United States Patent Application Publication US 2013/0129668 A1 - sequence listing, part 13

SEQ ID NO: 206139 - DNA, 122 bp, Homo sapiens
ctcagacctggactccaggccccacctgtcttagtctcctggaagaaaccgaggtcctggcgcagcagggaggagaaaagctgctcccggatccgcaagttgattcgagacatggtgtaggt

SEQ ID NO: 206140 - DNA, 122 bp, Homo sapiens
gatctgtgggcctcaggggtctggggcactccattcttggggaaggtaggggaggggagacggctccagggtctctggagaagttgtggggtatcctgatctcagacctgagcgcttcgacc

SEQ ID NO: 206141 - DNA, 122 bp, Homo sapiens
gcagttgagtaggatgggctgggtactgtcgccaggtctgtagtcccagcaatttgggtgcgcttgatgtcaggttccggcctccagggggcgcgcccgagccaggaaaaggctcccggcgc

SEQ ID NO: 206142 - DNA, 122 bp, Homo sapiens
ggatttttctcatcctttaaatcccgggaagcaaggaacctgccctctggcgccatctaccggcactgtttttcgagtccaaggagccccctgcggagttgggatgtgtttagtaattgatt

SEQ ID NO: 206143 - DNA, 122 bp, Homo sapiens
ttgaactcctggctcaagagatccacctgcctcagcctcccaaagtgctgggattataggcgtgagccactgtacccagacttattttgattctttaccacaagttgtttcctacacctaat

SEQ ID NO: 206144 - DNA, 122 bp, Homo sapiens
gcagagcactccctcccactaacttgttctgcatgtgtagagtctccccattttttttaacgcaaccctttcccctttttcctaccccacagctctgttccatgtaagttgccaacagtttc

SEQ ID NO: 206145 - DNA, 122 bp, Homo sapiens
tctactattttgtgaagaataggcatagcctttcaattaacactatcaccaaattgctttcgatgaatgtgggagattgtatacttgatacatatctgtgtcactatgggtctgatttcatt

SEQ ID NO: 206146 - DNA, 122 bp, Homo sapiens
taccaccccattcaggacacccctccccaacacatattgggggaaacggggcacggcacgcgttgggttcaggaaaaaaaccgggaacggaaaaagaggctggtttggtcctcagcttcctg

SEQ ID NO: 206147 - DNA, 122 bp, Homo sapiens
ccaggggactggggcctggagaggggcagtgtccaggggtggctcaggcccacagcagcccgtgctccccgttggctctgcccacctgccgacaggggtgacagtggcacagagcactgtga

SEQ ID NO: 206148 - DNA, 122 bp, Homo sapiens
gtgtgcagaggcacggactcttgtaataaaatcgttcctagtctcccggccagcccgagccgtgcagcctgacagctcaatcactctatccatcaggcgagtcaatcaaagcagcttttcgg

SEQ ID NO: 206149 - DNA, 122 bp, Homo sapiens
aggggcggggccctgcagacaggggcggggccctgcagacaggggcggggccgtcggcttcgggccccgcccccgatccgcgccggccggccggccccgccctctcagcgaaggtggctgcc

SEQ ID NO: 206150 - DNA, 122 bp, Homo sapiens
agccagagcaattaagggagtgcttgcaccacccttcccctaaccacaggcaacacagctcgtgacccctttctttcacttgaggaaaggagagaagagtaatgaggactttgtcttgcatc

SEQ ID NO: 206151 - DNA, 122 bp, Homo sapiens
agccctaaacaaccgctgaaccacttcctgtcactgtagatttgcccattgtgaatacttcgtataattataatatgtagtcttttttaaccaacttgtttcacttaacgtgttttcaaggt

SEQ ID NO: 206152 - DNA, 122 bp, Homo sapiens
tattaaagcagcaggctgcacccttcaacggggcttgtgaaacctggagaagcacaggcacgcctgtgacccacactcactccaaccccacaactgataaaagacaacgcaaggcccagaat

SEQ ID NO: 206153 - DNA, 122 bp, Homo sapiens
gccaggcccttctaggaatgttggtgctcctagcacccagaggtttccaggggagtggcccgagtacgtccccgcctaattctggagccgtcccttcggctgcgcagtggagcgccgacgtg

SEQ ID NO: 206154 - DNA, 122 bp, Homo sapiens
taaaaataaagacacatataacaaaaagaataaactacattttctctcctatgcaatctgcgtcttttgtttcgtttttggggttttttgtttgtttgttttgcccatttgtgctaacgtaa

SEQ ID NO: 206155 - DNA, 122 bp, Homo sapiens
gaccaggccagaggagggggactcagcctgccattgggccaggggcctcgatgacaggagcgatgagcagtttcgtgtcacctaatatagtcatacggcaaaaaaaaaaaaaaaaaaaaaaa

SEQ ID NO: 206156 - DNA, 122 bp, Homo sapiens
tggccccaccgcagggtgcccgtccctggctccttggctcctgcatggcagccagctggccgcgccctggctgaccgctgctctctctcttctctcccggctacagtttgcttcctcagggc

SEQ ID NO: 206157 - DNA, 122 bp, Homo sapiens
ggggccgctgagccggagacagatggcggagcttcccagtgcgggggcagggctggcagccgagactggggccgcctcccccgcccctaggctggccgggtagtcctccgtggccacgtgac

SEQ ID NO: 206158 - DNA, 122 bp, Homo sapiens
gatggctggcagtcacccctacttcaacctgcctgactccacacacccatcgccgccctccgctccacccagcctccgctggcaccagcgctgccagccctctggtgccaccaatggcctgc

SEQ ID NO: 206159 - DNA, 122 bp, Homo sapiens
tagatggatcaacttcattcccttctctcttttaagctgacatgtactaagtaattactgcgtgctaggtactgtgctaagtactttccgttcattatctcatttaatttttacaactgtct

SEQ ID NO: 206160 - DNA, 122 bp, Homo sapiens
gatttctgctgaaacatactatgagaaaatacaatagggatacaattgggaagagacacacgagggaacaaaaaagagctgttattttcaaagtatgtatttgttcaaaattcttgaacact

SEQ ID NO: 206161 - DNA, 122 bp, Homo sapiens
tgtgagacctgggtggaggcggtgctcccagagctgtggaaggtatgtttgcctcagggccgagatggggaggagggacgagccacaggcctattccttcaggaccagcctcatggagggag

SEQ ID NO: 206162 - DNA, 122 bp, Homo sapiens
ctttcagtcagaaaatctggagcttgagcctcagccaatcacctcattatagttagtaagcgggttgaaatctgttgtttctgctcattgctttttcaactctgttcccttatttaaccatc

SEQ ID NO: 206163 - DNA, 122 bp, Homo sapiens
gagtggattcttctctctcagtgaggaatagctttctgattgtgatctcagtggaagtcacgtgctgtacccaccactgggcagaccttgctggccacggcctccacgtgcagtgaccgttc

SEQ ID NO: 206164 - DNA, 122 bp, Homo sapiens
ccttggggcaggtgaaatgaggccagaagagagattctgattcctgaggcctgccgaggccgaacacacccaatattattacaaaagaccgaaacaagggaatataggagctaggaaccagg

SEQ ID NO: 206165 - DNA, 122 bp, Homo sapiens
tggggtagagcctgttctcaaggctggaggtaaagacatagagatgtttgtacatgtaaacgatgtacgtgtacatgtttgtacatgtaaaagacatagggaagcttgttagccatggagta

SEQ ID NO: 206166 - DNA, 122 bp, Homo sapiens
tcctctgtgaattggaatcggaggctgactcctcagagtgtgagaagctggcgggcctggcggctggggacgtgctgcggtgtgcgtgtatcgggctgaagacctgccaggttggacgtccc

SEQ ID NO: 206167 - DNA, 122 bp, Homo sapiens
gaggggctgggagggcccggagggggctgggccggggacccgggaggggtcgggacggggcggggtccgcgcggaggaggcggagctggaaggtgaaggggcaggacgggtgcccgggtccc

SEQ ID NO: 206168 - DNA, 122 bp, Homo sapiens
ccataggcgcagccccaaggtcagggtcacctcgagcctccagacaactcgtcaccttgacgaccaactgaaaaaaccggaagggatggaagcagcggatcatctcgcgatatctggagcgt

SEQ ID NO: 206169 - DNA, 122 bp, Homo sapiens
gctgtcagaaggggagtttgaagggggtgggggaggcaggtttggcgccacgctgcagaccgccactgcttttcggtgcccgtgcacagactcggggttaaaagtgctgaattcgggatgct

SEQ ID NO: 206170 - DNA, 122 bp, Homo sapiens
gttctctgggcttgttgactgtctcagagtcatctttactttttcacaaaaggtagcacacgtttgcagctgagtatcaacttatcagtttgttcttcttttatattctctaaagctttctg

SEQ ID NO: 206171 - DNA, 122 bp, Homo sapiens
tgcaggtgaagcctctgaacgggagcccaggccccaaagatgggagccagacagagaaaacgccctctgcaggtaggtggaaaaaaagacaggagccatacagagaaaacaccctcttcagg

SEQ ID NO: 206172 - DNA, 122 bp, Homo sapiens
tctccacaaacggtttttggaggcacacacacggatactttaaacacgtcggtgatgaatcggtacccagctgccagtggcggagcttcctgggcggggccgcgggcgcgcggcggcttcat

SEQ ID NO: 206173 - DNA, 122 bp, Homo sapiens
aatcaataagacagtttctgcccaaagtcatgttaccagttggtgacagagctggaaatacgtagagatctatacccttaaatctctccactcacatgctgatatactttctactacaatat

SEQ ID NO: 206174 - DNA, 122 bp, Homo sapiens
gttcttgagggcgtttttgaggctggttctgctgggggacttgacagcaggccggagctccgggctctgctcatcctttcgtagctccatctcgatgaccatcacctttgggcctttggcgg

SEQ ID NO: 206175 - DNA, 122 bp, Homo sapiens
ggtcacgttcatgtaagtcagttaaaaataaaccccaatctctccagcagcaaggttggacgtatggggccaagaagcctcgctgccagcactaaagatggcgcgccggagtgggggtgggg

SEQ ID NO: 206176 - DNA, 122 bp, Homo sapiens
ttaaaaggtagaaatttggagagaggacaagtctcatcacatcgtaggaggctttgcctacgcagaatagctacattttgaggatgtcatatgataaactgcatcattaagggtgcaaggta

SEQ ID NO: 206177 - DNA, 122 bp, Homo sapiens
cccagtgggtgcccccctcactcccagtctgacaagcaggtgtgtctgtctctttaggaacgactcaatcgccggagcaggaagctcagaaaggacattgcagaacttcagcggctcaaggc

SEQ ID NO: 206178 - DNA, 122 bp, Homo sapiens
taggtacaagctgcagggaggcaaaagctggctggggggccgggagcccagggcacgccgcgggactccagtccccctgctgcgccccagcctcaagacgctctgggctttatgaggttcag

SEQ ID NO: 206179 - DNA, 122 bp, Homo sapiens
gcggggacacagggcaggagagaggccaggcctggggcctctgtgccgggagggataatacgatctctgagtcaccccgaaatggggtgagatggtgctgatgatcccggattccttggttt

SEQ ID NO: 206180 - DNA, 122 bp, Homo sapiens
acgggaaggaaaagaaatagcggttggctgagaggcaagccaatccagctagggctgcgtcgactccaaggaggcggtcctaaggaagtactggccccgccatttaaaggcccctccctccg

SEQ ID NO: 206181 - DNA, 122 bp, Homo sapiens
actcccctccactgtttgcctacctttgtttacatctcaggtttgggagagttttccccccgtcttactgagcttctggctgtaagcagcaggagggataggttgtaggaggcttatgtggt

SEQ ID NO: 206182 - DNA, 122 bp, Homo sapiens
tgaaaacatttaaatagacatcttgagaggaggtcgcggcgccggaggccccagaaggctcgaaggcgccgcgggctggggtcggtggcttagggagcccgtccggccatggtggccgcggg

SEQ ID NO: 206183 - DNA, 122 bp, Homo sapiens
atctaaccctaaaacgaggaagcgtccgctgaggttgcccactgcaggatgctggtgtgtcgccgggcacatgaaagtccctgagtcaggggagagcgctcgccggggactgcgggcgggag

SEQ ID NO: 206184 - DNA, 122 bp, Homo sapiens
ttcccagactgggtggctgccgggcggaggggttcctcacttttcagacggggcggctgccgggcggagaggctcctcacttctcaaacggggcggctgccgggcggagggtctcctcactt

SEQ ID NO: 206185 - DNA, 122 bp, Homo sapiens
ctgatattgtataggaaaagtgcctaaaatgaaagaaacttgaattattgcatgtcacatcgttcaaatttcacaaacttggattcctgaggtcttgtttatttgggaccttcctgtgtttg

SEQ ID NO: 206186 - DNA, 122 bp, Homo sapiens
gattcatgtcctgagtggggtgtagcaggatggagcaagactgcattacactattcataacggtgcacaatttaaaacttaggaattatttctggaattttcaatttaatatttttagactg

SEQ ID NO: 206187 - DNA, 122 bp, Homo sapiens
actggagtgtgcagagggaaaagacgggactgtgcgagtcacccccaagaggctccgtggcggcaggatgcacacagcaagtggggtgggtgcacagcaaatgcacaggacaaacgttatcc

SEQ ID NO: 206188 - DNA, 122 bp, Homo sapiens
gctccactgccacaggctgtggccccccgagctagagcaggaaggcgggggccactctcccgagctccctgggctagacaacgggacccctggcccctggcgccccagcagagttggggact

SEQ ID NO: 206189 - DNA, 122 bp, Homo sapiens
caaagaatatctgagactaagacaagggcccctcctggtacaggctggtctttctgatgacgctgccccctctagccacttcttacacctggtctccctgcgctgatcactattctccctca

SEQ ID NO: 206190 - DNA, 122 bp, Homo sapiens
agcacttgcaccaccatccctggatcgaaccaaagtcaccaacatggactgaaaatgagccgcaagtgctggatcccgagtgtgaacggctggcaccacgctttggaggaaaactgatactc

SEQ ID NO: 206191 - DNA, 122 bp, Homo sapiens
gacgggctcaggcttggctacgggccacgcttctctggcttggatctctgaggcccacttcggccgcggtcatctacccatgatgagggaacggaggccccggaggggtggccagaaccgat

SEQ ID NO: 206192 - DNA, 122 bp, Homo sapiens
ggaagcatcttcagggcgtccccaggcctggcgcccgcccccgtggcacacaccggcctgcgtgtgcttcagctgcttccaggggttccctcacaggcgggggtcagggcacgcacgccagg

SEQ ID NO: 206193 - DNA, 122 bp, Homo sapiens
agcattttaagggccgtgatggaaacaccagatttctggctgccctcagtgatttagcctcgtctccatgccttccttcctatcacaccctgcaaagccctgagctcctaagagttaactgg

SEQ ID NO: 206194 - DNA, 122 bp, Homo sapiens
gggagaatgtgtataaaactaccccgttctgtgccttgagcacagtaagttttcaatggacgttaattccgttggaatcccaggcttgagactgcaatccaacgatgcatgtaaaagacctt

SEQ ID NO: 206195 - DNA, 122 bp, Homo sapiens
aatcttgctgctgctcactctttgggtccacactgcctttatgagctgtaacactcaccgcgaaggtctgcaacttcactcctgacgccagcgagaccacgaacccaccgggaggagcaaca

SEQ ID NO: 206196 - DNA, 122 bp, Homo sapiens
taatcttccttcgaatgtgggaaggtgcgttgaaatgccttttgcgattcttgcttcggtcggaagtcacaaagggattaaacttcattttggccgctcccgcttcggtgatcgatcttctt

SEQ ID NO: 206197 - DNA, 122 bp, Homo sapiens
gaggcgaaagatctcgttttccctgacagctgacttcctctggcgcaattcatccagaggcgctggagggttctcgggcccagagggcctgccaaaaaggcagtcagacagttggtttatga

SEQ ID NO: 206198 - DNA, 122 bp, Homo sapiens
ggtggactacctatggatgctcatcctgggcttcattattgcatttgtcttggcattctccgtgggagccaatgatgtagcaaattcttttggtacagctgtgggctcaggtgtagtgaccc

SEQ ID NO: 206199 - DNA, 122 bp, Homo sapiens
cggatccctccttcccactccacctgctcaacctgtcagaaacagacctggtccgttttccgtcctcttgccctggcacacagatggtacctggttcattggagatctctgctcagactccc

SEQ ID NO: 206200 - DNA, 122 bp, Homo sapiens
taatttccattggatagttgcaggcaaaagtattttcccttcttcagtggctagccgtcccgaggggagaaaactgtcctcgtgaggttccccattctgtttctcctgctgagtactggggc

SEQ ID NO: 206201 - DNA, 122 bp, Homo sapiens
catggtgccgccggcgtgcggctcctcggagagccccgctacccgcacgcaccagctctacggccttggcagggcagagaacaaacacagaaagaacctgcaagccgacaccaggccgcacc

SEQ ID NO: 206202 - DNA, 122 bp, Homo sapiens
gtaaactttttttttatttttttctgataaaatacaaatgttggccccagattcttttaacgtcaaggaaatgaataacagcttgtcagagacttcctatggaagaaagaattttttagata

SEQ ID NO: 206203 - DNA, 122 bp, Homo sapiens
ggcggtgccaggacgaccagccacgcgtcgccatggcaacagcgggcggggaggggcgggcggcggaaggcccgcccctagaagggtgtggaaaccgttagaccccctttcctgcccgcgcg

SEQ ID NO: 206204 - DNA, 122 bp, Homo sapiens
tctcacagggaggaagaggccaatgggctcgtggtcactgccagagctatgacaggcacccgcgtgcctttgagggggtccaggtctcagctgccttctgggtcacctgaggcaccttcatg

SEQ ID NO: 206205 - DNA, 122 bp, Homo sapiens
gtgcaggagcctcgagacacagccacaagctcctggtgccagataccggatgcggggttccgtcccaccaaagcaagcacgaagctttcgttcattcgtttctttcaacatagccttcctaa

SEQ ID NO: 206206 - DNA, 122 bp, Homo sapiens
cgcttgatttccatgtgactgcaggcaagaatagcccagcctttgtgcctctgcaaagaacgcaaacaaaaatgtacaccatcaccacccaacaaacgcgcaactccgcaagacacaaagcg

SEQ ID NO: 206207 - DNA, 122 bp, Homo sapiens
tacgcgccccacgcatcctcttccatccccaggcacagatcaaaggcgcagcccaggaggcgggagcccctgcacactttccacctctgctgggcttagcctcttggctggttggtctgtgg

SEQ ID NO: 206208 - DNA, 122 bp, Homo sapiens
tgcttatactcttgttcagggttgaaggctggaatatagaatggagggatattactgatacgtgtaccataacgtgtatgcaaagcttaatttaaaaactgagtggaagtgaaattgtagga

SEQ ID NO: 206209 - DNA, 122 bp, Homo sapiens
ggtggcctggggcccacgccttccattgggctggcgtcagtcaagtgatgggagccgcaccgccctcccctttcggtgaggcagcgccccctggtggactgacacgggcagttttggacgtg

SEQ ID NO: 206210 - DNA, 122 bp, Homo sapiens
ccaaaccaagaccggcgaagtcactccaggattttttcccaacaagggatcgcctccgctcgaggcagccaccccctcgggccgcagcgccttgggagttttattggctttgagctttcccc

SEQ ID NO: 206211 - DNA, 122 bp, Homo sapiens
ctgatcagatataacatcataaacacactggtgaagaagagttatagtcagagtaccactcgaattgaagctttaaactgtcaataagccacctgcaatccctcggtgtagagaaaaggaga

SEQ ID NO: 206212 - DNA, 122 bp, Homo sapiens
aaaatggaatatgtttaccctgattccattaatactaatttgctgaacatccctttgtaacgaagctacacttctcccatccctatggcagcacaccaaggttaatgtacctcagtagccac

SEQ ID NO: 206213 - DNA, 122 bp, Homo sapiens
ctggcttggatttagcccgtgggaggcaccggcaccctgctggttgggctcccagaagggcgggatcgaaatccgggtgcgtgggctgtgtcctgagcaccgggacccaggagttcccttac

SEQ ID NO: 206214 - DNA, 122 bp, Homo sapiens
tgtgctggttgtagtgctcgggctgcgtgtgccagaagagcatggctggaactcccagcgcgccgaccggggcgcggcagcaagcgcagacgcggggcgcgccgaggacccagcggcggctt

SEQ ID NO: 206215 - DNA, 122 bp, Homo sapiens
catgccctgtagtattttctgtccttttcttatgtgtgattcctgcaagtcaaaggaggccggagcctcttcagtagtttggaaacttgttttgaaattgccaccaagccgatttttttttt

SEQ ID NO: 206216 - DNA, 122 bp, Homo sapiens
gacaggctgcgggggcggagtggtgccagggcgggcgctcgcccgtcggatatgcccacccgtcccgtccagggcaggaaagcctgccagggcgccatccccatccccaccgcctccaggct

SEQ ID NO: 206217 - DNA, 122 bp, Homo sapiens
cagccctcaaaaccgtggctcttttcctcggtgatctccatgcgcagtcctcggggaacgcgtgggagtagcaggccaggggtccactggaaatccagaatctgatttctgtttccgattcc

SEQ ID NO: 206218 - DNA, 122 bp, Homo sapiens
aactgccagatagttgtaccccgttagccaccgatgaggaattaaccgagtacagcataccggaggggaagaactagcgttaccaacacgggagcgggtcagaggcagggtaggaagaggag

SEQ ID NO: 206219 - DNA, 122 bp, Homo sapiens
cggggctgccctgcccaggtggggagggcgctgcagttcccgggacgggcccgcaatcgacggtccgggcgccacccactccccgctgccagctcgcgccccagctccagcccggggacctc

SEQ ID NO: 206220 - DNA, 122 bp, Homo sapiens
tgcagggcagggagcggccgcagccaccgaccgccgagccggcacagcatttctgcaccacggcggagcccagatcccgggcctcacaatccagcggacatacaccggccagccaaggctga

SEQ ID NO: 206221 - DNA, 122 bp, Homo sapiens
ctttcctatgccctttgtccttgtaggttgacgcctgtgtcagcagagagaggaaagagacgcaggcgatcattctcccgtccttacgtggcagacagggttatttgcgtagattgaccgag

SEQ ID NO: 206222 - DNA, 122 bp, Homo sapiens
gccgcagagtggtgggcccagggtcggccgggcctactcccagggcaggcgggatttccgcgcctcgcggctgccacatcctgaccatgaatcagccacagttgggaaaataaacttcaact

SEQ ID NO: 206223 - DNA, 122 bp, Homo sapiens
ctcaggtgatctgcctgcctcagcctcctaaagtgctgggattacaggcgtgagccaccgcgcctggcctagatgtatttttttaagaacagttttaaatttatggaaaagtttagcagata

SEQ ID NO: 206224 - DNA, 122 bp, Homo sapiens
gagaacacccatgaacgttccccaagttctcccaagggcgagaaggagaagagcaggctgcgccagggttcctggcgggcgtttctgaaaagcaaagatgccggaagccccaaaaagcccac

SEQ ID NO: 206225 - DNA, 122 bp, Homo sapiens
acacgcgaacgggcccctctcctgcatgcaaaccaatgaaatagatcacacccagctccgcgtccccaggcttctcaccggctgccttggatgccccatcaggagccttccaagacagcagc

SEQ ID NO: 206226 - DNA, 122 bp, Homo sapiens
cacaaaggactgttcaaaggtagttgtgtcttcctaagtataaggctcttcatcacagttcgcctgacagaggcagaaaagacacaatgaaggacaggcataaaagcttacggtttgttaaa

SEQ ID NO: 206227 - DNA, 122 bp, Homo sapiens
atgcaactcaagatattcccagaatctctacaaccctaattcaagtaaatatccaagtgacgcagactcatcctgggatccaccaagccacttatccctcttctctccacactcaaagcacc

SEQ ID NO: 206228 - DNA, 122 bp, Homo sapiens
gccgagtggaaggcaggtagcctggggagggctccctgcaagggttggtggtgccagaagcggtgacggtcccctcctgtctccaccccaggcctcgctgaccccggtgaagtcgggcgagc

SEQ ID NO: 206229 - DNA, 122 bp, Homo sapiens
agagaatgtgagaggacactccctgtatgtgactacacacaggaatgcagtggtgtgtgtcgtggagatggtgtgggttttgtgtggaattcagtgagtgcgagttggagtggtgtgtgtgt

SEQ ID NO: 206230 - DNA, 122 bp, Homo sapiens
cagtacttgggtaaggaagctgggcaggcgctagggcggcgccgacagcgcaaagttgtgcggcggggagagggtcgcggcggggacttctcgcgctgccaccgcgcgccgccgccgccccg

SEQ ID NO: 206231 - DNA, 122 bp, Homo sapiens
tccctgcagttcgccaggggcagcaagcatccaggccactagggcctgcgcgatgtggggcggtggtgggcgacaagtgaggtctcgcgaagagtggcggtggttctcttttgtccagtgac

SEQ ID NO: 206232 - DNA, 122 bp, Homo sapiens
gatattatgagtccctggcataaggaagtcctgcttagtttatccttttattcttcttatcgttcctctttgagtaatgttttattacgaacttgcagctcttaccccctgtaactgaagca

SEQ ID NO: 206233 - DNA, 122 bp, Homo sapiens
gtttgcagttgtggaaactgaggctcagagggtcaggggcctgcttaggctcccccagcccggacagggcccagcagaaccgatttctgccggaatggccaggaaatccgagccggaggcgt

SEQ ID NO: 206234 - DNA, 122 bp, Homo sapiens
tgtgcacatgttctgctaggtgggtgttttctgtctaatgacattagttaaatcacttatcggtcctgtccctcgaggaggacagtcacagccttctatgaagcacttcacagaactccaat

SEQ ID NO: 206235 - DNA, 122 bp, Homo sapiens
agagactgtgtccaccgtcattgaaagggtaatgcttgagaaaggcctgaaggatatgggcggacagagtgtgtgtctagggcaataaaaagtaactgctccagatgttgaagaaaataatg

SEQ ID NO: 206236 - DNA, 122 bp, Homo sapiens
agagcccagggatggatccgcaggcccgaggttgaaggtgcccgtgccagtgggcaacgccggggttggcaatcatgatgagtcaggagcaggaggggaacgccgaccgcagttgcgatgcc

SEQ ID NO: 206237 - DNA, 122 bp, Homo sapiens
agggggcggttgcagggcggaggggctcctcacttctcagacggggcagccggtcagagacgctcctcacctcccagacggggtcgcggccgggcaggggcattcctcacatcccagacggg

SEQ ID NO: 206238 - DNA, 122 bp, Homo sapiens
aggccccttagcttcaagaaacccgcgtgggcggggtgaggagcgcagtcctcctactggcgccgtgaaggagatcgcgatgcgccggagggaaggaggctgcgggcggggaaggacggagg

SEQ ID NO: 206239 - DNA, 122 bp, Homo sapiens
cctaagcctctctggagttcagagattttccccgccctcacaatatgagtaactagaaaacgattcatctgtgtccatttgccagtggttcttcaacttcctttcagcgtctcaatgcatca

SEQ ID NO: 206240 - DNA, 122 bp, Homo sapiens
gggtgcgtcggcgagggtcccctgaccctgcacaaacccaggggtgtggtgtggatgacccgggaagccgcacccagagctggcggtatgtcaggccatagagaaaaagggatgttcctagg

SEQ ID NO: 206241 - DNA, 122 bp, Homo sapiens
gcggagtccgttgctgaccatgcgggagtggcggggctgctgcagcgcctgtggggtggccgcggcaggccaccaccagcctaggtggctgaagaggtggcggtgccaagtcacttttgggg

SEQ ID NO: 206242 - DNA, 122 bp, Homo sapiens
aaaactctcccctaggaggaatctgatgacataaggataacaccaagttatgtgcacaaacgacaaaaaatgccaaactaactggaatgatcatccttcctgaaatttctcttaaaaagcag

SEQ ID NO: 206243 - DNA, 122 bp, Homo sapiens
cccgagtgtgtcctcagggcatcctggggaggagccggtgttgcggtttcggggcgcagccgaggccgccccgccgcctcccgtaggcgatcagacttcctctccctggcggttccgggagg

SEQ ID NO: 206244 - DNA, 122 bp, Homo sapiens
ttaactctcttctccacagcgtgcgtggggaggcctccgtgaactctgaccttagctttccgtagcgcccgcgtctgccgcccccgcccccggagcgaaggaggcgggctttggccttttgc

SEQ ID NO: 206245 - DNA, 122 bp, Homo sapiens
ctctgggagttgtgggaaatgtgccccctagggcatctgggagtgatgtgcatggggagacgtctcaccagaagcaccgatcctgtttggcccaagggggatggaaggaagggaagtagcca

SEQ ID NO: 206246 - DNA, 122 bp, Homo sapiens
caaaactaatgaccgtacagcgctgcacaaataacaaaagcttaataccaaccaccaggccgtcaacccgctcacgttaccactgcccagaaggcttttaaaaacaagcattgaaaagggaa

SEQ ID NO: 206247 - DNA, 122 bp, Homo sapiens
aattgagaataattaacactggagccgttaatcaccactttgctgctctctccctcctttcgggtctgcggcgtctgcctttttcgctcccgctgccggcgcgggtgtactggtgaaagtga

SEQ ID NO: 206248 - DNA, 122 bp, Homo sapiens
cctccacatttcaagaattttctgctctagcaggtgcctgatttggaattttcagggccacgaagagatccccttgttttccaaggaccagccagcagagggagagcccaccatgcccctca

SEQ ID NO: 206249 - DNA, 122 bp, Homo sapiens
tggaatctcaattttggtcccactacatagtaacaacctggacagatacctctccagcttcggtttactgaaggtcatgatatctaagtttctaggtcgttataaggatgaaattagatagt

SEQ ID NO: 206250 - DNA, 122 bp, Homo sapiens
gatggttggatatacgaatctgcagctgagatgtaggtttctatatcaccagcatatagacggcaaccagaaccctggaagaaggtgcaaccgaccagcaagagaagatgtagatgagaaag

SEQ ID NO: 206251 - DNA, 122 bp, Homo sapiens
aggcagggtggtacatgctgaaggggagttctcttctctaagaaggagttccctgtgcctcgtagtgagtggtgtgcctctgtttatggagagggccagaggaaatggatctgagtctggga

SEQ ID NO: 206252 - DNA, 122 bp, Homo sapiens
cttccattaacttcattgataatgccaggaaagtggcatttctttcctacccagtccagacggaatctagtaactgaagcaaggcttgcctggtgatgtcctcacaacagctctgaatcctc

SEQ ID NO: 206253 - DNA, 122 bp, Homo sapiens
acttatatttctggagagccccggtgttatcctattaaatactttacaatgggatcgcatcgcagactgtaaatgaagaggaaacccttcttcctttggaggtttaatatgagctctgcact

SEQ ID NO: 206254 - DNA, 122 bp, Homo sapiens
gaggccgtcgggtgtaatttgattagttttcatttctcagcagcccctgtggggcaggggcgttgggggaggacacattcccctctcatctgctcctttcaattactcctagctgggcggcc

SEQ ID NO: 206255 - DNA, 122 bp, Homo sapiens
cccgaagagcgtggggaggcaggcggtgccccggcccctgactgacgcgaccgggaccagcgcgcttcgtccccgcccacccgacaggccccgcccccgagcccggccccgccccgcgctcc

SEQ ID NO: 206256 - DNA, 122 bp, Homo sapiens
tggagggcccagctgctcgtgtctgtggcgatggcagcggtgcccagtggctcccccccacgctgcttctccttgaagggccttcagtacccctttagctgcctgccaggcctcagtgtcca

SEQ ID NO: 206257 - DNA, 122 bp, Homo sapiens
actttgcgggaggggggaggctgcacaaaggagcaggtgtgcgcctcccctgccgccccgcgcccacaggacggcacacaggggtctgctcgtgccgctttctcttgacctcggacacctcc

SEQ ID NO: 206258 - DNA, 122 bp, Homo sapiens
tctgcaaaatcctccgacttccctatcccctaaagtccaaaccagtgctcatagaagaagcgtaataactccttgctaggggcttttttgtagatgggcttcctgctcaggtcgtttctgcc

SEQ ID NO: 206259 - DNA, 122 bp, Homo sapiens
gaatttgtggtctgcctgtcgaacagccagcccccttcccaccccacctgttaggatccccgcaggctttgctctgctgttctgggatgaaggatgttgctgcttcctccattgtgccaggt

SEQ ID NO: 206260 - DNA, 122 bp, Homo sapiens
gcccctggcacccacagccccggcgcgctccgtcacctggtagggagcagcctgggctgccgtgagtgaggtgttctcactctggttccgtgtttgtgtttagcctgtgcaattctcgtcaa

SEQ ID NO: 206261 - DNA, 122 bp, Homo sapiens
cgagtgggcacttctgagagacaacagagtgagatttggctccaccgagctttaggggtgcgggctggactggaggccatccaggtgacactccctcggctggcagagtgggccaggccacc

SEQ ID NO: 206262 - DNA, 122 bp, Homo sapiens
caatctgcatatttaacagacctaaaataaatcctattaggcaagtcagttgaaaatgctcgtgctgctaatggaattagagtgcgttcattttacaggctagtattttaaaagtagaaatc

SEQ ID NO: 206263 - DNA, 122 bp, Homo sapiens
ctaattcttcaaacttggtattgactccccaagtaaacaacaactgaaaagtattggtaacgtctttagattcatcaagagccaaggaattgcattcttaaaccctcttggtggcttccctg

SEQ ID NO: 206264 - DNA, 122 bp, Homo sapiens
ggtaattggattctagtaagaaatggcttgaatgttattttctggtgctgatgtctcttccgctgagaaaattgtaaagtagaggaaatggcatagaaaatactgccttggtagtattagta

SEQ ID NO: 206265 - DNA, 122 bp, Homo sapiens
ttaggtagaatgagcaagagactgtacttgcctcacgtgtgcctgggctcacggtgcctgcgctcacgggtgcctgccctcacggtgcctgcgttcacgggtgcctgccctcacgggtgcct

SEQ ID NO: 206266 - DNA, 122 bp, Homo sapiens
catctccagctcccgggctgtgcggctggacattttccagagctgatctgggggcagccccggggacaccttgtttgcttcccagcccgcagcgatcactgtccttcctcatctactgtcca

SEQ ID NO: 206267 - DNA, 122 bp, Homo sapiens
ctgtgggtgcgggtgccgtattgggtgggagccgggctctgtgggtgcaggtgccatctccgagctgggtgctgtgggtgcgggtgctgtctcgggtgggagctgggcgtgtttgcggctgt

SEQ ID NO: 206268 - DNA, 122 bp, Homo sapiens
gctttgggtacggcttgttcttacaataccggtaacaacggacggggcggcggcccatggcgataccaggatcttcagcggcgcgcttaagagaaagagcaatgcatttcttaaaacttaaa

SEQ ID NO: 206269 - DNA, 122 bp, Homo sapiens
cacaactctatttttagatgtcaaagtgcactcaagtcaaactaccagtcaagatcttgccgatctgaacattcagtgcctctctttttaaaaagaagttgcccctgtaacagcacactgga

SEQ ID NO: 206270 - DNA, 122 bp, Homo sapiens
cgaaaccccgcctcatccttgcgtgagacccaatccgatgtgaagaggcgaacgacggcgcgtaggaacgacctcggagttccggatcgcgcagagggacaaatttgttccggagatactat

SEQ ID NO: 206271 - DNA, 122 bp, Homo sapiens
tgtcttaacttattaagagatagaagcctgctaagggaaggagagggagaaaagagaatgcgaaggttgaagctcacatcaaagctgttaatttgcacaactttaagaatcctcctcttgtt

SEQ ID NO: 206272 - DNA, 122 bp, Homo sapiens
tcttcattgtcagtcaatgggcacaaatgagaacatttaaatacatctctagctcaagtacgttgaggacttttccatgtctgatgagtgagcacactggcttggagcagcctgcttttagg

SEQ ID NO: 206273 - DNA, 122 bp, Homo sapiens
ctgtccacgttctctgtgggttcattgccggacttgagtctgagttcatggagactctgtcggatgaagaagtacttctgtgtctcacccaagtgctccggagagtgacaggtaggtactca

SEQ ID NO: 206274 - DNA, 122 bp, Homo sapiens
gggagggcgcgcccttcccagctctgtgctcttcagaaccttggcttttgtgttaccacacgcttttagctcaagcccgacaaaagcaggaaccaggaccaggggcagagacgatcttgaag

SEQ ID NO: 206275 - DNA, 122 bp, Homo sapiens
tgggcagacagcggagggttctgcagcaatgaaatggagttgatgaacttcaacgccgcacgcaggcacggctgcatctcacaaagtgcaagtgaaagaagccagaccaaaaaaaaatcgtg

SEQ ID NO: 206276 - DNA, 122 bp, Homo sapiens
ttcccgtcgccgtgaatattgatcatattgacgacctctcagtcctcacccaccctcctacgcagctgccttccgtcctcccccgtgggccattcagtcaagaagaccagaggaatgctttg

SEQ ID NO: 206277 - DNA, 122 bp, Homo sapiens
gtcttggagcggactccgagaagcccagggtttcctctcaggtgatagatacacgcctggcgtggttccgagtcctgcgccaggaactcgccaaggccggaggcagccgctgcgcagcccct

SEQ ID NO: 206278 - DNA, 122 bp, Homo sapiens
cccctctgtcctgtgctgcccttagagatagatcaggctttttgtgcttcctccaaagctcgtgctttatcattcaccaaaccatccttctctgtgcccaggataatgtgtccaaggatggt

SEQ ID NO: 206279 - DNA, 122 bp, Homo sapiens
gcgcccagtgccgaggcagcggcggagccggggaaggtcggagggagggtggtttcctcccgccccacacccagtctccgagccggatatatagagtgtcacgtttgggagccgaaagactg

SEQ ID NO: 206280 - DNA, 122 bp, Homo sapiens
aaagtaagtaagagttggtcagaaaattcatgtttttcttacagactaacaaggcacagacgtatcactcggggagttagaaacaattacacatgactcacgccaagcattttaaagccaca

SEQ ID NO: 206281 - DNA, 122 bp, Homo sapiens
acctgaagagcctctatttgaaacttgggattgagaacaaagcgatgatctttctgttcacggatgcccatgtggctgaggagggcttcctggagctcatcaacaacatgctgacctcaggt

SEQ ID NO: 206282 - DNA, 122 bp, Homo sapiens
gggggaagtgaaaggaagagaaacagtcttcctgcttcaggtttttccttcttcctggtccgctgaatttgatcactggtaggaacagccccaagagggatatgactggaaagtagtgtgtg

SEQ ID NO: 206283 - DNA, 122 bp, Homo sapiens
ttcccggcttctcattattaaagtgctctcggctcacctgctacgtccaaatcaaactggcgggattggcgtcagcacctgcaaatcggtattgtctgagcggtgggcagctggaaccccct

SEQ ID NO: 206284 - DNA, 122 bp, Homo sapiens
cgctccggggctcagtgtccctgagtccccttcaactcgaagtagaagcatttggacaaacgcagtcctgtcgtctacagtcctggcggagcatcacaccgtgtgggaaagtgtgggccccg

SEQ ID NO: 206285 - DNA, 122 bp, Homo sapiens
acgcagcaggaggcaccccatctactgggcctgccaggccgcatctggcttgcactccggcgcagatcccacagcagctgctgctgcatgctcaggccctggtgggagggggtatgtgagtg

SEQ ID NO: 206286 - DNA, 122 bp, Homo sapiens
tcttccccggtggggagggtggggccccaaagtccaaccacaagatcccattttgcaggccgcggctaaatccactgcgccttccccgttttttctcgaactgcccaagccagactccacct

SEQ ID NO: 206287 - DNA, 122 bp, Homo sapiens
tgggtgagcggtggcaaaaagcagacccctgccccctgccctaccgcccatttccaatcccgggctaaggtcaacccaaagtggtggcagcagcgtcagtcaattacgggtcatagtactaa

SEQ ID NO: 206288 - DNA, 122 bp, Homo sapiens
aatctgtacctgtctcactgagccaggaaggctataaaatgtggccccttagtccatagccgggaatgaacgagccccagatgagggtttgctttgagctggggcattgccatttctggcca

SEQ ID NO: 206289 - DNA, 122 bp, Homo sapiens
agccggcgagcgagctagagacgcgccagagattcatgggcagggagggctcaatggccgcgccgcgccggccggccggccgctcgggtcatgttacacggccggggccgcggcggccgccc

SEQ ID NO: 206290 - DNA, 122 bp, Homo sapiens
caggccggcgaagcctctggggctcccccagcccggatcttggaagcgaagagccccctgcggagcccggcccggttactccctctgccaaggctcgcccccaaacccttctcgaaggagca

SEQ ID NO: 206291 - DNA, 122 bp, Homo sapiens
ggaggcgcgctcccgcgagtggcccgggagcgcgcgccccaggacaccccgagctgcgcacggctcccgccccatcccggccccgcaggcccagccacggggtcatgaccggggacggggta

SEQ ID NO: 206292 - DNA, 122 bp, Homo sapiens
tttcttatttccgagaaatctcgcaaacggcgtgaacactacgctgattccagaaatggtcgggttcccttccttcactcaggatggtcgcctgctgggagctcatttcgaaccgagctgaa

SEQ ID NO: 206293 - DNA, 122 bp, Homo sapiens
ggcccagtatgataagcccgacatttagagagggcttaatgcctatcaagggaggagagacggaggaaggagacttggactcacagcctccctccaggtcttaccagctctgccacccttga

SEQ ID NO: 206294 - DNA, 122 bp, Homo sapiens
ctgtcgccttcctgctccgcggatagccgcctgccgtctgctgccaccagaacgcacggacgctcggggtggaggtagtcaatgggcagcaggggacccccagcccccacaagcgcggctcc

SEQ ID NO: 206295 - DNA, 122 bp, Homo sapiens
catcaacactcatggcagctataagtgtctgtgtgtggagggctatgcaccccgcggcggcgacccccacagctgcaaggctgtgactggtgagatgcgcgcttggagggcatgaggtgacc

SEQ ID NO: 206296 - DNA, 122 bp, Homo sapiens
agtctgcctcccacctcgtggcacccatgccctgcaggaggccctctcccggagcttgtgcgggccaggcaggtgacaccacttctatggtgacggtgcagaccccatcttcccagccacag

SEQ ID NO: 206297 - DNA, 122 bp, Homo sapiens
actaagaacgatcaacaccagaccgttaaaacataaaccagtatgggccactaaataattcgtaaatatttcaaaatgtatttcaaaaccgactttgtattgtcaaaacattataatctagc

SEQ ID NO: 206298 - DNA, 122 bp, Homo sapiens
gctgatggaccagctccagggagtggtcagcaacttcagtaccgcgatcccggattttcacgcggtgctggcaggccccggtggtcccgggaacgggctgcggtccctgtacccgcccccgc

SEQ ID NO: 206299 - DNA, 122 bp, Homo sapiens
tctggcgccctctgctggcctctcccgcacaccgccgccacgccgggctcgggcctgcgccgctctcacctgtcctggcccaggaagtcgctgtcccttgcccgtggccaggcccgctctgg

SEQ ID NO: 206300 - DNA, 122 bp, Homo sapiens
ttttggagatcatctccactactcaatggaattgaattaattttttagatttgactgttacgtaggctagaatttaaaagctagctgaagccaaggtatgtgatatccattgctttcctgtg

SEQ ID NO: 206301 - DNA, 122 bp, Homo sapiens
aacagccagagggagacgcgaaccaggccgctggcggagggctcagggggagcgcagaggcgacggcccccatgccggcggccaacatgatggagaaccggccgctgcccgccctgcaggtg

SEQ ID NO: 206302 - DNA, 122 bp, Homo sapiens
ctggtgacaagctgtcgctggcatctagggctcctgggactcaggcacatggagctccctcggggccaaatttgtgtcacgcgcagggacaccggaggcgcgtgcacagtccgtgtaacggc

SEQ ID NO: 206303 - DNA, 122 bp, Homo sapiens
aagtcagctcagccctgcacaatgaactgatgactggcctgccctggggagaactcagcacgcaaagatttttgtcggcaacacaaacctctgaatgctataaccaaattcccctgcccttg

SEQ ID NO: 206304 - DNA, 122 bp, Homo sapiens
attagtgtaaggcagtgcttcagttggcttcacgtttgaaatcgcttttgaaatctggctcgggaagctgccaggataaaaaaaaaatgaaagccccctggaagtggccttgctttctctcc

SEQ ID NO: 206305 - DNA, 122 bp, Homo sapiens
aggcatcaacccagtttgtctccttatccctgttggtgctccaagtctctttcttggaagcgaagaatctgctttcgtcttcacaatcactttcagattttttcttctctctttctttattt

SEQ ID NO: 206306 - DNA, 122 bp, Homo sapiens
gggcctgctgcaacctgcgctggggttgaggcaggaaccaagcttggggccaaccgactgcgtgggacgtggctcccggatctgcccctcaccagctgaggacaccggagcgtctctctcca

SEQ ID NO: 206307 - DNA, 122 bp, Homo sapiens
tagcgtggcctctgcaggaccccctgtctctttgcagccagggggcatgtatacctcttgcggcacagtctctgaggcccctaatgatctttccccacctgactccctgaatccagttatca

SEQ ID NO: 206308 - DNA, 122 bp, Homo sapiens
tgcacagtaggaaacctacaccctgcaaacaagattacttcatgcctgtttctccatgggcgaagtcctcttggaaaatcccagcctagccctgctgtcctcagggagaaaggaaagggatt

SEQ ID NO: 206309 - DNA, 122 bp, Homo sapiens
ataggaagaccacaagtttacaaatgcaaacgccgagggcacggggcgatgctggctccacgtccaggcgatcttccctgccgggccacagctcaggaaagcccggctccttgctccagacc

SEQ ID NO: 206310 - DNA, 122 bp, Homo sapiens
cctcggagaggcggggcctgaggctccctagaggctcccagctaggggcgggcctcggggcgtggaaagtaatcccggacatcccaggcccccggcgtcggcgggcaagatgggggttcagc

SEQ ID NO: 206311 - DNA, 122 bp, Homo sapiens
ctctgggccgagttactgatgtagtttcggctctggtccacctggtaggagccctcatcacgattgcggtacttatacatggcgtagaggaggatgaggatgcagagcgccgccgccgccac

SEQ ID NO: 206312 - DNA, 122 bp, Homo sapiens
agttgggtcacgttggccaggtgccggttgggccgcatgtgcctctgcgggaaggtctcccggcactgcgggcacgacacgttagtctctgccgtgccccagcagcgggcgaggcacgcgca

SEQ ID NO: 206313 - DNA, 122 bp, Homo sapiens
ttaagtaactgtattcaaccatcaaatttaattttaaatcttggcacagtgcccacaagccgtgtgactttagtccccttgataatataaacttcatttctctcacttataataaagagaca

SEQ ID NO: 206314 - DNA, 122 bp, Homo sapiens
ccgcttggcgataggtgatggtctcaccgcttggtgacaggcagttgtctcaccgcttggcgataggcaatagtctcttcgtggttgccaaaatgtatctggaattggtgtgttcttggtct

SEQ ID NO: 206315 - DNA, 122 bp, Homo sapiens
gggcccccagcctctcgccgcccgctctccagaggcagtctgcaccttgcctccttcgctcgagccccagcccccagactcgggcaatacccacaagcaagatggcggcaacggcggcaccc

SEQ ID NO: 206316 - DNA, 122 bp, Homo sapiens
cgactcccgagctcccggccgcggctccacttcctcctcttcccctgctccctcgccgctcgctcagcgccgcgccgctgccacctccgctgtcatccccgccacccacccccaccggagcc

SEQ ID NO: 206317 - DNA, 122 bp, Homo sapiens
gctgcttggggtgggacgccgtgggaggagtcggctccttatgcaaatcacagcggagcgcgcacggtccggaggcggggcttgcgatgcaaagacaggtccgtctggcgaacagcgagggg

SEQ ID NO: 206318 - DNA, 122 bp, Homo sapiens
ggcgccgggagccgtgaggcggcgggagccatgggccggggcctgggcgggctgggggcccggggcggcgggcggcgctcagcagcggccgcctcccgggctccggagcgcagccatgttgg

SEQ ID NO: 206319 - DNA, 122 bp, Homo sapiens
cgccctcctaaatgatgtaagtggagtcccccaaattcttgcaaaatgcaatgactgttgcgaggttaattaacgagtagtttaggagcgagacggaactttgggggtgcagggtggccaaa

SEQ ID NO: 206320 - DNA, 122 bp, Homo sapiens
cacccgttcccggcagaaaatacccagcgacgcgcagctgagcaccgagaggagcacaatcgtgacagctgcttctgggccgccgtgctgcagcttgagagctgcctcggaaagctctaaat

SEQ ID NO: 206321 - DNA, 122 bp, Homo sapiens
ttttggttgcagccacccctccctgatggtgtgggggcttcgcttcctctgtttattcctcgcctgagggagcagaggtgaggggatgacactgccccgcctgagccccgagtccctgggcc

SEQ ID NO: 206322 - DNA, 122 bp, Homo sapiens
atgcgaccgcgcaacaatcagacgtcagcgccctccagccaataacggttcacttacttacggagaccgccgagggacagaagcctctctcaggtgtttgcgcctcaaggaagaatcaagag

SEQ ID NO: 206323 - DNA, 122 bp, Homo sapiens
gggcgcgctggttggccggtgggttgaggccagccttgaggtacaggagccattctgggccgtgcgtccccctgctatggccccggctcaccctgccgcttgcgctcccgctccatcataat

SEQ ID NO: 206324 - DNA, 122 bp, Homo sapiens
ccctgccacacctgctcctcgtactgcgccgctacacctgacctcaggaggacccacagccgacttcaggaggacccgggtgccgggaccctgggcaaccataacaatgaacaagggcctga

SEQ ID NO: 206325 - DNA, 122 bp, Homo sapiens
tggccaagtctccaatcgtaaaaacaatacacaggcagtttcaatacatgaagatttgcacggaagaagtgtgtggcctgtggtccggccaccagctcacaaatgactggcccaacaatgaa

SEQ ID NO: 206326 - DNA, 122 bp, Homo sapiens
cccgccccgcggcccgagtccctggctcgcagtcccccggcttgtttcgcttacctagagcgagaaaacctctcacaccccaaccggcttccgatccctgcaggcgcacccagtcctcccgg

SEQ ID NO: 206327 - DNA, 122 bp, Homo sapiens
ctccgcagacgtagacaacgaattcctggagcccaaggtcggccggggttgggttcctgtcgccgcacgcgtggcccgcccgaaacccgctacaaagtagcggcgtgtctgccctagggagg

SEQ ID NO: 206328 - DNA, 122 bp, Homo sapiens
ccaggggtgtggccaaaagtctgtgaggcggggccgtaggcagcctaaatcaggcatcggcgcggtcagcctcgtggcgcgcccacgcccccacgccggctcttcccggggtccttccgtgc

SEQ ID NO: 206329 - DNA, 122 bp, Homo sapiens
acccccacctccttcctggacggggtggctgccgggcggtgacgctcctcacttgtcagacggggcggcttccgggcggagggtctcctcacttctcagacggggcagccgggcagagacgc

SEQ ID NO: 206330 - DNA, 122 bp, Homo sapiens
aacagggccagccagtgacttttctgatcgcttaatgcacctatccagtctcttcacaggcggctcctggggtctgccgggggtgctggcgtcgggttggccctggcgctgtccccagcccc

SEQ ID NO: 206331 - DNA, 122 bp, Homo sapiens
cgtcagctggtagagattgggggacagcacccccgcgggcttgggctggatgggcatgggcgtgcgatgcaggatcacgttgggcgccgggaccagtggtgacaagctgaggcctggggcca

SEQ ID NO: 206332 - DNA, 122 bp, Homo sapiens
gcatgccacctggcgcaccggctcgtccttcctgggcgaactctttaaccagcacccggacgttttctacttgtatgagcccatgtggcatctatggcaggcgctgtatccgggcgacgccg

SEQ ID NO: 206333 - DNA, 122 bp, Homo sapiens
tcttgcgcggcgtccggtgcagagccagcagtacgctgctgttgcccagcacggccaccgcgaaagtcaccgccagcacggcgatctccagtttggccagctcctcgttgcgcacgtccctc

SEQ ID NO: 206334 - DNA, 122 bp, Homo sapiens
gccgcccccgagtgcagatgcacccaggcacctctcatgctgccggcgggggcgccaggccggctctccagcctctcaaggcacccactggactccaggcagttgaaggaacttggacaagg

SEQ ID NO: 206335 - DNA, 122 bp, Homo sapiens
catctgctgggctcaagcaattcttccccctcagcctcctaagtagctggggactacaggcgtgtgccactgtgctcagctagtttttatttttagtagagatgaggactcactatgttgcc

SEQ ID NO: 206336 - DNA, 122 bp, Homo sapiens
gcgagcccacggtctgccgaagcggggccaggggcgggccccaggatccggagctttgggcggggccgagtccgggttaggggcccgggaggcggggccggttagggcgagggtccccggga

SEQ ID NO: 206337 - DNA, 122 bp, Homo sapiens
agggctcagaagtcaccaagccgcagaatctcagggtagacggattcttagagatcctatcgttaaaccctcctactttacagaagaggaaactgaggcacagaacgaggcagcggctggga

SEQ ID NO: 206338 - DNA, 122 bp, Homo sapiens
ttctagggcaccttagaggtgatttcattcgagctttcttggagaccttaggaaagccagcggcgggactgcgggacctacgcgctcggcgctaagggagggtccaggcaccaggcgggcgt

SEQ ID NO: 206339 - DNA, 122 bp, Homo sapiens
ggagctaacacttggccattgggaaggacccaacaaggggtcggagacctgagctccatccgcctcgtatcctgagctattaagtaaaccagggacagggctgtagagagcatcacaggagt

SEQ ID NO: 206340 - DNA, 122 bp, Homo sapiens
gcaaccaatattttggtttttataattttcatttgtgaagaattatttgagaaagggtggcgaggggagatttcctgacggcagtttcttaagctgtccattagtagaagagcaagaaagcc

SEQ ID NO: 206341 - DNA, 122 bp, Homo sapiens
aatccctgtcctcaaggagtgtgcagtccagtataaggagagtcacatgaataaattcaccgtgagagatgcaataatataaatatgtatgacataaggattttaatctgtctcgatacagt

SEQ ID NO: 206342 - DNA, 122 bp, Homo sapiens
tggtgtccaaaagaatgctgcattataaccaccagggaaatgataaaaagttcatgttcacgatcgcccggccacatgaccggcgccggccaatcgctggattcaaccactcataaacttct

SEQ ID NO: 206343 - DNA, 122 bp, Homo sapiens
ttctctcttcccacccccgacataaatcgccatggcttcctgtccctgtgcatcccaccccgtgccatgtcctggtgttcaactgcagtggtcctccgagtacggcctggccacttagctgg

SEQ ID NO: 206344 - DNA, 122 bp, Homo sapiens
tggggcagagggagagtggagctggacctggatagggagttttggtgtaaagagaggccacgtggctccccagagcaccagtggggagcaaaagcagctccccacccagatacatgttaagc

SEQ ID NO: 206345 - DNA, 122 bp, Homo sapiens
caggactagatcccatggccatacagccctgcctgccagattggacgtgaaaagtatttccgcatctgacattcctgtttcacccacacagggcatcgttttgcccaggacaaagttcacct

SEQ ID NO: 206346 - DNA, 122 bp, Homo sapiens
gcgggctcgctcgggccgtagctgaaggcgcggccggggtccggtgcttgcttgcttgctcgctcgctggctcgctggctgcacggcgggccgggaaggcggctggcggggagaggccgggc

SEQ ID NO: 206347 - DNA, 122 bp, Homo sapiens
ggggccctccctgctccgcctgggctgtcaccgtgtcctgggggtgacatgggcctgctccgcggggcgtggagaccgggcccttcttcctgggggtgacgtgggcctgctccgcggggcgt

SEQ ID NO: 206348 - DNA, 122 bp, Homo sapiens
ggaaaatggagccaccctgtgacattgctccaggaaatggtactgacacgcccttaggggcggattcacttagcaggtttacatgccaggagaggccctgccttgccacggagatagctaca

SEQ ID NO: 206349 - DNA, 122 bp, Homo sapiens
cctgcccacaccaccggccccgcccacaaccccggccccgcccacaacccccggccctgccggcgcccgactcacttgtcaatgcagatcttctccacctgcggaaccagcacctgcagcag

SEQ ID NO: 206350 - DNA, 122 bp, Homo sapiens
ctgggcgtgccttccgcaggtgaacctgaaggtgcgtctgcaatgctgctgttgcattctcgttcttgtagattcttcttctattctctctctttgccttccgtttcacccagcacccactt

SEQ ID NO: 206351 - DNA, 122 bp, Homo sapiens
tttttgatggttctgaaactgctaatcatctgctctgtctaccgtggtccttatataggccggtgggattgagctgctcaggcatttaatgagaaaatgccaagactaggtttaatttactt

SEQ ID NO: 206352 - DNA, 122 bp, Homo sapiens
ccatcccctcccgacacctgactgcgcgtgttctcctttgcagttctttccttatggagacgcctccaagtttgcccagcatgccttccgaaccttcgacaagaatggggacggcaccattg

SEQ ID NO: 206353 - DNA, 122 bp, Homo sapiens
cgtcttcatcatgacgacatgtacacagtacttactatgtgtcaggtgcttgaccacactcgctaaatctagttttcatttatacatccattatactttcttccatctccaccctctgctcc

SEQ ID NO: 206354 - DNA, 122 bp, Homo sapiens
actatttctttcagtatctaagaatatctttattgaaaaaaattaaaaataaaatcagttcgccagaagcagttagaagtgtggctttgttcgtgtccaagcggattgttaaaatatataca

SEQ ID NO: 206355 - DNA, 122 bp, Homo sapiens
tggcgctgtcgtctatcagctatgtgggctgctccctctccgtgctctgcctggtggccacgctggtcaccttcgccgtgctgtcgtgagtccccttttctaatccacccaacagtctctcg

SEQ ID NO: 206356 - DNA, 122 bp, Homo sapiens
gctactcccattcagggctgctgtccagtgctgctttattggcagtgctgccagggtctccgttagctctctgcaaattgccttcctttctgctcctcctactccctccttcccccatagaa

SEQ ID NO: 206357 - DNA, 122 bp, Homo sapiens
gggagaaaacagaaaagagagagaaagagcagaaataaagatatggtttgagaagacatccgtacagaattgatgaagtttcttgtggaaacctcattggtgaggtttccttccacagagca

SEQ ID NO: 206358 - DNA, 122 bp, Homo sapiens
tttaaaaataatccttaagttataccctaaaaaggcaaggctaactagatttcccagcagcgaaaaggtctagtagttacccttctgcattccccttctgcattctagaatacacaataaaa

SEQ ID NO: 206359 - DNA, 122 bp, Homo sapiens
tacagagagctgggagggaggcaccccggggggcggggcgtgggagactgtattcgggggcgcgagctgccccaggtgagccgtggctcaggtccggagcgcggtcgggacacagcgcctct

SEQ ID NO: 206360 - DNA, 122 bp, Homo sapiens
agccggggaggaggagacccaggaagccgcgcccggctccggtgggtggagggcctaggccgcgcctcccagccccgcggccctaggcctcggcccgcccgaggcggagcccgggaggtcgg

SEQ ID NO: 206361 - DNA, 122 bp, Homo sapiens
acgggatgtgtgtgtatcagtgacgtccaaggcataggggagccagcgacgggtgggcctcgtgtgcagaataaaataaaccatttagcatagatctgcttccaggggcttttctagggtac

SEQ ID NO: 206362 - DNA, 122 bp, Homo sapiens
ctcgacagcctttgcgacctgctattctcaccggatcttgtatctttatgatagattactcgcacccggccttctcttttatctcagagagtgtgacccagtgtcacagctccagcaagcac

SEQ ID NO: 206363 - DNA, 122 bp, Homo sapiens
ccacgaagaggatgaggagaagctctccgaggacgtggacgcccctcccccactgggtggcgcagagctggccctgcgggaaagcagctcccctgaggtgaggcccccccggggaagctttg

SEQ ID NO: 206364 - DNA, 122 bp, Homo sapiens
acacaattacaatacattccaattgaaatcccatcttgcattacatttgcataaagcaatcgctctttccctatggagaaaaaacagcaaatcacattcttaatattacagtaaagtgttaa

SEQ ID NO: 206365 - DNA, 122 bp, Homo sapiens
gtctttccaaagcttaggggaaatggccgaggaaaggcgcaattccacgtgatggagccacgctggatgaggaatggatgcaagaggaagaaaataaccatattcaaggagctacatcttct

SEQ ID NO: 206366 - DNA, 122 bp, Homo sapiens
gaaaaattagttatgtggtaatggaaagaattactgtgtttggattaactagaggctgcccggaatgatgaggtacaaaagtgacaggctatggtatgatctcattgacagcattttctcca

SEQ ID NO: 206367 - DNA, 122 bp, Homo sapiens
ataggcaggcggtgcctgggggaacggggaaccggcggggaacgcagagtgggcatccagcgcaccgggactgggacttgacccagcgtccacctctgcccctgccccattggccacccagc

SEQ ID NO: 206368 - DNA, 122 bp, Homo sapiens
ttggagaccactttgcattggccagggtgtcttgggagcccggctggcctccgcggccggcgtcccctgcctccaccctgtgcccgagggggtgtccggtcctgcccatccgatactctggt

SEQ ID NO: 206369 - DNA, 122 bp, Homo sapiens
ggtatgtttcacttcttgacaatataaatgctgcagcaaagatgagaggtgaagtaaaaccgatacctgtcctgcaggtctaaaatttgaatggaaattcaagcacaagtactggggacaca

SEQ ID NO: 206370 - DNA, 122 bp, Homo sapiens
acataattgtgctactacagaaaggtgacacccacctccttcagcctttgtaaaatttcacgagtgcctcacattgacaaaacctaaacttacgaggggatcacatgggaatctgagaaatg

SEQ ID NO: 206371 - DNA, 122 bp, Homo sapiens
cccctgcaaatacgttgtggtgcccagagtagatgaaaaactgtgagtttcccaatagagcgggttcatctggactcttgttggttgcgttctaggagctaattctgtggctctggactctt

SEQ ID NO: 206372 - DNA, 122 bp, Homo sapiens
ggagaggcaggcctagaaggaagccgggagctttaaaaataaccccggcactgcccagagcgcggctgttcctggcgagtcacgctgactcagcacattgcctctgcctccccgccgcgccc

SEQ ID NO: 206373 - DNA, 122 bp, Homo sapiens
ctcgcggcatggggacaccaagtcagacgaacccgctgtgcaagaacattttccacacagcggcgcatacccccgcccgggggcgctcggcagccgcacgcggccctcagagcgcagccccc

SEQ ID NO: 206374 - DNA, 122 bp, Homo sapiens
tgggccccgcctctgccccagctgcatttccgggttggggcctggcgggcgggagaggcccggccccgcctgggcagggggacctcgcgcgaaccaatcccagggccccgggggcggggctc

SEQ ID NO: 206375 - DNA, 122 bp, Homo sapiens
ggcgaagcctagcgactcgcagcgccggtcccgcagtttcacctcttttttttttaactccgccagaggaccccgacccacaggtcccggttgctccgctggtcaaagtgcgtgcggagtag

SEQ ID NO: 206376 - DNA, 122 bp, Homo sapiens
cgtgcggataagcccagtgcctgttgggccgcacccaagttcggccctctcttaccctctcgaccacactgcacggtcccgctgccctttcatgcgtttctgccatcacccccgcccacccg

SEQ ID NO: 206377 - DNA, 122 bp, Homo sapiens
tttgaagaatgtgttctaggattggcaatggttcgtttacgaagagtaagtttagaacgacggcatggaaatctggaagaagctgaacatttgcttcaggatgccattaagaatgccaaatc

SEQ ID NO: 206378 - DNA, 122 bp, Homo sapiens
ccccggccccgccccctcctcccggctgcacgcgccgctccccctttgtcccccaggccgcggggaccccgggcaccaacccctccagcacccgctgccccccagcccggtggacggcccct

SEQ ID NO: 206379 - DNA, 122 bp, Homo sapiens
gagcaggatggtggccgggcagaagggctgcatgatcacaaagcccagtgaccccttgatcgcaacgcccagtgaccccttgcaaggcctgaggtggatcccggtggcaggaaggcagtgca

SEQ ID NO: 206380 - DNA, 122 bp, Homo sapiens
ggcgacttgtgaaaccgacccaagcattccaacaggaacaaaagtgtggtcctgtggccacgtccacagcaagttccactttccccttgctcatttctgcgttgttggaggtgtttacaacc

SEQ ID NO: 206381 - DNA, 122 bp, Homo sapiens
cttttcttgacgcgcgccttttattgacgcaaacctcccgttctcgcgggaacttgggaacgggagcctggtagggaggacaaatctctcgaaatctcagttggcgctggagctggaggggc

SEQ ID NO: 206382 - DNA, 122 bp, Homo sapiens
gtttcctcttctcagacagctccaagcttagagacctcagagaaaatgtgacccacaacacgccatcccaacaagcaaacacccgtgcgccagcctggggcgcattctgattgaagagatgc

SEQ ID NO: 206383 - DNA, 122 bp, Homo sapiens
aggaaggcagtgcaatgttttgtagaaatagacttagcagagcaggcgcccagcattcagcgagaccacagattcttagccactgtatgacttgaaggtgatactaactcccctgaacctgt

SEQ ID NO: 206384 - DNA, 122 bp, Homo sapiens
ggagcctggcgcatcattggctctccctctcaccaatctccacaccctttctgttttcctcgttccctcagccccacgaaccccgggagatttaaaccgcgccttactagtgatgtccattc

SEQ ID NO: 206385 - DNA, 122 bp, Homo sapiens
aggattcaagccaggtcatctgactctagattccagcctccccacagtctcccaggggcacgtagcctcagaggagcttcctgtctgttaccagagagaagccctgtgcctaagaaactgaa

SEQ ID NO: 206386 - DNA, 122 bp, Homo sapiens
tgcttgagcccaggagttcgaggctgcagtgagctgtgattgcgccactgcactccggcccgggcagcggtgagaccctgcctcataaggaaaaaaaaatgcccaagggaacaagggttaac

SEQ ID NO: 206387 - DNA, 122 bp, Homo sapiens
tgtgactcactgcctctctaccgtatccccctcctccacactgggagcttccaactctgccgggaaatggagcaagaggggcagaaccccagaagcagactctgcagccagtttgcagtcca

SEQ ID NO: 206388 - DNA, 122 bp, Homo sapiens
ccactcatttatttttctttctttgtccctcctcttcctttttaataaaatgcatcagagcggagtgcagacgccacctccgatgtccttataaaacgtgtgcgcgggtgctgcgcatgcgt

SEQ ID NO: 206389 - DNA, 122 bp, Homo sapiens
gcgagccggcgcggcaacacctgttcgcggcagcctgggcggcacgcgagctcccggacgcggctctcctcgctcgccgctcgccacccgttctaagccaatggacatctgccgagcctctg

SEQ ID NO: 206390 - DNA, 122 bp, Homo sapiens
aacgagttaccaggtgagactgatgctgtaggtcaaggaccacactttgggaactactgccgtaaaaatcaagcgattttataacttccttaagttagccaatttaaatgctaattttcctc

SEQ ID NO: 206391 - DNA, 122 bp, Homo sapiens
caatgctagctgcagatccaagcccgagtcccctcccttcggtgttgaacatccacactgcgctggaatgtggtcagcagcgttcacagttgtatctttaaatgaatcttgtttctggcact

SEQ ID NO: 206392 - DNA, 122 bp, Homo sapiens
ctgtaagtttctagaatgtgtgtgtggtggtggggggtgggggggcggtgtgtgtttgtgcgtcaggtaggaaaattgtccaagaatggagagtcaagtgaaaggtagacagtatttatagc

SEQ ID NO: 206393 - DNA, 122 bp, Homo sapiens
tgctcctcgcccacggggaagcccaggtgacattctctagctccacctacaggctgccttcgggacaagacctggttgtttccaaaaccccgagggattcagtgtgtgagtgagttctggga

SEQ ID NO: 206394 - DNA, 122 bp, Homo sapiens
ttatgtagtcaaggtaccggatgtcttatctatatttacatagatattttatgtggcccccgctagtttgcaggaaagtgggtggaaaagggattccagggcaggaaccaaaggtagatgat

SEQ ID NO: 206395 - DNA, 122 bp, Homo sapiens
gacctgtggcctgggagtaggtgcccatattccttggagacatcttcatcctccttttcacggtctgggtggctccagaaatgatgcccattctctgtggaaacatccttgttctcatctgg

SEQ ID NO: 206396 - DNA, 122 bp, Homo sapiens
caaacatttgggcgcccctcacctgatgtcaccaagaaccagaagaccaattagaattttcgtgggcttcctgccccatggttccctctgttcccaaagggtttctgcagtttcacggagct

SEQ ID NO: 206397 - DNA, 122 bp, Homo sapiens
aatgaccgccacgatgcgcccggtggcggcgcctgcttttggcgaaggagatgtttgcgccgcatagtccctgactaacagacaaaagatattggaaggagctggggtcaggccagttaaag

SEQ ID NO: 206398 - DNA, 122 bp, Homo sapiens
aatggggataacaatagtacctacctccctgggatgttctgaggattaagagatgatgcccgtcaagagcccagttcagtgtctggcacagaagtgggactgtttaatggctggccccgccc

SEQ ID NO: 206399 - DNA, 122 bp, Homo sapiens
gttaagtttcattcaagaaagcagttaatttacttgcaaatcagttttttcagctttgttcgagtgggtttagaatagtctttactattgggctaatttagctttaaagtgtggccttttta

SEQ ID NO: 206400 - DNA, 122 bp, Homo sapiens
gtgttcctacctaccaacataattcctagtgacacctgttgggatcttttccttccatgtcgcagctatctcttggcaagccccctggctccgtgttacttctttatcccacttggtgatta

SEQ ID NO: 206401 - DNA, 122 bp, Homo sapiens
gcaatctggccatgacagatgttttaaaatgcatttgaatccactcagtctccactttaacgaaaggcggctttctcccagagttactcataacaactcatgtagtctgtggtcacagttaa

SEQ ID NO: 206402 - DNA, 122 bp, Homo sapiens
gctgcttcccgaccgaggctgccagccaagccccagagaagaaggttatcattacctggacgggttcctgcagcaccgtcatcctcgaggctcaggcccactttctgcagtgcctcaggccc

SEQ ID NO: 206403 - DNA, 122 bp, Homo sapiens
aaaggtcaggattgtgcttacctttgagggaaagggggtcatgactgggaatgggcagagcgggcttctagagggctagcaaatgtctgtttcctgacccgggtggtggcaacttgtcttca

SEQ ID NO: 206404 - DNA, 122 bp, Homo sapiens
ggcagcgccaatgcctcggaacaaacgtggagaagggggtcatctctcaccttctcatctcgccaaagtgcatgattgtggacatggcagcagttctttctgttggggcccaatggcccttt

SEQ ID NO: 206405 - DNA, 122 bp, Homo sapiens
agtttggttatgttacagattggcaacacagattactgggagaaaagagactattcaatacgtggtattggggaaatggaagaacaaagaacttggatctttagtttatacagcatacacaa

SEQ ID NO: 206406 - DNA, 122 bp, Homo sapiens
ctttttgccaagcgtagctgtgtccgctttcacagaacccccgtagcagcagggcttgggcgtggagcagccaaggcccacgtagcagtggcttcatgtacggagccgagggggaggctcac

SEQ ID NO: 206407 - DNA, 122 bp, Homo sapiens
aggcgcgccctgccccagggcctgtttgactgtcgcccgctcgctcttctcctcttccaccggctcccgatgctctgagccccccgcgctgggccctctgcagcccagggatggggttgagt

SEQ ID NO: 206408 - DNA, 122 bp, Homo sapiens
gtccgagtacatgtgagcggtaatcgcccctgcagctggttatcctgacattatgcactccgaagcagaagaatccaaggaaggtaggattctggtttctcctgggggccggccaagttctg

SEQ ID NO: 206409 - DNA, 122 bp, Homo sapiens
gaactggagctgggtgaatgcttctggtctgccaccccctgccacttctttcagacaacacgggagcatggaagggtcccgtctgaggaaggcaacctgcccagggagggtgctggggcatg

SEQ ID NO: 206410 - DNA, 122 bp, Homo sapiens
cgcttgcggtgcagctagagttccgggtgggcgtgggctcggcagccccagcactccgagcggccggcaggccagcaagccccaggcagtgagggacttagcacctgggccaacagctgctg

SEQ ID NO: 206411 - DNA, 122 bp, Homo sapiens
ttggactggagattcttggaatcacataagtgaaaaatcccagccgggcgtgatggctaacgtctgtaatcccagcactttgggacgccgaggcaggtggatcacctgaggtcaggagtttg

SEQ ID NO: 206412 - DNA, 122 bp, Homo sapiens
tacttctcccgggatgacgtggccttgaacaacttctccaggtatttccttcaccagtcccgggaggagaccgagcacgcggagaagctgatgaggctgcagaaccagcgaggaggccggat

SEQ ID NO: 206413 - DNA, 122 bp, Homo sapiens
ttgcagttgggcagggccatatgatcgtgtcctgaccaatgggaggtggacctggcctcacgtgactctccatctcgttccctgccactgaatggaggctctccaggatggcggggccaccg

SEQ ID NO: 206414 - DNA, 122 bp, Homo sapiens
gaaaactgaaaaacatgaagaaaataaagaaaacataaataaatggaaacatcccttgttcgtgggttggataacttaatattagaaagacaacggtactctttgaagagattcagtatagt

SEQ ID NO: 206415 - DNA, 122 bp, Homo sapiens
ttaaaaatccagttagccactctatatctttatattgaagaatttaatccatttacatgacggcaattattgacagttaaggacgtagtattgacattttgttaagtattttctggtcgttt

SEQ ID NO: 206416 - DNA, 122 bp, Homo sapiens
gatgggccgaaggctggcctcgatagcctgcgcgcttaactgttatgctgtgtaccctcccgagctctgtttcatggcaccgctcgctcattattggcaagaacattccattccaggaggag

SEQ ID NO: 206417 - DNA, 122 bp, Homo sapiens
taatctgagggggcattattattactattctcacttccccgaggaagaagtcccaaaccccgtctggcacaaagccagcgccccgagtctccctctgcagtccatgtgctcccacgtggggc

SEQ ID NO: 206418 - DNA, 122 bp, Homo sapiens
atgacagagacagagagattaaaaaaaaagaaaaaagaaaataagcgaaagagaaagagacgggaaaagacagagatcaaagacacagaaggtgaaactggggagagacataatgtaaaagg

SEQ ID NO: 206419 - DNA, 122 bp, Homo sapiens
ctagattggcagcctgcgtctctctagctaccgtctctatggttcggggaatctccaggtcggggcttgaccggtccgacttttgcgcgtgcgcgagtcctggcgcgtgcccgccctcaagc

SEQ ID NO: 206420 - DNA, 122 bp, Homo sapiens
ttgatatggcgcatgctctgaataaacttggaagccagtttcctcgaacagtcaacagggcgcagacacagcgcacaggttccgtaatgtggcgctgtccggcagagaacatggccgcgccc

SEQ ID NO: 206421 - DNA, 122 bp, Homo sapiens
tggcgcccatggaatgaggggccatgtgcaggcacatttacccggaagatctgtggctcacgtgtgttcgtattttcaactcaggagcccggttttcagcttctcaggtctaagcttcctgt

SEQ ID NO: 206422 - DNA, 122 bp, Homo sapiens
ccgcgcaactggggccgggggaagcaccttactccacccccgccacaaaagctggcatcccgaggacctgctctctgggaaaaaactgaaaatgaatcaagaagccacagggcaaacccggt

SEQ ID NO: 206423 - DNA, 122 bp, Homo sapiens
aggcctcgggtcccgacgtcctccccagagcacaaacctactacaggttaggccggaggccgccacagcccagggtctctgccacctggcccgccccctccgaggcgccggagagcgattcc

SEQ ID NO: 206424 - DNA, 122 bp, Homo sapiens
tagcaaacacacacagacatcccttatagggatacagttccaggcctttctttgggcatccgtttcgagacctggagagactctgatgtctgtgtgtgactaaggagaagaatagctgaatc

SEQ ID NO: 206425 - DNA, 122 bp, Homo sapiens
cgccggctcttgcggccgagcagagttgcggcgtgggaaagagccgctaggagcagaccgcgccgccgccggagccgcgcctgcccaggcccggggagggaggaggcgggcgtcagggtgct

SEQ ID NO: 206426 - DNA, 122 bp, Homo sapiens
cgcgttaaattgcctagaagctcccacccttctgactgttgccacgtagttcttagtttccgggaatttggggattttttcctcccccttcttcccacccttcctccgtctcctcgctccct

SEQ ID NO: 206427 - DNA, 122 bp, Homo sapiens
cagaaaactacaagtcccaggatgctcggcgcgggacggtcacgtgggaggggccgcgggcgcggctaaatagtctccatcggccattttgtgcgagaagccgcagcgccgcctcttctctc

SEQ ID NO: 206428 - DNA, 122 bp, Homo sapiens
gctgcaggcctgccggggttctgccttcaaaggcagttggggaggcccaggcccgctccgcgcacctcgcgtggctccccaccacccccgccaaatgtgcaccacccatcacctcccaaagc

SEQ ID NO: 206429 - DNA, 122 bp, Homo sapiens
aactgctaaagctctcgcagagtccccagaccccccgcgggacatgaggtcttgcctgttcgtatgcgaacatccttgtacccgcctagcagccctgcagactgcaaattttccctgggtgc

SEQ ID NO: 206430 - DNA, 122 bp, Homo sapiens
ccccgagtctcgtttcagtcatccctttgtccttccccggattggcaggttttattattccgcctgaacaatccggccgcccagtggctgagggtcgctgacgtcggaggcagagccgggga

SEQ ID NO: 206431 - DNA, 122 bp, Homo sapiens
gggggtgggtgggcccggcccctccgattggtcgacggcgagagagacgctcccgcacgccgccagctctgattggcccagcggtaggaaaggttaaaccaaaaatttttttacagccctag

SEQ ID NO: 206432 - DNA, 122 bp, Homo sapiens
gtttaccttgtgtcctattaccctccctgctggattcaggatggagaaagtagtaatgaacgggccttacacttggtcatcagctgggcgcagagagttaaaatgattgcaatacgtttact

SEQ ID NO: 206433 - DNA, 122 bp, Homo sapiens
aacaaaataattctacgtgctaatgcaatcatcaggttttagaatgtttcaggctggttacgtatttcaatcattctgaagaagacagtatgacggatagcatgcaccctctatcccctagc

SEQ ID NO: 206434 - DNA, 122 bp, Homo sapiens
atcgcaggaaagtgggaagagccatcctggtgtgggcctctctgccagggcagggcaggccgcagagcactccgtggcagcagaagggctatgcggtggggatcccgggctctcctctaaca

SEQ ID NO: 206435 - DNA, 122 bp, Homo sapiens
gggcgggcgcggggcagctgctgggaggtgagcggagcagcgttttcccacagtctggggcggtgacacatggcgctcacacattccacagccggcggccgcgccaggcctggctgcgagtc

SEQ ID NO: 206436 - DNA, 122 bp, Homo sapiens
agccaagagtgccccactcctgggctcacaagagggcagatgctcagtgctttcaatttacgcatccaggcacctcctgggggcaagtctgtctaggggaagaccaggatctggcatcaggc

SEQ ID NO: 206437 - DNA, 122 bp, Homo sapiens
ttcctagcttcgctcagttccctgctacattgtcgcctcctcgcagaagccgtctctggccgttccgtatcgctagcgccctctatcattcgctagcagctcacccggctctgtttttcttc

SEQ ID NO: 206438 - DNA, 122 bp, Homo sapiens
ctcaagggtgatacagtgcaaataggactgtctttccttttgttgagggaaaagtctccccgttctatttgagtctgttctcatgctgaaatgaaaccatccaaacacagctgctccgccca

SEQ ID NO: 206439 - DNA, 122 bp, Homo sapiens
gatgctctcaggattgtccatgcgtccacgtggcttctctcatggtgcctgcatctgagccgctgctacttcctgacagggatacaaggcaggtgcacgttgagggaccctcactccaccca

SEQ ID NO: 206440 - DNA, 122 bp, Homo sapiens
gttcgcgctctccgccgctagatggaggcgttgcagaggggatggcagctccgaggcttacggaggagggtggggaccaggcctaggctgtccaggtggcgcgagcaggctcgcttagcagc

SEQ ID NO: 206441 - DNA, 122 bp, Homo sapiens
tgggttagagatataaatccaagagatacaacttttcattcaatttgattatttattggacgctttataaactctgtaaatactgggcactaacctagacattgcaggtacagatattaaga

SEQ ID NO: 206442 - DNA, 122 bp, Homo sapiens
agtgagcagggccccgaggaaggggatgctgacgggctgaaggcctgcagggagggagcgcgccgcccgggagtctggcgggcagatcttggcagacacctgtcaccttggcccgcgctacc

SEQ ID NO: 206443 - DNA, 122 bp, Homo sapiens
tttccctaaacacctataacttggccctcttgtgtacaggcagtattccatattattacacgtggtgctgatttttaatgaatattataaaagtttggctcgctctactgagagaaggatca

SEQ ID NO: 206444 - DNA, 122 bp, Homo sapiens
aaaacccctcaggaagatgcatcttagtgagctgctcaccctctctggaggaacacaactcggttctcctacagtgctagagcaggtgactgtgtgttcagctgcactgcaggtaaagttgg

SEQ ID NO: 206445 - DNA, 122 bp, Homo sapiens
aggaaacccctcttgagcctgccctcacatccttacaagggacccagtctgaggtccagtcgtccccaaaccatctactcccccaccacccccttccctgactaaaggctaaatttgggcgg

SEQ ID NO: 206446 - DNA, 122 bp, Homo sapiens
cccggggcgccgcggccggccgccccatctccgtggccatggcgccggtacctgtcgccgcgggggctcgccgactccgtcactctccgccttgcccgtgctccgctaacccttcagcccgc

SEQ ID NO: 206447 - DNA, 122 bp, Homo sapiens
ccgccgccgctatgctggggctgctggtggcgttgctggccctggggctcgctgtctttgcgctgctggacgtctggtacctggtgcgccttccgtgcgccgtgctgcgcgcgcgcctgctg

SEQ ID NO: 206448 - DNA, 122 bp, Homo sapiens
gcggagactgcgtatgcgtcgccggcgcgcggctgtgtcgtcatacttgcgcgccgacgccgccgctcgcttgtgaaactggaaggctgccatggctagcccagccgcctcctcggtgcgac

SEQ ID NO: 206449 - DNA, 122 bp, Homo sapiens
cagcccggctccccgggagacgggctgcggggcgggcacctggctgggtggggagaggggcggtacgcaccacgggggaagccaatgagaaaatcaggcccagccctagggggcggtgctgt

SEQ ID NO: 206450 - DNA, 122 bp, Homo sapiens
ttctcacccctgaccttgcctagtcctaagcgtcctttctgccttgtcagaaggattccccgagccctcctgcccagtccggcttccgcaggagacctgagtttgttttcttttactgagtt

SEQ ID NO: 206451 - DNA, 122 bp, Homo sapiens
tgaggggaggcacgggaggggctgtgccgggcaagagaggtggcaggaaaatccaacgcacggcgcctatgcaaatactcgtgtgaggcagaaaagaggctccgccccgctcgaagttccaa

SEQ ID NO: 206452 - DNA, 122 bp, Homo sapiens
gggtgacgccagcactccctgagctgcccagactggtgtctcagtaggtcctgtgccccccgcagtctactgtctccgggcccagctcagcactaggacttgcagtccttgtggcctacact

SEQ ID NO: 206453 - DNA, 122 bp, Homo sapiens
aacctgctcatgtagaggcagcgatgtggagacccgcccaatttctaagcggtgtattgacgttcttctggtgcacgctgtattctagttgagttgttgttaatgctgcccatgctgtactc

SEQ ID NO: 206454 - DNA, 122 bp, Homo sapiens
gtttcaaatgggccctgctctccggcaaaattagtttaaaggattttaaaacaaagaaaacgagatgaccggtctgggagctcctcaatcagagtagagaagttagaggggggcgggcgact

SEQ ID NO: 206455 - DNA, 122 bp, Homo sapiens
cctagagaaggacaaagacacccacagacggctaggagatagagaccaagcaaacaacaccgcggggctccgtcccaggttgggagcgcttagtctgatacggccagaagcctggggcaagg

SEQ ID NO: 206456 - DNA, 122 bp, Homo sapiens
tttagacaactgtcttctccctaaagtgtatactaaaagaagtttatcagcattccaagacgatgtcatcagagagacagcatggtcaagttaccattgaaggagtccttccagtccatttc

SEQ ID NO: 206457 - DNA, 122 bp, Homo sapiens
cgtcccggggctggtatcgatccgggtatccgtctctgaggtcaaagttggggcctggaccgttagtggggggtgggctatagtagcgcagggctcgggcatctccatggtactggcgttga

SEQ ID NO: 206458 - DNA, 122 bp, Homo sapiens
cccaggatgtttgagagttttgctaccagccttaagcaccgagagaggtgtcactcagtgcgcagctgcaccggctaagttttttagacgcgttgccctcggcagcgggtttggacccaagg

SEQ ID NO: 206459 - DNA, 122 bp, Homo sapiens
ccgcatggctgcgccctctccaggtgcgcgccgcgcagccccccgacgctcggtgcccggcggcccaggtgttccggcgtgcgcccccggccctgactctacccagccgccgccgccgccgc

SEQ ID NO: 206460 - DNA, 122 bp, Homo sapiens
gggccggggcccgccgtggcggtgctggtggggcggacaccccctccttcagggacctgccgaggcttctcaaaccatccgctgagatgccttgagggcggagaatggacgcgacccctgcg

SEQ ID NO: 206461 - DNA, 122 bp, Homo sapiens
cctgtgcgcgcggccgtggctcccctgcctgcgcgcttcttcgtatctttgccattacggcgctaatgcagtgcacgactgaaggtccagtggcggcctacgacctgcgaggcaattcacac

SEQ ID NO: 206462 - DNA, 122 bp, Homo sapiens
tcagcacaattataggaaagaagggatatgaacaggtttccataaaggggaaaggggagccgtacctaagctgactgagatgggctgagccattgtggtcaagaacaaacagcaatcaatat

SEQ ID NO: 206463 - DNA, 122 bp, Homo sapiens
ggctgaagggctcctcaagcagggccagagtgagcgccaaggccaaggaggtgctgaaggcgaccgagggctgccggcacgctgtcacctctcactaccttctccctaacttgtggatgccc

SEQ ID NO: 206464 - DNA, 122 bp, Homo sapiens
ggacagagcgcaggagctcagcatggagcccacgggggaggcactcctcgtgacagcaggcggctggcatgtgcatacagaatggccgctggaggctctccttaatatgctgggcagaggtt

SEQ ID NO: 206465 - DNA, 122 bp, Homo sapiens
gaggaacagcgctggggtcccggcggttcaccagcttaccaccaggtgtcgctgtgtgcacgagggcaaagggcacccgcagaccagcagggccgagccgggctctgcagaatcggactggg

SEQ ID NO: 206466 - DNA, 122 bp, Homo sapiens
gaggccggggctggacctggacctgccggtcgggcctcatcaatgctgggcaggcagcctcggggccgcaccggtgagggtttccgcccggagtctttggcattctcctcctcctggcgtcc

SEQ ID NO: 206467 - DNA, 122 bp, Homo sapiens
gagagagcccggcgctgaaatggaggcggcccaggtgggaccaaaggggcgccagctgcccggcaagcacgtagtaggtgggttccatgggggctggcgtccgcgcgcgctgtctgggtgcc

SEQ ID NO: 206468 - DNA, 122 bp, Homo sapiens
aagggaattctcatggaaaaaagaagtcaactctgactgccctaccacatcaaaggagggcgtgaggctactgagcaaagaaacagaagtccccagcgtcactgggccccggtgggctgtgg

SEQ ID NO: 206469 - DNA, 122 bp, Homo sapiens
ccgtccgagatcctgaacccccgcacgctccagggccattctgctattgggcagggatgccgtttttttctgcttcagaccagttctctcagcaagctccttcttccccgtccccattccta

SEQ ID NO: 206470 - DNA, 122 bp, Homo sapiens
tgcagccactgcaccgagatgtcctcaggcatgaagttctggatcaggcaggtgagggtgcgcttgtcccggctccccagccactccggcgtcgcaaacgcatagacttccggggcagcacg

SEQ ID NO: 206471 - DNA, 122 bp, Homo sapiens
tagcagctccgcaaaccgccgaggaaaacccgctgcgacacacaccccagcagctcctcgcgttccgcgctccgccctactccacatcagcggcgtaacggaagccgaccaatggcgggctt

SEQ ID NO: 206472 - DNA, 122 bp, Homo sapiens
ggcacccaagtaaacaataagtttgttggctattaaagacgttgatttctctactgatatcgtcagagatgggcctcatgctcattaaagttccttcctctgcgacctatttccactctggc

SEQ ID NO: 206473 - DNA, 122 bp, Homo sapiens
cggtgagctgtgcacggggaagcagagcctggcggccacgtcggcctcctgtgagagggtcgagggctccagccccgaatgggacttgagcagtgcttcggcgacgtgtctgtgtgtgttca

SEQ ID NO: 206474 - DNA, 122 bp, Homo sapiens
gggaggtgtccctgcaggcctgtcccatgtcacctcacctgccttctctgctttctatggcgcccacggctgcacggtcactcaggagacaccagtccccggggttggcggctttatctaca

SEQ ID NO: 206475 - DNA, 122 bp, Homo sapiens
cctagggccgcagccggaatcccgggccacatcccctgccccgttgtgccttccacacctcgggcagtcactaggaaaagggtcgccaactgaaaggcctgcaggaaccaggatgatacctg

SEQ ID NO: 206476 - DNA, 122 bp, Homo sapiens
ggacggtagtgatgggtatgcacaaaggagtgccaagcagttttaaccgttaatgttcttcgtctattgctagagaaaatgtctttccttggaggaggcattggcacgagttactataaact

SEQ ID NO: 206477 - DNA, 122 bp, Homo sapiens
cgtggagtcacgaagctgggcggcaggaggggcggcctggagctcccgcggggcacagcgcgtgcgtgagggcggccggcggggctgcccggcgcgggtgtcccggcgatgtgtggcgctga

SEQ ID NO: 206478 - DNA, 122 bp, Homo sapiens
tctctgccttgtgtgacatgtcagcatttccgttgaatttacactgtgacatggaatcgccgggtcataggcagggcacacttagcttttgtagattctaccggttttccaaaatggctaag

SEQ ID NO: 206479 - DNA, 122 bp, Homo sapiens
catcccctgacctgcagtgcagagccttctggtgcaggaacaaggcagaaaaaatccagacggctcccagccagcatgtgtcaagagctacaaagaaggaaattggacttgctcacttaaaa

SEQ ID NO: 206480 - DNA, 122 bp, Homo sapiens
atatgcctccgggactcaaataccacaaatggtttcccccttcaaaactccatgttcactcggccctcctcctttctatggccctccttcctaccctgtctgggactcccacgacagcaagg

SEQ ID NO: 206481 - DNA, 122 bp, Homo sapiens
aacgccgccttcgaacagctcagtttcaatacagggtcgaggcttcccattttaaaacaacgccgacggaaggccttcgccattttagtaaaggccctttgctgttaaaactaaccctccgc

SEQ ID NO: 206482 - DNA, 122 bp, Homo sapiens
gactgggctccacaggcccatgtgtgctaacaaatgctgctctcttttctgaaaatgagtcgttagagtggaaactgttatgttctctgtgggacttagaattagatttttttaaaaagata

SEQ ID NO: 206483 - DNA, 122 bp, Homo sapiens
gttctggtggcgcaggcgcaggagcagccagctgtggcagcgcattagttttggcgcaagcgagcctatgctgcagggtcacttttggctggtcagagaaggaataatgatatcaccttctt

SEQ ID NO: 206484 - DNA, 122 bp, Homo sapiens
gaacttccctccctcacttgagcacaatccaagatgaaagtttctgggttgtgtccccttcgcttcctctcaccctcgctcccccgcggagccaaggagccagcaattgtgcaagaggagac

SEQ ID NO: 206485 - DNA, 122 bp, Homo sapiens
tccctcaaggccagagcggcagccgccgcggtcccaagcccccttcctacctatgccgggcgccacatagacgaagtacagcagcgaggacgagagagaaaagaagaagagcgcggcgagca

SEQ ID NO: 206486 - DNA, 122 bp, Homo sapiens
ttaaaaactgccccctattaatgctgacttgggataggaaaggaaagttgtaacagaatacggatgtattcttctcaaccagagaagatgtaagttagcaacatgttctaaatccccagaag

SEQ ID NO: 206487 - DNA, 122 bp, Homo sapiens
atcctcacaggcactggcctcactgcccccactcccacaccagctgttgctggggcaggacgcccaatgtcccagtcttgctgaagtctgcttgaaatgtccctggtgagcttctggccact

SEQ ID NO: 206488 - DNA, 122 bp, Homo sapiens
gcctgcagcacccggagcgccgcactgacccgcgattctgcccgaaggccggcccgggtgcgccccggcgcggggagacaccaacaaggccagcttttccacgagaggctgcttagctcttg

SEQ ID NO: 206489 - DNA, 122 bp, Homo sapiens
cgtcatcaggcgccgctctcgcgagagctggggcgccgcgagcctcgggcctcgcccacacgcccggcccgccccgcctccagatcatgccccgcccacatgcccgccagtcttcttcctgt

SEQ ID NO: 206490 - DNA, 122 bp, Homo sapiens
actcggaaccgaaggctgagccaaggcgcagtcgggggccccccggctttgcgcaggacgcgcttccactaaggctttcgcctcgcgccgtaatgtgtggaatagccgcgcccacggcagcc

SEQ ID NO: 206491 - DNA, 122 bp, Homo sapiens
gctccgaagtcagattaaagggctcgaggacggcggacacaggggtgggcgccagggatgcggcgttaggggcgtcctctggaggcaggggcgccggcacaccctcttcagccatcaggatc

SEQ ID NO: 206492 - DNA, 122 bp, Homo sapiens
ttggccagagtgcccaaagcatggctgggcagcccgggccccagcagggaaccctgcctgcgctcctctggttgcacaaactgctggctcaggtgtgacaggcagcactgagttgggagggt

SEQ ID NO: 206493 - DNA, 122 bp, Homo sapiens
tcaagaaagacatgtgtaataatggccaaattagtattatcttcccccagccctcacccacgaccagcagatgccacagaagtcactcttaactaaattgcactgtgctcccagctggattc

SEQ ID NO: 206494 - DNA, 122 bp, Homo sapiens
ggccaaagagccctttttccacgcagcccaggggccccagcctcctggcctccacgcctgcgcggctagcggatgaggacgttaatctcggccacactggcctccagcacgttctcggccgt

SEQ ID NO: 206495 - DNA, 122 bp, Homo sapiens
ccagaatttaaagtgcccaggctacagagacaccctgaagccacagaaagacaaaggaaccggttgaaacacacaacgtgtccagtgaggactttgcagaattctgtaaccagactacaatg

SEQ ID NO: 206496 - DNA, 122 bp, Homo sapiens
aagagggcccctccaggccagtctgggcaccctgggatagcggctgcaggtaggcagaggcgctgccagtgcccaggtggcctttccctccatccggcccttcccaccttcctataaccttc

SEQ ID NO: 206497 - DNA, 122 bp, Homo sapiens
tcttcttcttcttccaataaccccgccctctctccctgtagtcctcttccaactggaaaacgttgaccccagtggtacagggtagccacagaacttccagaccaaagggaggatgcactttg

SEQ ID NO: 206498 - DNA, 122 bp, Homo sapiens
ctggttcagaccgggacagcgtttgcattgcagtcaagacgtgcttcccctgcatcaagccgggagctgcccgcagatcgtgtcgccggggatgctgggggaggagggaatgggagacctga

SEQ ID NO: 206499 - DNA, 122 bp, Homo sapiens
aaataaaaatattttcccaatgaaattattcttccctctctatatgtagacccagtgatacggtatataatcatcagtggtgcataatcatcaatgcaaaactgtagaaaacataattgaaa

SEQ ID NO: 206500 - DNA, 122 bp, Homo sapiens
tgcccagggtgttagttatcaatagctatattgaaagattccagtcactacaaatagactcgttgctctcttttcaagaagtcgttggcctgagctcagcaatatttaatatggttgccata

SEQ ID NO: 206501 - DNA, 122 bp, Homo sapiens
gacacagacacgttagtacagatgcagttcttgatgatgtgtcctgcacagtatctgagtcgagaagaaagtatggggataggcatagtaagaaggccattcctggccacaacaaagatggc

SEQ ID NO: 206502 - DNA, 122 bp, Homo sapiens
cgccctgctcctgcagggccgttcctgtggctcgctgggacctgacaccgcccccccccccgccctgttctgagtcactcgctgtcggagagtgtctcgtactgcgagcagagcagtggctt

SEQ ID NO: 206503 - DNA, 122 bp, Homo sapiens
cgcgtggctgtcattaaggcagcctgttattgtgcgaggctgaatcagtggctctttgtgcgctcagctgtatggtaatgcagacagcacctgctccccgcacaatgcggagagaaagagct

SEQ ID NO: 206504 - DNA, 122 bp, Homo sapiens
gcggcgcaggaggatgggctgcggcgggagccgggcggatgccatcgagccccgctactacgagagctggacccgggagacagaatccacctggctcacctacaccgactcggacgcgccgc

SEQ ID NO: 206505 - DNA, 122 bp, Homo sapiens
cccttaaaagggccaggaactctgtcttcggggagctctgctcttaagacgcgtgtctgccgacgctcctggccgaataaaaaacctcttccttctttaatccggtgtccgaggagttttgt

SEQ ID NO: 206506 - DNA, 122 bp, Homo sapiens
gataaatttcaggctgcacaaaatctgctttccactgtgggtctgcaggggttaaattagcggggggagaggccgcacctaatttcagacacttttctttctaatgtggctccagccccaga

SEQ ID NO: 206507 - DNA, 122 bp, Homo sapiens
gccctgcgagctggggtggccctggaggtcctggagcagaagctaggttcccgcagagtccgctgcagcgccgctggcgatcgggctgggtcccattttccacgaaaagtcccgcggcttcg

SEQ ID NO: 206508 - DNA, 122 bp, Homo sapiens
cgcatccgcagggccactttctccagggtccccagggatgcgagggtcagcagaggtgaccggggaaccgctgcaggcgctgcggcgcgagggctgggcgccgcctcccgctccctcgggag

SEQ ID NO: 206509 - DNA, 122 bp, Homo sapiens
tctctccctctgtgtgtgctgcgcctcccctgtgagcctaacccaaggcaggggactggacgcgtgggaccctctctttggcctccctgacgtccctcaggagcagagatgcgaccgagtgt

SEQ ID NO: 206510 - DNA, 122 bp, Homo sapiens
agacgagaaagagagtgggagagagagaggcagagagggagagagggagagtgacagcagcgctcggtaagtgtttccttattggttcaaatatgtaactaatggtccgtggcggtttcaag

SEQ ID NO: 206511 - DNA, 122 bp, Homo sapiens
tctgcttccccttcactttgggcctttctgcttgccatctccaggtggttttgctattcccgaggattacctcagcctctggttttatttttattttttatttaaagattttttaaaatatt

SEQ ID NO: 206512 - DNA, 122 bp, Homo sapiens
ggcccctcaaaactgtcccgtcaggaccgctcctaccccttaaggaggtcttaactgcctcgtctcctgatttagcgaatggctctgatattcttcaagttgcaaagccagatccacaggat

SEQ ID NO: 206513 - DNA, 122 bp, Homo sapiens
ccggggaacgaggccacacgtgggcccgggtcaagcgtgaccggggaacgaggccacacacgggtctgggtcaagggtgtgtggaaagtacttgttctactcgtgcaacttctataaattca

SEQ ID NO: 206514 - DNA, 122 bp, Homo sapiens
tgtggctcccagggacatggaaggcctgtgttcctttcccaggaagcccccagcagctaccgtgctcatgccccagcatttcagggaccaagatctgtagccccattttgtgatctttagta

SEQ ID NO: 206515 - DNA, 122 bp, Homo sapiens
aggaggcggcccgcgctggttaaattctcacattataggcagggtggcgagaccccgccccggaaatgcgtgttctagctttctgtgtgcttaggtgcccgagctactgagggtctaagtcc

SEQ ID NO: 206516 - DNA, 122 bp, Homo sapiens
aatacttgttcatagccagctcagaggtgcaccatactttagcttcccacggccttcactcgttttctcctgtgggtgaattctaactaggctcgcctggtgagtgaacaatgatgccattg

SEQ ID NO: 206517 - DNA, 122 bp, Homo sapiens
ctgggaggagagaaggaaagacatgtatgaatctatccatgtctgcttgcatctggagaacgcctgtttatgttgtaaagaaaagccatcggtattgtcatctcaggagaccggcttgtttt

SEQ ID NO: 206518 - DNA, 122 bp, Homo sapiens
caatcccttttccaaaaataaccccctcggcacctgcccccttggcagctgctgcccgggcggtacctgtgccgtagaccaagcagccggagaggatcaagagtagccgcactgtcccaccg

SEQ ID NO: 206519 - DNA, 122 bp, Homo sapiens
ccagggccctgagcaaagcctagacccaggtgccagctgcccctgctgcatccttaggcccgtcgccgagtcactgagccagcatcaaagtggggaaagttgcccccagactctaaggcggt

SEQ ID NO: 206520 - DNA, 122 bp, Homo sapiens
gcagcggagcaccctggttgcccagtgcctctggggcctggctgaggcgtcaggagtttgcgtggagccgctcccggcagtcagggcagcctgccttccgctgcggctgcagtctccgcggc

SEQ ID NO: 206521 - DNA, 122 bp, Homo sapiens
accacctataatgtggactgtcattactatcccaggtctgcatcttgtccttgtggtccacgggaagcatgtccataaccaaagcctggaacagctcatcagtgaccatgttcatcctcctg

SEQ ID NO: 206522 - DNA, 122 bp, Homo sapiens
ccctcaagaggatttcaaagatggaggcggcggctccctaaaccacttttcgtgttcatccgcctccatccgagatcgaaacgggacctcgtcggccccgtaggggcccgacaagaagaggg

SEQ ID NO: 206523 - DNA, 122 bp, Homo sapiens
catggcattttattaacagactctccgagtttcactttctggctcaaaagcgtcctggtgcgtgtaaaggttattgagaaactggcctcagtccctagaaaggacccaccatctccatcgct

SEQ ID NO: 206524 - DNA, 122 bp, Homo sapiens
catgtggatggaccacgtttcacttgtccattcgcccatcagtggacactgggctgctttcgcctttggctgttgtgcattaactgctatgaatatgggtgtgcaaacagctcttcaagtct

SEQ ID NO: 206525 - DNA, 122 bp, Homo sapiens
gtggcgcgcgcctgtaatcccagctccccgggaggctgaggtcggcggatcgtgggtgctcgggggttcggagctacggcgctgtgtggagcgggcgtccgcaccgggcctggcaccaacat

SEQ ID NO: 206526 - DNA, 122 bp, Homo sapiens
caacaacttgtgtggtttctcgtctctctcagagtaaaagccaaaatcctgaggatagcccgtaactctatacaatctggtccaccatttcatctgtgggctcatcttcaatactaccctaa

SEQ ID NO: 206527 - DNA, 122 bp, Homo sapiens
aacggggatacaaatgtccccgagagaacagcggtatactgggatagatgaggatggtcacgtggtggagaggcgtgtttttggctaccagcccttcacctccgtcgaccttctcaactgga

SEQ ID NO: 206528 - DNA, 122 bp, Homo sapiens
gagacccaccagagaccggcagctactggctttctcctctcaactctagaagcgatgccacgggaggatcactggctgcaggtccctcccatcgcgccggacgctccccgccaggaccagat

SEQ ID NO: 206529 - DNA, 122 bp, Homo sapiens
ccgttctgtgcttgaggtcaggcgtgcccttgcgtagcacaatcgcggggaggggtggctcggtgccatccccctcttaacctcgggggcctgaggctcagcgtgaggcgcagcttgtcttg

SEQ ID NO: 206530 - DNA, 122 bp, Homo sapiens
tggctccagaccacccctcccctccggcccccccgcatagtccttcagtcccgtccggggcgcccagactgggggttgcccggggcccccatccccaatctccgggttgagaggcgaagcca

SEQ ID NO: 206531 - DNA, 122 bp, Homo sapiens
gacccaggcatagctggagtttgaagctttgaagcaaaaatatctgtagaacatcttaaacgtgaccaaaatatgatgttaaaatcagcaactctttatacgttaaaaactttgaaacctgt

SEQ ID NO: 206532 - DNA, 122 bp, Homo sapiens
cgtctgtctgtgtcgactgcggacgctatcgataaagttgctgttttgacaacatggcggcgcccatggtccgtggcccggcagtgctcgcctaaaggtggagaacgaggagtagaggagcc

SEQ ID NO: 206533 - DNA, 122 bp, Homo sapiens
gctgaacccgaggggagcgaggccacagcccatgagatgtaccccacacttcctctgccccgccccccaagcaggactgtgtctgtgtttttcagggtgtgctgctggagccctgggaggag

SEQ ID NO: 206534 - DNA, 122 bp, Homo sapiens
gaagtggggcccaagactctgcatttccaaccagttcctgggtgaggccgatgctgctggcgttcagaccacaagtagaacagcccagggttgaaaccgctccctccctctctccctacctc

SEQ ID NO: 206535 - DNA, 122 bp, Homo sapiens
aagaaccattacgatgcatctatgttttcccttaagtgcggaatttcacactgcagccctcgtcttcaaacacctaaacaatgcacctaggaccttcatttattattccgtgcccacccaca

SEQ ID NO: 206536 - DNA, 122 bp, Homo sapiens
tataacttttgaagtatctaagtgatcagttcctacaatgacatccttgagatatggccacggaactttccaaagcagccttggcctccttcatgtccagcaacctgagataaggccacgcc

SEQ ID NO: 206537 - DNA, 122 bp, Homo sapiens
ggtagcgatggacactctggatcgagtagtgtaagtgcgctgggtctcagccccggggagcgttggggtgaaagggtcccgtgatgagggtggtactgtctcggcctctcactcttcctggt

SEQ ID NO: 206538 - DNA, 122 bp, Homo sapiens
tgtccaaatttttgttgttgaagccccaacccctgagtcacagcctgttaggacctgggccgcacaggaggaggtgagtgagcattaccgcctgagctccacctcctgtcagatcagcagca

SEQ ID NO: 206539 - DNA, 122 bp, Homo sapiens
gctcgggcaaacacccactcacctgcattgagcagcactttgacacagtccagatgctcccgggcacaggcaacgtgcagaggggtcccaaaatggcaatcgtgcgcttccagattggcccc

SEQ ID NO: 206540 - DNA, 122 bp, Homo sapiens
gggggagcgctggatgactgccccccgagactgagagctgcttcctgctctctggttttccgggccttcacccaagacccccctaccccgcaaggtgcagaggggctctgcctgccatctgc

SEQ ID NO: 206541 - DNA, 122 bp, Homo sapiens
aaactcattatttggtttatgtagaagacaaatggatattgaagaatgaccatggcttatcgtaaaactcgtccagtgatgaattcaattgcagctgttgttaaaaatgtgctcaactctcc

SEQ ID NO: 206542 - DNA, 122 bp, Homo sapiens
ggccctcttggtgaagcctcccctgggcagctgggggctgcgggagggccagggtggccccgcagggcacagcccggcgcctgtccagggagaggggcctgtgggcaagggcagccctgcgc

SEQ ID NO: 206543 - DNA, 122 bp, Homo sapiens
tacctgttggccagggcgcagggcgcacggaattcgggtgactttgctccaagatacacgcgtgtgtcccgactctcactcaatttataggggagagggactcgccaaatccctgttttctg

SEQ ID NO: 206544 - DNA, 122 bp, Homo sapiens
accctgtgataaataatgccccttttcccagtctatatatgatgaatggtgctaggcttccgattagctttaattccaaacttctttatgacagattagtggtgttaccaaaatatcagagt

SEQ ID NO: 206545 - DNA, 122 bp, Homo sapiens
cagggccttgctctgccagggcagctcagggcagctccgacaaggagtggcccctttgaacgagatcctggagagtcagggttttcactccagctttaaaccagttgctcccaggccgccgc

SEQ ID NO: 206546 - DNA, 122 bp, Homo sapiens
taacgagctcacgtggagtctgagacgagacaggaaatttgtatgcacggcatgtgccttcggtgcccgggctatggaggaaagaacacagacagtcttcctgaggtggggcagacaaaacc

SEQ ID NO: 206547 - DNA, 122 bp, Homo sapiens
ggtgctagtctattcatatctgaatcctatgggagagatgctaactcttttcctagagcccgtaatgattcaactagttggaggattgctctggattgatggtgtattctttcaaaataatc

SEQ ID NO: 206548 - DNA, 122 bp, Homo sapiens
cacaggacggccaggccacgtgcccacgggatgaccacagatgagcttgccacatgcctgcgggatgaccatgggacagccaaaccacgtgcctgcaggatgaccacggatgagcatgccac

SEQ ID NO: 206549 - DNA, 122 bp, Homo sapiens
aacactgttagatgctaaatacccaaataaaaataatacatacgtcctgttctgcagacgcgtataagtcacagaaggaaacacaagtgacaggacaacagcaggttcagaaggataagtgc

SEQ ID NO: 206550 - DNA, 122 bp, Homo sapiens
actgcagggacttacccagccaggtgtgtgtgtctgagccctgccattcggaggcatcaccgagaggttctggtctcccctgcccaggccctgcctcctggccccactgcaggaagcttgag

SEQ ID NO: 206551 - DNA, 122 bp, Homo sapiens
cttccacattacacacttcttcctggctggcataaaacacacctcctctgtaaacaaaggcgcattgctttcccacgcctgtcttcacacctgccatcattcttacatttacacccaagcac

SEQ ID NO: 206552 - DNA, 122 bp, Homo sapiens
agttttgctctgtcgcccaggctggagtgcaatggcgctatctcagctcactgcaacctccgcctcctcggtaagaaaactgtcatgacagagaggttaagactctagtccaaggtctgtgc

SEQ ID NO: 206553 - DNA, 122 bp, Homo sapiens
gacaagtaaaggtgctacccctaagtggcctggcagataagagccagatctttctcttagcgaaggttttgtgacttctgtggagattctttcgtgggtctctctcttaaatcaccttgaag

SEQ ID NO: 206554 - DNA, 122 bp, Homo sapiens
gccctgggctgagccctgcacgtcagcagagcccatcacccaaccactcacctgaccccccggccacagggctgtgcccagtctacacagacacacagcagaaagaggatggccttcaggtt

SEQ ID NO: 206555 - DNA, 122 bp, Homo sapiens
tgtggagcagcactccttcgggtgtagaaatggcccagtccagcccgggtgacagaacatcggcggccttgaggtgaaaatgaaaaagaagtagaggaggagtggggaagtgggccgaggat

SEQ ID NO: 206556 - DNA, 122 bp, Homo sapiens
tggttgccatagctccgggcgttcgcttgcaagatggcggcggcggggcagtggctgctgcgttttcgtgtctgagtccttcctgggttctaatgagggcgcggttctgctgtgcccggccc

SEQ ID NO: 206557 - DNA, 122 bp, Homo sapiens
aactcgggggcagaggctcgactcggagggctgctcaggacattccaagacagccttggccgtttccatagccacggtctcttccagggtcttgccggccgctgcagccaagccacaggcgt

SEQ ID NO: 206558 - DNA, 122 bp, Homo sapiens
aagacaggctagttcataaacaaactgtgtaacttctcaaaatgaatctatttcataactcggacaatttctgggtggtgactgagtacccctttagtgagtacccctttagtgctatattt

SEQ ID NO: 206559 - DNA, 122 bp, Homo sapiens
tgtccccgtccgaagagtcctcctggctgtaatgaagcagcatctcactgagcagtctcacgttgttgttaacttcctctaacgtgtgcagacgcttggtcaccttctggatccgtgcctcg

SEQ ID NO: 206560 - DNA, 122 bp, Homo sapiens
tgcgcctggctctggcggggctgtccttttgcacctgcgctgccatattccctttgtctgcggttgtgctggagcctcagagcacatctcaggcacagagtccctaggacagtcgctgggtg

SEQ ID NO: 206561 - DNA, 122 bp, Homo sapiens
gaggcagcagtagaaacagtttgctccaaggaccaaacttattctggtgtgcagctcactcgcccctactcatctccagtgtatttcaagagtatgcagggaaggaaaaagtcaggctgagt

SEQ ID NO: 206562 - DNA, 122 bp, Homo sapiens
agccgcggctaagttcacgggcctgtccaaggaggagctgctgaaggtggcaggcagccccggctgggtacgcacccgctgggcactgctgctgctcttctggctcggctggctcggcatgc

SEQ ID NO: 206563 - DNA, 122 bp, Homo sapiens
ctcagaattcatgaattagaaacttagttgcccgtgcaaaagtgttgggaggtagggcctcgtgggaggtgtttaggttatgagagctgtgccctcatgatggttcaatgcccctataaaaa

SEQ ID NO: 206564 - DNA, 122 bp, Homo sapiens
ggcgctgccaggtgagcggggccggactcgacacaccccgggccccgcctcacctgcgggcgccgccgtcgcgttccttcaggcggctgccctcttaggctcggtcctcccggcgggcggcg

SEQ ID NO: 206565 - DNA, 122 bp, Homo sapiens
tccgcaccggccggctgctggatgcccagtggcctatttcagggccggagagaccgctatcgctggaggaaaaaggatgggggaagggagtgcagcctgcagaggcactagcggtagacaga

SEQ ID NO: 206566 - DNA, 122 bp, Homo sapiens
acgttctgagggtctaagatgtggacttagaaagctatccctcttgctctctgtggcaggcgcgggtttaagtggacgccaggtgcaccggacacaggctgtgtttaaccacaccgaggact

SEQ ID NO: 206567 - DNA, 122 bp, Homo sapiens
ttatggaggagcggcacggattgggcatgcgtcgtgtgtgttgagcaggtactgctggatcgctttccaaagtggttgtgcccgttcccactcccctcagcagcatttgaggaattctgatt

SEQ ID NO: 206568 - DNA, 122 bp, Homo sapiens
cagctcctccttgagcccccctgctccacttgtgtctttcagtgagctcttcaacccaggcggggcaccctggcattcaccagcataggtgagtggatcctgctgccatcgtgggccatggg

SEQ ID NO: 206569 - DNA, 122 bp, Homo sapiens
ggcgccagagggaccccgcggcccgcacgggcctgtcctcggctccgctcggagggtgtgcgggttcccgctccgctggccccgcttgcccaccacggcgcgcccaaacccacgcggcccgc

SEQ ID NO: 206570 - DNA, 122 bp, Homo sapiens
ctctttaatggtgtctcattgcttacacattacagttcaagctcccaaacacggaacacacgactccttcctcctgttcctaagaacttaaaatggtagtctcaattcttaccacttcctgc

SEQ ID NO: 206571 - DNA, 122 bp, Homo sapiens
ccctctgaccatcaacccaaccctgttctcacctgcagggcatgaagtgcagccccgaggcgctggcgagccagggtgtggtcaagggccctggctgccaccacggtctcccgcagagcccc

SEQ ID NO: 206572 - DNA, 122 bp, Homo sapiens
cccctgagccttggatctggaaaactgcagcccatcctggaattagggaacatcacaaaacgtactggggagaactccccatgtggcctcggcccacgccaggaggcggtcaaggtcccagg

SEQ ID NO: 206573 - DNA, 122 bp, Homo sapiens
cggcgtccctccttaaatgtccggcggggaggggcctgtgacctgaggccaccggactctcgccgcgggtgcacctggctgggcgtgggccagcgaggggcccggcacccccagcccgcggg

SEQ ID NO: 206574 - DNA, 122 bp, Homo sapiens
aacctgcacatggatgtttatggcagctttattcataattgccaaaacttggcggcaacccggatgtccttccgtaggtgaatggataaataaacagtgatacacccagacaatgcaatagt

SEQ ID NO: 206575 - DNA, 122 bp, Homo sapiens
cctgcatagccgctagtggtcttcctatggatactcaccttctgcatcccagactccaaccggctctcctcgccctccagcagcttcctgtaggtggcgatctcgatgtccagggccagcct

SEQ ID NO: 206576 - DNA, 122 bp, Homo sapiens
actgctgatattgaaaaggcatgtctattttctgagactgaacattgtaaaccatttagtcggaagactttcttagacctgttatgtcctgatgaattgtattcttaaaaaatggaacgtga

SEQ ID NO: 206577 - DNA, 122 bp, Homo sapiens
agcagcccgagggcgcccggagctcacggctggcgccgccccgcgcttcctgcctcgccgcggatcctcctccgcgccgtgacgcgccaggctttgaccaaatatgtccctttcccctccct

SEQ ID NO: 206578 - DNA, 122 bp, Homo sapiens
aaagccacatttctttgctctctgcaccccattcccgcgccggccaggttaagcctcctgcgtggccagcaccccttggcaggggcagaactccctggaacccgatccttgtctccatggcg

SEQ ID NO: 206579 - DNA, 122 bp, Homo sapiens
atccgcccggagtcggagcccaaaacagatcctcttctctgctcctcccctgtccccgcgcggcgaatggttcgcgccggcctatatttacccgagatcttcctcccggacggcaaggatgt

SEQ ID NO: 206580 - DNA, 122 bp, Homo sapiens
cacatgatgtgggttgtggccttccccctaaatgcaaatgagagcttgacaaagggaacccgcaggcagccagctgaggtcttaacatccaagtggatccttttgtgaaatccattcctctc

SEQ ID NO: 206581 - DNA, 122 bp, Homo sapiens
tctcacagcggccccggccacgacagtccccaggacagctgcgcacaccgcagtcctcgccgctgtagcccgcattgcaaacacacacgccgttctcgcagcgcccgcgacctctacagtcg

SEQ ID NO: 206582 - DNA, 122 bp, Homo sapiens
gcagatccggagtacagtggactggagcgagtcggcgacatatggggagcacatctggttcgagaccaacgtgtccggggacttctgctacgttggggagcagtactgtgtagccaggatgc

SEQ ID NO: 206583 - DNA, 122 bp, Homo sapiens
tgccaggggccagtgctgatcccagtgacagagcagcatgagtcactgcccgccagggctcgctagagctccccctaggacagttgtcacagcccttcacagcccagacttctttttaactc

SEQ ID NO: 206584 - DNA, 122 bp, Homo sapiens
cgccccacctgccacacatgcttatgtttctggggaccctggggttcgggacttgtgccccggagtggctggacctcacagggggccgcccaaatgggctgggaggcttcaaaggggaggtt

SEQ ID NO: 206585 - DNA, 122 bp, Homo sapiens
tgtgtatattccatgctccatttcctggatgaagtcatctgcgtgggcagcctgggcagccgccatcaccttatcatcttcgcagctctgcagcccataagcaatgttgttcctcacagaac

SEQ ID NO: 206586 - DNA, 122 bp, Homo sapiens
agcgcacgtacctggagcgcggcgggcgcccgattagcgccctgaatggaggtgatgtaacggtgatgcaggctccagcccaccctcgccgaaagcaaggagccctgcctggggacaggccc

SEQ ID NO: 206587 - DNA, 122 bp, Homo sapiens
aagaacctcagatacttgagtcctggtttgaatcccagaggcgcaatcccaggctggaggcgcctaggggaataagatacagaatacgagagtggtggaggctgggtgcggggggctcgcac

SEQ ID NO: 206588 - DNA, 122 bp, Homo sapiens
tggggcgatggggcagggtggggccaggcgcagtggagctgatggttggaggccccaggacgaagccgagcatcagtgctgggaagggtctggtccactcaatgcccggccggtgggacctg

SEQ ID NO: 206589 - DNA, 122 bp, Homo sapiens
aatcggttgaaggagaagctgctggcaggtactgcagcccgggtggggaccaggctgaggcggtcgctgcgagaggggaagcacattaggctttttgcgacgctcgtgattcaagagacaaa

SEQ ID NO: 206590 - DNA, 122 bp, Homo sapiens
caagacatctggtgactgctccattctgctccaattctcactcactctggctggtgaagccgcttcaggaacaacaccagctaagcaggagggcatttggtttgggggaaaaatgacctatt

SEQ ID NO: 206591 - DNA, 122 bp, Homo sapiens
cgcttccatgtaaatactgtgcaaatccccgcctttgacacaggcgaccttcgctcggctcgctctccctgctggcctgggaacttagcgatttggaacccactacgtggacgatagccttg

SEQ ID NO: 206592 - DNA, 122 bp, Homo sapiens
gttagggacagtatctcgtgggaggtgtccgcctgctgcgatattgggagtcatatcatccgctcccacccaggatattaggaacaagatgaccgaagggatgtacacccactgtgctattt

SEQ ID NO: 206593 - DNA, 122 bp, Homo sapiens
atttgctgtgggcaaatcggacccatgagcccagagagcatcatcccgggaaagctttcccgaagcacaggcttccctgcaccaccatacacgcgcacacccgcacgcgctcactcccccag

SEQ ID NO: 206594 - DNA, 122 bp, Homo sapiens
tagtgccctctggagcactggctctgcgaaaaatgggattgccagccaggcgcggtggctcgcgcctgtaatcctagcactttgggaggccaaggcgggtggatcacctgaggtcaggagtt

SEQ ID NO: 206595 - DNA, 122 bp, Homo sapiens
actagaaggctgttacattgttggtagcaatgtaaaatgcgacaacccatttggagaggtcgctttaatgtgtagccaaaggcatgaaaacattctcacgttgttcgccagtgatccaactt

SEQ ID NO: 206596 - DNA, 122 bp, Homo sapiens
tttaccagctatctgggcatcctttagctcagtcaagttgacacataaaattaatcattacgggctgggcacagtggctcacccctgtaatcctagcactttgggaggctgaggtgggggaa

SEQ ID NO: 206597 - DNA, 122 bp, Homo sapiens
caacaagccaggaagtaccgctgcatcgggggtggttcgcctgaagaagaccgccactgccggagccatctcggagctcacggagagccgcctgaggagcggcacaggtaggagggaccggg

SEQ ID NO: 206598 - DNA, 122 bp, Homo sapiens
acctcccatccagccctgacctggcaagtcccctgagcctcccgctccttggccagggctcgtcctgagacgggccagccaccagcactcactgtgcccgcagctgcaccgaggggagggat

SEQ ID NO: 206599 - DNA, 122 bp, Homo sapiens
gatcagccaacttgagcagcattcttgtcaattaatggcacatgtgcgagcatgacagcccgtgtgacgtggagatgcatgaatgtacacgcaagagtgtggagcctatagctatgggtatt

SEQ ID NO: 206600 - DNA, 122 bp, Homo sapiens
tcgttggcgcagctgactcgccacctcctccctcctcgtccccccaccggaggagttttgcggtctgtagagagctatgcagggtgagggcccctagacttcggctttcgccgctgttggtg

SEQ ID NO: 206601 - DNA, 122 bp, Homo sapiens
gaggagaatcccctcagacagcgggcagggcaggataacaatctccggaattcccaagcccgtttccctcactcaatgccttctcttctctagccccaggtggctcagtccaaagtaacaag

SEQ ID NO: 206602 - DNA, 122 bp, Homo sapiens
atggaggatgagatggaccggctggccaccaacatggcagtgatcaccgacttcagcgctcgcatcagcgccacgctgcaggaccgccacgagcgcatcaccaagctggcaggtgggcgctg

SEQ ID NO: 206603 - DNA, 122 bp, Homo sapiens
ctcctcagctcattttcagcagcttcattcaagaagggctggctcccggcaaaacgcccccgtcctcgcacaaaacctctgagatgccaccagtccccggcgggctgagcctggaggagttt

SEQ ID NO: 206604 - DNA, 122 bp, Homo sapiens
cgttcccgccccgggcggcccccaggagtcgttttgggtccctaaatccgttgagggttccgaatctgtcttcatcagccaggattacccgggatttaactaatgaataaaggttcctcagc

SEQ ID NO: 206605 - DNA, 122 bp, Homo sapiens
gccctggagccccccagcccagctgcagcgaaatgctggcgcgccccgccccaccatggacggggccggtgatttcgagctgcctttattgagcatttctttgaccctccctcacccaccaa

SEQ ID NO: 206606 - DNA, 122 bp, Homo sapiens
tagatgttagagggagtcagggatagagttgtaacctagaaccaccaataaaagttacagcgacttatttatttttaccttgttttctgggattgcagattagcttatgttcaagggatcta

SEQ ID NO: 206607 - DNA, 122 bp, Homo sapiens
aatggttatggtatacctgtttgaagtatttggtatacatctgtgaaccaaacatgaaatcgaccctgccctcgggaaggctcatcaccgagcctactgatgaaggaacaaatgagatggaa

SEQ ID NO: 206608 - DNA, 122 bp, Homo sapiens
ttcatcaagcccttgcatcattacacgtgcacatgaggctcagctccattaggtaatagacgtgctgagagagacaagagaagagaatgtgactattcttccaagatttacactggagcatt

SEQ ID NO: 206609 - DNA, 122 bp, Homo sapiens
actgacctcctgtcgtcacccgaagggaaacacgcctggccgctgaccttctgtcatctccgtgaagggaaacacgcctggccactgacctctgtcgtctctgtgaagggaaacacgcctgg

SEQ ID NO: 206610 - DNA, 122 bp, Homo sapiens
ggacacccttggcctccaagccagccttgaacccacctccctgtccctggactctactcccgaggctctgtacattgctgccacatactcctgccagcttgggggagtgttccttcaccctc

SEQ ID NO: 206611 - DNA, 122 bp, Homo sapiens
tcagtccatcttccagatcattcattaatgcaattctgtggtgatgtggtttttacattccgttcaatcctgacagcattttaaactctggcctctgagtaaaaatctcagtacaggtccca

SEQ ID NO: 206612 - DNA, 122 bp, Homo sapiens
tacgcaggaaaaagaaatgcagccatggaaacgaggaagagagctacgcagagggcagctcgtgcctgcagggcaaaaatgttagcacattctagccaaaatggatggtgaagtatagtctg

SEQ ID NO: 206613 - DNA, 122 bp, Homo sapiens
ctccaatccagttgctcttctttcttttcctcactctctttttcctcgcgtcctttgccccggaagtgctcttacaacattggctgccggcgtgactttgaccgcttcccggtgcgttaccg

SEQ ID NO: 206614 - DNA, 122 bp, Homo sapiens
agatggctcatggagggcccaagatgatttcagaatggaggctggccacaccagaagggccggccaaccatgagggcttaggctttgagtcacataagcaggcccacctctggggagcagat

SEQ ID NO: 206615 - DNA, 122 bp, Homo sapiens
gcgccggccccgcgggctccggcttttatgcaaggagggtggggcggccggcacaggccgcgcccccagcccgagccccccagtccccttcgcgctggcgctctccaggcccggctgacgta

SEQ ID NO: 206616 - DNA, 122 bp, Homo sapiens
tcagcggagatgcagtgcctgtcaagggtttggcttgcctgcagccatacaagatttttacgagcctcaacaatacgataaacactacacacctagctcccaggatgggctctcaaaattgc

SEQ ID NO: 206617 - DNA, 122 bp, Homo sapiens
tgcatctgccagagctccacacagctgcagacacctgtggcttcatctgagtcctcatctcggcctctgggaaccactccttcctaccctttgcctggagacagtggaagccgagggacatt

SEQ ID NO: 206618 - DNA, 122 bp, Homo sapiens
cccgggcgacggtggccgctgagagacaaactaggcccggccgttgggcggggctccaagcgggggcggggcttccggcgggggcggggccaaagcaggcggcggaagagacgagaagcggg

SEQ ID NO: 206619 - DNA, 122 bp, Homo sapiens
ggagtggccataccccatcatcaataataaacacacacactggtgcatctccagaaagcacgtgtgcagttctgtgacttctttcttctgctcccagggcgctggaggccatatgtcagtag

SEQ ID NO: 206620 - DNA, 122 bp, Homo sapiens
tggcacctgcctgtagtcccagctactctggaggctgaagccagaggattgcttgagccccgcctcttaaaaagaaaaaaagagagagagggcagaaggatgcttcaaagatgagggggtgt

SEQ ID NO: 206621 - DNA, 122 bp, Homo sapiens
accatcccttatcctaaacatcaccacctcatcatgaattatctttgccgaccacagttccggtcctaccaactgcaagagctgctagggagatacctcccagaaatcctcagccgggcaga

SEQ ID NO: 206622 - DNA, 122 bp, Homo sapiens
ttatgagctgtaaaactcaccgcgaaggtctacagcttcactcctgagccagcgagagcacgaacccaccagaaggaagaaactccaaacacttctgaatatcagaagaaacaaactccaga

SEQ ID NO: 206623 - DNA, 122 bp, Homo sapiens
gacgcgcagcgcgctgccgggacaccggtgcgtgcgaaacggaggacctttgtaacgccacgtgtttgctctttttgaaaaaacaagaataaatgtgttaaactgtctgaaaagcttgccgc

SEQ ID NO: 206624 - DNA, 122 bp, Homo sapiens
tacaaaacacttggggtggcctcagattaaattgaattctgctgctctctccccactctccgccttcatttccttctttcctattctcgtcaaaagattgtttcctctgattgttatcaacc

SEQ ID NO: 206625 - DNA, 122 bp, Homo sapiens
gggccccgcccacaagcccagcctcctccctccccgcggaccctgggcctcgtaggagggcgtaccctactccagggacctttaggagctttcaggaatctgggctacgggaccgcccacat

SEQ ID NO: 206626 - DNA, 122 bp, Homo sapiens
gtccatggtcctgacacgccccgcaccttctaccctgcccttctctccgggggtacccaacgtcctggctatctcctgcccaccctgtgcccaggaaaggccagggagaggagtcagggtcc

SEQ ID NO: 206627 - DNA, 122 bp, Homo sapiens
atttgtatggtcaaaggattaattgggatgtgcttaaaaactggcttataatgaaggcttcgtacgtctcatttaaataaatgagaaagggaaaatagaaacaatgtaccccagagttttcc

SEQ ID NO: 206628 - DNA, 122 bp, Homo sapiens
tctcctttgctagattgaaagatccctgaggacagagaccacgtctgtattggaacatcccgtatcacctctgcaaaacgtcagtatttgttgaaggaattaaaggcagaatgaatcaataa

SEQ ID NO: 206629 - DNA, 122 bp, Homo sapiens
gacgccccgtctggtagcatcccagatccagcacgttccttccggccctgcaccccggcccggtgcctcacaccccgctaccccatgcatccagactctaaggcagcccctgcatctcagtc

SEQ ID NO: 206630 - DNA, 122 bp, Homo sapiens
cagcgttagttaacggttaacccgccaaggcgggcttccgcccaggcacaggagactcaccgagcttgttcaccttgaaacttgggccacacctgagacctgccacctaaggggggtacgcg

SEQ ID NO: 206631 - DNA, 122 bp, Homo sapiens
aaggccctgagagggaagtcacccacctcccaggtggcggaccccccgcccgcccagggtcgactaggacttgggactaccccctccgcccatcccacggcagctgcaggcgcaggaagaaa

SEQ ID NO: 206632 - DNA, 122 bp, Homo sapiens
ggaaatgtgggggtccggaggaaatgtgcggatcaggagaagtgccagtcccgagatgtgcggatcggagatgtggagggctaggagatgcgtgggtccggagatgcgcagatcaggagatg

SEQ ID NO: 206633 - DNA, 122 bp, Homo sapiens
gcgggggacgggcgtccggtgcctgggctctctcctctccctgaggcgccgctggggagtcgaaccctgatgatgggacctgtggtgagcagccctgaaagcaagcccagacccagccattc

SEQ ID NO: 206634 - DNA, 122 bp, Homo sapiens
tcacagctgagaaaactggggctctgagagccattaactcagtgttaagtggaagaattacgggtctgtgccccagactctgtccttcaacgcacactggctgcgtctgcttcagggtggat

SEQ ID NO: 206635 - DNA, 122 bp, Homo sapiens
ctcgtttggacaactgtgtggcctccggagcaaggtacccaaacccttgggcctcagtttcgtcgcagttgttatttgaacccactcggcctgggacgtgccagagcttcacactttaggtc

SEQ ID NO: 206636 - DNA, 122 bp, Homo sapiens
ggacctgccagcaagaccagttcagaagtcagaaagatcccccttcagcttcctctgccacgtccctgctgtcagagcttcctttgaggaaccctttgctcaccctgacaatggaagttaag

SEQ ID NO: 206637 - DNA, 122 bp, Homo sapiens
tagctaacaccccggtcccaccgctgtcccacggccggcaccccgatcccaccccagtcccgcagctggcaccccgatcccaccccagcccaacagctggcacccaccccgatcccaccgct

SEQ ID NO: 206638 - DNA, 122 bp, Homo sapiens
cgggtcacgcggcgccgcgtgcgccgcccgccgggctgactcagcttggccgcagctacccggaccgactctcccaggtggaggagttccggccactcagtcccacctcggtccctggcccc

SEQ ID NO: 206639 - DNA, 122 bp, Homo sapiens
ccccatctgtagagtggagatataatgcacaccctttaaggagttattgtgaagagttaacgtaggtaacgagctcattaaagatgtggattatagtaagcgctcagttaaaggtcgtcttt

SEQ ID NO: 206640 - DNA, 122 bp, Homo sapiens
ctttagaaccacacccacccctgccttccaactattaatgctggcaggacttagccagaccgcaagggcgcctactccgaacaaggaagagggtcaggcgctgggagggcgactgcaagcgg

SEQ ID NO: 206641 - DNA, 122 bp, Homo sapiens
tccctaacagcgaattccaaggcgcccgtgtagcaggagaggagcaagtcggccacgatgcgtgcactgtgcatcagggagacctgcagctccgagctggggttcagcaggaactggtcccg

SEQ ID NO: 206642 - DNA, 122 bp, Homo sapiens
aggctccgctgggccccgcaccgctggcccggtctgcagtgaggtccgcagcctgagcgacgccggctggagggccgcttattgtccctgtgacagggccccactggagagactgaggacct

SEQ ID NO: 206643 - DNA, 122 bp, Homo sapiens
gggaagccacggggccccggtgcaccaagaggccgaatgggaccctgagggcactctggccgcgtccggctcacgcgcccccttcagcgccaggtctgggggatccgcgcctgcgccccggg

SEQ ID NO: 206644 - DNA, 122 bp, Homo sapiens
gcgcttcgcgctgccgcagggcctgctggccggggacccgcgcgtcgagcgcctggtgcgcgacagcgcctcctactgccgcgagcgcttcgaccccgacgagtactccacggccgtgcgcg

SEQ ID NO: 206645 - DNA, 122 bp, Homo sapiens
ccatgcctagcaccaaagaacactttagtgggagaagctatatatgttaaacattgtcaccgaagaatccttgctctaaggcagattacctaaggggcatgagaggactctgtgctatggac

SEQ ID NO: 206646 - DNA, 122 bp, Homo sapiens
gcctaaagtgtgccacttgaccgattttgagacctgtgcacactgttgaacgcatctccgcggtcgagatcatgagcttccctccacagcctccgctgtgacacgttgaccatccctccctg

SEQ ID NO: 206647 - DNA, 122 bp, Homo sapiens
gacgcagggcgcgcccgggcggtgctgattggccggaggaggccagccgggggaaacttccgggaatgtccgcactcccgcgttccacggggcagcatccggcggcagcggagcctgtggct

SEQ ID NO: 206648 - DNA, 122 bp, Homo sapiens
cggggcgctggcttggggaggctgtcgggggggccccgacatccatggcaaggcgggggccgcggcggcgcgctcggagtaagtcggggctggggacccgcgccgaggggaagtggccggag

SEQ ID NO: 206649 - DNA, 122 bp, Homo sapiens
tcggaccggcgctggtgacgccagctccggggattacaacaggatggattgtgcgggccccgagtggcattttccaacctcggccaggggcttccgctagaggcgcctgcgatctgcagact

SEQ ID NO: 206650 - DNA, 122 bp, Homo sapiens
aggcgtgttcgtcagctcttcgttttcagaaggcaagaaaacgtggcaagatttctatgccgatcaaaagggagagcgttgacatatttatgcaataaattattccctgctctatacattgg

SEQ ID NO: 206651 - DNA, 122 bp, Homo sapiens
ccagagcaaatgcctgcagagggctggaccagggctgctgggacacacttttaaatcctgcggtggggagagagtgacaaatttctgaagtgaaatgtgagagaggagagggaggggttaac

SEQ ID NO: 206652 - DNA, 122 bp, Homo sapiens
gcaaagaattattaacatgcctaataggagccctaaaaactaatccaggtctgcaaaagccgatcgacaactctgtagtgatttagaagagaattgcaagacattaacacagagcgtcctaa

SEQ ID NO: 206653 - DNA, 122 bp, Homo sapiens
aatttattccttctgctgggttgttggtctcgccgactttaagaataaaaccacggacctcgcggtgagtgttacagctcttaaagatggcgcgtccggagtcgtctgctcctcccggtggg

SEQ ID NO: 206654 - DNA, 122 bp, Homo sapiens
aattgactagttttgactttgccttatgttcccatttgttttctctgttctttacatgttcgatgttcaccataatcacttggattaaaatgtgtggattagtttttggagatagggacctc

SEQ ID NO: 206655 - DNA, 122 bp, Homo sapiens
cactgcctctgatactgtccagactcattaaacctgcctggccagcgctgtcaccaaggccgacagactgccagccagcatccttcccctgaggcacagaaactgccccctacccccaatca

SEQ ID NO: 206656 - DNA, 122 bp, Homo sapiens
agtgggagagtccctggccccagggtaggacacctgcttaaagaagtttgtgacagttagcgtggctggacggaagccagagaagctgcaggcgtcgtccccactactcgcccggtcctggg

SEQ ID NO: 206657 - DNA, 122 bp, Homo sapiens
attcacgcccgcatcactcgattcccacaacactcatcacccacaagtgcagctttcaatcggagctgaacgagagctaactaagaatgagcccgacaagcaccgggaacaccaagcacagc

SEQ ID NO: 206658 - DNA, 122 bp, Homo sapiens
gggccctagtccagtcctcccacaagcacctttctgaaggaaggggcccgctgggaggcccgggtgtgggcatgcctagcctatctgtggccccttaccaagtcctctgtcctctgggtctt

SEQ ID NO: 206659 - DNA, 122 bp, Homo sapiens
tctgcctcgcggctgacccctccagcggcggctccgggggtggggtccacgatgccccgccgcccactccctgccccgcctggcactgtcctcgccctgcattggctgtctcgttgaatatg

SEQ ID NO: 206660 - DNA, 122 bp, Homo sapiens
actggaggggcacagagataaacccactcagccttggcctccaagactaacagaacacaacgtttccctgaaagaataaaaaaaaaaatacaggcataagaaaacacacaaacatgggctta

SEQ ID NO: 206661 - DNA, 122 bp, Homo sapiens
ctgggggccgcagctgcgagacgcagttccccagcctcagtgcaggcgcgcgggcttacgcgtgggggtgggggagcacacagatactgacaccctaatgcagtccagggcacaggtggaaa

SEQ ID NO: 206662 - DNA, 122 bp, Homo sapiens
agacacccccacccccatggaatgctgtggcagtgtgcagctgcagctgggggagcagggcgggtcttctgggtctcagggaagcgagatctgaagtgaggggggtgaactggatgggacag

SEQ ID NO: 206663 - DNA, 122 bp, Homo sapiens
gagggaaccggatagggtgccaggaaacccttcagagcgcatgtccttatgagctggagacgaagctgagcaaagtgtccacacacacgtgcaccctcgcacacgcatacacatatgggcag

SEQ ID NO: 206664 - DNA, 122 bp, Homo sapiens
cctgaaattctcgactctttcggataaatttctattaaagtgaacgtcaagtcagtcttacgcctcttgaaggaaaacagaaaagaaattcctgtaagaggttgagatgggtgtgagtggtc

SEQ ID NO: 206665 - DNA, 122 bp, Homo sapiens
gtgagggacaggcggagcgacttgcggtgcctgggattggatcacgggcttgccagttcacggtgggaacagccaatagaagagttaagaaagaaggtgggcgagaattatttgcgcgcctg

SEQ ID NO: 206666 - DNA, 122 bp, Homo sapiens
agaggagccggggtctccaaacactacaggctggggtcccagggcaagggactgggccgccggcggaagcgtcggggagaggcgggactgtcggcggggtgtgggagaggcggggcgtggga

SEQ ID NO: 206667 - DNA, 122 bp, Homo sapiens
aggggccggcgcacggtaggtagttccctgcggctggaggcgggtctggcgcgggctgggcggtgctgcggggccgcgggacagcggagcgccgggaagggggctgccttaggggtccaggt

SEQ ID NO: 206668 - DNA, 122 bp, Homo sapiens
cagcagtgaaagcaggacgagaactttgctgcaggtacggacaggccttgggggcttcatcgtggctccagtgtctgccaggaggcttctgaactcgacagcaagtggggaatggattagta

SEQ ID NO: 206669 - DNA, 122 bp, Homo sapiens
tcctggcagctccaactccttgcacagtcttggtctctcaggagaccaaggcagtcaggacgctacagggcacgggtgtaagcgcgacgttcgcggccagccctctgccttgccccactgta

SEQ ID NO: 206670 - DNA, 122 bp, Homo sapiens
aaagacagtgcatgtctgtctctgtgttcagatatcccctaaggtcattttcagaggaaccggaagttaggacatcaacatatcattttggggagacacagttgaacctgtaacacccagtt

SEQ ID NO: 206671 - DNA, 122 bp, Homo sapiens
tgttcattggtttctgaaatttcaccataatgtgccttgatgtgagtctgcctatattatcgatctttagatcttgacaagttagagggttggtaagcttaacaactttagtgttgtcttct

SEQ ID NO: 206672 - DNA, 122 bp, Homo sapiens
tctgctgttggagatgagccgagcttcccggttaaccgtggctggctgtggggcatggggcgaggcatcctgtggaccttagtccctcttacccgggggaaagcacccaggcagctcaggcc

SEQ ID NO: 206673 - DNA, 122 bp, Homo sapiens
gacccaccggcgactacagcttggcacacgctggggtttctgcccatctgttgacacagccgaggccgccctgcgcccactccgagctcccgggccctgcgtgtcttcccacgtggaggccg

SEQ ID NO: 206674 - DNA, 122 bp, Homo sapiens
ctggggagggtgaggtcactcatcgagctttgctgttgggaatttcccacatggggtcatcgacattgcaacactgatgtcatggcattggcacctgccttttgacatgtccttgttttgta

SEQ ID NO: 206675 - DNA, 122 bp, Homo sapiens
gctcgcggggccacgcgtgatcggcgactgcccggcagcgtgaagctggtgtcagtggagcgtgtacacaatccccggcagcgtgttccctctgccctgccccggggaactccagaggccac

SEQ ID NO: 206676 - DNA, 122 bp, Homo sapiens
attccacaccagaaaagtaagcaaatcttgttcttttggctgcggtatagtactccgtttcgcagagatcccatacttgatgaactagtcctgccttttaggttgtgtttggtcttttgcta

SEQ ID NO: 206677 - DNA, 122 bp, Homo sapiens
caggtgggtgcgttgataatgtatctgttgcagacccaacaaaatcagcacataagagcccgggagcccagaggccaggaaggatgagcaagtggaatccatggggaccctggcagcctcag

SEQ ID NO: 206678 - DNA, 122 bp, Homo sapiens
ttactcttgccattccctctttttaaccctgtcttccatacagcaccaacctcctagcatcggtttcctagaggtgcagcttccttagcaaatgatatattccatgctaaggcaggtggaag

SEQ ID NO: 206679 - DNA, 122 bp, Homo sapiens
atttgtctgtctgccaggggacaatacgccctagcccagctgatctgtctgtccagcctgcggcagagtgcctgagaggggagtgcttggctctgcctgtctgtggggccgcccagccagcc

SEQ ID NO: 206680 - DNA, 122 bp, Homo sapiens
cattccgggttgggagggcagggtgaggtcctgcccttccctcactgctgagggcaaaggcggttactactgtacacaaccatcaagggctgccattgtcagcctggacccagggaagtccc

SEQ ID NO: 206681 - DNA, 122 bp, Homo sapiens
ccttctcccaggccccccctcccggccggagcttggcctgagctgtcaaaaccccgcccccggagacccacaattggtccaaaaagcgtaaaatcagcaatcaaggggggcctggctcgtta

SEQ ID NO: 206682 - DNA, 122 bp, Homo sapiens
ttgaaccctcctaggtctcctcgccccgcccactcgctgggctgcagcttcctaccgttccgtactttccactcaacccggtaaccccaaacgtgcacggtccggccggggcgcgcggagcc

SEQ ID NO: 206683 - DNA, 122 bp, Homo sapiens
actagataggtatgctcatccttaaccttctaggagaaccggagccttaccatcaaacttcggaaacggaagccagagaaaaaggtagaatggacaagtgacactgtggacaatgaacacat

SEQ ID NO: 206684 - DNA, 122 bp, Homo sapiens
atataaaagataaataataattccaaggaaaggaatagagcagcttctcagataccacgacgccaagcggctcaaagtacgcgaaccgaaggaggagcctttgctttccccaaccccgcctc

SEQ ID NO: 206685 - DNA, 122 bp, Homo sapiens
aaagcacccgggaagcaactggctacaaaagccttttgcaagagtgcgccctctactggacgggcgaataagcttcattgttacaggcctcgtagtgaggcacgattcgcaaacttcccttc

SEQ ID NO: 206686 - DNA, 122 bp, Homo sapiens
caatatataatcagagccccaccccacctcagagtacagtgatcttctccaagcctgcagcgcctcagttaggaaagtgaaagcttgcaaaaggcattggggcaacaaaatagtctctattt

SEQ ID NO: 206687 - DNA, 122 bp, Homo sapiens
ggcggagatgagcaggcggcggtgtgcggtcccagggtccagggtcaggtcggctggagacggggaggcagggagaggacctcatgagagagttttctaaatcacaggcggggtagggtgga

SEQ ID NO: 206688 - DNA, 122 bp, Homo sapiens
gaattttcttactttagaataatatattctctcttttaaataatcaagagttaaatgttgcgtgaaatattagagaagatgggagcttaatttctactgaaaaatcaggtaagaggaaatag

SEQ ID NO: 206689 - DNA, 122 bp, Homo sapiens
tgggtcaggccaggtcctctggccccgggatggccccgagcgcctgctgctgctcccctgcggccctgcagaggaggctgcccatcctggcgtggctgcccagctactccctgcagtggctg

SEQ ID NO: 206690 - DNA, 122 bp, Homo sapiens
ccgctcctctcgcggctgcgtcattatccccgcccactactccaactccttcttcgacttcggccaactcctcagtgctgtcggcagctgacacaggggctgcggtcacactcgctccctcc

SEQ ID NO: 206691 - DNA, 122 bp, Homo sapiens
tttaattaatttttgtttaaaataagcacatgcagggagcagcactgtgctggacagtgccgttttaggctctgtaaccaacatcagaggactttttccttttcttgtcccacggcaacctt

SEQ ID NO: 206692 - DNA, 122 bp, Homo sapiens
gactcgagtgagctgcaggaggccgtgctgaccgagtctcctctcctactggaggtgcggcgggggaacgacgacctcctcttcagcatcgcacctgaggtggtcatgtgaggggcgcattc

SEQ ID NO: 206693 - DNA, 122 bp, Homo sapiens
agtgatccacccacctcggacccccaaagtgctgggattacaggcatgagctaccacacccggccaagtgaattcattcttaaccctatgtagtaggtactaatggtatgtacacctgtgtt

SEQ ID NO: 206694 - DNA, 122 bp, Homo sapiens
tgcattttaggcagcacattactgatacatttgaagaaatctatgtacccctaaggactgcgtcttcctcctagccactgttgtgacttgtatgacaaacatcccttgctttcctttatagc

SEQ ID NO: 206695 - DNA, 122 bp, Homo sapiens
tcctcatgggatgcctgaatgttataactggttcccagccctgaacagcacctgaggaagcggtgcgtgagaggactggaggactgcccactctcaccacaaacctctgggaacctaataca

SEQ ID NO: 206696 - DNA, 122 bp, Homo sapiens
gaggtgtggcaggaaaatctgtccttgctctgaataatattgacatgtcaggagctgacacgacggccaggctggtcatattaaaataaggaagcagcctccccacctggaaagaacacaga

SEQ ID NO: 206697 - DNA, 122 bp, Homo sapiens
gggctgaggccccaggtgacagacgttttccagtctacgctgcgcggggctaagcctctgcgaggcagagcgcactaaagcgtgcgccgcctccgggagagctgagctcaggacagcatcgt

SEQ ID NO: 206698 - DNA, 122 bp, Homo sapiens
agaggctccagttaccttttgttaagataatggcgtctttactggcagaggcgtgggttccggggccctgggtgtgggattgtgagcgctgttcaaggggtggacggggacttagaatgaga

SEQ ID NO: 206699 - DNA, 122 bp, Homo sapiens
agcggggtcaatggagggtcatttactctcctggctgagcttttacggctttgccgcccccgccaccatcaagcgccttacgggtagatgactttttcatctccatcgccccgcaaaggggg

SEQ ID NO: 206700 - DNA, 122 bp, Homo sapiens
ccgccggaagcccatcatgcacaggcggcacttgaacgtgaagctgtcgtagtctgtggacgtgatgcggggcttgaacgtcttggagcggctgatgcggtcggctttcttggcctccctct

SEQ ID NO: 206701 - DNA, 122 bp, Homo sapiens
tcacgctgaatggcttcttcctcggcatggcccggaccagtcacctggcccgccctccgccgagctcccgccgcctcaactgactgccccccggggcagcccccgccgcaggggcccgggac

SEQ ID NO: 206702 - DNA, 122 bp, Homo sapiens
attatcaagactttttttttttttttgaaggacaactctttcaagccaaatttaaaacaccggtggggcagattggatcttggtctcccatttgtaacttcttatttacttctttgtaattt

SEQ ID NO: 206703 - DNA, 122 bp, Homo sapiens
ggagatcgaggcatctgtgttgtggaaggaaaacacaaacgagtcagaggtcccccaccacgggcaaaagtgcctctcgaccgcacatgcgtggggcccagggcaccctgagcatccatggc

SEQ ID NO: 206704 - DNA, 122 bp, Homo sapiens
cttgtgtgaaccaatatcagatttctcctattagattgcaattctcagggagtcacattccgtctccaaatgcccatctcctgatccacaaaatgagcacaacatctctgataaacggtaac

SEQ ID NO: 206705 - DNA, 122 bp, Homo sapiens
ttttctactcttttaataaaatttggctttccttatacaaatctgactttaaaacaacctcgcagtgggggaaaaaagatatttttggccagtcaacatttcctctcaccttcagcatctca

SEQ ID NO: 206706 - DNA, 122 bp, Homo sapiens
tttgagtgattctgtatactgatagggaatatcaagagtgttactgggttttgtgaatcacgggccttgaaagtattattaatgaataaatgacataatcaatagacaaggtagaaatgaat

SEQ ID NO: 206707 - DNA, 122 bp, Homo sapiens
gctctggcagcagtcggggccgcttgggatcgcggctctgaagggcttcatcgcagcgctcggaaatctccctcaggatggcgtccacttccgcgcaatcctgccccgcagcgctgaccaac

SEQ ID NO: 206708 - DNA, 122 bp, Homo sapiens
tatataaagtcagaaataaacccaagtaacccagccgcctgggccaggtggtatctggcccgccccattccagcctgaactccgcccaccgcgatccggaagcctagcgcccagtgggttgc

SEQ ID NO: 206709 - DNA, 122 bp, Homo sapiens
gcgggggcggcggcggcggcccgcgggtcatgatctccgccgtgtccagcccgtggctcacgcagctctcgcatttctgcgacgttgcagccttcacggccagcagcctgagcagcctgggg

SEQ ID NO: 206710 - DNA, 122 bp, Homo sapiens
tggaactctaaaacactctactgctaccccaccagctgatcggtatgcaaacaaggccagcgggaagctgaagcagatgagatcaggtaagaaaatcacgaagtgctctaagccaaagtgag

SEQ ID NO: 206711 - DNA, 122 bp, Homo sapiens
ggaggctctcggcagcctggtcctggtagtccccgggctccctccccttcagctcccacgcggggccctggactggttcacatctctcagggaattgcacacctactgtgcgcctgtcactg

SEQ ID NO: 206712 - DNA, 122 bp, Homo sapiens
cggtggagacgctgtgggagaagtacccgctagaggcttcactcagggggctggggggcccgtcctgtgcctccggagccggggtgaccgctgtgacagctatgacaggcggtggggaaggc

SEQ ID NO: 206713 - DNA, 122 bp, Homo sapiens
cttccgctctttcgcccaggtgccttggagccgctgctctcgcctcccttctccacctagcggcggtgtttcacaccccggagtggctttttggggataaaggcacaaatctttgccagacc

SEQ ID NO: 206714 - DNA, 122 bp, Homo sapiens
tgatgaccaccctttgtgactgcatgagtcactctgcctttggatgagggatttggggcccgaggccactcagagaacatctccaggaagccttttctaactccccggactgtgagatggcc

SEQ ID NO: 206715 - DNA, 122 bp, Homo sapiens
ttgcttggtgctcaacggaagccgagagataccacggggccaccgagaggcgtgctcgggcggctcgcccccgccggagcctttggcgtgtgccacctagtggtgaaacctggctactacag

SEQ ID NO: 206716 - DNA, 122 bp, Homo sapiens
ggaccccagggcgccctcggccctgcgaggtccccgccctctcttccgtctcctcctcaccgccctcctgaggcactctgatgcgggcgggcatctctgccgaaaacacctacagcgcccgc

SEQ ID NO: 206717 - DNA, 122 bp, Homo sapiens
tagccccattatttactcagacaacggtgcaggcagcctgggctccctgcttgcgcggggcgctgtggagagcaccatgcatcaccagccggcccgggcgcttcccttaaatagtaatatgt

SEQ ID NO: 206718 - DNA, 122 bp, Homo sapiens
cctcacttgggaagcgcaaggggtcagggagttccctttccgagtcaaagaaaggggtgacggacacacctggaaaatcgggtcactcccacccaaatattgcacttttcggaccagcttaa

SEQ ID NO: 206719 - DNA, 122 bp, Homo sapiens
tgccaggctggctcagttgatccagacaccgtgggtgctgcaaaggacccagctgttgtccggggcctgtgtctcaaaagccatcctacaagtgttctgtggggttttgttgacagaaactc

SEQ ID NO: 206720 - DNA, 122 bp, Homo sapiens
cccaaacctcagaaggccccttctgctgtgcccagaactccccgcccctgcccgcccttccgtctgtcgacctcacttcctgactggtgagtttcaaacccacagcctgggacagcactacc

SEQ ID NO: 206721 - DNA, 122 bp, Homo sapiens
ccacatcctggggcctctgccttgtttacccggtgttttaaaacacacagctgggaggggcgcagggcttgcagagctggctctgtgcccaggaaggacacgcactcaaaatcagccctgca

SEQ ID NO: 206722 - DNA, 122 bp, Homo sapiens
attaaaaaacacactgcattgctttattgcgttttcccgcatcaagggacatatttcagtcgaaaagggcaaaccaggaaatttactcatgaaaaccaatttatataagcatatgaatagta

SEQ ID NO: 206723 - DNA, 122 bp, Homo sapiens
cctccttccttctaagtttgagtctccctcctggagcgttgctctttccctttcttttgtcggtgcctctttctttttccctttagctctctgtttccttctggctctcagaactactctcc

SEQ ID NO: 206724 - DNA, 122 bp, Homo sapiens
tgtagcggcgctcggcgtcgcggcgccgggtcagcgagcggtaaggcttcctctccttcacgtccatggcctccggcccgcgctcctccacatccacaaacagggtcctcgccgcactcagg

SEQ ID NO: 206725 - DNA, 122 bp, Homo sapiens
ggaaattgcacataaataaaccggatgattccaaatgcaaggagtcctcagagcggagcgcggacggcttttccggagtcctgggtctgcatctggcgccttggcccctgctcactcgcgct

SEQ ID NO: 206726 - DNA, 122 bp, Homo sapiens
acttggcgaaggggcggcagccttccgggcccgttcccccagcgtgcgtgttcactcgaccgcccctgaccacccctaatgggtcactggccatcgggctgttgtcctcggcgctcgggagc

SEQ ID NO: 206727 - DNA, 122 bp, Homo sapiens
cgaacgacaatgcgcctgtttttacacagcccgagtaccgcataagcattccggagaatacgctcgtgggcacccggatactcacggtgaccgccactgacgcagatgagggctactacgct

SEQ ID NO: 206728 - DNA, 122 bp, Homo sapiens
ggtgggcagcgctggctttcaggatcactatccagcagcagctccgacttccagattccgcggctgagcggcgagtccccgcgaagggtgcacaggaaggtgccaccggcccaggacgctct

SEQ ID NO: 206729 - DNA, 122 bp, Homo sapiens
ttgcgtcaccgtcaaggcgggaaagttcccggctgtcggttggagggtgggtcctcgccccgccccgccccctcgggccgcccttccgcgcttccgggaggcttgtcccaagctcacggacc

SEQ ID NO: 206730 - DNA, 122 bp, Homo sapiens
aaatttgtgtatctaattttaaaagcttatttcacctcctgctcttgcatgcaattatagcgcataatcttgtggttagagataagcaaacacgctgaaactaaaatgcaaatgcaccctgg

SEQ ID NO: 206731 - DNA, 122 bp, Homo sapiens
cttcagccgcctcctcgcggggcagggcttgggacctgcaacctgccatgcccgagaattcgcggtgggctcctgcgccgccggagcctccccgacgattgccgccccctgcttcacggctt

SEQ ID NO: 206732 - DNA, 122 bp, Homo sapiens
agcgggtacaggaaccagacggatgctgaagtgccggctggagtgaactccgtgcaggtccgcagcagtatccgggcagggtacccacgactcctgaagccccagagggcgcgttatggtgc

SEQ ID NO: 206733 - DNA, 122 bp, Homo sapiens
caacagctctctgatctcactgtttaatggcttgttctgaagctcttcggccagctgcaacggagattacattgacttaaagaacatttagtaagagcattgtgggattgggtgtgtgacaa

SEQ ID NO: 206734 - DNA, 122 bp, Homo sapiens
tgggtttgagttgggcaggagttacacagtagctcttataagagaggagtagcattgttgcggcttttagaaagaatgctacttattagttgtgtgatctgagcgatcaagacaaatgcccc

SEQ ID NO: 206735 - DNA, 122 bp, Homo sapiens
cctagttctttctttgctcaagaaaagcagcttgtctgataaactaagctatgtatgattcgctgccagtacagactgaaaaacaaaataaactcccaattcacagtcctccgttgcgtaac

SEQ ID NO: 206736 - DNA, 122 bp, Homo sapiens
ctaggattctccttctgaaagctcagaatatttcttccccttccctatacacacagggctcgaagggttagagaagaaaggcagacaacagcttctgagctttggactaatcacagcctctg

SEQ ID NO: 206737 - DNA, 122 bp, Homo sapiens
ccaggagctcagcctggtaggggagtcggcaaggcttagaggccacaaggctgttgcctgcggcgtagaagcgctgggcctgagctcggaatgcttcccggaggatgcgaggggcgggcgct

SEQ ID NO: 206738 - DNA, 122 bp, Homo sapiens
tcagcgctgacatgcaaggcgagggatcaaccctctccgaattggatgacaacgggcactcgtccaggaaaagcacacgtatgtgcacattcacacagaggcgcgtccagcataatacaatc

SEQ ID NO: 206739 - DNA, 122 bp, Homo sapiens
actcacttgttcttgaagtcctccaccaggtcctgcatgcctctgagctctgagtccaggcggccccgttccccgacaatgctgtccagctgcctcctgaggttgttgatgtactgctcgaa

SEQ ID NO: 206740 - DNA, 122 bp, Homo sapiens
gttaagccagggccatgttttgttcttataacacccacataacatggttagaagctacgacggtctcactcaatgaaatatacatgcctggctatgtttattttacactgtccatattttag

SEQ ID NO: 206741 - DNA, 122 bp, Homo sapiens
ggcagcactcaggaggccttgaagagcgggcactttgtcaacgtcctgagcatccttgtgcggctgcagcgcatctgcaaccaccctgggctcgtcgagccccggcacccaggctcttccta

SEQ ID NO: 206742 - DNA, 122 bp, Homo sapiens
agcccttctctgtcagtttctccattatcttctggtttggtgataaatgagagttcccatcgggggtgccaccctctgtgtgacggggagcagagaagaccctgcatctgagtccttctggg

SEQ ID NO: 206743 - DNA, 122 bp, Homo sapiens
ccatggggcaccgctcctccctcggggtccgcgcctgcacccgacgctcaaagcccctctcggagtcccacgctcgcatgcgctgtcccgagccctctgggggtcccctcctctcaccccgc

SEQ ID NO: 206744 - DNA, 122 bp, Homo sapiens
gctgcctctgcttccgtttcctccacgagggcgaaggtatacccagaacaaattatgccacgaagatgcatgtctgacatctttgtttttaaattgaattcagttggtactctggctttttt

SEQ ID NO: 206745 - DNA, 122 bp, Homo sapiens
ccggacacgtcgctgattggctggacgcagagcgcaggcgtgaactgggtggcgaggctccgcccccatggggcgattgcgcgcccaaatagctggcccagggtgctttggccgccggagcg

SEQ ID NO: 206746 - DNA, 122 bp, Homo sapiens
aggctgcagtgagccgaggtcgcgccactgcactccagcttgggcgacagagcgaggctccgtctcaaaaacaaaaagtgcctaggataagaagaccagagtctaaatcaatttcagttgaa

SEQ ID NO: 206747 - DNA, 122 bp, Homo sapiens
gtgactctggggcgtttagctgagccggaggccccggctcttggggacgcggtgggctggcggcgtcggatcaccccgccatccatctcaccactcccagcgctgagcccggggggcgggga

SEQ ID NO: 206748 - DNA, 122 bp, Homo sapiens
ttacgggatagcgatgagggcagaaaatatccagagttggtactggaccaatccctggatcgagaaaaggtgtctgagtttagtttaacgctaacagccgtggatggcgggtctccgcccag

SEQ ID NO: 206749 - DNA, 122 bp, Homo sapiens
gcccgacatcgccactgcgtcgcccccggggtccgcgctgatgggtgcgaggcgggaggacggtatccggggttgccacagctgcagccagcgcaccacttgcaggcggcactgcagctcgg

SEQ ID NO: 206750 - DNA, 122 bp, Homo sapiens
gagcaaaggacgagggagtggctaaacctccgcccgccttagaacgaaagctggccgttccgtttcacaaactgcgaacctgaaacttcggatatccctttctcgatgacagccgaaacgca

SEQ ID NO: 206751 - DNA, 122 bp, Homo sapiens
cccatcctgaggggcctggaggaggccatgcccacaacccagagctaacattctttcctgcggatcccaaagttttagacaaagattcgcttctgcaccaaatcagaaaacctttgaatcca

SEQ ID NO: 206752 - DNA, 122 bp, Homo sapiens
tgttggagaaagtgaaaccgcctttcttgctggcagaaatgatgtcttagcagtctgtagcggccggtgtgaacgggttggttctcaaggagacagacttttctagtgttcttagggtgctg

SEQ ID NO: 206753 - DNA, 122 bp, Homo sapiens
agctgcaggatggcaggagtttttctgcagtctttcagtgaagcctctctggagcttccccgactggttatgtagaactggtcctgcttcctgatctgtgggggccccatgtgcctctaccc

SEQ ID NO: 206754 - DNA, 122 bp, Homo sapiens
tacctccctggacctcctgaaaaacgctgcccggggaaagtccgggcagagcccgagcagcggccagggtaacgctgtcttgtggacccgcacttcccacccgagacctctcactgagcccg

SEQ ID NO: 206755 - DNA, 122 bp, Homo sapiens
aataaatttaaggaaaaagcaacttgattcgaagataaatagtgatagtgcaagtggtgccgaactaacgataaatttggaaaacagcggcccacgcgcagagcccgtcccaattctggcag

SEQ ID NO: 206756 - DNA, 122 bp, Homo sapiens
cacacacacacacaaggctcctccgcaggggactcgggtgggagatctgcaggtgggtgccgtggggagggacagctgcctgcttgtaaatccgccccctgccttcttctgggctgcctctc

SEQ ID NO: 206757 - DNA, 122 bp, Homo sapiens
ccttgggcttccactgcaggaatgcaaggcgggtaaccttcaaagccaggtggaaacgtccggtttgaaccgcacatatgctagggtggagagtgagaacgaatgcaaagagaggctagcgt

SEQ ID NO: 206758 - DNA, 122 bp, Homo sapiens
ggtgtggttcaacatctcctgtgtgacttgtctgatatgcactgtgatgtcggccaccgtcgtgaacttcccatctgttacgctgacattgagaaggtattgccctatgtctagctttttgt

SEQ ID NO: 206759 - DNA, 122 bp, Homo sapiens
atgaaaacacttcttttcagccacactgaaagagatcagtgggtgggcccgtccacttgtcggcatccgttggagatcaaagcaaacacaagagggaacagacccaaaggaaggaggaggga

SEQ ID NO: 206760 - DNA, 122 bp, Homo sapiens
tgacgtgcggtggtgtttccgggaagatggcggctgtcgaagcggctgcagagccggtaacggtggtggcggctgttgggccaaaggcgaaagacgaagaggaggaggaagaggagccgctg

SEQ ID NO: 206761 - DNA, 122 bp, Homo sapiens
aagtcctcttcccaaaagaactgcagtcaggtttccatgtcattttgtgaaaataccccccgccacacacacaccctcctttaccacacacacatacacacagacacgcaagcatccccttc

SEQ ID NO: 206762 - DNA, 122 bp, Homo sapiens
aaactcgcagagtccggaaacagatacacgaagtttccttatcttcaggctgcagatgtccggataggaaactccggcaggagatccgaaagggcatttttttaaaatcactcaaatgaaaa

SEQ ID NO: 206763 - DNA, 122 bp, Homo sapiens
ccacttagctgtttagacattttgttcccctggctaacaatgaaggtatatgggtaatctcgtgcctgcaaactggaacactaaacatatggattgaatcaggaggacatctgacaaaagtt

SEQ ID NO: 206764 - DNA, 122 bp, Homo sapiens
ggtgaccagccctattggcgcacaggcaggcacaggctgcacccccacagctgggccccgcgagctgaacgctaatcatgaagcagctgtgtttgctcctaaatctgtttatgccagtgtac

SEQ ID NO: 206765 - DNA, 122 bp, Homo sapiens
ctctcttctcccagcgccaacggtgtcgctccggcctgcggggtagtgaacctgggactgcgtagggggtcagacctcgtggttcccactcagaggcagccaagttcatccctctcagtggc

SEQ ID NO: 206766 - DNA, 122 bp, Homo sapiens
aggcaggagaatcgcttgaaccagggagacggaggttacagtgagccaagactgcaccatcgcacttcaggttgggcaacaagagcaaaaaaatccgtctcaaaaaaatcagctggatgtgg

SEQ ID NO: 206767 - DNA, 122 bp, Homo sapiens
tccgaaggcgaagagggtcctccaaacccgtttggcgtgcggacaaaaaccccagcatatcgtgtcctcacaccggctggagcactggacgtcgccatgacagagctcaggggcgggactgg

SEQ ID NO: 206768 - DNA, 122 bp, Homo sapiens
attttaaaagtcctgatacgatagtcatcctggagggtaagtgtggtttatgaagattttcgtgtttaaagagaagctcagcgaagagaaatgagattgcacttcctgtcggtgcccgccac

SEQ ID NO: 206769 - DNA, 122 bp, Homo sapiens
gcagaggagtgggcagtgggaaagttggcagctcaggtttgcccccggaggaggcggtgtcggcccgactctcctgtaggagcgttaagttgtggcagctgccgagcccaacttttgtgggg

SEQ ID NO: 206770 - DNA, 122 bp, Homo sapiens
aaagcggagtggagtaagttcgtctaggatcggtcccgggtggctctgggatccaatctgcgccgccctggcccaggtcccaggttcaggtcctttacgccactgtgtccaccacctggctg

SEQ ID NO: 206771 - DNA, 122 bp, Homo sapiens
ttagaagctgtctacagagcaggctcggcaagaacctgcggctgggcctgtttgcactcccgctggattagagatgcaggagatgaaggaaatgctggcaacccacatgacatgaggacccc

SEQ ID NO: 206772 - DNA, 122 bp, Homo sapiens
ttccagacatttattgggaggtattcttgggttcaacagctatgaaagggagaaggaagacggaatttggcagaagcagaagctggcctgtgatgcactcatgcagcctaagataaccccgt

SEQ ID NO: 206773 - DNA, 122 bp, Homo sapiens
ccttgattgaagtcacctgccttctctagcttccagtcctttaaaacgagggtttggacccggtgccttctgaacccggtgcttcactgagtgagcaagtgaagggtgtgtgtgtgtgtttg

SEQ ID NO: 206774 - DNA, 122 bp, Homo sapiens
cagtcttaacatgaaagcagagtggtgatcctacagctgactgatctcacccaacaccctcgtttttcagataaactgaggtccagtgaggttttgtgacttaatccaggatcgtcaatcaa

SEQ ID NO: 206775 - DNA, 122 bp, Homo sapiens
caggtgtgagccaccacacccagcctaaactgtactttattatgccccatctgcactcaacgttttccacaaataagattctaagcctttttataccctaagaattttttacatatgaaaca

SEQ ID NO: 206776 - DNA, 122 bp, Homo sapiens
atgttcatttaacgcttccagagatcagagctttcatgtttgccacgaaagccagagagccgggagcacctcaggagcggagatgaaaggccatttgtgtttgtgcatgtgtatttagcgct

SEQ ID NO: 206777 - DNA, 122 bp, Homo sapiens
ttcatttaattaatttttgacccatattctcacttataggaatccctaaggaaattcacacggtccacacactcaaccttgatggcctggctccttgaaactaatttctactccacttctct

SEQ ID NO: 206778 - DNA, 122 bp, Homo sapiens
gcgcccgctaacgtgccaggcacgcgccggggagctccgggatatgctccgcggtgctaccggtgacaagtgtggtatctggaatttgtgtagttctttgccccctgtctcaaccacaaacc

SEQ ID NO: 206779 - DNA, 122 bp, Homo sapiens
catggcggacaggtggggccgccttacctggtagtgggaggtgaggtctgctttgctgagcggggaggccccagtggggctccttctggaccgtccttggcaaggagggggctgctggggag

SEQ ID NO: 206780 - DNA, 122 bp, Homo sapiens
cctcgctcatcatgctgaaccgctacttcagcaagcggcgccccatggccaacgggctggcggcagcaggtagccctgtcttcctgtgtgccctgagcccgctggggcagctgctgcaggac

SEQ ID NO: 206781 - DNA, 122 bp, Homo sapiens
ccgcgggtgaccggccccgaaagtcccctaaggccccggcagccccaggactcgatcacccggacaccccgggctcccccggctccccggggtcctcctgttcgcccctcggccggcgccct

SEQ ID NO: 206782 - DNA, 122 bp, Homo sapiens
gcccaagggctggcatttggaagagggaactattcaaactggcttcaaaaaattgaggggcgctaatgttagctcaatgtaaggcagaatttcctaaagattatagttgttaaacatttaaa

SEQ ID NO: 206783 - DNA, 122 bp, Homo sapiens
cgtctccccgggcgagtggaggaatcctagggtgtgcctggaggtggcggagtgtaccgacgcgggtgtgagcgcgtgtgccagcgagggtgggcacgggggtgagcgtggcaaggtgagct

SEQ ID NO: 206784 - DNA, 122 bp, Homo sapiens
taccagggtctctgggtcgtttgttataaaatattgcagcagcagcagcagcaacagtaccggcagcagtggcagggatggagagctgcacgtagcaagggtcaggacggccagcaggtgga

SEQ ID NO: 206785 - DNA, 122 bp, Homo sapiens
gagcagcccctgttggctccgaaggtaataacagcttttcgcagagacgttttgaatatgcgccggtagggggcagcgatgaggcggttgcaaatccccaagcatcccgtcaactggtgagc

SEQ ID NO: 206786 - DNA, 122 bp, Homo sapiens
tgagcacccgagccaggcatggtgcccgcacctgcccgcccgctgcacccaccttgaagtcgtaggccgactgcttgatgacctcaggtgccatccagaagggggtgcccacgaatgtgttc

SEQ ID NO: 206787 - DNA, 122 bp, Homo sapiens
agccacaaagagggagcagagaaacaaagaaaggagcaggagtacagacccgcatcacatcgcaggtttcccgcaagttgcagggaggtttctggggcacccagttacgtttaccccttttg

SEQ ID NO: 206788 - DNA, 122 bp, Homo sapiens
ctaggtggtgaacccaggaggaggaaatccccacaagtcgacagaacaccaacggctcgtcggctcgtcggctcttcccggctgaacccaagggtgcttggcttgactcacttccataccaa

SEQ ID NO: 206789 - DNA, 122 bp, Homo sapiens
gtgggggagggaggcggttagcgggctttagcgccttttctggcggcggtagatttgaagcgcttcaaaggaccggacccagagaagaggaaaactctaccggtgcaggtaagtggtatgag

SEQ ID NO: 206790 - DNA, 122 bp, Homo sapiens
ctgggattataggtgtgaaccaccatgcccagccacagaatgtccttttgaaaggcaagtcgttatcatttcaatcctctcttcaacaccatccaagggctccccagcttgggtaagagcca

SEQ ID NO: 206791 - DNA, 122 bp, Homo sapiens
ttagcccaggaatttgagaccagcctgggcaccaaagtgagagctgtgatcacaccactgcgctccagcctgggagacagcgagatgctatctgaaagcaaaaacaaaacaaacaacaacaa

SEQ ID NO: 206792 - DNA, 122 bp, Homo sapiens
ggggagagacacgaccctgcccttagggatctctcaaatgaggcatacccactggactttcgggaaccatcaatctgtttccagacatggattagagatttcaatgcctcaagggctgccag

SEQ ID NO: 206793 - DNA, 122 bp, Homo sapiens
acatttctcatgtgagcctacctcacgttcatttcctcttttttccttttaaacagaagtcggatatatcatgcttggctggaattaagcacaataatcccattctcctttgtcagtgactg

SEQ ID NO: 206794 - DNA, 122 bp, Homo sapiens
ggagactcacagagctgtgagatgacctgcctggtgagccaggctgacttcacacttcagcgaggaatccccctgagcaggcgccacccaatggggactgctcatctagagaacagaaggct

SEQ ID NO: 206795 - DNA, 122 bp, Homo sapiens
tcagggaaagctgaatgaatctgagcattagatcatgaatgtatcagtgttgatgtgctgcgaatgctcttatggatcgggcaacaaacaaggctgggactcaggacccctcaggtggaggc

SEQ ID NO: 206796 - DNA, 122 bp, Homo sapiens
ttacttcctacattcatctggtaaaaattaatttttctaacgaagcatacggcagctccacgcaagtggcaagacccagtgcaattacatttagatgataggcaagcattcacactcacttc

SEQ ID NO: 206797 - DNA, 122 bp, Homo sapiens
aggtcaggtcgaggcctctggagtcgggtcgttccccagtgactccagggcagcgcaccccgcgaatgcccacttcggcgatactcaccactcgagggtagagaaccctgcggctgcgcttt

SEQ ID NO: 206798 - DNA, 122 bp, Homo sapiens
agcaaagtataatgagtgactcttgatgcaaaataaacagaacacatggtttcaattacccgccaaataactttaaattgtttaaattatgtgagtatggttaaacttcaacaaattattta

SEQ ID NO: 206799 - DNA, 122 bp, Homo sapiens
ccgcggaagaagcagacgctggggccgcgaatgtgcatgtgcgcgcgtgtaatgtgtgtgcgcgcgcagggtctgcatatgttcttgggggtctgggtgtatgtgtacgcttgtgtgtctgc

SEQ ID NO: 206800 - DNA, 122 bp, Homo sapiens
aattggtgtttatcaaatgctttcaggctctggtgagcaagcgtccaggaaaatgtcaagcgcatggagctccaggcctgtctgggggatctgggcacggggaggcatccatgggagaccat

SEQ ID NO: 206801 - DNA, 122 bp, Homo sapiens
atcctttcaaaaatttcatttgaataaatagctgcttctaaagaagttccaagcatcacccgccctgaaggcccaggcagtgacgctgaccacagtttctagcatctgttctttcctgaatt

SEQ ID NO: 206802 - DNA, 122 bp, Homo sapiens
tagatggcgacttgaatttttagggaatacatccaccagtttgggcacacccaccaggcacgacagttgaggtctgatcttccagccactgtgagtactgagaaaacttggcagggggccac

SEQ ID NO: 206803 - DNA, 122 bp, Homo sapiens
gcctctcccgccttgcacgggcttcacagtttgccagcgagggcacaaacgggggctccgcgggccggcgactcaccgcgccttccctaccccgccccagtttctcccatggagctggtctg

SEQ ID NO: 206804 - DNA, 122 bp, Homo sapiens
ccaccctggcaagaagggcgacttttctagaaaaacttagcggcaagttaacgggaagcgcggcgacacagttcctacgattgtggggggcactctgccgccaggcagtctcatcctttgtc

SEQ ID NO: 206805 - DNA, 122 bp, Homo sapiens
gaaactaattaaaaccttcctatttgatgacacccataggatgggaatcgcttcctctctcgactttccttgacacaacttgctcaggaggaatgcaaaggatgggtgggatcttccccagc

SEQ ID NO: 206806 - DNA, 122 bp, Homo sapiens
ctcctggagcctgctcctgcttcagcccaacggaaagatgaagtgcggccacttagttcccgcttctggccgtaggcagcggtcaggactgtgatgttggtcttttcagataaggtcttctc

SEQ ID NO: 206807 - DNA, 122 bp, Homo sapiens
ggctccacgggtgtttttccggtatccttaaaagccatggctgctgcgtggcttcctgaccgactttttcctcagcgagagtgaacagcagtgagtcaggagcaggagagtgcggacgagag

SEQ ID NO: 206808 - DNA, 122 bp, Homo sapiens
gtcgggttcctctgcctgccccacctcttctacgggtgcctcttgctgcttctgtgtccccggccaactgaactcagtgggcttcgctgtacttggttccaaggtgctctggactccaggag

SEQ ID NO: 206809 - DNA, 122 bp, Homo sapiens
attcacatcctgagtggacagagtagggtggtgcaagatttcatcagaaactgcagaaaacgaaaccttggataaagtgagactactgtaacatcacatagaggcctacgaaagaggttttg

SEQ ID NO: 206810 - DNA, 122 bp, Homo sapiens
ctgtcggagggagaggcgggcctgtgtggcggggatcgtgctgtaatggagcaggggcggcggggacccggaggtgagggctgcgagggccgcccgggagggtccgggctgggaaaagggcc

SEQ ID NO: 206811 - DNA, 122 bp, Homo sapiens
cctaaatatttgtcacagcaatgggctaaagcctctggaagaggtgaagttgggaaactgcggattgccaagtaagttatttacatattcttgacattttaaaaagctatttttgaaatttt

SEQ ID NO: 206812 - DNA, 122 bp, Homo sapiens
gccgctaaggtcagcggctgcggtttgagaagactgcagctgcttcctgtgttacgctgtcgcagacaagcagaagttaaaaactagtaaatgacttaaaggtgataatagtcctggcagtg

SEQ ID NO: 206813 - DNA, 122 bp, Homo sapiens
attacaaaatgaccctgaactcctcccatgtacagagccctgccggggccaaaatcccaccgaggttgcagggttggcaccttcaggaccccgaggacactcagaaagctctagagattccc

SEQ ID NO: 206814 - DNA, 122 bp, Homo sapiens
gtgccttgctaatttaccagaaccacctgctacccattatttctctagaaagacaggcagcgtcttcaacttcagatggtgactgtggcctgaagcctctgcatttcagaatcaatttcttc

SEQ ID NO: 206815 - DNA, 122 bp, Homo sapiens
aaataagagcaggtcagagaatctcccaaaagtcatttgaccctaccctccctggaatcacgcacgtttctctgagcttctgaaaagtactgggaaggctaaaggcagcaagccactgaggc

SEQ ID NO: 206816 - DNA, 122 bp, Homo sapiens
gggactaagatgtgcagagcaggctgggtggggactcccggggaggtctcccccaacccccgccccacctcgggcacccacttcgcgatttttgcagaggggagccaggtcagaggtgcagc

SEQ ID NO: 206817 - DNA, 122 bp, Homo sapiens
gacaaggagtgaacacgggaactgtcacgactggaagggcgtgaggcctcccagcagtgccgcagcgtttcgaggggcgtgtgctggaccccaccactgtgggttgcaggcccaatgcagaa

SEQ ID NO: 206818 - DNA, 122 bp, Homo sapiens
cgtgatccacctgcctcggcctcccaaagttctgggattacaggcatgagccaccgtgcccggcccatgagaggttttgtttgcacttcaagaaggacagaaaaaggcaggcaggctgggga

SEQ ID NO: 206819 - DNA, 122 bp, Homo sapiens
gagttttccgcagttttgcaaatccttttccctctccccatgcctcgcggtttaagaccacgcgatttcccaaaaagaaaaactcaaaagatgccaggcgccgggctggagtcacttagagc

SEQ ID NO: 206820 - DNA, 122 bp, Homo sapiens
accatttacagacacactaaaaatgttttaaaatatcttctttctccaaagagtccattgcgcatttcttagagtagagatggggacacattccaggcaaggtcacaatggcattttgttgc

SEQ ID NO: 206821 - DNA, 122 bp, Homo sapiens
cacatcctcacacacattcatacgtgtgctctcacgctcacatgcacacattcacacacacgttcacacacccatgcgctcacatgcccatgcacgcacacgtttgcacatgtacgcgcaca

SEQ ID NO: 206822 - DNA, 122 bp, Homo sapiens
cacacacacgttacgggtgcataaatattacacacgcagggactcaattcaatgcaaaatcgtgcccgcctcctactcaggcggcatggaggcagcgagccggctatcagcggcgaccttgg

SEQ ID NO: 206823 - DNA, 122 bp, Homo sapiens
taagcagaggctgcatttgtaagtagagctacaccttagtttttcaggggtgatgatgcgcgcaatgggtatgaagcacagaacatgtggtcagggagggagatcagccctaaagagaaagg

SEQ ID NO: 206824 - DNA, 122 bp, Homo sapiens
agccgcagatccgttaatgttttcttgttgcacttggtccatctaacgccttccttatctcgtttttcaagaatgtagccctcaatttcggtacctccgtcgtctactgggcgtgcccatgt

SEQ ID NO: 206825 - DNA, 122 bp, Homo sapiens
cagtctgcattagggagcagattgaaaacatgtctgcaaaagtgcttaggacagactgaacgtctgttctggcacaactgattctgaactttccagtgagtgtgaggtggaagacgtatggg

SEQ ID NO: 206826 - DNA, 122 bp, Homo sapiens
caacggcataaacgacacagggtaatttatcatgggattgcgtgtccacctgggtccccgcggagctctgttgactggagtcgctcggagcccccggcgcgaatgctggatggctgggcggg

SEQ ID NO: 206827 - DNA, 122 bp, Homo sapiens
tggttacctctggccttcctctgctcagaagcccacccctgcagagcaaagcccgggtcccggatggcaaagccatacgcaggagccttcccagcagccgccgccatggctgacgcactggc

SEQ ID NO: 206828 - DNA, 122 bp, Homo sapiens
cctaagacttggctttcatataaaatggcaaaactaatacgaacctaactgatctcccagcgttgtgatggtgggatgagatgatgaaattgaaagagctttgcatgctggaaagaacaata

SEQ ID NO: 206829 - DNA, 122 bp, Homo sapiens
tcttgccctcagattaccagacacgacgcagctggacttgtctcatgcctgcgatagggacggcccccaccctgacttgcatggaacagtcgacataatgtggcctactgcttccacctgag

SEQ ID NO: 206830 - DNA, 122 bp, Homo sapiens
ggccacgtctacaggggttcggggtaccgaatcggaagaaccacagggcgctgtcaagggcgaagccgcggaagtggagcgctgcctggcgcgcaggagcggagacctggaagccggggaca

SEQ ID NO: 206831 - DNA, 122 bp, Homo sapiens
gctatagtatatgccagaggccacctcattgcaactttgtaaacttcctattaacttttacggcccatttaaaaatgggctatgggagggggagatccgtggctttccaaaatcccttcatg

SEQ ID NO: 206832 - DNA, 122 bp, Homo sapiens
agacgctagaagagccacgggtaggcgcgagtcagagtccgaggttcgagggctctgggccggccgcatctgcgagccctccgaggcgccgtagccccgcccctccggcgcgtggcgcccat

SEQ ID NO: 206833 - DNA, 122 bp, Homo sapiens
cattctgtagccggtgcttggtcttctccagtgaggagcacttggcattaacagcctccacggcctcctcggcatcctgcagccgctgggccagcttctttctgcccaggtgagggtggagg

SEQ ID NO: 206834 - DNA, 122 bp, Homo sapiens
ttcatagtgaaatgccttcattgccgtgccatgcatatttctgaggggaatttttttggtcgaaacgaggactcttcgattgaccagacaggcactttccaagggtgccacgtactgaggaa

SEQ ID NO: 206835 - DNA, 122 bp, Homo sapiens
agcgccccctgccccccgacaccacagccccgccccgggccgctcagcccaggacccgcccgcacttcaccacttcacggtcttggccagactctcggcctccgggcagcgcgggtgctggc

SEQ ID NO: 206836 - DNA, 122 bp, Homo sapiens
gtggaggagaagctggagcacctggagaagcaggtcagactgctcaacatccgtctcaaccgggtgctcgagagcctggaccgctccaaggacaagtgaaggtcagccggccgggcgggtcc

SEQ ID NO: 206837 - DNA, 122 bp, Homo sapiens
ctctacatttggcgagtttaaaccacacaacaggacagctcacacctcgagagtgttctgcgcaaaatagaatggggaaaggtgagcctgagaacttgccaagctttggatgactgattcaa

SEQ ID NO: 206838 - DNA, 122 bp, Homo sapiens
ggtagcaatccggtttagttaaccagccactgtaccgtcagcgccgcgcgttcctcatggcgttagggctgacgggccttgttgctgaggggccttcattcaacggtctcttgttgaatgaa

SEQ ID NO: 206839 - DNA, 122 bp, Homo sapiens
agtgaattagaagttgtaaaccaaattccttgttactacagtggactacttttcatagaacgaacaagaaaaatcagctctgtaggacaatgttaaaaagagtgttcttggctgggcacggt

SEQ ID NO: 206840 - DNA, 122 bp, Homo sapiens
gcacatccccaggacagacccacccccaggacacgcctacccctgggacacccctacccccgggacacgcccacccccaggacacctctacccccgggacacgcccaccccagggacacgcc

SEQ ID NO: 206841 - DNA, 122 bp, Homo sapiens
catgatttttatttttccgtttcatggaagcagcagctgtctactgatagttcctgccgccggccaccaggtggcagaagggaacacagtaccatagccctgccccagcgatcgcgcgggca

SEQ ID NO: 206842 - DNA, 122 bp, Homo sapiens
ccttctccatcttggggagggtacatgaaccaaaacaaaccaaactggtgaatccagtgtcggcctctctgtaccccgagcgtggcagtgtggggctctgcctgttacccttgtgagcacgc

SEQ ID NO: 206843 - DNA, 122 bp, Homo sapiens
ttgaactcctgacctcaagtgatctgcccacatcgccccacaaagtgctgggattacaggcgtgagcctctgcaccaggcctgtatcctctgatcttgtttcaatcaattagctgtgtcttt

SEQ ID NO: 206844 - DNA, 122 bp, Homo sapiens
gtctttgaagatgtttctggatgagatcagcatttgaatcagtccagtgagtgaagcagacggcctgccctaatgcgggtgggcctcatccaatcagttgacagccagaatagaacaaaaag

SEQ ID NO: 206845 - DNA, 122 bp, Homo sapiens
cagatgagggatttgaagctcagagattcagggacatgcacacatcacacagctaacaagcggtgcatccaggactctaacctaggattgttggtttccaaagcctatgctttaaagcataa

SEQ ID NO: 206846 - DNA, 122 bp, Homo sapiens
tgtcggctgcccacctccctggcttgcagtaaggctccggggacccgcgaatggcaaagccgtaaagcgggaatgctgccaccgggtggcagtccgaagccacggcccagaggcctcagaac

SEQ ID NO: 206847 - DNA, 122 bp, Homo sapiens
ggcttccctacttttgaggatttgggactcagaatggcttctttgctcctcattttgcgacgggcctgttgtgagacctcactttgtgatagtatgagtcaataatcttaagaaactcccct

SEQ ID NO: 206848 - DNA, 122 bp, Homo sapiens
gagcctgggggacgccgagaagtcatgggagctgcttagagttcggctttctcagctgtgcgaaggggatgatgagactttacatagggttttcataagtagaaatgcgggtggagcctggc

SEQ ID NO: 206849 - DNA, 122 bp, Homo sapiens
aaagtctggccaccattgtcactggagaagatgatgacactgttgttgtagaaaccgtagcgcttgagggcccaggtgatgttgcgcacagcctcatccatgcaggtcaccatggccgcgta

SEQ ID NO: 206850 - DNA, 122 bp, Homo sapiens
ccatgacaaataatgcaggcaagtaaggagaagaaatattcagtgaagaatcctcaaaatcggtggttctcagctaggagtgattttgacccccaggggatatttggcaatacctggagaca

SEQ ID NO: 206851 - DNA, 122 bp, Homo sapiens
atctgcgctcaggccacgctgtaaatctggcatgccacaagaaatgtgaatacatgcaatcgccaacattttctcagaaaatgtctcaaaataacttttgtgcacacatctgctaaccattt

SEQ ID NO: 206852 - DNA, 122 bp, Homo sapiens
gggcatgcggaaaggtctcagataatccccactggagaggaacactgtggatgtcatccacgcagcagaatcggataaattgcaccaagggaccccacccccaccccctgtgcagtgaccac

SEQ ID NO: 206853 - DNA, 122 bp, Homo sapiens
gactctgggactggggcccagcagtctgtggtataacaagtcccccaggtgattctggttcggcagctcacgtttgagaaccgctggagtcaagcacacagaacctgtctcatattgttatt

SEQ ID NO: 206854 - DNA, 122 bp, Homo sapiens
ccctggcggcccagccaggcaggctgttttgtcagctgctccgcccaggccggacgaggccgcagcctgccagccggctccggcctccacaccgcgggagcacgccccgcctcggcctcgcc

SEQ ID NO: 206855 - DNA, 122 bp, Homo sapiens
attcctccaacttctatcatgctggaaccttctttcacagaacactaatgttctgaggagcgagtgtactatgaagcacatttggggaaatgctgccccaaatatttagcaaagagagcctt

SEQ ID NO: 206856 - DNA, 122 bp, Homo sapiens
ttttgttctttttattttcaggtttccccattcctgcaagtttttttaactttttctgtgcgggaagtccaagttcctagttgaactgcaagttcttgttctcctgacaagtccagccctat

SEQ ID NO: 206857 - DNA, 122 bp, Homo sapiens
ccccagtgcttgtcctctgcccactcgctgcacagacctggggtgaggaagaaatgccgccgagcgccagaagattaggagggaattgtgtgaggcctcctctcaaagccagggtggctctc

SEQ ID NO: 206858 - DNA, 122 bp, Homo sapiens
cccctggcggccgaacggagccactgcatgctggtgtccgcgagcccaccgccctcctcccgcttgggaaccggtcactgggacacctgccctgcggctgctgcctgcctttcctcctccct

SEQ ID NO: 206859 - DNA, 122 bp, Homo sapiens
gcccggcgcgccgggaaggcggcccgggaggcggtggcgacaacaagtggccggactgggcggctaagtcgcgatagccaagcctggaagggaaaggcagagaggccaggacccaaacccgc

SEQ ID NO: 206860 - DNA, 122 bp, Homo sapiens
gcccaagtccgatccagtgttagagccaggcgtcgcactactgccacgacttttagagcgcgttctagagccccattcagcaggtcctcccaccccatgtgagaactcaggcagattgttca

SEQ ID NO: 206861 - DNA, 122 bp, Homo sapiens
gagcgctcgacaaatgtttactgagtgcccacggggtgcctagagcctggcgggacgtcgcggggatgcggctggaggaatcggagccggccctgccctctcggcactcgcggtccggacca

SEQ ID NO: 206862 - DNA, 122 bp, Homo sapiens
taggagggatagtgcttctaaggcctaatgggtggcctcaaaataacccccctagttgttcgggtttcacactttgtacactagtgccaatttaagtcctggctgcctcgaaaggctggcca

SEQ ID NO: 206863 - DNA, 122 bp, Homo sapiens
accttcccacccaggggcggggcggggctggcagcgcggcccggcggggaggggcgtgcacgcccgcgctgcgtggcaaggggacccgcgagaacgttgtcgcctccggaaggaaagggact

SEQ ID NO: 206864 - DNA, 122 bp, Homo sapiens
gacccatccttgctccagctatctcagtccttggagaggaaaagaaaatggggagaaatgcgtactcattaaaaagtaggagcttacgtagaagttttggaacggctttatttggtagttac

SEQ ID NO: 206865 - DNA, 122 bp, Homo sapiens
atcacctgcagatgcggttaagcaacttgcagaggccccagggctgagccaccgcagaaccggagctggaaaccagtcctatgactcctgaggcagtgctctttctactacctggccatggc

SEQ ID NO: 206866 - DNA, 122 bp, Homo sapiens
tctccagacgattctaatgtaaagataggtttgaggacctctaaactagttctgtgtcaccgctgaccagttgtgtgagcctagacaaatcgctgtctctctctcggccatatttctttttt

SEQ ID NO: 206867 - DNA, 122 bp, Homo sapiens
gtggagctgcgcctgccaactcattgctttctgctgtgctgtgatcctgcagtcagttgccgctgttgctactgcaatcatttgcaccaaactgagccagagaagttccctcttttaacata

SEQ ID NO: 206868 - DNA, 122 bp, Homo sapiens
cctctagccgcaccttccggctgacctcgaggcatgttgccccacaagacaaagcaaggccgggccgccctggagcgcctcaaggtgtttgacggcatcccaccgccctatgacatgaaaaa

SEQ ID NO: 206869 - DNA, 122 bp, Homo sapiens
cacgcgcttgctggaagggaattctggctgcgccccctcccctagatgccgccgctcgcccgccctaggatttctttaaacaacaaacagagaagcctggccgctgcgcccccacagtgagc

SEQ ID NO: 206870 - DNA, 122 bp, Homo sapiens
ccaggaccacctccggctccacagccagctggaggccgtgggtctcattgccctcaccatcgccctcttcaccatctatgtcctctggacgctggtgagtggctgtggttgtgcagcacgcg

SEQ ID NO: 206871 - DNA, 122 bp, Homo sapiens
cggaattaggagatttcttttttaataattagaaattttcaaccaaggaggaaaagtggccgagggaaaatgcctacctctgggcgcagtttgggaagctctgggtttcccatggtctggag

SEQ ID NO: 206872 - DNA, 122 bp, Homo sapiens
tcctctttgctaatgaatgagataattacaacagaatcaagccaaccccagaaagcgcagcgcctgagcagaagaaatgggaagttcactgggtggcagtgttgggaactgaggtagaaata

SEQ ID NO: 206873 - DNA, 122 bp, Homo sapiens
agaaggtggctggtattccagggacagctggcactcccttccttgctctttgccagcacacggcacacacaccttcattaaagcatttgtcacactgtactttgaggtcacatgactatgtc

SEQ ID NO: 206874 - DNA, 122 bp, Homo sapiens
cccggcatttctactacgatggggagctcttcctctcccaaaacctggagactcaagaatcgacagtgccccagtcctccagagctcagaccttggctatgaacgtcacaaatttctggaag

SEQ ID NO: 206875 - DNA, 122 bp, Homo sapiens
taagaggctctagaaacatgaaatactcagtagtgatgggtttcccacttctcctcaatccgttgcatgaaataattactatgtgccctaatgcacacaaatagctaaggagaatccaccca

SEQ ID NO: 206876 - DNA, 122 bp, Homo sapiens
gaatcaaagtacccaccccatggtctttgtgaaactgaaggagttaatgtgtgtaaagtgcgaaaccagtgcttggcacagagcagactcaataaacagaagttccgctcacctcccactgt

SEQ ID NO: 206877 - DNA, 122 bp, Homo sapiens
tggatccaattagaccgcggctcagcgggtctgaggttgcgctgaaaagccatcagtaggcgaacccattaataactcgccagtgccctgcgtattgtaattgtcaggctgcaatttacagt

SEQ ID NO: 206878 - DNA, 122 bp, Homo sapiens
ttattcaggtactcaactacacagtacaggctccaggtggttttataagtccacgaggaacgaaagaaaaaaacatcgcaactcaacgtacacaaaccccaggcttcggttcccacataaca

SEQ ID NO: 206879 - DNA, 122 bp, Homo sapiens
cttccatccatttaagtaagtaaacaccagcggggctgttggccttgtgagttgtggcaccgtgaaaaaccaaggcctgcagttctcagcatctgcccaatttgagctcctgtttgaaacca

SEQ ID NO: 206880 - DNA, 122 bp, Homo sapiens
tctcagctattataaagcctatgtgaggcacttggatttggccaacttatttaattcattcgtagcttctcttagccatttaaaggtaggcgtcaagcagtgcagttcttctaaggcttctg

SEQ ID NO: 206881 - DNA, 122 bp, Homo sapiens
acgggcacacacaagtgcacgcgccggccactcgagaatgcgctgccactcgcgcgcgcacgcacagggacgcgcacgcggctccgctaagtggaaccagcagaacccaaggccggccgagc

SEQ ID NO: 206882 - DNA, 122 bp, Homo sapiens
ggtgatgcgcatccatcccagtgtgtcctggaaagttcccagataggccacaggagggaacggtttggggaaacccttgctgggccccgccacagcctggcaggtggtgaagtggccagcca

SEQ ID NO: 206883 - DNA, 122 bp, Homo sapiens
atggatgcatattacagtttaattacccattctccttttgatggacacttatctggcttccgatttttcatgatcttgaacagtgctgtagagacttccctgtgtgtcactatggatacatg

SEQ ID NO: 206884 - DNA, 122 bp, Homo sapiens
tgggcacccactcagctggtcccgggtgtgagaggggccgctgtgacactgagtcccacgcgggatgaccttggcgaccggaagcctctgcacttccaaaccccgctgagcagcccaggtca

SEQ ID NO: 206885 - DNA, 122 bp, Homo sapiens
agcgggcctggggcgggcacctgtggggacggcggcacctggagcaggcggggcatgggacggccgacctcgccacccgtgcctccccatagggcggggccaggccccggctccctcccccc

SEQ ID NO: 206886 - DNA, 122 bp, Homo sapiens
tctccaggagctgcctgacggaagttgatgtcagctatctatgcattagggttgcattaccgccttcgtcggcctcctcgccacccccgctcgcgcctgcaggggaggcttttttttttttt

SEQ ID NO: 206887 - DNA, 122 bp, Homo sapiens
tggtggctttccttctgagctttccccacctgagtcatctgcaaagggcaaggctgcaggcgggagaggccggtgtgatgtgaccgccagccacggtccccacacccctctctgagggctgt

SEQ ID NO: 206888 - DNA, 122 bp, Homo sapiens
tgagcctcagtgtcctcatctgtaacacgggcatcatcatatccccagcttcaatcttcacgtctcaaaccattgaaatctcagcagtaagaatccaagtatccaagtgccaaattctccat

SEQ ID NO: 206889 - DNA, 122 bp, Homo sapiens
ggcgtcggcaactgctcggctcgccagactgttcacgggcccagtagagcagtaaataaccggccacccctgcggccgtgccggccgtgatggaactagacagctcacccgactcgagaaga

SEQ ID NO: 206890 - DNA, 122 bp, Homo sapiens
cccgactcagggttgagcgcatcagcgctaaacccaagacaaaggctgccctgtgtcttccgtactcagcgctctcctttggtaatcggtccccgtccccttcaagcccacactaggagcgc

SEQ ID NO: 206891 - DNA, 122 bp, Homo sapiens
aaaaggcttatttgagattggctgttgcagtatcgagggggatggcgacctactgcgtcccgctgggttcaagccaaatagatccccagaagggggctggcttggaaggctaaagacatctg

SEQ ID NO: 206892 - DNA, 122 bp, Homo sapiens
gggagggcggagcctgctctggagcctgactgctcggttaggacctcggagagcgccaggcgccgcgaccagagggcccagagaagcggccggagcccgcctacctcggccccctcagcttc

SEQ ID NO: 206893 - DNA, 122 bp, Homo sapiens
acctgttagggattaactcccatgtgccagctccggagccgaggccgcggcagggctcggcgcaacatgtgtcgctgcctgtttttcggggcgctggggctctttcaaagggcatgtgtgtg

SEQ ID NO: 206894 - DNA, 122 bp, Homo sapiens
acagaccattgtttgggaacaattagctagtttaattcctaacagcagacccttagaatccgctctgttgtgaccacagctgttctccaataaaccaataatctaaaactcagtgagattct

SEQ ID NO: 206895 - DNA, 122 bp, Homo sapiens
cactgtgacatggaatcgccgggtcataggcagggcacacttagcttttgtagattctaccggttttccaaaatggctaagccaattgacaagccccgaacctggtggatccacaccctcac

SEQ ID NO: 206896 - DNA, 122 bp, Homo sapiens
tccctagcccctcggagaagacttagcctacccctagtcagagctcaggccccaggtgaccgggcagcggcttgggggaggttccctaggcccttccctcatcccttgcccagatccaagtc

SEQ ID NO: 206897 - DNA, 122 bp, Homo sapiens
atcaatatatataaagtgccggtacaacgctctgaaaaatagttttgtcccaaaatccagcgcctagggtgctccgggcctagcctttgccagtgaggtccaacggctgcaggaatgggggc

SEQ ID NO: 206898 - DNA, 122 bp, Homo sapiens
taatatctggagaacccttcctgttcttaaattctagggaccaacaagacagcaggagtccgctgggtagctctgcccaactcattcagctttcttttataacctaagaataaaaataatcc

SEQ ID NO: 206899 - DNA, 122 bp, Homo sapiens
agggctgtggttccctcctgattctgggccccatccctactcccccaccccccagcctttcgcagggctgggagcacttttcccaagaggcccagggccacagaaagccaaggccacaccca

SEQ ID NO: 206900 - DNA, 122 bp, Homo sapiens
attgctgccctatttaaaatatgatttccttatttatagtgggaaagtaaaactgtcctgcgcaatgagcctttggttttagagggaggctatgaaaactggctcctttgttatccccagta

SEQ ID NO: 206901 - DNA, 122 bp, Homo sapiens
gcccaggccaagggcagggcttgggccaagtgtgcgcagcgtggggtgtgtgtgctccagcggctcctgctgcggagggcggcatgaggcttgtttacctgtgtgctggcatctctggtggc

SEQ ID NO: 206902 - DNA, 122 bp, Homo sapiens
gtaagccctgtaaatgctagtctggtagttcagaaacttttatgcttacttcctggctctcggcaagccccaggaaaataagatacatggcgttgactgttagggaactttggcttgagatg

SEQ ID NO: 206903 - DNA, 122 bp, Homo sapiens
aaaacgcccccggcgttctgggggctgggaccgaggaaagcgctgagtatagctcttgcgcgtccagtcacaaatgacgtcccttctgtaccccgccctgtaggcgggagcatccaatcaac

SEQ ID NO: 206904 - DNA, 122 bp, Homo sapiens
tgtagtaggtgccctcaaggagaattaatttattttccagagcaccttgtcctcactgggcgctccccctggggttagggttgggggcaccacctagggaagcctgccttcctgccgggaga

SEQ ID NO: 206905 - DNA, 122 bp, Homo sapiens
taaaatgtttgcgcccctgttttgctgatgcccctgggaatcccagcacggccttttcaccgactgctgcttctcagtcttcatgagagcccagagctctgtgctcggctctttcctgtcct

SEQ ID NO: 206906 - DNA, 122 bp, Homo sapiens
ggcgttggactacaagtcccggcaggctgcgcgagagggggccggggctcgcatgcgcgccgcgaggctctctgggacccctagtcctgctcccgaaaggtttggactgcgtctcccggcag

SEQ ID NO: 206907 - DNA, 122 bp, Homo sapiens
tgacgtcagtctgcagatgtgcctgggctgcgtcgggtgcgcatgtgtcctgggtcgtcacgtggagggggaggggaggtagaggtacaatcggggtaaccaactaccagccattcagaagg

SEQ ID NO: 206908 - DNA, 122 bp, Homo sapiens
tctgagaagttgcagtctttgatgaggcaatccccaagcggtggttctccacttactttgcgggtcagcagcagaagcacctcaggccatctctgtttttccaataagaatttgaagacggt

SEQ ID NO: 206909 - DNA, 122 bp, Homo sapiens
ccctctctgagttttagtttcctcaagtgcacagtgtggccttgagagcctcaggatcttcgacatgaccgaacattcataaggctcagtgctcactgtctcctcttcccttcctctcccct

SEQ ID NO: 206910 - DNA, 122 bp, Homo sapiens
agagagcaagagaacggggaagtggggcgggctgatcatgggaggagaaagagaggtaaccgggaccaagtcctgttgggccttgtaataattcaccttttatgactgggcacggtggctca

SEQ ID NO: 206911 - DNA, 122 bp, Homo sapiens
cggggcccggtcggacatgggcaagaagcacaagaagcacaagtcggacaaacacctccacgaggagtatgtagagaagccattgaagctggtcctcaaagtaggagggaacgaagtcaccg

SEQ ID NO: 206912 - DNA, 122 bp, Homo sapiens
agggcttgcgggcgaggcctgttttaagtctccagtaaccgagcggaggcccggcaggcgcgacccgggctgcgtacgtcagagctgcctccgaagtggtaaaatgtgctgcgagaagtgga

SEQ ID NO: 206913 - DNA, 122 bp, Homo sapiens
gggtagaagctcaggggaggagccgagcctttctcctgtccaagagcgagatctgggctacgccgggcgcccggagccctagtccagcccccggccatcgcggccgccgcccagccaggtgc

SEQ ID NO: 206914 - DNA, 122 bp, Homo sapiens
aattaagtctaatgttgggattggaagacgcttcagacatccgctgccgccctgggcaagcgaccagctcaaggttaccccacagggacgtgctctggtcccacggtccagtgctcttttgt

SEQ ID NO: 206915 - DNA, 122 bp, Homo sapiens
aagtgcctcagggctgcccaaaaataaccgaaaggacacccaggaccccctcctggacagcgaagacatctctccaaaggcctcagcagagcccccgtgttttggggagcccgtcgtcccca

SEQ ID NO: 206916 - DNA, 122 bp, Homo sapiens
ctaaatggccaaacaccatttcaactccagagccttcaaatgtgacaggcagggacaaaacggatggctcctccagctacctctggtctcagtctctgagccagaggccctgggtagatcat

SEQ ID NO: 206917 - DNA, 122 bp, Homo sapiens
aaccacattctcttcagttacctattcactctcaactagaaaaatgacaccatttctggccgggcgaggtagctcatgcctgtaataccagcactttgggaggccgaggcgggtggatcaca

SEQ ID NO: 206918 - DNA, 122 bp, Homo sapiens
accctggcgacccttattcgagtccagcgtgtgcctggggccgctaggggtaccccaaagcgggcagaacgcccatgaagggaaggtgacccacctggggcagaggaaaaaaaaaaaaaccg

SEQ ID NO: 206919 - DNA, 122 bp, Homo sapiens
taggaccctccgagccagttgcgggatataatctcctggtgcaccgttttttaagcccttcggaaaagcgcagtgttagggtgtgagtgacccgattttccaggtgccgtctgtcacccctt

SEQ ID NO: 206920 - DNA, 122 bp, Homo sapiens
gctacccgccgccctcgggacagtcaccgtgagcaaaagagtcggtgtcatgtgcgtaaacgaagctcttaggagccgaggatagatttcacaggaacgtagtgccttgttctgaaagacgc

SEQ ID NO: 206921 - DNA, 122 bp, Homo sapiens
tcccatgcaaagcagcatggctgatcaccctacttgctgccatgagactaccaccatcctcgaggatgatagatcccaaggagagagtgacccagtcaacatccagccccatcagcatgtga

SEQ ID NO: 206922 - DNA, 122 bp, Homo sapiens
gacgaaagagagggggtcttccaacccagcgagtcccgcttggccccggtttgccagcggcgctctccaaaatgtgccaaaagctgtgcttggggcactctctcgaccccgccccgggcagc

SEQ ID NO: 206923 - DNA, 122 bp, Homo sapiens
cagctgggactggcccgccgaaagcacatggattacagtctgaggctgtaatgggaaagtcggttcctgggctgctgtctcatagacatcagcttgcagggaagctgggggctctccgaatt

SEQ ID NO: 206924 - DNA, 122 bp, Homo sapiens
cagctgcaaggcacgggggacccctccaccgccagcaggcaggcggaacgtggcgtctggcgaatggcagggaagccgccctccatgacgctgagtcctcaggaccagtgcactagtgggga

SEQ ID NO: 206925 - DNA, 122 bp, Homo sapiens
ttttttcaaaaaacgaaaagaaagaagagaaagccaaaaaagaaacaaaattgggatgttcgggttggagagttagcaggggcatctccaggagggtcctgccccccaccccaaagccggcc

SEQ ID NO: 206926 - DNA, 122 bp, Homo sapiens
ccgccaagaacgagccgccgtgggcggggcctgcggtgattggcgggcgggcggggaggtcggaagtactttgttttttatgctaatgagggagtggggcttgtccgtatttacgttgaggc

SEQ ID NO: 206927 - DNA, 122 bp, Homo sapiens
aaatgcaggcacttagtgcagggaaagctctggtcgcgtggcttggcatcatgggcaccacggcagtctctttgggggcagcctgtccagccctggccccggctggcacagggtatgagaaa

SEQ ID NO: 206928 - DNA, 122 bp, Homo sapiens
ggagcagggacccttgatgcgtctcctgcatctagaaaatgtctcacatgcacctaataacgtttttattattgatttacttatttatttttagagacagggctttgctctattgtccaggc

SEQ ID NO: 206929 - DNA, 122 bp, Homo sapiens
atggccaggtacagtggctcacgccattaatcccagcactttgggaggaacacttgagcccgagaatttgagacttgtctgggcaacacaatgagagacctctgcctctacaaaaaatttaa

SEQ ID NO: 206930 - DNA, 122 bp, Homo sapiens
cgccttccactttctcatctgtgatgtgggcaaataggaggtttcttccagctaggacggcgtttgggtcccgagccctctgtctctcatgctgctgcctaaactcaggacacccgcggtac

SEQ ID NO: 206931 - DNA, 122 bp, Homo sapiens
ccctccctttttctccctcccactcttcctggtctgcatgggaactcggtctgagctcgacgtgacagacagcaggcctgcatgctaatgaagtttgtctcaagttcattgtcaaagccccc

SEQ ID NO: 206932 - DNA, 122 bp, Homo sapiens
cgggagggcccggccgtctggaagacttggcagccggggcaagcgacgtgggctcggacgcgcgaggagggctggggagcggggcgcggggctgggaagggcgccgtccggcggtggccggg

SEQ ID NO: 206933 - DNA, 122 bp, Homo sapiens
acgcctcccgggttcagttgattctcctgcctcaccctcctgagtagctgggattacaggcgcccaccactgcacctggctaattttttgtatgtttagtaaagagggggtttcgccatgtt

SEQ ID NO: 206934 - DNA, 122 bp, Homo sapiens
agctgcaaacatatacattgacatctcagttggaatagccctttgtccatagttattttgcgtctcatcttccacctcctcaaaaatagtgtttctgaaggcatcctctcacaggtatcttg

SEQ ID NO: 206935 - DNA, 122 bp, Homo sapiens
ggagagcggtggccctggcggctgtgagtaaacaggcctgtgcttagtgaaccatccgctcgagcgggtgtgtgtctgctagggacttctgcacttccttttaggagccaaacatcctacag

SEQ ID NO: 206936 - DNA, 122 bp, Homo sapiens
tctgttatcctgacacatttccagccttgaatgggggcttttgggtctccaatcattcttcgtattactccttgacttaaatctggtttcacaacattctgtttctgtcctgggttgttact

SEQ ID NO: 206937 - DNA, 122 bp, Homo sapiens
taatgtacctgtctgagaaagctcaaagcaattaaaagaatttactacttatgcccggcacgggtggttcacgcctgtaatccctgcactttgggaggccaaggtgggcggatcacctgggg

SEQ ID NO: 206938 - DNA, 122 bp, Homo sapiens
accaaaaccaaccaaacaaaaagctttatttgttgtagagctgggggctcactatgttgccgaggctggttttgaactcctagcccagctcccaagttgccaaagccacgtgcccagcctaa

SEQ ID NO: 206939 - DNA, 122 bp, Homo sapiens
gtcctctttcctctgacaggtatggccacaacccttaagcccacggcgataagggatgttcgctcacgctgggcgatggggaggagggacagagggcctccgaaggaggggaggtgtgcacc

SEQ ID NO: 206940 - DNA, 122 bp, Homo sapiens
ggcggtggccacagagagtagggctgctggaagccatggtgtggctgttgcagccagcggcgttctctgtgtgcctgggccatcgctaggaagtttactaacaaagtctggtctccaggcag

SEQ ID NO: 206941 - DNA, 122 bp, Homo sapiens
ttgtgcctttttttaggaagaaaaaggcagtcttatcctaagctggagatccttgggcaacgtaagagaaggcagccacttattttgatttccagttccgtctgtcttaggagcctaggtaa

SEQ ID NO: 206942 - DNA, 122 bp, Homo sapiens
gtgctcagaaccaggagccggcggggacggagccacagagcagccgcttccccgtgtccgcgcccctgtactgtcttcacactcgccatcaccttgcacaccctgcggcaccacacgaccgc

SEQ ID NO: 206943 - DNA, 122 bp, Homo sapiens
tctgtttctgtctctctgtctcttgctgcgctgcaaagagtgagcagcccccttaaggatcgcgtggcaaaagctgcaggagaggcactggcagggctgtttatttatgagccgcgttcaaa

SEQ ID NO: 206944 - DNA, 122 bp, Homo sapiens
tgcaatggtgatgtattctataaggcagccattgttgtcataatgctacataacactacccgaatctcagttgcttataattcaagtacttatttttcttgtccataatctgtgaatcctgc

SEQ ID NO: 206945 - DNA, 122 bp, Homo sapiens
tgacaaatttacatcaagagtaaagttactgctagggcagatgggtgccacctctgatctcggaggacccaaaaatgtcccatgtggatacaggcaagtctccactggctccttcattctct

SEQ ID NO: 206946 - DNA, 122 bp, Homo sapiens
ctcagaggtggaatttttgtgggcacccacacggtagtcgatctgctctcctccggaagacggtcacctttcggggacctgaaaattttttttcaggtggcgcccccattacaagccggccg

SEQ ID NO: 206947 - DNA, 122 bp, Homo sapiens
agtacttgcctgcctgcctgcctgcctgcctactaagactgggttgaagattatttctatcgacaaggttacaaacagtaattttcaacacttcatatggatatacaattacctgggtactt

SEQ ID NO: 206948 - DNA, 122 bp, Homo sapiens
atgcgtccggcccagggccagccaatggcggtagaggtcttgggcacctgacaagaggggcggtccccccgccggaaggggcggggcgaggcgagcggccgcgtcagcggtaggtggggctg

SEQ ID NO: 206949 - DNA, 122 bp, Homo sapiens
gagcccaagccagagcagtggcagagaaagaggtgacatcagcaggcaggtgcatcctcacgtaatctttaggaagagtgactgaatttcctacagtccacagaacagatgcatgtgcccct

SEQ ID NO: 206950 - DNA, 122 bp, Homo sapiens
taccaggacgggagccaggatactttaagcgtgtcactctgcaagaattccctcaaccctcgtgggcacttttattccatcccaccttccccaacacacacagactcaggcgtccggcagcc

SEQ ID NO: 206951 - DNA, 122 bp, Homo sapiens
agtagcacgaggaggtgttgcagcagtggcagatgtgcatcgagctgctctcgccgggctcgctgccgtcgccgccgccgccgcagccgcctcccccgggctccccgtcctcctcgccgccg

SEQ ID NO: 206952 - DNA, 122 bp, Homo sapiens
agacccgtggctcagtgatagtgcacagcaggtagcagctcagacactctttaaggctggcgccagtccagtggtgaagctttctcatctgtcaagagcagaaaaagatgctccaagcaggg

SEQ ID NO: 206953 - DNA, 122 bp, Homo sapiens
gggcgcgccttggggaggggcatttgtccctccgaggaggctcgcacctcggcctggacacgcagcagatactggcacccacccttcacttaccgcgcgcccggggtgactcggatccgtcc

SEQ ID NO: 206954 - DNA, 122 bp, Homo sapiens
tcccagctcgaaatagttctgtgccccttgcacgttcttccctggccagggcttccttctcgctagtctccagctcccaggagtctcggccttgagtgaaggatgccagtgtgagcctgaca

SEQ ID NO: 206955 - DNA, 122 bp, Homo sapiens
tgaataattgctgaagattcggggggcctggggtgggggtcgggagtgctggattgtgtacgcgtctgtgtgtgtctactaaggagacggaatgtctgttatgtatctggagatagggcgac

SEQ ID NO: 206956 - DNA, 122 bp, Homo sapiens
cccaagcaccgccgggcccccccaacaccgccccacccagctccccaacgctgtccagcccgggcccccaacactgccccacccggcccccgggagcctcccggctgccctcaccctccagc

SEQ ID NO: 206957 - DNA, 122 bp, Homo sapiens
cgtctgggcagcggctcttcgggggccacgccctccgggccctgggggcctagcgcgcgacggtggggtggagctagcctcgtgaccttttaccccaacatggctgcgcccgtgggaccggt

SEQ ID NO: 206958 - DNA, 122 bp, Homo sapiens
gggattcgaggattctgatagggacaaatataattcctcagtgtttattcacttcatggccgcttggacatagacacccgggttaagggacccggaaggtgccttctgaaaatatggcgacc

SEQ ID NO: 206959 - DNA, 122 bp, Homo sapiens
cctgccactctttacagagccgtgagactgtggctaaatcatttatccagcacccaacaacgtggaaatcatgacactccacctacaggggctaggctagaaaggcatttaatcaaacattt

SEQ ID NO: 206960 - DNA, 122 bp, Homo sapiens
ccctcccattccccttccctgatctattcttctcctttggtttccataccatgtatatatcgcagtgtgtattttgcttatgttgtctttcaattccaattaatgtggaagcgttgtgaaca

SEQ ID NO: 206961 - DNA, 122 bp, Homo sapiens
aaaaatgggtaaacaggtagagtgttccttaaccagagtgcttgagaccagaagtgttaccgatttcagattgtagactatgtgtgtgtccaagagttatcttggggatgtgacccaagtct

SEQ ID NO: 206962 - DNA, 122 bp, Homo sapiens
gctggctggggctcttcccagacatcatgggccgagtgaacaactgctcgcctcgctggtcggctctgatcttctccgcctacgccgagtacttccccgcgtgcgatatctttcccttccca

SEQ ID NO: 206963 - DNA, 122 bp, Homo sapiens
tctggccaacagtgaaaccccgtctctactaaacacaaaaattaggcgggcgtgctggcgcgtgcctgtagtcccagctactcgggaggctgaggcaagagaatcgcttgaactaggaaggc

SEQ ID NO: 206964 - DNA, 122 bp, Homo sapiens
ctaggcccgcagacctggccgtccgctgacgcagcgaaggtctagcggaaccttggggatcgctctcccagtgccgaccgaaggcccggacctccaggctggacgcggcgaaggccgcataa

SEQ ID NO: 206965 - DNA, 122 bp, Homo sapiens
cttagattccgtgtcacggcccggcttgccgaggatgcctgctcccgccttcacctgcctcgcagcctccccagtgctggccaggcgctgagggatgcttgaccccaccccatggatgagtg

SEQ ID NO: 206966 - DNA, 122 bp, Homo sapiens
cgcgccagaagcaggggggaccgcgagactctttccgcctatggtcccatccttgccccccgccccaggagctattcctggccagtcagaggtctcaaaacttcagattctcactttcctct

SEQ ID NO: 206967 - DNA, 122 bp, Homo sapiens
ggcccgattgtacccacggtgcatgtcatctgttccactcctgctgactccggtgcgttccgggaccaccttgggaggtgatgcctgccccaggaaggaggctctgatgcaggtcagtgccc

SEQ ID NO: 206968 - DNA, 122 bp, Homo sapiens
ctgggctcaagtgatcagcccgccttggcctgccaaagtgctgggattgcaggcgtgaaccgtgcacttgcctggaattcttgcccttaagtagcttatgatctaatggggaaggcaaatag

SEQ ID NO: 206969 - DNA, 122 bp, Homo sapiens
ttttatttatttatttttgagacagggtctcattctgtcactcaggctataatgcagaagcgtgatcttggctcactgccagctccacttcctgtgctcaagggattctcccacttcagcct

SEQ ID NO: 206970 - DNA, 122 bp, Homo sapiens
tgcagggcctgagctgggggaggaagaacaggcccctcagtctgaacctggggctggcaccgagcgccaggctcccagcccacccagctttgcccctctgagccacctcctccgccttccct

SEQ ID NO: 206971 - DNA, 122 bp, Homo sapiens
gccggcgaaccaggaaatagggaagccttagaccgaggggcctttacacggcccagagggcggccgcaccgcctggcatgccgggaaagggagtcgcgagcgcggctacgcgagctgaggac

SEQ ID NO: 206972 - DNA, 122 bp, Homo sapiens
caggtagccgcgctgatgggtgtggcggcgacggggggcttcgggctccatggctggcgccgggttcggcggcggggtcaggccggggcgggccgcacgcgcggtgcaggcggcggatgctg

SEQ ID NO: 206973 - DNA, 122 bp, Homo sapiens
ggggtgggagaagtagggcaaccctggagcagcccacagaggtactggtagtgctcaagccgcctgaccagcctagagtctgccaaggccagaagagccagacctggagacagccaggatgc

SEQ ID NO: 206974 - DNA, 122 bp, Homo sapiens
gtgtaaaggggagaggaaagatacaccaagcccttctctaagaaatctttgttgttaacacgccctgagcacctcacttagtggacttccgtctgcggacctgcgacttctatagcgccata

SEQ ID NO: 206975 - DNA, 122 bp, Homo sapiens
aacatacatcttggtggaatcttcaaacaaccatattccgagtctttcaatacagaagagcgtgaactggccacagaagcagcagcacagctcactgaaaggttcttttgttggctgttgaa

SEQ ID NO: 206976 - DNA, 122 bp, Homo sapiens
ccacatcatgggttcaagcgattcatctgtctcagtctccggagtagctgggattacaggcgtgcgccaccaagcccagctaatttttatattttaaatagagaccatattggccaggctgg

SEQ ID NO: 206977 - DNA, 122 bp, Homo sapiens
ccgcagaggcgtgggttctccaggcagcgcccagctggggggtgctccgtggccgcgggccgagtccagctgaggtggctgcaggggtgactttgagacttgtgttccacagcgaggaagaa

SEQ ID NO: 206978 - DNA, 122 bp, Homo sapiens
ttccaaatactcctgaaggaaactttacttctcctggctatgatggagtcaggaattactcgagaaacctaaactgtgaatggactctcagcaatccaaatcagggaaattcatctatttat

SEQ ID NO: 206979 - DNA, 122 bp, Homo sapiens
cttcttcttctcctccaaccttgcaccagtgcctccaaattggctgaacctgctgaaagccggtgggagagagcctgggaaatgtatttcggaggcatacacaacagaggaaggtgtctggg

SEQ ID NO: 206980 - DNA, 122 bp, Homo sapiens
gggcaccctcctataggacgcgcccctctttctcagggtgaacctctggttcccgatacccgctcccaagaccgagaccctgttacggccacatcaacacaggtccccctccccccggcgtc

SEQ ID NO: 206981 - DNA, 122 bp, Homo sapiens
cggcgccatgggcaaccgcgggatggaagagctgatcccgctggtcaacaaactgcaggacgccttcagctccatcggccagagctgccacctggacctgccgcagatcgctgtagtgggcg

SEQ ID NO: 206982 - DNA, 122 bp, Homo sapiens
gccctccatcttgcgtttccgagcccacacctagcgtgtctggaaggtgtgggtggattccgtccacgggcagcgctgaaagcatgagtaggagcgggtgttacaatgaatgtcttgacagg

SEQ ID NO: 206983 - DNA, 122 bp, Homo sapiens
gtgaagagcgcgggctttggaaccctaggcgcgcccgcaatcccagctctgggtgtggcgcgggacacctcctgctgagggctggtaaacccagacttctctgcgtccttgctgcacgcgag

SEQ ID NO: 206984 - DNA, 122 bp, Homo sapiens
cagttaacggaggtgaatgagcgaatggcaggttctgcctgaactgagcctaaccctacccggacctgcaaaaccacccctatgaccgaataccaggatggtgcagcgggggagggtggaag

SEQ ID NO: 206985 - DNA, 122 bp, Homo sapiens
cccagccgcaggcgcccctgttgtttccttcgggcgggtgggttggagaagaagtccacgcgggattcttcaaaacggcgtacagggggattctagggccccatggttacttctttggaccc

SEQ ID NO: 206986 - DNA, 122 bp, Homo sapiens
gaggcatcatggcagagcacatgagatgtcctcagctgggcttggctgcctggccagggccgggggctcagcagcctcctctagcctctgatgccttccctccacggcccaggtctcctcac

SEQ ID NO: 206987 - DNA, 122 bp, Homo sapiens
tgcacttgtacagatacaccataatctaagaatcaccctacccccatgaacagggtgtcacgcatgtgcttgactgtgtgcttctacagtggcaggtagagtgaatgcagtgcaggaaatat

SEQ ID NO: 206988 - DNA, 122 bp, Homo sapiens
acaaatttgttccggagatactatcgcacggcgaggcatggacgctttcatgggtggttacgcgacagttgccaggaccgagggcgaaaccggctgcaaggcattgtgggacattggaggac

SEQ ID NO: 206989 - DNA, 122 bp, Homo sapiens
gtttcagctccgggatcggtgggatgagggtgggagcatttcagcgtgtccgcgacttgccgccgccgccgccatctagccaggaggaaaaagggacagccaactgggctcccacggagcgg

SEQ ID NO: 206990 - DNA, 122 bp, Homo sapiens
gaaaccagagtatcttcaaagaggcggggccaaggccagagctggacaccacgactgccacgtaagaggaatcccaagcatactgcgatcaagggaagggaagaaaatccactcccagaagc

SEQ ID NO: 206991 - DNA, 122 bp, Homo sapiens
gggccctgccggcccataaatcagccgctaatccttcccctccgccggcctctcgtggggcgtgatggatgggttcccggcctcgccgactgctgtgaaatcactcagcagccaggcaagcc

SEQ ID NO: 206992 - DNA, 122 bp, Homo sapiens
caaaaggtcaccagaacaagagctgaaaattcgtatgcatgaccgcctatctaccacgaccgacgccacgccgagtcgattggcaacacagacgagccggtcgaggtccggtcgagattggt

SEQ ID NO: 206993 - DNA, 122 bp, Homo sapiens
aagacgaagccccggcgaggaaggtgggcggaggcggcggcggcggcggctgtcagctcgcgttcccctgctcacagcgctgccattactgtgcgccgaggccgcctccccggccggccgcc

SEQ ID NO: 206994 - DNA, 122 bp, Homo sapiens
gaaaactacacaccacagtatgggaagtcaagaattttttttaaggttttctgatccacccgcaagtggcatttgaccaggtccaggggcatgatggacatgtgtgtcagcccacagctcag

SEQ ID NO: 206995 - DNA, 122 bp, Homo sapiens
cttttctctgttttagttgattttccttagccttctaagatccccttctaatggaaagaacgcttagccggtcacaggagatgtgaggtcttagcctgactgtcacaactggcctctttgag

SEQ ID NO: 206996 - DNA, 122 bp, Homo sapiens
gtccaggtatactctaccctcctataggacctggatttttaggcccccgaggttggtcaacgtggagtctttcccactgttcacctgggaactgaaggaatatcccatggggccctctctta

SEQ ID NO: 206997 - DNA, 122 bp, Homo sapiens
caagtaactttgccaagtaagcatctttacacctaatcccaaaggctcttttaagagccacgcatgttttcaataaatgagttgtaatcatttcattcaaaaggggggttattggacttagc

SEQ ID NO: 206998 - DNA, 122 bp, Homo sapiens
tgtgcggtgggagggagggaggcagagggacagaccaaccaagagcagaaggggtgtagacgtggcacatttggagtcagaagcaggctctgcatgagacgcagcctcaaattggggctctg

SEQ ID NO: 206999 - DNA, 122 bp, Homo sapiens
cggcgactccgccctcagcggggagcggggagcggggagcgatgcccggggcggccgcgacgtcagcgtccccgcccctgccgcccctactcccggccaggcctcggggacccccgccccac

SEQ ID NO: 207000 - DNA, 122 bp, Homo sapiens
ttctagctaaaacccagaaggggcatccaagaagatgggagggcaaattactaatgaaggcgggccagtccctgtgcagccccagaggagtggaattgtgttcatacattacttgcagcctg

SEQ ID NO: 207001 - DNA, 122 bp, Homo sapiens
ccctcactcccctgcaggcaggaatccgtgggggtggggatagacaccagagtgtgcctgcgataataggaacccaaaccagcatttgtagaggcttcactgtgtgctaggcactgtgcaaa

SEQ ID NO: 207002 - DNA, 122 bp, Homo sapiens
tcctggccaggtcagcccctcagtgggccctggccctagaaggtctcagaagcctggggacgctgttgctaggcaccagttgctaggctacacattgtttctcctgcttggcctcctccagg

SEQ ID NO: 207003 - DNA, 122 bp, Homo sapiens
ggagaggcatgctggaaaaggagcgtaaaaaataggctggcggtggctttctgggtgcttcggaggtgtccttgaagcgcattctcaggtcggaatcttgcattcagaggttccaggctgag

SEQ ID NO: 207004 - DNA, 122 bp, Homo sapiens
tagaggctcctgctacggactggtcggctctggggttgtaggcagaaggctctaagcggtcggaagggtttcctgtgtgtcagcaacttcactttgccgagatagctggcggaagagggaag

SEQ ID NO: 207005 - DNA, 122 bp, Homo sapiens
ttcccgtggtgacgtctcggtgttcctcaaacatggcagctggcacgaagggccggcgcacgtcccaaacatagatgttgtggtccaccatcatggagcacgtggccaggtggtggcggcac

SEQ ID NO: 207006 - DNA, 122 bp, Homo sapiens
accatcagtgcaggaacttcattcttgaagcttaaatcatcaacatttctttcagtctcacgcttttcttcagaatgagctgcaagagaatccatgtcttgttgtgggacccaggtccaaag

SEQ ID NO: 207007 - DNA, 122 bp, Homo sapiens
accagaggggttttggccagaaaacaaagagagcaggggctgctcactcctcgtcccctgcgcctgaaattcaggtcgcctgcagctacggcctcaggtgagtggctcagggaagggtcgct

SEQ ID NO: 207008 - DNA, 122 bp, Homo sapiens
ccttccccagagggacattggctggcgcccggacagcacccacctgctggtcttctccaccgagtcagccttccactatgaggctgatggcgccaacgtgctggctggcatcatgagccgca

SEQ ID NO: 207009 - DNA, 122 bp, Homo sapiens
cagcaccggccaatctagggacctgaggaaaaacccccaagatgcccacgagctgtgtggcgggggcacaggctgaacctctgctggggacttagcatcctagacttccccgagtgttcccc

SEQ ID NO: 207010 - DNA, 122 bp, Homo sapiens
aagcagaattgattatctctttccctgtgctcccacagggcaccatagcattgaacatgtcgaactgtcgattaaatacctgatttctgtatctgaaactcacagcaaggtgccaggcatac

SEQ ID NO: 207011 - DNA, 122 bp, Homo sapiens
aacatgtgatacaaactcaagattttattaaaatcatttgtaagttaaattagcatatctcggtggtgaaggaagacttttaataaagcaaaataatgagttaggtgaatcaacagaaagag

SEQ ID NO: 207012 - DNA, 122 bp, Homo sapiens
gagggaagtgcgaagcagctgcgggacggactctagggaccgttcctcttcagggctgcccgcctcagaagggcctgtgcatgccgctgtgtgtgtgttgggggtgtgggcgggtagaggag

SEQ ID NO: 207013 - DNA, 122 bp, Homo sapiens
attacaatagtgtactgtgcttatttgttctaagagaagaattgcttctttatacagctccgacagaagcaggagtccgagttaaaccttcagttgtatagacaataaactataattttcat

SEQ ID NO: 207014 - DNA, 122 bp, Homo sapiens
cggtgggaggcgcggttttggggattgttcatcatggattggtgaatttgggctccttctcgaggtggtggcccatcccgtctgctctctgtcccgtctcccgacccgtacgcttttccctc

SEQ ID NO: 207015 - DNA, 122 bp, Homo sapiens
agagtccccgcccagagcccagactgccggaggatacaggccagagccgcctggactgggcggctgggcaggggaggggaggggagggcccaggcagcccccggtcgcttgctccagggcag

SEQ ID NO: 207016 - DNA, 122 bp, Homo sapiens
ggcgaacaagacctggtctctactctcggccagtatatatgttggcgggcgtcggggggacggggtagggtaagtgacagacgtcagaccaggcagccagattaagtcaaaccctgtcgttt

SEQ ID NO: 207017 - DNA, 122 bp, Homo sapiens
cgctgggatccacagatcccagctgaaagctgtcaagctgggccacccctggtcgtcccacggcccccaggagaccccgaagtctggcctcaactagcaccctccaccgccaaggaacaaac

SEQ ID NO: 207018 - DNA, 122 bp, Homo sapiens
acagtgccagccccctccctctctcttgattcaggtaatcactcccctcctttgacttttcgggcctgggggtggaaacattgatttgctactggccctagtagattgtacactatttcttg

SEQ ID NO: 207019 - DNA, 122 bp, Homo sapiens
gaggtagggggctccgggagagcggagagagtttggaaagaatccatccctccttctccccggcggctttctcgagaccctcacacagcgccccgccccgccccagtacatttcctttcagg

SEQ ID NO: 207020 - DNA, 122 bp, Homo sapiens
gtggcgctgcccctgcccgctccctcccgctcgtgcagctccggcatcagtttcggggatcgtgtaatccgatcccttctgactcacaagccctgagtgacagttctgatttggttcaaccg

SEQ ID NO: 207021 - DNA, 122 bp, Homo sapiens
ctccccgctcttctaagtacactgagcagggcccgcgctgaagtagaagctgtccgggggcgcgtagcccggagtcccagtgtggcccggaggaacggagcccgtgccagggcggcccagtc

SEQ ID NO: 207022 - DNA, 122 bp, Homo sapiens
caagtcattagcttcctctttggggcctgaagtcaagcttgtctgggtagctgaaaggaccggtagcactgtttacttaaagacctctggacagtacctataaattaattcctgtgcatgac

SEQ ID NO: 207023 - DNA, 122 bp, Homo sapiens
caaatcgaccacaccgggcgctggaaggagcaccgggagggaaacggagggttgacgcctcggcctctgggtggctttaaaaccctgtgccaatagtagactgggtgctgagcgcttcccaa

SEQ ID NO: 207024 - DNA, 122 bp, Homo sapiens
ctgggagtgcgcgcggtcggatcacaaggcggcggcggaggaggcccagagaccggagcgcggagacctcagccagcggcctacgcccaggcctttctccaccggaggaccagggaaccgca

SEQ ID NO: 207025 - DNA, 122 bp, Homo sapiens
aacaaaccttcccaatttgggggtgcaaattttgatgtctgaagcacatcatcaaagtagcgagatgagactggctttactaagcaccttaaagagaagagcatctcacagagaatacagct

SEQ ID NO: 207026 - DNA, 122 bp, Homo sapiens
ttgcaaaagagacagctagcaatctttactgtactaacaacccgccacccagaggccaggcgggagcgtggacggaagtgagcgcatcgggctgggagacagccgaatctcagaagtcagca

SEQ ID NO: 207027 - DNA, 122 bp, Homo sapiens
gtcaaggcccagaacagatgaagagcccacgcgactcagccagggcaccaaggaaggaagcgagacaacttcctgcttgcagagcaggaggaagacaacgtgcaggaagggcagctcaaggg

SEQ ID NO: 207028 - DNA, 122 bp, Homo sapiens
caagtcttcttagagctggggccaagtgacttctccttgactcctctgagcaaagcccagcgccagccacagcacaggaacctgggcaggcagtccaccctcagggcctgcctgtgaccact

SEQ ID NO: 207029 - DNA, 122 bp, Homo sapiens
atgatgaggctttctgttaaccacatgtgttcagaaatggatacagccctaattttgacacggaatgcagctaatgcaccttgctatagatgtacgtccgttggaaaagtgtgtgatgggca

SEQ ID NO: 207030 - DNA, 122 bp, Homo sapiens
atccagaaagtaaaaaaagtggtcacatgtgcaggggagccaggtgggttagggtagtagcgggagactttggtttgatggtattgtatactctgatatttgacccacatctgtgcatcggc

SEQ ID NO: 207031 - DNA, 122 bp, Homo sapiens
cagggctcgggacctgcagcccgccatgctggagcctctccccgcccgcgccttcccctgcgggctcccccgcccctgtccggagtctccccgaccggcaccgccctctgctccgcggcggc

SEQ ID NO: 207032 - DNA, 122 bp, Homo sapiens
acgtccccgagaccagcccggtccaggctttggggtctgcctggctgtctccttgtcctccgctgccccgccactcctgtccccagcctggacccagaccactgtgtcttggcctttgtcag

SEQ ID NO: 207033 - DNA, 122 bp, Homo sapiens
caccgcaggtcatggttggcagctagggggagacgcggatccctgagggctactgcgcagcggccgccacttatggacacgcagacgcttgcggggctggtgcccagatgtttgcccatcgt

SEQ ID NO: 207034 - DNA, 122 bp, Homo sapiens
aagacattggcacagaaatgtataaagagctttattgaaaggcacagattgaaggctgggcggctcaggatgctgggctccttactctgccttgcctggagatttgagattcctgccttgag

SEQ ID NO: 207035 - DNA, 122 bp, Homo sapiens
agcatgtttgtcaggtttgttttgttgttgttgttgttgagacagggtctcaccctctcacgcaagatggagggcagtggcacaatcacggcacactgcagccttgacttcccaggctcaag

SEQ ID NO: 207036 - DNA, 122 bp, Homo sapiens
catgctgcggcagcgtgtgtggcgagtcagccaaggaggactgagcatgtgaactgcgagcgttcccggccgctgcggtgcgagtctgactgttctgaaattaaaaaaaaaaaaaaaaaaaa

SEQ ID NO: 207037 - DNA, 122 bp, Homo sapiens
gaggcagaaagcgaaagcggacgcgggtcagcaaacggggagctgggcatgctgtccccccgccccccacctctccaccaggctcccagccggccttgaccttcccccgcgcttaagcggct

SEQ ID NO: 207038 - DNA, 122 bp, Homo sapiens
accccttctcacagaacctgatctgcctcagctctccttgcctcctaagtggcagtgccccgctgctgggaagactcctctctctgctggatgcttcttcaggcctgctgctgcacagctta

SEQ ID NO: 207039 - DNA, 122 bp, Homo sapiens
actttttcctgattacaattagcaacgttgagctggagcatattttctgctctctgggctcggtctggctttttctcctaaaacttttatgttgcgtctctccatatcccgtcttactggca

SEQ ID NO: 207040 - DNA, 122 bp, Homo sapiens
acaaaaggaggtactggttgacttcataggcacactgccatgatacaatgtcaagagatgcggagaagttatcattatgcacagcaagtaaggagctgctaccaaaccaaatggtgtcaaga

SEQ ID NO: 207041 - DNA, 122 bp, Homo sapiens
ctgtaggcacccctccatggatgcgcgaggaacgagtgtggcgaaggctgcgagttcccacggggtccttggcccggtagtgaaggtgacctgaggactgctgggcacgcactaggaaccgg

SEQ ID NO: 207042 - DNA, 122 bp, Homo sapiens
ccctcccaggcaggccctaacttgctggcctccttcaggagggcgatggcaatacgaatccgctgccgcaggaagatgagcatcagcagcaggatggcttcaagcaccgccaacacgatcac

SEQ ID NO: 207043 - DNA, 122 bp, Homo sapiens
cgaccatctgccacccctgctggtgatcagccccttcccctttcctctctgctcctccttcgcctttcccagcagggagtctgcatcctgcattcctgggcagggttctgatgacatctgtc

SEQ ID NO: 207044 - DNA, 122 bp, Homo sapiens
tagctgccttctggctgttccctgaacgtgccgtgtgttttcacatcccctacatttgctcgtgctcttctattaggaagctcttttcccctgctcctttgactggtcaaaacctacttgcc

SEQ ID NO: 207045 - DNA, 122 bp, Homo sapiens
catcagtgcatttcactagtatttcccttgaacattttcacttgcagcaactgagggaggcgtagtaaggaagcccaacacaaccaattcccccactccccaaataaaccactacgaccggt

SEQ ID NO: 207046 - DNA, 122 bp, Homo sapiens
gtcgccggatggcgtaaataacactgacactcaaatcccccgtctgatttcagattgggtcgatttcacgcaggttctatagaatttgccaagactgctggcctgttttctaccctgattcc

SEQ ID NO: 207047 - DNA, 122 bp, Homo sapiens
cctctgcttttgctcatggctggttctgaactttgccccagctgcagggtaggaacaccacgtgccccagcctgcacatggcaggggatggggggcggagctcatgtcacaaggcccatggg

SEQ ID NO: 207048 - DNA, 122 bp, Homo sapiens
gggagagcgtgagcagccacgacatctgggtcctgaagcagcagctggagctgaaccgcccggaccacggcaggaggcgccgcgcagactcgatgtcctcggagagcacctgggacgcatgg

SEQ ID NO: 207049 - DNA, 122 bp, Homo sapiens
tcgcgagaaggtgactttctttctcggtatttcctggtttccagaatccttagcgcgaggcggaaaaaatatttctcccagcttgtgttgatgccgcgattttgactgagacttcttcccac

SEQ ID NO: 207050 - DNA, 122 bp, Homo sapiens
gaaatttggccctgaaatgtggaccaggcccagtttattggcctctgcagagcctaaattcgttatgcagagaaaatgcagaatgcaaaactcactggtgttttgaaaaaggccaccagaaa

SEQ ID NO: 207051 - DNA, 122 bp, Homo sapiens
tcacttcgagttctcatttgtaaatcaggattgtccacggcctctcttgcacgaggctgccgtgagggtgcattcggggtgctgaggttctgtggattgtcctgtccaccacacaagttcat

SEQ ID NO: 207052 - DNA, 122 bp, Homo sapiens
agcgaggggcggggtttaagcaacaaggggcggagcttaagcactgaggggcagtgcttacgggtgaggggcggggcatgttctcgaatcaccaggggctgggtctgggatagcgtgcgtgt

SEQ ID NO: 207053 - DNA, 122 bp, Homo sapiens
aacacggtgaaaccctgtctccactaaaaatacaaaaaattctccgggtgtggtggtgggcgcctgtggtcccagctactcaggaggctgaggcaggagaatggtgtgagcctgggaggcgg

SEQ ID NO: 207054 - DNA, 122 bp, Homo sapiens
gctttgaggttcacctccttgacatctaagctgcagcttcctggacgtcggcctaggagacggggatggtggcatccctcgtgttttctgagactgcaccatgaacaggacgggcctcacat

SEQ ID NO: 207055 - DNA, 122 bp, Homo sapiens
cagaaggggattgggaaccagaagccaggtgagcctccctgagatcacagggcctgattccgggaccccagtgtccaacacctgcccccccagggtgctccacagcccctgcctacacctca

SEQ ID NO: 207056 - DNA, 122 bp, Homo sapiens
gccacagaatcgccccaccctgcctgggtaggcactgggagggaacttccttagcactttcggaggtggagttaatgagacgcagctggtatgatggaaaaagctcggagccaggcgactga

SEQ ID NO: 207057 - DNA, 122 bp, Homo sapiens
ttccttgctaccactcagagcggcagtgacacagttcccttatctcagaaggccagaagacggctgtcaaaggtcacagggaaatcaaaggcggggtacagggccagagggaggaggaaaca

SEQ ID NO: 207058 - DNA, 122 bp, Homo sapiens
gcctctgctcgaatacctctttgatggggagctcaactttttaaaagccaccagttgcatcgtaagccaactcttgccattagaagatccttcttatgccagacggaaaaccgctctctgga

SEQ ID NO: 207059 - DNA, 122 bp, Homo sapiens
tgactaaatctttcatagttcattcattgtctggtgagagcacagagctaagaggaccagcgttagcatatattagagtcccttaagaggtacttgctttgccgtgccacataaccataggt

SEQ ID NO: 207060 - DNA, 122 bp, Homo sapiens
ggaggcgtccgttcaagggcgagagcgcggccctgagcggcggagggatcccgggtgaggcggcttcccgaagtcagaggggagggggccataaagtcggcgggggacgggaagcgcgagct

SEQ ID NO: 207061 - DNA, 122 bp, Homo sapiens
gaaagtgggccgagtggattgtacagcctctacaatatgccgaaagtgagaatgccatgacgatggggcggtctcaggagaacgctgtgacaccgtaactcttaaccccggctcaggacgct

SEQ ID NO: 207062 - DNA, 122 bp, Homo sapiens
ccagggcagcaggcatccctctgacgcaggcccttggaaagcaggttgagaaccttgggtcgggctgaggagtctcaggttccgccatcccacggaatcagagcagacccgatgcacgagac

SEQ ID NO: 207063 - DNA, 122 bp, Homo sapiens
agctggccgaggagggacccaccaaagacagcgcgctgcaggggctggtggccacttgtgcgagtgcccctgccccggggaacccgcaacccttcctcagccaggccgtggccaccaagtgc

SEQ ID NO: 207064 - DNA, 122 bp, Homo sapiens
gctgtagcctcttaaactaaaccagctgcagcctcgtcatctgtaataccttgactcccccgcccccacccctttccggtctgggcgggacctgtcgctggggagggcggggagaggagtgg

SEQ ID NO: 207065 - DNA, 122 bp, Homo sapiens
gcctgcagggcgcagagaggcgaaggcaccggtgtcagggagaacgcatccgttaccgcccgcctcccgcaggtctgcgtcaaactagatcctggcttctgggttcctgacctcgtttggcc

SEQ ID NO: 207066 - DNA, 122 bp, Homo sapiens
ggaatatttgaatataatgagactccaccgcagacaggctctgtttttcttccagcccctcggagtcacgtgagcgccgaggcccctcccgcggcaggcggcgaaagggcttgcgcgccctc

SEQ ID NO: 207067 - DNA, 122 bp, Homo sapiens
tggattggggcctcagggagcggacgtgtaactggggaatccccaagacccctgggcgcgcgtggagttaactgcgagcctgtcctcattctggcgatcagacgccccagggcctcgtgacc

SEQ ID NO: 207068 - DNA, 122 bp, Homo sapiens
attgcttggcctccagggagccaggacaatgggacttagttgctccccttcctaccccttcgattgtgagagagggacatactctctcagagaggggagggcacccaacttagcacccagtt

SEQ ID NO: 207069 - DNA, 122 bp, Homo sapiens
tactaatataaatctcatgttagagagcagaaaactgagactcagagaggttaagccatgcgcccaaagtcgcagagcttgaaggtggcagaaccaggattgaaccgtggtctgcccggttc

SEQ ID NO: 207070 - DNA, 122 bp, Homo sapiens
ctctctcattaccatgtaattgtttatttctgctccacaggggcctctgcataatgctgccgatgggtactttgtgaaggagtcttcctaagagttccaaatgggaagcagtgcaaaactgt

SEQ ID NO: 207071 - DNA, 122 bp, Homo sapiens
gagccatagggggcttttgagttgtcctgtagcacaaggctggaggaggagataacagaccggaagggtatctaacagccctgacagaaataaggaggtagagggatgatgggaagaaacgt

SEQ ID NO: 207072 - DNA, 122 bp, Homo sapiens
agggccgggcacggcgcagcctctcagccagttaggggtgagtgtgccggcaccttcctccgccacggcggagccgcctgtgcagggcggtcgcagggccctcgcaggactctgcaggaagg

SEQ ID NO: 207073 - DNA, 122 bp, Homo sapiens
acctacccaccctcacctcataatctacctttagtttatgttcactgtctctaaaaataacgtgggtaaaacatatatttaaaatgttgccattttaaccatgttaagcatacaattcagtg

SEQ ID NO: 207074 - DNA, 122 bp, Homo sapiens
cgacgaatctacttgtttgtcaagcttgaaacctgtgcactgagtgattccgaaacgccccgcaccccgccttgccccctcacctgcctcagaagccggcgcttccggagatgccgggatcg

SEQ ID NO: 207075 - DNA, 122 bp, Homo sapiens
tgggagtctgagtttacagaagctgatgctgcctagcacccatttaatctccttcacttccgtggatagtgtgcatgtgagtaccagttattactatgcacaatgtaatggagcatttaaaa

SEQ ID NO: 207076 - DNA, 122 bp, Homo sapiens
actcagggaagggactcaggaaaggggagttccccctggcagcctcctcgtgggcaccaccgagggtgagaggagccagctcagcgggtcccacccccagggttgcccaccttgaccacaag

SEQ ID NO: 207077 - DNA, 122 bp, Homo sapiens
aagaaatacacagataaaaaccacacaatggctgattaagggtggggggaacctcagaaacgctgaggagacacccagtgtggtaggctaaataatggccccatacctaaatccacatccct

SEQ ID NO: 207078 - DNA, 122 bp, Homo sapiens
gccatccaggggttggacagacgtgaagagctctgggtaagatgtccttcctcccgggagcggtcgtttgggagtgctccgtgggttaagcaaacgcaagctgtaagtgatgactgtggtcg

SEQ ID NO: 207079 - DNA, 122 bp, Homo sapiens
cactatgcagctggctttcttgtttgccacatcctaggaatggcattcaagactgaggtgcggcaacagcaacaacattagcacgactactactacatcacactgtcattctgagcactcgc

SEQ ID NO: 207080 - DNA, 122 bp, Homo sapiens
ctcgtaggcggtggggggctttgcggcgcccccaccccagccacgctgggagcgcagccccgtagagctcaatgtggagctctcaaaaggcaggaggaagatgaaaagtgagtcgagaagct

SEQ ID NO: 207081 - DNA, 122 bp, Homo sapiens
cattccccagcaaacgcctaacgaacccaatggcccaggactgaaaattcctttccacttcggctttcccctctacatcccatcggttctgtggagctcgaggggcgtcactgtgtgtgtgg

SEQ ID NO: 207082 - DNA, 122 bp, Homo sapiens
ctccgcctgccctccacccggggccccggcgcaagaggcagcccgcgctccctcccggagcgctagagacagatatgcaagatggcagaggagggggaaaagccaatagaaaagggatattg

SEQ ID NO: 207083 - DNA, 122 bp, Homo sapiens
gcaaaattgattagcaatttgctaattccataaccacccgagcaatactaaccatgggtccgagacgttctaattgtcgccgcctccgcggcgaatagaaatctcacatccctttgatactg

SEQ ID NO: 207084 - DNA, 122 bp, Homo sapiens
ctggaatcacagatatgcaacagcgctgaaaactaattcaggtgcccacccaggatgccacgccaacctcagcataggctgatggctggcaggaagcttcccttttcccttctcctagaccc

SEQ ID NO: 207085 - DNA, 122 bp, Homo sapiens
gaacggtaaacgcccccgggaggggcgacggaaggggcgtgctcttggccgggcgaggggcgtggcccgcgcacctcgggcgtctaggggcgtgcgccgcgggactcgagtcgggcgtatct

SEQ ID NO: 207086 - DNA, 122 bp, Homo sapiens
tgagtggggctgccgagagggcaggcgtggggcgaggccaaaggactgaacccgcaggagcgtcacgggcgccggggcggctgccgacggcgggactgggtcagtgagaagcccgtgggccc

SEQ ID NO: 207087 - DNA, 122 bp, Homo sapiens
agccaaatcatccagcagagtacttagcacagagcacactttgatggtcaggaactgctgcgtgagacactgatgggtgacagagggaggctcgttagggttagtccacggcagctgtgcct

SEQ ID NO: 207088 - DNA, 122 bp, Homo sapiens
tttgtcaccccttcccccgccacgtggaggtgcctcagccgcctgagctcagcctgcctgcgcctggatttttaagaaggggaaaccaaggacagaagccgccccctaggacgacgcgcccg

SEQ ID NO: 207089 - DNA, 122 bp, Homo sapiens
caaccctcacagccaataggagccgattgctcctctcgcgataatcggggcgtcggatcccgcgagatctgggactgcctaccggccaaaattaaagtgaacgcttcagcaggggaaggtgg

SEQ ID NO: 207090 - DNA, 122 bp, Homo sapiens
tgaaatcgttacattcaactgaatatttggctcattcagatccgaaaagtctcctagcatcgtcgaattccctcctccgcccctccgctctaaaggggggaagggggggaaggtaggaaatg

SEQ ID NO: 207091 - DNA, 122 bp, Homo sapiens
cggaggaggcgagcttggtgatgagctgccccagcggtagggggcctggggcggagaagccgctacagccgcggccgggcgacgctgacatctggcatccctggggtctcagagacacgggt

SEQ ID NO: 207092 - DNA, 122 bp, Homo sapiens
caagacagctggccaccttagagggtttcctaggagaagctcagctttctcctcctctcccgctcccctgcgctcctcatcttggatcatggaactccttttcccagaagcccaaaccagaa

SEQ ID NO: 207093 - DNA, 122 bp, Homo sapiens
caaaagaaggaattgtttgcgagttcagtcatccaaaaagcttcttccatatggagggaccgggtgcgctgggcgcggcgtcccctgcgttgtcctcctgctgccgcccccgcggccgccgc

SEQ ID NO: 207094 - DNA, 122 bp, Homo sapiens
ggctgtgagaaaacatcccagatgctgaaaccaatagtcttagcccagaatctcaaacgccgtggcaaagagggagtgacgacggcctgtggaaaaacctgaggagttttgggcttagcgcc

SEQ ID NO: 207095 - DNA, 122 bp, Homo sapiens
tttgggaggccaaggcaggcagctcacttgaagtcaggagtttgagaccagcctggccaacgtggtgaaactccgtctctaggaaaatacaaaaaattagctgggcatggtggtgtgtgctt

SEQ ID NO: 207096 - DNA, 122 bp, Homo sapiens
ggcaggtgcctggagtagtggacggtggaaatggcgacggcggcctgcacccagcgatcccgaaagtgcccatgtatccgtccatctgggtttttttttttcttagatcatccaccaaggcc

SEQ ID NO: 207097 - DNA, 122 bp, Homo sapiens
ggcagggccttgggcgaagcgcgcataacgccaggcctgcggcgaccacgcgaagtggcgcgggggagtctggcagccccgagcccaacctttaggaaagatgagctgtgaggcgtcctcct

SEQ ID NO: 207098 - DNA, 122 bp, Homo sapiens
ttaactttttcatgtgtctaaggctccttcctttgcaaatcttccaaatcctaacagtcccgggtttcagcaataatggaggaaatacagaactattctattctttcaaattgtgaacatcc

SEQ ID NO: 207099 - DNA, 122 bp, Homo sapiens
acgcgcggccgtactccgccctccttactccaccctcccccactcccgcgagcacgtgcgcgtcctcgctgctcacatttcggcggagggcgcgctccctggaaaattccactcctgtgcta

SEQ ID NO: 207100 - DNA, 122 bp, Homo sapiens
gagaatcttcaaaagaaaggatataagagggacatggtaattgttatgccattatacagacgaggaggctgaggcataaagagatagcttatctagtagaaagctacagagccaggatttaa

SEQ ID NO: 207101 - DNA, 122 bp, Homo sapiens
tggtgcttttccctactgagatttgcgcctctgtgccgtgcactgtatcagtgttgccttcgtggctctgggcttcgtgtcttccttccggaggctttcctcactccaatgttttaaaagat

SEQ ID NO: 207102 - DNA, 122 bp, Homo sapiens
ctgcacgaggcaccacggtgcgtgaggagtccctgcagcaatgctgacagaaggttctcacgagtggggaatcgttcaggacctggtgactgagggtccggaagacacgcaatgcctgcggt

SEQ ID NO: 207103 - DNA, 122 bp, Homo sapiens
gagggacaggcagtgtgtccagggcttgaaggatggcctggcagagacccaagtgacaggcggtttggcctctgtccccccatggccactcccagcctcggtatttccggggcctccgtggt

SEQ ID NO: 207104 - DNA, 122 bp, Homo sapiens
cagcctggggagcaaaagacccaggaccagttgtagcaaactgaactcaagaaggagagacgaggcacgcgctggtctttcccgagggggcagtacggtccccacctcccacgcgtcgcgcg

SEQ ID NO: 207105 - DNA, 122 bp, Homo sapiens
aggacaggagctgagggttggcctccgtttctccttacggggtggaaggatgacagcctgcgcaggttctggctagagctgggcacaaaggcaggcaacagttcctgtgaaggctgttgtgc

SEQ ID NO: 207106 - DNA, 122 bp, Homo sapiens
gacgaacgtgagcgaggcagagtgcgacatggagtgcaagggcgagcgaggcagcgtgtgcggcggcgccaaccgcctctctgtctaccggctgcagctggcccaggagtcggcccgcaggt

SEQ ID NO: 207107 - DNA, 122 bp, Homo sapiens
ctgtagagcagaaacagaggcttgtggcatttaggcagtaagagcacctgagatagtactcgtagtttccacagagatccataactcttcatgttccagtggagaaacccagaaaaaggcag

SEQ ID NO: 207108 - DNA, 122 bp, Homo sapiens
ctgcgcggctgaatgacagggagtagccccgccgcctccaacatggcagcttctatccagcgaagccgggtccccgcttccgggttccgtactgtcggccaggctacttccggcagcgcgat

SEQ ID NO: 207109 - DNA, 122 bp, Homo sapiens
tggtcttgaactcctgaccttgtgatccacccgccttggcctctcaaagtgctgggattacgggtgtgatccaccacgcccggcctatttttattttttggcacagggtctcactctgtcac

SEQ ID NO: 207110 - DNA, 122 bp, Homo sapiens
ggaggctctggggcgatggcttccgcacctcttccaaccaccctctttccctggagtcggcggaccacagctcagccaattggcttggagatgtggcgggttgccacttccctgtgggtctc

SEQ ID NO: 207111 - DNA, 122 bp, Homo sapiens
caccccgtgcatcttcggctgcccaaggcccttcccgaccaggccaaggaggctgtgggacgccgtgggagtggggaggctcccacagagccccgtggctgcacgtacacacctgcgtctct

SEQ ID NO: 207112 - DNA, 122 bp, Homo sapiens
caccgccccaaccaagctccttcccaggtgaggatgggatgtgtggggctccgctgtcagcgcctggttcctctactcaccccactcagggcacctcaggttggccacacctgcagacattt

SEQ ID NO: 207113 - DNA, 122 bp, Homo sapiens
gtcacccggcctggagtgcagtggtgcaaacacagctcaccgtagcctcaaactcctgcacgtaagggctgctcctgcctcagcctcccgagcagctgggactacaggtggtgccaccatat

SEQ ID NO: 207114 - DNA, 122 bp, Homo sapiens
ctaccggaagctgacgggactgccaggagacgagtccccggttgtcatggtaaccagtggcgggaggcgggtgaggagcggggtcccgtcgggccgggtgggcgccagctccctcccaggac

SEQ ID NO: 207115 - DNA, 122 bp, Homo sapiens
tctgtcttctaggaggatgctctttccactggaaagtcccaagctttttatagctcaagtcgcctttcattatttacttccaccccaagcagccactgtcccgcatcttcatatttggaaag

SEQ ID NO: 207116 - DNA, 122 bp, Homo sapiens
aaaaagatttttattgatggaattcaaagtataataataatcacatacacatttctgtaacgggaagataagaatggaactctttggggggaaaacattttatttaatctgggtttaaactg

SEQ ID NO: 207117 - DNA, 122 bp, Homo sapiens
cccgagggacgcggccctaggcggtggcgatggggaccgcccggatcgcacccggcctggcgctcctgctctgctgccccgtgctcagctccgcgtacgcgctggtgagtcccccgccgcca

SEQ ID NO: 207118 - DNA, 122 bp, Homo sapiens
ttattccactttccctcagcatttatgtgtgtggtttcagtagctctgtggctatatgtacgaacacgtgttatttttccaattggacatgtgataattttccaactggaccttgccttcta

SEQ ID NO: 207119 - DNA, 122 bp, Homo sapiens
cggggtggcgaggccgccgattggcagcgaggcgccatgtgaactgcactggttggctggcgggagggaggaggaggcggtttcccgggtaacgggagggcaaggagcggctgcagcggcag

SEQ ID NO: 207120 - DNA, 122 bp, Homo sapiens
aagtcacattgtgattgcttgtcttccctctaaaggttacatttcatgacagagattaaacgtcttgcccattctatgattgcttttgaaaattatgcactaatgatagccactcagcaagt

SEQ ID NO: 207121 - DNA, 122 bp, Homo sapiens
aacaagttgctgccagaaaagactcctggtgtttgaactcattaaccttgatgccaaaatcgacccactccccccgacaaaaactttagtacctgtctggttttacccacccaacctgtccc

SEQ ID NO: 207122 - DNA, 122 bp, Homo sapiens
tgcaagtcggcctgctcgcatttgggaaagcgaaacactcataggaagcgacagccacaccgcatctcaataaagaggcgggaggggaaagaaagccttcctgttatgcaccttctccccaa

SEQ ID NO: 207123 - DNA, 122 bp, Homo sapiens
gcggaggcaggaagatggctgcaggagacatcggcgagctgctagtgccccacatgcccacgatccgcgtgcccaggtccggcgacagggtctacaagaacgagtgcgccttctcctacgac

SEQ ID NO: 207124 - DNA, 122 bp, Homo sapiens
aagacaatctcctcccgataaaccggcccagcgggagaagggagaccaggaagggggagccggcctggaagaacaaagatcaaaatccgtcgggaagcagcgaccggctccccagcgggggg

SEQ ID NO: 207125 - DNA, 122 bp, Homo sapiens
gggtgatcctatttctgtcaaaaataaataaaagcacacatgtgcctttgtgcacttgtgcgcatgcttgtaggtgtgtgtaagtttacatgggcatgcagagtctgcagggacaggttcac

SEQ ID NO: 207126 - DNA, 122 bp, Homo sapiens
tccccgtccctgtctcccctgacactcgttcctccagaagcccggtaaaccccgtccttacgagccccgcccctagctcttctactacggaggggaactgcagagccagaagagcacggagc

SEQ ID NO: 207127 - DNA, 122 bp, Homo sapiens
caggcagagggaattgcagttacagacactgacagacgaacggcctggcaggctcaagggcgagggagcggcatgagcagggtgggcgctggttgcaggtgaggggtcccgaggcgggcgga

SEQ ID NO: 207128 - DNA, 122 bp, Homo sapiens
ctgaaagagccactgcagaaactgaagcagcggtgcccaggagcaaccaacgcccttcagcgaccatgagggctgatagcgttgatcggttccagtgtgtttccagattcacggcctttcat

SEQ ID NO: 207129 - DNA, 122 bp, Homo sapiens
tttgactgagtaactgggcacagagaggctgttatgcatcccaattgcagagctaggcagcggcaagcccactttcacacagcgccagctgcctggctctgggatcagcctgtagtcactct

SEQ ID NO: 207130 - DNA, 122 bp, Homo sapiens
ggaagcccctctcgtgcgccgctgcgacccccagccccgggtctgcgcaagcgcagggctcgcccagcccagccctcggcctctgcaggagaccctcggacccctcctcactgcgccgacgc

SEQ ID NO: 207131 - DNA, 122 bp, Homo sapiens
ttggggatgcagcacatgggaactgctcctggtgggccagggcattgggaggttcctgggcgcttaggactgcctgtgaacagggttacgtgacccgggcctggctctccatctctggtgga

SEQ ID NO: 207132 - DNA, 122 bp, Homo sapiens
ttagagttcctccccttgtcctcaaacagtaatctcatttcaggatacccagtattactgcgtcaaaagacttggacatttgagcatttgaacaaggaagggaagcattttgtgacacacac

SEQ ID NO: 207133 - DNA, 122 bp, Homo sapiens
ctgcctcgcccgctttctctcggaaacgtgaagtgtggcctcagctgaaagtgaggtgagcgtgagtgtggacatgtgtcagtgtgcgtgtgcatgggaggagtgtgtgtgcgcttgatgac

SEQ ID NO: 207134 - DNA, 122 bp, Homo sapiens
catcatcactacgacatgctcagctcctgggccggcctcggggctcggggatcatcacagcgctttcccacactcacagcgtgtggagacagcaaggagttaaaatgaagccgggagcagca

SEQ ID NO: 207135 - DNA, 122 bp, Homo sapiens
gagggtccagggggcacaccaagtagaccttccctttttcccacctgtcttggtgaaggtcgatttcacctcaaccaatttctcccattcacaccctctttttttttttttttttttttttt

SEQ ID NO: 207136 - DNA, 122 bp, Homo sapiens
cccctcagcgccatgtccaggccctccctccccaccgctgcccccaccgggagcccccaccgcccccggggcccctcagtcccacacacagacaacgggcccagtcgcgtcacccgcccgcg

SEQ ID NO: 207137 - DNA, 122 bp, Homo sapiens
tctattacattttattcatttgttagaacatttacttcatacaactgttcactaactgttcgtgagcctgtctttgtgattaaactataaacttttcaaggatagtgactgtagctagttta

SEQ ID NO: 207138 - DNA, 122 bp, Homo sapiens
cataatatcattacagaggtcttccacctgttttaaacaacacgacaagctgtgagcaagcgtgtgtgtggggatgtgtggggaggggtgggtgtgagtagggagagaggcgaggggagaac

SEQ ID NO: 207139 - DNA, 122 bp, Homo sapiens
tttcccaggcttcccccacctcctgcctggagagctgggctggagggctgcccaacggggcgtctgcggccaccccgagggcctcccgccctgagtgaggacaaagggggcgaccccccgcc

SEQ ID NO: 207140 - DNA, 122 bp, Homo sapiens
gtggacaatgcttatggtgccaccttctgtcagtatctagaaacatggtctcacttaacccgtgaagaccccagactataatagctaaaatggggcgcctttaaagtaactagtttatgcac

SEQ ID NO: 207141 - DNA, 122 bp, Homo sapiens
gctgggtcatccacaggcttgagagcggcgtgtcgccggcctagggatgtcgtggagtggcgttgccgcgaggacactccggagcgaagggccgggcaggcccggcctcgcgcctggcgatt

SEQ ID NO: 207142 - DNA, 122 bp, Homo sapiens
tttgaaaacccaaatcgaggagataaccgtttttgaatgaacggcagtgcaaagcgtggtcggggttagcagcaacgtggctgggcgcctttaactcggcgtgacctccgggtcccaggccc

SEQ ID NO: 207143 - DNA, 122 bp, Homo sapiens
cccgcgagcacgcacgcgcagggcccacctctgcgagttccaaaccctcggccctcgggtcgcctgccctgggcctggccccgcctccaggtccggccccgccttcgtgccggggcccgcgc

SEQ ID NO: 207144 - DNA, 122 bp, Homo sapiens
atcctggaagctgggcttcagaagcgtccaggttggtggcgtcctggaggcggggccttgcgtgggggcaggataagagtcctggaggcgggcattagggcagggataaacgccattgggtt

SEQ ID NO: 207145 - DNA, 122 bp, Homo sapiens
ctctcccagctcctgcactctgcagagtttcattttcccctctctcccagctccgcccagcgggaacatttgtgtgctgcctgctggcagaaaaatgcacttcaagctgaggacttttggag

SEQ ID NO: 207146 - DNA, 122 bp, Homo sapiens
cagacgtctctatggtcaagtaaacagagcgtgtgctgtcttccccatgtggtggggttgcgcatgatcagtagctgcaccactagaaagatggcggagcaagagtgagtgtttggggcttt

SEQ ID NO: 207147 - DNA, 122 bp, Homo sapiens
gccgggcagggggcgggactatttagagaagtaggcggggcctgaggtcccagcggaggccggagtttaagtcctgggctgttctcgcttggggtagtctgggtttaaatatgaattatatc

SEQ ID NO: 207148 - DNA, 122 bp, Homo sapiens
agccccgggggccgcagcaacgccagcagccgcagcaacagcacccagcttggcgcgggccgagggctcccaggcatgacactgcagatccgcgactgagcctgtgaggtctgggggactgg

SEQ ID NO: 207149 - DNA, 122 bp, Homo sapiens
ccagcaggaccctaagtctttcgggcagaagagcaaacgcctggtccgtgtgcctaactccggtcccccgtcaatggcagacacggctcctcacacacagcattcctccctcccgttcaccg

SEQ ID NO: 207150 - DNA, 122 bp, Homo sapiens
taacaaaaatgaaagcctctaacaatgacattgcagtgtcgataaagcaccaaatcacaacgtaccattattttggactttataatatttaagcagcaaaagcagcaacataatgtagaggg

SEQ ID NO: 207151 - DNA, 122 bp, Homo sapiens
ttggaggaggcgcctaagtttcccccagtgcccacagcaccctccggcgctgaaaatacacgcaccacccaccaggagccttgggatcataaacaccccagcgtcttcccaggccagagaaa

SEQ ID NO: 207152 - DNA, 122 bp, Homo sapiens
gatcagatggcaacctttagggttcctttacgatcagatcagtttaaatgaaaaaaaaatcgggtgtaatttttatcaccagggagcactggcctggagtatttccatttctaaagagcggt

SEQ ID NO: 207153 - DNA, 122 bp, Homo sapiens
gcacctcagactggggtcgcgtgggtggctgcgcgcagctaggcgctcgcgcatgcgcaccgccatccaggccacggaatgaggccagaggttagatgggttgaaccactacgggaagggga

SEQ ID NO: 207154 - DNA, 122 bp, Homo sapiens
ctgagagcagtaggtttaatgaagccgtaaagcaggacacatatccctgcacaatctgtgcgcctgctcagacgtaacaccccgcagcgcagcaggcagattcagcggcgtcgccccataag

SEQ ID NO: 207155 - DNA, 122 bp, Homo sapiens
tactgtcgattaccttactgggtaagggcaaaaacccctattgtgaaagacttgtggctgcgtagccaacggccattctttttgaaacagtcatttctgtttttgaaactattttttttaaa

SEQ ID NO: 207156 - DNA, 122 bp, Homo sapiens
ataggcccgtttgatgaaacgctgaacagttatcgccctcttgtggaaaaaacttcttagcgtttcactctgtctaggaaagacaaggctgcttggttctgttgactgctatacctcatttc

SEQ ID NO: 207157 - DNA, 122 bp, Homo sapiens
aggattacaggcgtgagccactgctcccagtctctttctgaatcttgactctgtgggcaccgcccgttagggaggctcgcgtccctgcccaggggccttcattaaccgaaggggacgtgcca

SEQ ID NO: 207158 - DNA, 122 bp, Homo sapiens
agtgagactccatctccaggaaaaaaaaaaaaaaaaaaagaaagaaaaaagttccttaagcgatgctgatggttgagaaccacttccagaaaacatgacacctctcttaagcatctgctgga

SEQ ID NO: 207159 - DNA, 122 bp, Homo sapiens
ctcaggtgatccaaccgcctcagcctcccaaagttctgggattacaggcatgagccaccgcgccaggccaaatgtaaactattttaactggtttggtataaatttccactatatagggcaat

SEQ ID NO: 207160 - DNA, 122 bp, Homo sapiens
tgtctgctgaggctgctcagatattttcattctaatccttgatagcaggcatagctctgccgtttataaccatcccatccacctgacataggttcttgccgggggcgtttgaattggtgcct

SEQ ID NO: 207161 - DNA, 122 bp, Homo sapiens
ttgcatcacattgccagtaataattgtcaacactgaaaatttatgtgtcctacactgtaacgtcaaactttgtaaaaccatctggaatctattaatatacaatttgacaatacatctttcaa

SEQ ID NO: 207162 - DNA, 122 bp, Homo sapiens
tgagatgcccttgtttgggtcctttcagaggccttggcatatactcaccctatagcctttcgaatacatccttttcttaaattagccacagttggtttcactgcctgcaaacaatgaatccc

SEQ ID NO: 207163 - DNA, 122 bp, Homo sapiens
agttcctctgagatttctggagaaggcggttacatccaagacaaatgctgttgcgctctgcggagacgcacctttgttctatagagattttgttgttgtttaagaatcttcctgaaaaaact

SEQ ID NO: 207164 - DNA, 122 bp, Homo sapiens
cgggggctcaggaattcaattttcctgaagctgacagaagctggagaagccatctggcagcgaggtgacccggccaggtttgtgttccagaaatgtccccagaatactctacttgtataaat

SEQ ID NO: 207165 - DNA, 122 bp, Homo sapiens
ttctttgactaggaaagggaactccctgactccttgcgcttcccgagtgaggcaatgcctcgccctgcttcggctcgcacacagtgcgtgcacccactggcctgcgcccactgtctggcact

SEQ ID NO: 207166 - DNA, 122 bp, Homo sapiens
gagactagctcctccctggccagcaagctctgtgcgctgcgaccgcccgctgtcccctcccgccgtcctctctgatcttgcaggagcgcgtggccaacgctcccacctttctgcctggctcc

SEQ ID NO: 207167 - DNA, 122 bp, Homo sapiens
cagctcccaggcctcaccacacaccccaaccctaagctgctataggtggaaagtgtgtcccggtaggagggggaccaggcgggtccctgagagccctcacaaggccccccgctgctcctgtg

SEQ ID NO: 207168 - DNA, 122 bp, Homo sapiens
tctctccatgatggctttgcaggggctccatggtccttctctctgtgatgggtttttgcacggggtgtgctctgccactgtggtgggtgggtggatgctgcttctgttgcctccagacctcg

SEQ ID NO: 207169 - DNA, 122 bp, Homo sapiens
ttttgtgtaatactcttttgagccactgatagccagcagattggatttttcagagcctttcgttccaaagagatctaatattaagcacacagcttagtaaatcccttcaacaagttctcatg

SEQ ID NO: 207170 - DNA, 122 bp, Homo sapiens
gacaaagcaaatgagtaagcctatgatactcttatcattcctggtgttgctgagaagtggcggtattataaaacataagtactgtgaatgagactcgactatagagctagactgttttaatt

SEQ ID NO: 207171 - DNA, 122 bp, Homo sapiens
aacacgtcaaactgacgatcacaggttagttaacacgtcacacagccaagtaagttaacacgtcaaactgaccgtcacaggttagttaacacgtcacacagccaagttaacacgtcacacag

SEQ ID NO: 207172 - DNA, 122 bp, Homo sapiens
ctgggaagctcttgagtgtgttcaggcaacctctgagctctctgtggaggagcctggtcccgctgttctgctggctgagggcaaccttctggctgctagctaccaagaggagaaagcagcag

SEQ ID NO: 207173 - DNA, 122 bp, Homo sapiens
ttttcaaacagctaacttttgcagtgatgatacctacataaaagggaattatcattaaaacggtgcttgttaggatggtttactttaagataaggcttcataacaagggacttaaactgagc

SEQ ID NO: 207174 - DNA, 122 bp, Homo sapiens
agtgtggtgggaggctcctcaaaacattaaacagacaattaccaaacaatctcgcaatcccgcttccgggtatatgccccaaacaactgaaagcagagtctcagagcagtatttgcacgccc

SEQ ID NO: 207175 - DNA, 122 bp, Homo sapiens
accaaagaagctgacaccaagcagctttatatatacactcctcagcctatgagcactgcccgcaagcatcagcttcattgctcatatataccaaatgtaagagcagatttaaccatttctct

SEQ ID NO: 207176 - DNA, 122 bp, Homo sapiens
ggctgcgcgcggcgctcgcaggccagcttgagttctgggtgggcgtgggcttggcgggcccggcactcagagcagctggccggccctgctggccccgggcaatgaggggcttagcacccagg

SEQ ID NO: 207177 - DNA, 122 bp, Homo sapiens
ctttggtgttaatgtgcatgcacgtgggagcccagccctgtaagcaccattcgttatttacgggggagtgaaggccttttcagaccctcccctgagaaaagattttgatggaggaggcaggg

SEQ ID NO: 207178 - DNA, 122 bp, Homo sapiens
ctctttctgccaagttcggctcaataagcgcaaggaatacatggtgcgctagggccccggcgcgtttccccgctccagcccctcctctatttaaagactccctgcaccgtgtcacccaggtc

SEQ ID NO: 207179 - DNA, 122 bp, Homo sapiens
gaggaggaagcggaggcgagaccgcgctcaacactggggaaaggaaggaggcgggccctgcgcgcagcattttgggaaagagtggaattctgggtgttaggcccgccattcgcttgactcac

SEQ ID NO: 207180 - DNA, 122 bp, Homo sapiens
aatggggggcaacccggggaactgttgtacttgcaaatgacttacccggatcacatgatgcgctaaatgtagggtgggccggtgggtggaggctgccgagttgcgagccccggtctagtgtg

SEQ ID NO: 207181 - DNA, 122 bp, Homo sapiens
ctggtgaggctcacgcagggctgtgatcaaggcgttggccagggctgtgcgatgaggattcgtttccatgcacactcatgaggctgctggcagcctcagaagatccatttccagggtcgcta

SEQ ID NO: 207182 - DNA, 122 bp, Homo sapiens
acggacacatgtggctgtaaaaagccggagcagaggcgggtactatcttcctgcatgcagcggagaaacccttcctgatgctgagcatcagacgtttggggcatctttttgaagagcagaag

SEQ ID NO: 207183 - DNA, 122 bp, Homo sapiens
gcctacctccccagttctccatgctgaagagcttgctgaagttgtgggcaacatagggggcgatctttttgagatcgtgggtgcgcacacgagtggccagcagtgactggtgggcgtccctg

SEQ ID NO: 207184 - DNA, 122 bp, Homo sapiens
ttggcagaaactttgtttctcaaggcaaagccctttagagacttgggagcacatgaggtgcggtgtagatttgtcttcatttctctcagcacggggttgtcttcaggctgccagagcgtgac

SEQ ID NO: 207185 - DNA, 122 bp, Homo sapiens
cttcttgtttttggaaatgctcaagccaagaatggatgttcaggcagaggggattccgctcggaaggggctttctgcactgaagtggtggccagcgggaaactccaggtttccaactcctgc

SEQ ID NO: 207186 - DNA, 122 bp, Homo sapiens
gggaatgccggcacctactgtgtgccagatatttgcaaacacccttttccaagcttacaccgccaccgctatgaggaagacagaattccacttttgcaaataaggaaactgaagctcagcga

SEQ ID NO: 207187 - DNA, 122 bp, Homo sapiens
gttccataggccaaatcttacccgcctcttgattttgtaaatcttcctagaacacagccacgcccactagtttaagtataacctatgactactttcccatgacaatgttagagctgagtggc

SEQ ID NO: 207188 - DNA, 122 bp, Homo sapiens
tggggattttacagatttaaaaaggggtgcctactgtggcccatttatagacctgtggagcgaagagaaggagattagtcacactgggggccggagtagaagccgttttaaattagttgccc

SEQ ID NO: 207189 - DNA, 122 bp, Homo sapiens
cttgatcttcacaccatgctgggtcggaggctctgccaacatccattttccagctcttttcgtgagtcccaggttctgagattgtcctgctctgattccacaccccatctctatttctcgct

SEQ ID NO: 207190 - DNA, 122 bp, Homo sapiens
agcttagaagattgtaaaaaaacagataaagttctgttctcagattgtttatagcccaagcgaagttcagttagtaataaaataaaaacatacagcagatgatcataagaactaagagggga

SEQ ID NO: 207191 - DNA, 122 bp, Homo sapiens
tgtggggagcgcctctgccccgccgccccgtctgggatgtgaggagcgcctctgcccggccgcgaccgcatctgggaactgaggagtgtctctgcccgactgccaccccgtctgggaggtga

SEQ ID NO: 207192 - DNA, 122 bp, Homo sapiens
gtcccgtggggtgaggacacctcccgacccatggcccggcggagctgcccccgttgcccgcggcctcccgggttcctggagcacctgcagctgcggccttcaggcagcgaccaaggccgggc

SEQ ID NO: 207193 - DNA, 122 bp, Homo sapiens
tatgagctgtaacactcaccgtgaaggtctgcagcttcactcctgaagccagtgagaccacgagcccgccgggaggaacgaacaactccagacatgctgccttaagagctgtaacactcact

SEQ ID NO: 207194 - DNA, 122 bp, Homo sapiens
tccagctcattttcctggttcccggagcttcaagacagacattgttttccaggccccgctcgcccggatgaatcacctcccggccactgcttcccaggcgtcatgtgctcccggggacggca

SEQ ID NO: 207195 - DNA, 122 bp, Homo sapiens
cagaacagttcacggcaaagacttggccctggggctcctaaatccaagctgcctccccggcgccccaagccccagcctcgctctgggagtcatgattcccgtggagactccttcaaccacat

SEQ ID NO: 207196 - DNA, 122 bp, Homo sapiens
tgactgctggagctaaggccccagcaaggccccatagggccagcatcactacctcagtcacgctggccacaccctctgtcaagctttggcttggcagtgggcctagcaatgtcccatgcagc

SEQ ID NO: 207197 - DNA, 122 bp, Homo sapiens
aaagagactgaagcagcccagtcatgtttcttctttttcttgccctccattctctggtatcgttcaagtatcagatgctgggggagtttggggagacaacaagagcatgggagaataggaag

SEQ ID NO: 207198 - DNA, 122 bp, Homo sapiens
acaaacatttttgggagtacctctgttaagagacatttgaggttcctgtttttaagttttcgatcttgtggaggatctcataacagtcttgataaaaatgttatttgggctgggcgcgatgg

SEQ ID NO: 207199 - DNA, 122 bp, Homo sapiens
ctcagccattggagtagaagtgagagaggccgcgggctgagtagagaggggtgaggattccggaaaggaagcatcgtcaggaagcgctgaagttcctactgataaagagggggttgggccac

SEQ ID NO: 207200 - DNA, 122 bp, Homo sapiens
tcttgatcctgtggctcctgagaagctggatcatctcctcggtaaggccagggcacagtccgaccctgagcacgcccatgttccccgcaggccggaacagccccagggggactgcacgtcac

SEQ ID NO: 207201 - DNA, 122 bp, Homo sapiens
attacattcctctggctgctgttatataggcaaaaatctaatttccaaagcagaacaaaacgtgtttctaggtgctttgctacctgcggtgctggtacaccgcctccgtatctggacacgag

SEQ ID NO: 207202 - DNA, 122 bp, Homo sapiens
tagacccgggcagggtcacgggccagcagccagccggaccaggtggggcctccccgcccccgcctgccctggcactcacagggtggtctgcttttccggttgaagtggtggtgaggagtaag

SEQ ID NO: 207203 - DNA, 122 bp, Homo sapiens
tctcacggtgacagcagagcctttccagctgtacataaccacgtcctcgccactgcacctcggcatatgccacctccatgccactgccagagctggcctagcaagatgtgctctcagaatgg

SEQ ID NO: 207204 - DNA, 122 bp, Homo sapiens
tctggaggccacaagtctgaaatcagtcctgcggggctgaaatggaggtgtcagcagggccgtgcccctctggacgctgtaggggagactgtccctcgcctcctctggcttctggtgccatc

SEQ ID NO: 207205 - DNA, 122 bp, Homo sapiens
gttatgattgtcccagcctcccagagggcttgaggctttagtgagattgtgagccaggcccggcacatgtgtgcacgtgcacacacacacacacacagagcttggtacacaggagctgctgt

SEQ ID NO: 207206 - DNA, 122 bp, Homo sapiens
agttgaggcatttgtcaaaaatgcagattcctgccacagccccaggcaattctgagtcaccgggtatggagggggcatctgggctgtgcattttacatgagcatccaaaaatcatgctttga

SEQ ID NO: 207207 - DNA, 122 bp, Homo sapiens
aactggccaattgcaaggggtttcacagggcgctgaactcgcgggagcgtcaccgtcctgcgacgcttcagaggatccttaggcctcagtggtctttgacccccggccccaggacctgaccc

SEQ ID NO: 207208 - DNA, 122 bp, Homo sapiens
ccacgtttccaagctgttttatttttaagacttagttttaaattctgattaatatgcatacgtgtgagaagtaaaaacttgtcaacaaggatgaatcagtatttgtagacctttaagcagta

SEQ ID NO: 207209 - DNA, 122 bp, Homo sapiens
gccggccttctctccgcttctggccgggctccagacgaaccccactttactgcaaagccgcgagaccgattgcccgggaagtctaagcctgctagcgaaagctgctctccgcagttcctggg

SEQ ID NO: 207210 - DNA, 122 bp, Homo sapiens
cacaggctggctgggaaggggcctctgtgggtgcgactctggactcgccagccttcacagcgtgtctgttcctccgacacccgcagctgcagagccaccgtgtgccaggcgccgtgcagggc

SEQ ID NO: 207211 - DNA, 122 bp, Homo sapiens
tcggaggcgctgccagcgccctccctcctcctccgcagggcgcgggacctctatttatatcgcccagccagcacaggcccatattgggcagtggcctcagtcaggcccgctggccgccctgc

SEQ ID NO: 207212 - DNA, 122 bp, Homo sapiens
tattctaccattcttgaactcacagtcaattaataaaaagtacctggggttggggagctgcgcatcaatattatattaactgtgaagccttagtgcttactacggtcgagaaaaagcgctcc

SEQ ID NO: 207213 - DNA, 122 bp, Homo sapiens
agctgctggcccggggcccacaggaggggcttcgaggctggccctgccaggcagttttcccggcgttttaggatctgtacatagagaaatatttaaatttttagaagcaaaacttatacaac

SEQ ID NO: 207214 - DNA, 122 bp, Homo sapiens
gcgtgatgaaaccagagcaaaggagccctaaatgcaggagcgcacaggtgtccgcgcagccgggaatcagccagcgcctgcccgcagagtccagggaaccgacaggtgagcgctcccgggcc

SEQ ID NO: 207215 - DNA, 122 bp, Homo sapiens
ctcgctgccccaaagtaccaatgcaagacacatgtgtgctcggccctcagtccccaagcacggtgtgccacggtgatgggcttggggtctaggtcaccaggtcaaccttctcctccacactg

SEQ ID NO: 207216 - DNA, 122 bp, Homo sapiens
cagcaacctgccccatgtcggtcacagagctgaagttagaacctgagccttctttgagcccggcatgtaaggaggaaagacaaaggggcctctccggctcctgggtgtcactgggatggtgg

SEQ ID NO: 207217 - DNA, 122 bp, Homo sapiens
gtctggccatgttttggtagagtagctgtgttgtgctggggaattccttccttctgtggtcgatttggatgctccaaagctcaaatgccagaacagctaagttgcacaaacagcaaagatgg

SEQ ID NO: 207218 - DNA, 122 bp, Homo sapiens
gccacacctccaccctccactttccaaagaccggcttccccggggagcccccacactaaacgccagcgaactgcctctccgtgaaagtcttagccagaaactttccccgctttgtcgccagt

SEQ ID NO: 207219 - DNA, 122 bp, Homo sapiens
ggggtcccggagcctccatgggctcgcggggtgggggtggccgggggcggtggccgggatcggtggacagctgccgggcgcgtccctcccagactgggctcggctgagcgtgtgcggagcga

SEQ ID NO: 207220 - DNA, 122 bp, Homo sapiens
tgaacctatgagcgtttccctaagtctttacacaatgaatatagtaatggggccactagtcgagggtggtaggagcggcggagactcggtaatatactggccacgcctactctgccctgcca

SEQ ID NO: 207221 - DNA, 122 bp, Homo sapiens
agctgatctggtttaaagaaagagagaacccagaacagctggtcctggtgcctcagtgcccgtgattacaacacacagcaagcagccccgtgtttcttttaacactggatgtgtgtgtgtgt

SEQ ID NO: 207222 - DNA, 122 bp, Homo sapiens
ggggtgctgagaggtggagagcgggagccggcggatttcttaatgaagtgtctccgcatgcgtagagggaatgtagggagggaggtggaagcactaggaggaggggaggggtggagagaaaa

SEQ ID NO: 207223 - DNA, 122 bp, Homo sapiens
gtagaacactccttaggtccacacatatgggattacctctctagcactcctctgcacctccgtgtactttcccaaccattatttatttatttatttattttttaagacttacatgcttcttg

SEQ ID NO: 207224 - DNA, 122 bp, Homo sapiens
gtacgcaacgaagaaaacgcagaagggcctcgaagggtccacatctacacaccccaaccgcgcaggcacaccacactcggacacagagcctgtcgccaagaagaccacacttagaagcagcc

SEQ ID NO: 207225 - DNA, 122 bp, Homo sapiens
gatttttataattacagacagacatattcttcaccttctttaacaagaaataccaccctccgtctcaaaaaacaaaaacaacaacaacaacaacaaaaaaacgaaatgccatcacagtggtc

SEQ ID NO: 207226 - DNA, 122 bp, Homo sapiens
aaagatgcatatttatgtatctggggaaaggagggagctctaaactgtggtcagcaccggcgttcttacatatttgggcatttggtgaggtgggtgccaaaaatctctttgtatgaatgact

SEQ ID NO: 207227 - DNA, 122 bp, Homo sapiens
ggcgtggggactgatttccgacctcccgggcccaacgagccgtgctgaaacgtggcgcctcggaggaggctgaggttggtttctcccacgcacggacacacccacacccactccgggcccgc

SEQ ID NO: 207228 - DNA, 122 bp, Homo sapiens
ccggtcccggcagcaggtggcaggccctgaacccgccccaagcggccctgggccgaccctcgcagctcccagtgcccgggaggcagggccccagtactccctccaggagcggtgatggtccc

SEQ ID NO: 207229 - DNA, 122 bp, Homo sapiens
ccagtgccctgcagtgcaattgtacctgaggacccaaggtggccagggaagccccaggtgcgacttggcaggggaagcaggggctgtggacggatggagagctgtcatgtggaaaggcagtg

SEQ ID NO: 207230 - DNA, 122 bp, Homo sapiens
ctggagaactacaacttccagggtgcaccactttcgccccgcccatgacgttgcagctcccgtttctcgccaggctcccggcccgaactacaaatcccagaagacactgcagccccgctcgc

SEQ ID NO: 207231 - DNA, 122 bp, Homo sapiens
gggacagggtacagggaagcggcggtctggtgctgccaaaggttagtcccttgtacccggcgaactcaggaaagttcactcgatttcgctacaaacctgcagcactcggcctggaggtaacc

SEQ ID NO: 207232 - DNA, 122 bp, Homo sapiens
aaatgacaaacaccaaaccggtcagaacattacgaggagctgagtgtgagctctctgaggcgtggggaagtggaaggcattggcccggggccctcccggctccctccgagcacccccacccc

SEQ ID NO: 207233 - DNA, 122 bp, Homo sapiens
cattcatggccatcagaggggccgtaacctcagcaggggcctccagaacagcaggcctgacgctcgcggcctcacgccgggcttctgccgcccaccacctcttatcccagactgcaagaatc

SEQ ID NO: 207234 - DNA, 122 bp, Homo sapiens
gaccttgtaaagcagcagcctcttagatgactttcccctctgctcagatcccgagtatcccgctctggggtttaggaaagccggccgctacagccacacaagcccccaccacaccacacctc

SEQ ID NO: 207235 - DNA, 122 bp, Homo sapiens
cccctgcccggccagctcgtgactaatttaggcaaaaggcagcctggagctatttccattcggcggcgggaacaggtgccggcgcctccgccccatccccaggggccgcctcccccggggcg

SEQ ID NO: 207236 - DNA, 122 bp, Homo sapiens
gaaacttacaatcatggcagaaagtgaaggggaagccggcacatcttgcatggcagcaggcgagagagagcgagagcagagaaagctcccttttaaaaccatcagatctcacgagaacagat

SEQ ID NO: 207237 - DNA, 122 bp, Homo sapiens
tgggggggtgctgcaaaggggcaggaaacgcaaagtccccacaaggagaacggccgcgggcgccaggtgccactgcccacactccctcccgccgggccacaggctgggcctcaaaccgccca

SEQ ID NO: 207238 - DNA, 122 bp, Homo sapiens
gcagacgccacctccgatgtccttataaaacgtgtgcgcgggtgctgcgcatgcgtgtgtcgctgggggctgtaggctgggagcctccgggaactcccctcgccaggccaccagccttccta

SEQ ID NO: 207239 - DNA, 122 bp, Homo sapiens
ccactgccttcctctctgatgaacctatcgggtgaaaacgaccactcaagagactgacttcgccattcaagacaaggaagagacacatgtgtgcactcctgcatgttcagttctgtacttcc

SEQ ID NO: 207240 - DNA, 122 bp, Homo sapiens
cccccagccctgctcctgcctagctagggtgagcccctcgggacacttccccgctgcaggcgctcccaggccctcggctgatggcaatgggcccaggcagggcatttatcccaagggctcct

SEQ ID NO: 207241 - DNA, 122 bp, Homo sapiens
agcagggatgcccagggtcccctgggccccacacatgcctggtggagaggcatttttgcccgtagggggatcctctgccgggccgtttgtgttttccttccacaccacaggtgcctcgatct

SEQ ID NO: 207242 - DNA, 122 bp, Homo sapiens
gttgcaggtgtagacaaagcggtcctggccctgggtgtgcagctccaccagcatgcagagcgtggaccacttggagcggcgcaaggaggagaactcccagtgcttgtctctggcgagggtga

SEQ ID NO: 207243 - DNA, 122 bp, Homo sapiens
tcaggactggctctcgggggccgggacgggcggtcccaggacccacccaccgcaggggcacgggccgaccacaggcctgactcacagctggagagcagccctccggggccctgcccctcccc

SEQ ID NO: 207244 - DNA, 122 bp, Homo sapiens
catggcaaagtggagtcaagtcggctgatgcaggcgagacacctggccggcctggggagccgcaccagcgctccccacattgcactgctgactgaggggtgctcggtgccgcggcttcacac

SEQ ID NO: 207245 - DNA, 122 bp, Homo sapiens
atactgcgcggagccagacctcggactgccatcgccgccacctgccccaccctctggccccgcgccccgccccaggctagtctcattggtctagttccctcagaaccgtcctcatcggccgc

SEQ ID NO: 207246 - DNA, 122 bp, Homo sapiens
tgtttgcatggcttcttcttggcctgccacgtgcgtctgtaccggaccctaggaatatcccgggagctggtggccagccctagcccctgcccgcctggcctttggccagcacttagcgcggg

SEQ ID NO: 207247 - DNA, 122 bp, Homo sapiens
ctgggtcctaaactgcggtgagctgaaccttctcgtgggaatgtgagaaagcggaacacacgtgggccccaaataacaaccctccccacaccgaagcccaagagctgggggggaggggcgga

SEQ ID NO: 207248 - DNA, 122 bp, Homo sapiens
atccactgctgcctggagagaaaggaacggggcaagcaaggctgggaaagagacaagggccgcctgttccagcccaggagacagagggcgcctctgtctgctcctggccccttgccccacag

SEQ ID NO: 207249 - DNA, 122 bp, Homo sapiens
acccctaagaactacaaatcccagcaggcagtgggccgcggggcggggtctcggaagctgcggcctgtggtgcctttgctgagcccaggtccggagggccctcggggacgggagcaccacaa

SEQ ID NO: 207250 - DNA, 122 bp, Homo sapiens
actgcaatggtatattcacccattcctttacaaaatcagaatccagaaagggcaggacaccgtctcatttgtcttcgtgtccccagcaccccggtaagccaggcataggtagactttttttt

SEQ ID NO: 207251 - DNA, 122 bp, Homo sapiens
ttagcacaaggtcgtacttctgcgtgcaggtgtagatgttcctagggtcaattattcaagcgaccttagctacataggagaaataaattttatctctctctgggttttttggaagaattcac

SEQ ID NO: 207252 - DNA, 122 bp, Homo sapiens
gccagggggcggcagagtactgcttgtcagttccaggtgcccttgccccagccttctgcccgagacccctaaatgcccactcctgccccctgcccagcccgggaccaaattcgctcctttga

SEQ ID NO: 207253 - DNA, 122 bp, Homo sapiens
cctgagaccagctgcctcgctccggaacaggcacagcgatgccctgtgcaggaagaagggcggagcagggtgaccagattcctgccaggcaaaaacctctagcaaatctaaagtctggccat

SEQ ID NO: 207254 - DNA, 122 bp, Homo sapiens
gaaaaaccacaaaaatccgctgagacagggggaaaaagacgcgggggcaaaaagccgtggcgacagggggaaaaaatctgcaaaaagcagcagcggcagggttaaaaaccgcagcggcaaaa

SEQ ID NO: 207255 - DNA, 122 bp, Homo sapiens
ttgtgttgggcccgctgtcactgggccaatgtcagtcagccaggtgcccagcccctggtgcgctgaagcttgggcccttctggcacccttggctcctgcactgagctgtggtgagcccatct

SEQ ID NO: 207256 - DNA, 122 bp, Homo sapiens
ccgacccccggccgccgctccgccctgcccctcgcgcctcgaccccttctcccgaaactccgtcctctccgccgaggggctgccttgcccccaacccaccccccgcgtggagaataaacaca

SEQ ID NO: 207257 - DNA, 122 bp, Homo sapiens
gctaacaggcgtgagccaccgcgctcggccgatcccgacacttttttaaaatgccgaagccggaatcgacacagcactttcaaaggttcctccatagctcccctgagatccggccagcggga

SEQ ID NO: 207258 - DNA, 122 bp, Homo sapiens
cactgtgacctctccaggtggctgagtggcctgccacctacctggggcatggcctggggccgggaatgggggagtgggtgcaggggcaggactctgcctgagcggaacagggctgggcaggt

SEQ ID NO: 207259 - DNA, 122 bp, Homo sapiens
agtaggtgaggctgtcagaaactgaaaaacagaatcaaatggtggggctctttcgtatatcggagcataaagcaactagaaggctgttacattgttggtagcaatgtaaaatgcgacaaccc

SEQ ID NO: 207260 - DNA, 122 bp, Homo sapiens
cgttcttcggtggggaggaactcgactcacccaggagctggaatggggggcagtgactgccgttggcgtctcagggacgctggccggggccctttcagagtccctctcccggtagattttgt

SEQ ID NO: 207261 - DNA, 122 bp, Homo sapiens
aaccaaagcagccccccagtcaccctctaggcacataaccctattttagttctctgaatacgactgattgctgtctaacatattttggtttgtgtgcttattgtctgtcaccggtttccctt

SEQ ID NO: 207262 - DNA, 122 bp, Homo sapiens
ttgattgtggctggaggagataattataataatagcgtagttatctttctgtgggtttcacgtccagaacatttaaaacatataaaacccttgctgggtcagggttttagtcatctttgcag

SEQ ID NO: 207263 - DNA, 122 bp, Homo sapiens
gctatgacaggaaatagatgagtggttgcctagtgcttgggggcagaggtgggggtgaggcgagtgagtactgctaatggtacagagttacttttggggataaagaaactgttctgaaatgg

SEQ ID NO: 207264 - DNA, 122 bp, Homo sapiens
tgagacaaatcccttgcccttagggaaaaagccactcttttctgttttctcccattagagcgtcacagcagtggtgacaatcctgtagacttgacttaagcgcttttggatgaacaaaattc

SEQ ID NO: 207265 - DNA, 122 bp, Homo sapiens
ctgggccgggcgttgggcagcgggagggggcgcgggcggccacgtggcctcgaaggaatgcgcgggcgcgagggcagggcgctgccgagaaaccggcaggctctgcggccaatgggcgcccg

SEQ ID NO: 207266 - DNA, 122 bp, Homo sapiens
agcccagcttttctctccagagaatgttgtggtgggagagggaaaagaaggtggaggtcccggaggaattgcacatggggccaaaatgtgactatgaaagaagagtgggcttttgataatac

SEQ ID NO: 207267 - DNA, 122 bp, Homo sapiens
ttctctttcgcaccttctttcctgttgtgattgaacatgaagccattaggaaaattatcacgagattatgttaagtgaaaaaaccatgatacagatgggcaaataaccttgtttctcagatt

SEQ ID NO: 207268 - DNA, 122 bp, Homo sapiens
aacttcctctggggcagctcagtgcggtcctcgccgcacgggacagccagggggagcgcgcgctctgctccctcgcggcccggtcgctcctgcccagcccgggcaccccactcttcccctga

SEQ ID NO: 207269 - DNA, 122 bp, Homo sapiens
gggggacgtctgcagcagaggcccgggcagcaggcacacccctcctgccagtgcgaggaacgaggcgccacagcggccggtagccccccatttgcccagcctggcctggagcaggcaggaag

SEQ ID NO: 207270 - DNA, 122 bp, Homo sapiens
ggacccgcactgctgcacaccagaagcccagctcctgggcagccaccctacctgcccctacgcagggtgtccacacagagggtgtccgcacacagggtgcccacacacagggtgtccccaca

SEQ ID NO: 207271 - DNA, 122 bp, Homo sapiens
cgcctcgtttctgctgaaacttcgccgggttttaacacgcctgccaaaactgcccccttccgggcccaagagtccaggattctgtgccaagccgcgtggccagatgccacttggggatggcg

SEQ ID NO: 207272 - DNA, 122 bp, Homo sapiens
tattatctgattgctaagttcccttttaagccacaataggacacaccaatgctccacaatcgttttgccattaagaactagttgcatcatgttttgcaaatacagcccagttcgagaagtct

SEQ ID NO: 207273 - DNA, 122 bp, Homo sapiens
ctgcgcccagcttccggcctggccacccgccagcaggtctcacccggttcgcatcagtcccgggcccccggcgcccctcagtagtagcaaattatcgcatccctgagcttaggatccccctt

SEQ ID NO: 207274 - DNA, 122 bp, Homo sapiens
cgtggctttctgggaaatgtagtttagctcccctggtccttgtgtttccgcactccgcatcgtcgcctcccgccttccccacacttgtcattcgagcgctctgtttttccaaggggcaattt

SEQ ID NO: 207275 - DNA, 122 bp, Homo sapiens
ggggtaggttacgttccggaaggctggtgccaactctcccggttggcaagcgggggagggcgctgggaaccgagcaaaggggagtggatggcacccgccaatgggcggtcccaacagggtag

SEQ ID NO: 207276 - DNA, 122 bp, Homo sapiens
ccgtgcagaagcccacgctgctcagcagctgctccatgagcctcccgtcctccacctgggcgtgcgtgcctgtggcatacacggtggccccctcccgcaccacgactggagtgttggtcatg

SEQ ID NO: 207277 - DNA, 122 bp, Homo sapiens
ggcggggaagcttttaggctccgcccactccgccggcccggcgagccacgcccatggccacgcccctcttagtgcctcggagacaagcagcttctgggtgagcgctaggcagtcctgacggt

SEQ ID NO: 207278 - DNA, 122 bp, Homo sapiens
gtctgaataaaaacttttccaaagcggtttaatgaagatggacttggtgcgttgcagcctcggcgtggcatccagcacgcctctgcgtgtcacccatgtgcatcagccgcacagtcaaccgc

SEQ ID NO: 207279 - DNA, 122 bp, Homo sapiens
gcggccccgagaagggcagagggacctacctggatgcagttgatgatgaatgtgtggccccggaacaccctccgcagctctccagactgcgcgtcgaaggcccgggcgcaagcgtccccgct

SEQ ID NO: 207280 - DNA, 122 bp, Homo sapiens
gcttcgtccaccctgggccttggtccgggcactccctgcggtccagtgctcccgggaaagcgcccgcttcctgccgtcttccctgtgggccccagagaaagccccggggtggagggcgtccc

SEQ ID NO: 207281 - DNA, 122 bp, Homo sapiens
tctgaccccaggcccagctcgtcctggctggcctgggtcggcctctggagtatggtctggcgggtgccccctttcttgctccccatcctcttcttggcttctcatgtgggtaagtctcccct

SEQ ID NO: 207282 - DNA, 122 bp, Homo sapiens
aaatggtaagaacctaggagaggaccaggccccatactccctccagcttctcctctcagccgtttcagagctgcaagaggccttggcgctctggggcacgcccccgtttcacagatggggaa

SEQ ID NO: 207283 - DNA, 122 bp, Homo sapiens
tcccctcagcaggtctgactccccatcaggaagcacctccacctccgctctgtgatgccccggccactgctgtgccctctggggtagctgtgctccccacacttctgggttgggctccccgt

SEQ ID NO: 207284 - DNA, 122 bp, Homo sapiens
ggcctcataaatgctgcgacgcacgcccagccgcaaacagccggggctccagcgggagaacgataatgcaaagtgctatgttcttggctgttcaacacgactgcagacccatggacaagagc

SEQ ID NO: 207285 - DNA, 122 bp, Homo sapiens
atggacaaatgccgggcccgtggaggctggcggccagatttacagacacctcagccctcgcgtacccaccagcctgccgggcagtaagcctcaccccagtgccttcaatgcagagctcctgg

SEQ ID NO: 207286 - DNA, 122 bp, Homo sapiens
gaatctgattgggagtgtaggcaggaacgggttggctggctgggcgccgacgcggtgccacgggataatcctttagtgagccactgattggctggggggctgcacgggagacaggcaggtag

SEQ ID NO: 207287 - DNA, 122 bp, Homo sapiens
tacctgaaaaccagtcttactgagctccaaccccaaattaatttggtgagaactcgaactcggctattaaccttaattctgagagaagaatgacacccccctcccactgcgagggtccactg

SEQ ID NO: 207288 - DNA, 122 bp, Homo sapiens
cgcctggcagcccttcccactcacccctgcactcgggaccccgccctcgacggagagagtcggaccccacaggcccacagagacaggtaaggttgggcttgcaccccactccccatctccag

SEQ ID NO: 207289 - DNA, 122 bp, Homo sapiens
tcacagtgcttccttaacccaacctctctgttggggtcagccacagcctaaaccgcctgccgttcagcctgagaggctgctgctagcctgctcacgcatgcagcccgggctgcagaggaagt

SEQ ID NO: 207290 - DNA, 122 bp, Homo sapiens
cctgagttcttgcaggagcatccccttgcaagatactcatcatgaccttgggccccattgcgccacagttttctccactttgacaagcccagatcacttcctagggcctgcaggattcctac

SEQ ID NO: 207291 - DNA, 122 bp, Homo sapiens
gagtggtactgcgaatggtggtggtggtggtggtccggggagcgggagcgggggctatagcggcctacgcctggagactggcagccaggggtcttgaggaccctggacaggtgatcgtccag

SEQ ID NO: 207292 - DNA, 122 bp, Homo sapiens
taaggttctatgaaatacagtatcacattttatcctaagtgaatataacatactgcacttcgcttagacttaatttattggtaatgtcacagattgctttacaattgttatattcaagaact

SEQ ID NO: 207293 - DNA, 122 bp, Homo sapiens
cagacagcctcttctgccagacagcatgtgcctctggcccatccttttgtcagaagtccccggggagccctttgctgcaggcataggaagactcgtggaaggtgttcagcggagcctcagga

SEQ ID NO: 207294 - DNA, 122 bp, Homo sapiens
tcattggcgcctttctcactcatctgtattttctccagtcctttccagatgcatttgccacggccctgtacaagggttggaaggggagagggagccataaatcatctgccccacagtcctta

SEQ ID NO: 207295 - DNA, 122 bp, Homo sapiens
ctaggaaaaagagaaaaatgatgctatcaggcatccaacaatagtagggtggttgtgaagcgcttagcaaagtgcctgacccttggaagaactagaaaaagataaccagtgattattatgct

SEQ ID NO: 207296 - DNA, 122 bp, Homo sapiens
cgctcgccaggacgagccaggcagtgatttgaggcaccggcttcaccttcacccatggtccggagagcctagcggggctcgccaccgcctcccggctccccttccacgcctcatcctgccag

SEQ ID NO: 207297 - DNA, 122 bp, Homo sapiens
cccaccccattgccgctcggccgcgtccggggtccaattcgcttgaccctggtaggaagacggggtgggagctgggaatcagccaagggacagagccaccaacacgttcatgggctcatcca

SEQ ID NO: 207298 - DNA, 122 bp, Homo sapiens
gagttgtgagcgttaaatgcatgaacacaagcgaagtgcttagaatggagcctgagacagcgagccgggcagctcctgtccttcaccctgctccacggcgttggagggcccagccttccccg

SEQ ID NO: 207299 - DNA, 122 bp, Homo sapiens
cggactcctgacaggctcagctgttacatctgtgccatggctgcaaccctgtgctcctctcgcccaggcacggcgcaggctcaccacgcagggaacacgcctctcgcccaggcacggcgcag

SEQ ID NO: 207300 - DNA, 122 bp, Homo sapiens
caggaatggactatctcaccccaactgaccgctgacagtgaggccactgaccggatgtcccgcaccgcctccatgacgttgatctcgcacataagcttctttgttacccaatcaagggcagc

SEQ ID NO: 207301 - DNA, 122 bp, Homo sapiens
agtcaccatgcccagcctacccatctaatatttattgaaggtctcctttccagcagaggccgtgctgggtggtgccttttatcaagatgagagcctgggttcctctggttgttttgctggaa

SEQ ID NO: 207302 - DNA, 122 bp, Homo sapiens
cccgcaggcggcccgcgcgggcgggaaccggggcggcagtcagcgggcgcgagctcagggcgcctccggggtcctcactgcgctccccacgcgctgtgaccccatttgttgcacgtgcatgt

SEQ ID NO: 207303 - DNA, 122 bp, Homo sapiens
acctcctctgtcgcgcgtgccctgctccccagtgagggcgtccctgggatgggatctgggcgcccggcgcagcgcggctgacaacagccgagcggttccggtgcgctggcacgtggctcggg

SEQ ID NO: 207304 - DNA, 122 bp, Homo sapiens
ggtagcaaaagcccacgcgcgtgccgggccgcagggtgaagcaccagggcgcctctgagccgtcgaggttccagcagaagttctcccgaaggtctctaagcaggcgctccactcagccctag

SEQ ID NO: 207305 - DNA, 122 bp, Homo sapiens
tgagtcggcatctccccgtcaccaggtgtgtcctgagtgtgtcctgagtcggcatttccccgtcaccaggcgtgtcctgagtcggcatctccccgtcaccagatgtgttctgagtcggcgtc

SEQ ID NO: 207306 - DNA, 122 bp, Homo sapiens
tctagtggggacgtggagaacctttgtgtctagctcagggattgtaaactcaccaatcagcgccctggcaaaacagaccactgggctctaccaatcaacaggatgtgggtggggccagataa

SEQ ID NO: 207307 - DNA, 122 bp, Homo sapiens
ctagaagcattgtccaggagtgagggactggaatggggccttaggcatctgccttctgctcgatcatattgtggttaagctgttggccaagttgcaagacaaagtcctctttactcttccct

SEQ ID NO: 207308 - DNA, 122 bp, Homo sapiens
tccatgctgaccaggtacagcatgctccacagcccgggtctgtcgccttcaaagctggatcggcccagccccgcgctgtggtcaccatggaggaggacggcccagccccgcgctgtggtcac

SEQ ID NO: 207309 - DNA, 122 bp, Homo sapiens
ccacctcgcggcccgcctggccggccggaggagcagcggaggccgagcactccccggtctcgggttcaacttcaataaaagggcccagcccgcccttgatcacgcggcttgcctgacagccc

SEQ ID NO: 207310 - DNA, 122 bp, Homo sapiens
cgaataagaggcagtggggtgagaagctccttttgccgacgccctgggagggggtggaaccggcttaggtcacccattcgttttccagcagccgctgggttacttcccaccagctttgcaaa

SEQ ID NO: 207311 - DNA, 122 bp, Homo sapiens
cagcgcctgcagcctccggtgcgcgcaggccccaagcccacatgcgcagtcctcaccttgcgcgcagccccatgtacagccccggacgggctcccagccccactggcgcagaacccatcacc

SEQ ID NO: 207312 - DNA, 122 bp, Homo sapiens
cagctccatgtcctgatgatcgcatcaaaattgtggtcacgtttgccagaatagaggctacgcgatggcgctagaagccctcccactctgagagcacttttcattccctaaacttcaattga

SEQ ID NO: 207313 - DNA, 122 bp, Homo sapiens
taccatacatgggacttcaaccccgagccacagtcaccctgtcctttaatgggcagcacacgtaaccttacatctgaaatacgctgcagcaggctaacaggcaagcccagcttcttccctgg

SEQ ID NO: 207314 - DNA, 122 bp, Homo sapiens
aggccacccttcggggaggcgacagcagccccagcgagtaatgaggagcagtggcagtgacggggcagagtcggggctgggagattagagagcccctcccagggcctttccctcccgcctgg

SEQ ID NO: 207315 - DNA, 122 bp, Homo sapiens
gccctgaaacatgcgtgttttactgcacaagatgtgcccttgaatggagtctaggccagtcggggtcaccaaaaaaaatccaccaaaaaacacccaagaagggagaagcggtcaccccccac

SEQ ID NO: 207316 - DNA, 122 bp, Homo sapiens
gcacccaaccgaggggctagaatcgggacaaagcagcaggcaaggcctggaaaggccagccgcggggagaggaggccaggggaggggctctgctgccggcgcgcggcctttccccggggcct

SEQ ID NO: 207317 - DNA, 122 bp, Homo sapiens
tcctggcaggactgtggtggcgagggcagcggcagcctttaaatactggctgtggtctcccgcgtgcccactgcgttcttggtcacccagggcaacagccaattggggtcgaaatcgtcctc

SEQ ID NO: 207318 - DNA, 122 bp, Homo sapiens
tgtctgtggcgcccgctgggtgccgggctggctgctgagcgctgaggctgcggcggcgagcgacaggccaggtgcctgctcttagggaaggtacctggcttccccagtctctgccgcgggag

SEQ ID NO: 207319 - DNA, 122 bp, Homo sapiens
tctggctgcctgtgcttgcctcacctcccctgttgagaaaaatttgataatcgaattattcgtgctgacccattttcaagaggctttcaaccatattgatgaatatttgctgggaataggag

SEQ ID NO: 207320 - DNA, 122 bp, Homo sapiens
agtacgtgtaatctattaaaatcgggttccgacactaagagggctttgaggtcctggttgcgttgtgttttttgttatgagagctacctgcatgagtgtgttcagtttgtgaaatgtaattg

SEQ ID NO: 207321 - DNA, 122 bp, Homo sapiens
tgggagaattaccaaaatgtgacacagacaccaagtgaacacgtgctgttggaaaagtggcgctgatagacttgcttgatgcagggttgccaaaagccttcactgtaaaaaacagaagatca

SEQ ID NO: 207322 - DNA, 122 bp, Homo sapiens
tggactgaaccagaattttagagtgccctggcctgggagaaagtccattccgatggttggcgacacggggggcttagaattgtattttcggtttacatctaaaagaagaacaaaggtctagg

SEQ ID NO: 207323 - DNA, 122 bp, Homo sapiens
tactaaaaacataaaatttggctgggcagcctccctgggactaggtttcagcggccgctgcgatgaccaaaataaaggcagatcccgaagggcccgaggctcaggcggaggtgtgttccggg

SEQ ID NO: 207324 - DNA, 122 bp, Homo sapiens
ctgagcaaaccgcattctacaccgaaggccctctattgatggccctgggatttttctgctcgtcagtccggagtcacttaccgggcaccactagaagaacccgggatgaaacattttctccc

SEQ ID NO: 207325 - DNA, 122 bp, Homo sapiens
ttccctcctcagtccctgctcccggccctgggccacaactgctttctgtcccgccagtttcgcctgcgccgagggcactgtatcgtgaaccacaggctgtgttgttttcatgcgtctggttt

SEQ ID NO: 207326 - DNA, 122 bp, Homo sapiens
cttagttacagaagctctcagtgggctgtggagacgctgccgtctcctgaacacatccagcgaccacatgactaagcaaaggcagcggagagtggacggacggtgatggacgcggccacgga

SEQ ID NO: 207327 - DNA, 122 bp, Homo sapiens
aacaaacaggcccttttcctaccataacccaactgtggtttacaaaatgtgaggggaaaccggatctgaaaagtcccaattttcagagtttacaaatgtgcagagatgactcagaattatct

SEQ ID NO: 207328 - DNA, 122 bp, Homo sapiens
tcctttctgcacggcagaagtcagggctactgccctacagagcaggcatggcctatgagacgttgccgctggagagacacttgtcccctcagtgtcccacctgagtaaggtgtaggaaaagc

SEQ ID NO: 207329 - DNA, 122 bp, Homo sapiens
ttttgggggatttcgacccacacatagtctgtacctgcctttttactatgtatccccagtcggtgcggtgggagactaagcctatgtcccacaggagaaatgaatggagagtttactagttt

SEQ ID NO: 207330 - DNA, 122 bp, Homo sapiens
caggcatttggggcagagtcgggactagcatagtagtatcctgactctcgcaggagggctcgctccactgtagttattaattctcctctccacacaaccaggtctaatccggccaaagtctt

SEQ ID NO: 207331 - DNA, 122 bp, Homo sapiens
tcagcaaaggcgtctcaggtgacccttagggagggcttctgaggcagcccgtgcggggtccgtcctggctgagcactgcgcggacggcgcgcccgcgagactcggacccggcctagggctca

SEQ ID NO: 207332 - DNA, 122 bp, Homo sapiens
agcggcaatagcctgggtcgcaggggccggcgggagttggagttctgaatgcgccaagcccgcggtcgctgtcaaacctctcgccgctacggactacaactcccagagggctctgcgacggc

SEQ ID NO: 207333 - DNA, 122 bp, Homo sapiens
gggtgctaccggcatctagtgagtagagtgctgggtgctgctaaacgtcctgtagttctccggatagcccccacggcaaagaatttctcggcccacactgcaaatagtgctgaagtttgaaa

SEQ ID NO: 207334 - DNA, 122 bp, Homo sapiens
gggcggggctgctgttggacggcctgggccaatccgaggcgccggaggccaatcagttggcggagcggcgcgtgcgcgggcgaggaactgcccgggcgcggtagcgtacgggaagaccggag

SEQ ID NO: 207335 - DNA, 122 bp, Homo sapiens
gttttgttgagacggagtctcgctctgtcgcatcctcatgattattaggacttggatggacgggatggtacagtgagtctaagcgccacatccctccgtcgcttcctctggatatgagggaa

SEQ ID NO: 207336 - DNA, 122 bp, Homo sapiens
atgactgggaggcactcggacaggcagcttcttctgtgtctctttaataccctccaggcccgtcaaaccctccactctccctccctcccctcccgccgcctttaagggtgggccccctcccc

SEQ ID NO: 207337 - DNA, 122 bp, Homo sapiens
ggttgagcctgtaaggaaaaggcttttatcagggttgttcaggggtgaaatgggctgtcacgagagccagtcaagcaaagcttggaccatctcttggcaggaaaaccaagcaggagactgaa

SEQ ID NO: 207338 - DNA, 122 bp, Homo sapiens
tgctcattggctggtgtatggcttgcagccacccttgaattggttgactctgtacggctgcgcagatgccgactttagaggaggcggagtttcggccttcgcctgctggaaaagcagtagga

SEQ ID NO: 207339 - DNA, 122 bp, Homo sapiens
tcggccccgcctgggatgaatcccagttgcgcagttatagcttcccgactaggcccattccgcgtctgagtcagagcgacccccgggcagaggagcttattgagaatgaggtggggggcggg

SEQ ID NO: 207340 - DNA, 122 bp, Homo sapiens
ccatagctgcctagccccaggggcttgtagtggttgggagctgggcctggctactggctacgtggcagccccagcgcacatgtgggatgagacactttggcaaaggccatgtttgcagggaa

SEQ ID NO: 207341 - DNA, 122 bp, Homo sapiens
tagatactcattcataccacagggtgttgccatggaaatggatcaaagtaaggtgatatccgaagagaacagtagctgccacttagagcctcagagaggggagaaagccttaatggagactt

SEQ ID NO: 207342 - DNA, 122 bp, Homo sapiens
ggccgcgcagggcctgtgggcgcagacgtccgtgcttcaccgagaggatctggaaaggctcggggtgcaggagtccgacctccgtctgttcctggacggagacatcctccgccaggacagag

SEQ ID NO: 207343 - DNA, 122 bp, Homo sapiens
tcaactgagcctgtgtcttgaaaaagtgttgaagtttgggggttttctggtgagaatccacgttctgacatcaccttggtcgtgacagtgattggctgttggaaggcaaagaagagtttata

SEQ ID NO: 207344 - DNA, 122 bp, Homo sapiens
agcaacattataggcttcaggcctacctagcccaggctgggttaaagcagataaacgaagcggacagcggaggaaaagcacgtaaccaagtgcagtgggtctgaagcgaaaggcaagaaaag

SEQ ID NO: 207345 - DNA, 122 bp, Homo sapiens
tgtcctcaaccccatctccctcccaggcaggccctaacttgctggcctccttcaggagggcgatggcaatacgaatccgctgccgcaggaagatgagcatcagcagcaggatggcttcaagc

SEQ ID NO: 207346 - DNA, 122 bp, Homo sapiens
actggccccgacttgctaaagccttctccgtgatagctgatcacccttatacagtttgaacgggcttccgggtaccaacgatccattttgcccttgcgccgcgctcccgctgctctgccttt

SEQ ID NO: 207347 - DNA, 122 bp, Homo sapiens
gcgcaagtgcttggtagagtgtagacgtcgtgggatttgactgtggtacaatcgcttcgacgtcctagtgctgatttttccacctgccttctgcttagggcaccggcagcagttttccgtct

SEQ ID NO: 207348 - DNA, 122 bp, Homo sapiens
cacgtcacacggagaaacaaccccaggaagagcggcctcttcttacctgggtggcagccacgtgattagaaaacagcgcgcaccatgtgacagtagaagaaggaccacctgcgcctccagag

SEQ ID NO: 207349 - DNA, 122 bp, Homo sapiens
tttacagaaaaaatgagcagctagtccggagttcttattacaacccctgctgcctccccccgtgaacatcttgcacaggcgacgtgcatttgttctaatgaacgaacaaatagtgacacgtt

SEQ ID NO: 207350 - DNA, 122 bp, Homo sapiens
cacggctctttgccggctcagccgacccctcctcgggcatctcactctcgccctccttcccgctcagctcctcgggtgagctcatggacctgacgcccacgggcctcagtagccaggaatgc

SEQ ID NO: 207351 - DNA, 122 bp, Homo sapiens
acagaaaagtgacccagatcttcactgcagtgtatctgtttagagggaatgtgacgccgacgaaccattctggaggataatttccatgctccagaatttccatgtgttccctatgtcaccgg

SEQ ID NO: 207352 - DNA, 122 bp, Homo sapiens
agcctggacttgagaatgctgtccccagcagtaagctgctcaacctcaaagcaacttgcacgggggtttacaaaaaaatgcacttggccgggcacggtggctcacgcctataatcccaacag

SEQ ID NO: 207353 - DNA, 122 bp, Homo sapiens
tgcttgcgggccagcgcgagttccaggtgggtgtgggctcggcgggccctgcacttggagcgcctgaccggccctggggccccgggcaatgagggacttagcacccgggccagcggctgtgg

SEQ ID NO: 207354 - DNA, 122 bp, Homo sapiens
gacgcaggtgcgaggagagcagtggccaagtccaaccaccggggcccgggctgggtcagacggacaggcagtagctccggctgctacgggggtacgtggtcaggtcagctgtctcctgaaac

SEQ ID NO: 207355 - DNA, 122 bp, Homo sapiens
aatgacgtggttgactacgctacgcttattcagtagacaccgtgacctgcttcttctcagcgtcaaatgcagcctagaagaagcgccctcaggcaacttcgtggacatgagccttcttccag

SEQ ID NO: 207356 - DNA, 122 bp, Homo sapiens
tactaagagtaggggggctgaaagacagactttgaagttagaaggtttagagtaggaatccgggctccatcatttgccagtcttggacaatgtaagttacccaaacttacattaccaaagtg

SEQ ID NO: 207357 - DNA, 122 bp, Homo sapiens
tcctaggagtagaggggaagatgcggctgtcggctgcgtggggtgccctgagagggccagcgtgatgctggggtgccttggcgtacatgggaggtgtcatcctattggcagggctgggccag

SEQ ID NO: 207358 - DNA, 122 bp, Homo sapiens
ggtgggggaaaagagtttgtcagcgtccgtcgagacagggacccccagcccgggaagcttcgtaggcctcaaacatcccagatgccaccaaaagcaccgtgaccatccaaatatacccggac

SEQ ID NO: 207359 - DNA, 122 bp, Homo sapiens
gctacaaccaagccttcctgtgtgttctcacctgccccagctgggtgaggtctcaggccacgctcttccttgggcccctgggatggtgcctagttgcataactatttgaatggctctgcagg

SEQ ID NO: 207360 - DNA, 122 bp, Homo sapiens
gataccagaggcagggaaggagaacttgagctttactgacactgttctttttctagctgacgtgaagatgagcagctcagaggaggtgtcctggatttcctggttctgtgggctccgtggca

SEQ ID NO: 207361 - DNA, 122 bp, Homo sapiens
gggtctggggaagatgaggactggggacagataaagatgccagccctgctttgatattttcgtcttggtgactcagctgactccccctctcttcataagccatccaactcctggagcacaag

SEQ ID NO: 207362 - DNA, 122 bp, Homo sapiens
cggcagccttgagaggagagatgagcaggggtgggtctgactcaggctgacctggcacagcgaggccacccaccgacagggacctcagcgcgtggccaccacacccccagcacacatgtgtt

SEQ ID NO: 207363 - DNA, 122 bp, Homo sapiens
caaatggagccacagagaggaaacaagcagcaggctcaggagcagggtatgcgctgccttcggctctccaatccatacctcagggctcctatgccactgcacgattcttggttgccaagagg

SEQ ID NO: 207364 - DNA, 122 bp, Homo sapiens
caagtccctccacctccctctggctggccattgccatggcaactagggtgtactgggctccggagggaagccaagggtgggggtggaccaggacctcttggggaaagcaagggtctgagctg

SEQ ID NO: 207365 - DNA, 122 bp, Homo sapiens
taccctgtctcaggctgatggccttggcactccaccccactgcccctgtgacgcgggggccgccaaggcttggtcttgattcccagaggccctgctggtgacctccccgacatctctgccct

SEQ ID NO: 207366 - DNA, 122 bp, Homo sapiens
gactcccagtatgtatttgatgatgtggtggggatacaaacaagtattgacagcccccagcgcctcaactgattcaggaacaggctttcctggaagcctgggaaggatcaaagaactttaag

SEQ ID NO: 207367 - DNA, 122 bp, Homo sapiens
ctgcgttctgcgtgtccgcagagcccggagagtccctgataatctaagactcatagccaccgactagcaatttgttaggatcctgggccagcgtgcgcacctcggatgttgcaggagtccgg

SEQ ID NO: 207368 - DNA, 122 bp, Homo sapiens
aggaacccagagtcgggcctctttcgagccctcgcttcctctcgcctggcttcttcggcgcgaaggatgaattggggttgttgaaaattgatcaaacaacccgatctctgtcagcgcctgga

SEQ ID NO: 207369 - DNA, 122 bp, Homo sapiens
tatcttaggaccatgttccagtaaatgaggactgcagcaggagccgtgagccctgactcccggccagagacacgacgtcagaccagaaagaatgaggaggccgcgtggggcccgcgggtgtg

SEQ ID NO: 207370 - DNA, 122 bp, Homo sapiens
gttgatgatcacccgcagtttcctgatgtaggaggcctccgtgtgcagcagctcccacaccgcctcctgctggtggcactgccgccgggtcagcttctagagggagggcaggatgggtcatt

SEQ ID NO: 207371 - DNA, 122 bp, Homo sapiens
tttgctgtaaatggatatgtgtaacccccattccatcctgctaaagccgattgtcttatccgatctcgaggtgcaaggcaacaaatatgaccaagcaaatgtttacagccttaatttgagat

SEQ ID NO: 207372 - DNA, 122 bp, Homo sapiens
tacatgtaggagcttggactttatgtagcaggcagaagagaactaatgaagggcttgaagcggtggcgtaatttaactagattttcattttagaaaattacacgcaaaaccatgggagaatg

SEQ ID NO: 207373 - DNA, 122 bp, Homo sapiens
tgcctccgccccagagacacgttgcaggccagagcggccggggcgcggggcatcacgggacggcctcacctggcctcttggaggactcccgaagcccgaggccgccaaccgaaggaggcccc

SEQ ID NO: 207374 - DNA, 122 bp, Homo sapiens
acggtcggcggcaccccccccagcccccaccccgcggcctccgtgggacgggagagtctgcgcaggacggcaccgagggccacctctgctcccagagctgtcccctgtccccacgaccccca

SEQ ID NO: 207375 - DNA, 122 bp, Homo sapiens
atcctgccgttaatgacataaccttctcccctaattaactgacaactgcattaggcggcgcgcctccgccgcacgccgcccacagcttcccccacgcagttccgcccgcgccggtgcggggc

SEQ ID NO: 207376 - DNA, 122 bp, Homo sapiens
gtgttggaggcgctggcaagggccgcgcagccgcagtagagggccagggggcgggtggtgcgcacccgccacagagggctgaaggtgctgcccacggctttcttggcgtctcgacgttttgg

SEQ ID NO: 207377 - DNA, 122 bp, Homo sapiens
ctttaccaaaggctacgaatgggaaggaatggaaatccacgtcgtttgccagaagatttgcggtgttcagggaggtctctataacctcttgacacttgagagaaagaagaaaaaggttttac

SEQ ID NO: 207378 - DNA, 122 bp, Homo sapiens
acatactaatagtgaggaattggaaaaccaagtactggtgagggttcggctgctgactggcgaaatcacttgctgaatgtgaggcccaacatcctctaaaaataataagagttaatatgtgc

SEQ ID NO: 207379 - DNA, 122 bp, Homo sapiens
gaagttcctggaaatgttaagcaactccacagttccccttctccaattctccgggctgagcgccacctgccgtctgactcaggaacagcgggcccgccgcagcttaggggagaaacgtccaa

SEQ ID NO: 207380 - DNA, 122 bp, Homo sapiens
taaggttccagcatgcctcacaaccaaaatttcctgaaatgagaaaattcccagcaccagcggttttaatcatccagtgtctgaattcctaatagtcacaaatcactcagatgttggaaact

SEQ ID NO: 207381 - DNA, 122 bp, Homo sapiens
tgcttccggccctgtggcctggtggggctctgcaggctccctcgggagtggtccttgggccgtggcccctctggggtgagcgtggatgattagtacccagaagggactgtgtccaaaaggag

SEQ ID NO: 207382 - DNA, 122 bp, Homo sapiens
tcattcattcacttaataaataaggtactaagcattcaccctatgctaagcaatgtaaagcgatgtgaagacttgctgtacatggtccatgatctcatagagtctgcaatccaggtgaagag

SEQ ID NO: 207383 - DNA, 122 bp, Homo sapiens
gggtcgccaggaagggtggtgttggaatccaggccccctgtaccttgcaggtgcccatggcgtccgagcggggcaaggtcaagcacaactggagcagcacgtcggaagggtgtccccgcaag

SEQ ID NO: 207384 - DNA, 122 bp, Homo sapiens
taggcggcggcgccagccggagtgaagccctccagcctttggaaaaagtaattagcgctgcggacaaacccaacgtggtaaaccccaagccccgccttcccctcggaaggcgggaggggatt

SEQ ID NO: 207385 - DNA, 122 bp, Homo sapiens
catcccccttggatcagcagatacctgaggcatattctttttatttttcagtttttgagacggagtcttgctctgtcacccacgctggagtgcagggattgcaggcgcatgccaccatgcct

SEQ ID NO: 207386 - DNA, 122 bp, Homo sapiens
gcatgccatcatcagcccactgcgttctgcaaacacagtcgtgcagagcaaagctgctctcgctgtcaccgcaactgcgtgtgacgttgaagcccggactgaggtgagaattttaataacat

SEQ ID NO: 207387 - DNA, 122 bp, Homo sapiens
ttacttccattgacgacagcctttgaggaaccttcaaaatgagtctcacagcacggtggacgtgcgcaacgggaaaagctcccaagcaggcgcagcccggctaggctgctacaggacggctt

SEQ ID NO: 207388 - DNA, 122 bp, Homo sapiens
gcctcgggcctcaccgggaagccggttctgtcaggcggggctccgggtgaacagcgcaggcgaggcccctgccccgcagagctcactctgtagaagggaaacaacacacgcagctgcgatgt

SEQ ID NO: 207389 - DNA, 122 bp, Homo sapiens
tgtcagtgcgggtcttggagcatggcggtaatcagagtaactcggcctgtggtccggagccgccagagggcgagatggggagctgattggaagaggattaacttcccgccttcttcacccaa

SEQ ID NO: 207390 - DNA, 122 bp, Homo sapiens
ctgccccagtcccctacatcgacaggctctgttccggctaccttagtctgggcgggagggcgagagcgagggcgcctgggagaaacctcgcccagcggcggttgattagtcaggcctcagaa

SEQ ID NO: 207391 - DNA, 122 bp, Homo sapiens
cggcagggccccgggggcggggccgcagcgggggctcagtcactcactggaggcgcagggcgcggggcggggagggccgggactgagagggggctgcttactcaacagcccaagccttctgg

SEQ ID NO: 207392 - DNA, 122 bp, Homo sapiens
gaactgcacaactcagacagtaatgtaacttcacatacagcttgggaagcacataggcatcgaagacgctcgcttcagacatgtccctgactgctgcggcctccactatgtttcgaatgacg

SEQ ID NO: 207393 - DNA, 122 bp, Homo sapiens
aactggcagagcttttgccaatacaactttctcaaaaatgatgtgaattttctatgtattcgaggttttttcatgtgtcaacaaaccacgctcacaattatttttgagacaggcttctctcc

SEQ ID NO: 207394 - DNA, 122 bp, Homo sapiens
aagtagcatgttaaagggcacagacacagaaaagagcaagctgtattagggatgaccttccggttcacttggctggaacaaagggcttgaccacagagggtgagaagcatgaggctggagga

SEQ ID NO: 207395 - DNA, 122 bp, Homo sapiens
cagggcaggaggagcgggcgcgcctggtgagaatgtatcttaacgagtatgttcttaagccggccacagaaggaaagcggtaagtgtcccgccccaccagcccccgtccaggggccctcgct

SEQ ID NO: 207396 - DNA, 122 bp, Homo sapiens
gctcctgcgctcttccccagggtcttagcgtggcctagggatgcagatcttggcggccggcgtctgttgctggcgtatcccccatatggctgcccgggctgaactcggccgcgagaaagagg

SEQ ID NO: 207397 - DNA, 122 bp, Homo sapiens
ttttctgtgttgcagcgtcttttctccccggaagagatgttggtgtgtaagtagcagcaacggcccctctgtttaacggtggctacccctccccggatgacagtcacaggccaggcctcata

SEQ ID NO: 207398 - DNA, 122 bp, Homo sapiens
ctgtcccccatgacagcggggacgaaggtcctaagccctggccgggagggcagttgacctcgggactcgccgcggggcggagcgggtgctgggaggaaggagggcgtggctggcggggtgtg

SEQ ID NO: 207399 - DNA, 122 bp, Homo sapiens
tggccgggagggggaaaaggggggaaaagaaaatctttaaaaattaaaaaaataataaaacgaacaaatctttacttgttgccacatcagataacacggaaaaagccttgaaattactccag

SEQ ID NO: 207400 - DNA, 122 bp, Homo sapiens
cacacccgcctgcgaggctgacccgagcgcgtcccacccaaggtcgcccagccccgcgggcgtttacttttcaaaggtcgtgtgtacacagtctgagccggagctgccccttcacttctgga

SEQ ID NO: 207401 - DNA, 122 bp, Homo sapiens
tctgtctgcctaacgcacaaaaccagatgtccactcttcatctcacataattgacatctgcgtcttttatctacgtaaacaaacttgtcattgaaaaagtccttggctttgaagtcgccgga

SEQ ID NO: 207402 - DNA, 122 bp, Homo sapiens
ttcctctaattctatgagtgagctcttggcttgtggcccgcctctcattgagctgaccctcggccccttcagggcgccggggcccacgtgtcgcctcttcagggtctcagtgccctggggag

SEQ ID NO: 207403 - DNA, 122 bp, Homo sapiens
agttttattttgctcatgaggaagttgcttaacctctcggaatcttgtttctatctagaacgtagggacttgataactaccttgcagtgttattgtggggcttatgtgaaagaaggaatttt

SEQ ID NO: 207404 - DNA, 122 bp, Homo sapiens
aaaaccctgtttaatcaatgatctataggcagttatcagagtgctgttctcctgttgccccgtgaagtgacagggctttggggaatgtgctcagggctgcagtggacccctctccacagggt

SEQ ID NO: 207405 - DNA, 122 bp, Homo sapiens
gctggtttttactgaatttacgcttagcagagacctacagaaaaatgagatccagctcgccgctggagggaacagctctggcctcccagtgacgctgatatagacgcgaggctggagtgatt

SEQ ID NO: 207406 - DNA, 122 bp, Homo sapiens
caaatttatttaatatgtatacacaggtgcattcagaataaagacccagcctcccaatgccgtacagaagcttataggccatcttgaggttacagaaataatgggggcttggatcctggtaa

SEQ ID NO: 207407 - DNA, 122 bp, Homo sapiens
ctgagaggacgcgtctagtcctgaaggccaagggaatcaggtgggcacccaggcgggggacgctccccgagccgtccgggagcctgctgcaggcggcggggtggggtggggtctcagccccc

SEQ ID NO: 207408 - DNA, 122 bp, Homo sapiens
agaaattacaactttcaggtgcatcaggagagtgagtcgaagacatgcaaatttcaaaagcgactggacgatattatttatattcagtctgataagggattttgttaacttagctgactttt

SEQ ID NO: 207409 - DNA, 122 bp, Homo sapiens
cttggggcggtccctctcaccgcccttctcgcccgcctgtgcagaaggcaaatccgtggccgacctcattactgaacggcaactgctggcggccttcgaacagcttctgcgcctggagacgc

SEQ ID NO: 207410 - DNA, 122 bp, Homo sapiens
acacacacgccctcaagcccttcatctcgagctcttcaactccagtccatccccactcaccgtccgcagtcctaccaagcctcacgtggggctcacacccacaatcctccgcgtgacgctcc

SEQ ID NO: 207411 - DNA, 122 bp, Homo sapiens
caaccctcttctgcgcctaacactggcacctccttttcttccggctgatgaataattgtccgcaaaccagcctctctggggcactgaggggcgggaaggttagaaggagccagggctagagt

SEQ ID NO: 207412 - DNA, 122 bp, Homo sapiens
ccagtaccgtgccatgtgcctgcactcctcagcccttcggcggttgatgggacttgggaccgggctcagcggagcaggaggaggcgctggtcggggaggttcccgcgggcgtgcaggagccc

SEQ ID NO: 207413 - DNA, 122 bp, Homo sapiens
tgggttggaagatgggaagtcaatgcagaagcaccgttgaaagtattccactgggcagggcgcggtggctcacgcttgtaatcccagtacttcgggaggccgaagcgggaggatcgcttgag

SEQ ID NO: 207414 - DNA, 122 bp, Homo sapiens
aggctgcaggccacctgcccttcggcccccgcagaggggctatggccatgctcttgtggccgtggcccagcgggctctggttatctgacatgctccaaacatgtatgtgtacacatgtgcac

SEQ ID NO: 207415 - DNA, 122 bp, Homo sapiens
ggggcatggtggctcatgcctgtaatcccaacatattgaaaggcccaggcggaagtatcacgtcaacagcagcctggacaacagagcgagaccctgtctctatatttaaaaagaaaaaaaaa

SEQ ID NO: 207416 - DNA, 122 bp, Homo sapiens
agaggcctaggatgcctggggcccagcggcctcttccctcctggcgtccccggctgccctcgctcccaggccccgcagtctcatttgccgcttccgacgcgtgaccccggcgcgctagcgtc

SEQ ID NO: 207417 - DNA, 122 bp, Homo sapiens
gcatttgctatgtggactttagaggaattctgttcctaagcaaggtccatctccaggggccgttcacggtgatcagctgtctccctcagccaggaaattcatagcctaagcttggtaaacta

SEQ ID NO: 207418 - DNA, 122 bp, Homo sapiens
tgaaaaattggcatgttgtagtccaacaaggcaatttttatattgttccatgcagctgtgcgcctctggatgctatgctgcctgtgtcctaaagccacaggatggagagcattttccagcca

SEQ ID NO: 207419 - DNA, 122 bp, Homo sapiens
acagccatggcatctcttccacttcccttcatacaagccccagtctgagacatatgagttcgactagaatcagccagttcctccttatttggtgcctgctgtattcaaaacagtgagtgtaa

SEQ ID NO: 207420 - DNA, 122 bp, Homo sapiens
ttcctgggttaaatgtacatgctaacacaacctttgacattaaaaaacaaattcccctcccgcgttggagagaagtcttccaaacagtcatggaaatttagactgtagctttaaggtatcta

SEQ ID NO: 207421 - DNA, 122 bp, Homo sapiens
aaacccttggttttgcgtatgagcacagcaccctgtaggcaggtgaggagtcttagaacacggcggggagcgaaccagacacgtactaaagaaacctccatgtttgatataaacccaatgca

SEQ ID NO: 207422 - DNA, 122 bp, Homo sapiens
cgtaggggcggggaagacgggcacagaaacctggccgcggctttccgggagctgtgggcacgcgagctgctcgaagccggtggcccggggatcgtcgctgcccagtccggccgcggccggcc

SEQ ID NO: 207423 - DNA, 122 bp, Homo sapiens
aggtggcatttaattaaaagacacttcgtatttctgtctattcttcaattttctcccctgcggggaacactaaagccggaagtgaaatgacccttttcacacatacagccggtcaagaggca

SEQ ID NO: 207424 - DNA, 122 bp, Homo sapiens
tgctgtgaatgatacctggcctttctcactatgaatttctgattaaccaaccagactacacgttgcctctctgtgtatgactaacggctccaacccgatgactcacagctacttgcttatcg

SEQ ID NO: 207425 - DNA, 122 bp, Homo sapiens
gctaaaagctgccagctcactttaagagcagctttgtgaaaaacaaccccagtgcgcaggcgcaggccgcggctgctgtccgccctccctgcgcgccccctcccgcgccgcgccgcgccgcg

SEQ ID NO: 207426 - DNA, 122 bp, Homo sapiens
actcatcaatactggctcatcaattctaacaaatgtgctgttctggtgcggcgatgctgacggcaggagagtgtgtgtctctgtgcgtgaatatgcatgcgtgtgtacatgtaagcacgtgt

SEQ ID NO: 207427 - DNA, 122 bp, Homo sapiens
gcttcggctatggcatgccccctctgtacccccagacggggcccccaccatcctacagaccgggcctgcggatgttccctgagactaggggtaccacaggttgtgcccaaccacctgcagtt

SEQ ID NO: 207428 - DNA, 122 bp, Homo sapiens
gaaggaacagcgacagtcagggttcggtggaagctagcccccacccagatggcattctcccgtccactgaaaactcagctgcctctcagaggtcattttaacaaagccttttctttttttgt

SEQ ID NO: 207429 - DNA, 122 bp, Homo sapiens
taactaaaatcagtcacaatatcccactgggaggtgacgctttttaagacgagcaacagccggccgccaagaggcgggtgaggccccactgagcacttctattgcatctaactggggagcca

SEQ ID NO: 207430 - DNA, 122 bp, Homo sapiens
ttcgcaggcgtctcacccgggcctaggcttctgcacggcagtggggcttttctccttctccgtgaatccgctgacgccgtgccctggagctcccccatcccgggagtctgacggcgctggcg

SEQ ID NO: 207431 - DNA, 122 bp, Homo sapiens
ctctgtgaccctgaccgcaggcaggcagctgggccagcgtgcacaggaagctggacagagcgttcccagaaaggccacgggactgacgcctgtgggtttccatcgtgtttctggaggaaaaa

SEQ ID NO: 207432 - DNA, 122 bp, Homo sapiens
agtccgcagatccacagctgtgagccaggtccgcgtggggccagttttcccaggagtgcacgtttcctcctctcggcttcccagggattcatttccggaagaccaagctttcagctttctag

SEQ ID NO: 207433 - DNA, 122 bp, Homo sapiens
ttccctccccgacgcgcggctgctggcctgcaggaagaactgctggcggtgggccagcctcgctgcgcatgcccacccagaacgccaggcagacaaaggggggcggacgagagtctggggat

SEQ ID NO: 207434 - DNA, 122 bp, Homo sapiens
gcgagacgggatgagggccggtggttttccgtgcccgctgtggggacagcactttcccgccgtctgtcgttggtgttgcagctccaggccattcccccgagctgtgctgatggagagggatg

SEQ ID NO: 207435 - DNA, 122 bp, Homo sapiens
cgcaccctagcctcgccgccctcagcctgggacttggggatcgggcgcttgcccagcccgcgtcccagcgcggccacatggctccactccgcgcgctgctgtcctacctgctgcctttgcac

SEQ ID NO: 207436 - DNA, 122 bp, Homo sapiens
ggcagccccaggagagtcacatctgacacactcgggggaagcacgagaacccctcagcggcggtgtcaggggccgcccggcctcccctgtcccccgaaaggcgggcgtcgacaaggcgctag

SEQ ID NO: 207437 - DNA, 122 bp, Homo sapiens
tcttttcactaacggagtccagctgacctgattataattagtgtttcctttggtcagcctcgttattttcaccaggtgacctaaaccactcatttctttgagcccactcctgctgctaaagg

SEQ ID NO: 207438 - DNA, 122 bp, Homo sapiens
ccaccctgtaatgatgaggggagatgctccctgggacagcccccttgaagcttctggcgacggggctgggatccgcccacccttactcaggggcgagccctgtcatacgcgtggaagcggcc

SEQ ID NO: 207439 - DNA, 122 bp, Homo sapiens
ggaaaaagtcaacagaccgtgagatgtggagaagattatcaaagggtagcaccttatgttcgagcccatgacccatttccaatccttagcctgggcctggctcctgttgagatcaaggtgaa

SEQ ID NO: 207440 - DNA, 122 bp, Homo sapiens
aatagggtccctgtcgccccggtaaccatgatgcacggcagccaatggaaaccagcaagtcgcggccctgctccatgattgggactgaagtaaggaggtagcggcccaatgggctgtgggaa

SEQ ID NO: 207441 - DNA, 122 bp, Homo sapiens
ccctatgcggttacagtctaagatctacctttttgggatgacatcacacctttcttcaagcgtgttttctgcctgtacaccccttatgctagttccattcctgcctggcagagcctctccct

SEQ ID NO: 207442 - DNA, 122 bp, Homo sapiens
aggaagttgtgtggtgggaaggccgcttctggctggactgcaggcttgtttgcccacacgcgccccagtgagagcgaggcctccacgggcttccttctccagtgcggggagtgtgtggcgaa

SEQ ID NO: 207443 - DNA, 122 bp, Homo sapiens
ccggtgtcggggtggacctgcttcagcaccttgtacacgtaaacggagtagctctccttgcggctgcgcttgcgcttcttgccgtccttcttctgcactttcgtaacagcctttttggagcc

SEQ ID NO: 207444 - DNA, 122 bp, Homo sapiens
acacggagcggactgaggggagtgagcgttctctgcaccaaacaacagttattaaggccccggtcactggcgccctcattaccgccagcagtgctgggagtggtgggagcagcggcggcggc

SEQ ID NO: 207445 - DNA, 122 bp, Homo sapiens
catgtgtttcagcaaggagcctgccccagccgaaatcgaggtgagagaaggggcccctcacgctgcctctcatggtgtgggaacccctcggcgagctggaggacatcctgtcctgccctgac

SEQ ID NO: 207446 - DNA, 122 bp, Homo sapiens
aagtacgagaaggcccgtggcccgaaagtggggagcaagggggcgtggggctcggccttgcgcgtcctttggattcttggccaaggaaaggggagtctggggtctgcacccagagaacggct

SEQ ID NO: 207447 - DNA, 122 bp, Homo sapiens
ttgaatttctgtttatatctttcataattaacttttcaagtgattaccatccatcatgaccgcaaactccttggggcagcaactacctcctaagctttgttttactcactttacacgttatt

SEQ ID NO: 207448 - DNA, 122 bp, Homo sapiens
ttcctcttcttattcaaatgttcactgcggagacaaacacaaagtagattatagggtgcccgggacaggtggtagaaatggggattaacagtaaatggaagaaagagagacagaggagagag

SEQ ID NO: 207449 - DNA, 122 bp, Homo sapiens
ggcagcctttcactgaggccacccgccagtttcaaattcagtggcgtttgccctgattcccggggcctggctttcagcgtagcaattctgccggcgaagaaggtgagcgcagtgctgtgtgg

SEQ ID NO: 207450 - DNA, 122 bp, Homo sapiens
ggactgcagatcccagctttgagctctgagtactcctggcagtgccagcccgaggggcagcgggaacaggatcctacccaggatctaatttgacctttgccccgaggtcacagatgtcttcc

SEQ ID NO: 207451 - DNA, 122 bp, Homo sapiens
tgtttacggtccctgtgccgccgtgcggtagcagttttcccgagtgtctcctggctgggacggctggtgaggatgtgagttcaatagatgaacaccccaccttggtgacacagaggctggac

SEQ ID NO: 207452 - DNA, 122 bp, Homo sapiens
caaagaggcttaaactgcccagaacctccgaatgacgaagaatcaccgccagtctcaactcgtaagctgggaggcaaaaccccaaagcttccctaccaagggaaaacctttggcctcaaagg

SEQ ID NO: 207453 - DNA, 122 bp, Homo sapiens
cctgtgctcatttggctgcacaaacagaagcacacagcctcatcaaggtgagagctaagccgaccccatgtctatttgaacaatgctaagatggatgatgaatgggtattttggaaacacag

SEQ ID NO: 207454 - DNA, 122 bp, Homo sapiens
gaaagacagaggcctctgtaaggtggtgtcaaaatgccaggttgaatcaacagtcatctgcggggactctgaaggcaggcaatccgcccagtgaactggcagcaccgggcaggagggtctgg

SEQ ID NO: 207455 - DNA, 122 bp, Homo sapiens
tgagacccattgtagacttctgacctccagaatcttaagataatttgtgttgttttaagccgtcaagcttgaggttaatttgttatagcagcaatagaaactaatagactttgctatattgg

SEQ ID NO: 207456 - DNA, 122 bp, Homo sapiens
gacagcagctccgtgagagaggcggctcccggggggaattagaggctgccctcgtcatgccgttcatgcactgacactcccaccgtgccaggacatgccccatgctctctcctttccgcctt

SEQ ID NO: 207457 - DNA, 122 bp, Homo sapiens
ccacacttgggagatatgattaaccattttacagatgacaaaagtgaagcatatatcgatcgcttaaataagtccaaattcagtcaggaaatagtggaaattgagtttgaattcaggcagtt

SEQ ID NO: 207458 - DNA, 122 bp, Homo sapiens
ctctcaaattgttagatttctctaatagctggcaaagggcttggatgttctcaaacatctcgcctctcctctaccacagcacactctctccagccttgccttgtagcaataccctgatgact

SEQ ID NO: 207459 - DNA, 122 bp, Homo sapiens
cagtgaacacttcagtcctctaaaggtacttccctgtgtccacccaaactgctctctaaccgaacgcaagcaaggggactccaatgctctcaggccatgaactaatgaggagcttcatgcct

SEQ ID NO: 207460 - DNA, 122 bp, Homo sapiens
cggggctgccggtcgtggagtctggcctgaaagtgggtcctttaccggagcaaccttctgcgttccctttttcctctttccctgttccccgacttgcctggggcttgcatcaaagctagtaa

SEQ ID NO: 207461 - DNA, 122 bp, Homo sapiens
ggcaggggatgggggggtgtcatcgtccaggtcctggacggggctgacactcctgaggaccgactccccaaagctcttcagcaagttcttgctctcgtgcagccagttcaggttggtcagct

SEQ ID NO: 207462 - DNA, 122 bp, Homo sapiens
cgtcccaaaggaaagcaggttctcccgaaacaagtttccagtcgggggttttccccaaggcggggggtggtctgggcagcagccctttctggcctgtgcctcgtgcggtagagaggcgtgct

SEQ ID NO: 207463 - DNA, 122 bp, Homo sapiens
agcctctcccatctgcggctccggctgcctcggagccatggaatggtttcaacaactcctcgacaaggccaagttggtatttatgtctcatcaaacccactctacaaaggaaatgaaaaagc

SEQ ID NO: 207464 - DNA, 122 bp, Homo sapiens
ggtcgtcggtgttggggatgaacttgaaggacgagaagccgtgagtggggaccaccgccccgacgtggctcacagcgatgtcgccgaagtcaggggaggcgctcagcagcaggttggcgccc

SEQ ID NO: 207465 - DNA, 122 bp, Homo sapiens
ccggccgactaccagcctgccccgcacagcacctgccttcctcagtccccactactcacccgggctgggatcgtcagggtctgttctgagcccctccaggctataagcgtccctggacaagg

SEQ ID NO: 207466 - DNA, 122 bp, Homo sapiens
agactgccccaagtatacatgtcccagctcactcaccaggccgtcgcaggcgctgatggccgccaggccaccctcgagctcagggtcctgcacctcgccaagcaggtggcaggccggggtgt

SEQ ID NO: 207467 - DNA, 122 bp, Homo sapiens
attccacttacatccctgctctgtgttttgctaccaacccatatcacctgacgtccaaaccgggcaggttgcctgtctgaaaggctcaggggcccagttgctgcctaaagaagccccatgtg

SEQ ID NO: 207468 - DNA, 122 bp, Homo sapiens
ggagggtggggattaggaccttaatgggataggtgggagaaccagctcacacacacaccacgaacaaagggatctcttgcatgtgctcatgggtgcacagtgcacccacacatggttaaaca

SEQ ID NO: 207469 - DNA, 122 bp, Homo sapiens
ggagagaaaaccaagcctctgcttgaacatgcattcgttcattctacataacaactcctacgagtttgattcagtgatctattttgggggtcctgtggatgtggctatttggaaaccattaa

SEQ ID NO: 207470 - DNA, 122 bp, Homo sapiens
aggccaagccaggaaggtttagcttccctgggctctaagtggcagttttatcttgtggaacgtaaatgtctcctgtcactggagacaagtttggaaactcttcctctctctctccctccccc

SEQ ID NO: 207471 - DNA, 122 bp, Homo sapiens
caggtaactgctaatactttccaagccatgctcaaatcatgcatctgagggatgttactgcgtttatttgatctctcgttcaatggctaaggagtatagaaaggatcattatagtgtgtgtc

SEQ ID NO: 207472 - DNA, 122 bp, Homo sapiens
gcgccgtcctcccgtttcctgtgatctaccagtcctcctctccgcggaggcttggccgggcgcacctgaggccggcagcatccccgtggcttggcggcagctgcaacctccacagacggccg

SEQ ID NO: 207473 - DNA, 122 bp, Homo sapiens
ttagctcctatgaatgcctccagtcactgtcctatacattttccctgtgattgcaataaccgtgtatatgcagttgcatccttattttttcacttaacactgtatctcaggcatctttataa

SEQ ID NO: 207474 - DNA, 122 bp, Homo sapiens
ccggcctcccacctgcccggctgccggggtcctggggctccgccgcccccgccccgcggacggccagcctcctgcccctgcagtgcctgcagcagagcagcttggggcccagcgtggtggtg

SEQ ID NO: 207475 - DNA, 122 bp, Homo sapiens
aattgctctacgtgggaatggattcattggtgctttggcagaatgactcactctgatcagcgtttagattgaagggactctacctggaatcacaggctcagagaaatctagagaccttagag

SEQ ID NO: 207476 - DNA, 122 bp, Homo sapiens
agtcgcttgcgactcacttggggcgtggggggctcgaaaccactgagtagagcccgctcccgttgcttagccgcccgtcgccacgggaaaggggcggggcacgctgtattaggcgagccgag

SEQ ID NO: 207477 - DNA, 122 bp, Homo sapiens
agggtttggaggagaggggcaagaaaaggcggaaggagaagaagtaactgagcccctaaacgcggtctctgaatgccgcctctgaatgctgacgtctggcctgcaggcttctactctactgc

SEQ ID NO: 207478 - DNA, 122 bp, Homo sapiens
caactgggcgagctgtgcatggggcgtggctaaggccgtggtttggttacgattggccagcgggacttaagtgttgtctctgaagagcatggacattagtctggagggtcctggaagagtga

SEQ ID NO: 207479 - DNA, 122 bp, Homo sapiens
caaatgcaggaggcccactggttcctaagcagaaatggcacacttcagtgtcattaggcccgtttatctccaagttactcttgcaagcccttgtgtctttcccatctccctctacacacata

SEQ ID NO: 207480 - DNA, 122 bp, Homo sapiens
gcctgagctgcgagatagctccgtggggttttgccatggggtcttgcttactaatcaccccgcacgccctcacccctgtccctggacgcccttttgctgcacccgctcacatctgcagaccc

SEQ ID NO: 207481 - DNA, 122 bp, Homo sapiens
ttccaagcaggcactgggtgccctccccgcccccgcccctcgccggcagacagaggtgcccgtttctggacagagccttcagctgtcctacagcaggtccccctgccacagtcggcctcctg

SEQ ID NO: 207482 - DNA, 122 bp, Homo sapiens
ggggaagcggatcggggggcgcgggcgcgggcgctggcgctcgagcgggacgcacggctgcggccgctgggtcggtcagcgaattagttccatgatgacccccggcctgaggccgccgccgc

SEQ ID NO: 207483 - DNA, 122 bp, Homo sapiens
gcgggcgggggcagctctcggagggccgggccctggtcctgttctctgcacagcgcactgcgcccagcccagtgtctggcccagagaaggcatccagtgtgtgttcagaaggcgaagaagga

SEQ ID NO: 207484 - DNA, 122 bp, Homo sapiens
atcaacggaggggccgctgcctcttctgggggtttactgaagacactgctcgagctttcccgggccacacacaccccccccccgtttgccttggtcccgctcggggctcctttagaacgcgg

SEQ ID NO: 207485 - DNA, 122 bp, Homo sapiens
ttgtctattcggagcagctccacgaggatgggcaggcctttctcttttcggacagcggctcggatatatactgaccactgcaaaaacagggaaggcgaagggcgttagaaacaggaagaaac

SEQ ID NO: 207486 - DNA, 122 bp, Homo sapiens
gcctctgcccggccaccaccccgtctaggaagtgaggagcgtctctgcccggccgcccatcgtctgggatgtggggagtgcctctgccccaccgccctgtctgagatgtgaagagcgcctct

SEQ ID NO: 207487 - DNA, 122 bp, Homo sapiens
agagggaggctagggaagtgggggacagtcaagagtggggggacacaggcagggactgtgcgactccacccaacacaaagactcaacgagtatgcacgtgactacacgtgagtgtggagggc

SEQ ID NO: 207488 - DNA, 122 bp, Homo sapiens
atgccgggctgtagacggggaccccgttaggacgctgactgcgaggaggcaatggtgactcgctaaagccagcagagctcccgcccttggccgaagcgacccctcctccctgcacacaggtg

SEQ ID NO: 207489 - DNA, 122 bp, Homo sapiens
gcgaacggggagcagcactacaaatagagaaggagagagagaagagggaggtgctacacacgtaaacaaccagatctcatgacaatttactcagtgtcacaagaacagcaccaagagaatgg

SEQ ID NO: 207490 - DNA, 122 bp, Homo sapiens
ctagagtgaggtggcaggatgaccgcgcagggcgtgtcccggggattgggggtctgggtacgcgggctctgcccgtttcgtggaaaggcgctgccctagtgttgcctgcggggtagacccaa

SEQ ID NO: 207491 - DNA, 122 bp, Homo sapiens
ttgtcatttatctctgaaagaggcaagtcaacaccttaatcctcatcatagcatagtcctcggtcctcagtggcaagggtgacttgaaagtggggcctttcatagctccagagccaaggagg

SEQ ID NO: 207492 - DNA, 122 bp, Homo sapiens
ttgacaatatttgcatctactctgagaagaaaaaacctctcaccctcctctgatagcctgcgtcctctactctggcctagcttctgcgcttggggcagctggagggacaaacatatcctaca

SEQ ID NO: 207493 - DNA, 122 bp, Homo sapiens
gccaacaaagcaaagatgtagcctgttactgggccgcagtgagaaataagtctgtccagtcgtttgtccattggcaacacagcttccactgatacccggtcatatacctggagggagagaag

SEQ ID NO: 207494 - DNA, 122 bp, Homo sapiens
tcctgggctcaagcgatcctcagcctcccagagtgctgtgattactggcgtgagccaccgcgcccggccaatgtcttcattttctaattggggaatccgttgagggcgcagctcggccttaa

SEQ ID NO: 207495 - DNA, 122 bp, Homo sapiens
tcagggattgggtataactgggtaatactcagttgagtaatgtagtttactgtgagtgcacggcaggtgactaatacagaaactacaagtacactttggtggcactaccttgattcacacta

SEQ ID NO: 207496 - DNA, 122 bp, Homo sapiens
tcccagcataaaccaggattggaggcggtgcgtgtcccaggagagagggccagcgcggtgcgcgcctcgccaggcatgctgggaggagtagtctcctagccacttccggccgttggtcacag

SEQ ID NO: 207497 - DNA, 122 bp, Homo sapiens
tttatattgtaagctcagggaggcctcttcattcattaaaaagccacaatcaaggtttcccggcacaggattttttctgcttagagctcctccttctctaacctctctaataaacttagttt

SEQ ID NO: 207498 - DNA, 122 bp, Homo sapiens
cgtttccgacccataagtgaggcgagctggcggcgggggcgagcacgctgcggctcaggccgccgggggcgcgccagaggctggcggggcgcgcgcgcgccgctcccggccccgtctgccta

SEQ ID NO: 207499 - DNA, 122 bp, Homo sapiens
cgtgaccatcgtcattgctcctggagcagaggcgcgaggacgagcccaagtttccaggagcgttgacctcctcgcccagactccgccacgcggctgctgcagactcctcggctgctccggct

SEQ ID NO: 207500 - DNA, 122 bp, Homo sapiens
gcgcaggaccacgttggtgctggcggaacctggaggctgcgcgtcggctctgggggcaggcggggcagggctcacctaggctgtccagcctgaggagcagccccggaggccgggagcccagg

SEQ ID NO: 207501 - DNA, 122 bp, Homo sapiens
tacaggttattttcacaagatatgacccttacagggcccgagatgaatcaaaatgcagaacgggctctccggcgcctacttcccttctgtctgggcggccaaggattcccaagagcgacgac

SEQ ID NO: 207502 - DNA, 122 bp, Homo sapiens
cgctcccagacggtcgccccgcccctaatccctggcagtccttttagggtcctggtttcccgctcccacgggcccccagagtgcacctccagtggctactgcccagtggatttgcgttcccc

SEQ ID NO: 207503 - DNA, 122 bp, Homo sapiens
ggggcgactgcccttccttgtgctcaggaagagtcgggcaggcctgctcctgcagggcgccggtggtgctattttaggcgtcctgctctgaagggcctctctgcgccccgtgtgctcacagt

SEQ ID NO: 207504 - DNA, 122 bp, Homo sapiens
ggttttatggctcggggtgccagagaagcagatgctgttttcgccgttagtcttaggatccggaatcagcagccccggacacctgagacagggggtgcgggccgtgtcccctccacaggtgg

SEQ ID NO: 207505 - DNA, 122 bp, Homo sapiens
ctcttaattctttcccaataatacaggggaatcatggactcaggggctgacctccaaagacgctgttggtggtaaattgttagagccccgagatgtgacttaaatttaggttttctgacaga

SEQ ID NO: 207506 - DNA, 122 bp, Homo sapiens
acgcagccccaaagctaatgattctaggcctaaacactgatcccaaggaaatagtctccccgccccatgtaacgaggcccctgctgagacagacctgctgatcgtcgtcgtccacgtcctgt

SEQ ID NO: 207507 - DNA, 122 bp, Homo sapiens
agggacacatgagacatcaatcaacatatgcaagatgaacattggttctgtctggaaagacgggacaactcaaagcaaaggcaggaatactggaaccagggacggggctttccaggtcatag

SEQ ID NO: 207508 - DNA, 122 bp, Homo sapiens
gctacattgaaagctgtcctgggccacatgcagcctgtgggccacaggtttgagaagcttcgtctagtgttttagcaattcacctcattttctgaaagcagtatttgttagtcctggattgt

SEQ ID NO: 207509 - DNA, 122 bp, Homo sapiens
actttccccagagagtaaacagagtccccactgagctaccatcttcagatgagtgggaggcgagagcatgactcagggtctaagcacacagccggggtggaacaaatatgaagaggccatga

SEQ ID NO: 207510 - DNA, 122 bp, Homo sapiens
tgtcccttgctctccctctagtttccctagatcagggtggaaactctccatccagccaaccgtgcacttcaaaaacccagaggtcagcctggacacctcttctcccccgacctccagtcata

SEQ ID NO: 207511 - DNA, 122 bp, Homo sapiens
ttctctgcctccgccctgctcagccagggctttgagcctcttcggttttccggccagacccggaaaaacgaaaacacagcttggggagcccccactagccggcgcctgtgccagctcacctc

SEQ ID NO: 207512 - DNA, 122 bp, Homo sapiens
ctaaaatctggagacgtggaatccacccgcggaaactccgagcccctccgactgagcatgcgccatcgccaggcggcttttggtcacaggctcccgagttctcctagctggggctgcggagc

SEQ ID NO: 207513 - DNA, 122 bp, Homo sapiens
gcacatgagagacagtatcacagactcacacactaagctggggtgtgtgcttaggatgtccggaccagaacaccccatgggtcagatccaaacccatgcatttcatggattccagccaaatt

SEQ ID NO: 207514 - DNA, 122 bp, Homo sapiens
cccatgttatttatagctctgctagtctccttcctaagagacctaggagggtcctgcatccgcctgtgaaacaaaatcattctctacacattagctagtaataaaactatgccaacagagct

SEQ ID NO: 207515 - DNA, 122 bp, Homo sapiens
gtcgggctgaggaaggagccagcctaggggcccccaacctgctttcacgcctcctaccaccggacggaacgtagcctagcgtttcattttccgtatcctcccgtcaggcgaccccgttatag

SEQ ID NO: 207516 - DNA, 122 bp, Homo sapiens
ccgaactgtgtgtggctggaaggatcgctccatgaccacgtacgctggcggcccctcttccggcttacctcaggggctggtatcgcgggcctgttctttcatcagaaagatctatattttgc

SEQ ID NO: 207517 - DNA, 122 bp, Homo sapiens
aagctctgactcacgtcttcctcatcgagcccgattggctaagccccaattgacccgacccgattggctgggcttgtaccgagctctgattggcttcctattctgattttttttttcctttc

SEQ ID NO: 207518 - DNA, 122 bp, Homo sapiens
gactctgtctcaaaaggaataaaaaaaatacaaaaaaaaaatgtagtatgattgcagagtcgtgccacggaagcgtgctggtcctatccatgtagtgaaggctgatttcatacagaaatgtc

SEQ ID NO: 207519 - DNA, 122 bp, Homo sapiens
agcccctcgagggcgcggccagcgaggagggacagagggcggcgcccccggctgcccgggcgcgtagaacaagcagctgccgccagggccgacaaagttgctccccgaggggctgagatcca

SEQ ID NO: 207520 - DNA, 122 bp, Homo sapiens
attattagccaggtgagccttctggtgggtgccggctgctggggctctctcaggcttcctcgggcaggagtgccgggagaaagttactctttatcccactctctcccggggcctactcccgc

SEQ ID NO: 207521 - DNA, 122 bp, Homo sapiens
ttcctgggcttagagtaaacaccagcttctgccacacagacatagacacacgcgtgcatgcgcagacacacacacactcacacactacaccagcagccttacactcagatcaattctctccc

SEQ ID NO: 207522 - DNA, 122 bp, Homo sapiens
tcggtctggggcgctggtgtctgccaggccacgagatttcacttccgaggctcctgttaacgcagaggcgtaggctcagaggcaggagccggggaacaccacgggctgcccctccattctct

SEQ ID NO: 207523 - DNA, 122 bp, Homo sapiens
gggcgcccaataaagggactttgaagagcaaatggcccagttcagatgatcaagtgctgacggtaaaaacaaagcccgacccctttcctcgctccccgcccccgccctccgcggtgggagca

SEQ ID NO: 207524 - DNA, 122 bp, Homo sapiens
tgtcagtcaggccgggtgggggaattagggaggggcaggagaacaagtgaggcctgagcccgccaaccctgagcttcaccccagggctgtatgacctcagggtggaaagggaccacccggac

SEQ ID NO: 207525 - DNA, 122 bp, Homo sapiens
ccggagggtcgggaacaagacgccagagcccttcttccagcgcctgcagcgagttaaggccgagggtatgcctctggcgggctcatcttccaacacagaagaccccgccgccctctctggtt

SEQ ID NO: 207526 - DNA, 122 bp, Homo sapiens
caattttgaatgccactaataaagaataaagaaaatctctttagaatctgaaaaaaggaacgatatatagttcacttacatagtagagttaatggggatttcagggagtggtatttttatta

SEQ ID NO: 207527 - DNA, 122 bp, Homo sapiens
gggcggctggagcagcagcgcgggagcgctaggggcacgggagcgcagtccctgtggagtcgctgcgggtccgcgtggcgtgcccgggggaccctaaagaccgtcgggtgggggctgagggc

SEQ ID NO: 207528 - DNA, 122 bp, Homo sapiens
aaggccaggtgccctgctccatggggcagggtccgagtgctcagaggctggtacgtccctcgcaagtcaaagatcttcagctggtggtctaggccagaggtggccatgtacctggtgagaga

SEQ ID NO: 207529 - DNA, 122 bp, Homo sapiens
ccgctgggccaggggcctcctgctctgggactctcctctgtttctgtgctggcgcgcggacgccttgggaactagaggcgggcagcctcggcgaagcccaccctgttgttgtcacggtcaaa

SEQ ID NO: 207530 - DNA, 122 bp, Homo sapiens
tgcaggtccccagccctgccacacggggaggcggctgaggcccagcaagaattcaagctccgcgggggcaggccagcagtgctgggggacccggcgcaccctccgcagctgctggcccgggt

SEQ ID NO: 207531 - DNA, 122 bp, Homo sapiens
ctggagagagtccgtgggaggaggcacgctggcggtgaagggcggggacccacaacccagcggccgctcacctgttccagccgccgcagcctcggcggtcacacgccacccgcccgcccaga

SEQ ID NO: 207532 - DNA, 122 bp, Homo sapiens
tagtagccccaccatttcctgtgacttcctggagcctggcccacagaggagggttcaggacggacgctttccttccccgccctagggaagagggagggacgcgggcgctggcgtggaggttg

SEQ ID NO: 207533 - DNA, 122 bp, Homo sapiens
tgctaaggctggtcattttcgtttagctgtgaaaggagcgcgtcgcccttgctgcccagccgaaccccgctccctccagggctgcgctgcacggggctgcctccccgagccgccagcgcccg

SEQ ID NO: 207534 - DNA, 122 bp, Homo sapiens
atctctaagatctatcctagccgggaggaatacgaggcccatcaagaccgagtgcttatccgcctgagccgcctgcacaaccagcaggcattgagctccagcattgaggaggggctacgcat

SEQ ID NO: 207535 - DNA, 122 bp, Homo sapiens
agaggtggtgtcacccaggccttgctggggaacatggagcttggggtccctgggacaccgcggagggtccacgtttccccgagtccatcggcaggtgtggacaccgccttttccttcctctc

SEQ ID NO: 207536 - DNA, 122 bp, Homo sapiens
gagtatccgtgtttcagtatctctgcaccctagcttaatagagagtgtggacaaagtggacggacaaaaatccaagaaggaaacagtgaagatctgagaagcaaaatggtgcagtgtagaca

SEQ ID NO: 207537 - DNA, 122 bp, Homo sapiens
cgacagccacacttggttggcagcaaaagcatttgctgtttcctgcctgaggctgggccccggaggactgctgtggccctgaaggcagtgcagggtcctctgggtgggaaggacgtgcccgc

SEQ ID NO: 207538 - DNA, 122 bp, Homo sapiens
catcatcctggggccaggacctctaaaacgacgtcatcctgggggccaggacctctaaaacggcatcatcctgggggccaggacctctaaaacggcgtcatcctgggggccaggacctctaa

SEQ ID NO: 207539 - DNA, 122 bp, Homo sapiens
ggcgcttttcctgcttgagctgcagtctttacagtcttcacaattacaaaaacagggtaccgtccatctcagagataatatacctgcaagtgccttgtgaattagaatcacactttcaaatg

SEQ ID NO: 207540 - DNA, 122 bp, Homo sapiens
tccctctccgctcctcacccttggctgcctggcggggcttgaaagggcaggtggccctggcggcgcgccccgcgagggatgtggcagaagggcgtgcgcctggcgccgaggcggagggaccc

SEQ ID NO: 207541 - DNA, 122 bp, Homo sapiens
ctcaccgtgtggtctgtctccccgccgcacagccacgcagtacacaccccaggagagcagcgcatgtagctgtccctgcctgcagccgccattgcctctcggccacctggttctcccagggc

SEQ ID NO: 207542 - DNA, 122 bp, Homo sapiens
ttagtgtcatgcccatctcacagatgaggaaactgaggctcagtggtcacacagctaagacgtggtaaagacaagagctgaacaggattgtgcctttcgatttcaaggcactccactatcaa

SEQ ID NO: 207543 - DNA, 122 bp, Homo sapiens
tcggtttgtttcactccctcgcggatggcttttatctctttccaccgtcaccagctcctccgaactggccctcggtcaagggtttcacagtgatgtggaatggcttttccacagtcgaatcg

SEQ ID NO: 207544 - DNA, 122 bp, Homo sapiens
caactgatccattttctaaggagtcctagttcctaaatgggtgttattactattttatctcggtttaagtgttttacagtgggagaggttggaggtctctagtacagggtattgctggaaat

SEQ ID NO: 207545 - DNA, 122 bp, Homo sapiens
gcatggccacttgggctcacatccgggctctcagcgcggggactcctggaggtgagaacccggcccagaggaaataagttggtgggcggagcgggccgcggaggccggctgtgggtggaggc

SEQ ID NO: 207546 - DNA, 122 bp, Homo sapiens
accaaataataatttctttaaaaaaattgaaccttggtaggaaattgctaatgctgtaggcgggaagaatgagctcctttgacatgagccgatgtgtcatattgtctttccatctcaatgca

SEQ ID NO: 207547 - DNA, 122 bp, Homo sapiens
ccagagcctggtcttcctcatccttcctgtgcaccagctccaactgctgctgagggctcccgggacagctacaaggcaccacaatgacctagaggcttcggaaagttgcacaacaggatatg

SEQ ID NO: 207548 - DNA, 122 bp, Homo sapiens
acctaacttactccaagtgacatgctcactcccctaggcacgcgcgccgcgaggatggagcgctgagcctggggctggctaggatgacctggacagcaacctttcctcaacgcagtcatctt

SEQ ID NO: 207549 - DNA, 122 bp, Homo sapiens
caatgctgcccactacctcgtctagacgtcacactgactgtgctggggtctctggggatgcggcgtgggtgggggcatctcacccaggtggtgctggtccctctcggaggcgttggacaggg

SEQ ID NO: 207550 - DNA, 122 bp, Homo sapiens
agcccgggccggggccttgttgcaaatgtcacatttcagtagctcgcaggctctggctctcgcagcacacgcgctcagaaagctgactaatgggaaaagctggcaccacaatgggctccttc

SEQ ID NO: 207551 - DNA, 122 bp, Homo sapiens
ctctagaatttgccctgcctccccaggcacctaactcccggcctggaaaggtcttctgcacgttggcctccagatttgggcctgacactgctgttttgagcgttggcagggtgagaccatgt

SEQ ID NO: 207552 - DNA, 122 bp, Homo sapiens
aaccgcattccggtcttcccgcccgaaaatccgcgctgtgcgagggacccacaagactggcggtctaaaagggacccgcctcacttggaaacggggctgcggtagccacaaccctccggtag

SEQ ID NO: 207553 - DNA, 122 bp, Homo sapiens
aattagagtgtgtttgttgtctgtgtaaaatagaattaatgtatcttgctagtaagggcacgtagagcatttagagttgtctttcagcattcaatcaggctgagctgaatgtagtgatgttt

SEQ ID NO: 207554 - DNA, 122 bp, Homo sapiens
acgggtctcccctcctccttcgcagtgagcgccgcagaccctcaggcgctgcagagcgtgcgctccgtggggcaaccatgggagctgttgggagacacagaagtgcttagcgcagtgcctag

SEQ ID NO: 207555 - DNA, 122 bp, Homo sapiens
ctgaagcagcatcattgtctggggtaatacccaaggcttgttgtctcacaccaagggaatcgaggatgtggacacacacatgaagtgaggtttaatagcacaagaaagagaaaggagaacag

SEQ ID NO: 207556 - DNA, 122 bp, Homo sapiens
aaaagctttcttcttattaaatgggcctcaaacttgcaaattcctggctgaaaggcaaaacgagtctttgaagtttaagacgtaggcttttaaggtcccagtccaatctgtggccccatttt

SEQ ID NO: 207557 - DNA, 122 bp, Homo sapiens
gccttaccaagcggcaggcccttgttgagcaagtgcgagctgcccatcgagaggcgcgagcggccgcgggccccgaccactccggcgcgctgcgccgccgcgagcccggcgcgtggggcggc

SEQ ID NO: 207558 - DNA, 122 bp, Homo sapiens
gccaggggtcagtctttttttttcaaaccaaggaagcatcctcacctggagagatttgagcgacaaatactgaagtctcaggcccacgggaaagcaagcaaacagaaagagaagatggcgtt

SEQ ID NO: 207559 - DNA, 122 bp, Homo sapiens
ctgcgtcccgcgggcggctagaaccagtcctgccggaagttggggcggtgccttcgcttccgcggagccgtgccacgtggccggcccggagggacaggggaaaacaacaagatggcggcagc

SEQ ID NO: 207560 - DNA, 122 bp, Homo sapiens
cacagaaaacagtatgtgcgctggtgacatttccaggggaaggactgggtaaactcacctcgacattcagagaactggcctgggagctgaggttggcactagtgagagcaagcggaccctca

SEQ ID NO: 207561 - DNA, 122 bp, Homo sapiens
ttgggaggccgggggagctggatgccccagcaatgaatcccacacctcagggactcagtgcggttgaagtgccggcaatcagaggagaggaagagctggtctaggtctcttagtagtagctc

SEQ ID NO: 207562 - DNA, 122 bp, Homo sapiens
cctccacccccaccgcctaccagtgcaaacgcaccgggttcccacaccggaggacgacctcgagtcatttccagatctgagcgtttccttggatctggcctccagactccacccccacactt

SEQ ID NO: 207563 - DNA, 122 bp, Homo sapiens
agcccagatcggaagagccgagtccgggcagaggggtccgcgggctctggaggtgctggacgggtgcgatccgagagcagaccggggccctcgcgagcctctcccggcccctgcccgcgatg

SEQ ID NO: 207564 - DNA, 122 bp, Homo sapiens
tccccaccttagcctcccaaagtactgggattataggtatgagccactgcacccagccagcgtatgtattttgggaacaaattttatccattgttttgtcattctgttgttttctttaaaat

SEQ ID NO: 207565 - DNA, 122 bp, Homo sapiens
gtgggcagactgaggacttcagccagctttcaaatgggagagcgtcctggcacggggtgtcgttgacgtgggcagaccgaggacttcagccagctttcacatgggagagcgtcctggcacgg

SEQ ID NO: 207566 - DNA, 122 bp, Homo sapiens
aggagagagcctgaccctcattttgaggttggctctgtggccgagggctattcttgctgtcggcttaaggtccccctcttagtttatgaacaaaatttctctgccagcgtgcgttgtctact

SEQ ID NO: 207567 - DNA, 122 bp, Homo sapiens
cccggacgtctgtcctccagaggcggaggaagggccactctgtgacaccgcgatcccggacgtctgtcctccagaggcagaggaagggccactctgtgacaccacgagcccggacgtgtgtc

SEQ ID NO: 207568 - DNA, 122 bp, Homo sapiens
agtaaccgtacttagggcttctgcaagggccaccagagcgcctaggtggcaagtgggcgccgtgtcacgggccgcgctgcaggcggctgcgcaagtcttccacgcagccgtccagccccatg

SEQ ID NO: 207569 - DNA, 122 bp, Homo sapiens
ctgtgggtggtggaggagcagagtgttagccaaatcgatggtgactttgaagactacaagcgggaggtgttggaggccctgggtgaagtcatggtcagccggccccgagagtgagctttcct

SEQ ID NO: 207570 - DNA, 122 bp, Homo sapiens
aagcccccaaagaagaacacccgttggaattaaccaccctttaggtaattcggtcttgaacggaaatcgcgagtcaggagctgggttgagtgctcctcggtcgggcattcaaagccctccaa

SEQ ID NO: 207571 - DNA, 122 bp, Homo sapiens
agacggggcacccctgtggaggggctgctgtgggccctgacctccaagctcctgcctcaccgtctgccttgctcctctcttcccaaatcatcaccgccatgggcccagccccaaagggcagt

SEQ ID NO: 207572 - DNA, 122 bp, Homo sapiens
tccctagatgacctggtcccatcccatgctttaaatccacttacatgccagcacctccctcgcctgggtcttcacactcaccggtccctgtaatggcatttccatgaggaccagtgatctca

SEQ ID NO: 207573 - DNA, 122 bp, Homo sapiens
caccaccgtgaacaagggtgggtgaatgccttttcttccccctgaatgtctttccttccgcggtattttctgccccgatctatagtcccttgagtctccacacacactcctcacagagatct

SEQ ID NO: 207574 - DNA, 122 bp, Homo sapiens
gctgtgggtcggcgcagggacgctggctgctcacctccaggagccgacagaaggtgccttcggcgtcacgcgtccaaccctggggctgatttaaataactaataagctcagagaaattttac

SEQ ID NO: 207575 - DNA, 122 bp, Homo sapiens
gccctcgctcctgatctcctggtctggaaggcgtggaatcagagtttggatgggagtggtcggagtggacaccctcgctcctgatctcctgatctggaaggcgtggaatcagagtttgggtg

SEQ ID NO: 207576 - DNA, 122 bp, Homo sapiens
tcagagctggggcggaggagcgagcgagcagcggcgagcgcctcacggccgggagcggagcgagagagagactgaaggcagaattctgcctgggtaccacctgccaggagaagaggaggctg

SEQ ID NO: 207577 - DNA, 122 bp, Homo sapiens
gtctcggaagaggctgctgattgcggccaggatcacccgatgcaccccgtatacccgccccgcgactgacacctcttcgtccagcaacagtctctgctcccgcagccgctgggcctcggcga

SEQ ID NO: 207578 - DNA, 122 bp, Homo sapiens
gctcccggcggacggtggcagggcaggcccaggtctctatcacagcaaggcctctccactcggccccctccacctgtttacaacctcaagctgggtcaaaaccccaggggtactcagaggga

SEQ ID NO: 207579 - DNA, 122 bp, Homo sapiens
ttgtaaaccttgaatatcttttaccctgttaacttgcaaatattaatagattactaccaccgccactactattacaattacagctactattactggctgctgacagcaactgttaacttgct

SEQ ID NO: 207580 - DNA, 122 bp, Homo sapiens
acctcgtctctactaagaataccaaaatttgtcagttgcggtggcaggcgcagtggcgggcgcctgtaatcccagctacttgggaggctgaggcaggagaatcgcttgaactcgggaggcag

SEQ ID NO: 207581 - DNA, 122 bp, Homo sapiens
acaattacttattgaacacctgctacgtggcagacagtaagagcctggatagtttctccccgtttttcaaagtcgctaaacgcgaccagagggcagaggagaggccggtaacctaagagtcc

SEQ ID NO: 207582 - DNA, 122 bp, Homo sapiens
tgcctccgacggagttgaagtcgccacctctgacttccccaacaggcagccaacttgccacgggacaaaaggactagacagggaaacacaactggcccttggttacgccaatggcgttgcag

SEQ ID NO: 207583 - DNA, 122 bp, Homo sapiens
ccattaaaaacctgggggcctgccagaaagtgcctttatgcttggctctgtattagctttcgtgactttcctataatgaattgtagcttgcttgggtcattaagaagattctgacagggaat

SEQ ID NO: 207584 - DNA, 122 bp, Homo sapiens
aaaagtgcaagaggcaaaagggacgctaggcaggtttgaaatctgagcgagtggcaacctcgctttttcttatcttacttttcggtggttccacccatttgggtgaacaatctggattacct

SEQ ID NO: 207585 - DNA, 122 bp, Homo sapiens
ggaaaggaatcacgtccgtcgcgctcctgacgtggctacacacggtgcatccaattccgtcgagttgtcatttacaacacacctgcagtttgcatatgatggtcccgctttacaaatggtgc

SEQ ID NO: 207586 - DNA, 122 bp, Homo sapiens
cactggtgacgaagcagtagacgatggggtccatgcagctgttgaggctgctgagggtcacggccacgtggtagaccacgaggctcgtgtggtgtggcatgtcgggccacagcgccacggcc

SEQ ID NO: 207587 - DNA, 122 bp, Homo sapiens
gaggcaggacagggaacaccgaatttcccctgaaacactctgaatgcctgatctgagctccggccccgtggcagaggaggtggttaagaaaaggctgggggcagcgcgggaacgcgtccctt

SEQ ID NO: 207588 - DNA, 122 bp, Homo sapiens
acaagaatagggactagaactcaggaggtatcgtgagaggtcacgtagaccctcaaacggcgggcaccatttacagtcagaactgcgctccacacttgtctcaggggcctccctcctcccgt

SEQ ID NO: 207589 - DNA, 122 bp, Homo sapiens
atggataatttcgccttggtagtgttaagatgtatttagcgactcaagtatctgcagcagcgagagggtgggtgtgggagtcggtgaattgtctcttacgccttcctttccgggttttcctg

SEQ ID NO: 207590 - DNA, 122 bp, Homo sapiens
gagcgggtactttcagctacctccaaaccatctggggtctgcccaccttctaggccccagcgtccccatcagaaagcctttgcaggcagctttcagaatagggcttgcacctgccagtcctc

SEQ ID NO: 207591 - DNA, 122 bp, Homo sapiens
gaggagtcggaagggaggcggggtatccagagcggcttcagcttcagctgcagcggacctcggaggggggccgcggcgcaatgtcagagcagacgccggccgaggccggtgctgcgggggcc

SEQ ID NO: 207592 - DNA, 122 bp, Homo sapiens
tgttccagtactcggcatcaggccgcccctgcggcgtcaccgcgcggtacacccccacgtcgctgtcgaagcgcgcgtactcctctcggttatagatgtatctggtcacaagacgcacgcgc

SEQ ID NO: 207593 - DNA, 122 bp, Homo sapiens
ccgtcgaaggcagcggaggaagtgtaattgactagcgtggatgcagcttttctaagcaaacgctcgatttaacctggagttgtcatcccaaaaaatacattgtacctgactacagagaaaca

SEQ ID NO: 207594 - DNA, 122 bp, Homo sapiens
tgcgtcatgccaggagtggttctgttagtctccggtcctcccgagccggtactggtacagcgaataatgccaagatgcggggctgaactttccagcgaaagcctgtgcttccccaagatgct

SEQ ID NO: 207595 - DNA, 122 bp, Homo sapiens
gccactgtacaccggccagaagcagtccacggtcggtggtctcttatcaggaaggaatgccggttcgtcactgtgtcaaaaccacggaaggggagtctggcaagtctttggaaagggctgtg

SEQ ID NO: 207596 - DNA, 122 bp, Homo sapiens
ggcaggaacccgggaaggaagccctgggaccctggctgaaactccgggtttccccagtgccgagtcccttccccgccgcgcccagcgcctgcgccccgggaggcggaagcaacaggggggtt

SEQ ID NO: 207597 - DNA, 122 bp, Homo sapiens
attgtgccactgcactccagcctgggcgacagagcaaggctctgtctcggggtggggaggcgggcagtgtggggagttaattggtaatattccctatgtttcatatcctcagtagactaata

SEQ ID NO: 207598 - DNA, 122 bp, Homo sapiens
atgtccgccagcagcagcatcagcaatgcagggggcgggaggctcggctagcaagggcggcgcggggcgcggcgggggcggcgcgcgctcgttggaacagcccaggcggctgcagccccgcc

SEQ ID NO: 207599 - DNA, 122 bp, Homo sapiens
gtcaatcagcgccgcctttgaactgaaaagctctcagtctaacttcaactcactcaaatccgagcggcacgagcacctcctgtatcttcggcttccccccccctttgctctttatatctgac

SEQ ID NO: 207600 - DNA, 122 bp, Homo sapiens
ggagccgctgtgggagcagcagtggcggcagtgggagccctgtgccacgcgtcccctgtgcgccgtgtccccaaggcagctgactacacctcccccaccctcctgcagcagggtggatccca

SEQ ID NO: 207601 - DNA, 122 bp, Homo sapiens
atctacccaatgttctaggcaggttgctcaatggcctgtgagttagggatgatctctgcccgttgggagcttatactctgatgcgggagagagccacaacggagcactcacggaaggttgac

SEQ ID NO: 207602 - DNA, 122 bp, Homo sapiens
gcacttgtctgaaaaagcccagcactggacgcggagagggagagagaatcagagaggctgcgccagcaggggctgtaactgtagcatcagcatcacgtttgacatcatcatacctggtttaa

SEQ ID NO: 207603 - DNA, 122 bp, Homo sapiens
attggctttcacctgccagagggtcggcttcaacaggcctcttggcccgtcaatcaggcccgccgtgctccgccccgcccctcccgggggtttataacgggaattcccatggcccgggctca

SEQ ID NO: 207604 - DNA, 122 bp, Homo sapiens
tggccttgctagtgactggcttcggaggctctcctttctgggctggagctgagggtgacccggttgccatccagcctgaagctggctcctcagtcctgcagtctcaacgggaatgaatctgc

SEQ ID NO: 207605 - DNA, 122 bp, Homo sapiens
tgtgatagatcacagacccatgacagaatcattcagacatgcaaagagactcctgcaggacggtagtcgaggggagagttctctactgctttctgctggaaggagataggctggagatgctg

SEQ ID NO: 207606 - DNA, 122 bp, Homo sapiens
gaggccgtcggtccgcccctcccgctgccgcagcggccaggtccgacagcgggcgcgggacgctggattcctatttgccagcttcctgctggggagcgttttccaatggggcgcggcgaccc

SEQ ID NO: 207607 - DNA, 122 bp, Homo sapiens
gggtgtgtgtgtgacgggggcggggaaccacaacgttaattttatccccgacatagggagcgcctgagtggtggcttttcaccgggtgtggctcgtctgagctcttgaactgaagccagcgg

SEQ ID NO: 207608 - DNA, 122 bp, Homo sapiens
ccgtatacagggggcggggtggtttccgggcggtgcccgcctgggtcacttccctaaactcggctccaccctcactcaggcccatccgggaaggcctcgctggcccagggcttcggcaccgg

SEQ ID NO: 207609 - DNA, 122 bp, Homo sapiens
ctgtgtccttcccagaccaggccccgtccccatgcctcggggtgcagtgtgcatttggggcgacgtgtgctgtgaagaacgggcaggcagcgtgtgaatgcctgcaggcgtgctcgagcctc

SEQ ID NO: 207610 - DNA, 122 bp, Homo sapiens
tgagaccagaggaacatctctttattacatgactaaggatatgttttgaaaactggcccccgggcagctgctcggggacaggaagctgacctgacttctccagctggccggggaggctgatg

SEQ ID NO: 207611 - DNA, 122 bp, Homo sapiens
gcggacgagaggtgtccgtcaggccgtgtgtcccaggccgtcgaccccgctgtcgcgctgcgtctgctccttgcatgcctttagatggtacagccttcagccggggcttcgggagacagtgc

SEQ ID NO: 207612 - DNA, 122 bp, Homo sapiens
ttccccgacgatggctaactgaggccagcctgggaggagcaagtgctctgcagaccgtggcgttgggagctttacctttgaggatagtgtctgggcaacagctgctcaccctgcatggccaa

SEQ ID NO: 207613 - DNA, 122 bp, Homo sapiens
agatataataaaatcagtaccgggatgtgactggcagcagtgtgcagaatcactgaaaggcgatatgcatttgaattaaacacggcagaggacagagtgtttgacattagcatgtgggatac

SEQ ID NO: 207614 - DNA, 122 bp, Homo sapiens
tggaaaaaagcaagatgttcttctcctgccctatatagaataagtctaataacatttcaccgaagttttttcacgtaatagtaggtcaatatctaatagagattaacataaaggcatgacca

SEQ ID NO: 207615 - DNA, 122 bp, Homo sapiens
cctgggcaacaagagtgaaactccgtctcaaaaacaaacaaacagcaatccctaaagccacgcggccgccaactccagggagctgatgcttccaaccactgcacgttgctcccgggctgtcg

SEQ ID NO: 207616 - DNA, 122 bp, Homo sapiens
ccgacaccagcacctattggcatcttcttcattaacaagatgttttctaaccaagcaggtcggtcacaaggacttgaagccgccacagtgtttttgaaaaaggagtgacaaaggctaaggga

SEQ ID NO: 207617 - DNA, 122 bp, Homo sapiens
ggctgggaagtgttgcaaaaacttaactgccctcggaacttgcacgcgccgtgaactgggcggtgttcctaaagggcttcggtttgctggttttgttttggtcctgtcttgcaaatgagcat

SEQ ID NO: 207618 - DNA, 122 bp, Homo sapiens
accttgttcatacactctgcctgcggaaaccctggacttcctggccaaggccactctgagcgtgcaggagccctaccagcaacgctggccacccatgcacacagggcacgagaatcaaaatg

SEQ ID NO: 207619 - DNA, 122 bp, Homo sapiens
cattcttccatgggaaacatgcagttgttaaaacaacctgcacagatgcgtccaccaacacggatagatgcgtgtttttgttttttgggttttttttttttttttttgagacagggtctcgc

SEQ ID NO: 207620 - DNA, 122 bp, Homo sapiens
ggggctcccacggtgcagcggcgggctgaagggcccctgaagcgcggccagagggggcgccgagagcgagcggggctgccagtacgctgtcacctctcaccatcactgcccttgcttgctct

SEQ ID NO: 207621 - DNA, 122 bp, Homo sapiens
agccaatcagcgagcgaagttcgtgaaccactctgccaatcagaggcggaacactatgcccgcctcccacagcctggccaagagcctctagtgcgcctgtgcctgcccccatggcctgccgg

SEQ ID NO: 207622 - DNA, 122 bp, Homo sapiens
gctatgggaaaggggtctccgagttgatgtgaaggcccaggtcgaggtgtacactgggggcggggaagtggaggtgaccacacgagcgccccatcactgagcgccgccgcgaaatctgcgct

SEQ ID NO: 207623 - DNA, 122 bp, Homo sapiens
gtccccagcatgcaggtggcaaatgccactccaggcacttctgtggccccggctggcccccggcagctccaggacccgaagccatgggcctctgcccgccctgggctgctgccctaacccag

SEQ ID NO: 207624 - DNA, 122 bp, Homo sapiens
attcggtatatgctgttttatagctctttttcatggaatattattttgtgagcatttcctcgtgttttccaatagccttcaaagtcagtgccttcgctgctcattgtcgcacacctaagcag

SEQ ID NO: 207625 - DNA, 122 bp, Homo sapiens
aagtggcggcgcggtacggtttcgggcgcgaagaccgggcagggagagtgtggcggcgggcgtggcccgagtcttccctttgtggccgagggggcgtctcctccggacgcggcggcggttcg

SEQ ID NO: 207626 - DNA, 122 bp, Homo sapiens
tctcgaccatctgcctcagcaccccgaagtgctgggattataggtgtgagccaccatggccggcagtaaattgaaatcttaatgaggtttaagcagtttcaggatatccaagagaatctaaa

SEQ ID NO: 207627 - DNA, 122 bp, Homo sapiens
aaaatgtaaatgtgctttaaattttacatttcctggcgtggccaggacaggctgaccttccgattacaatccgcgtcatcccgtcgcttctgcccccagcctggcgaggtcgggaaccgttt

SEQ ID NO: 207628 - DNA, 122 bp, Homo sapiens
atgaagttaaagtaaactatacaaatgtctggagggaaacatcctaggacgtagttcaaacgttaccaggcaagagcaagaatgattgtcgcatgaacagcaaaggggccaggatgacaaga

SEQ ID NO: 207629 - DNA, 122 bp, Homo sapiens
gaggccaactccacgaaggcccagaagcagaagaggcgagggtgccgaggctcccgcaggcgccacgccaaccgccgtggggacagcttcggggacagcttcaccccctatttcccccgggt

SEQ ID NO: 207630 - DNA, 122 bp, Homo sapiens
cggcgtctgtagcagcggacacagcgcgcccaggcgcagggccaggcacggtggcagcggcgtgggcactgaacgccacattaggaggagttttattttcatgcacacaagacttcaacaga

SEQ ID NO: 207631 - DNA, 122 bp, Homo sapiens
agttagtaaacaattgcttctgctagaatcatcattgtcaatattaagaaggcgagtccacgcatctctctggcctgttggctcacatttgggggtgtggcatttgtgcgtgaagtggagcc

SEQ ID NO: 207632 - DNA, 122 bp, Homo sapiens
ttgaaggacgtgcctgtgctcacagacacacggctagcatggtcaaccaaggaacgacctcgagactcaagaacatgcgaagaccaaggtgtcccaaagctgaagtgcatggtgactccagg

SEQ ID NO: 207633 - DNA, 122 bp, Homo sapiens
cccagtgactgtggatgatgcgttcttgtggtcacacttggcttactttccccacggagccgagcatcagtggtgctctgaagcacagtgcaggccacaaaaactaccagggctctgaacgc

SEQ ID NO: 207634 - DNA, 122 bp, Homo sapiens
acctctttgccacacccagccaacagcagacgtgatggaagcctgaagaacaccctgccacgggcacaggcagaggcacaggcaccctgtcgtcctgattatttcaccttgtcacgggcaga

SEQ ID NO: 207635 - DNA, 122 bp, Homo sapiens
ctactaggagcgccgaggcgtgagtcgtagcctgtggcttggggtcgggagtgcaggaggcgaaaatgtttgccattcttttgaaagtctggcctgggtgtgggagttcggtcatcgaacac

SEQ ID NO: 207636 - DNA, 122 bp, Homo sapiens
ggctgttttgttaatgcagcttactaatttcttatcattattctgaaatccaaacagctgcgaaaactcaagatttgttaggactcatttggctgcaaaacctgaccatttcagtgactgtt

SEQ ID NO: 207637 - DNA, 122 bp, Homo sapiens
ctgatggccatggcagaaaataccccaagtgttgcaaggtacaggagccctgcttggagacgtcgcagtctgaggaaggtggcaggacttccggctcttaactagctgtatgagcttgagca

SEQ ID NO: 207638 - DNA, 122 bp, Homo sapiens
aaatgctcacttaggctggaacagcatataataagagatatgttgtggttataagatcaacgattgccaaaaagctcacttgagggtctctcaggctgacaccacttgtcacttagcagcat

SEQ ID NO: 207639 - DNA, 122 bp, Homo sapiens
tttgtggccttcagtgaagaaccgtcactgacgcgctctgtgcatggccttgggcttctccggagctcattcttgcttcgggcgttcaccctctatagagctcagacgtaaagtgaacgggg

SEQ ID NO: 207640 - DNA, 122 bp, Homo sapiens
tgacatggcccagcatacttccaaatgcaatctagaatcaaaaggtggcagatgtaaatgcggcacgggcccaggaagctgtcagggttgagagaggaaaaaaaggagggaaagaagaaaag

SEQ ID NO: 207641 - DNA, 122 bp, Homo sapiens
gcatggatggatctttccattttccgacaatggtttgataaaatttttgtgccgcaagttcgagagtatttaagatctaaaggcttgcaggaaaaggctgtgctcttgttggataattcacc

SEQ ID NO: 207642 - DNA, 122 bp, Homo sapiens
ctcagcccgggcccacatactcacgccgagatgagcccggtggctctcccccgcaagtctcggtactcccgccaggactccatgttggctctctggggcgcagcgccctccgcccggagcac

SEQ ID NO: 207643 - DNA, 122 bp, Homo sapiens
attctgctatcctcttggtttcagctcggactgacctggaagaagaccctgaggagaacccgggcacacagcagccattccagtcctcagcttcaagggggctcacgaaggttgtggatcct

SEQ ID NO: 207644 - DNA, 122 bp, Homo sapiens
atcgattagctgcggagagggtgacctgagaccacacgaggatgcattttgtataccgtacgctttgtatgctgtaaagcacatgggacacccagtcacagcgtttgaacaccacggtagtt

SEQ ID NO: 207645 - DNA, 122 bp, Homo sapiens
gaagacaaaaatgtaaaagtgaattttgttagcaagtgagaaactattatacttggaggtcgaattgtaaataacgctatttgattggctagaacaaccaaccaattgcaaagaaacgctag

SEQ ID NO: 207646 - DNA, 122 bp, Homo sapiens
ttgacgcctcccactctccctccctggctctggcagagggaggaagatgaaagagaaagccgctgccgctgtgatggacaccacattgatagatgctctgacagtggggagaggcgggaatc

SEQ ID NO: 207647 - DNA, 122 bp, Homo sapiens
gccgggcctgccatgccctaggcattggtacccagagcaaagatttctaggaccaccccccgccgccacctcctggagcgggagatctgcgggtgcaggagaacacaccaggagctcggggc

SEQ ID NO: 207648 - DNA, 122 bp, Homo sapiens
cctccacctcggccccgcggcttggtggcggcgtcaccgggctccgcgcggggcaggacacggtgccttccatgactgcctcgtttaatttttcaacacagcatttatcattaccccaatgt

SEQ ID NO: 207649 - DNA, 122 bp, Homo sapiens
tctgaagccagaacgctgcgcccctgacccggccacgtgcgaggcctcctggcctagtcccggagcccagctctcacctggaccaggcccacagctctgggctgagggtcaagccggcgtca

SEQ ID NO: 207650 - DNA, 122 bp, Homo sapiens
ccacatggaggagctgctctgcagcgctgaagccacgttagcgctccacacccagtcctccgagacagcagggagcccgtctgggccagactcttctgaggatgcttgtgaggatgacagtc

SEQ ID NO: 207651 - DNA, 122 bp, Homo sapiens
tgcacactaaggctaactttcccctgtgtaacataagtgcctactgatctttatcactagcgtgttagcaaggttagcattccacttctgtgatttcaccatccaaatatttatgaatcaga

SEQ ID NO: 207652 - DNA, 122 bp, Homo sapiens
tcccttttctatcccatcaggaggaatctgcaaagtgacctgaagattcccaggactcagcgctcacgtagataccttcctcagttgctgaaaaatccctgaattacaaaaagtaattttag

SEQ ID NO: 207653 - DNA, 122 bp, Homo sapiens
gagcttgttacaattagaaactatggttgttattaccatctccttaaatctgagtatgaacggaaagacatgcacatttactgaatgtgaggcattgggccagcccattgacctgcaaagtt

SEQ ID NO: 207654 - DNA, 122 bp, Homo sapiens
catgggtcagaatgaaagtaaagtgccgttgaaaaccttgcaatccacctttaaaactgccgggtgtagtaaaacaattgcttgccccaaataaatgacttatcattgctgttggttgtctg

SEQ ID NO: 207655 - DNA, 122 bp, Homo sapiens
cctccagctgcggtcgccgctgctccagctgcgcgtggcttccgggaacctcctcctccgcgcccgtcgttgcaaaattggagagaggaaaaagtggcttaaaaaaatagttgcggcccctt

SEQ ID NO: 207656 - DNA, 122 bp, Homo sapiens
attcctgcgagtccatggctgccccgaggccgggccgcggggctctggggattgtctcgccgcagcctaaaggaagacgcagaattcagctcccctagcctcccggagcgctctagcgcccc

SEQ ID NO: 207657 - DNA, 122 bp, Homo sapiens
cataaaatagtacacgaattaagctttaccaggcagtgtttaatatagggtggactctggcgccctcacgtggtcctcatataggatctggtttggttatccctgctaggtaaaggtgcaag

SEQ ID NO: 207658 - DNA, 122 bp, Homo sapiens
aaaagatatgaagaaccggggacagtgctcagtaatcaatagtctgcagttctgcacccacgtgctcctgggtactctgccgtccccacagggtcctcagctcagcccctgtcactgcctct

SEQ ID NO: 207659 - DNA, 122 bp, Homo sapiens
tagtgaccttataaaagggctggagataactagctaggcccttttgcccttccactctttcgccaggtgaggacatagccttccttccctccagagggtgcagcaacaaggcaccaacttgg

SEQ ID NO: 207660 - DNA, 122 bp, Homo sapiens
tgtgtgcccaggagggcttcgtgcagggtgataacgccgcggttgcagcgaactcacttgcgtttttctatcagccaaggctctggtgatagctgggcgcaggaagatggtgagttatctgt

SEQ ID NO: 207661 - DNA, 122 bp, Homo sapiens
actgcaaactgccttgctgggacttctattttctgttttattctgttctctgccttttgccgatgtcaccctgttttcagcctcaacattaaataaatagccaaatacacaagtgccaagaa

SEQ ID NO: 207662 - DNA, 122 bp, Homo sapiens
ggacttaggaagcctcatcctcagatcccaaaaacaaatgggatgtttggcagcagcagacgctttacagatcactgctacaccttctgtgggagcttggtcagcatttattctgagatccg

SEQ ID NO: 207663 - DNA, 122 bp, Homo sapiens
agcgacgaggagaccagaaatgtcaatagttctgatttttaaaaatcatccccccttccccgcccccaagaaaaaggggaggacccaactacagagtgagagggtgggaagaagcgggagcg

SEQ ID NO: 207664 - DNA, 122 bp, Homo sapiens
gtggtccggtcccgcctgtgcacgctatgcctccattaatattttaaagctgccaccgcacgctctttgcaggagggagtcattgtctgggttaacagtaggcttcaacaaaaacctggcgt

SEQ ID NO: 207665 - DNA, 122 bp, Homo sapiens
gtgtggtcacctcccccccccacacacaccagcttcccgccagcctgtgccctcagccctcgcctccctgagccaggacaaagccccggcagtgactgggaggggaacaggaggagggacag

SEQ ID NO: 207666 - DNA, 122 bp, Homo sapiens
ggagttgtattacataaaccctactccaaacaaatgcatggggatgtggctggagttccccgttgtctaaccagtgccaaagggcaggacggtacctcaccccacgttcttaactatgggtt

SEQ ID NO: 207667 - DNA, 122 bp, Homo sapiens
ggtgggacacgccggatgtggctccccggccggttggaggcctagcaggacactgggctgcgggccgggggtcaatggtggcgggcagccggggccccgggctcgggagctgtggcggcagc

SEQ ID NO: 207668 - DNA, 122 bp, Homo sapiens
taaaagtggatcattccaggatttcatctcaagcaaagataatcagaaggcatgggctttcgttaacattttaccacttagcattttggctatgctactttaggcagttgagttcacaaatg

SEQ ID NO: 207669 - DNA, 122 bp, Homo sapiens
agctgcgcggccccggcccgggagctgccgaacccgcgcctcccctgggtgaggaggacacgcctgccctcgtcgagaaaacttttcctgccgactcagttggggcggcggtggcaggaagt

SEQ ID NO: 207670 - DNA, 122 bp, Homo sapiens
tgtggactgccgggttcttggtgctagaggcagtttgggtccgttgccttttcactactccggacacacattgtttttcagcaaatgagaaagccgcataagcagcatcccaggcagtttct

SEQ ID NO: 207671 - DNA, 122 bp, Homo sapiens
cgacaaccccctgatggattaaagaaaacaagatattcctgccgtggtcgatcttcaaagcgtatcagcttcagcccttttgggggttaaaatcagccagtccgtgcttgactgctctccct

SEQ ID NO: 207672 - DNA, 122 bp, Homo sapiens
gtgcttccttggtcacacagtgtatacttcttttaagagttaattggaattttggctgggcgtggtggctcatgcctgtaatcccagcactttggaagtctgaggcaggtggatcacaaggt

SEQ ID NO: 207673 - DNA, 122 bp, Homo sapiens
ccggggagagggaggcctggagctctgtggcagctctctgctctgactacaccaggcacccgggaacccatgacttcccttcaacaatctcaagctccctcggctctaattctcactcaccc

SEQ ID NO: 207674 - DNA, 122 bp, Homo sapiens
ccccccacactaggctgttccatgcaaatgaggaggaggagccagagaagaaggaggtatcggagctgcgctctgagctatgggagaaggaaatgaagcttacagacatccgcttggaggcc

SEQ ID NO: 207675 - DNA, 122 bp, Homo sapiens
gctgtcttagtttccccctctgtaaaagggggacaagaatgtgttccataggttgtagtgcggttaaatgaggtaactcatatttatgctaaacacaatgactgatgactacaatgatgacg

SEQ ID NO: 207676 - DNA, 122 bp, Homo sapiens
ggtatgtgtatgtgtgcacgtccatgtgtgcacgtttgtgaaggtgtgtgtatgtgtgtacgtccgtgtgtgcatgtttgtggaggtatgtgtatgtgtgcacgtccatgtgtgcatatttg

SEQ ID NO: 207677 - DNA, 122 bp, Homo sapiens
ggcctctgaagagggcagtgaggggcccccacctgggcgcccgatgcccagagcactctgcgcccccagcctgccccagcccagtccctcccggccgcgcgccctgaccggtgagcaggatg

SEQ ID NO: 207678 - DNA, 122 bp, Homo sapiens
aaccatgtgtctccacccaagttgtgggttaaatcttgccaatgaatgctgaaggaggcacgtgaccacggccttcccaagtgtacaaggaagaagccatcagggagtgtgtcgcatgttcc

SEQ ID NO: 207679 - DNA, 122 bp, Homo sapiens
ggtcccttctcggagtgactcctggcagagcagagcaggcctcagccctccttacaggcgcgtccagccagccctgcgtccgggcgtgagtgcgctttagctcgcggcagtcggcggagggg

SEQ ID NO: 207680 - DNA, 122 bp, Homo sapiens
ccctcccaccaaagccgaagtagctacagcttcaccctacgcgaagcgaaaagcaaatgacgcacaacctaacgaagcagtgaggggcggagccaacctaccacggccggctcccgcatgcg

SEQ ID NO: 207681 - DNA, 122 bp, Homo sapiens
attcacttcccaaatcacagggtggtgcttctgtcgcttagtccaattatgtttgcaacccgtgtagggaaggcggataggagtctttgaggcctagtgcaaagtttgcatcagtttctgcg

SEQ ID NO: 207682 - DNA, 122 bp, Homo sapiens
cccaactccagttactccatgggctgtagctaactaattatttcccatgaattaaagtaccgtgactgttttgtgcatctattaaatctccctcccagttcaaatttcacatacccttaaac

SEQ ID NO: 207683 - DNA, 122 bp, Homo sapiens
ggcagaaaaagggcttggaactccaatgtctggattcaaattctggttccagcagtcattcgcttgccatgtgaccttgagcaattcaagtcccctttctgaacgtcccccccccccgcacc

SEQ ID NO: 207684 - DNA, 122 bp, Homo sapiens
gacagttcagcaagatgagctatgagccgggcagtgagacaagggcatgagctcatcttccggccacccacagcctgacccagcctgctgcaggccagagtggtgcaagctcaggctggctt

SEQ ID NO: 207685 - DNA, 122 bp, Homo sapiens
tctgtctcaaaaaaaaaaaaaaaacaaacccaaaaaacaaaccccccgccccaaaaaaaacgtttcatcgaggtagagcagcagctttgtttctttgcttcactgctgtctccctagcactt

SEQ ID NO: 207686 - DNA, 122 bp, Homo sapiens
accgttctttgtgttttgacaatcgagacacagaacagctccgtcagccccaaactccctcgtcctctgtaggaggatctgttctctgtttctatagttttctaaaaattgtggtaagatag

SEQ ID NO: 207687 - DNA, 122 bp, Homo sapiens
ctgaaaaagacaccagaagtccaactgagcttgccttttcaagctgatgactttaaatgccgctaactatagagaagtttatcttgccatttttcatttgttgcagaacctaaaactagatt

SEQ ID NO: 207688 - DNA, 122 bp, Homo sapiens
agatgcctaatgtaagagtgacccatggaaaaataataacttggcagcagttttttttgccgctaagatcaggacaattctgaggggagttttgttttggaacgatgaccagatggccatgg

SEQ ID NO: 207689 - DNA, 122 bp, Homo sapiens
cctgtagccttgtgatataagtgacacctacagacaggtccgtttggtttttcaggtttacgcacagcccctttgatgacggtgacatacagtgtgacacggctccttggagggggggaaat

SEQ ID NO: 207690 - DNA, 122 bp, Homo sapiens
ctgcccgccaggcgaggggcggggccttggcgggggtggtcgcgggcggcggggaggtctcgcttccctcctctccacccgctcccagtcccggcctgggtctcagccccgccctgcccaga

SEQ ID NO: 207691 - DNA, 122 bp, Homo sapiens
ggtttcaccatgttggccaggctggtcttgaactcctgacctgaggtgatctgcccacctcgacctcccaaagtgctgagattgcaggcgtgacccactacgaccagccaatttttattatt

SEQ ID NO: 207692 - DNA, 122 bp, Homo sapiens
ctgtatccccacggaagttgcaaactgaagcttctttgttcctgccaaatgactcatggacgccctttaaaagagaacgaaacagacgtgttttgatggggaaaatacataaaaaatgcagt

SEQ ID NO: 207693 - DNA, 122 bp, Homo sapiens
ctggccgctggctctgttcctggttagaactacgccagacaggccgggcgaggtggctcacgcctgtaatcccagcactttgggaggctgaggcgggcagatcacgaggtcaggagatcgag

SEQ ID NO: 207694 - DNA, 122 bp, Homo sapiens
gtggcggctgtggcaggcatgtctggagggagtgtcgtgcatgtgggtgacaagaacagccgagtgtgccacaagcgtggacggcagctccgtactcagaagggcacggtgagaagagcagg

SEQ ID NO: 207695 - DNA, 122 bp, Homo sapiens
ttacccaaattagagtaattgcattcctgtgatcatagtgactaatgcagggcaggtgtgcgaccccttctaggccaatgagaggacaatgatgaaagctcagctttgggagtaaaaagtct

SEQ ID NO: 207696 - DNA, 122 bp, Homo sapiens
gcctatctgtaagtatattacttacctttactaagtcttggcttctttttctatgaaatacgtatagtaaaatctactccatgaattgttaaaatgtaattcacatacagcttagtaagaga

SEQ ID NO: 207697 - DNA, 122 bp, Homo sapiens
atgcccaggtctgcagccacagctgggtggatgcagctgtgcctgggaaggcagggctcccgccccaccaactcagaagggagtggggctcctgcctgttcctagctcctaccagctctatg

SEQ ID NO: 207698 - DNA, 122 bp, Homo sapiens
tgctgttgattttttctctcttgctaccagcatggctatgccagacaaaccccccagtcccgggagctaggaagtgtttaggacgggtctggaatacacaccttggtagtacgccggctcca

SEQ ID NO: 207699 - DNA, 122 bp, Homo sapiens
cagaggctgggcctctaggagcagaatacacagagcagtaaagactagacctggagctcccgcagcagctagagacaaaggccccgccaaatcccggaagccgtcctgtccgctccagctgc

SEQ ID NO: 207700 - DNA, 122 bp, Homo sapiens
cctctaactttaaccttctctgttcctccctctaagcaagagtgaagatgatgacgatgacgatgatgatgataagggtagtaattggtttcccgttatcaagcacccactgcatgccagta

SEQ ID NO: 207701 - DNA, 122 bp, Homo sapiens
cggacatccagacacaccccaccacaatcactagcaaacccactcccaaacagacacatacgggcgcacgcgcgggaacacaagcatacacgcagacacacaaagacacagacagcttgaag

SEQ ID NO: 207702 - DNA, 122 bp, Homo sapiens
ctgtcacatccatcgtgccttgaggacaggcataaatttacggccttcctcctgcgctcccggcctgctcctagcctttgactagagcctgcgcagcatcccagtcccaggctagggcccac

SEQ ID NO: 207703 - DNA, 122 bp, Homo sapiens
tgaccaacatggtgaaaccccgtctctactaaaaatacaaaaattagctgggcatggtggcgcacacctgtaatcctagctagatcctagtagattgaggcaggaaaactgaacccgggagg

SEQ ID NO: 207704 - DNA, 122 bp, Homo sapiens
cagacactaaaattaaacccatcacattatctactttggtcttccccaaacagaggatggcgtctttccaaatagaaaaaaaaaaaagaatatgctttactcagtatttagtattaagagtt

SEQ ID NO: 207705 - DNA, 122 bp, Homo sapiens
gcattcacatacattacctcctctcagaggccctcgctggcctgctgggcgcccctcctccgtcagtcagcttgctgcatgtacctttgtccccaggtgccagccctccctgccagaccacc

SEQ ID NO: 207706 - DNA, 122 bp, Homo sapiens
gggcacggcgatcccggcccgaccggggccctgggcggcggggtgggcgcggtcacggcgcggggactcaccgcccggctcccccagctccatcgcggcccctcgggcacttccgggcggga

SEQ ID NO: 207707 - DNA, 122 bp, Homo sapiens
ctctaaaccctactgcagccctagctattgtcatagtgaagacaccacacacagggctctcggcccctgcttccaagaatgaagcctcatgtgcaaaattctttttcattctttctacaatc

SEQ ID NO: 207708 - DNA, 122 bp, Homo sapiens
ccaaccagctacctatcgaccaagccttcacttggacaggcaacaataagctgaaattcccgggaaaacgattacgtacttggctgaagaacaagaaagaaatagatcccttccccatagtc

SEQ ID NO: 207709 - DNA, 122 bp, Homo sapiens
aggcctgtgcacagagcaggaggtcagtagatagttgatgactgaataaagaaatgacggcgaaacatggtttatggagcttaaacagcagaggcctcccaaaattggaattgccatgaaat

SEQ ID NO: 207710 - DNA, 122 bp, Homo sapiens
tgagacctcagggaacggagatttttgtggacccagctgcctggagctgctttcctgttccggccggaggaggtgaggcccaagacccctcctgggagcctgggggcagatagccagtgttt

SEQ ID NO: 207711 - DNA, 122 bp, Homo sapiens
atgacattccatccagtttggcttctccttccctgtgccattatttcactttaagacactcggggctcctctgggaggccaggagtaggaagagggcccaggagagctaggggatccccagg

SEQ ID NO: 207712 - DNA, 122 bp, Homo sapiens
cacccaaggagtgaaaattgcctttttatgagaaattgccaaaactgatgcaagctcatccgttgaaaaggtgagtaatgctggcagttggcttcacctgccccttccccacaagtaactgg

SEQ ID NO: 207713 - DNA, 122 bp, Homo sapiens
gagctcggctccctgcggccttgacctcccgggctcaggcaatcctcccgcctcagcccacggagtagatgggaccacaggagcccaccacgcccgactactttttgtaatttttgtaggga

SEQ ID NO: 207714 - DNA, 122 bp, Homo sapiens
ctgaaatgtttgagggaacatccagggtttttatccccacatcaggccgggcgatgggctcgagtttcaggccttgtcactcagctgtcaccaaacaaacgaagctctcagagcccaggaga

SEQ ID NO: 207715 - DNA, 122 bp, Homo sapiens
ttaaaggcaaatttcttcctcagtcgtgtggcaggccctgagcaggcagctgggtgtccccgctcagatccaggcccgagtgggctgggcggctgcagagccagtcacctgagctacccagg

SEQ ID NO: 207716 - DNA, 122 bp, Homo sapiens
ggaggggctctgccaaacctgacaggcgctccaaatgggggcagggagtctgtgcaagttcgtttgtgtgaccgggcttaaggtgttatggggagggggtccttaggcaccgcagagctgtg

SEQ ID NO: 207717 - DNA, 122 bp, Homo sapiens
cctcatgggccttctgtccgacgtggggtacacctagcggccccaggcaggtgttgggctcgaataagggtcgccgggaccccggggcccagcgcaagggtcgatgggaagacactttcact

SEQ ID NO: 207718 - DNA, 122 bp, Homo sapiens
cactctcgcacccgccacagaaccggatccattttgaaatattgaagcgactgatggggacgaagggaaccacacaccacactcaaaaactcttgatgttttcttgctaaaggggctctctc

SEQ ID NO: 207719 - DNA, 122 bp, Homo sapiens
gaaaactctggcctgacgatacggggcgggcactgttctagagacagcctgtggtgtgggcgagttccgctgccgggacgggacctgcatcgggaactccagccgctgcaaccagtttgtgg

SEQ ID NO: 207720 - DNA, 122 bp, Homo sapiens
gggtacgggcccgaggccgtgagttcggggccagagggctgcggcctcggaggggctgcgcggggccgaagcgggggccggcggagccacagccacgggggcgcgcgggcagccacaggcag

SEQ ID NO: 207721 - DNA, 122 bp, Homo sapiens
ccaggcggtccccagcgcgctgcctccgccgttccccgccccctcgcctctgaggctgcccggatagctgcctgatccaaggcccagcagcttctgccttccggatccccaccgacggacgg

SEQ ID NO: 207722 - DNA, 122 bp, Homo sapiens
gaggatttttcacttattttgctagttgtcaccaacagtagcaaaaggaaaaataaaatgcggaagaatgaaatgttcttactgcaaaccgtacaagatcacattgaggggctggagctctt

SEQ ID NO: 207723 - DNA, 122 bp, Homo sapiens
gcgcccccgcctcgcggtcgcggtggaactcccaggagggctcccctgctctcgtccccgcgtccctgagcagccgccgcttcagcaccgcggacagctcccgcccgcagcccgccgccgcc

SEQ ID NO: 207724 - DNA, 122 bp, Homo sapiens
cattattttttctaaagtgcagcagctgtgcatctccctggtctgcccagctgttcttgtcgttgactggagagtttatgtcacttgtgacaataaataggaaatgagaatgagagggttgc

SEQ ID NO: 207725 - DNA, 122 bp, Homo sapiens
acttaatctttatcataatcctattgttatccccatttacaagtgaatccccaagccagtcgccaagaatgctgaatttatttactccttcatttattcacaaatatattaaaattattcaa

SEQ ID NO: 207726 - DNA, 122 bp, Homo sapiens
gagtcccaccttgcaggatatcccccaggctcccagcgacccctgctcgggctgggactccgatactccctcgagtggatcttgtgccactgtgtcacctgatcaggtcaaagaaataaaaa

SEQ ID NO: 207727 - DNA, 122 bp, Homo sapiens
gaagtttatgtaaacccatctggattttggtgaagaagtctcttggaaatgtaattctctcgggtagccgaaagatcaatttaattaatcatcagccgaggcttctctgagttttctgggga

SEQ ID NO: 207728 - DNA, 122 bp, Homo sapiens
cgcctcctcctcttcttcctgcttggtcgagggtcttctgcctggactgtggagcctcgccgaccgttcgtcctcacagccacctcacggacaaccggcgcgtcgccggctcattgtgtccg

SEQ ID NO: 207729 - DNA, 122 bp, Homo sapiens
ccggtggtcggtgtccaaatagcatcaacagtgcggttttagtttccttctcccacctgccggatcccgccccgggcaccctcgggggaaaccctgccttctccggaaacacctgtctgggc

SEQ ID NO: 207730 - DNA, 122 bp, Homo sapiens
tattttgaaaatcgcagtaatgcacagagctcggcttgctgtggctggtgcagctctacacggatgcagagctggtcctcccgttccctggaaatggttttgcaaagttgttggttttgcaa

SEQ ID NO: 207731 - DNA, 122 bp, Homo sapiens
acacatgcaagaaccggtcacagcagagtgtcagcaaataggcagggtctgtgccttgtgcgcggccaaacaccgcaggcctcacatctaaaggatgctttcgccaggctgggacagggtct

SEQ ID NO: 207732 - DNA, 122 bp, Homo sapiens
cgctccgacccctcgccaggggatgtccggtaggaatagcactgagctgatgtgacggcgcggaggcgccaaaatctccacttagggcaatgaaaggtcatcggtctccctcttgccggcac

SEQ ID NO: 207733 - DNA, 122 bp, Homo sapiens
tattcactaaaatcatgggttattatttagggctttcattcatccaacaaatgtttattccgcatttgcaggtggccaggcaaggtgaacattctctcagggtggagagtatgtgcagacag

SEQ ID NO: 207734 - DNA, 122 bp, Homo sapiens
aagtcagccgcctgcgcggttttcccgccgaaacgcgtccccggcgtgtgggacggcgcgcgggccgggcactcaccagctgcagcaagccagggaccaccacgaggggcagcggccgcagg

SEQ ID NO: 207735 - DNA, 122 bp, Homo sapiens
caggccagatggacctccagccacggccgggccagactcgtggacacaggcgcagtgtcacgtacagaccacggggagacatggcactaggggacaaatggacgtgacaccacaatgcacag

SEQ ID NO: 207736 - DNA, 122 bp, Homo sapiens
ggggcggcgcgggtctggtcgggtgaccccgggcgcggccagggctgtaggaggcgagggcgtcgccccgaggccgtggtctcgggtccatggtgggggacctgggtccccgcccccccggg

SEQ ID NO: 207737 - DNA, 122 bp, Homo sapiens
aacagtgccccaagccccactccatccccgggcagtgcagccctggatagcaccccaacccgctcctggctgcaggcagtgatgcccggaatagcgcccccaagccgctccccaccgtgggc

SEQ ID NO: 207738 - DNA, 122 bp, Homo sapiens
ggcggcgggggccgcggggctgagctccgtcctgttcaggctcagcctgtacctgagctgcgcggcggccgccttcctgctggggatcctgtttgccctcgtctgccggagcccgcgcgccc

SEQ ID NO: 207739 - DNA, 122 bp, Homo sapiens
tgagcatactggaatgccaaccccctaggtaggtgccagggccaccacaggaacctgactcgcaggagtcgtcctccgtctctacgcgaagcgccccctcgaggtgggcagggggtggcggc

SEQ ID NO: 207740 - DNA, 122 bp, Homo sapiens
ttcctaataaggggggtggacacaacgccggctgtctcctcctgatcattccgaaaccaccggactttgatctggcctggatagaaatctgtcaccgagcagaccagcaggttgtggtggtt

SEQ ID NO: 207741 - DNA, 122 bp, Homo sapiens
cctcctggtccctggccgaggaggaactgtacgctgcgcgggggtctgtgtgcatctgcgcgtgtgcatgggcatttgcgggtctgtgaatatccatgagcggtgcatctgagcctctgtgt

SEQ ID NO: 207742 - DNA, 122 bp, Homo sapiens
ccaatggttacacaaaccaggtaagaaaataaaatatgcccagtaagttcataggaccggcgggcttagatttcgaatgcgcgtgactctgtcaactgtggacttaaccctatgcagagatt

SEQ ID NO: 207743 - DNA, 122 bp, Homo sapiens
aggagggaaacggcctctgccgtgaggagcgaaaggtccacctggctggggcgcaggacccggggagccgcgccgggaggagggtcgggcgggtctcagcccctcctcgcccccaggctccc

SEQ ID NO: 207744 - DNA, 122 bp, Homo sapiens
tgcctttgtgctgggaattgtagtgcagacggtagtgaccaacacacacaaagcacagtgcggcacaacgcacttcaacgcactgtaatccaccaggtgcggacacacctccttcagcacgc

SEQ ID NO: 207745 - DNA, 122 bp, Homo sapiens
cctccctccccccaccccacccccgcaggtcagccccgcgcctaggcggcagcggagtcccgaaccgcgtttctcccgcccaaaccctgccggggccgccgcccacctcgtgtgaccgcaag

SEQ ID NO: 207746 - DNA, 122 bp, Homo sapiens
agtgatctgtctacctcggcctcctaaagtgctgagattacaggtgtgagccaccgtgcccggcccattctaagggttttctttgaagacaggtcaaatgctgttagtaagtttcaggagat

SEQ ID NO: 207747 - DNA, 122 bp, Homo sapiens
gggtacagggctatgtggagaaagaccctaagatgaagggaccagtgggggaggtggccccggcaggtgtcccagcagctttcgccttggcaggtgggagcatgacctatcgtgtgcagttc

SEQ ID NO: 207748 - DNA, 122 bp, Homo sapiens
cttctacaactcggtgtctgaggggttttgtctgcggctcgtcctgctacactgaccacacgtacccaaggtgctcagagcccagtttggttttatacattttagggagacatgagacatcc

SEQ ID NO: 207749 - DNA, 122 bp, Homo sapiens
accttcatcaccatcaggccggacagcatgcagtgcggcctggtgggcaagatcatcaagcgcttcgagcagaaggggttccgcctcgtggccatgaagttcctcccggcctctgaagaaca

SEQ ID NO: 207750 - DNA, 122 bp, Homo sapiens
cctacgcatcatacccctccccttcttgagaaggctttttctttttttctttttttttcccggtttccttttctctggcttcttccacaccttaccgcaggtgtgggcctcttttcatgtat

SEQ ID NO: 207751 - DNA, 122 bp, Homo sapiens
tatggatttaaagaatcctgatgacttcgttctcaaattttacgctaagccaggatttctcgacccttggcattaatactttgggtccaacatgtctttactgtgggagactgtgatatgca

SEQ ID NO: 207752 - DNA, 122 bp, Homo sapiens
ccctttcaccatgctctgattcagattccgttagtaaagtctgaaattcaggtcgcctaacgcctctggtcttaatcaaaactatccattcggatatggtatttatgatctgattaacatct

SEQ ID NO: 207753 - DNA, 122 bp, Homo sapiens
cccatgtgtgcacatcctgtttcagaagaggggggccagaggaaaaggggccagcaggaccgggcaactgttaagctgaaaggctgcaagtctgatgggacacagacttgggcagaaggaga

SEQ ID NO: 207754 - DNA, 122 bp, Homo sapiens
atactgagtgataatgatttctttttatactgcctgtaataaaatgacaacatggtatatcgaactaggtgacagaatccacttaactggtggtaatgccttattccttccgtgattaaatg

SEQ ID NO: 207755 - DNA, 122 bp, Homo sapiens
agaggccgagggccgctcgggtctgggagtgccaacaggacgggatgggcacgagcatgccgggccccgcgcgggggaggggctctttccttaccccacacaaaaaggtgtgcccgggttgg

SEQ ID NO: 207756 - DNA, 122 bp, Homo sapiens
ggcaggctgaaggccaggtgccctgccttggggcccctgggctcacccccacatgcttcacgagcccagccacgtcctccctgctgcagagctggggcctggggtccagccaccctggaatc

SEQ ID NO: 207757 - DNA, 122 bp, Homo sapiens
accgtggaaatccgggaagacttttaaagaggtcaaggagggtatcacacaggaggattacgtgacaagaacatattttatgggccctcagtggggaggccatttgtggttgatctgtttct

SEQ ID NO: 207758 - DNA, 122 bp, Homo sapiens
cccctgaggagctgctctggcagccacaggccactgctgaatatcccgtttgttctccggcggcaggaggggcggctccgaggccagagccgccccctctcgtggggcgggcgaacgtctcc

SEQ ID NO: 207759 - DNA, 122 bp, Homo sapiens
tgatccactggagcagagcctgggaagccttcgaggtgggcttgtccccagccagagaggcggaaaatcaatttggctggcaaacgagagcccccaagagcttagtccacgctccataatcc

SEQ ID NO: 207760 - DNA, 122 bp, Homo sapiens
ctgagggaagtggttcatgaaccgcttagcagaccacttgaactaataggaggaggatgacgcagaactcaagtgaagtactgtggtcatttgcagaagagtttctcctgggaggaggtcag

SEQ ID NO: 207761 - DNA, 122 bp, Homo sapiens
tgcaagacagcagagagctatgtcatcaattcatcccacttagcaccatgctcctcaactcgctgacactttaatgagcatgtccagatttgtggcctgactccagggagagaataattaga

SEQ ID NO: 207762 - DNA, 122 bp, Homo sapiens
aggatctctaagaccaagaagctggtgcgatcgcgggcgcccagacttcagtctgaggctcggcggcggcggcggcggcagcggtcgtcctggccagagatgcgcggcctgacgtagcagag

SEQ ID NO: 207763 - DNA, 122 bp, Homo sapiens
cgcaaacatggaaatcttccaagagcctccctggcccccagggctcagagggtggcagagcggagagcgaaggtggccgcagccttcccggccccacagccagcctggctccagctgggcag

SEQ ID NO: 207764 - DNA, 122 bp, Homo sapiens
ctgagaagattttactcacctctgcgtcccattatgagatgggaaacctggcttctgccacgtgggcacagagtagatacccactagattttgttgttttgtgtgtatggttgccagggatg

SEQ ID NO: 207765 - DNA, 122 bp, Homo sapiens
acacgtccgtctgttgttctctttctgcctcgctgtctgcctgcctattcttccttgcagcgcgagcctggtgccaagtggctcagaagttcacgggcggcatcggaaacaaactgtgcggt

SEQ ID NO: 207766 - DNA, 122 bp, Homo sapiens
attaagctgctgcattgaattcttactccaaaacaatgcaaatctgcatgaggtctctcccgctatgggtgtgagtggaagagagggagacttttttacctggggttggtggtggagtgaaa

SEQ ID NO: 207767 - DNA, 122 bp, Homo sapiens
ggaaacagaccagatatttcaggcaggctagagatgagcgtggcctggccttgcctggggcggttgtgactgactggattgggtgaaggacaggaaagctacaacaagggtgcctataggtg

SEQ ID NO: 207768 - DNA, 122 bp, Homo sapiens
tggccaatcactggtgtcaccgggcagctgtctagaggacttccgcgccacaccattcatcgaatgcaatggaggccgcggcacctgccactactacgccaacaagtacagcttctggctga

SEQ ID NO: 207769 - DNA, 122 bp, Homo sapiens
tatttatgtcaatcattcggggcactcagttttaactatacagtgtttctgcatactcatcggtttctttttcctataaatgtgaaaatagtgtaagaaaagactcatcccctcagtgtcca

SEQ ID NO: 207770 - DNA, 122 bp, Homo sapiens
taaacaaaaaccaaaaaaactaactggaaactccaaatctatccaatcaattcattttatcgcctttagtatctttattaacttaagctattcatatttcctagaaaatggatcctcacttc

SEQ ID NO: 207771 - DNA, 122 bp, Homo sapiens
ccttggcctctggagtagctgggactacaggtgcgcactaccatgccttagatacatatgcgaatctcattggctattgccttggatatcacaatggagtttaactctgtccatcatgtcag

SEQ ID NO: 207772 - DNA, 122 bp, Homo sapiens
cgctgcgcccaccctgcccctttagtgacccagccagcctttgctgggggtttctgataacgctcatcgataagctctccttgctcccaaaaggcgtgcttctctttctctccaggtacaaa

SEQ ID NO: 207773 - DNA, 122 bp, Homo sapiens
ggggccaaagagtgttattcctcactccttccaagccaaggactgcagaatccaaaggggcggaggaaagagaaagggcgccaggcggccagggaggccttgttggagagcagaagtgaatg

SEQ ID NO: 207774 - DNA, 122 bp, Homo sapiens
atcctgacagatagaactgtgtttgtttgccttagggcttcagtcacgtcagtgtagcaacgtgactcatgtatcagttaagttctgacctccagaggaactactgactaaagacattggtc

SEQ ID NO: 207775 - DNA, 122 bp, Homo sapiens
gttaggtggtgtggggaggcgaggatgacagtaaagcgcagccagatgtggtcgggccgccgccgggactggctacgattgggagcggcggggctgctgctgccagggcggcctcgtgggtc

SEQ ID NO: 207776 - DNA, 122 bp, Homo sapiens
tggcaggatttcttgcctcaccagtggctactaaaccacttcagaaacaaacaataaggacgggcgcagtggctcacgtctgtaatcccagcactttgggagaccgatgcaggcagatcaca

SEQ ID NO: 207777 - DNA, 122 bp, Homo sapiens
tccccttacccctcctctttccttcaccatgggcacagcccgtcttggaggagcagaaatcgctctgaatgacactggctgggacagaagtgccctggggtcaggcctgaagcagtcgggcc

SEQ ID NO: 207778 - DNA, 122 bp, Homo sapiens
ctcaatggcaaacttaaccgttacaacttcagtaactaataacaaatttttggtgaagaccgtgtcatacaaaattttgaacagaccatggagaggctgggactgacaaggagagaacatca

SEQ ID NO: 207779 - DNA, 122 bp, Homo sapiens
cgtggccctgagtggccaggcctgtctgtcggtctaggcccagcacctgcagggcccatccgtgggctctgctcctgggcttcgctgccagccttaggaggcacgtccaggtcaggtggacg

SEQ ID NO: 207780 - DNA, 122 bp, Homo sapiens
gtgatcccctgagggcctgcctacctcaagctaggagcctcagtctccacttctgtaaaacggggatagcaatcccaccttgtagggctcatggatggatcaggagagcaggctcaagtgag

SEQ ID NO: 207781 - DNA, 122 bp, Homo sapiens
atcagccatactggacatgccaccgagtcccacatttcctgtggccatggatctagctgccgaacctgaacagctgagacagcttacagtaataaatatcagctgacacccttggccattcg

SEQ ID NO: 207782 - DNA, 122 bp, Homo sapiens
agaccgagtatacaaatatctctttgaatccttgcttttgcttcttttggatatgtatcccgaagtggagttgctggatcttatagtaattctgtttaatatattgaagagttgccatacag

SEQ ID NO: 207783 - DNA, 122 bp, Homo sapiens
ttattgagaggtacatcactaatattttattaacttctttccttctggataatacatccacggtgtgaatttccactgggacctacagttattagatcaagtagattgaagcacacataacc

SEQ ID NO: 207784 - DNA, 122 bp, Homo sapiens
ccaggcgcgatgtgtgcggtgtattcacagagagacaaagccagggcggggcgggggcgccgcccgcgaagcgggggcgggggcgaggggtgcagactagtctcccccggcgcggggtgccc

SEQ ID NO: 207785 - DNA, 122 bp, Homo sapiens
gccagcccaacagcttctcacgcctaccaggtttctccaatggggctcctggcccagggacgctcagtcccccttcaggggacacccctggtctcctggtgccacctgaatccacatgatcc

SEQ ID NO: 207786 - DNA, 122 bp, Homo sapiens
aacgcaggactagcattaaggctggaaccaagggcaggaccaaggtcagggctaggaccacggacagtgtctgggactggaagttggttagacacagccaccagggctgaggcagaatcaga

SEQ ID NO: 207787 - DNA, 122 bp, Homo sapiens
tccttcctcttccagaagctcggcctcttttgaggcctcaacccttctctgctcagagatcggctgtaagaagaaggaactttgccaacttccagggaaatccctgggcctatcatacattc

SEQ ID NO: 207788 - DNA, 122 bp, Homo sapiens
actcttacggttggcaaaggttctgggatcgcaatttccccacctataaaatggagataacgacgccgggagtttggtgcagagagagagaatgaatatgaaagtgaacttcaaactatgta

SEQ ID NO: 207789 - DNA, 122 bp, Homo sapiens
gccgcgatgcaaagcagggggccaaaagcgagacggtgggggcagtgctcgacgcgtgtccgcctcccgctagctttgagggaccactgcaataaaccgcctggtcctgattgtccccactg

SEQ ID NO: 207790 - DNA, 122 bp, Homo sapiens
ggaagaactatggtgatagtaaaagcaaatggggtcattttgatcatccacatgttttttcggtcttgtatgccatacaggcataaaaataatgtaaagaacatgaagaaaagaagggaata

SEQ ID NO: 207791 - DNA, 122 bp, Homo sapiens
ctgtggctctttgaaaaacacgacgaggcctgcaaaatgcgtttttctttttttcctttacgcatgtaaccacggtcctgcatcgtgaaacggtacgcgcgtcggtggcaaaagaaaaacag

SEQ ID NO: 207792 - DNA, 122 bp, Homo sapiens
ccagccaccgcttcagaggaagctgcgttcagggtcgttcctccccaggtcgggcaatgccgagcactgcctccagggggcgccgccacgccgaccccgcgccccgggggttgtcttttccg

SEQ ID NO: 207793 - DNA, 122 bp, Homo sapiens
agagcggagattggttgttctcaggggctccttccctttgcctgcttctttcatttgggacgccagaccttgacctggaagtgaggtcactattgggcagtggagtgtgagaaaggactttg

SEQ ID NO: 207794 - DNA, 122 bp, Homo sapiens
cgctccatgagggcaagaatctggggctgtcttgttccgtgctcagcgcagaggctggcgcggcactgaacgaatacccagagttaaaaataaagggatagatggtccgctgggcgaaggag

SEQ ID NO: 207795 - DNA, 122 bp, Homo sapiens
acaaagcccgtcggcgcccgcggccctggctcagcagccgggccattagcgcgcactcaccgccccaccccgtagccgtcgctgctcccggcatgccccgccccccacggagcctagtggtc

SEQ ID NO: 207796 - DNA, 122 bp, Homo sapiens
gccacccacgccacagtggcagccgtagaagccataactgagtgcggcttcctttcctgtcgtcaacttgatcattctgtggaaattcaccaaattcccatgggcctgcagtaggcctggaa

SEQ ID NO: 207797 - DNA, 122 bp, Homo sapiens
tggccaatgtagcgaaaccccatctctactacaaatataaaaattagccgggcctagtggcgcatgcctgtaatcccagctactcgggaggctgaagcaggagaatcgcttgaacctgggaa

SEQ ID NO: 207798 - DNA, 122 bp, Homo sapiens
gatgtgaaaagtggatagaaagatgtgggtcagtctgagggatgtttagaaagttgaatgcgtgcttccggtgataaagtggatgtggaagatgaagaatcacggatgcttccgaagttctt

SEQ ID NO: 207799 - DNA, 122 bp, Homo sapiens
aaaagaaaattccagaaaggaacaattcatacattttaaattatgtaccgttctgagtagcgtgatgaaatctcacaccctgctccatcctgcctggaaagtgaatcatccttttgtgtcca

SEQ ID NO: 207800 - DNA, 122 bp, Homo sapiens
ccttcgtatgtccagggccccgctccgcgcctggcacacagtaggtctagcaataccgggcgaacgcttcaagccctgcctcaagcgccacctcctctggggcgcaggtcccagcaccggag

SEQ ID NO: 207801 - DNA, 122 bp, Homo sapiens
taataataataagaatgtgatcgtttattattatcatcacaacattgtttgggcatcttacgtggtcaccaatcctactaaccatcttctcaggtctatattagtatacctctattacagtg

SEQ ID NO: 207802 - DNA, 122 bp, Homo sapiens
gacctagcagccccgacaggaagctttaacataaagccttgaccctgagaagcatgggtgcgtcttgtcgtgagcaggttcatggctgtgctccatcctcagcccgctgatttttggtcttt

SEQ ID NO: 207803 - DNA, 122 bp, Homo sapiens
ggcgccctgcgcaaagcctcctccaaaggcaaaggaactcagtgcccttggtggggtgagcgcggtggccgcgccactggccaggtccctggagccggcaccactcccacttcccgccccgg

SEQ ID NO: 207804 - DNA, 122 bp, Homo sapiens
gagcctggacgccagccaggattgaggtcctacgggtgtttggggacctccccaagcccacgagtatcaatggcagtatcaattgtctgtgacagtgattaaggagcaaaacacttggtatg

SEQ ID NO: 207805 - DNA, 122 bp, Homo sapiens
ggaagctgcagtcggggcccggatcccggtcctcccctaccccggccggccctccgcctgcgctccagcccctcccgcgggccccagagtagggaacgcgcaggactcacctggggcggcgc

SEQ ID NO: 207806 - DNA, 122 bp, Homo sapiens
tggagtgctggtgcacctatctcaaaacgctgtctcaaaactccaacagggagcacctaacggtactgggtgcaacattgctagcacggagcaaacagcagtccagtaacctggaacaacag

SEQ ID NO: 207807 - DNA, 122 bp, Homo sapiens
acacaggaacatggtgggaatagaaaatgtgaaagacatgttaataggcatagaagactgcgtgacaacatataacatacatctatctggagtttctgaatgagggagtcgaaaggatgaga

SEQ ID NO: 207808 - DNA, 122 bp, Homo sapiens
ctggggagaagagtgaagacaggccagggaagacgtggttaggattcactcaccaatccacgggcctgatctgcacaaaggaattttcctagaggaaccgcaggaaattcttgctcacactc

SEQ ID NO: 207809 - DNA, 122 bp, Homo sapiens
atccccaccaagagttcggtgtttttacaccgtccggttcagctttaaactaacattctgcgcgctgatttcctcccacattccctcccccggccccgaaagcccattccaggcgcgcgggt

SEQ ID NO: 207810 - DNA, 122 bp, Homo sapiens
tcttagagctgaagcccagctcctcctttttaagaggaaatgacgagccaaagccttctgcgtttgttagagatcctagcttgtggccctgtcagaaccagaatccaggtatcccaattccc

SEQ ID NO: 207811 - DNA, 122 bp, Homo sapiens
ttaattactcacaaagaaggcttggtcaaccaatccagttttctttaggaactgatgcaacgacagaatggaaagcaaaacaggaaggcaaaactgacttgtcttttcagaaaacttctaag

SEQ ID NO: 207812 - DNA, 122 bp, Homo sapiens
ccatatctctcaatagatttgatccaaaaccccaagtgcgggagacaaagctaggtggaacgttattaaccctccacaactccaacctctactagcttcctcggagcaggcgaggcaccagg

SEQ ID NO: 207813 - DNA, 122 bp, Homo sapiens
aacgagccggggaatctggagggagcacacaggaaaggcagagccgcgagctggaccagccgtggtgagtgcagcggcgcccaggcggggagcgcagtgcgggtcgctgggactgagcgcgc

SEQ ID NO: 207814 - DNA, 122 bp, Homo sapiens
ttgaacaactggttttatgtgggtgtcaccagtgctttataaaagtaaactgcatcgccccgagttcagtcatactgcaccagctgagcaatgcatggagtggacctgtaggcgacttgcat

SEQ ID NO: 207815 - DNA, 122 bp, Homo sapiens
agcgattctcccacctctgcctcctgagtagctgggaatacaggtgctcaccaacatgcccggctaatttttgtgtttttagtacaaacaaggtttcgccttgttggccaggctggtctcga

SEQ ID NO: 207816 - DNA, 122 bp, Homo sapiens
tgctctctttcattgtgtatctatgacatccaccctatccttgtcattcccactcctgcacgtcctgctttcaggagcaggcaggtataattagtggtgattcagaccttacacctctctct

SEQ ID NO: 207817 - DNA, 122 bp, Homo sapiens
cgacgtggtccgggtcatcggcgaccttgacacagtgaagcggctgcaggctgggcatggcgagtggacggacgacatggcccctgtgagtccccctgccacccccgccgctagcgccgctg

SEQ ID NO: 207818 - DNA, 122 bp, Homo sapiens
tgggccacttgggcaaggcagcccttcccaaattgtaaatgtccccacgtggagctcaagcgtctggcttgagccagaaggtgccctgaacactcggtggccccagcccccacgtaacagca

SEQ ID NO: 207819 - DNA, 122 bp, Homo sapiens
cgacctggtggctgagtgtgggaggccggcgggcgaggacgaccccgggccggggcgcagcgggagcccctcagttcgccactccccccaccgtacagcccccgccgtccccagcctgcagc

SEQ ID NO: 207820 - DNA, 122 bp, Homo sapiens
cagtgtttgtggcggaaggtgctcagtaaacagaaggtcttcccagcatgtctaactagccgctgtcactctcttgctgcttcctgctttgtgattcttcagagctctcctcagcacctgac

SEQ ID NO: 207821 - DNA, 122 bp, Homo sapiens
ctgctgaagtcacccacagttgtgatgtcttgaagttcccctttaaaaggtcattactctcgaccctcccagggaaaacaaacctgtatttcttaccctttaacttgatatgtatctcttta

SEQ ID NO: 207822 - DNA, 122 bp, Homo sapiens
tgcccctgggcgggggaccgggagtcctcaaccccggactgaggcaggggtctctgggggcgaggagggcgcgtcgccctctgcccccgccggcaccctggccatgacaggcaagtcggtga

SEQ ID NO: 207823 - DNA, 122 bp, Homo sapiens
cccgcagattccccgaatgccgcggcggccgcagctcccgaggctgcgacggcttctcctcgttccacagggcccactgggtcctggtccatcgtcgtcgccaccacagggctgctggcgcc

SEQ ID NO: 207824 - DNA, 122 bp, Homo sapiens
atatgatatgcatatttccatggctttgaaaagcatatttaattaagtgttaatgagctgcgcttacttgggtgtggaatgtgaatgctacccactattgtctgtggctaagaggattctta

SEQ ID NO: 207825 - DNA, 122 bp, Homo sapiens
ctgtcttccagggaaaacatttcagacacaggtctctccttcacaggctcttttttgacccgctccttcacactagtcaggtcgggttccgagatggatgggccgagagaggccccgttgac

SEQ ID NO: 207826 - DNA, 122 bp, Homo sapiens
ttgtactgaagtacattccttttatacctaattcattgagcttttatcagagaaaaataacgaattgtgtcaaatgtttttctgtatctattgaaatgatcaatgtggtttttgtccttcat

SEQ ID NO: 207827 - DNA, 122 bp, Homo sapiens
tccggctaagaggaaactcgcccacgctccagggcagcgacgccggctccacctcagccacggctgtctcaagcttctcggggttttccgccggctccacccgagccacaagtctacaggac

SEQ ID NO: 207828 - DNA, 122 bp, Homo sapiens
acaagcgcgggcacctgaggcacgagtgtcaggctgcggacaccttgctcttatctttcccgcctgggtcggggagggtggcgtcccgagggcgtgcctgaagagccgggacacggggggag

SEQ ID NO: 207829 - DNA, 122 bp, Homo sapiens
tcagttttgctgtgtataggcggcttgcgtcaatcagctcagttagaccctctgtcttaccgcaaggacagagggctttctgtttcctggggttctggccttggtgtaccggaaaaatcgga

SEQ ID NO: 207830 - DNA, 122 bp, Homo sapiens
gtggcggtgaaggcttgagggccacggaggaagatccgacgacagccgacggccttcgttcgcttccgccctgcacagctggttcttcaagaacctgagccgcaaggacgcggagcggcagc

SEQ ID NO: 207831 - DNA, 122 bp, Homo sapiens
ctgatagcacgacctctcgctaccccgcccccggtcgcctagccgggtggtctttcccaccgcgagcggcacctgcatccgctgaaactcctcctcagacagagcttgcgccatgttcctcc

SEQ ID NO: 207832 - DNA, 122 bp, Homo sapiens
gtcacaaaggcgcccgttccaggggtcccagaacgcccgggcgtggggctgggggtgtggcgcagcgaggccgcgcagcaagcagtcctcccggcaccgtcggaagcgcagttgcagcagcc

SEQ ID NO: 207833 - DNA, 122 bp, Homo sapiens
gcagagatgacccgggagacattgactgggtctccacggcctccatatggcatcccccgccggtccaggatgtataagcaggcatccagcaccccgtggtcaaactggaaggagggatggag

SEQ ID NO: 207834 - DNA, 122 bp, Homo sapiens
ttactagggcgacggccggacgcctccgcgttacgggatgaattaacggcgggttccgcacggaggttgtgacccctacggagccccagcttgcccacgcaccccactcggcgtcgcgcggc

SEQ ID NO: 207835 - DNA, 122 bp, Homo sapiens
agacgcccgttgccgagcggacggtggtctagcagaagcctcagtgtcaagaaaaaacaccggctgcttagcagaccggaaaagggagtctccctctccccgggggagtttagagaagactc

SEQ ID NO: 207836 - DNA, 122 bp, Homo sapiens
gcaaggaagagaatagtaactcaggagtgcctaggcgcccgcgaaggcttcagggtttcacgcgggtgctcagagacgaagactgagggcaggacttctgggttctggaagtgaaagggctc

SEQ ID NO: 207837 - DNA, 122 bp, Homo sapiens
gtgtaccacatgagcacctcccgagcacagtgaaatgacaacctgagtcataatgacacacgggcctgaaatctgcctcctcttggtattcatttcgctttaggaattagaatttaattgat

SEQ ID NO: 207838 - DNA, 122 bp, Homo sapiens
tatgcttctctgtaaacccaggctctggcctcgaccaggcctccagcacagctggccatacgccctcacagtgtcatcggcctggaatttaatcgtgatagtgtggacctatcagatttgag

SEQ ID NO: 207839 - DNA, 122 bp, Homo sapiens
gcttgagccactcgtggctggcggccaccgtccggacaacccagccattccctccacttccgagctctgcaggccactggcctggaggtctcctaaccgctgcagtctctaccttccaaagc

SEQ ID NO: 207840 - DNA, 122 bp, Homo sapiens
aatgttggcaaggatgtggagcaactgaaacactcatatattgcttgtaggagtgtaacacggcacaacaagtttgggaaactgattggcagtatctaataaagttaaatatacatctactt

SEQ ID NO: 207841 - DNA, 122 bp, Homo sapiens
gacgcagggtgtggatgggcaggccaggaggcgggtgagtgggccaccgaggagcagacccgacaggaggcgcctgtggggttgagagtcttaagtgtcctcctgtatctctgggctgtggg

SEQ ID NO: 207842 - DNA, 122 bp, Homo sapiens
ccagggttcgtccgccagttcagcgcctcattccgtcaagaggaaagcgccggacgcagacgaccaagatgtcaagagagcgaaggccaccttggtgcctcaggtacagccctccacatctg

SEQ ID NO: 207843 - DNA, 122 bp, Homo sapiens
tttgccgaggtttgcatgcacatattcagttgcccttttttttcccccagtcctttcagccgtgtcccgaaattcacccttagtgtaacttctgcctctgctcctcctcttcttggaactgc

SEQ ID NO: 207844 - DNA, 122 bp, Homo sapiens
aaggtatttttaatgtatttaagctctagtatcctcatcgctcagatggttggtttggttcgcctgagtggcttttagatctgtatttctagtgccctctaatccatgggatgacctttaat

SEQ ID NO: 207845 - DNA, 122 bp, Homo sapiens
acctcagtttcttcctgtacaaggaaaagtactgaccaaaatgagttctacatacatttccgctgctggagatttctttggtttttgagacagagtcttgctctgttactcaggctggagtg

SEQ ID NO: 207846 - DNA, 122 bp, Homo sapiens
aatggttcttcggactcctttttccggagctgagaaaccctaaaacatagcacccgtttacgtctagacatgcacaggtgctgtgaattgaccccatttttgcagttcatagtttattaagg

SEQ ID NO: 207847 - DNA, 122 bp, Homo sapiens
atgaaggggatatataatggaccttcttgatgtgaaacctgccagatgggctggaaagtccgtatactgggacaagtatgatttgagttgtttgggacaaggacaggggtacaagagaagga

SEQ ID NO: 207848 - DNA, 122 bp, Homo sapiens
tgtcacgccttagcgcttccagctccagctcagattccagctcctcctcttcctcgtcgtcgtcttcagacaccagtgattcagactcaggctaaggggtcaggccagatggggcaggaagg

SEQ ID NO: 207849 - DNA, 122 bp, Homo sapiens
ggtcccggaagaccacacgcgtgcgtggtggggactacggtgacagtaccccgggtggggcgagggccagtcatggcggagtcctggtctgggcaggccttgcaggctctgccggccacggt

SEQ ID NO: 207850 - DNA, 122 bp, Homo sapiens
tggggattcaaagactaaagttaaatccggccataaagtttattgcttcagactcacaagcggctgagaacagtcccgccgaaataaaaagaacatgcaggcaaacagggttcagggcctgg

SEQ ID NO: 207851 - DNA, 122 bp, Homo sapiens
cagggcggcggtgctgggtccgggtggctgcgcctttgcacccgggggctccccgccgggcgcggcagtgtaagggtcgcagatcatgcggcaggtgcccatcatctcatagtgcgcggcgc

SEQ ID NO: 207852 - DNA, 122 bp, Homo sapiens
attggtcagcgtccgtatcgctgattggctgtttcctaagtaacaaagtgttgcgagagccgttcacagtgggcttgctcacttcctcttcctgtcggctgcagtttcccaggcggtgtctc

SEQ ID NO: 207853 - DNA, 122 bp, Homo sapiens
gggtccgaagcagaccctgggcctcagctgtgcacctggtgatggtgctgccctatggagcgcccggttcgacgtgggaccgaatgacattcccagtgacgcatgcagcccagcgcctggtc

SEQ ID NO: 207854 - DNA, 122 bp, Homo sapiens
ccctacacagcaaaacaatcccaagacatgtcaattctatctcctgagcaacccataaaacgatttctcttctttccatcttccattaccctaattctggtgttcattctctctccctggga

SEQ ID NO: 207855 - DNA, 122 bp, Homo sapiens
tgtgcttccagccggttaagcatctccctgcccaaagaatgggagtaataatagggggtccgccagtcactgactgggtgactgtcatcaggtttccacttagaagcacacagttactcatc

SEQ ID NO: 207856 - DNA, 122 bp, Homo sapiens
ttggggcagaccacaggcgtgagaggcacggcggggctggcaagctggcaacgggggagacgggagttgccaagaccctgcctctcctccctcgaggaggcgccggaggattccgtcaacgt

SEQ ID NO: 207857 - DNA, 122 bp, Homo sapiens
gtatcctcgctggtggagtaccctctgcttgagcgcatctcatgcgccagtagtggcgcccgccccgaacggtgtcgacggggcgttctctgagcggttcagggtcactggaagggaccaga

SEQ ID NO: 207858 - DNA, 122 bp, Homo sapiens
gattcataatactctagtttgttacatgttctgtgatattcaatgtgccttaattatgcacgtgtcctcatttcaaagccttttcagggatcatgtgggatagaacaggggtctggctgtaa

SEQ ID NO: 207859 - DNA, 122 bp, Homo sapiens
ccccacttctttgatgaggacaaatctctttttaactgcagtgaacattcagcagctcaacgtatggcatgatcattaaatcaatgagccagcttttagaagcagccttatgataatgagcc

SEQ ID NO: 207860 - DNA, 122 bp, Homo sapiens
aagcaaacggtttcatcgaggtggattcgacgacaaactaagcgaaggcaaaaacgatcgcgggagtcgacgtggagacagataaggcccagagctctgaccagacactaagtacttcatca

SEQ ID NO: 207861 - DNA, 122 bp, Homo sapiens
cttcaacctgccctcatttgacctgatttccaggtgcccaccaccaaactagccccttctcgagcttgacatactcacgtttgtcaaagtccatcttaaagtgtggtgtccataactgagct

SEQ ID NO: 207862 - DNA, 122 bp, Homo sapiens
ccaagttaacacgtcaaactgacgatcacaggttagtttacacgtcacacagccaaaacacgtcaaactgaccatcacaggttagttaacacgtcacacagccaagtaagttaacacgtcaa

SEQ ID NO: 207863 - DNA, 122 bp, Homo sapiens
tacgcaggaggctgaggcagaagaatcgcttgagcccaggaggcggaggttgcagtgagccgagatttcttagaaggaattgttacttattgttctgaagtgaaagtctggtctgattcaga

SEQ ID NO: 207864 - DNA, 122 bp, Homo sapiens
gaagctacaggagaaggtgggacggggatctcctccccgggctggggtcaccattagctccgactgcagtgtgaagagccctgtctcagggtgtctcctggtctgttccttcacagatactc

SEQ ID NO: 207865 - DNA, 122 bp, Homo sapiens
acagactgaattggaacttaaaatataacgagatccctgggtggcatgtatgcacttaaacgctgagaagccttcatatagtgcctgcacacactctattttgaggtagtttctccaattca

SEQ ID NO: 207866 - DNA, 122 bp, Homo sapiens
tagaaggactcattttctaattacagaagtttgtttctttctttcttgtttttgagacagcgtcttgctctgttgcccaggctggagtgcagtggtgtgatcttggctcagcctcccaggtt

SEQ ID NO: 207867 - DNA, 122 bp, Homo sapiens
gaggccccactccaccgtctgtctgccttcccggcctccctcagatgtgatggatcgccccggcagaggaagctaagtgcttgcagacaaaaagcccttttatcgtcctcgggtgggccact

SEQ ID NO: 207868 - DNA, 122 bp, Homo sapiens
taggccctggccgccgcgctccccgcgcgggtccaacgccctgggtgcccttctcgcctgcgccttgaagcccccacgcccatcctagcgcgtctctctgtgacctctcggccgccagcctg

SEQ ID NO: 207869 - DNA, 122 bp, Homo sapiens
ctcaagttcactcagctagtaagaggcagatctggggtgccaatcaggttggtctgcccccgatccatctgcaccgcctcggcaccattcagaaggaagtcaggcctctttcctgacgccca

SEQ ID NO: 207870 - DNA, 122 bp, Homo sapiens
agccttggctgctgttccctcctgtgggggccctgggctgggtgccagggtccaggaacacgaaggcattcaagaacgcggggaggggctgcgggagcccaggggcagccggggggtgggga

SEQ ID NO: 207871 - DNA, 122 bp, Homo sapiens
gtcgatgctagtgccagtctcccctccaaagtggctgcgccagcttcaccccagcagccacgtggagtgtgtcttccacaatgtgtctaacctactaggtgatttttgcttatctgagaagt

SEQ ID NO: 207872 - DNA, 122 bp, Homo sapiens
tccaactcaggcatctctgggatccaaccagtttttgtttttcctggactgagctttttccgggaactttttgaaacaataagaactgaaggtgcaacagtaacaagtgggtactttttttt

SEQ ID NO: 207873 - DNA, 122 bp, Homo sapiens
tccccacgggccccaggagttctccacacgtaacccgactcaccgccagacgccgaccagcgcttctgtccggttcaaacttcggaccaacctactcaccatgcgcatgctcactttcaaaa

SEQ ID NO: 207874 - DNA, 122 bp, Homo sapiens
cagacggggtggcggccgggcagaggctgcaatctccgcactttgtggggccaaggcaggcggctgggaggtggaggttgtagcgagccgagatcacgccactgcactccagcctgggcacc

SEQ ID NO: 207875 - DNA, 122 bp, Homo sapiens
actgctagggccaaatactggacataaagtgacaacaactaccaggcgcatatcctgaagcgaatcacaaataactacaacaacacagtcttaagacttgagcagacttgccacccaggaag

SEQ ID NO: 207876 - DNA, 122 bp, Homo sapiens
ctccacctggcacttgaggatgggcaagctgtcagatgcagcagagccaaccacagcccccgccctggccctctccctcgaggggctccacactgcagccagcccagggtgcccgaaaaggg

SEQ ID NO: 207877 - DNA, 122 bp, Homo sapiens
atcatgcactgctgcaattattctgggctttcatggagcacacatgtatccaccatcacccgtcatcattcatagtatctgctgggcattcatcatctaccactgggcatccatcatctccc

SEQ ID NO: 207878 - DNA, 122 bp, Homo sapiens
ccaagaaccgacgtagcctcccaggctgaacctcagtttggggctttaccccatgacacccgcaaagggctgggcttcccttcttcttggggagagggtcaaggaagtggctgtatcttgaa

SEQ ID NO: 207879 - DNA, 122 bp, Homo sapiens
ttatgtaggaactatcttaaggagtgtgggagtgaattccaaacctagcgtgctttatcccgggcttgggtctgccctcgaaccacaggaggtagaaaaaagggcacacagtcttcattttc

SEQ ID NO: 207880 - DNA, 122 bp, Homo sapiens
agccggacgctttggcttcttcgccatctggccctaggttgggcctcaaactcccggcggcggtagggaaacagacgatcacagttaggcctgaggcccctcggcggcctgtgtccttccca

SEQ ID NO: 207881 - DNA, 122 bp, Homo sapiens
agttccttggttcccctcccccctttccattccattcatagatgcagcagatgatgtgggcggggctgctgtgcccacagttggagtggctgcaggggagggcatgcaggccgtgcggcctt

SEQ ID NO: 207882 - DNA, 122 bp, Homo sapiens
ctttacgtttttcttctccaatttccagtcttggataagccattagtcaaactccctcatcgtaagggaatgataatgtcaatatcaaaacttccagagctgttgatttccccaaaggctta

SEQ ID NO: 207883 - DNA, 122 bp, Homo sapiens
gcttttgtctcccaggaggaactgccggagccctttgagcatcttctgcagagaatcgcccggagacccaagcctcagcagttctttggattaatgggcaaacgggatgctggtgagatagg

SEQ ID NO: 207884 - DNA, 122 bp, Homo sapiens
tcaaaacaaataggagttcagggaagagaaacatccttcaaaggacagtgttgttttgaccgggagatctagagagtgctcagaattagggcctggcatttggaatcacaggatttatcatc

SEQ ID NO: 207885 - DNA, 122 bp, Homo sapiens
tcacgcgctgcctgcggccgagacccctgcccgcgccctctgccgggctgccctccaagccgccctttctctggaggtcctcagcctgcaggggcaccctccacccggccatcgcgcagcct

SEQ ID NO: 207886 - DNA, 122 bp, Homo sapiens
ccgccatgcaaggctagggtactagcagcgctaacatcagcaacagctggctccgctgtgcgttttaaggcttagggctcggggcctgcccacggcacctttcctaaataccaagccggtgg

SEQ ID NO: 207887 - DNA, 122 bp, Homo sapiens
attcttatataacatcctgttgcaaaaaataatagagaccactatttgctgaaagcctaccgtggattaagcattgttcagtgtgcttttcatgtgtcatttagtcttgacagttcaatact

SEQ ID NO: 207888 - DNA, 122 bp, Homo sapiens
gatctgaaggactttgcaggcacccagggagataggagaggaggagggagcagccctggccggacactgtcctcctagcattgcctgcatcagggactcactcagctttaagaagccccttt

SEQ ID NO: 207889 - DNA, 122 bp, Homo sapiens
cattgagcgggaacatgatggagctggaatcccacccagctctgcctgctctgcaacccacgtctgcatggccatgtgaacctacacctcagcacaggctcgaggagacggcaatcagtgac

SEQ ID NO: 207890 - DNA, 122 bp, Homo sapiens
gctcgctcgcccagggagggagggagcagaaaaccaagcccacgtgttggagcgagatcgcgtctgactccagcgcacgggaccttgcaggggctgatggccaaaaactgaagtcatgggaa

SEQ ID NO: 207891 - DNA, 122 bp, Homo sapiens
tttccccgccccgcgtccgtgcacccttcctctgcagccgcccttttgcctccgctccgccggaccggccaaactggtttctccgctcggggaggtgcctctggtttccctccagcagccgc

SEQ ID NO: 207892 - DNA, 122 bp, Homo sapiens
ccgctccgccggaagtgacgcagggcagcggcgtcgcgggggcggggctcgggaaagacccgtgccagcgggcgtgtggccgcgggtttcgcacggtccaataagggagggcggcgtggccc

SEQ ID NO: 207893 - DNA, 122 bp, Homo sapiens
catcggccaccgggacggcatctgggatgtcagcgtggccaagacacagccagtggtgctcgggactgcatcagccggtgagtcgcacacggacctggccagcctgcggaagcatggctgtg

SEQ ID NO: 207894 - DNA, 122 bp, Homo sapiens
catttactgtcttctgaactgcagcagtagcataaactacctggagtgatagggcctctccgccggatgaatcatcccactagattcaatgagaagggaattgggaggcagcaccgttggct

SEQ ID NO: 207895 - DNA, 122 bp, Homo sapiens
acccatgaaggcaggaggtttatttgtctgtcaattcctcccaaagaggccaggtcccctcggtcttttatttatttattttttttgagacggagtctcgctctgttgcccaggctggagtg

SEQ ID NO: 207896 - DNA, 122 bp, Homo sapiens
aaagctgttgtatgtatctgttactcattagagatagatgggttttacaaatcagagatgcggagtaaatgtgggaatgacctcagttttgtcagaagaaatgcactaaaagaccctttgtg

SEQ ID NO: 207897 - DNA, 122 bp, Homo sapiens
cccacctcggcctcccaaagtgctgggattacagacaggcatgagccatcgcgcccagcccgtttccttaagaaacgttttgagcgtctgttaggtgtcatacgctctgacgggggaaacaa

SEQ ID NO: 207898 - DNA, 122 bp, Homo sapiens
ccccaccgcctgccacgccggctttgggaagcatcaccccccttctcctttcccattctccgcacctgcacatgtgcatccctaaaggttccagtttggtttcgctctcgtcgcatggagcc

SEQ ID NO: 207899 - DNA, 122 bp, Homo sapiens
aggggtcagggagttccctttccaagtcaaagaaaggggtgacggacgcacctggaaaatcgggtcactcccactcgactattgcacttttcagaccggcttaaaaaacggcgcaccatgag

SEQ ID NO: 207900 - DNA, 122 bp, Homo sapiens
tatcgtcccgtttcacaggtgtggagacagaggctcgaggggagaaacagccctggcgggcgaaggcagagctgagcttccgagaagggcctcctgtgttcagaaattccaaaggagaagta

SEQ ID NO: 207901 - DNA, 122 bp, Homo sapiens
cgaggaagggggcggggagaatccctggcacatgccagggtcgccgtaggtggcagcggccggcgcatgcgcgccctctcccagaagccaggaacgccgaggggcgcgctcccccattcgcg

SEQ ID NO: 207902 - DNA, 122 bp, Homo sapiens
gccagctgcgcagccggtgggagcatcccggaggggacgtttctgtccttctggcacacacgtgggtttcatgattgaagtccttgagacagaagggacacgaaacaaactggagctcggct

SEQ ID NO: 207903 - DNA, 122 bp, Homo sapiens
tgactggggagggaggcggggagcaagggaggcgcgtcggtctgggaagtcgcgcgcactcgctgctcctgggaccgacgtttaactcttgccaagtctcgtcgcagccgccgcggctggcg

SEQ ID NO: 207904 - DNA, 122 bp, Homo sapiens
tttgcatctaatttggtctttacagtaaacacagctatcccagaagggagaaatgtgcttcgaactcctcaaagctgtagctaatggaagatactccattgagatcacattggcagttgttt

SEQ ID NO: 207905 - DNA, 122 bp, Homo sapiens
gtgggctggggctggggctggggctgctgagtgggtccctggcctggatctgtcccctcccgtcggcctggccacccgccgaggctcacgaccccgcccctgtgcccacaggcacacggaat

SEQ ID NO: 207906 - DNA, 122 bp, Homo sapiens
ggcaacattcctcccttccgcacgcctaccaggggtcagcttcagactgagaagtcaatccgtttccagtcaagctggactggaccccagcaggcagaaatcagacagtgtccccggaatcc

SEQ ID NO: 207907 - DNA, 122 bp, Homo sapiens
ctcctccatcagctgagagctacttccactcaataaaactttgtactctttctccagtcccgcatgtgatccgattcttccggtacaccaaggcaagaacccgggatacagaaagccctctg

SEQ ID NO: 207908 - DNA, 122 bp, Homo sapiens
ctcaaatcccactctgccttcaccctggagtacactccagcgaagccgaggcccagccaacgctcgtgaagtttccacagagaagagcctgcaaaactcccactggaagaggagaaataaag

SEQ ID NO: 207909 - DNA, 122 bp, Homo sapiens
cctatgaagtcaagatgatctgaagagtccttgcagctgccaccttgccttcaaccctcacgtcctgtaacccatcccccacccccgatcctgtgactctggatttaaaatctgttttgctt

SEQ ID NO: 207910 - DNA, 122 bp, Homo sapiens
ctctgatgcttcagggagcgcgcgagcagggagcggcgtgagtgcccgtctgtctgttgccgggcggaactgagcctgaaccccggcggctggagcgctggccaggagggggcgaatgccga

SEQ ID NO: 207911 - DNA, 122 bp, Homo sapiens
gtctttctcaatctgtttcttgtcagggaatgcctaattgggctttctcggtacttggctcgggggatctgcatgaggacaagatcactgtgagtcgcaggtgcactcagggcacagccgac

SEQ ID NO: 207912 - DNA, 122 bp, Homo sapiens
tctcccgctgtcttgtcttacagccttgacatcgccaatcgagtaccagaggaaccacagcgggggcggcggcggcggcggcagcgggggcagcggcgggggtgggggcagcggcggcggcg

SEQ ID NO: 207913 - DNA, 122 bp, Homo sapiens
tctcccgaaggacccctgctcggaggagctctccctggtcccctctccggatccactagccgggtcaggcagagagaaggaggccatagattcaggaccaccttctgcagctactcttggcc

SEQ ID NO: 207914 - DNA, 122 bp, Homo sapiens
gccgccagacgttgcctacagtctcggctctgtctcccacggctgtgggtccggaccccacgggacccctatgggacccccacaggacccccacggcctgagtccaaggcccgccccctcgg

SEQ ID NO: 207915 - DNA, 122 bp, Homo sapiens
ggctgcctggggccactgtcacggtgttcggaggtgctggaggcttgtgtgacccctggccggagcagcccccctgctgggcccggcggcgcgcgcccctctccaggccacgttcccctgag

SEQ ID NO: 207916 - DNA, 122 bp, Homo sapiens
aaggaatcgagggcaaaacgggactcgtgagaacagacagttccccgtcgtggggctgcccgggctcaccttctggtctgaactcggccctgcctggcggtacaccccggagccgtagacga

SEQ ID NO: 207917 - DNA, 122 bp, Homo sapiens
aagccccttacattatgtgggggtgcacggtgggtccttcccatccgcaggttcggcatccgtggatggggagtggatacagagggcggactatacagcttgaaaggcttccctggaagcaa

SEQ ID NO: 207918 - DNA, 122 bp, Homo sapiens
tagaaacatgtcccgatgggatctcactgggaagcggtctgaccacctgaagtgctttcacgagggaatctggcggccgggacacctgctttcatgtttggaggtgttggggtgaatctccc

SEQ ID NO: 207919 - DNA, 122 bp, Homo sapiens
caccagtgagccacggtgatgggggctagacttgcgtccgatgagcaaaggcgggttccacgctggatcaccagtgagccacggtgatggaggctagacttgcatcttctgactcctacttt

SEQ ID NO: 207920 - DNA, 122 bp, Homo sapiens
ttatatgtggagcatagcctaaacctttaccgattcttagcagtaacgagaaataaggcacgcaagtgaaaaatgaaaacagtgacgttaaagatatcatacattattggtgtcaaagacac

SEQ ID NO: 207921 - DNA, 122 bp, Homo sapiens
ccggtgggggccggagcaacaagcggagcgcggggaaccgggccgccaatgaagaggaaacgaaaaacaaacccaaattggtgagtgctcccgcagcccccgccggccttagggacagggag

SEQ ID NO: 207922 - DNA, 122 bp, Homo sapiens
gaatcagtcacctgttattttatacctgagcttgtggaaacctcctctttgagtcctcatcgtcagatcatgtctcgtcggtccttcatctaaattccttaattaatctcagggattcagct

SEQ ID NO: 207923 - DNA, 122 bp, Homo sapiens
ccaggagttggagaccagccttggtaacatagtgagaccttgcctctacaaaaaaattaacgaaattagcagggagtagtggtgcttgcctgtagccccagctacttaggaggctgaggtga

SEQ ID NO: 207924 - DNA, 122 bp, Homo sapiens
gtgccgcgagcccggcggggagagcccactcccgcgccccttccgggcccactaccccgccgggctgtggcccatcgccccagtgcctggtagcctagttttctcgtttgtcgtttgttcac

SEQ ID NO: 207925 - DNA, 122 bp, Homo sapiens
ggagagatgcagagggccggggtaattaggaaacgcaaggttggccaggagggctccttgcgttgttttgtttatgaggatcctccagtcaatgcagctgtcccccttgaaagattgggggt

SEQ ID NO: 207926 - DNA, 122 bp, Homo sapiens
gcgccccgctttcccaagtccccaaagcactcagggcctctcctcattacaggggccccccggaccgtccctggttagagcttctggggcagcttctccattgtggaccgccctcccccgcc

SEQ ID NO: 207927 - DNA, 122 bp, Homo sapiens
ttctggaaaccagctatcaatctagcacaagcgactattaggaaaatcaaggaggtgctgcggggatgtggaataggacacctgggttttgatttaaagtaacttaaaggaattgcttatag

SEQ ID NO: 207928 - DNA, 122 bp, Homo sapiens
agaagagtagtgaggaagccgtggcgttctcctggctttccaagcccgaggcgaactttgcgtccaatgagcactttgccttagaggggggcggtcccagattcaagttaggcgaaaacctt

SEQ ID NO: 207929 - DNA, 122 bp, Homo sapiens
gggacaagccaaacactcccgcctccgggatcgaacggaatgaaccagagtgattaactacgagaatcaccaggcgctcattgggctgatcagtacctcgtctgacctagctgggtttggtc

SEQ ID NO: 207930 - DNA, 122 bp, Homo sapiens
ctctcctacctccaccccttggctccatgggtcgcccacggggcacagcattgctcgaggcgctggttcagagtgctctctgcgtccaggcgggctgccagaaaccttcagtgagctggtct

SEQ ID NO: 207931 - DNA, 122 bp, Homo sapiens
gactgcagaagatgaaattaatgccctgcctgaaagcaagcatgagaaaaataaggaaaccgggtctctgggaatgtcattcagccactggatcagactcacctgacagctgctctatcttt

SEQ ID NO: 207932 - DNA, 122 bp, Homo sapiens
atttacctatttacagttgcaatcccttccctatctgagcactccctgtccccttctctgcgtgtcccatatctggaatatgatatattttatgtaatgggtattgtctgtttttccctact

SEQ ID NO: 207933 - DNA, 122 bp, Homo sapiens
ttgagccttgactgggagctgaaaggagttgcagctgttggcatgagacctccttctccccgtcttggggaggtggggaccagcagataaatcccacccttccttgagctgtcgctgtactc

SEQ ID NO: 207934 - DNA, 122 bp, Homo sapiens
gttttaaagcacagctctggcctagatgtactccggggcttaaagactatatactgcccacgtactcaaacatttgcctgagaacatctatagctaaagcaaaataaaaaagattcctccta

SEQ ID NO: 207935 - DNA, 122 bp, Homo sapiens
gtgggctgagcttgggacgagctgcgttccgccccaggccactgtagggaacggcggtggcgcctccccagcaaaccggaccgactgggtagggccgcccaccctgccttcgcgccgctcgt

SEQ ID NO: 207936 - DNA, 122 bp, Homo sapiens
gagtgggccacccgcagcacagggtagggctgtccgccttctggggccccccggcgcctgcgttttggagcaaatctgcagtcgaggaccagctcccgatagtcacccaactctggctcagt

SEQ ID NO: 207937 - DNA, 122 bp, Homo sapiens
agggattccacctcttaaacatttctaaatatatccattcttggtccttctgtcctactccgggccctggcctatttaaagacttcatcttctcttgccctagtgtgttatcacaggctgct

SEQ ID NO: 207938 - DNA, 122 bp, Homo sapiens
actccacgtcgcccggagctgaggcctgggagggggtcctgggcggagcgggcgggtggtcgggccaggccacgccccaggccacgccccaggccacaccccaggccacaccccaggccgcg

SEQ ID NO: 207939 - DNA, 122 bp, Homo sapiens
gtgcagagaccgttccttgtcttcggaaggtgaacttggaacaattcccacgggacactgcgaatgacggcggctgggcttgggctcccctctccgtcctcagagcatggccaggcccatgg

SEQ ID NO: 207940 - DNA, 122 bp, Homo sapiens
tttagaaaagttcgagaaacagtgcattgcatgaggctgactagaagcaagttgagaaggcgggctgtggttgttgaggtgttaagggtaaacataaacttagaagaaccaggtgcttttat

SEQ ID NO: 207941 - DNA, 122 bp, Homo sapiens
ggagagacttggaaaggttaaatgacttgcccatgatcacatatttcttagaaatatcaacgcaagttctacatttaggaagaggaagtgaagtgaattagctagtcaggtatagtctaggc

SEQ ID NO: 207942 - DNA, 122 bp, Homo sapiens
gcgagctggtgaagaagatggtgatcgtgtcctgggcccagcgctgaagctcggctacggcgtgtcttgaccctgcctcccctcctcgcctgagccagagagaggaaggaggttgggatgaa

SEQ ID NO: 207943 - DNA, 122 bp, Homo sapiens
tgcaagggcaagagatgcgagcccctgaccctgaggcctgagaagactcacgccaggcgccgccggctcaacaagccgaggagaacctgaagaccaagaagcagcagcgttaggagcggctg

SEQ ID NO: 207944 - DNA, 122 bp, Homo sapiens
aattattttggttattcatgtttgagaaagaatgagttttacttaaaagttttaagaatgcgaagaatattttcaaggagtttgcaaaaagtcaccaatttgatctgtcttttccataattt

SEQ ID NO: 207945 - DNA, 122 bp, Homo sapiens
ccggggtcttcgctctcattgccaggatgaaagtgtgaaagacgtgactggggtgggcaccgttgtctttcctactcacagaaaggtggctcctcctgaagatgcttgggctgacctgagcg

SEQ ID NO: 207946 - DNA, 122 bp, Homo sapiens
agcagggtgatggataactagagggttcgggcttccttgagaggggatcaaaacgttctgcgaagggtgacggtggttgcactagccgtggacataaaagtcgctgaactgcccccttcaaa

SEQ ID NO: 207947 - DNA, 122 bp, Homo sapiens
gggcttgcaccgtggtcctggaggcttgaagatttcagatccttaatcctctgttatttgcggggaaaaggtggctctagaccattttgtcttttaggttagcttcacaaaccgctttcgcc

SEQ ID NO: 207948 - DNA, 122 bp, Homo sapiens
actgctcagcatgtttacatttgaacacacctcaagtgtgactaacaacaaaaaataaagcgcagatattccataaatgagtaagttccagtatggctgcatcctactgcaattaatccttt

SEQ ID NO: 207949 - DNA, 122 bp, Homo sapiens
ccgcaaccagtggcatacctaagtaaggaaattgatacagtagcaaaaggctggcctcaccgtttacaggtagttgcagcggtggccatcttagtatcaaaggctatcaaactaatgcaagg

SEQ ID NO: 207950 - DNA, 122 bp, Homo sapiens
tcagtagcccgagccctcccattctccactccttcgacccaattccactaagtcaagaaccgtggtcggtctcagccactcactcagcgccactctatgctccgaagtccgtgtagcaccac

SEQ ID NO: 207951 - DNA, 122 bp, Homo sapiens
ttgaactcctgaccacctgcctcagcctcccaaagtgctgggattgcaggcatgagtcaccgcacctggcctgaaatgtatttcttactgtgagggatgattaaaagaaggttgaaagccac

SEQ ID NO: 207952 - DNA, 122 bp, Homo sapiens
tcatgacaggagacgcttcgaaatgaaattctcacaaattatgaggccaacacttagaatcgggaagaaagtgatgaaaccatttgtgaaactcccttgtgaaaaaggatgcatttatttta

SEQ ID NO: 207953 - DNA, 122 bp, Homo sapiens
ctgtgccagggccccgacagggcaggaagcagatagagtcccacaagcacaagcccagtgcgcagaaagggttacttaaaaaataagttctgtgataaaatcaaacagggtgaagggctgga

SEQ ID NO: 207954 - DNA, 122 bp, Homo sapiens
actttccaaagcagccttggcctccttcatgtccagcaacctgagataaggccacgccaccggctaagagttccgccaggggcccagctctcaggaggcctcttcggtgccgccagcctccc

SEQ ID NO: 207955 - DNA, 122 bp, Homo sapiens
agctgcctacaaatgtcagggtgccgctatcccagggaaaagctcggatgtgacacggaacgaacgaacctgaagcaaactgaattatctcctcaacgtcagatcaaacgtggacttgtcct

SEQ ID NO: 207956 - DNA, 122 bp, Homo sapiens
gtctcgcgccgcccgcggccgctcggacgcgcgcagagccgccccccgccgctgccgccgcgtgcgcccgcgaacatgacttctgccttcaagctggatttcctcccggacatgatggtcga

SEQ ID NO: 207957 - DNA, 122 bp, Homo sapiens
tgggattacaggtgctcaccaccatgcccagcaatttttttttttgtatttttttagagacgaggtttcacgctgttggtcaggctggtcacgaactcccgatctcatgatccacccacctc

SEQ ID NO: 207958 - DNA, 122 bp, Homo sapiens
cgcagaaatctcactgaaataggctgaactcacaaggccttagaggggtttgggccctgccgcgggggcccacgtgggaagcggccgagagccccgggccaggctctaagggagcgcaggag

SEQ ID NO: 207959 - DNA, 122 bp, Homo sapiens
catccggctatctggaaggtccgagaagaccaagcgctggcgcccgcccgcctctcctgccgccctaggcctcttccaaaacagcgccatacatctccacgaggccaggcagctcagagcag

SEQ ID NO: 207960 - DNA, 122 bp, Homo sapiens
actaatgtcattgtggctgatcatcactttattcagaaatggtccgttacaatcctcttccgtagagtttgactctctttaaagtctatgctggacagggcatcttcctgggtccctagctt

SEQ ID NO: 207961 - DNA, 122 bp, Homo sapiens
gttgtatgattccatttatgggaaatgcccagaatacggaaatctatagagacagaaagtcgattagtggttgcctagggcttagtggagaaatagggagtgactggtaatgggtattgtgt

SEQ ID NO: 207962 - DNA, 122 bp, Homo sapiens
ggacaagcacagactgctcagaaggaacgaaggtggagggaggtgtgaggacagcagaggcggtggaggggactttaaaggatgcttttcctaactatgaaagcaatacatcatcactgaag

SEQ ID NO: 207963 - DNA, 122 bp, Homo sapiens
cggtggctgcccccaagcaggcgctcagcgagtgtgaaaccaatgcattcactcaggactcgcgagctgccgtggcaggcactgccctcccctccgccagcgagcatctccccctctccgcg

SEQ ID NO: 207964 - DNA, 122 bp, Homo sapiens
acaatcccccgccccgcgcgcgcaaagagggctttagtcctgcggaacttggctttggggcgagctttcccccacttctctccgagtcgcctacttttaagtttaatttcttgatttgcttt

SEQ ID NO: 207965 - DNA, 122 bp, Homo sapiens
ttatcacgggccggtcatcacgggcggtcatcacgggtggtcatcacgagccagttatcacgggccagtcatcatgggccggtcatcacgagccagttatcaccagccagttatcacaggcc

SEQ ID NO: 207966 - DNA, 122 bp, Homo sapiens
cccagatccccgcctggagttgaggagtgagaccgggtacgccccgggagccagagtgagcggagacccagagaagcccgctgggatttctctttgattatgagtagggaaaaccctgtgag

SEQ ID NO: 207967 - DNA, 122 bp, Homo sapiens
tgagaaccgctgccctagggttagcaaaacaaccctcagaccccagttgtgactgtgatccgtaagttgggtgcagtgcctcatcaccaacctcattttctctagctgtaaaatgggagact

SEQ ID NO: 207968 - DNA, 122 bp, Homo sapiens
ggcgcgccgcactgggcatgctccgtagcctgggcaggttggggctgcgaggcgacagctcgggctctggagccgggaggcgagaacgaggagggaggctcgggggcaggggaggaggaagc

SEQ ID NO: 207969 - DNA, 122 bp, Homo sapiens
ctgaagaagggccagttactcctggctgaactgtaaggttcgcacaggaaagtagagatacgtcagaaatgtgtggtggggccatattagtggtgacaggttctttctttaatccagtagac

SEQ ID NO: 207970 - DNA, 122 bp, Homo sapiens
cagggccattgggattcttgttttccatgcgtcccttctctccaaattctgtccttccatcggaagggctcatgcaccaatgacggtgtggccctcctgtcctagcttaccgtcgggtggta

SEQ ID NO: 207971 - DNA, 122 bp, Homo sapiens
gcacagcatggctggcctttcctcagttgtctttttcagcagagaaacggttaagtctctcgtctctaacccagctcctctatggtgcttacctcctgatccctggggcgatcagcaaaccg

SEQ ID NO: 207972 - DNA, 122 bp, Homo sapiens
attccgcccttgttttcttagaattaaagtaagataatatattttatggcctgttgcaaacggaaaacctttacacaatgattagtgattagtatcagtatctgtggactgggaaggctcta

SEQ ID NO: 207973 - DNA, 122 bp, Homo sapiens
atttctgtctccggcacacgctgtaaccacagggaactgctttggaaacaacattgaaaacgtcccctgcaaacacggtgtggtgagacagggagtacagaacagaaaacaaactgtttttc

SEQ ID NO: 207974 - DNA, 122 bp, Homo sapiens
aatcttggctcactgcaacctccaccttctgggttcaagcgattctcctgcctcagactccggagcagctgaaattataggtatgcaccactgcgcccagctaattttttttattttcagta

SEQ ID NO: 207975 - DNA, 122 bp, Homo sapiens
ttctcttcagaaagcacctttcctctctagccggaaatttcttcaccccattcaacaaaccgcttgcccctcaaaggttggtccttgggccagcagcagctgtaacctgggcgcttgttaga

SEQ ID NO: 207976 - DNA, 122 bp, Homo sapiens
ctgtagagggaggtaatagcagtacctggctgacaggcttgcagagggcgtgtagagcaccgagtgcccgttgtccttgtcacccaggtgtgcagtgcaggtgaaggcagcagcagtcaggg

SEQ ID NO: 207977 - DNA, 122 bp, Homo sapiens
ttcctcccgcttcctagagaatcagagaatggatgcgcgagctcgctgctgacgcactaccggccgcgccaccattcttccggtttcagaagttaaggctggtgtcctggccccagtccacc

SEQ ID NO: 207978 - DNA, 122 bp, Homo sapiens
ccccgccccgcgcccgcgcccgcgcccgggttcccacggcgcccgcccccgcgcgcccggcgcctccctcacgcccgccctccttgccgcccagccggtccaggcctctggcgaacatggcg

SEQ ID NO: 207979 - DNA, 122 bp, Homo sapiens
tgcagaggcaggtgggggcggagcggcccctgtggtgcagagccacgcctccttcaccatcgagtttgatgactgcagccctggcaagatgaagatcaaggaccatatcaccaagttttccc

SEQ ID NO: 207980 - DNA, 122 bp, Homo sapiens
tctgcgacagctgccctgtgcaccaggacatgactgggctggggacgcactgtggggccacgtccccgggaaggtgcagaccttgcttccccgtggggaagtctcggcacctggagaaagcg

SEQ ID NO: 207981 - DNA, 122 bp, Homo sapiens
tattagaacactgcaagctcccccgacacatacatacacactttgatgtgtaaatgattgcgaaagccttaatctatatcagaagtccagtacatgttacttagggcagtattaaccacacg

SEQ ID NO: 207982 - DNA, 122 bp, Homo sapiens
ctgccgctcgatctcgtcgttgatccgccgggcttccttggcctcctcgctcaggcagcacgccatgatggactccagagtcattcttccagagtgcctccgctgcagccccgccggcaccc

SEQ ID NO: 207983 - DNA, 122 bp, Homo sapiens
gaggggtctcctctgcagagacgtggcctcctccagagacccttggccacagcccctgcccgctccgtgctgggccgaggccaaggccctggcagccctgcctgcttgcccgggtcacgctg

SEQ ID NO: 207984 - DNA, 122 bp, Homo sapiens
cttgtgggtaaagagtcaaatcagagttcgtgagcctgggataggttaaagattggtctacgtttggaagcagaagagagcaggcgtaaggaatgtccaaatagtcattatgccggaccttt

SEQ ID NO: 207985 - DNA, 122 bp, Homo sapiens
cgcgcacccccggacgtcccccccaccccaggcccggatcctggaatcacctgggccccgcgccccacgccccgccgccgggcccacctgcgcgcccagctggttcagctgctgcatgtcgc

SEQ ID NO: 207986 - DNA, 122 bp, Homo sapiens
cggggaccagcacccactggggctggacgaagacctgctggggcctggggtggccgagggcgagggagcaccaactccaaactgacctgggccgtggctgcctcgtgagcctcccagagccc

SEQ ID NO: 207987 - DNA, 122 bp, Homo sapiens
gaactaagcagactccgccctccggtccgcgaagtggcgactgcggtattaagtcgacctcgcgatttctcaaatagtgcaggaagaagacattaaatagcgaatgctagagactgcattca

SEQ ID NO: 207988 - DNA, 122 bp, Homo sapiens
ttccagcagtgcagctgcggcctgccatcgttggttgtcgtgtcactgaaagtagagagacgcgaaaaacctggagagacgaaagagccgccccagtccgagcgcagccagattttgttcaa

SEQ ID NO: 207989 - DNA, 122 bp, Homo sapiens
ctggcgggcccccagtgtccgcacagccttcaccactgagtagttccgcgccttggagaccgtcttccggtaccaccagtacttgggctctcaagagcggaagaggctggccagggagatgc

SEQ ID NO: 207990 - DNA, 122 bp, Homo sapiens
cagggaccaggtgcagtggcccacacctgtaatcccttcaagcactttaagagttcaaggcgggtgaatggcttgagcccaggagttcgagaccagcctgggcaacacggcaaaacccagtc

SEQ ID NO: 207991 - DNA, 122 bp, Homo sapiens
aattggagtcacagagggaggaaggccgaaccgcgggagcctacagatcccagaagacaccgcgctaccgaggactgcagtctggagttggagcccttgtcccaaccagggctggataagaa

SEQ ID NO: 207992 - DNA, 122 bp, Homo sapiens
tcaattgcttagcccatctgctaggggctgcccaggcgggccagaggcgaggaggagagacgttccagggatgtcttcccaccgagttagtaccagtaccatgttcgctaatccaggttttc

SEQ ID NO: 207993 - DNA, 122 bp, Homo sapiens
agcctgcgctctgcgcacccggctttccctgggatgagcggcacaggggctcctcggcaccgtgtagatgtgcatgctcgcccctcagcccccggaaagacggcagcttcagccgctgctgc

SEQ ID NO: 207994 - DNA, 122 bp, Homo sapiens
ctccgaatgcttatgaaagtagttaatagcattatagttagagctttgttggcaaaggaacgtcctgctttgattttaaaagctacctcttaaatctagggtagtgggaaactggacgactt

SEQ ID NO: 207995 - DNA, 122 bp, Homo sapiens
ttggcgatggccagctacacaggtccggcgggggcggcagccatgtggggcgcgggctggcgtggggagcagcccacagctgggcctcccattgaactttgatgtgtttttctttggaaaac

SEQ ID NO: 207996 - DNA, 122 bp, Homo sapiens
aagtcgttcctgcagagcctggagtgcctgcgccgcagcacgcagagcctgtcgctgcagcgggagcagctcagcagctgcaaactgaggaacagcctggactccagcgactccgactcggc

SEQ ID NO: 207997 - DNA, 122 bp, Homo sapiens
ccaccgctgccgggcctgctgtacgacccgcgggctctgggccatgcctgctcttgcgcccggctcaggaggacccttcttgatccaggagtggaccctggtctcattggagccagttgggg

SEQ ID NO: 207998 - DNA, 122 bp, Homo sapiens
acacttcttattatagtatgtgtttgcaaaagctagactttgaaaagtcgcctttaagaccggtcagtttacataggatttaaagatagactaatgcttccttctctaactagtgtggaaat

SEQ ID NO: 207999 - DNA, 122 bp, Homo sapiens
gcctcaacgtaaagtacaacaacgacaagagccgcgactaccacgcccggacctgccctccggggacagctagccctcgctggaccagacatggccgtggccttcgacctttcagttcccaa

SEQ ID NO: 208000 - DNA, 122 bp, Homo sapiens
gcttctcccagccctacctgcctctcccggaggcggccccggcccaggcccaggccgactcgctcactgtctacctggtggtggcgttggcctcagtgtcgtcgctcttcctcttctcggtg

SEQ ID NO: 208001 - DNA, 122 bp, Homo sapiens
cccactgtgtggccccctggctggggagggggccggggggctggcagtgtcacattggaccgtgaagagaaggggcctgctctggctgtgctcagcagcaccaggagaaccaggctggaggt

SEQ ID NO: 208002 - DNA, 122 bp, Homo sapiens
ccagcttgtatcagctgataaatggtcccctctttaagggacttatctctttagggcttgcgggatgagggatggcgtcatttgtcctggacgctcgtctggaccagccaggccggatctat

SEQ ID NO: 208003 - DNA, 122 bp, Homo sapiens
tgcaggcgcccaacggccctgtcggcaggaacaaggtcaccccttggcgttgggcaatgtcgggcgatggggcagtggccctaaggggacctgtggggtgggtgggggtactgccagagagg

SEQ ID NO: 208004 - DNA, 122 bp, Homo sapiens
caaggtgctgacccgcagactctgccaggacacccccaacgtgtgtctcatgctggaaaccgtaactgtcagtggctgcaggcggctcacagaccgagggctgtacaccatcgcccagtgct

SEQ ID NO: 208005 - DNA, 122 bp, Homo sapiens
aggtgcgcacggaggcctcgcaggaagtgcgtgtccacggaggcgcttggtggccaggggcggggggcggggggcggtgtgcgccggggtccgggaggctacgcaagctccgcccacgaggc

SEQ ID NO: 208006 - DNA, 122 bp, Homo sapiens
tgtcattggccggctcttgctccggaaaaaccaatcataggtcttatttctgaaacgtcacgaagaggcgggggaaaagaaacaactacatccccaaatggccaagagctactgaggcggga

SEQ ID NO: 208007 - DNA, 122 bp, Homo sapiens
ctggccttcctgagccgtgacgaggaggatgaggcggacggagaccaggacggccgaagccgggacggcctcagcccccaggccaggcatgactttgacagactccaggctggcggcggggt

SEQ ID NO: 208008 - DNA, 122 bp, Homo sapiens
ccacgaggaattccttggagagatgccggggtcaagcctctctctaggtagatggtggaccggggaacctgggtccagcctctcctatctgtagccttcattctgagtatgaaacacttcct

SEQ ID NO: 208009 - DNA, 122 bp, Homo sapiens
tccattcccctatcaaccccctccttccccactgctgtcttgctgtgaggatgctgtgagcggatgccggctccaccagaatcctcagtgggcagagacaaaagaatgtgtcccccccacat

SEQ ID NO: 208010 - DNA, 122 bp, Homo sapiens
ggccgggtatggggagggacgctgtgtcgggtgcgccctgcgcttgccctggtgggggcgcggggctgtttccggcgggcggaggcgccagcaggccaactttgccgcggcccaaacagatg

SEQ ID NO: 208011 - DNA, 122 bp, Homo sapiens
tccaccagagtagaggtaagaacggggacagggcatgcctatagacacctatccatcattcgcttgtccacacattgatttccctaaatatttattatctgcttgttatctgccaagagtga

SEQ ID NO: 208012 - DNA, 122 bp, Homo sapiens
agttaagttgttatcaacttaaaatagaagagtataaccaaatataatcaaagtaaatcacgattaaacgttgtcgaataacaagacaataagaggaaaagaggagcaaaacagttgtcaaa

SEQ ID NO: 208013 - DNA, 122 bp, Homo sapiens
cagtatacacagcggacgtcagcagaggtgggcggcaggcgagcctcctgcaggagcaggcggtcccctgaagaaactcctttcggagttggctcctccccgacttttcagggagggatgtg

SEQ ID NO: 208014 - DNA, 122 bp, Homo sapiens
cggtgatcgagcacctggagcgtctagcgcttgtggacttcggcagccgcgaggcagtggcgcgactggagaaagctatcgccttcgccgaccggctacgcgccgtggacacagacggggtg

SEQ ID NO: 208015 - DNA, 122 bp, Homo sapiens
agcgaaggagaccagttaggagggcagggtgctggcccaggaactccccatgagaagaggcgggggtcctgttaacgctgcataacaggcccctctaaacataagtgtcatagaacaatcac

SEQ ID NO: 208016 - DNA, 122 bp, Homo sapiens
gagccccagcccggagccggggctggggccagggcgggggtgtgtcgggatgctccccaccgggcctggggctggggctggctcagacaggccgggggccccgcaggcctccaggaggggcc

SEQ ID NO: 208017 - DNA, 122 bp, Homo sapiens
gacggtgaagtgcctcagccatcagcgctgaatatcattaataccttcccactgttaaatcgatcactgtcatccccggatgccggcgtgcggcggggcacatggctgccagccagaacgcc

SEQ ID NO: 208018 - DNA, 122 bp, Homo sapiens
gagaaccaccgctctagggatcctctggctgacccgaatccccggtgtgtgtgcgcgcttcgtctgcaggtaggagttgtggtctggacagaagcaaagtaggccacactcgcctgcccttg

SEQ ID NO: 208019 - DNA, 122 bp, Homo sapiens
agttcggctctctcagttaggactcacccttgtcctgggcatctgccggaatgtgacaggcggccaagccacgtgctgtgcctctgagacgatgccggtgaactaaggagtgacacaccttt

SEQ ID NO: 208020 - DNA, 122 bp, Homo sapiens
aggcccggtcaaatgtcttaaatctgggaggattcctcctgggaaattccagtaagggcgcggagcaggtcaggaaggaggttactttttgggtctttatcgtctatgatgggagaaaagga

SEQ ID NO: 208021 - DNA, 122 bp, Homo sapiens
cgaggtgcggactgatgtagtcaaagtttgggttcttatcctccgcaagttcagatctgccgcctcagccactccaccctaggtcgctcgcatccttccagctgcagtgctgcctcctgaaa

SEQ ID NO: 208022 - DNA, 122 bp, Homo sapiens
tcttcaataaagttacaggatcctgatctactgtagtttgtgtggattaattaacatattcgtttacttattcactgacttattaaaatggtgacaaggagagcaggttggacccagggctt

SEQ ID NO: 208023 - DNA, 122 bp, Homo sapiens
tttcctccaggagaaagcttgggggaggggtgaggagaagcagtaggaatcgaagtgactcggaggaagcggcttccattcattagcatttgtaaagggctctgagcgctgcagatggaagc

SEQ ID NO: 208024 - DNA, 122 bp, Homo sapiens
ctcgacacagccaggctggagttggcagaggtgcagatagggcggtgatgctgagagccacgatgtcgtcattgaaatgaagtcaggtggaccctctggaccctctgagtttccagcctagg

SEQ ID NO: 208025 - DNA, 122 bp, Homo sapiens
gaaccatctatatactgatctctttaaggtacagttaacttacagtgtctcacttacatgcgctgctgaggtgaaggtgtttaaaatcaataagtgtaagtagtttccctggaagagagaag

SEQ ID NO: 208026 - DNA, 122 bp, Homo sapiens
actgtccgcagggcgggcggtggcggggcgcaagctgcggggagggaggtgaggcgggagcgtctctaccgccagggcgtaggcagtgacctcactgcaccatcacccctcaccccttgcgc

SEQ ID NO: 208027 - DNA, 122 bp, Homo sapiens
gaaagacccaagcaactctgaacagagagaataccaaaggaagagcagggaaggaggtggcgtcaaggcatgagctagtatcccagactgcctgggaaggtagcactgctcaaaacatctct

SEQ ID NO: 208028 - DNA, 122 bp, Homo sapiens
gcagcacccgcccagtcacgtctgtcatctcatctttgaccatgattccaaattcacggacgtatggatctgtgttgaaacttgcacttcgcatctggcaaagggaaacaagaaaacgcacg

SEQ ID NO: 208029 - DNA, 122 bp, Homo sapiens
ctattgtctcctcagttatggaattagatgatgcaagttccagttcagtcaccatttccccgtttctatactttgtcaataaaaatgatatggcctttgttcatacagaccattgatactgc

SEQ ID NO: 208030 - DNA, 122 bp, Homo sapiens
agcctgggcaacatagacccccatcttaatttaaaaatagaggctaggtgtggtggctcacgcctgtaatcctagcactttgggaggccaaggtgggcggatcacctgaggtcaggagtttg

SEQ ID NO: 208031 - DNA, 122 bp, Homo sapiens
catgagaagctcactggctggttcaggaacacccaggtgtacacgacaaccacccagccccgtcctcacacatcgaatgtgacggtattgagataaatgctaacaattagggacccccccgg

SEQ ID NO: 208032 - DNA, 122 bp, Homo sapiens
cacccacttccccaagcgccggggtttgcgcagcggcggaaatgggcagggcggagcgagcgctgcggctaaagcgaaggcggggaccctacccatccctagtcctgtcggctcctcccacc

SEQ ID NO: 208033 - DNA, 122 bp, Homo sapiens
tcaccggactaaccgagttcgagaccacaggggggtcaggtagccaaggctgggctttgacggtaggaatgaaggaggtgagggtggcgcgccgcaggcctgggccactccctgagtagggc

SEQ ID NO: 208034 - DNA, 122 bp, Homo sapiens
gttgtccagaaactggcgcctgcagcggaagccgcggtacgtctggtccagtagcagcctcgcatgaagccggagcctgtgctggcacctggagctgcccaccccgaggcagcagccagcat

SEQ ID NO: 208035 - DNA, 122 bp, Homo sapiens
caagttgggtagaacctataaggcatcaccaactgcatctcaaaccaaccaagcaagtgacgctccaaaacctccctaaataccctctctccccagcattccgaacgcaacatcaagggcga

SEQ ID NO: 208036 - DNA, 122 bp, Homo sapiens
tttaactcacaccgaagcctggcgggagaacggatttctcaaggctcggaagtgtctgagcgtctgctcggttccccagtaactacccgagtgttgcatgcagccagaaatctaagggtcac

SEQ ID NO: 208037 - DNA, 122 bp, Homo sapiens
taggaacttaatacttaggagtcaagtgttgcaaaagaataaatgaaaaagcagcgctgacggaggaaacctgactttcaaagtctctctttagtgcctactgtgtatattatttccttgaa

SEQ ID NO: 208038 - DNA, 122 bp, Homo sapiens
ctcttcggatggaggccgagtggagttttggagcgcagcttctccatagctgagcggctccgggcttttacagggctctgtgcagttgacccccaaaggctggtccactgtgttcatgtgtt

SEQ ID NO: 208039 - DNA, 122 bp, Homo sapiens
cagcctggcagcggtgggattcgaacccacgcctccgaagagactggagcctaaatccagcgccttagaccgctcggccacgctacctgcacgaaaacttactgtccccgttgtcctcctaa

SEQ ID NO: 208040 - DNA, 122 bp, Homo sapiens
tgtctagcaccagacccagccacaaggagcacctcaggactatggcatacttctgttgaccggatggtcacagccgtggtcaaatcaaagccttcttggggttccctggagctgtcactcat

SEQ ID NO: 208041 - DNA, 122 bp, Homo sapiens
gctggacgaactcggagagcttcgccgcctggtgccgctttggcaagcgggagttcaaggcgggaggggaggtgccggcaggcacgcagcccccgcagcagcagtactatctcaaggtgcac

SEQ ID NO: 208042 - DNA, 122 bp, Homo sapiens
acgcagtaagagtggaaaaccataacataactccctaagggcctgagaagtcaataagaacgtggggattctgagtaatgtaatcagtaagatgacttaatagtttacatatcaaactgtgc

SEQ ID NO: 208043 - DNA, 122 bp, Homo sapiens
gctgctcactagcgacccctctaggtcttagagagaagagagctcatgcagaagagtactcgggaccattgccgggacgagaagcccatcaggctgactgctccattagggagcatcgcaag

SEQ ID NO: 208044 - DNA, 122 bp, Homo sapiens
ttcctttttgttttctctctttttcccctctcccctttctgctctcgggatgcagccaaacgcaaagcatggaaactaaaccgtgttggtagcctgcgaaatatatacagcagcagcaccaa

SEQ ID NO: 208045 - DNA, 122 bp, Homo sapiens
agattctctgcaaagccctggcacaggccccgtccctgcagctgtttattgacgctgtggcggccgagacggcatgtttggaaatctgcttggcatggagactgcggtgccctgaccactgc

SEQ ID NO: 208046 - DNA, 122 bp, Homo sapiens
aggccttccaagaccgaaaaggcaaaaagcagtgtgaccaccacatagcccttgggagtccgtgcctttagtttcttctgtagcatgagccacaggacaaaaatctggatggcaagtgttcc

SEQ ID NO: 208047 - DNA, 122 bp, Homo sapiens
caaactgctatgtggatttttttttcctctacccaagtttgtatcaatcccaggcactatcgtagctaccaatctggcacacgtgacacactttggggctgagatcagcattttacataaat

SEQ ID NO: 208048 - DNA, 122 bp, Homo sapiens
tcgagctagctctcgagatcagcgagaggttacttccggggcggcaccgagaagctgaaacggaagtggcgtacggcatgcgccggtggcgtgatggagcggcagcagcagcagcaacagca

SEQ ID NO: 208049 - DNA, 122 bp, Homo sapiens
actgctgaggactcgcccgtgtgcggggacccgagtgccacttcccggagcgttaccttgcgctccagcctccaggctagataatacctggaaggcagggcagggctgttcccgctctcacc

SEQ ID NO: 208050 - DNA, 122 bp, Homo sapiens
tgtttcgtcttagtaaagtttcaagtctactgtgttagaaaatgactggcttgcctagctcggcggagcttcggacccctctaaggaagaaaaggaggttttgatgctcaacattgagagag

SEQ ID NO: 208051 - DNA, 122 bp, Homo sapiens
agaaattagggccaacgagtggtacaactggattaaaacctaggcttctggccccagagccgcacactaaactgctgtgcttgagcgctataaaataaccacatttatttatgtattttctc

SEQ ID NO: 208052 - DNA, 122 bp, Homo sapiens
ggaagcgcccaaaggattccccttcacgttggtgcacctgctccatagctccgggcgctgcgtcccgaggggccacagtctccatttcagcgtcttgcatggcctggcaccgggtggggtgg

SEQ ID NO: 208053 - DNA, 122 bp, Homo sapiens
gagcagggactggaaatacaagagcgagcgggtcctaacgcaggttgccgcgggacccgacgccccgggcccggacaccctccccggggacgcgggcgcggcgggcccggctcccagacggg

SEQ ID NO: 208054 - DNA, 122 bp, Homo sapiens
gctgccctgccctgggggatgccaggctggactcccatgaagaaaggctgaccatgctcccggagtcttggccccagcgctcatggtctgtggtttggggcaagctcgctcatttcttcatg

SEQ ID NO: 208055 - DNA, 122 bp, Homo sapiens
cggctcgcgcccgccggtgtctaacaggatccggacctagctcatattgctgccgcaaaacgcaaggctagcttccgccagtactgccgcaacaccttcttatttcacgacgtatggtcgta

SEQ ID NO: 208056 - DNA, 122 bp, Homo sapiens
aagaaattaattttccacttattcataaaatattctagtgctgtgatgggtggcaggcaccgtgccaggggctagggacaaggataagcaaggccaggtccgggcctccaagcagcgcgctg

SEQ ID NO: 208057 - DNA, 122 bp, Homo sapiens
tggtggctccggccaggtaggagctgacatagtggtgccggtccctggtgcctctggacccggcctcctggtagcacagcaccttcaagtcgggcagccggagttcttccctcctgcgccat

SEQ ID NO: 208058 - DNA, 122 bp, Homo sapiens
atcacaagtgctccctgagggtgggccaccactcgtcggctgcaaattgtagcctgggaacgctccagccgtatttcagctcgccttcggggatcgccgcctccgaagggcaacaacaagca

SEQ ID NO: 208059 - DNA, 122 bp, Homo sapiens
aagaaaaaaagaatctcataatgtgtgaagaaaatttataaatttgtgttgggctgcattcgaagctgtcctgggccacatgtggcctggggactgagggttagacaagcttggtctaaaag

SEQ ID NO: 208060 - DNA, 122 bp, Homo sapiens
catttagcctgatgacccctggccaggttcagcctcaattgctccaaagaactccggacccgtaccccgagcccggcgtcccagcggcgaagttgatgggccccgcaggagcccttgcggtg

SEQ ID NO: 208061 - DNA, 122 bp, Homo sapiens
agggcttcacaacctcctctttgggttttatataccattttgacaaaggacaatatattgcggagaactgcctagacaaaagaaagaggggtttggactcctggggcagtaaattgtaggaa

SEQ ID NO: 208062 - DNA, 122 bp, Homo sapiens
cttgatttcatcacttgactcacttcagcgcagctagtggtttccgtttctgtacgcgggcgctctggtaggggcgcctcacgtccaaaggaggagtcttcttccaaagaagagcctttggt

SEQ ID NO: 208063 - DNA, 122 bp, Homo sapiens
agtgcacctgcaggaccgggtccctggttgtgttattaaggttctcgggtgagcagaccccgtgcgggtaatgaaatcgcggcagccacagccagcagccccgacgccttcccgccgttgcc

SEQ ID NO: 208064 - DNA, 122 bp, Homo sapiens
ccagcgcacgctgggcaggggcgcagccttggcagtgcagtgaatgtgaatgctgagccccgggggcagcgagatgttctccagcttctcctggtggataacggggggcagtgccgccacgt

SEQ ID NO: 208065 - DNA, 122 bp, Homo sapiens
gtgcgcggactctgggaggcgaagcttaggacgggcccacttggggaggggcccagtgcccgggaggcggggccgagtccgggctgggctgcgctcaggaggcgggccctgggaggcggagc

SEQ ID NO: 208066 - DNA, 122 bp, Homo sapiens
tacagaaatgtgattgcagatctcttgcaatttcattctgctttagtgtcagaattcatccgacaacgtgccaaaaaaaaaaaaagtgtgtaaaatcacatacagatttagatacttcaaga

SEQ ID NO: 208067 - DNA, 122 bp, Homo sapiens
tgggcgctggtctcaccgcccccgccctgctatcgtccctacctccttccagccctgcggcgtgcgcgcaggccagcccaacggaccctctgatctacctgatcatctgcccactcccggcg

SEQ ID NO: 208068 - DNA, 122 bp, Homo sapiens
cttaaccacttttaaccaattcttatttcagtctctccttcacccccactcccagaggtacgtggtgctatcattatcagagccattgtgggggcgtcttcggtgcaaatgtggttatcttc

SEQ ID NO: 208069 - DNA, 122 bp, Homo sapiens
cctcctcgatcccccttaacaagcagcagcactgtgtgggagatccacatgtgaatagcccgtgtttgagaaatgtccaatcctgatcatgtcaggaaacatcctgcaaattctgaaatcag

SEQ ID NO: 208070 - DNA, 122 bp, Homo sapiens
gccattgtctgcgccaggcgccgccttggcagcagaaggtgacatctggtgactaatggccgcggctgcgcgccgcgctcctccctcccgcagcgcccggggcgcagctgccgcgccgcctc

SEQ ID NO: 208071 - DNA, 122 bp, Homo sapiens
accggagtccgcctccgcccaagcccctgcggttctgacctgagccttcagcccgcagcgcgcctcccttgagcccaagcactgggaacacacagagactgtgggagtctctggccataagc

SEQ ID NO: 208072 - DNA, 122 bp, Homo sapiens
agggaggatgcggtcaggtgaggaccaaggtgtcagtccagtctcagcacttccgggacacgttagagcgtcgtttgaacctaatcttagggcttgtatggcagccttatttcagctacatt

SEQ ID NO: 208073 - DNA, 122 bp, Homo sapiens
cggaatggctgggctccgagaagggcgccgggcccacgggcgggacggccagggcggccccgcaccctctgggcgcaaatttctccagcggggtccccagcgcggccagccccagtctcgcg

SEQ ID NO: 208074 - DNA, 122 bp, Homo sapiens
gatggaactggatgagctcagactgcagacatccttctttccagtagctccctccaccaccgctgccgccccccgcaacgccgcttccggagtttctgctgccggttcctggggttttgccc

SEQ ID NO: 208075 - DNA, 122 bp, Homo sapiens
cactaacgcgtcttccgctacgtcaggccgtcgcgtaaacgccctatccgccgccaatggcgggaaggctctacgccccaccttacgccaaatgcgtactcctcccacccttgcggccagag

SEQ ID NO: 208076 - DNA, 122 bp, Homo sapiens
tttttgctcattatatatatttttttagtcaatactatccctgctttcattgagagcctacgtattcagaaagcaaaagagaaactttttttctttgataatagactttcagactatgtgac

SEQ ID NO: 208077 - DNA, 122 bp, Homo sapiens
tcgcggagcaggttctcgggtggccaaggcctcgcgtcccgggcacccctctcctatcagcggccccaggacaccagaggggtcattcccgcccagtctttggggctgaggccgcggaggat

SEQ ID NO: 208078 - DNA, 122 bp, Homo sapiens
ccactagagttggtcaagccagtcctgagaaactgctcgaggccaagatagggacccacccgtctcttatgaagaaaagccactgtccccagctgcttcctgggctcagacatccaccagga

SEQ ID NO: 208079 - DNA, 122 bp, Homo sapiens
ttggcaaccttaacagggactcaccatccctattattcttattaatgcttgggagaagtacgaataatagggataaacctgccctacacctagagctcttgttggctctgaccagtggtcaa

SEQ ID NO: 208080 - DNA, 122 bp, Homo sapiens
aatgtgcagatcatcagtgcagtgccgtgggtagaaatataactttttaagccagagagacgtgggtttgaacagacagttccccacagtgagaccctgggtgaggtcacgggaccatttat

SEQ ID NO: 208081 - DNA, 122 bp, Homo sapiens
cccacggacgtcccgggtcccccccgcgagtctccggctccaagatccaccccgaggctgcgggacccgccagatcctcgacccgggagaggcccaggcgcctttaccaggtttcattttcc

SEQ ID NO: 208082 - DNA, 122 bp, Homo sapiens
attaaaatgataaaaagaaatggtacttacttctgctgatggagtaggagacaaagtcctcggagactagaaaaataaaagagaatttaaagtcacaatgtttgttaactctttgccgtttt

SEQ ID NO: 208083 - DNA, 122 bp, Homo sapiens
taagtcacaggaagagcctgtaagatgttggggcccctggcaggagccctcacacagtggcgggaaggaggcagaggcctgtctgcactgaggactggggcaggaagctgaggctggcagga

SEQ ID NO: 208084 - DNA, 122 bp, Homo sapiens
ctaacactctagagaaggtgggaagggtacagaaaaggcaatcattgtggaaagtagtcacgaaatggaaatgttaatttccattaacatgagaaagagagggagaactttgcaaaactctc

SEQ ID NO: 208085 - DNA, 122 bp, Homo sapiens
ccctccctggccaggtcaattctcgagagagcctggagtgtgcatgctggctgctggccccgggtccagcatggcttgagatcagctttggaggatcttggaatgtggtcataaggactcaa

SEQ ID NO: 208086 - DNA, 122 bp, Homo sapiens
tgtctgggaagcagctctctccagtgtagccactcaacacggctggtttcattgcagcagcgcacgcccacctgtggccaccccggcctcctccccgacacccacacggaaggccgtgtccc

SEQ ID NO: 208087 - DNA, 122 bp, Homo sapiens
tccagggtgaagccaccacctcctgcaaggtttctgcaacattcattccatacctgggaccgtgctcacttatgggcactcccccaaccccgctcgacagcaagcttggacctttgcattgg

SEQ ID NO: 208088 - DNA, 122 bp, Homo sapiens
ccgagcaggttcagaaagtgaagtaaaatgcaggaagcaggtggctctgaccgtgtccatcgcactgccccacccacacccagccacatgcagcagccggcccctgggggagcatggggacg

SEQ ID NO: 208089 - DNA, 122 bp, Homo sapiens
gttgcctggaagggagcattgagcaacgtgactaacgctggcctgggtgtcagacgacagcgcagcactttaaccaggatccgggtgtgaaacatgacgcggctgcttccttcccaagctct

SEQ ID NO: 208090 - DNA, 122 bp, Homo sapiens
caggcggcgctggagatggagacgatggagacggtgcagacggtgcagacgctgccccagcgcattcggagcggagccccagggaacggctgagggaacaggaagcagagaaaacgggagcg

SEQ ID NO: 208091 - DNA, 122 bp, Homo sapiens
gcggggcacacaccgtatgcctcgttgatactaaatgcaaaaccaggcgaggctaatccacggagatgaaagtcagctgggggttactcttggcagcagatgtgtctggaagggagtgcggg

SEQ ID NO: 208092 - DNA, 122 bp, Homo sapiens
ttttagctttataggaatgctgttgctttaaatccgaaatcccgtgccggtatcaactctcgcgatctccgaggccgcatacatattacccacaattccctttcctttctctctcctcccgc

SEQ ID NO: 208093 - DNA, 122 bp, Homo sapiens
acaaacaagaagtaacttaggttttcctgagcaggtgcagaaattatttaggcctctgagcgtcgctgttgaccacctaaggagtaaaaggcagcgagacatccaatccagcaatacggctc

SEQ ID NO: 208094 - DNA, 122 bp, Homo sapiens
aggaggaaggggaggggggtctgcgctaatcgactctggcgcccacataaggactggccacggactgaaggagaggacagggaagtaggggggaactggggtggggggcgagggcacccact

SEQ ID NO: 208095 - DNA, 122 bp, Homo sapiens
ccacagaaatctagctctcttttctatttgatgtttaggaactcactgtggagtagggcacggtctttacagctcctcttttttttttttttttttttcctgtgccggaatacaagcccaaa

SEQ ID NO: 208096 - DNA, 122 bp, Homo sapiens
aaccagatcaaaacaactaaaaatcagcgacttctcttggttccatcatacaactgaggtcgctcgtctctctgtcctttggtcatttatcccgtggttgcatatctatgttgtctctagta

SEQ ID NO: 208097 - DNA, 122 bp, Homo sapiens
ggcaggtatgaccgagagctggggcgggagcgttgacctgtcgggtaaagccagccctaccgctcgactcagttgcacgcgcagggagtgtgtgttcactctgactcggcccggctccccgt

SEQ ID NO: 208098 - DNA, 122 bp, Homo sapiens
acgattatactccaaagtgcaagcggaatcagcaaacaacttaggcagcctccacacttccgagaccccattttgccctgcttagaacctgcgggagatttcaagagtatacagtcacagaa

SEQ ID NO: 208099 - DNA, 122 bp, Homo sapiens
aggttcgcgcccagcagagacgaccctcgaggtggcaaagttgggtgtccaagccagctccgcggggcagtcctgggtgggagaagggagcgtcccgggatgagcgacactggccgggccgc

SEQ ID NO: 208100 - DNA, 122 bp, Homo sapiens
tctgtgccccgagccgcccaccccgccgcgcctgtgacgccgggctctgccccccgtggacgcccgcagccctccagccgtcagagccctctcagacgcaccccatcgcggccccgtcccca

SEQ ID NO: 208101 - DNA, 122 bp, Homo sapiens
attgcctatagtggtataaaacacagggcaggagcccagccgggctgcagaggagacaaccgtgagcgtcccgcgccgaagcgaagcgctccagaaggacgcgcttttgcgggctgcaaggt

SEQ ID NO: 208102 - DNA, 122 bp, Homo sapiens
cgctaaacttctcacttccggagtgctgcaagcgcagaaaatatacgtcatgtgcggaggcggagcttccgccctgcgcgtcgtattagacggaaaccgagcgggcccatttttcatgggtt

SEQ ID NO: 208103 - DNA, 122 bp, Homo sapiens
gaatcctggaacgcggcctcccaggcccccagctatggagaagactccacactctggaaccggatcctggaacgcggcctcccagcctcccacttaaggagaagtctccacactctggaacc

SEQ ID NO: 208104 - DNA, 122 bp, Homo sapiens
cagggagggtttagactactggttagagtgccattcaattactcggagttggacctctcccgaggacacacacaaaggccagggagcgcgagtgcgcgttccctctcccagagtgtgtgtat

SEQ ID NO: 208105 - DNA, 122 bp, Homo sapiens
tcttccgcatcctgccaggaccactccatttgtgggcgatatagccagctccacctcctccgggaagcccttgttcacagtttccaaagcaagccgcaggcgggatggatcctgcttaacac

SEQ ID NO: 208106 - DNA, 122 bp, Homo sapiens
taagttgggtgaagttcctggggcttaggtcctgatgctgcctctccagggcagtgcagtcgggagagatcactggtggggaagtgcccttctcttaggagaagtcctaggcctgccctgct

SEQ ID NO: 208107 - DNA, 122 bp, Homo sapiens
cacctagcaggcgtcacagggctcactcaagagctccagcaagagcagaggcgggagcctcgccagcccctccacagaccacagcgaccgcgcccctcggcccggaggccccgccctcccca

SEQ ID NO: 208108 - DNA, 122 bp, Homo sapiens
gagcccggagctgattgggcgcgggcctggtgggcggggccgggccgcagctgtcagagccgcggcggcgaacgaggcgcagcgagctgagcggtggcagcgccgcagccggggccggagcg

SEQ ID NO: 208109 - DNA, 122 bp, Homo sapiens
aggcccaccgcccagacccggagcagtggcagcgcggtgggcaccagcagggagaatatgcggggcagcgcggtccggagcagcacccagtcggcgagaagtagcagtactgtccccagcca

SEQ ID NO: 208110 - DNA, 122 bp, Homo sapiens
tgcagcactcggccctacctctaccccgccgctacctctaccccgccgcggcgccgacagcgagggccccgcctcccccagctggctccagagccaagccacccacagcaggaaagccacga

SEQ ID NO: 208111 - DNA, 122 bp, Homo sapiens
gaacacactgcattgtttatttcagataaaccctttgctgtattcaatccccagaaaacacgcatgacaattaacatccttgcagaagacattgggagacggcaggaaatttcaagtaggaa

SEQ ID NO: 208112 - DNA, 122 bp, Homo sapiens
gagattttaataaatcatcatgaagctgcaggtagtggagccagggtcttccatcaaagccgtatggctccagaatcatctgttaagctgattccctgcaagtggcaaataaatatattagt

SEQ ID NO: 208113 - DNA, 122 bp, Homo sapiens
cgcgccggggcggggtcaggccgaaccaccggtggccgggggtgggaggcggtgctccggcgagggccgggcgctgggtgcgagggggtcgccgggggccaccgttcggcactgggccgcag

SEQ ID NO: 208114 - DNA, 122 bp, Homo sapiens
agggccgcgggacggtgccggctcgtgggtcacacgcacccaggaggctcctggctcccgcgtggcggctgttccagcacgccctccgacccgcaaccggaccctccagacatcagactcag

SEQ ID NO: 208115 - DNA, 122 bp, Homo sapiens
atgtgctggatgtcatggagggccggtgacatctagcggggaggtgggcggcgagggtcccggcgggagccaataaagttggtgaaaatcgtttggtcgagagagctgtgtagtcgcgggga

SEQ ID NO: 208116 - DNA, 122 bp, Homo sapiens
ctcacacgcctctaccagcctgctagagtcctggacagtcagggcacagatgggcccagacgggggaaagagccggtcctgggtcacagggctcatcccggcagcctcacgccttggtataa

SEQ ID NO: 208117 - DNA, 122 bp, Homo sapiens
ccccttgtcattgcaacccgtctctagaatactgtggtaattgaaactagcatgtacctgcgccccctcccggggtcctatctttgtcacccacctcccccatggctactgcttgtcatatc

SEQ ID NO: 208118 - DNA, 122 bp, Homo sapiens
tgctgccctcccccagcccaggcccttgtggttgccaatgaaggccgagagccctagctgcgggggcagtcccgctgggtgtctgcgccgtccacggcccgggagcgcaggagcagcctcca

SEQ ID NO: 208119 - DNA, 122 bp, Homo sapiens
atgttacatcagggacttgggcaacctcagatttgggtatccgcatggagtgccctctggcgcttgacttctaccgcggccatcgcgcttccatccgccaggtggcgacacagccggcgcgg

SEQ ID NO: 208120 - DNA, 122 bp, Homo sapiens
ttatgtgctaaaccattagctctgactcaaatccagcttcctagtctctcatcagccctccgcctgggctaatgagcagaggtgaaatcactggataagtggctctcaaagtgtggccctca

SEQ ID NO: 208121 - DNA, 122 bp, Homo sapiens
tcatattcccctgccgccgcctctatgcccgagagcatcgtcaccgcctctgctggtctgcgaagacaccggagcacaggggtcatgaggattcatgagacgtaatgggtgctataggggac

SEQ ID NO: 208122 - DNA, 122 bp, Homo sapiens
ctgccgccgcagccgcgccagcctctcctgttccgccttctcgctctcccgcttggcccacgccagctgctgctcctcattgccaaactgcaaaggaaaaacggagagtgggtgatgtggcc

SEQ ID NO: 208123 - DNA, 122 bp, Homo sapiens
ccggcgacgtcactgccgccgccgccgccgcctccgctgcacccgccggccccgccgcaccgccagggaccctggttctgccgtcgtcgctccaagaccgacagggttttctcctcacagct

SEQ ID NO: 208124 - DNA, 122 bp, Homo sapiens
gtggattggctagggcagccggtccgtgcaaggcgggggcggggcctcggcggctggttgcgcgtgtccgacgctggctccgctctatccggctttgctaggggaggtgagtccggccgcgg

SEQ ID NO: 208125 - DNA, 122 bp, Homo sapiens
gccagtcattcaactcccagttctcttacactggactgtttgtgttacctgtctggcctccgcaggcctttgagtttgtgatccttaatgtatgcctttttaggcataatgtggagaagcac

SEQ ID NO: 208126 - DNA, 122 bp, Homo sapiens
ggtgagaggaactcactgtctacctagaatgtcccaattccagagtcttcccgagtctcccgtgtttcagtgagcaccagtgtgggggatgggatgggtcctgtagctttatggaggtaggg

SEQ ID NO: 208127 - DNA, 122 bp, Homo sapiens
tagggatccaagtaagaggaggctcttagctgttaacaggattcgcttgaagagatcagtcgttcctttcctgagtactccgcagagaaaaatcagacatagccccaatgcgcaagtcacag

SEQ ID NO: 208128 - DNA, 122 bp, Homo sapiens
agccatctgatataatgttacacatcagtgggtgtagtaacggcttaggactctgagcgccgctgttgatcaactctaagcgaaaatcaggactccatccggatttccagttctgcggctac

SEQ ID NO: 208129 - DNA, 122 bp, Homo sapiens
ctctccgggagggagggcagggctgggcgcggaggtggggcggtggcggtcgcggtggggcggccgggtccctgctcggcccggcacggccgggcggccagactgtggcagctgctgtgggt

SEQ ID NO: 208130 - DNA, 122 bp, Homo sapiens
cactctacaccacgtgagccacattattcaacattatctgagccatgccattctacatcacgtgagccacactattctacaacatcatattggccgcgttcaccccatgtcatacgcaccac

SEQ ID NO: 208131 - DNA, 122 bp, Homo sapiens
agagaagacggaggcacaccggggtggctccggaaggtttccaagcagggtgttgggaggcggggggtgggggtttggggggaacccacctaactgactcactaaatgaaggtaaagggacg

SEQ ID NO: 208132 - DNA, 122 bp, Homo sapiens
gcactaatatgaaatcacttaaaaggaaacatgccactttcggctaggggacagcatgttcgtcattcagtgtcctactggtttcttaacacgcatataattaatattggtactcaggaaag

SEQ ID NO: 208133 - DNA, 122 bp, Homo sapiens
ctaatgcagttgccacagaccctttctccttcactgattacagaatcataccaagcacagcggtgccgcaactgatggtggaagactgcctttcttcaggctaagaaagaagtactgcactg

SEQ ID NO: 208134 - DNA, 122 bp, Homo sapiens
tgttcaacttttgacttgcaagtttctttactctttgacttcatcttatttaaaacgattcgtggatttcatctttcagctaggtagttcgcactgccttttactcacagtagattggaatg

SEQ ID NO: 208135 - DNA, 122 bp, Homo sapiens
gcgcgctgtttcctttcttccctgggtgatctcctgcgtggccaaggtttgccccagccccgagagtgcatatgagctaagtgtttgctaggggcagcttctggccctgactgcttgtgggg

SEQ ID NO: 208136 - DNA, 122 bp, Homo sapiens
ggtctgcgccaggccgatctgcggggagaaagtgcctccgaagactgggttgacatggtgcgggaagttctggaagagcatggtcccgttgactggggtgatcccctggaagaagctgtcct

SEQ ID NO: 208137 - DNA, 122 bp, Homo sapiens
acaaaggagccatctagaattctgtgctcctaacccacttctgggaggcacgcaggcatccgatcttctcttaaagactgtaatttattatgcctcttttaagttaaagaggctctctgagt

SEQ ID NO: 208138 - DNA, 122 bp, Homo sapiens
ctctgaggtcagtaggcggcacgcagcttccaagtgattcctaatgcctttgctgtcttccgtaccaagtcagccacaaacgccggcccgttatctgagctgattcataagggcagtccaaa

SEQ ID NO: 208139 - DNA, 122 bp, Homo sapiens
tttctgttcccgagctgccttcggacccgtcggatcgtaaatcccacgtaaggtacctgccgtcggaagatttgaactttctacttggacacctaatacccacagtcctccaggtgggtcct

SEQ ID NO: 208140 - DNA, 122 bp, Homo sapiens
gggcgggcaccgaggtgcttagggagggtcccaacggcccagacccctgctgtttaggggcggagcggcccgcccctcaagagacaagagtagggaaggcgggacaggtgagtccctccccg

SEQ ID NO: 208141 - DNA, 122 bp, Homo sapiens
tgcccaccttatctttaaaaagttcaaatgtttagccaaccgggattagtttagaatttacggcctgaacccagccaatggggaaagggtacaggcgcacttgcttcaggaataaaggctct

SEQ ID NO: 208142 - DNA, 122 bp, Homo sapiens
gcaaagggaaaacacgctctggacacaaaggcagagatgcagagaagaaaagaaaggaaacgggcatgtgtgggcataccagtctggtagcccagtctggggtaaaaatcaagttggaagag

SEQ ID NO: 208143 - DNA, 122 bp, Homo sapiens
ttccttggtggaagcaagtggaaactccagaaaaaaaagttaaactgctcgtctttgtcacggaagcaaggaaatttgccttccttattggaagagagcaaaactccagaaaaggagggttg

SEQ ID NO: 208144 - DNA, 122 bp, Homo sapiens
aaatttaactgggcgccctgtattttatctggcaccactatgtggaaggcaggggttccccgttgcgcctggcttcttcccagtaggtgctcggcgtctgtatacttgttagagcgaaaccc

SEQ ID NO: 208145 - DNA, 122 bp, Homo sapiens
cggttcgccaatgtggctgggtccgtaggcttgggcagccttggagttcctcagagaccccgcgctcggtcccggcacgcactcacgccgcggctcctggtggccctggagcgaggagtccg

SEQ ID NO: 208146 - DNA, 122 bp, Homo sapiens
gcaggggggaaaggggtggatagatttgtcttgggaagagaggaactgtgcaggtatagtcgagacatttgcagactgaacaacaacaatctgccttggcaatgtttgacagtaaaaatcgc

SEQ ID NO: 208147 - DNA, 122 bp, Homo sapiens
aagaaggaggcggagagccgagctggcgtaacgagactttactgaaaacagaaaaccgggcgaaccaaggattacaaacaggaatgtggactcgtagcaaaacaaaacaaaacagaacaaaa

SEQ ID NO: 208148 - DNA, 122 bp, Homo sapiens
aaagcggcccccgccccctaccgccgcggagccgcccgccaaggcagtcaaggccccgggcgccaagaagcccaaggccatccgcaagctgcacttcgaggacgaggtgaccacgtcgcccg

SEQ ID NO: 208149 - DNA, 122 bp, Homo sapiens
gcgtccaacgagcacggctctcaaccggcctcctggcgcccaacgaccatggcttccaaccggcctccgtgcgcccaacgaccatgactcccaaccggcctccagtttccaactgtttctcg

SEQ ID NO: 208150 - DNA, 122 bp, Homo sapiens
tcaccgcctcggtgttgaatggtccccgaggcggcgagggcccggcgttgcttctggggacgccctcctccgtctgtacttactcagaggaggggccccacgcccagaggcgcccgcagtga

SEQ ID NO: 208151 - DNA, 122 bp, Homo sapiens
cctgccgccgcttcaggttggtctctccatccaggttggcggtctcgatgtggcatagcccgtcggggtcactggaggagagcagcagaatgtccgcagggaagatttcgttgcagcgaaga

SEQ ID NO: 208152 - DNA, 122 bp, Homo sapiens
cctccccctcccgcagacgccgccaccaaagttcgagccgctcctccccagcccagcgcgcgccccgccccgtgccccacgtgcagcgcccccaccaatgggcgcaccgcgcgcgcggaccc

SEQ ID NO: 208153 - DNA, 122 bp, Homo sapiens
caggtaaaaatacctgggtgagatttgactactctctccagaccctgtcttagttttcctcgacccctaatggatagaaacctaatttcttcctctcctgtgaagcagtgtgatcaaagtct

SEQ ID NO: 208154 - DNA, 122 bp, Homo sapiens
accctgattggcgcttgcttggatattaacagtttgagagaggcttcacgtggattcccacgtgtaccaacttgaagcaaataacgatgaatatcttgaaactagaagcagtggctctacca

SEQ ID NO: 208155 - DNA, 122 bp, Homo sapiens
gggtgagctactgtgcccaaccaagatgagtctctctctctctttttttttcttttgagacggagtctcgctgttgttggccagggctggagtgcaatggtgctatcttggctcactgcaac

SEQ ID NO: 208156 - DNA, 122 bp, Homo sapiens
gcctctgtggggaaacatttgccttcggcttcgaaagagcatgtacaacagttttataaacgccacccagggagccctgctgtagtcctgcctcatgacttgatgacctaagagtactacga

SEQ ID NO: 208157 - DNA, 122 bp, Homo sapiens
ttcaatttccgaagattttgataaaatcatgcggtttaagagccgcaggatggagcccggcgggcggagcgtaatgaaatgctgctgtttcacagccttcacgtggcacagcccagctccgg

SEQ ID NO: 208158 - DNA, 122 bp, Homo sapiens
cgggatccggggttgccactgctgcagccagcgcaccacttgcaggtggcagctgcagctcgggctccggcgggggctggcggggctcccctgggatggcctcctgggccctgagtgcgccg

SEQ ID NO: 208159 - DNA, 122 bp, Homo sapiens
aggtccatggaggggaagatcaacagctcaagctcagagagaaatatgtaccctgaaattcgagatgcctcgtgctaattcccatggagactggtgtcaggtaactgaggacaagaccgtaa

SEQ ID NO: 208160 - DNA, 122 bp, Homo sapiens
gacgcgccccccgccccctggagtgatgggtgggtacctgttgaggaaagcgttgccaaacgcgttgagcttgcggaaggggcgccgcgggtccaccacgagcgcgttgcccggcaccacgc

SEQ ID NO: 208161 - DNA, 122 bp, Homo sapiens
acctgccctggttccctggtccacctcccagctagtagagttccctgggaaggggttagacgcctctaagtggcagagaggggccctcattcctgccccaaaggtagccttctcccctcccc

SEQ ID NO: 208162 - DNA, 122 bp, Homo sapiens
tttgagatggggagctacaaaagtaagacctgatgtcctgctgtgtaataaaacaacaaacgtttggccctctccctgttaacatacttaatcatttaatactaaggagtaggtaccgttat

SEQ ID NO: 208163 - DNA, 122 bp, Homo sapiens
tggtaagccctatggtgcgctatggtaagcgctatggtgcgctatggtcagtgtatggtgcgctatggtcagtgctatggtgcgctatggtaagcgctatggtgcgctacggtcagtgctat

SEQ ID NO: 208164 - DNA, 122 bp, Homo sapiens
atgtatgaatgggtcctcgaagaatgactaagactctggagacaggacagagagaggaggcggcattccagacagaaggaaggtaatgccaagacacacagagagaggtgtgtgctcgggcc

SEQ ID NO: 208165 - DNA, 122 bp, Homo sapiens
tccacaccttgtggttactatgcagcagggggcgctgcagtagtgtacatcgcggtgcaccggagctactctcctggccagaaagccaacaagccgggaggaggcgtgtcaggcagccctgg

SEQ ID NO: 208166 - DNA, 122 bp, Homo sapiens
ggctggaggctgaaggctgcgtcctgggtgggacaggagtcggtacctctcttcatttgacgctctctgggattggggaactggccttccacagagagactctgtttttgagcacatctgga

SEQ ID NO: 208167 - DNA, 122 bp, Homo sapiens
agaagtgtctggcttctgctctgaaagattctgatttattggtctgggatatgacctgagcgatgggatttttagaagtttcccaggtgattataatacgaagccaaggttgagaaccacag

SEQ ID NO: 208168 - DNA, 122 bp, Homo sapiens
ctaaggaggagtcgttctttgatactcagattccacagtgatgatgtttctgggatgctacgcctgaagtgtgatctggtttagattttttaatgtaagcctagaatcccaaggatctgcca

SEQ ID NO: 208169 - DNA, 122 bp, Homo sapiens
ggcagcgctggcagccacccgggccacggcatgcgaggagccgtggcgcggcggcgggcgcgggactgacagccccaggccccgcctccagaccccgggccccgcccccttcctggccgcgc

SEQ ID NO: 208170 - DNA, 122 bp, Homo sapiens
tcatcgtccaagatgggcaccaaggcctaaagaagaaaatagcatctcattttcgcattacggcatgcaggcaacttgctcaggaatgtgaattccacctaaacgtttgtttcatgttttat

SEQ ID NO: 208171 - DNA, 122 bp, Homo sapiens
gagctcctcaccctggtgattgaacagtctccatattctagtgaagagaattcccattctcgggcagcggaccccccccctccagacacccgggccgcctggcttcccccggctcaggctga

SEQ ID NO: 208172 - DNA, 122 bp, Homo sapiens
tagaacctgcatggacacatagcctgcgtggacacatagcctgtgtggacacagaacctgcgtggacacagaacctgcgtggacacggaacctgcgtggacacatagcctgcgtggacacag

SEQ ID NO: 208173 - DNA, 122 bp, Homo sapiens
tcagcaataggtgctgaacaccatttgttgattttacttaaagaaaagcccatcaggaaacgtaagccttgtatgctgaatcgagattccttcccaaatcctttaatgcatacgtggtgcca

SEQ ID NO: 208174 - DNA, 122 bp, Homo sapiens
tgtgaatgaaagaggcatcttggacattccagactcaatagatgcaatgtgggaaagaaacgaggatcctaatagatagccagaacctaggcctcaggcaaaggaccccaagtgagctgtcc

SEQ ID NO: 208175 - DNA, 122 bp, Homo sapiens
gcaagggagacggagctgaagagttactatgtcaacagagactctccagccctcagctcccgccttcatcccccgcactctccgtcaagatccccacctttaaagggatccgagcgacgttc

SEQ ID NO: 208176 - DNA, 122 bp, Homo sapiens
gcctgcgcctcggtccgggtgggtctaaggatgatgattgatccgccgtgcgcacgccagcgcgttcctctgtggcaggagaggggggcctgcgtgtgaccgagcgtgcgtgggaggacgcg

SEQ ID NO: 208177 - DNA, 122 bp, Homo sapiens
ggggcgcttggagggccaccggcggcttcgaaagcttcgcagccggaagccgccggttggcggcctggatttaccttacgaaaggttttaaccaaggacttgaggtttctcaggttttaaat

SEQ ID NO: 208178 - DNA, 122 bp, Homo sapiens
cccgcacccctccctgggtgagcgcaggccccgcacccctccctgggtgagcgcagccaccgcacttcaggctctgggtccaggagaggtacaaagaagcaaggatgacagaaccctggtgg

SEQ ID NO: 208179 - DNA, 122 bp, Homo sapiens
agtcggggatgagactcacgggagataaggcaagaacagtagttctcgaagtgtggtccacgaacccctagggggcccaaaacgctttctgggggtgggggaggggcagcaagctctagttt

SEQ ID NO: 208180 - DNA, 122 bp, Homo sapiens
ggcgtggtggtgggtgcaggtcgccgcttgggctgaaaacagtcttactgctcttagagtcgctgtgtttgagattgagaatccaggttgcagggctctggtggtggctgctcctcagtgtc

SEQ ID NO: 208181 - DNA, 122 bp, Homo sapiens
gtcagcggcagcggcagtttctgggcgccaagtgtgattggagtactccaggaagaggggcgtgaccagagctctagcgaagagacctgacattgtaaagctaggtttggcttctgatttcc

SEQ ID NO: 208182 - DNA, 122 bp, Homo sapiens
ctccgcgggactcctgggccggcctcgccgcctctccggcggggaaccttccccagcccccgtccgcacagatccctagcgccccgagcccccgcccttcgcgcctaggcgtgcgccggctc

SEQ ID NO: 208183 - DNA, 122 bp, Homo sapiens
ttaccaggccccccgcctgagcctcgacttctgtcctgtggccacagtgtgaggaacgaacgcagcagcgtgtcgccatgtcttgtgtggctgggatacgctgcaggggtgtggagtcgccg

SEQ ID NO: 208184 - DNA, 122 bp, Homo sapiens
cggtcaactcctcctctttcccaggctcctggcccagctgaacgaaaccgaggctgccttcgatgagttctgggcaaagcatcagcagaaactggagcagtgtctgcagctccggcactttg

SEQ ID NO: 208185 - DNA, 122 bp, Homo sapiens
ctccgagccccctgatctaagcccacggccgcccagcctcttccgggctcgcgcccgccccgagaaaaaggaaacctgatgccccaccagcctcgcaggtgccggggacacgtggaaaggtc

SEQ ID NO: 208186 - DNA, 122 bp, Homo sapiens
cggagaggggactgcggtcagctgcgtccacttggggctgtgcggcggtcccgcgcccggcgatgttcccgggcactccctgagtagcggcagcttatcccccgcccgctagcccgccctgg

SEQ ID NO: 208187 - DNA, 122 bp, Homo sapiens
tggggatcagggtggcttgcatggctcggctgcccggtggcccacgggctgtattcgcagcgggcagcacaaggccggctggagaccgcatctggttaccatggtcagtgggtgggaggagt

SEQ ID NO: 208188 - DNA, 122 bp, Homo sapiens
gaccacggcccgcgcccgggccccgcctcccctacctgaggccctcatggccggaggcgtcgcagcctccgcccaccagcgcgcctgccctgccattggctctgcgggctgcccgtctcctt

SEQ ID NO: 208189 - DNA, 122 bp, Homo sapiens
gtgcttgggcgttctctgttctctggtgctcccatgttccagaacacacactggtgaattcggaatttaaataaagctggcctttctgaccttaagcctctggatgagagttaagcatgtcc

SEQ ID NO: 208190 - DNA, 122 bp, Homo sapiens
ccacacctcctgctgtccccctctccgcaggtccagccctctcctggtggccgcgtttggcgcctgctctctcaccaggcagtgcaaccaccaagccttccagaagcacggtcgctccacca

SEQ ID NO: 208191 - DNA, 122 bp, Homo sapiens
ggtcgcagagccaagtctagctgctacaggccagccaagccgttacgcacgtgcagtgtgcgcatgccgagtgttacaggccagccaagccgttaacgcgcgtgcagcatgcgcgtgcaagc

SEQ ID NO: 208192 - DNA, 122 bp, Homo sapiens
tagtggtaacagactctcaattaggggctcaacatcatggtcgctgaacagaatcacggtcgctgaacagaatcacactcttcacgccgccttggagccaaaattagtttagccgcgagaag

SEQ ID NO: 208193 - DNA, 122 bp, Homo sapiens
tattagaagtgaagttatatcctgtgccatccatgtcccttcctacttccccatgacagacgtaagggtaagacttctggctaagggaaaggtgtacagactgtgctcctaaaataaaatta

SEQ ID NO: 208194 - DNA, 122 bp, Homo sapiens
acgagctggtcagaagccgtccccgcaggaaaggactgcagggagctggggtgagcttcacgggaggcggcaccgcaccgccatggctgtccctagaatccttgactctttaaaagagtgag

SEQ ID NO: 208195 - DNA, 122 bp, Homo sapiens
gcagagccacctgcgctgggatggttcccagagatctggctagccagtgccacaggaggccggggcacagttccagggcctagtgggcaaggcaggggtattcagggacaaggtgcacctga

SEQ ID NO: 208196 - DNA, 122 bp, Homo sapiens
cttcagcaccgtcttctccctgcacaactggggaaggagtatggactacactgtttttcccgaaatgtacagaaatgtgaagctataggcctgacaggatgtctagatagaaatagcttcta

SEQ ID NO: 208197 - DNA, 122 bp, Homo sapiens
tgtgcgcgcctcctccgtgcacccagggccaggcgttgaagacggaaggggcgattcctgcgggtgttcttctcggagctgaggttggcacgcaccagtttgtccaccggggggcactacgg

SEQ ID NO: 208198 - DNA, 122 bp, Homo sapiens
gctgttggggaaggcggctcaggaggaggcatttacaagaccttaaggaggggccggctgcgcagcaggggcaggaggagctttcctggtggaaggaatctcacgcacgaagaccctgagct

SEQ ID NO: 208199 - DNA, 122 bp, Homo sapiens
ctaatctatgctagttactgggggtgttgggggagacaggagagagatcccacggggttccggcctcccagggactcaggtcactaatggaggtggcttggcttgtctatgtgctgggccaa

SEQ ID NO: 208200 - DNA, 122 bp, Homo sapiens
gcagtggctcaaaggaccgagcgggcggtgcaggttggaacccgcggggcggaccaatcgcggctcggccacagcctcgcccgctgattggtccctccaggccccgcccccgctcgccccgc

SEQ ID NO: 208201 - DNA, 122 bp, Homo sapiens
gtgtgacagcattccaggccagccagatgggactgccttgtctggaggctttgttcatctcgaaggacacacacttccacactgtttgtgagccctcccacctccacaacttcagttgtaaa

SEQ ID NO: 208202 - DNA, 122 bp, Homo sapiens
ggccgacgaggacgatgaggaggacgacgacgagggagtactcgggcgcgggccgggccacgaccggggccgcgaccgccacagcccccccggctgccacctcttcccgccgccgccgccgc

SEQ ID NO: 208203 - DNA, 122 bp, Homo sapiens
gtaccttgtgtgatggacccgcggatgtggtgctgctctttgaggtggtgggggctgtgtcgctccggcgggatggcacggcccatgagacctgggtaggagagggtgaggccatcattccg

SEQ ID NO: 208204 - DNA, 122 bp, Homo sapiens
cgttgtatcttctatgccttgaagagtgctgcacagagtggcctcttattaaatatttcacgaaataatacatattcaccttcattgaagatgggactgatgaaaaaatgatgacagccgtg

SEQ ID NO: 208205 - DNA, 122 bp, Homo sapiens
aaatcaacaaaggtctgttgaggtcctgtgatcatattttctctctcttcttaattgtaccgctcattctggatgattttctatatccctacaatgctttttttaacacactcctgactcat

SEQ ID NO: 208206 - DNA, 122 bp, Homo sapiens
tggcgttcgcggggaggaacggggcctgccggaggccgcccaacggggaggggcggaaggcgccaccccgcggaggaggccccagtgccacagcccagggcccccgagagctctgggagccc

SEQ ID NO: 208207 - DNA, 122 bp, Homo sapiens
tccccaacggaccctctagtttgtaaccgtgcgaacactggagggattcattatgtgcaccgtggaggcgcggacatccacctgagtgtgcagaagcaggggagggacacaagagatagtcc

SEQ ID NO: 208208 - DNA, 122 bp, Homo sapiens
ctataccatcatgcccctgcctttgctagtttcttttttctttacaagacctctgaccatcgtccatagaactgctgttctgttgtctcctccctatcaactctcaggcttctcttaacatt

SEQ ID NO: 208209 - DNA, 122 bp, Homo sapiens
ttcctttctcgccactgcagaagcccataactgcctctgcctgcctaatccagagactcacgtcccagctgggagcggccatattgttttctgaaaccatggaaaccattcccgactctcct

SEQ ID NO: 208210 - DNA, 122 bp, Homo sapiens
tctcatggcacctctcatgaaaagagacccttacctcatttgctgtgttgtgtgtcccaacgatacggatgaaggaggcaggctgcctttcaaaagttactgactgccaggacctgtgagag

SEQ ID NO: 208211 - DNA, 122 bp, Homo sapiens
agagatcaaggagagtgatgggtgctgcccgcctctgaggggacggaggcagctgccacccgccgtgtccctcacgctggctttcagaaggcttcacgcaagtgggctcacaggcaagaaga

SEQ ID NO: 208212 - DNA, 122 bp, Homo sapiens
actgacctgtgttccttccctgttctcttttctattaaaaataagaacctgggcagagtgcggcagctcatgcctgtaatcccagcacttagggaggccgaggagggcagatcacgaggtca

SEQ ID NO: 208213 - DNA, 122 bp, Homo sapiens
gaccatcctggttaacacggtgaaacctcgtatctactaaaaattagccgggcgtggtggcgggcgcctgtagtcccagctactcgggaggctgaggcaggagaatgactgaaccccggagg

SEQ ID NO: 208214 - DNA, 122 bp, Homo sapiens
ccacatgtcagagcctgggccttgtactttaggaacattactgcttttttacagtcatttcgcagatagaagacattcaagtacttcctcattttgtgttgagtaccaaatacagagaaaat

SEQ ID NO: 208215 - DNA, 122 bp, Homo sapiens
ggatgttcaggatttatttaaagtaatctgaggaaaggaagaagcacagaggggatagagcgaccaggggtggataattattgaaactgggtgatttgcatgcatggttaaatatggtattc

SEQ ID NO: 208216 - DNA, 122 bp, Homo sapiens
aagactcagtctccaaatacagtcacattctgaggtgctgggggtcagagcttcaacatacgaattttgaagggatacaatcagccatagaactagctgtgtgaccttggcctctctgcacc

SEQ ID NO: 208217 - DNA, 122 bp, Homo sapiens
ccgaaaaccagacgccctggggcgcggggccaagtgcggcgacctcctgccctccctctgcggctccctggaaaccggcctggacaacggcacctgggcatccatgcaacgggaccaccgcc

SEQ ID NO: 208218 - DNA, 122 bp, Homo sapiens
agactccgcggactcgacgggagggaccctgcaatgcttaattagaaccggttgccatggcgacagtctctaggcagcgtgggctgagctctccgtaggaataaagggtgggccgccgctgg

SEQ ID NO: 208219 - DNA, 122 bp, Homo sapiens
cttgatcactctcaaacttggtttgtctgcccgacttagacatgcctacagcaagacgaccgatgcactccggcttcactgtgagttttgtttctttgtcgccaaattgccggggcaatgga

SEQ ID NO: 208220 - DNA, 122 bp, Homo sapiens
aaataaagacgtttggtggttaatgttcctttttctaaacttcatgtacagcagagcttacggtccagagaactcagtcctcaaagaaactgatactatagctatctaactggataccaccg

SEQ ID NO: 208221 - DNA, 122 bp, Homo sapiens
tcagcctgtttcctctgatcagcttaaataggtctacttgaagttcacaactgccaaaaccgcgtgttcagactgaaaggctgggagcatttcagacgcatttatgaacttccaccaagatg

SEQ ID NO: 208222 - DNA, 122 bp, Homo sapiens
cctcggccgccacccctcggtcccgcacggcccctgccgaggccaggaccggcagcccggcgcttctggaacagccgcagctggcggaaaagagccagagccgagtgcaaatagctagattg

SEQ ID NO: 208223 - DNA, 122 bp, Homo sapiens
tggtggcggtgggtgggtcgagtttttctctagaacaggcctgggacttgcccccactcacggtgacctctggatttggccggcggggccctgggacacgagctctgtgcccgcgaggggag

SEQ ID NO: 208224 - DNA, 122 bp, Homo sapiens
ctcccttcaggtttccgaggtgggtagagaggttccccctcctttgaggtcaaggctcctcggtggcggccacagcaaaggctccagtgtccgccgcagggcagagaccgggcctgtctggg

SEQ ID NO: 208225 - DNA, 122 bp, Homo sapiens
ctgggagccctgacttcttgtccatgttgattttcagagagtactgcttgtttattacagcgttacggaaaacccagctttgtatgtatgtgatgccgacagaagagacgctgtgcagtttg

SEQ ID NO: 208226 - DNA, 122 bp, Homo sapiens
gccttgtttacttttctccttcattcagctctgtcattcggtgttctcagagccatgccacggtgagtccacagttatccagggtctaagcctctatgcaagtgaggggatcctcaaggctt

SEQ ID NO: 208227 - DNA, 122 bp, Homo sapiens
cggctgggcaccgctgcagactgggcttcccaggcagcagaccagggtgtgcagaagctccgacggtgtggcctgggcgctccctgccccggcaacgcagggacaaggccggcaagccctca

SEQ ID NO: 208228 - DNA, 122 bp, Homo sapiens
agctcgtagtagcactgggggactggctgacatcgcactgtgtcccagaacccagcctgccgtcgccgcctcgggttcctggatgcacacagacagggctgggggactcaggaggtggggat

SEQ ID NO: 208229 - DNA, 122 bp, Homo sapiens
ggccgagtcctgggatgccctctgctgtgtcaagggagctgtgtccgtgggagtctcctccggggtggggtctgggccagacacaaccaacactggctggtgacgggcctcccctgagcagg

SEQ ID NO: 208230 - DNA, 122 bp, Homo sapiens
tgccaaggaggagactgtctgctccctggaattggggctgtgcctggctcctttctgccccgctttcagggatatgagtccctccaagtccacaggaggtgacagccagcttgcgtcctggg

SEQ ID NO: 208231 - DNA, 122 bp, Homo sapiens
agtccctgccgagcccattcattcctccattcgctccacaagtgtttgggtagcccctgccgtgcgcgccggactagttctcatagggtgtgttggttccctgtgggagaggcggcctggga

SEQ ID NO: 208232 - DNA, 122 bp, Homo sapiens
tctctgccctcgcaatcactctcaagtcctagagtaccaaacttaactgcagagggagcacgaaatggtgggtattttgaagcgctaatttttagggatcccctcccatccaaaacagggat

SEQ ID NO: 208233 - DNA, 122 bp, Homo sapiens
aggttggcatttgctctcatagctctcccagctgatccggacctccctgagctgtcgctgcgaccctgaagaccccaaggcctggccggaagagggtgctcttgcctttcccgcacacagcc

SEQ ID NO: 208234 - DNA, 122 bp, Homo sapiens
gtggagcagtcggggctggaggcgaggccgccgggcgggcaggggttgtggcgcggcaagcggcgggccagcgacggcgcgaatggcggactctcagctgttctgtgtggcggaggaacgca

SEQ ID NO: 208235 - DNA, 122 bp, Homo sapiens
gctctcagctgcgcctgccgcggccactgccagccgtgccgggggagctgaccgaggccacgcccaacaggtaccgccccgaagcttccccgcgtccgcccgaggcgcttaccccctcccgg

SEQ ID NO: 208236 - DNA, 122 bp, Homo sapiens
taaacctacaaattctgaagcttctgtgggaagctatgcctcctccgagatgttgttcttcgtacgttttcaaccatacagcggcagcgactggagtggttgttttgcatgtcaggcttcac

SEQ ID NO: 208237 - DNA, 122 bp, Homo sapiens
ccttttggagggttagaagatcaggggacatggttgttcacatttgctgccacggaacaccgccagtcttcacttggaaacagaatcacgccttgtgaagagatcatccctaagcaggagag

SEQ ID NO: 208238 - DNA, 122 bp, Homo sapiens
cacgcggccccccaccaccttcacggcaggagagctccacgcggccccccaccaccttcacggcaggagagctccacgcggccccccaccaccttcacggcaacactccgggaggagagggg

SEQ ID NO: 208239 - DNA, 122 bp, Homo sapiens
agccactgccggctgcgggtttcccctcccccgccaggcgagctctgcgcggcggcttcgcgggcacacgccttcccataccttacatggacaaatgcgtgcaggcaaagtcaggaattcag

SEQ ID NO: 208240 - DNA, 122 bp, Homo sapiens
aaataaattaaattaatttttttggacgtgagatcttgctatgttgcccaggttggagtacggtggctgttcacaggctcaatcataacgcactacagccttaaactcctggctttaagtga

SEQ ID NO: 208241 - DNA, 122 bp, Homo sapiens
ggaaggggtggcagcactgtagggagtggccgggatcattcgagcccacagatagtgctccgctccccacctcaccagctgctctccacaccctgctcacaaaccttcccccgagtggagtg

SEQ ID NO: 208242 - DNA, 122 bp, Homo sapiens
gaatggggtactgatgcaacagttgggtagccaatctgcagacagacactggcaacattgcggacaccctgggggagggaagatttcattttacgtgagattccctacaggaaaggaagtcc

SEQ ID NO: 208243 - DNA, 122 bp, Homo sapiens
actggactgtgcgcccagctctgagctgtgctcttgagtcctctgggaactgtgctacagcgtggacatgggtctctggtgtgcctccaaaggaaggcatggggttacatggagaagatggt

SEQ ID NO: 208244 - DNA, 122 bp, Homo sapiens
cctgcttggcaggagagggtggcagtttgggcaacactcagccatattgctgagttgcagcgaactcaccaagcaccctcacaccttagaggcgtccctcaccgtccagccttggtgcatca

SEQ ID NO: 208245 - DNA, 122 bp, Homo sapiens
ataaaatgatgcacacccagaaattggctacttggatgacagtggcttaggacaacatatcggaggtggaataaatgtggaaactaggactttctagtctgcaagagataaaaataagaggc

SEQ ID NO: 208246 - DNA, 122 bp, Homo sapiens
ccgctgcgccggaggtggacctctaccagggcagtttctctctgaggctgcgcgctaaggcggtgggcggtcccaggcaggcccagaagctgggcagcctctgccgggttccgggaaaagga

SEQ ID NO: 208247 - DNA, 122 bp, Homo sapiens
ttcgaatatggccccatggtggaagttgaaattagaatttagggcatccataggtcagaacggttgctattggaagagcgatgtcagtgattcagtcctatgataaactttgaggctatttg

SEQ ID NO: 208248 - DNA, 122 bp, Homo sapiens
cgcgacaagggttcctaggaataaaccataaacaggcccgggagctacgctaacgccaaacgccgagcagtgagacgcgcagcacccgccctgcgcctcggtggcagccgtccacgccgtca

SEQ ID NO: 208249 - DNA, 122 bp, Homo sapiens
accttgaagtatccccttcaaaagaattcccaaacagatgatgtttgatgttccggacctcgcagcatgatgcgaaagaaagatcatgggttttgaagtaggttagtgcagacgcctactct

SEQ ID NO: 208250 - DNA, 122 bp, Homo sapiens
atgggggttgggtgcttgtccagtgggtcggggtcggtcgtcaggtaggcacccccaccccgcctcatcctggtcctaaaacccacttgcactcatacgcagggccctctgcagatactcgg

SEQ ID NO: 208251 - DNA, 122 bp, Homo sapiens
ttcttactacgctacctccaacctcgctccacgcatggggagatcagggttccacattttcgggtaagcattagccgtcctggcgctgcacgagcgtattctacaattccgaaaactactaa

SEQ ID NO: 208252 - DNA, 122 bp, Homo sapiens
tcattgtcgtagcacagctgagaaagctcactgaggcgctgagagtgagatgcgaagggacggccagtgcaacacgggcctgtgtgtttttatggacagtatgaaggtattgaaactgatca

SEQ ID NO: 208253 - DNA, 122 bp, Homo sapiens
aataaatcggggaacttgcttttctccccaagaccccagatggggcctacccatcgttctcgtgtaacaaaacgtgtaaaaaaaaaaaaagaaaaagaaaaaacaaaacaaaaaaactaagt

SEQ ID NO: 208254 - DNA, 122 bp, Homo sapiens
gaggaacacaccacaccaacacaccaaaaaacagacatctcccagtgtctcattgtcctacggtcaacccagcaagggacactagcagtcctgtcctcaggaccaattgaatttaccttgaa

SEQ ID NO: 208255 - DNA, 122 bp, Homo sapiens
gtcccaacctcccccttctccggggtttcttttttgacctgatccctcagtgatctttgacgctgggctttgctgcccggcaggtgtcactcatccttcacccctcccctcccagctcaccc

SEQ ID NO: 208256 - DNA, 122 bp, Homo sapiens
ctccttgccggggtctgggcctcaggctcagtgggccttggacaacccagcagggagttccggggagtccgaagtggagaaaggctggtgggaacatggaggccagtgttggggagcctgtg

SEQ ID NO: 208257 - DNA, 122 bp, Homo sapiens
aagggaaaaggagagagcctgctggcggcgaagctgcaagaggcagctgcggagggagcgcgcggcgggcctgggggagcgctgggcgggggcgggcggtgcgggcagggctatacccgagc

SEQ ID NO: 208258 - DNA, 122 bp, Homo sapiens
caagttgccaccagctagttccgcttgaaaaccacttctggccccgtgggggactcaagtcgccaagcgagggttcccctgagcgccggagctcacaggtctcgccttgtcccgaaagcccc

SEQ ID NO: 208259 - DNA, 122 bp, Homo sapiens
gaagaggctctgcgcatagtagaaagttccatgttttagctgcatcatcaccaccatcatcgccatgctatcctgccttctgcaaggctgcttgaattgcctgagcctggaacgtttcccca

SEQ ID NO: 208260 - DNA, 122 bp, Homo sapiens
catgataccccactccctcttgctcagctaatgagctcctcctgttacccaaagttgacccgagggacccactgcagagcccgggatggcaaagaattctctgactcaggctctgacccgga

SEQ ID NO: 208261 - DNA, 122 bp, Homo sapiens
agacagagtgcgagcgcctcctttctcccttttcctataaccttgctccgaataaagagacggcggagaccgcggtccttcctctggccagttttcaaccctgtatctgctcatcccgtttg

SEQ ID NO: 208262 - DNA, 122 bp, Homo sapiens
tccttcctcctgctggccagagacacattttgcatctgcaaggcatccggagatcagccgcgaactctcctcccgagcggacgctgcggagttgcagccgccgcccccggcacctgcgccag

SEQ ID NO: 208263 - DNA, 122 bp, Homo sapiens
aactcctgggctcaagtgctcctcccaccttggcctcctgagtagctgagactacaggcacgtgccattgcctagcacaatctgcattatcttaaggctacatgcttcattcttcactgcct

SEQ ID NO: 208264 - DNA, 122 bp, Homo sapiens
agaggtgagcaaatggtttatgcacgcaattgcacaatttccagtactccagaaatatagcgatgatggtctgcatgtatgttaatattataatttaaaagatactgactataagaaaagag

SEQ ID NO: 208265 - DNA, 122 bp, Homo sapiens
atgaggtagctacattattctgcttttcaaactttaatgtgcaaaataattcaggggaatcgtataaaatgaagattttgattcagtagatcttggatggggcctacacttctgcatttcta

SEQ ID NO: 208266 - DNA, 122 bp, Homo sapiens
aatgtgtccatactcaccttacagtctggatggcgtgagcgagccactgtccggagagctcgcacttcacctcccagcctccgtactgcttggcttccccatcccggatgctgaggggaagc

SEQ ID NO: 208267 - DNA, 122 bp, Homo sapiens
ggtggggactgtagaaaggggcggagagatcagccgcccagccaggagttaagctgaggtcgtctgagccctgcgacagcctggacagcaactcaggtaagatcagccaaggatgggagtca

SEQ ID NO: 208268 - DNA, 122 bp, Homo sapiens
cggacacagcagagcgaaaggagacgctgccctccgggaatttgcagccgcttgcagaggcggccccttagcagctgcgcatccgggtggatagcggcgcttctgcccgcccagtgcctacc

SEQ ID NO: 208269 - DNA, 122 bp, Homo sapiens
ggacgtttcctccgtgcagcctgggccaggggccacgggaggctcttcacctacaggggacgcattcagcaccgaggtcagcagcccatcccgagccccccacacccccgctcgtctcccac

SEQ ID NO: 208270 - DNA, 122 bp, Homo sapiens
gatggctggccccagccccagagtttctgatttaaaggtctggagtaagttctgagaattcgagcttgcatttccaactcactcccaggtgatactgaagttgctggattgacaagattccc

SEQ ID NO: 208271 - DNA, 122 bp, Homo sapiens
gttttgatttttctttttgaggcaaggcccagggttcgttaccatttgaatttgactcctcgggggctggccttagtaaaggcgggtagattggactgtagggaggattcctatctcctctg

SEQ ID NO: 208272 - DNA, 122 bp, Homo sapiens
atgtcagcagagctgaaaaccacctctaggatatggtgttaccttagatcaggggctttgcggtgttctttgtgtttcttgttaccagtaggcccatgatagacctgttccacgccatttca

SEQ ID NO: 208273 - DNA, 122 bp, Homo sapiens
agatgggtttgctggtttacactaggaagagtgacgtatttacctcgattctactgaaagcggataaaagcagtaccatcactgtgacctaggaaaagggaaaatgtaagcccactaatatg

SEQ ID NO: 208274 - DNA, 122 bp, Homo sapiens
tcatcaagaagaataaattccagggcttcagtctgcctttggttcgcaagtttgcccactcgattctgcagtgcttggatgctttgcacaaaaacagaataattcactgtgaccttaagccc

SEQ ID NO: 208275 - DNA, 122 bp, Homo sapiens
cgttcctttgctgtctgccccaggcgggggagggggggggaggtggtgggggcgagggggcgggggctcagctagtccagccgtctacaagaaaattgctccctttgaagctgccagggggg

SEQ ID NO: 208276 - DNA, 122 bp, Homo sapiens
atctcatttaacccttgaacacctttatgcattgcttctattatccccagtctatagatgcggaagcagagacactgagtttgagtaacttgcccaaagtcatatagctagtaagttgcaga

SEQ ID NO: 208277 - DNA, 122 bp, Homo sapiens
aaaccaactaaaagtacccaaacagtctcaataatttggtgaattagtcattcagtacagcggcctggttttagtcctgtcagagggagggaggactgactaaaaatagcacaaagaaatct

SEQ ID NO: 208278 - DNA, 122 bp, Homo sapiens
aaataatctaaagataaatcctttgttaaggtgaataaccaaaataaccctccagtaattcgtaactgtttagaaccttagtatttgtgtgtgtgtttgataatgttcagctatggtttcac

SEQ ID NO: 208279 - DNA, 122 bp, Homo sapiens
tgccagcctggctgactgtgccacgagttacctgcttgtctcgagtgaagaatagcgctccggcaaaacctggaggcagcgctggaaaaatcgcacgtgccgatcccgtaagaaatccagcc

SEQ ID NO: 208280 - DNA, 122 bp, Homo sapiens
actcagtgtccttttggggggtccccgggccgtgtggtgcgtgctggctcggctcagtagcgctgttacaggcttacgagctgacgtggctgggaactgggaagtctgttagaagccgttcc

SEQ ID NO: 208281 - DNA, 122 bp, Homo sapiens
atagatgcataaaaacatctgtaagtctacacaagcaatcttggaagtatgggtatttttcgagaaaagcagttaagtgaatggtcaaggtttttgggggggactttaactttttactttat

SEQ ID NO: 208282 - DNA, 122 bp, Homo sapiens
tttattagaaacagcgattgtgcctgccaagttttaatcaactcgcctggccgtgagacccggctggcattaactgtctttaggaaataaatgcttcggatatggagcatagtattagcaag

SEQ ID NO: 208283 - DNA, 122 bp, Homo sapiens
tccacaaaggtgctaacagtctggggtggagtgggtttgagctcaggtccaccatgaatccgtcctgaaagaatcagagatggtccagcggcatgtacctccccaaactctaatttaaaatt

SEQ ID NO: 208284 - DNA, 122 bp, Homo sapiens
tctgacttcaaaaatgaagccgcagaccctcgcagttgagtgttacttagttcttaaaggcgcgtttctggagtttgctccttcccatattcggatgtgttgagagttttttccgtccggtg

SEQ ID NO: 208285 - DNA, 122 bp, Homo sapiens
cacttgccttgcaggcgccgcgtcctctgacacgggctcggattacaggagggaccggcgcggtggcagcagcccccgggacacacgttccactcagatggacgcacgcacagatgacgagc

SEQ ID NO: 208286 - DNA, 122 bp, Homo sapiens
gtttcggtcatttttgtcaaaggaaatcagatgaaaaggggtgtacaaaggaccaggtctcgtgagcgcagccaatcttgtccgctcccaagcgactcaggctcttggcaggacttgctgta

SEQ ID NO: 208287 - DNA, 122 bp, Homo sapiens
ctccacgcccactttcaggcttctactccaaacttattggattacctattgcatatgggacgtttggggattcctggactcctacagaattagccgtcaataaatgaaacgtaggccggggc

SEQ ID NO: 208288 - DNA, 122 bp, Homo sapiens
tgccagggcagagagaaaagctttttaattaacagggaagagctcactctgggcagtctgcggacacccctgggaggaagcgtctgctctcgctgacccccacacccgcctgcacggtgagg

SEQ ID NO: 208289 - DNA, 122 bp, Homo sapiens
tttctaagctaactcatgtggctgttgtcagactttgattccttgtcgtgtggacctatccgtaggcttcctaagtctcctcacagcatggtagctggagagagagaaagagagagagagag

SEQ ID NO: 208290 - DNA, 122 bp, Homo sapiens
tgagcaggtgcacagggtggatctgcggttggaccagcaagagtggtggtggaggcgtgacgtgaaggaatgcccgtgatgcccctgaccctgaccttggtcccgagaaggtcatctgagaa

SEQ ID NO: 208291 - DNA, 122 bp, Homo sapiens
gacagcgcgggggagggtggcgcggcggcggcggagggccccagacgggtcgcgcgttctcgccccccccgggcacaagctgcttgctagtgcaggggccgccgatgtcccttcccctggcc

SEQ ID NO: 208292 - DNA, 122 bp, Homo sapiens
aaggcaacaaaaaaaagcctggtttatgtgtcgacgctttgatgcttttgagtcgtgaggcggtctggctttttgttttgtttgtttgttttgtttttatcttccatgaacagcgcttccgt

SEQ ID NO: 208293 - DNA, 122 bp, Homo sapiens
agaggttgagcacgattccatttctggggatcgggtccggtggggagccactgtccctaacgcctccagagactttaagtaggacaatataatgctggtaggagcaaggtgcaaggaattta

SEQ ID NO: 208294 - DNA, 122 bp, Homo sapiens
tcatgaaaaactaagtggattctgccttttagtacttcccatcatgggggaagtcaccagcgacctccttactgtattttggatgattcaagaaatagaaaggtgtcctactgacttctgaa

SEQ ID NO: 208295 - DNA, 122 bp, Homo sapiens
aggacggtgcccggcaggggtggccccaggcaggtgtgagaacctcagctggcccaggaccgtgctcagcaggggtggccccaggcaggtgtgagaacctcagcgggcgcaggacggtgccc

SEQ ID NO: 208296 - DNA, 122 bp, Homo sapiens
atgttcaactgtgaatatgactcaaagccataggtccactaaactaataaaacactaagacggttaaacattttaaaacattttaaaaatcgaaacatgagcataacatactcaaacttgca

SEQ ID NO: 208297 - DNA, 122 bp, Homo sapiens
cagacctgggggcgtgtcaccgctgttacctccgaaccctgggtgctgcgcgcgatccaccgcacgacggctgcgaccgacacctcttctcgcagcagcgactccaaaacggccgccatccc

SEQ ID NO: 208298 - DNA, 122 bp, Homo sapiens
caccttggggccttggtcactgggctgcctccttggcctgcctttcccctcactccgggccgcactgggcttctgtgattgggcggatcacgccggcctcatgttccttctcttgtccctct

SEQ ID NO: 208299 - DNA, 122 bp, Homo sapiens
acctaatttcttataattcactcagcataacgttgcagcaacattagcttttgtaccattcggtacacacaccaagtttattgcacttcaccatcattgtctttgctattctttggctagaa

SEQ ID NO: 208300 - DNA, 122 bp, Homo sapiens
atgttgtttctgttcacctcaggttaacagcctagacttctttcttgaaattcgccacagcgaaaccttgtgattcagccaaccaaaccagtaattcatactcatccctctagcaaacgaaa

SEQ ID NO: 208301 - DNA, 122 bp, Homo sapiens
tcacgcaccaaatcggcacgtccacttttgtggtggcgcttagtgttggtgacggtgcagcggcacagcccgtccgtgggtggctggtggaggtgtcggtcagctctgcgtccgtggaaagc

SEQ ID NO: 208302 - DNA, 122 bp, Homo sapiens
ccgttgatgcaactgcatgccatggttgccagagaatcctaggtacgcccggaccctcgccgtcccccctccgacacacgtgtgggtccccaacgcttaccagagagctgttgcaaacctag

SEQ ID NO: 208303 - DNA, 122 bp, Homo sapiens
cgccctgggaggcagcggtggggaagggcactccaatcagagggaacagcgttgagtaggcgcccagaggacccttgcgaaagagcaagagagataatgacgctcattccctcatcagcagg

SEQ ID NO: 208304 - DNA, 122 bp, Homo sapiens
gaaacactgaggggtcggggatgggggcaaatgtcgtgcgcgcgagcgtgtgtgtatatgcgttgccagaagagaagaggggtttaatgtctgtagcttttaactgatcctctttgtggagt

SEQ ID NO: 208305 - DNA, 122 bp, Homo sapiens
actttgaaccgatggagtcacaggaaagagcagcttatttttgttgggagggaacacacacgcaggtatggcatgttgtattgtaaaatgactccagctatgtcagagagctggacggggcc

SEQ ID NO: 208306 - DNA, 122 bp, Homo sapiens
ccagggagccataaagagatgacctccgataacctgaatcaatatttccccattggggctcgggcccccgcagctgtcttcttgatcatctggcagatgccacacccacccttggccctccc

SEQ ID NO: 208307 - DNA, 122 bp, Homo sapiens
cgaaaagagagcgcggaggtcccgccgcgcctcgctctgaggagaggacgcggagccgcgcgcccgcccggtggaccccagggactgctcccacgtgctccggccccacgcgcgggccgccg

SEQ ID NO: 208308 - DNA, 122 bp, Homo sapiens
ggaggccggcaaagatgtgccctcgtgtgtccacattttaggaacacaggagacaggcctcgctgcccacgttcccctgctagtagaagacatctgctgggcatgtgtgtgtgtgtgtgtgt

SEQ ID NO: 208309 - DNA, 122 bp, Homo sapiens
cagttctaccttcaaacctctctctgaaggcagatgcaggcgccctttaatgactctggccgatgtattctgtgaggccatgagggaaatcctgggcaggcctcatggcatgcgcttgtagg

SEQ ID NO: 208310 - DNA, 122 bp, Homo sapiens
gtaggggaaggcggttctaaggacattcaaggcgaaagttgttgagatgtacaggcttcccggggcctagtgcatgagcacagggaggtagagggtgaggaggagcggtctgtgggactctg

SEQ ID NO: 208311 - DNA, 122 bp, Homo sapiens
gggcggggtgggaagcagaggtgggaggggtcgaggttggagcacctgtcgtctgcatgacgtggacggctggttctggttgtattttaaatgaaatctcatcccagcgtagacaccacgtc

SEQ ID NO: 208312 - DNA, 122 bp, Homo sapiens
aaggataagaaccgcctccctcatcagtgcccgtctgacggccccggctcggggaagtcacgcgtcgctcctgagccacgcacagatcccctcgaaggctcccgagagcaggtgcagcggcc

SEQ ID NO: 208313 - DNA, 122 bp, Homo sapiens
tgtttctgaacagcccgtgcccaattctgttaaaagacaactaagtctctctacatggttcgattcttgtgatttgtttccacctttatattttctgtgaggaaatttttctatgaggaatg

SEQ ID NO: 208314 - DNA, 122 bp, Homo sapiens
gagaatcaagcctattctgtataacttcagaactcagaaggacttaaggacacaggaagccgcacgttttggttcaaaaaacttttgtaaccattaaacagcctcataatggaatggatatt

SEQ ID NO: 208315 - DNA, 122 bp, Homo sapiens
acaggggagtgtcagagtgatgcagcaggagaaagattcacccacttccggctttgaagacggaggaatgggcagtctatagaagctggaaaaggccaggaaatggattctaccctaaagtc

SEQ ID NO: 208316 - DNA, 122 bp, Homo sapiens
tggtcactcactcacccctttattaagagttggttctacggaggatgagagaggcagggacgtgttttgggagaaggtcatatgaaaaattagtgccacagagtttcggcccctaaaaagct

SEQ ID NO: 208317 - DNA, 122 bp, Homo sapiens
cataccacaaccctgtgagggaggcaggcctggcattgctcctgtctacaaatgaggtagcgaactaaagaaggaaattcacagggtcattgcatgtgtatagatgcacacctttctttaca

SEQ ID NO: 208318 - DNA, 122 bp, Homo sapiens
tggaaggccttagagaccacactgagaggtcagacttgattgaggagacagttcatgtgccggatgacatatgagtgatatatttttctttcaatttattattttcatatttgatttattaa

SEQ ID NO: 208319 - DNA, 122 bp, Homo sapiens
ttacagttgctaatgcctcactgaccttttggaaaggtcatagttactcttcaagttgagcgatttttctcccccaagagctaattaaagtttcttgtttctgatatgctctccttggcaaa

SEQ ID NO: 208320 - DNA, 122 bp, Homo sapiens
gctggcctcacccactgggacgtgcccaacctggagacattgcaccaggtagggctgcaccgctctccgagaccccgccccgtgcttccacttgggggcggggaccctgcacctgaccagcc

SEQ ID NO: 208321 - DNA, 122 bp, Homo sapiens
agctggggaggcccacccagagagcatgttccaggccagcccttcaggagtgagcagtgccgacccagagcaggaacacagaatcctgccggcccctcctgggcccagctgtcccgtcactc

SEQ ID NO: 208322 - DNA, 122 bp, Homo sapiens
aaaagagatgtaacataaaatatcatcacgtggaaatgcccaaaatactatctgccccctcgaaagtatagtttgtaagccttcctcaccttgggtatgtgtttagtagtaagatgaaagtt

SEQ ID NO: 208323 - DNA, 122 bp, Homo sapiens
ccccacccagacgcccggggcatggtggagttccaggagggcgtggagctggtggacgtacgggtgcccctctttatccggcctgaggatgacgacgagaagcagctgctggtggaggccat

SEQ ID NO: 208324 - DNA, 122 bp, Homo sapiens
tttccctccgcccccacgcgcacacaggcgagcaccgtccgcccttcctagttcccaccgcgcgcccctcgctgagcgctccgcacactctgagatccagcgcgccctctggtggcacacgg

SEQ ID NO: 208325 - DNA, 122 bp, Homo sapiens
tggtctcccctggagggtgggcgggttatctgagggagtcctcggagggtcgcccccttgcgcgtcagagttgctgcgtggggtctcagagatagcgcctgggctggggaaatcattgtggg

SEQ ID NO: 208326 - DNA, 122 bp, Homo sapiens
cccggggccggggtttgaagatgctgaacgtcccttcccagtctttcccggcccccaggtcgcagcagcgtgtcgcctccggggggcgtagcaaggtaagcgggtggctccgtgagtctctc

SEQ ID NO: 208327 - DNA, 122 bp, Homo sapiens
tgctgagacccaaatgccagtagcgggcgggaggcagtgcagagacctgtgaaaatcttccgatgtgaccaacccacccccacccaggggaatccacggggcgcagcggcagcgcggtctcg

SEQ ID NO: 208328 - DNA, 122 bp, Homo sapiens
tgcgccctgcccggtctggctggttggggttggctccagcctcaaggaggcggcgggcagcggttggccgggagaatcgggcagccaggtgcaggggggtctccccagtgcccacggtgtga

SEQ ID NO: 208329 - DNA, 122 bp, Homo sapiens
ggtgatggtattggccgctacaacatcttcacctatctgcgtgcaggcagtgggcgctatcgctaccagaaggtgggctactgggcagaaggcttgactctggacaccagcctcatcccatg

SEQ ID NO: 208330 - DNA, 122 bp, Homo sapiens
ggtggctgcgtgggggtcgcactgcctctcccgccttagaaacggccccagtgatgcaaacggctccgagtgcacgagatctctctgaaatttgtcaaatgagagttgaagctctgcaacta

SEQ ID NO: 208331 - DNA, 122 bp, Homo sapiens
caaaacccttcctcaaccacagactggtgactgagctaggaaagcggcctctgattggctcggcttccctgcttcagtcagctgaagagcgttccctcggagagtggagggcgcctcggagc

SEQ ID NO: 208332 - DNA, 122 bp, Homo sapiens
cataaaaattaattttatacaaatatataaaacagctacacagaaatactagtggagagacgagtaatgtgccaagtaatgattaggcaatgaggaaccacgagaagcagatagctctggtt

SEQ ID NO: 208333 - DNA, 122 bp, Homo sapiens
ccagcagcccgcaagacaaaaggcgagcgccggggccgccgcgccgcgccgctcccatctcgctcccccaccgaactaacccgaacgggagattcaactaaacccctcagccacaaactcct

SEQ ID NO: 208334 - DNA, 122 bp, Homo sapiens
accgataaacgattaccgactgttgacctcacggccccttcgcttccggccgcaccgcctcgctgcccacgcctgcgcactcaggcaccgcaggtaggaggaacgtaccaactgcgaggcgg

SEQ ID NO: 208335 - DNA, 122 bp, Homo sapiens
gagatgaaaactgcacatctgcagtggacgtggtcacctgcctgttgtccttggacaccgcgtgtgggaggagcccagaactttctaaagaacctaacaggcctccaggtcccagatgttct

SEQ ID NO: 208336 - DNA, 122 bp, Homo sapiens
gaaaggcgcggggagcacaaacttttacaggaaccaccagcccttccgaggagcacagcccggtgaatagaacacagttgcctgtgctgaaggctgaagctctctccaaacgctcacatctg

SEQ ID NO: 208337 - DNA, 122 bp, Homo sapiens
ctttcttttttttttttgagacagagtgttgctctgtcaccaggctggagtgcagtggtgcgatctcggctcactgaaacctccgactccgtggttcaagtgattctcctgcctcagcctcc

SEQ ID NO: 208338 - DNA, 122 bp, Homo sapiens
gcgccggggctgctagagcctgcccatcgtccggccccggcctcaggtgctgtccacaaacgctgccgcccgccacgtgcaggccccgggcgaacccagcaatcacagccgtccctgccctc

SEQ ID NO: 208339 - DNA, 122 bp, Homo sapiens
atttcagtttatttctcctatttgcatgcagttcttttggagaaatgccctgctggggatcgtggctataaaaagtaaacaatgaaaagaagttgttttaataaaaccaacaacatagcaag

SEQ ID NO: 208340 - DNA, 122 bp, Homo sapiens
gcgggcgcccagggccctgagaaaccggctagccaggcttttcttatatgggggcggggacggctggggagctcccagccaactctgtgtctgggtttttcaagaggatggtgaagtcggag

SEQ ID NO: 208341 - DNA, 122 bp, Homo sapiens
gcaccttttaattctctcactcttctctaatgtgttccttgatttatctattaccatctgcggattttcatctgttcttttttgccttttttttttttgagacggagttttgctcttgtcac

SEQ ID NO: 208342 - DNA, 122 bp, Homo sapiens
aactgaacaaggttgcagggtacacaacaaatacacaaaaaaaattaattgcatttaggccgggtgtggtggctcacgcctgtaatcccagcattttgggaggccgaggtgggcagatcacg

SEQ ID NO: 208343 - DNA, 122 bp, Homo sapiens
tgggtgggaggcttatctgggtgggtggggacgcttgtttaaactagcgctgacccctaacggtgacggctcccttcctcactccatggcgccggcctcctccctgctccccaactcctcac

SEQ ID NO: 208344 - DNA, 122 bp, Homo sapiens
ccctccccccgcactcctgcctcgccatttcccctccctggccggccggccggccttcttcgctttgcgcacgtaccttttgaggtaacggcccaaagaggtagaagcgcttttcccgcccg

SEQ ID NO: 208345 - DNA, 122 bp, Homo sapiens
tggggcttgggtaacctgggcagggtttcccccggggcctcggcacctgctgtttggaggcgtctgttggcagcggccatggcactggagtccccggaccaggcccaggccctgagctggga

SEQ ID NO: 208346 - DNA, 122 bp, Homo sapiens
gggggtaggaggagccggctggaattagcctgcctaatgcgcctgtcagtccgggcgctgcgctgcgttcggcccgagctgtttgtaaattacattagctgctcctttattgcacccgaacc

SEQ ID NO: 208347 - DNA, 122 bp, Homo sapiens
tcacttctccgcggaggagcagcgaaggcgacagctctcttggcgcggctgcctgggagccgggcgcttgctgggtgggtgctcgggcccggtgctcccgctcccgccctgactgcgcgcct

SEQ ID NO: 208348 - DNA, 122 bp, Homo sapiens
ttgcgttggcgctggagcggtattcctcttagaagggataaagggagatgaatgtagcgccgaatttagttggtccttgaataatgggtggagcagttgaatactccaccagataggaagcc

SEQ ID NO: 208349 - DNA, 122 bp, Homo sapiens
ctcccacccacctggaggcaggtctctgtctggctgggccgggtggggggcccaagagggcggggtggggagcggaaaggggcgtggccgaggggcggggtctcccgggccgaggggcggga

SEQ ID NO: 208350 - DNA, 122 bp, Homo sapiens
cgcctcctaagcggagccattggcagccgtagcatcagccccagcccaagggcggcgctgcgtgtcccacccgagcccaccgtgcggatggagtgcagcctgcaccggatcccttccctcgg

SEQ ID NO: 208351 - DNA, 122 bp, Homo sapiens
ggtctcgtcgtagtgcaggatcagctgcatctgcaggaggcctggggacaggacagagagcggcgtgcagggagcagcctagctttgggcgccaccgagcagaagacggcatgcaggcctcg

SEQ ID NO: 208352 - DNA, 122 bp, Homo sapiens
gccggcgccctccgctgccccgcggccgcccagcagcagcccagccgtccgcgctcctcgcggcttccggcccgccgcggtcccgccccttttatagccgcttatttgcatctcaatgcgcc

SEQ ID NO: 208353 - DNA, 122 bp, Homo sapiens
aggaaggagcaggcccggccgcccgcgaggcggaaccaccaggtgggccaccttccctaccgccaccccgaggttccagtggacatcaaaacctcggctccatcagaggctccaggactccg

SEQ ID NO: 208354 - DNA, 122 bp, Homo sapiens
agttgcggaaagttaagtagggcccagctgaggatggctcctgcagcgaacgcgctcagccgggctcctggctacgcggcgacggctgggtgactgcgccccacagtgcgggccagggccgg

SEQ ID NO: 208355 - DNA, 122 bp, Homo sapiens
catcccgcccccattccctgggcaggtggggtggcgggggcggggctaggagaatgggagcggctgattggaagggaggcccccccaagacttgaaatgtacctcaaaattaggagacaccc

SEQ ID NO: 208356 - DNA, 122 bp, Homo sapiens
caaatctgtggcttctgtgggagttggggccacgacagggccacacggctcctccagctccgagggagacggggccgcgcggctcctccagctctgagggagacggggccgcgcggctcctc

SEQ ID NO: 208357 - DNA, 122 bp, Homo sapiens
gcatttcggggagtgactggagccagttggccacaagcgggcgggacggctggagactgccgggacagcggctgccggtgctacgcgggtggtgggcggcccggaaatgagcgccctccggg

SEQ ID NO: 208358 - DNA, 122 bp, Homo sapiens
gcatggaagacgatgcccaagtgggccagggggaagacttgcggaagttcattctggccgcgctcagtgccagccacagaaacgtggtaaactgtgccctgtgccaccgggcgctcccggtg

SEQ ID NO: 208359 - DNA, 122 bp, Homo sapiens
gggactggataaatgtcattagtgggcccagccacacaggctgtaaaggatgtgggcatgcgcaaaagtcgcactaattgtttctaaaaacatatttgtagccacgttttaatgtatcagta

SEQ ID NO: 208360 - DNA, 122 bp, Homo sapiens
tccgagggagccaaccctgatttgtacatttgccaatttccttgttgtaaatacactccccgtggccagtttaaaaaaaccccacatgacatcattcagaagatatgcacattagcacacca

SEQ ID NO: 208361 - DNA, 122 bp, Homo sapiens
cgggccggcgtccgggcccaggcgaccggggcctccgagctcagaggcagtgccgaggaccgaaggaggggaagggattccccaaaggcatccctgactcccgaattccagcaagggagaat

SEQ ID NO: 208362 - DNA, 122 bp, Homo sapiens
cggggggtgtacacccctagcgatattgggagtagtatcatcctctcttcccttgaataacgcgaacaatatcagaggggagtgttcatcccgggtgatattgggagtaatattatccgttc

SEQ ID NO: 208363 - DNA, 122 bp, Homo sapiens
tccactctccagttgaaaagtgcatctcagaagagccatgccttctacttagcagcccttcgtagctactaagccatagataaatcccagtgaggtctcagtgttcagagatgagtggacag

SEQ ID NO: 208364 - DNA, 122 bp, Homo sapiens
tcttggccaggctggtcttgaactcctgacctctttttagaagtggcatgtcacttctaccgacatttcattggccaaaggaaatcatttggctaagccaaaagttaggggcatcatttaag

SEQ ID NO: 208365 - DNA, 122 bp, Homo sapiens
ccacactgcatttgcccagggaactgggaataaaaaggctcatggtggggcagcctcctgcgctccccttggccctggcagactttccctgcctgaacgagagccagctggcagagcctttt

SEQ ID NO: 208366 - DNA, 122 bp, Homo sapiens
gataagagaaagatgagtttaaaatgacttaccagaactcatggtggtggcaggacaagtcgtctgcaactggggctctgaactgctctgtagaaaaacaaacaccacacaatgcaattgat

SEQ ID NO: 208367 - DNA, 122 bp, Homo sapiens
aacgcgacagatttcctgccccctccgtaaccagatccccaccccaccccgcggcctccgcgttccacaatcaggacgcatttgttaaaaaatgtgccggataattaaaaaaaaaaaaaaga

SEQ ID NO: 208368 - DNA, 122 bp, Homo sapiens
tctcccatcccccgacagatgggacccgcaggggtaggggaagagcggtgtctcccaggccgcgccttcacacttgctggccactgcggccagacagatgtgcaccctggtccttgctttga

SEQ ID NO: 208369 - DNA, 122 bp, Homo sapiens
cagtccacacacccccgggcctttgcgccaccgcaccaatttgcatccccaacgaatgcgcgctgccctgatccccgagcacgcgggtattaatgatcataaaaaactgggcgattacaaaa

SEQ ID NO: 208370 - DNA, 122 bp, Homo sapiens
cagcaaccatgtgtctacaccacaagtagttaggattctccaggtccagttagaggcctacgtccctgggaaagttctgggtgccaacgagagaaataaaaaatgcagtgagtggtccagct

SEQ ID NO: 208371 - DNA, 122 bp, Homo sapiens
gaggtggggggctctcaccagctgggctcaggcagctgtgccatgggggcttgctggctccgagactgcacgcctgagacgggggtgagggcatgggtgctgccatagggactgtcgtgaga

SEQ ID NO: 208372 - DNA, 122 bp, Homo sapiens
taagggctgccaagaccccgagacaccctggcagaacctagatactgctggggagccggacgagggacaccccaagcctccctctcccgctccattctccttggagaccccaccagcgcccc

SEQ ID NO: 208373 - DNA, 122 bp, Homo sapiens
ccaacttccgcgacgcaggaagcgcccacaaagggaggatgtcgccggccaatgacatcccggagctctcagcgcgcgaaatccgctttgaacctgccccgcccaaaggtctgcggtcgcgg

SEQ ID NO: 208374 - DNA, 122 bp, Homo sapiens
ccatgtttgagaagggcaagttgcccacaacagggcggagctcctgctctaattctctaacgtcccagggctatggacgggctcccttggcggccagttttgttgcgcgtagggaggcgtta

SEQ ID NO: 208375 - DNA, 122 bp, Homo sapiens
atgtcatgggaagccagtgaggtagtcaggtatggcatggggagggctttttggctttctcgtctcctaagggactcagtccagcacagcttcccacctttgaacgaatatttctgctaatg

SEQ ID NO: 208376 - DNA, 122 bp, Homo sapiens
aatgtgtaggacacttagcttttaagaatgtgccaagctgtgttagagaatgggctatctcggaggtcttagattcctaaccttgacctcagaagtcctaagttcatcctctactacaatag

SEQ ID NO: 208377 - DNA, 122 bp, Homo sapiens
cccaaccgcccagccgacctgcaccgcattcccgccccctcaacacggctcaacggccgacgctgggggcccgcctccttagccaatcggggtcctagtgcccttaagtccctcctctttat

SEQ ID NO: 208378 - DNA, 122 bp, Homo sapiens
caaacatcacagggcaggcagaatgcaactacgacccacgtggcagacgggggcggggaccggtcgcgtggccgcggccttggctcttgcgcctgcgcgctgcctcccgctctaggacccgg

SEQ ID NO: 208379 - DNA, 122 bp, Homo sapiens
tcgtggcgaactcggattgggccatatcaggccggggcgggtcccatcaaccaatagcggcgcggggctggcgggtggggcggggcctcgccggcgccgtcaagtagcctgggggacaggcc

SEQ ID NO: 208380 - DNA, 122 bp, Homo sapiens
tttagtgtgtttccactcacagcaaaaggtgaaggggagttggtgtgtgcagagatcacacggcaagagaggaagcaagaaagaactggggttggaggaaacatcaggcactttttaacagc

SEQ ID NO: 208381 - DNA, 122 bp, Homo sapiens
cagcctccagtctgacatgttccactatggccttgggaagagcaatgggcccggagtcgccgcatctaaccctgctgtaactggtcgcaagtcacagtttgctcatctataaagtgagcgaa

SEQ ID NO: 208382 - DNA, 122 bp, Homo sapiens
tgtggtctttgtatccatgtggtgcagaaaatagctgtgtggtcagcggccctttccaggcgctgaccatgttaagggctgtcctcttattagcagccagtggcaacttaattttgtcaagc

SEQ ID NO: 208383 - DNA, 122 bp, Homo sapiens
aaacctggaatgatgcaaccacaagccaaggaacaccaaggaatgccctcagttggcagacgctggaagaggcagtaatggattttccctcaggacttctggagagagtgcagcctgcctac

SEQ ID NO: 208384 - DNA, 122 bp, Homo sapiens
ctgaggtgggcataggatgctgagacagagcacatccctcacacagccggacccctgacacgcagagtccgccccacagtacaggccgacagaaccctgtgccgtccccctgtaagcctgga

SEQ ID NO: 208385 - DNA, 122 bp, Homo sapiens
ttccgtgtcatctccctgcaggcccgtgaagctcccagcgccagacccgagaggctacgtcgaggtttacaggcagatccccccagagtccccgaggtgacctgtaatcgaacccacccacg

SEQ ID NO: 208386 - DNA, 122 bp, Homo sapiens
caaaaagctccagccgcaaaccaagcatttgaatcttttttttcttttaaggaaactagccgttacacttctcaaaccccaatttctaaacactctgtttacagtgcaacactgaatcataa

SEQ ID NO: 208387 - DNA, 122 bp, Homo sapiens
gacattgtcaaagtctttgtctttctagtttgttttaaagtcaacttcctgatgataaaacggtcctcgtatcatgaggcaactgtcagtctatgatgaaattacttaaaatctccaattaa

SEQ ID NO: 208388 - DNA, 122 bp, Homo sapiens
ggctccggccgagacccgcggactgctgaggagtggtccctgggagactgtcacctgctccgttagcatcgggggaagggagtagaaacggaatcaaaatatgtgtcccctctttaattcac

SEQ ID NO: 208389 - DNA, 122 bp, Homo sapiens
gggacgcctgggtggtttgcggggagacccacgtgcggctgccgttgcggggtgggtgcgcggggcgcggcgagctccggagaaacccaggttgggcgtgagcgctgggcaaatcagcaaag

SEQ ID NO: 208390 - DNA, 122 bp, Homo sapiens
gttttacccggaactacttagcccagggtttcctgagtgctcctcgggccaaaagcagagcgcacaaattccagaagaaattaccaacggcgggactatttcagtgctccgagaagtatcac

SEQ ID NO: 208391 - DNA, 122 bp, Homo sapiens
atggagaagcagaagcagagatgatagaatctttcgcccaaggccacatctgtattgggacgggggcagcctggcacccaagtgcccattcctcccttctgaccagcccccacccctccggc

SEQ ID NO: 208392 - DNA, 122 bp, Homo sapiens
tgggagatgaggtgggtctggatcttttctcagagcgtctccatgctatggttgcatttccgttttctatgaatgaatttgcattcaataaacaaccagactcagttcttggggcccttgtt

SEQ ID NO: 208393 - DNA, 122 bp, Homo sapiens
ggtgctggacgacctgtgccgcaacatggacgcgctcagcgagtgggactggatggagttcggtgagtgcggcccggggaggggaggggaccagggcgaccggagcccccagcgatcccgcc

SEQ ID NO: 208394 - DNA, 122 bp, Homo sapiens
caagaaaagatccaagaagttagcttagatccgccgcctagggcgcgcgcgccaaacgagcgccttggcgcctcgacatgacgcacttccgcttcatccggtggggaactggaagacgccgt

SEQ ID NO: 208395 - DNA, 122 bp, Homo sapiens
gtgagcctggctagccccacctccaggcacagaggccctcccgccgcccgcagctccagccgcactgccccgatggctccctacccctgtggctgccacatcctgctgctgctcttctgctg

SEQ ID NO: 208396 - DNA, 122 bp, Homo sapiens
gggcttgggtagagcatgtgccctaaaaagcctgcatagagaagaagcatttcttgcctacgaaaaatccagcctgagtcacagccccaggaaggcccctgctgtcttgggtggcaataatg

SEQ ID NO: 208397 - DNA, 122 bp, Homo sapiens
ccgttgtgagagtttcagaacctttggccagcaggagagaggtggtagggagcagccagccggcaaaggaaggagggggaaaaaaaccgccaccgggctgacttccacctcccagtggtgag

SEQ ID NO: 208398 - DNA, 122 bp, Homo sapiens
tacgcggccggaccccagggacgccccaggcgcggccagcccgccccacacggcccgcagcgccgccccgccacattggaccagcactggcagcagtcgcccggccaccagcgccgccgcgt

SEQ ID NO: 208399 - DNA, 122 bp, Homo sapiens
gctctgggagcctgcaggagcctggcttgctctgggcctggccctggccctgggccccagcgtggccgcagctgcccctcggcaggactgcacgggcgtggagtgcccgccgctggagaact

SEQ ID NO: 208400 - DNA, 122 bp, Homo sapiens
tctcgagacaagtgctagccggtgttggtgcaaaccaaagcttgctatgtgctcagaaagcggccccagctactgagcatgctcggcttcttcccagctgctgttatcagagccccttaact

SEQ ID NO: 208401 - DNA, 122 bp, Homo sapiens
ctgctttagtttaacacatatttagtctgggcgtggtggctcatgcatgtaatccctgcacgttgggaggctgaggcgggaggattgcttaagctcaggaggttgaggcttcagtgagccat

SEQ ID NO: 208402 - DNA, 122 bp, Homo sapiens
ccgcaggcgggcactccgggggtcccgcccccactgggagtcccggcccttcggagcagtcgtgggaccgtccccctcgctaccccaccaagagtcctgcggccctgcgcatgcccagatac

SEQ ID NO: 208403 - DNA, 122 bp, Homo sapiens
cgtaggcgctggctcagcctggggtgaacccaccaggccaccgaaacgagcgatcagggtcggcaaagctgtggagatgaaatgggcaacaccttccacactgcgagtaaagctcgcaatcc

SEQ ID NO: 208404 - DNA, 122 bp, Homo sapiens
agtcccacagcatcactgcagctaaactcctccctgtggctttgttgttgtctgaaacagcgttccaaagaggaatttctgtctctcattcttgcagatgtaaaaaagttggtgtgtattgt

SEQ ID NO: 208405 - DNA, 122 bp, Homo sapiens
gaggcgcacacgcacacgagtgttctgcaaacgtgcctctgcacccgggggaggccaggtcgcccccagcagggccggcgccgctgcccccttgcgcctccgaggactgcgggtggcgtcgg

SEQ ID NO: 208406 - DNA, 122 bp, Homo sapiens
tcccggaaggcagagaagtggactacagctcccagaaggctgcgcgacatacagccagcccggtgctctcgtgaggcgtgccagtcagattccgcgggagagcggcagagataccgcgatat

SEQ ID NO: 208407 - DNA, 122 bp, Homo sapiens
ctctgtctcccctgtttctgagcggcctagatgcctctcggtctggctgaatatcttctacgaagatcacttcgccgtccatcagggagacacttcctggagatccgtgtcatgactgtttc

SEQ ID NO: 208408 - DNA, 122 bp, Homo sapiens
atattagagtgtggtagaaaaggtcaaatagagcagccacggattaagcaaacgcccctccgcgtatggtgggggctgcagcgcccgtagctccacgctccgccccgccgccgctgattgtc

SEQ ID NO: 208409 - DNA, 122 bp, Homo sapiens
agttttttccctttccatatgtataagtcctttttccaacaataataaatctgggctgggcgcagtggcttacacctgtaatcccagcactttgggaggctgaggcgggtggattgcttgaa

SEQ ID NO: 208410 - DNA, 122 bp, Homo sapiens
taagcgtgcgtgcagatgcacgtggctacgaaggcgcgtagagtcacaaacctacagatgcgggaggcagaaaaaaatagctcttggcagttgcagctatctctctgtgggccttctgttct

SEQ ID NO: 208411 - DNA, 122 bp, Homo sapiens
tttctgcccttctcagcactccctggtataacagccccctgaccttggctttgaagcaggcgtgaaggtggccaggaagtgttcttccaccctttagcttcactcctttattttgtatccag

SEQ ID NO: 208412 - DNA, 122 bp, Homo sapiens
agatgctccaagaacccagcagggcaccagagaacgctatatctgccttaacaatggtcacgtttgcgccaagacaggatagaaggatggctgatctatcaaaggaaacagggaaaattact

SEQ ID NO: 208413 - DNA, 122 bp, Homo sapiens
taatttcacacagttctcccccttcccgcactgccttccatcacctcgtttcattttcttcgtggcacggagcaccatctccaatggccttgttcatttagttaatttattttccgacttag

SEQ ID NO: 208414 - DNA, 122 bp, Homo sapiens
gggcctggctgtgctgctggtactgaacccctgacagcttgattccaacatcaaagggggcgttgaactaggaggcagggcagggaggacccaggagatgtcagaggtcatgcccatcccca

SEQ ID NO: 208415 - DNA, 122 bp, Homo sapiens
gcatccctctttctggtgttatccggtccctgctcagggcacaaagacctcctcggtccacgctctggagcagggcgggggacgggtggtgtcctaaaagactttctttaggaaaagcaaaa

SEQ ID NO: 208416 - DNA, 122 bp, Homo sapiens
cgctgcacccacgagccgcgcgtcgccttcgcccagtgcgcccaggagcgccggcagcagcgtgctcacgtgccgcacctgctgggactcggggtcagcctcttgcagacctcgccgcgacc

SEQ ID NO: 208417 - DNA, 122 bp, Homo sapiens
tcgaaatttagttctttaaattccagacccgagccggcgtctacaaagccttcccctctgcgcgcgtcgcttccagtaggaattcgactgttccttttataaaacagaagagggcgcccgcc

SEQ ID NO: 208418 - DNA, 122 bp, Homo sapiens
cttcctctcccatctttgtgtcctgagaggcccccacatccctaccaggtacaagcagcccggtcctttcaacaaattaagttttcataaaggatgaaagaaaaactggctccagaaggctt

SEQ ID NO: 208419 - DNA, 122 bp, Homo sapiens
cctcccgggccttcctcctggctgcctctttctgctggtgcaggtccaagagggtcccctcgcctgaccgctgccgctgctcctgccaaagaagccggtgccatgtggcgtttacatctgga

SEQ ID NO: 208420 - DNA, 122 bp, Homo sapiens
tcgggcacgctgatatctttaaaaagaaatgtttttgttttagaaaagaagtgcctgccccggaagatgtgagctgagagtaggtgtgggccccacagttagagttccaggtggcctttgag

SEQ ID NO: 208421 - DNA, 122 bp, Homo sapiens
cccgagcccccgggagatgacttcacctcgcggagctcagagagccgggggtggggccgtcggaaagacagcgcggacagccctcagcttgcagggggcggaggccgggcagcctgcgccct

SEQ ID NO: 208422 - DNA, 122 bp, Homo sapiens
ccgcgggcagggccggagcctgctctgggggtcgcggaggtgtctcgagagttgaggacccgacccgggcgcgcgcgggcgcaggtatggggagggcgcggcggctcctggccggtcctagg

SEQ ID NO: 208423 - DNA, 122 bp, Homo sapiens
tgccctgatctcctgcactgagctgtgatgagtacatccgggttccactggatgcatgtgcgggaaggggggtgccctgggttgggtcagtgatgagaaccttatattgtcctgaagagagg

SEQ ID NO: 208424 - DNA, 122 bp, Homo sapiens
taataatttactagccactgagctttgcatgagtttaaatttaattggtggggcttctggcgtttgtcacttcttggcgattagtggtcttgccctggcctgggccagagtggggaggggat

SEQ ID NO: 208425 - DNA, 122 bp, Homo sapiens
gtcagttctgctgttgagaggctccaatgcattcttcagtatgctaattccttttttctacgccagaatttctgcttgatgctttttaattatttcaatatctgttaatttctctgatagga

SEQ ID NO: 208426 - DNA, 122 bp, Homo sapiens
ttttgaaatagctgaaaatcctgagacttactgacagtggctcctatcaaattggaacttcgggctaaatacattaaaactggcatctgtttcctcacacatgcccacatgactaacagttg

SEQ ID NO: 208427 - DNA, 122 bp, Homo sapiens
gagtacaaagcttccaaggcgtggaaggggtcccgaacgggtagccagagttagcttatacgattgccttttaaactctttaaggcgggaaatacgtgcagcgggaagatgttaccagagcg

SEQ ID NO: 208428 - DNA, 122 bp, Homo sapiens
aaaaaaaagaaagaaagaaagaaagaaaagaagcagagttggactcagcgggaaaataggcgtgctaccacctcaggagagttccagggaagaaccccacccgcactccaatgaggtcacaa

SEQ ID NO: 208429 - DNA, 122 bp, Homo sapiens
gagctggggactcccggctcccggctcccggctccaggttctggccctgacgccacgcttcgctcccacggacaaccaagttgacttttctcgtttggcaccggagcgatttttttttaaaa

SEQ ID NO: 208430 - DNA, 122 bp, Homo sapiens
ccgggctctacgcgattacaagcaggtcacggcttcctgcaggaggcgggattactatgacgacttcttgcagcggtgagccagggcacacgaggggtgcagcatggggtgcggtggccctg

SEQ ID NO: 208431 - DNA, 122 bp, Homo sapiens
cagagaaaagcagaaatgagactggggcagccaagagtgaataaccagcacggtagctgacgcagtgcggtacacaaagggcgcgcttccagtaagacctcaaggcccatgtgctgctttga

SEQ ID NO: 208432 - DNA, 122 bp, Homo sapiens
cctattcggccatcttggaaatgcttcccttgattaatatttcaaatatacttaaccctgcgtctaattggggctgaaaacagttgaatccaatgaaatcagacttgctggcagttagagga

SEQ ID NO: 208433 - DNA, 122 bp, Homo sapiens
taggtgcggcccggggctggaggccatccaggagacaatgagcccctttcccagagaagccgagtgcccaaggcactgggctgtcgccgtcagaagactgccgagcggaagccctgcccacc

SEQ ID NO: 208434 - DNA, 122 bp, Homo sapiens
ctgcgccatatgggtaaatggaatgctgaggcttaggcgcccccttcccctgctgggatccgggtaggatccggttgcctttctgcggtggaggaggaagtgttggatttcagcgctaaggc

SEQ ID NO: 208435 - DNA, 122 bp, Homo sapiens
tcaacctcgagatctagcatctattttgcaaacgaagacagcaggaacgggcgggctaaccgtcgcagtcactgcctcggcgctcctccccctccaaggccagcaagttgcggcactggggg

SEQ ID NO: 208436 - DNA, 122 bp, Homo sapiens
caggatgtgggggcagggggaataaaccaacaaaaatataaaaattttgaattccagatacgctgagcatgaccagcctttctgcctggggaggaggaggggcatataaccccaaaccagta

SEQ ID NO: 208437 - DNA, 122 bp, Homo sapiens
gtggtcgacaccgcctccctgtgttgtgaaaccttcctacccctctctggagtctggtctcgttgctgtctgactggcgggcctgagggaaaccctctggcggacgtgctgtgccaggaggg

SEQ ID NO: 208438 - DNA, 122 bp, Homo sapiens
agccccgcggcgggacccgcccgcggccgccgcgcgcgcactcaccgagcccgtcttgaccggcacatacaccacttggcccatcttgggttcccggccgctgcccaggcggaagcccttgg

SEQ ID NO: 208439 - DNA, 122 bp, Homo sapiens
cttgtggtctggctccaggcccgagatggtgaccccatcctcgtgtcccggcacccgcaccgccttgggctgcccgtccccattcttaaactggaccaagaaatggtcaaactggccctcgg

SEQ ID NO: 208440 - DNA, 122 bp, Homo sapiens
attcaacacagttaaataccaatttaataataatgcccagagcaaaccaattctggagaccgccagagcagtgagaatttggtcagctgaggagatcttttttctcttcacccagtcaatga

SEQ ID NO: 208441 - DNA, 122 bp, Homo sapiens
gctcttctggaaacaaagggctcaagcacccctttcaaccctgtgactggggtcctccctcgggctgtaggcctggtccgccattcagtgacaaataaagccattgtgctctgaggcctgca

SEQ ID NO: 208442 - DNA, 122 bp, Homo sapiens
tcccccaccactctctgtgcctgatgggaccttgagcctcctgctgtcctcctcagccaacgcctctgggactcatcctcttggcgatattcatggtgtcatggcacaggtcccagcaggag

SEQ ID NO: 208443 - DNA, 122 bp, Homo sapiens
gtagaaagagtatctacttctccggattgttgggaggagggtcgaagcgtagactggccacgcccgggtcccgctctctcgttgcacaactgcaagctagatctgggcatcgaaggaggaac

SEQ ID NO: 208444 - DNA, 122 bp, Homo sapiens
gcgcggggagccggggttgtgaggggtgatgtcctcaggcggcggcgctgcggggtgcggcgaggacaccggtggggtgagagcaccggcggggcagcagcgggggccgcagcgccgggtcc

SEQ ID NO: 208445 - DNA, 122 bp, Homo sapiens
tcttataacagagataaaactattaatgccttccctgtctcactggccacaactgttctccggatttacaggaggattacattcccccctcgtgccctcctctgtgccacacaaaccctgtc

SEQ ID NO: 208446 - DNA, 122 bp, Homo sapiens
actcccacccggatggcagccccatcccacgtgggatcatgcgacctgtctctgggtgcccgcggcgaggcagcaccccgcttccctacacagaaggccttcccctcccgtcggctcattca

SEQ ID NO: 208447 - DNA, 122 bp, Homo sapiens
gggcagtgagagagggcgaattaaaataaccatcacctactgaatatttactataggctacgaattatggttagcgctttgcagtattttgtttaaccctcacaacaatttttggggggtga

SEQ ID NO: 208448 - DNA, 122 bp, Homo sapiens
gctagagatgctgcagttgtgttagaaacttaacttcatcccccaagatgctgtgaaacacgtgaacggatgtaacaatgcagggtggtcttggtctttggttgagtttctttttatttaaa

SEQ ID NO: 208449 - DNA, 122 bp, Homo sapiens
taccgcggggacgccccgaccccatcctacctgctgcgccccgcgccgcgccccgcaccccgcccgccacggcctgcgtccgccaccggaagcgccctcctaatccccgcagcgccaccgcc

SEQ ID NO: 208450 - DNA, 122 bp, Homo sapiens
ctaaagcacttaaaattagcactgaaagtctgggtctttggccccagttatttactcagtcgctatgataaacctttatgcatttttattggggagacttggccacaatgctgttttgctcc

SEQ ID NO: 208451 - DNA, 122 bp, Homo sapiens
gtgcaacatcgggtttgagactgcagaaaactaagtctggaaattgggccatttgttccccggggaggcagtgctttccttccagtaccccgtcggttgttatttggaacacctggcatttc

SEQ ID NO: 208452 - DNA, 122 bp, Homo sapiens
gcttgcgggactccgggttggggccgcacgggctggcaggcgggctccgggcaacaagggcgcggctgcggactggcgggcggaccccggggaggggcttcacggaggcgccgcggccggag

SEQ ID NO: 208453 - DNA, 122 bp, Homo sapiens
attttcactgttttattacttttctgggaattcaaatcagtgtaaccacgcttgatgcgccggtgaaaaatgctatctccctcccccttctccttcaacctaatgaattgccttttttcata

SEQ ID NO: 208454 - DNA, 122 bp, Homo sapiens
ccgccgtgaccggggggatggacgacgccggccactcaccttgctcacagttcttcccgccgaatcggagtggacactcacacagatacatattccacctgttgacacaggtgcctccattc

SEQ ID NO: 208455 - DNA, 122 bp, Homo sapiens
aaaaggccaaagctaccgttagtggctcagtctttgccgccagactcgggcaggtgacagcggtttgggctcgggcgccgggcactctgcgccttccaacgctggcggccccgcctcccctt

SEQ ID NO: 208456 - DNA, 122 bp, Homo sapiens
aggagaggagagaactcttccctggtctcatcttcccagacgcctggtcgcgcgcggctgcgttagcctcctctgggcctcttcccgagtctctggcgtgcactccgtgcctcagtttcccc

SEQ ID NO: 208457 - DNA, 122 bp, Homo sapiens
ccattgttggtttggaatctgcctgttaaaagccatgagccaagtattagtaagcaactacgtgatgaccacagaatatgccttgaaggcagaatgtgggttaaatctgtagcaaatggcgc

SEQ ID NO: 208458 - DNA, 122 bp, Homo sapiens
aatcatcaactgttccctggccctgttctgtgctgcatcctaagccaaatgtcacaatctcgagatggattaggggatgcggaggagggagaggaggccatgaggagcagaacagaggaggg

SEQ ID NO: 208459 - DNA, 122 bp, Homo sapiens
caagtgttgtttcagttcagtgaaaagcgaacatttggcttcagctgaggttcactccaccgtgggttgctgggtcatttcagttcagggctctgttgaggaatgtggggttttgcctgggt

SEQ ID NO: 208460 - DNA, 122 bp, Homo sapiens
aggagggagccccaagccccgcaagccaggtggcgtccagatctgagcgcacgaggaggccgcctcagcacgggctgaagacctcactccttcggcctccgaagacggggttagcggagccc

SEQ ID NO: 208461 - DNA, 122 bp, Homo sapiens
tcatgctaaaaagtagaggtttttaaaaataatctcatgttagtcgtttgttggtgattacggagacttacaagcaaggctgcctatccacattggttaaatctaccatcaagaaggaaaca

SEQ ID NO: 208462 - DNA, 122 bp, Homo sapiens
aaatgaaaatacctgtatgaaccagtatcgacgactagtatatacatttgcggagaattacgtacgtgtatttgtgatacatttgtgtttaacttgatgatgataatagcagctaatatttg

SEQ ID NO: 208463 - DNA, 122 bp, Homo sapiens
atggtgtgccgggggccgcgcgggccgggagttgggtgggctgggggacaggcgcgcccgcgccgcccgctccagctgggctagtgctgcacattccggccagcccctcctcaagaccccat

SEQ ID NO: 208464 - DNA, 122 bp, Homo sapiens
aattcaaacacgtgcactgttgaccctgcaatggtggagtttttggattttccttcagtccgattgctaaaatacttccctctcatgtgagctgttgtgaaagtcatcagccagataccatt

SEQ ID NO: 208465 - DNA, 122 bp, Homo sapiens
ggagaggggcatgcacgtgtggctgctgttactctcgcgcgtgctgttggtgcaggtggacgtcatggcaacagccagagggcgtgagacaggttgcaggctcagtgccggcaccggtgggt

SEQ ID NO: 208466 - DNA, 122 bp, Homo sapiens
catcatctgaacaagcatcaaacggctaccagcgagcctgtgatcacacgtgggcccggccgcaccggggcaccgccgacaccggcacccctttgatctaacgtgaccttccttcatcatcc

SEQ ID NO: 208467 - DNA, 122 bp, Homo sapiens
cacttttttcgcaccccttgttaactggagacacgaaggcgggcggaggggagaggccatcggaaacctggcaatgtcttttgcagctgcatggtgtgtgcccagccaccttcagcagttat

SEQ ID NO: 208468 - DNA, 122 bp, Homo sapiens
tcatcccaaactgacttcagagccagtgctgacctgcttgggcttcccatcctcttgtctcggcagggctcataacaatgttatcattttttaaaacatatgcctaagctagttcctattct

SEQ ID NO: 208469 - DNA, 122 bp, Homo sapiens
gatgcccacacaacacggaggacctgcggccgtgggctcggggtcagggcaggcagcggacgctcacacacggaggacctgcggccgcgggctcggggtcagagcgggcagcagacgcccat

SEQ ID NO: 208470 - DNA, 122 bp, Homo sapiens
ctccctgctcgctcctcgcctaccagccccgcgcgcgccccagagaagttgtcaccagcgcggctggctctccggctgctcacacgccccctggcacaattgctactttcttccaccccaac

SEQ ID NO: 208471 - DNA, 122 bp, Homo sapiens
cagatccaagccctcaaagagcatgttggcggccgctcgggggattggctgtgccggccgcggcgggggaggggagggcccgacgggaggggaccggagcggcgggggaggggaggctgcgg

SEQ ID NO: 208472 - DNA, 122 bp, Homo sapiens
aatggttcccagccccagttctcttagcaaggctttctaattcattatctcatttaatctcgccatgagtcaggcagggcagtaacacatgggaaaggagggtgggggtggggatagtgtga

SEQ ID NO: 208473 - DNA, 122 bp, Homo sapiens
ctcctaagcttccaacctatcagctcctagaattaagtctcattggctcagctttggtcacgtgcccagagggaaccaatcactgtggctggaggatgaaatatgctgattggctagacctg

SEQ ID NO: 208474 - DNA, 122 bp, Homo sapiens
ccaccagcactgttgccgctgtctttgtttactgcttgtcactaagcacttgctgcccagcgagtgagtcaacaaggccccttccctttcctgccaccactctcattccctgggtcctgcgc

SEQ ID NO: 208475 - DNA, 122 bp, Homo sapiens
cgtggggaggaggtctgggcggtaggcggtggggtgggtggaacctagcgtccagctaggcggaagggcggagcttcaggtctccatggaggcggcttctcctagcaactcgacgggcgttg

SEQ ID NO: 208476 - DNA, 122 bp, Homo sapiens
gttcgaactgctccatattgttcattatactgctcagtaaagtctgccacacgacccgtacgatctactgggcactctttggaccagtgcccttctttcccacaccgatagcagccactctg

SEQ ID NO: 208477 - DNA, 122 bp, Homo sapiens
gcagggctgcctccacttccccaagcacacggaagacaggcagggtggacgggggtgacccggcctgggacctgggctgtaccttagacctcagttcccctccacatggaagcagcaccaag

SEQ ID NO: 208478 - DNA, 122 bp, Homo sapiens
aagtcgcttccaaaacacaagccagcgcggaatcggaagcgagtgcatttcgcaggcagccgtggacacgatcgggtttcctgtgccagtcaattacatgagtcattttaatcacatctaca

SEQ ID NO: 208479 - DNA, 122 bp, Homo sapiens
actctatatcccacaataattgagcagagccacgggtccaggatgccaaaaccaggtcagcgtgcacggacctccgggagggctccacgacctggccgtgaaacactcggcggccgcggttc

SEQ ID NO: 208480 - DNA, 122 bp, Homo sapiens
tttgacattggctctgctatccagcaactgagtgaacctaaacatgccactaaaatcactcgagcttcacattaaaaattggagaggagagggaaataatgttaatgcagaacccattttag

SEQ ID NO: 208481 - DNA, 122 bp, Homo sapiens
cacgcctcccgccaggtccactgctcagacaaatctgtaggtttctgagtatccgtatctcgaaaagcttcaatgcacaaacgaggttttaagcccatcgcggcttcgcaaggggaaggggc

SEQ ID NO: 208482 - DNA, 122 bp, Homo sapiens
tcttacgaggcggggggctcgtaagagctacagctgccagacttcggtaaatcaagggggcgccccctggagaccagaattttctggtacccctggggatccggcttcaagatcgctgctac

SEQ ID NO: 208483 - DNA, 122 bp, Homo sapiens
ccccgccactccgcctggccagatcgctcggttccctgcagctctcctgggccctgttcgcgggttgttctatgagcattgcgagcttttgcctctgtgcagcagcaggctcagccctccgt

SEQ ID NO: 208484 - DNA, 122 bp, Homo sapiens
tgacataaaccgacagctctgcagagggccccgtaaccctggaaagtcccagagctccagcgtggtatggctgctggagaataggtagctctgtcaccaggagaacctggctgcgtataaca

SEQ ID NO: 208485 - DNA, 122 bp, Homo sapiens
ggctgcctccgggcggggctgtggttcagcagaagccacaaatatttaccttggagacctcggcctggtctgaggcctctgcctaaagacaaagcctgtgctggggtgtgcaggatataagg

SEQ ID NO: 208486 - DNA, 122 bp, Homo sapiens
gtgtgtacgctttatttgtgacgtaggacacatggtctacttcttctcaatatcacatctcgccttggaagacttccaggaggtgatatcagctttgcggaagagccactgtcctggtgtca

SEQ ID NO: 208487 - DNA, 122 bp, Homo sapiens
cggggctgccgtcgttgcaggtcaccgaggtgttgagtaggaggtgcaggcgcaggtcctcgttgagctgctgcgcggagcaggggtacagggactgcgccaggctcttgacttgcgccatg

SEQ ID NO: 208488 - DNA, 122 bp, Homo sapiens
gtgacggagtggggtcgcctctcaaagggtaaatatgaatcttgccttatctggctccagcgggctcttccctaaattcaccttggagaaagatggatcatgtgagcgggactgagagcttt

SEQ ID NO: 208489 - DNA, 122 bp, Homo sapiens
tcatgaaaccgacagtagatatattattattgttgttaaacagttttacaaatgagaaaacgcagagagaagtgacttgctcaaaggtgaacagtaagtgagtggcagagcttgccctggaa

SEQ ID NO: 208490 - DNA, 122 bp, Homo sapiens
aaccgttaagactgaaacgtagatcgccgggatctagctcttgtctcattggggcaggaacgccggggcggggacacgcacgcttcgcccccaggaatgacctcatcgctccggagctccac

SEQ ID NO: 208491 - DNA, 122 bp, Homo sapiens
gggtgagatggggcgcatgtccagggagcaccagggttaggatcccagcttgccatataccggcctagggccctttccactggccacaagtgctgcttcaagcacattcctcttagaagtcg

SEQ ID NO: 208492 - DNA, 122 bp, Homo sapiens
caggcaaatctgatgttacggtaccattttatcctagaattccttgctgggttcacccagcgaatgcatgagttggtcctcctcctccctcatcatcctcattcccccaacacactgctcca

SEQ ID NO: 208493 - DNA, 122 bp, Homo sapiens
aatggagctgcattttgactgcactctttctaggttggagaagcagggaaagtgatactccgggagctggtgtgtctaaggcctctgtgagtctgcatggtcaacacagctggctctgcctt

SEQ ID NO: 208494 - DNA, 122 bp, Homo sapiens
acttttaagaaagagagacaggagaagtgaaagcaggcgcaggcataggatctctcctgtcggctgtggcccagtagagaggtgttatgcctacagttgtctaagtgtctaagtggatggga

SEQ ID NO: 208495 - DNA, 122 bp, Homo sapiens
attggattatgtggcaaatggaggtgcaaggatgacttggacggtgacaaatgaagtgggcggagacctgctttgagttaatccaggctattaggaggggaccttttgtcttccagagactg

SEQ ID NO: 208496 - DNA, 122 bp, Homo sapiens
tatttctaaactgtgtgtacaggtctttcatggcggtaacatgtataatcaacgtgcattcgcatacacaagcatctgttcttttctctgagccagttgttaaaacatttaccagcaccgct

SEQ ID NO: 208497 - DNA, 122 bp, Homo sapiens
cttcttcgggatcccagctgaccagctgggggtggggcgtggcggagtggccacgtgggccgcgcggagaacgcgccaggctcatcacctggatcatcgtgcctcagtttccccctcggcaa

SEQ ID NO: 208498 - DNA, 122 bp, Homo sapiens
cagctactactgtggtaggcagaacaacagccctcaaagatgaatgtggccttggctggacgcggtggcttacacccgtaatctcagcactttgggaggccgagacgcacggatcacttgag

SEQ ID NO: 208499 - DNA, 122 bp, Homo sapiens
gggaatgggaagaaaagagtgacggggatctgtggacgacattctttaaagcaggcaggccgtgaaggggaggacaggatatggcacctgaagaaggacaggagttgaaggggcgctgtttt

SEQ ID NO: 208500 - DNA, 122 bp, Homo sapiens
ttaatggttgtttttgttttatggcttctgggatgtgagctttatttatttcctaaagatcgtctcaaggaaaacacattggctgatgtgttttgttgttgtttatagatggcatgatttgt

SEQ ID NO: 208501 - DNA, 122 bp, Homo sapiens
tcctcagctaatacagcaataatgtagtacttaggggcagtgaatccccgggtgggggggcggattggggattggtatctcgagacaattgcaactcctctaggggccccattgtctctggc

SEQ ID NO: 208502 - DNA, 122 bp, Homo sapiens
cagggtctggacgatagttttcccagccggaggattcttcgaagagcgcttagtaaaggacggaagttccacgtgtttgtgttgagcaactgcaggtggtgggcggagacaccagcgccccg

SEQ ID NO: 208503 - DNA, 122 bp, Homo sapiens
acgctgcggcgggtgtgggagcccttccttcctgaggtgactccctctgtgcggaatcaccgtgctgtccgttccttcctccggcggtggacacggagctgctgcttccacatggccgctga

SEQ ID NO: 208504 - DNA, 122 bp, Homo sapiens
agtcccaaggggggcagtggcacagcgggcaccgagcccagcgacatcatcattcccttacggactacagagaacaactactgcccccactatgagaaggtgagtggggactacgggcaccc

SEQ ID NO: 208505 - DNA, 122 bp, Homo sapiens
agtgccaatgagacaaccacaccagaggcggacgcacccggcccccgctctgcggcacagcggccccagcctgactcccaggcagtgtctgattcaatccgtcaacttctcactcagcctct

SEQ ID NO: 208506 - DNA, 122 bp, Homo sapiens
tggcaggcgactaggagactagggtggtggcggtgggggtgccagcggctgagccggagccggagccggaggcgggggaggggaagagggcggccggggctgcgagcgcgcaaggctggaac

SEQ ID NO: 208507 - DNA, 122 bp, Homo sapiens
gcactggtgaggggcattgtgactgcattgagtgcttgccactgtgagatgaataaagtccgtactggctcctggttacaacatatagtaacacagtggctaccttgtattaggagatgtcc

SEQ ID NO: 208508 - DNA, 122 bp, Homo sapiens
gggagccgagccactgcaaggggtcctgcagcagagccggccgtgagctggggcagtggccgctgagctctgggcctgatagccctccccactcctctcaccagctgctcctgtctttggag

SEQ ID NO: 208509 - DNA, 122 bp, Homo sapiens
aggctacctgacccatggagaccggcctgagacagacgcatccccgaacaccaggtgccccgtcttctaggccattccagggacggatgaatcaacatgggcttcttatcctaatgttttaa

SEQ ID NO: 208510 - DNA, 122 bp, Homo sapiens
gtaaattacttcccccccctttcataccttattctaaatcttgcctacatgcaggaaggccgtgaggtctcattgaaggaaaattatctacacaagttactttgcaattcttctttaaggaa

SEQ ID NO: 208511 - DNA, 122 bp, Homo sapiens
aatgcagaagccccaggggcccccggaagatccttcaagctggcatccttggcctcgctgcgggggcttagctacctgtgggaacccacgtagcaagggtgactcaaagggttaacaagcag

SEQ ID NO: 208512 - DNA, 122 bp, Homo sapiens
cagttcaagttaaaaagaaggttttgggccccaactttacagaagcaggaagcaggttgacgtagtttctcaaatgaaaagatgggtcattttttaaggaaaaggaaagatatctcagaagg

SEQ ID NO: 208513 - DNA, 122 bp, Homo sapiens
gtcggtgagccagacttcctcactgaggctcctttattcccccgagccttctgtcgtgagcggtttcctagcttccagcgagaaccaggaaggaggtggttgctttggccatgtttcacggg

SEQ ID NO: 208514 - DNA, 122 bp, Homo sapiens
ccaggcgcgaagcggcctctctccgcctcaggtgagtcctgctcgacgcccaaggcccaacggtcagaaccgcctctgcccgccggacccagcgaagctaggggaacaaatcccaaaaacag

SEQ ID NO: 208515 - DNA, 122 bp, Homo sapiens
ggcggagagccacccaagaaaggtggcggaggcggggagaccctgcgggcacggctcacgcgcacatccccggcttccccgggctccgcgccttcccaagagccccgttgtctccggcgtcc

SEQ ID NO: 208516 - DNA, 122 bp, Homo sapiens
aggttcccagagcaggtccgagtctccctctttcacacgccgcacctccgtgggctgcttcggctcctcatccctgagcgcttcaacgagaccatcggcctccagcacattaaggtgtacct

SEQ ID NO: 208517 - DNA, 122 bp, Homo sapiens
ttggcgcaaccagttttgccatcacacccaggaacagaagacattaagaaaacctcacttcgaccccttatgattccatctccaacctgaccaatcagcactccccacttcctaagccccta

SEQ ID NO: 208518 - DNA, 122 bp, Homo sapiens
atcccaaagaacaagcagctggagacagaacatcagccagccccaaggcctgcacgccatcggtgtgtgtttaggaagaaatgaggaaacaatagggcgtctgatgggtggcagaagagaac

SEQ ID NO: 208519 - DNA, 122 bp, Homo sapiens
ctctgctgagtagccagaggtagacgtttatataccagcttcacaaaaatgggggtagcacgtagttaggtcttcagtgggaaagcatggaaagttcttttgggctttttgatgctaatggc

SEQ ID NO: 208520 - DNA, 122 bp, Homo sapiens
cacctgaaacggctgggcctgcgactcctgatgccagattcctgggcgaggggagcaagccgctcacagggtggcaggtgggcgttcgcctaatgtgggcccaagtgccgcccctcgcgggc

SEQ ID NO: 208521 - DNA, 122 bp, Homo sapiens
aggggactgggggatggagggagtcctggacgaggggtgggattacccggctgccgctgtcgcctggatggtctccgcggccgtcccgggcatagtcggcgcgggactccccccggctgctg

SEQ ID NO: 208522 - DNA, 122 bp, Homo sapiens
cctttcgcccctcaccctagctcccccaacgccaaagacaaggttaagaaagtgatatcgcgaaatagttttttaaagcattttattgcattttatgacttggagtttatgtgaaacctcaa

SEQ ID NO: 208523 - DNA, 122 bp, Homo sapiens
tgctccgcagctcccgcaccggcctggcgggttttgtggttagcaagttcctgcttccgtcgcagcgacggcaagtttgccgcgggggaagggcacgttcctgccctgcaacccggagctgc

SEQ ID NO: 208524 - DNA, 122 bp, Homo sapiens
tatccaaagtccttgttttacaaatgtggcaactgaagctttaaaaaaaaggtaggcctgcgggctccttgcctgagcaaagttaaagtgtagttctttcaatacaattcattcagacctcc

SEQ ID NO: 208525 - DNA, 122 bp, Homo sapiens
tctctgcgtctttccctcttccgctgcctcattcctttccttcctagccttggtcgtcgccgccaccatgaacaagaagaagaaaccgttcctagggatgcccgcgcccctcggctacgtgc

SEQ ID NO: 208526 - DNA, 122 bp, Homo sapiens
acgacagcttttactgtcccaaatcctgagattaagacctcagggctaaatcttgcgtggcggtaaaaattatttggaagttctgtgcaaccgttccaatattccgcttttacgtgcacgga

SEQ ID NO: 208527 - DNA, 122 bp, Homo sapiens
cccactgcctccatgacttccctttgccaaccccaactccctcgggcaacactgccgagacgacccgtccaaggcttcggcgcccccacccacaaactcttgtcgagagccgctcgggtgcg

SEQ ID NO: 208528 - DNA, 122 bp, Homo sapiens
caaggacgcagatgatgcctgcagattgggttgtgtgtgggccggctgggttggggagagcgtcttcccaatccatactcatacctgtacccgagtgcccaggggacagccagacaagctct

SEQ ID NO: 208529 - DNA, 122 bp, Homo sapiens
tccccgccctgggcacctccagctgtggcttctgttgcccaccttgaatcagggcctctccgccctaaccctagcactctggcttgggcctgcttccacgcgggggcaaatccgggggtggg

SEQ ID NO: 208530 - DNA, 122 bp, Homo sapiens
ccccgggagatccgagcaagctgatgagtgtatcagtggctcattctttctgttgcaccacggaccctcattctgtaaccgggataccagccagagatggggagcgggaggcgcagggcagg

SEQ ID NO: 208531 - DNA, 122 bp, Homo sapiens
cctcagctgcacttgcaggagcgcacgatcatgttggacagctgctccaccttgggcttgcggcccacgtagtacacgatgggcagcggctccagcgcctgcggcacgcagcacggcgccgc

SEQ ID NO: 208532 - DNA, 122 bp, Homo sapiens
ttcataaagtaaatatctttttcattgctctccagcacatgctaagaatttagcttccaccgccttaagtaaacactctgcgataccagtcctaaaaaagtcactgtggcaggggctgtggt

SEQ ID NO: 208533 - DNA, 122 bp, Homo sapiens
tcccgcagcacctgccctctcctgagctatgcctctggccttcccgcctcctcctccacacggacctccgcgccccctgaagaaggggggaaaaagaaatacgcattaatacctcgagcctt

SEQ ID NO: 208534 - DNA, 122 bp, Homo sapiens
ggacgagccagcccgtctctctctggggttgcacactgtccttgccggctgccactgccacgcggctccccccaggagtgcataagccctaccgtcacctgtcacacccaccacctttcctg

SEQ ID NO: 208535 - DNA, 122 bp, Homo sapiens
tcacagaggtcaggggtgggttgtccccaccaacaaccaatcaattgcctctgtagtggacggtagctgagtgtcccctaattcaattcagctctgatactgtctacctggagatagcatca

SEQ ID NO: 208536 - DNA, 122 bp, Homo sapiens
cttattaggataatctccaatccctagctcatctacttccatgtgagaattgtttaaaaacgattttgccctaggtaatacactttaagctccccaatgacttttcccatctcacttcttga

SEQ ID NO: 208537 - DNA, 122 bp, Homo sapiens
atcaccatctggcgatgggtcagatgactcccatacttttaaaaactacctctataggagcgtgacagcagcgagtccttgcctcccggcggctcaggacgagggcagatctcgttctgggg

SEQ ID NO: 208538 - DNA, 122 bp, Homo sapiens
tcccctcgacagcctctcgacagccagctgtttgtgtgtccgccaatgctctcctctcaacgtccagcagcttgtgtctctgcctgctagggtatcagggtttttataggcacaggatgggg

SEQ ID NO: 208539 - DNA, 122 bp, Homo sapiens
tttcaagggagttgtaacaggagatcctaaactgaaataaattcatccaagcagagcagacgaaggggtcaaagtggctgagacttgccactatgacttctaaggcaggggggttagaaaac

SEQ ID NO: 208540 - DNA, 122 bp, Homo sapiens
gggacccgcgaagccaactctgccggagacccaccccccggcggggctgggggctcgtggcgcagtggcaagaaagtgtgcaaattaaagccttccggagagaaatgaggcggccgagtccc

SEQ ID NO: 208541 - DNA, 122 bp, Homo sapiens
gccactgccgcgaaccgcgccccggctccgcccctcacctggggacgcagtgcctggaagcgctcctgccgcacccactccaggacgcgcagggcgggctcccttctgtttgcaggggaatt

SEQ ID NO: 208542 - DNA, 122 bp, Homo sapiens
acgatttgcacagactggattttttaaaatatatggacaatgattttgagcagcccgggccgaacatctcggcatagacaggcgcagaatttcgatgctggggtctagttagagtggcaagg

SEQ ID NO: 208543 - DNA, 122 bp, Homo sapiens
gcccgatgcgcggggtagagagtgggtttcctccaggcattggacttgagaactggctagcgcgcagagcccggggccctggagaggctccttggctttctcttttgggcgactatgtattt

SEQ ID NO: 208544 - DNA, 122 bp, Homo sapiens
tgggtccgggcccccggggatggggttcctatgcgtcccgggtgatccgcgcggaccttccgcacttctctgggtgggtggccttccctgagaagggagcatcccggagagcatcccgggca

SEQ ID NO: 208545 - DNA, 122 bp, Homo sapiens
gggtggccaaggaaggtttctctgaggaggatcatttgagctgaggcctgaatgatgagacgacatcagccatgcagataacaatttaggaattcccaaggaggacagagggctcaaccgtt

SEQ ID NO: 208546 - DNA, 122 bp, Homo sapiens
gcttgcgtccctaggccgccttcccgggccgtccacgccttaatggcctccgccgcgcggcgttcgagctgccgccatacttcccggcccaccacgcccagcgccgcccaaaggcgctgcgt

SEQ ID NO: 208547 - DNA, 122 bp, Homo sapiens
agagtctcttctcttctatactaaaagatagtcatcctgcagtcggaagtggcagttattcggccattggaaaagtctcatgtaatagtagcttttagatgatgtctcctccaaaggggcat

SEQ ID NO: 208548 - DNA, 122 bp, Homo sapiens
cgcccaacaaacacaggtgttgctctggtaaggcgttgcccatgtctgtggaggtgcagtcgcgggaagggaaatcgaaactcccagagcaggtggccccagccgacgaggtgagtgggctg

SEQ ID NO: 208549 - DNA, 122 bp, Homo sapiens
gagagctcggcctcaaggaagaggactcagcgccaggctgaggatgaggtctaggtggctcgatctcctgcagggcacattgggcaccttgctttacgccctcatctcttgggctggagctg

SEQ ID NO: 208550 - DNA, 122 bp, Homo sapiens
acaagccaataatgccagcttcttttacaggtgcacaagttgaacttcccagacgggattcgaacctacgatctccagtagccaaagccctgcctcggcaaccctgaacgccaacccaggag

SEQ ID NO: 208551 - DNA, 122 bp, Homo sapiens
tctcggctcgtggatctcaagctagggcgctcctggccagatgagagtggcacagaccctcgggaatcctaggttgagaagcaacgctcctggcggctagtgtttgggaaacttggagcagg

SEQ ID NO: 208552 - DNA, 122 bp, Homo sapiens
ctgacccctgactcctcatccggccaccagaaaccacctgctgagggggccgggaactgacgactgagagcccgggccgattgttagaagctgctgagaaccagctcttcccctaatcccgg

SEQ ID NO: 208553 - DNA, 122 bp, Homo sapiens
agatctcatatttgaggccagaagcattaggtccagagacattagtaatttgcccaaggacgggccctctcctaacatttacagaacttgagaagtttcaggcgtgatgaaggcacaaaact

SEQ ID NO: 208554 - DNA, 122 bp, Homo sapiens
taggggccctccgggctaggactgtcctcaccactttgtacattgccaaagtaaatataacgtagaggtcaagcgcaggcgctttgtgggcagacatgactgagctccactcgcgactcctc

SEQ ID NO: 208555 - DNA, 122 bp, Homo sapiens
atcatttggggaagttctgaaaacattgtgttaggatcacaaatcttctaacaaatcttacgcagaaatctgatataagatcagcccatagtggagtggagagaagacagagcctcctcagc

SEQ ID NO: 208556 - DNA, 122 bp, Homo sapiens
ggcatgagggtgacactgcctggtgctctgtctttccaggtgacagaacacagagcaagacgtcgacttcaacgcagaagcattctggacgacaactccccggggccgatccacaaggtggc

SEQ ID NO: 208557 - DNA, 122 bp, Homo sapiens
ttgcaggctgactatgcaccaagcgggctcgagtggattccagagttgaagcaggagccccggggaaaccagtgcctgacaaacctccctcaaactccaccgcccccgggcaccctgccagg

SEQ ID NO: 208558 - DNA, 122 bp, Homo sapiens
gacacacacacacacacctgacctacaacctcacctgcatagaaacaagagcatagttaccggaaaacaaacttagaaaaataggctggtctgaaaaactctgtacttctttccagttctca

SEQ ID NO: 208559 - DNA, 122 bp, Homo sapiens
ctgcttaccctcctccccacttcgttcttgagggggtggtttgctggtctttggcagggccgccactctgggtcagcacatctgagtcacacatgttcctccccagccctattggaggcttt

SEQ ID NO: 208560 - DNA, 122 bp, Homo sapiens
ttccgcccggtgccttgaggggatccagccccgcgtgggctcccgccctgcgtgggctcccgagtcacgtcgatgctggccccgctgtatcaccttcgaaaccgaatttctaatttgagcct

SEQ ID NO: 208561 - DNA, 122 bp, Homo sapiens
cctgttgcacaaggcttggggaagagaagccacctccatgccgaggcgaggagaggagtccgccaacctagactcagagcccagtgcctggctgcacaaagaagtggccgcacagggaggga

SEQ ID NO: 208562 - DNA, 122 bp, Homo sapiens
attacctgggagactttatttacataatataagaacctccgttcacagggaagttctgaccgtcactatcccaccacctcccctagtgctcagaatgaagttttgttccagaacaatgtctg

SEQ ID NO: 208563 - DNA, 122 bp, Homo sapiens
ggtcagtggcgctcagcggcggcgaggctgaaatatgataatcagaacagctgcgccgcgcgccctgcagccaatgggcgcggcgctcgcctgacgtccccgcgcgctgcgtcagaccaatg

SEQ ID NO: 208564 - DNA, 122 bp, Homo sapiens
atgggaggggtcgtccctaccagcccctcccttgtgcccattccactcccgcctggctgccgtctccagctggtcccggctgcctgcccggtcacccgatccgccctctaaactttacggca

SEQ ID NO: 208565 - DNA, 122 bp, Homo sapiens
gaggcctagaaactagacataacctgcccaaggttccacagctatgcaagtcaaccaggacgatacaatcaccttaggaaggggaaaaggcagcaatgtggttttggccagtaatctttacc

SEQ ID NO: 208566 - DNA, 122 bp, Homo sapiens
gggggccccaggctttcttatcagcttgcccagatgggggcagaaggggaaggtggggagcggtggggcctgaaaacagcagtcagatgtcagaaatggagccagactctgtattacaggaa

SEQ ID NO: 208567 - DNA, 122 bp, Homo sapiens
ttgcgcgcccggagcggttgctgggcgggggcgcggcggcgcgctgggctgggaagtgtccggggaggcgcgggccggggtcgcgcacctcccggagccttgtggggtgtgctgcctccgaa

SEQ ID NO: 208568 - DNA, 122 bp, Homo sapiens
cttactttcatatcggtcccaaacaacttttctcctagactttaaggaggcctctcccaacgatggtttggaggatccgcacagaagcgaccattccatcttttcaatgaaagtcttggggg

SEQ ID NO: 208569 - DNA, 122 bp, Homo sapiens
tgcagacccagggaccaccaaacactccatcactgcagacccagggaccaccgaggactccgtcactgcagacccagggaccacagaagatgaaaccactaaacatggtgacactcaccttc

SEQ ID NO: 208570 - DNA, 122 bp, Homo sapiens
gaggctgatagaggctgggggagctgcttctggtctgtgtgctttgctctcaggctgctccgaccctcccgtgttctgcctggttagggtggtgttggtctcatgagtcagtgtcagggaat

SEQ ID NO: 208571 - DNA, 122 bp, Homo sapiens
aagccaaaaccccagaactccaaagttacaagaggtcaaaacagtggctctctccacctccgctcctacctcctcccaaaatgcatgaaattcccttcctctgactgataaaccctcactca

SEQ ID NO: 208572 - DNA, 122 bp, Homo sapiens
ggcagggtgtgaggagcttcgtcctgagatcgctggtcacttgaaggtctcgggagagggcgtcctgccctgccaaactgggtcgccaggagccagaaggttccctcagtgtggccatccct

SEQ ID NO: 208573 - DNA, 122 bp, Homo sapiens
gccgcaggggagggcgggcggccctgctgcgctggacagccccggccccgccgcttctggcgacctgactgtcccctgtgaccacaggaaggaaggggctgcagcagggcgaagaggaacac

SEQ ID NO: 208574 - DNA, 122 bp, Homo sapiens
tctgtggcattttctgccaataaattacctgcctgacaggaaggcgtcactgctcatcaacgctggtagtgtgtaagctggtacttgttcagttaaggagaagagaaatagtgcctcagaga

SEQ ID NO: 208575 - DNA, 122 bp, Homo sapiens
gctctcctggtcagctctgctgccttgtgagggacagggacatctggattgcatccttcccgctacccagaacccacagccccaccttgtcaggcttgcagcagggacttatgttgtgggag

SEQ ID NO: 208576 - DNA, 122 bp, Homo sapiens
cccccacgtctcagccaatgagcccggagcgcgccctccagcagcccctccctcacgtcccgcagccaatgaacttggaacgcgccctcccggggcaccaccctcacgaccctcagccaatg

SEQ ID NO: 208577 - DNA, 122 bp, Homo sapiens
ttttctactttatttgggatttaatgttcttacagaatcctgctgcctccctctgccccccgacccatccacccccagccccgcatgcaagaggcgtaatggcccgttcagcatattagggg

SEQ ID NO: 208578 - DNA, 122 bp, Homo sapiens
aaaccagagtggagaacagaatcgaaacttacaccggaggggaaagagcagacgtggtcacggagaaaacagagtagctggaatgctgttctaggctcataggagcatgagctggtattaat

SEQ ID NO: 208579 - DNA, 122 bp, Homo sapiens
gttccttggcgcaccaaagaaaagacatgctcggcgtggggatggaggcctccgtctcggcgtttccatgtaactcgtttctcaggatatctgaacagaaaccctggccttgacattccttg

SEQ ID NO: 208580 - DNA, 122 bp, Homo sapiens
tgggctggaccagggggccttagagggcagaggtcaaggagaaccccggagtctggggaccggccaaggcttggcgttaacctttgtggatgaaaagtcccgctgggctgatcctgcgcgga

SEQ ID NO: 208581 - DNA, 122 bp, Homo sapiens
gatgagtgtggtttcatcagaggagagaatgcggaggaggaggagaactcccgcctcctccgaggaagcagcgccccttagtggtctgtctctcacacggcaatgtgcgcttgctctcttca

SEQ ID NO: 208582 - DNA, 122 bp, Homo sapiens
aggtatttaaagattttaataatctgtattcccatattaaaatgtctaaacttggccgggcgtggtggctcaagcctgtaatcccaacactttgggaggccgaggcgggcggatcacaagat

SEQ ID NO: 208583 - DNA, 122 bp, Homo sapiens
gctgaccctcccaggttcccctcacaccagcttaccaagtaaccagtaacaagctccgcacgcggcgactgtaccttggactccctaaaaaggtttccgtttccacttccgtccagggagac

SEQ ID NO: 208584 - DNA, 122 bp, Homo sapiens
gtcttacctgatggtggctgtagtgccggataaatgctttcaggaaggatttgggccactcgcttagatagcacatgccactctccagaagccccttaccaccgaattcttctgtaacatca

SEQ ID NO: 208585 - DNA, 122 bp, Homo sapiens
ttgtagatcttaatgatttctcaacagcccctgattgaagcatgcccaatttagcaatgccgtaagtaactttttatatttccttagggaatcatttcacttatgaatcttttctgaatctg

SEQ ID NO: 208586 - DNA, 122 bp, Homo sapiens
gaaatatctggcctctactataaatacaagtcccattgattaaaatacccggaaaaaatacggaaagaaaatcactaagagtttgtgtcgaaccgtcaagaaaccacaacaaaaaaaagagg

SEQ ID NO: 208587 - DNA, 122 bp, Homo sapiens
cttgttctcctttttccacttcatgcgccggttctgaaaccaaatcttgatctgtctttccgtgaggcagagcgtgtgcgcgatctcgatgcgccgccgccgcgtcaggtagcgattgtagt

SEQ ID NO: 208588 - DNA, 122 bp, Homo sapiens
gcccctccttctgcggatgggtttctctctcattccaccctccacccacctccggttccgcgtgcacgcgcgagatagtccagtgggcccacagataacgaccatcagagattaaagaagga

SEQ ID NO: 208589 - DNA, 122 bp, Homo sapiens
ccgaaacgctggctttggtaggacaaccaagctcacacgccgagagattccggaagtgctcgttgcccaaaagagaccggaggaaaacatggtcgggagggggataaaaggttccggaatga

SEQ ID NO: 208590 - DNA, 122 bp, Homo sapiens
attgtttcctcaggtggcgccccgcctccgagccggccgtccttccgggggagcctggagcgagaccggatctcacacggtggtgttaatatctcgctggggcctccaaaatgttgtgccca

SEQ ID NO: 208591 - DNA, 122 bp, Homo sapiens
cgtccctggcagagaggggctgtctcttgattcctgagcttcagggccacatgtctcaggcgggttgagcctcgatgatgtctgccgtggggttcgcttgtggacgatcccttcctgggacc

SEQ ID NO: 208592 - DNA, 122 bp, Homo sapiens
aggatatcttaagaatctagaaaatttgcaaatccatttaaatccccagaggttgcctggcggctgactggcctaaagccagactgattcttagaaacaaggcttgggccaaggaacagcgg

SEQ ID NO: 208593 - DNA, 122 bp, Homo sapiens
gctctcggtccgggatcagaaagcctgggagggccgaggcctccttgggtactccaagagcggaggggcaggcccgcctccctgcccagtgcggcggcggggagagggtattcccggaactc

SEQ ID NO: 208594 - DNA, 122 bp, Homo sapiens
tgaggtggaggcgttacaactacctgctctgtgtgtggggggggaggggggaggggggtacgcatattcacttgaagtcgaggttcccagggcatttccatgtgctccaggcctgactaccc

SEQ ID NO: 208595 - DNA, 122 bp, Homo sapiens
tggcagcccattccgagactagcggaggcgggcagggagggtatataagcgttggcggagcgtcggttgtagcactctgcgcgcccgctcttctgctgctgtttgtctacttcctcctgctt

SEQ ID NO: 208596 - DNA, 122 bp, Homo sapiens
ttgaagtgctgctattgggggctatctgagttggtaatgttgacatagttcaggattccacgttgaactctggaacctgaaaaatgattagaaaggtttacttaatcgcgtgccaaatttgc

SEQ ID NO: 208597 - DNA, 122 bp, Homo sapiens
tcctgccctcctctttcctcttgccctcttgccctcttgctcctcgtggctcagccccaccgagggccagtgttgaggagtttgggacagtcatatcagtgcctactgggttccccatctcc

SEQ ID NO: 208598 - DNA, 122 bp, Homo sapiens
cccaaccctcgctctgctaggcctcaaggaggcctcaaccggctcctggctctggccccacggccaaggctgaaccccagcaacccccgggaactcggggtctagccaagcggggacaccac

SEQ ID NO: 208599 - DNA, 122 bp, Homo sapiens
tgtgtctgcaggagccaaatccaaatgagcagtccaggtacttcagagttttaacctgagcgaaacaggaatgtctcgggtcttaacaggaccgtccgcccgctcggaagaggcgaatctcc

SEQ ID NO: 208600 - DNA, 122 bp, Homo sapiens
ggctaatttttttgtatttttagtagagacggggtttcaccgtgttacccaggatggtctcgatctcctgacctcgtcatctgctcacgttggcctcccagagtgctgggattacaggcatg

SEQ ID NO: 208601 - DNA, 122 bp, Homo sapiens
gatagtccaaattttgcatgccagcaaacggtggagcttggaaaagaactctaagtcttccgttggccatgaggagaaattttctgagcctcttctgcataagtgctcattaccgtgtgaga

SEQ ID NO: 208602 - DNA, 122 bp, Homo sapiens
cccaggaaaggcgcccacagccacagccagcctggatggggcccctggagcgtggggtctcgaacaccacccgtcagggctgaagcccacttccctcaaaggtgacaagtgtggccgagagt

SEQ ID NO: 208603 - DNA, 122 bp, Homo sapiens
agcaactattgattagcctggaatcccgacctaaagcaaaggaaatcacaagtatgaaggcgtcgtcagtcggataaacactagtactctgcatgtgtaaagccactctcgtctcctgaaaa

SEQ ID NO: 208604 - DNA, 122 bp, Homo sapiens
agcctcacgcgcgaaggaacggcatcccgcagcaccttcagacaaagggctgccccgccccgtctgcgcagccgccaatccctgggggctcctgcccctcagttcccgcccccacagccgag

SEQ ID NO: 208605 - DNA, 122 bp, Homo sapiens
aaggcatgggcactgagtggcatccagcgccggttagtaagtgacaggaactggacttcacgcgttgtgtccaaatgcccctttcacccacgttggtctagtagccatctgctgaccgtata

SEQ ID NO: 208606 - DNA, 122 bp, Homo sapiens
acacactccgctccggccttgcagcctttctccctccgagcccctcacccatcccacccccgcccagtctcgggaacccgcccccagtcccaggcccccgtaaagcctagacggcagaaaag

SEQ ID NO: 208607 - DNA, 122 bp, Homo sapiens
ggtggcacatgtcgttttgcttcggaaaattccactgcattgtatactgaggggataatgcgagatgagaaaggaaaatcacacgttagtgttgttataaagatagtattgactttacacac

SEQ ID NO: 208608 - DNA, 122 bp, Homo sapiens
ttcggaactgcacacagtagttcataaactttagtggatatataccaccaccttaacaatcggaaaaggcatggattctcaaaccagaaaaaaatcaccatgataaattcctccactggttt

SEQ ID NO: 208609 - DNA, 122 bp, Homo sapiens
gcaaaacaaacctactgagtctatagagcagttaagctgccttccagaccaacctcaagtcggagttcttgtccctttctttgctaaccccaatactcctaaattccagcccctgcacattc

SEQ ID NO: 208610 - DNA, 122 bp, Homo sapiens
tattaccaatcccttggcattgcacattgacttagaccgtatcagccaatagccattgtgcgaaggcaggactgcactaaccttttcccgcccctaccctttgggccaatcctttcttttga

SEQ ID NO: 208611 - DNA, 122 bp, Homo sapiens
cgcacgcaaccccagcggtcgctctcactttgctgtgtgaaaaacccaaaggaatgattgcgagtcccccgcaaggggggttggtcttccttgctgacaagagtagaaagataaggtgcaga

SEQ ID NO: 208612 - DNA, 122 bp, Homo sapiens
agagggtgtgtaggttaatggcaggaagcaagttgcagcgcggagcgcgggccctgagcgcgtgtcaggcttaatgatttattcaagctgcagcgcatccgggcgttgattggctgcaggca

SEQ ID NO: 208613 - DNA, 122 bp, Homo sapiens
ggcgtggcttgaagtcccctcctccatcccggggatcacgttttgcctgggggagctgatcgcaagactaggcaacctccagccagtccctgggtcgggcggatcctcccagaggtggcaca

SEQ ID NO: 208614 - DNA, 122 bp, Homo sapiens
caagtggaccttggaagcccgtccctggatgccttcatcccctgcaccaagcagccatggcgccactaattttgcactgaagatgtctatgtttcacttgtctgtcttccccaagggacttc

SEQ ID NO: 208615 - DNA, 122 bp, Homo sapiens
gcaggcaatggaagcttttccaggagaaacctaattctaacctttccagaggccaggagacggcagcgcagggatagcacctggcgcaagtgcctgtttggatgccgaggtcgcctccctcg

SEQ ID NO: 208616 - DNA, 122 bp, Homo sapiens
ctttttgttttcccaacaagtgcagccacacctgattttcattgtgaaaataccacacaacgccccctcctttcctcccaaccaatgccattcaatttggccacacctgttgccagccacgc

SEQ ID NO: 208617 - DNA, 122 bp, Homo sapiens
gctcgaacccaccaccaggttggacgtacttgagggaattcagaatctcttcgttcttggcgttctcctgatgcccagactggttgcacgggaagccaagcaccaccaggccccggggccga

SEQ ID NO: 208618 - DNA, 122 bp, Homo sapiens
tttcattgaggcagcatctattcctgtttggaagagaaagccgagaggtgttctgttccccgaggaagccatcaaggcttcatgacctgctgtcctggggctgttcacagtgatagctggca

SEQ ID NO: 208619 - DNA, 122 bp, Homo sapiens
cccctccctactccggaggccaagcgccccagcgggaggcttccctgcccgcctcggcctcgcttacaccgcaggtgctgtgagtcacccacctgcgtggtgagtcaggggaggaggccgag

SEQ ID NO: 208620 - DNA, 122 bp, Homo sapiens
gagagggggagaaaagtgaagcgggatagatttagggtagagatgttcaggagaggcgggcgacccatctcagatgaaattcagaaaaactgacaactgactaggggtggcaggatggcaca

SEQ ID NO: 208621 - DNA, 122 bp, Homo sapiens
gccggttgtccttgcagcgcttcccaaatcaggcagaagtgaggcagccccacccagtcacgaggaccctgcagaactcgagcctttaagcgctcctctaggctcacatgacccagacccac

SEQ ID NO: 208622 - DNA, 122 bp, Homo sapiens
gtcccctcccgcgctggtgcgtgaaggtggaaggaggtagggtgcgccaccctgtgctggcgttaaacctacagatcggaatagggaaaacgagctctggacccctcgcccgccagggtagt

SEQ ID NO: 208623 - DNA, 122 bp, Homo sapiens
ggtgagaggggctgtccctccgagaagagaagcaagacttaggcagaaggggtacagggccgggggctgcacacaaagaccctaggagaatcctatgccccaattcagggaacatcttgcaa

SEQ ID NO: 208624 - DNA, 122 bp, Homo sapiens
ttacccctttaagatgtataattcaccggtttcagtacttccacagagttgtgcaaccatcgccaccatctagtcccagaacatttgcattacccccaaaagaaatcctggactcacaagca

SEQ ID NO: 208625 - DNA, 122 bp, Homo sapiens
ggaagtgtcttggggacagggggccacagcagttgtggccacatggtaccccagggccgacgcagggccgacgggcaagaggctgttatctccagcctggcgcttccgggcctttcttgagg

SEQ ID NO: 208626 - DNA, 122 bp, Homo sapiens
ggggtctggggtctcaggtctcggccgcctggggagcgacctgcctggagaggcgggttgcgatggcagcgctgggctacagaccccgccttatttgcggggaggagaggacgggtggagtc

SEQ ID NO: 208627 - DNA, 122 bp, Homo sapiens
ctgaggatcccagccgctgccccgggcctcccgcgggcgcacgcaatccctgccgctgtgcgcagatccagccgagtctgccggcgtggtgcctgctcaccgcattatccgctccgagacgg

SEQ ID NO: 208628 - DNA, 122 bp, Homo sapiens
ttcagtggatggctcagtaggggcctctcacagacctttgacccgggtaccaagtcatgacgcacatagaaaatggcaacatctggaggctgggtgtgggggctcacacctgtaatcccagc

SEQ ID NO: 208629 - DNA, 122 bp, Homo sapiens
cctttgagaaacaagttttgttgtgctgatttaacagcctgtgaattctgcaaacacgatcgtgaaaaaatgccaatctgtcctgtgtaagccctgtgtgaagttttgactttaatctacca

SEQ ID NO: 208630 - DNA, 122 bp, Homo sapiens
ggggcgtcggcgcctagggcgaagtgagccagggtgcagtcgggaagctccaggacgaagcggcgcggcggagccatggccccagcgcagaccccgcgccgcccgagcagcggccccgacag

SEQ ID NO: 208631 - DNA, 122 bp, Homo sapiens
ggaagccgagaagaacgggactcaaagcccggctgggaagtcaggtatctagttggccggcgataagggtttcaccttcaggactggagctccacaagattcaaccgttatatcaacctccc

SEQ ID NO: 208632 - DNA, 122 bp, Homo sapiens
cagcagcgttcgtcccttgatttagagggctatgatttctacaaagtggcccgactggcccgcgaacacgcagcagagacgcggcctccacaaggtcagaactaagatgtcctcagagatcc

SEQ ID NO: 208633 - DNA, 122 bp, Homo sapiens
agagtcaaaatgcatttcatatgcattacacacaactggtcatttgtaaatgatttacaccgtatcataagagaaatcaaacccacaaaggccataattagctttatctcaggaaagaatgg

SEQ ID NO: 208634 - DNA, 122 bp, Homo sapiens
ctgcactcaatcaataccagtgaggacactgccacacttgctgaacacaaccctggagcacgtctacaggtcaacagcatgacaccgataaaactgaaaaatggaaaaagcacaggagcccg

SEQ ID NO: 208635 - DNA, 122 bp, Homo sapiens
ccggaccaaagctggcctctcccggctcctcctcctcgctccccaaggcctttcccaccgcgtcattgtctcggtttatctgcagatacgtctacctagcagtcagcccagcagcgtaagtg

SEQ ID NO: 208636 - DNA, 122 bp, Homo sapiens
tgttttcgaaggtctggggtgctgctgtgagccgggatcgcgtatctgctcctgttctgacgagactgctcctgctggaagttcagcctggtgaacctgatttgggaggggatggtgtgatt

SEQ ID NO: 208637 - DNA, 122 bp, Homo sapiens
tctgtgtcgtgaagcccccacatggagacctggggagtccggagcgtgtgggggggctcccgattctctctccctctctcggactcgccgtctgtctccacctctatttctctgcgtaaaac

SEQ ID NO: 208638 - DNA, 122 bp, Homo sapiens
aaatggaatatcttttcttaaaagcaccataattcagtcttgtcactaattcagacagtgcgtcccccaattaggaaggttaaactatgtatcacacccttcacataaattgccaggtaaaa

SEQ ID NO: 208639 - DNA, 122 bp, Homo sapiens
ctccgattctcaatgacaaccggtaccgtatccatgttaacacatcaataaaggcccaggcggttttcaggtaggaatacagctcgctcaggcgcatgtgaggaaactcaattaatagtcca

SEQ ID NO: 208640 - DNA, 122 bp, Homo sapiens
ccttgcatctaatttgccgtcaagagaatatctgaataaaacgaatgaaaaggagaaaaacgcattcccgtagtatctggcactgtacatgaatcgtggaaagtgggagtgagagtgggcac

SEQ ID NO: 208641 - DNA, 122 bp, Homo sapiens
agactctaccgcgaacattttttgctccagacattgtaaaggattcccagacatcgtaaacgctttgctccagacattgtagatgctttgcgtgcattattttcttcgcacaatcacgctag

SEQ ID NO: 208642 - DNA, 122 bp, Homo sapiens
tctgtgcggattctgtacttcttccccatttggaatgtttgcactcaaaatgctttcctccggcatgttctctaatgcctttaaagtaatgttcttccattcaccttctgcgttagctttac

SEQ ID NO: 208643 - DNA, 122 bp, Homo sapiens
tcacctcccgggttcaagcaattcttctccctcagcctcctgagtaactaagactacaggcgtgcaccttcatccctggctaatttttgtgttttttggtagagaaaaggtttcactgtgtt

SEQ ID NO: 208644 - DNA, 122 bp, Homo sapiens
tttgcggactgtagtgagggaaattcttgccatgtaaatgcccaggcaagggctccaggtcgggcacctttcttgtccgattcctcaggcttttgggtgctggcagcgaggcacagacaaag

SEQ ID NO: 208645 - DNA, 122 bp, Homo sapiens
caccaaatgtgcagcagcgtgattcacaggttcaccactggaaaatagaccttaaaattccgccaatattgggtcaaagatcttacactataacacatactacactgtgggcacggatcaac

SEQ ID NO: 208646 - DNA, 122 bp, Homo sapiens
ggggcggcacatgggccgggtgtgtgggcttggtttggatggggacggggttttgcggcgcgcctgagttttgacactccaaccccaccgaaagtccggaggagccgggtgtgctgctcgcg

SEQ ID NO: 208647 - DNA, 122 bp, Homo sapiens
gtcttaatcctagcaattgccttcaggagcctttagtttctggctcttttcctttgtagccgcatttcctactacgttccccacccatcattcctttcaaccacactggccaatgacctaat

SEQ ID NO: 208648 - DNA, 122 bp, Homo sapiens
cagcgggaagcgcgggcggcggcgggatgcgcgctctgggcggcggggcgcggcgctaggcgcccggcggggcttccccaggctgcgaccccgcgggaccctccactcctcccgccgcctcc

SEQ ID NO: 208649 - DNA, 122 bp, Homo sapiens
tctacacgtctgtctggtgggacgcctcccctggcccgtctacacgtctgtctggtgggacgcctcccctggcccgtctacacctctgtctggtgagacgccttccctgtccaacacacgac

SEQ ID NO: 208650 - DNA, 122 bp, Homo sapiens
ttgtgacacatttttgtgtcttcctgcgctggctgaggcctcccgtgaatcgtctcatagcggtggtgttggtgcctgtgctggccgaggcctcccatgaatcgtctcatagcggtggtgtt

SEQ ID NO: 208651 - DNA, 122 bp, Homo sapiens
acacctgaagagttcattttccatcttggtctttggtttttcctttgaactctctttacacggccctctttcccacttcatcacttctcccccaccgtcataaaagagagctcttccctggc

SEQ ID NO: 208652 - DNA, 122 bp, Homo sapiens
gtggtgatatgcctttgaaactgtcattaactcacagtgtgagcctattatttgaccgagcgagttggcaattggggaacaactgtaccatcccccatgatgatacactgtttattattatc

SEQ ID NO: 208653 - DNA, 122 bp, Homo sapiens
cccctcccaccccagggcctttgcacctgctgctcctgaaaccaaacaaggacccccccccgcccttaggggcctgtgggtcttcccaagcacagaagcaaggacaatgttgagttccttca

SEQ ID NO: 208654 - DNA, 122 bp, Homo sapiens
aagtctgcatccctttcaacccctggctgcagttttcagcaatggacttcaagagttgggcgttttttttttctttcagcacatatctacatttaaggggcacaaaagcagtagtgttatgt

SEQ ID NO: 208655 - DNA, 122 bp, Homo sapiens
ctagcatgcgttgtgggacgtcagctgcctgctgtgctcattaccactagcccaggaatgcggtgttgactcatggctgcagctccgcttttgaacagaagcactcagggcctgagcctgta

SEQ ID NO: 208656 - DNA, 122 bp, Homo sapiens
ttgtttgcttttaatctctcccactagaatgcaggccccaggagggtgggggcttctgtccgagttgttcagtacaacgtgcccgattcctcaaatggtgccttgcctccctgtttctcact

SEQ ID NO: 208657 - DNA, 122 bp, Homo sapiens
cctctccaaaaccccccatcagcatcccagcatctggacctgtgtcaccagccgctctgccgtacaagagaactggattttcagctgggttcgctgcttccctaaacaaagtagggttttgt

SEQ ID NO: 208658 - DNA, 122 bp, Homo sapiens
gcgcgcacccgttctctcggctgcgggcgctgccacctgctcccaggggtggtgcgtctccggtccagctgtgccgagcgctgccctgggtgcatccgtggcacctctcagggccccatccg

SEQ ID NO: 208659 - DNA, 122 bp, Homo sapiens
ccgcctgcgggcgcccgggcaacgggtctgagcgacggcaacccgagccaatgagcagcgcgaccgtgggcacctccttgccacaaccgcccccgagggccaaccgggatgcgcgggcgtcg

SEQ ID NO: 208660 - DNA, 122 bp, Homo sapiens
ttagacaacgccccacaggccgcggctctctgctgaccctcagcagcgatgagaccggcgcgcacaagccagcagccactagctctcccacaaggccgagcgcggccaaagggcagccccgc

SEQ ID NO: 208661 - DNA, 122 bp, Homo sapiens
gttgtgccaggcgctgaatcaggctctggggtgcagcagtgacctcggtggtcatgtccccgcgtcgcccggccacctccgcagagcaagctgagcagggggctggctggaggccgacggcg

SEQ ID NO: 208662 - DNA, 122 bp, Homo sapiens
cgcggggatccggccgccgcgcgggctggggagctgccggaggcgctctccccgccgcggcgctgccccagactcaccctcagcgaggcacagagtcgcccagtgcccgtccggctctcact

SEQ ID NO: 208663 - DNA, 122 bp, Homo sapiens
cagaagatcgccagcccaattctctgagttccgaggagcctccaaccaggtatctgcatccgtcttcccacacctgctgaattcccgcctttctcctgaggagctggacgtggggatcctgg

SEQ ID NO: 208664 - DNA, 122 bp, Homo sapiens
tccctggtgattctgatattttgcctctgtacctccagatggcacgcacacacacacacacggcttgtcgatttctcggtctcgggctttgtctactgactcccgccgtgcaggattgggat

SEQ ID NO: 208665 - DNA, 122 bp, Homo sapiens
ggctccacccagttcgagcttcgcggctgctttgtttacctaagcgagcctgggctatggcgggcgcccctcccccagcctcgttgccgccttgcagtttgatctcagactgctgtgctagc

SEQ ID NO: 208666 - DNA, 122 bp, Homo sapiens
gacagctactcactcatgcattccctccctcgttcatgcaatctacaaatactcactgagcgcctaacagaaatgcatgaccttagggagggttctgggggagggacacggggttggatcgg

SEQ ID NO: 208667 - DNA, 122 bp, Homo sapiens
aaaaaggtagtgatagcagacacagagagacagccttgggtttgtaatattcttgacctacgtaactgatggaactgattgcatctcctgaatcttcttcctttatgaggatgtttcaggga

SEQ ID NO: 208668 - DNA, 122 bp, Homo sapiens
ctaagtcgaccgcgaagacccttccttccccgcccgcccgctcctcctccgctccccctccgctcccagcccaggatccttcaacccagagcccggctcggacctcagccgcccagcccctg

SEQ ID NO: 208669 - DNA, 122 bp, Homo sapiens
gagccacctcgcccgtcacatccccttcccaggggctgtgcatccaatgtcgagtcagtgcgggggattagagggccggggtcctcgccctacctcagtgcatctctgcagggccgtaccag

SEQ ID NO: 208670 - DNA, 122 bp, Homo sapiens
cagcgcggccgggctgagagtgggggcggggcggaaggaggcgagagggaaaaggccatccgcgcgactgcccgattaaaaacagtcctgatcgtcttccctgcggcatgccgatgccctca

SEQ ID NO: 208671 - DNA, 122 bp, Homo sapiens
gagtgggcctctcctgtgccaactgccagaccaccaccaccacgctgtggcgccgcaatgcggagggcgagcctgtgtgcaatgcctgcggcctctacatgaagctccacggggtacgtggg

SEQ ID NO: 208672 - DNA, 122 bp, Homo sapiens
tttcataactctgccagctctttgtggcgggttagccttctgctctgggtggcacagtggcgtcagcgtctgttttgctaactctgggcatctcatcctaactgtgcccagccacacggagg

SEQ ID NO: 208673 - DNA, 122 bp, Homo sapiens
cacagactatacacagaatcacctccaagatgcactgatagcaagctgcagaaccacatacggtgtgatcctaagacatcgaaaaaaccagttatatcctcacaagtacgtgcatgaaattt

SEQ ID NO: 208674 - DNA, 122 bp, Homo sapiens
gacccccgcccaacattcccaggccccatttctaaacacacaattaagatgccacccctacggaaggcaaagcaaacctttgtctctgcagctacttggggtgggtggggcatgtgaaactg

SEQ ID NO: 208675 - DNA, 122 bp, Homo sapiens
ggcggacgccggggagggccgggccaagacacggggcggcaggggcgcccggggagggggcgcgaaccggcgcagacatgcaccgaaacgagcgagcgaaaggggaaatgcagtagagacac

SEQ ID NO: 208676 - DNA, 122 bp, Homo sapiens
gccatggcggcgtccgcctcctccacattggagtaggtcacgaagccaaagcaacgggagcgcttggtctggggattcaccaccaccacgcagtccgtcagagtcccaaaggcctcaaagtg

SEQ ID NO: 208677 - DNA, 122 bp, Homo sapiens
tagtcgctaattacgccttggggatggaaagaaaccctgcagggaaagtagctttggagacgttgaatgtgctagctgctgcctggggaccagtaactttggcattcaatttagggtggggc

SEQ ID NO: 208678 - DNA, 122 bp, Homo sapiens
acgcatgcgtccttcgtctccttttgttttccccgctcccgcccactaaaccggatgtgacgttgacctaccttagtcacattgttagggaaggaagtgtgccgcgcctacctatctgcccc

SEQ ID NO: 208679 - DNA, 122 bp, Homo sapiens
tcactgaccccatcctctttgaggcctattttgggctcaatgaactggctgagggcattccggcatttctccaccacgtgctccatctgcaggtaggaggcggctgtaaggtagttgacgat

SEQ ID NO: 208680 - DNA, 122 bp, Homo sapiens
atgaacttttttccctaagctgatcattcaagtacactagatcccttctgaaataccaatcgtcagaaaacagaatttgacactagccacccacgagtttaaaggaccgctgcaagatgcat

SEQ ID NO: 208681 - DNA, 122 bp, Homo sapiens
aactcgttcagctgcgctgcagatggggcctgctgctcgaagccgctgtctccagggagtcgtcaccgaaccagctcggccagccgcctgtcgtgccgtttaaggttaccgcgcttcccgcg

SEQ ID NO: 208682 - DNA, 122 bp, Homo sapiens
ctgcactacagcctggacaacagagtgagacccccatctcaaaaaaataaatgtggaagacgcttttgggaagagaatacaattgatcccatctttctaaaggataatgaggtaacaggtat

SEQ ID NO: 208683 - DNA, 122 bp, Homo sapiens
ttttttttttgagacagggtctcactttgtcacctggactcgagtgccatggtgtcatatcggctcactgcaactttcacctcctgagctcaagcaattctcctgcctcagcctcctgagta

SEQ ID NO: 208684 - DNA, 122 bp, Homo sapiens
tgacccgaaagccccgcctgactccgggctgcaggagggggcgtgggacgggggcggagccgttggcgatgacaacagccccacgtgaccggccaacactgagtgttgtctcgctctggcgt

SEQ ID NO: 208685 - DNA, 122 bp, Homo sapiens
aggaggcgcggggcggaaagggttagttaggagcccagaggctgatctgtgggcgcccggcgagagaggccccgccccgccctggaggccctggcagctccgggctgagagcagttccggtg

SEQ ID NO: 208686 - DNA, 122 bp, Homo sapiens
gtgggtgaggacaggttttgggactcaggagctagtccctgggtttgtctcgtcagccttcgcccaccccttgacctcgaatgggcctcctgacccagaacatggggatcggggcctgggaa

SEQ ID NO: 208687 - DNA, 122 bp, Homo sapiens
gcccctttacctgtgccatcccggccgcagacccaagggtgcccttggagccgtgcccgccggcctgggtgtcaggcttgtccaacgggttcttagagaacctgggccccatccctccttgg

SEQ ID NO: 208688 - DNA, 122 bp, Homo sapiens
gatcaatgttttccttattatttgggcattttcatttgcatagaaacattgcagtttctacgggcttagaaacaaagcaacaaaaaaaataaaagtccattgactctgcctcttcctctaat

SEQ ID NO: 208689 - DNA, 122 bp, Homo sapiens
cctgcctcttaagcctcatctcctacccttgcttgttcttgctatgtgggtcagattttccggtctccagagctgaaaacaatcttaactgacaggcattagatcatagactctatctacag

SEQ ID NO: 208690 - DNA, 122 bp, Homo sapiens
accatatcacctcctaacatgtactagaagattgaaattaccagtgtggctcacatcccacgtctgctggccccacagccccacagagcccagcttgggttcaggcagctgtccaggcctcc

SEQ ID NO: 208691 - DNA, 122 bp, Homo sapiens
attggccataattgatataatgtacaataccaaaaagggtactcatagcagatcaggacacgaactgctcagatcccccttaaagaatttgctactgaatgcaaggagtgaggctgcatcca

SEQ ID NO: 208692 - DNA, 122 bp, Homo sapiens
ccccgcccctcttctcccaccacaatgagatcctaagatggcggtggctgcggcggttggcgctgcgtagctgaggtcgaaaaggcggccactggggccgaggcagccaggaaacgtgtggg

SEQ ID NO: 208693 - DNA, 122 bp, Homo sapiens
ttagatatcctttcacttggatctccctgtttccttactgtcctaatgaatagaaatgatcgttacaagctgggcatggtggcttgcacctgtagtcccagctactggggaggctgaggagg

SEQ ID NO: 208694 - DNA, 122 bp, Homo sapiens
ggcgccaaggcccatcagtctttctccgctgtcagtgataagaagccaacaggagagcaacgggacgaggggaaacacttccagggctcacaggagtagccaacggtcaccaaattaacatc

SEQ ID NO: 208695 - DNA, 122 bp, Homo sapiens
aagcaatctggcaaccgggggccgaagaacaggagaggaccaagcggcgagacaccagcacgcaccaggcaagctggagaaactgcaagagtcgcctgacctggtctgcagcctgagaccaa

SEQ ID NO: 208696 - DNA, 122 bp, Homo sapiens
cccgggccgcgcggccccgcgcccgccggctccccgtcgcagcaccagttccacccgggtcgccggaaacgcgagaacaaggccagcacctacggcctcaactacctgctgtccggcagccg

SEQ ID NO: 208697 - DNA, 122 bp, Homo sapiens
tgaggactggggctggcccagaggcactttctggtctctgaaggcagtgggctatggtgacgtgagtacttggccagctccaaactcctgcccaacctctctccagaccccaagcatgtgca

SEQ ID NO: 208698 - DNA, 122 bp, Homo sapiens
gatttgatggtattttaggttaacaagtttaatgtaataaaactcctaacaatttccacacgattgatttgtccagcccacaactactccaccacacagttgctaataacatcactgtgctg

SEQ ID NO: 208699 - DNA, 122 bp, Homo sapiens
aggagaaatgctaatttctcattttgtacctccctggatcccgtgtccatgccggcagaacgccaccataaagctacacctttttttttaaagagatgcgactgagaaatatgccagatcag

SEQ ID NO: 208700 - DNA, 122 bp, Homo sapiens
gcagaaccgctgaccctttaacaagttatccctcacagaacaggtgtctcccccgactctcggtggagagggatggctggatacttagtgacatcagccacgagccaatgggaagtcgggct

SEQ ID NO: 208701 - DNA, 122 bp, Homo sapiens
ctcaggtgatctgcccgcctcggcctcccaaagtgctgggattacaggcatgagccaccgcgcctggcctcaaagaaatattttatttaggaggctaaggcaggcagctcacttcaggccag

SEQ ID NO: 208702 - DNA, 122 bp, Homo sapiens
gtgtgtacacacgcgtgtggagggcctgccttgttcgtgagcaccagccacgccacgtgacgacaggcatcattactaccgcatcgaccgccaggtgctccttccctgagtcaggagccatg

SEQ ID NO: 208703 - DNA, 122 bp, Homo sapiens
gcacccgtcggcgccgagcgcgcagcctgctccaccgccgcctcttggtcccgccgccgccgctgccgccgccgccgggcaggtaacttcatgcgctcattgtcccccccgcccgccccccc

SEQ ID NO: 208704 - DNA, 122 bp, Homo sapiens
ggggcggggctgtgtgggctccggccgctttgcatgccgcgttcatgattaatttcccaccgaggcttgcagaacctcagctccccggcaggcgagccccctctgagaagagggaagccttt

SEQ ID NO: 208705 - DNA, 122 bp, Homo sapiens
gaattcctggccaggctgatggagcagtgtgcctccctggaggagctgaggctggccttccggccccagatggatccccggtgggtactcagttcctacttctttggatttgtttccagaaa

SEQ ID NO: 208706 - DNA, 122 bp, Homo sapiens
tttctgtggcttgcgaccccagctgggcttgagagaaggctctgcacactggggcgggggcgggcacaaggtgatcggagggagggggatgactcgcagttgtgttttgagtggttgccttg

SEQ ID NO: 208707 - DNA, 122 bp, Homo sapiens
ctccacacctgccccatctgcagcaggtggatgaccgactgccagatccacacggagaggcgacacaggcgctgcgcccccggcgtgggggagaccctcacgcctgggccaccgcgggccgc

SEQ ID NO: 208708 - DNA, 122 bp, Homo sapiens
agttgtctctgctccagttgatgtggcagacacagggtcagacagaagcttgctggacatcgtccctcccctgaggccaaggccggacgaggggtctcttcagctgcacatcggggcaggtg

SEQ ID NO: 208709 - DNA, 122 bp, Homo sapiens
gagccaggcctggaatccaggaactttgggtttagaaccttttaaccactatgacacatgcgtcctgtgtgttgctggtcactgtgggccctgggatcccagctacccttcatgggctggct

SEQ ID NO: 208710 - DNA, 122 bp, Homo sapiens
aggccgagttctgttctggggcctgagtttgcaaagcattccctttgccaggttaggttgcgtggactgacaccttagagattttcacggcctatccggtctgagtcccacggagagcagaa

SEQ ID NO: 208711 - DNA, 122 bp, Homo sapiens
tgcaactcccccaggcccaaagctcccactgtcaatccccggaccctcccgccgaggccccgctgggattcccacacctgggctcctgggcccttacccaggtcaatgtcggtgaagccctc

SEQ ID NO: 208712 - DNA, 122 bp, Homo sapiens
ggttcctttctcccggctcttgttgccagatgcacagaggcggcttgtgtcagcagagaccggtgagtacatggaagagtccttcttttcgtgaccctcagaccagcaggcgaggaagaatt

SEQ ID NO: 208713 - DNA, 122 bp, Homo sapiens
ggcccaggttgggagacgagtgttccagaaatcagcgcgtggtcatttcccccgtgattacgaggtacttgataaagagacagtctcgtgacgtaacagcaacagcacgaggtcacctacaa

SEQ ID NO: 208714 - DNA, 122 bp, Homo sapiens
gaggatgaggaaacaagattgtttaagtccaggaatctgagagtagactgagcaacacagcgagatgccatctttacaaaaaatttaaaaaaaaaaaaaaaaaaaaagtcaggcatggtggt

SEQ ID NO: 208715 - DNA, 122 bp, Homo sapiens
gcggagggtccgatttcctccctctgaacggaaaaaaagccactttccctgggaagaactcgaagaagttggatgtctgatcttcaccttggatttgtggtctcggcccgcgggcgactcac

SEQ ID NO: 208716 - DNA, 122 bp, Homo sapiens
gcacatacatttgttgtcatggtggtggtgtaatgcaggggtttacacaatgctgcatagcggtcataggccattgatgccaggaggaaactttctgcagtgataaaggctacaaagaagaa

SEQ ID NO: 208717 - DNA, 122 bp, Homo sapiens
ctcgcgggggcaggatacatgcgtcatatcttcgaaaatcaggattagggggtcgggcgccgtggctcacgctcgtaatcccagcactttgggagaccgaggtgggcggatcacaaggtcag

SEQ ID NO: 208718 - DNA, 122 bp, Homo sapiens
gaggcagtgccggcggctcctcagccactacggtggaaacatccccaccgtttatgaccccgggggcccctggaggcatctcttctggaggagcaagactttcttccacgggttccgcttca

SEQ ID NO: 208719 - DNA, 122 bp, Homo sapiens
cgcaccttttgaactgccatctgtagattgtgttggtgcactgacttgttaactgtgccacgctgtgaaggaaatggcatgatttagatcaagtgctcacgacggctgttcataagaaacac

SEQ ID NO: 208720 - DNA, 122 bp, Homo sapiens
gatgatgataggagagctggcgccctcacgcgcttgtcacctgctgcgggcatcagtgagcgcttgctgccgcctctgagataaggagggctctgtagaaactcacctgggccacctccact

SEQ ID NO: 208721 - DNA, 122 bp, Homo sapiens
cctagctccgcaaccctgctcctttcgcagtccgcggcggagtgagcaacttgctgggtgcgctccacggtttttgttgccggcggctctcgaagacttacacaggctttgcctggccgtaa

SEQ ID NO: 208722 - DNA, 122 bp, Homo sapiens
cccgccttaatatgattggtttttgttcctgtcactctaggatccaagcccgccattggtcggcttccgttacgccgctgatgtggagtagggccgagcgcggaacgcgaggggctgctggg

SEQ ID NO: 208723 - DNA, 122 bp, Homo sapiens
cagaggggctccctcctggtcactccttatagccttgctcggtccagggcagggtgggttcggtctctcggtgagaacaagaggaacacatttagctctgcattatgtatttaggttgagag

SEQ ID NO: 208724 - DNA, 122 bp, Homo sapiens
aagcacttttgctactaatgcagtgtgggaattgttggcttcagctccagaactgccagccgcttgttaggtaccgggttacctctttctcagtgctcagagataagttgctaacgtttgaa

SEQ ID NO: 208725 - DNA, 122 bp, Homo sapiens
cccgcggcgccgctgcaggatgaagtagcagctgctcttctgggtcacccagagcttcagcgcgttcttcagcagcacctcctcgggcttgagccacatcgcggcggtccggccgcgcccgc

SEQ ID NO: 208726 - DNA, 122 bp, Homo sapiens
tagtgacccactcaggccgggcccatgctgggagtggctggaggcagctttggaagcatgcgtgcttagcgagcctggagggtctgctgcaagcacttgccaggccatttcagtctccttta

SEQ ID NO: 208727 - DNA, 122 bp, Homo sapiens
tgccaacagcccctgagttcctgcctggaaatcagggattctctgcggctccccaggcttcgacgcccggacccccaggggaagggtcaacagctcggacgtcgagctgttccactctatcg

SEQ ID NO: 208728 - DNA, 122 bp, Homo sapiens
tatatagattttaattcagaaagtattacacattcgcttttgaaaggacctaggaagccccgaacggtggcagatgcctgtaatcccagctactcaggaagttgaggagggaggatcacttg

SEQ ID NO: 208729 - DNA, 122 bp, Homo sapiens
cattgcgacatagctgccacccttcactcagcatacgtttaccacccttcactcagtatacgtttattgtacatgtctacgtgctgggaacatgaagataaataagacatggtctctagcct

SEQ ID NO: 208730 - DNA, 122 bp, Homo sapiens
ccacgccaagtaccttgcaaggcggctgctaagcctggctaattttagatctccagaatgcgctatgcccgcgctcaactaaaaccaagtcaaaccatcaagcacagtgatgtgctgctttt

SEQ ID NO: 208731 - DNA, 122 bp, Homo sapiens
tgctggtagcagtctcatattgtggtggctttattaactcttcaatcatcaccaagaaaacgttttcctttaacttctgccgtgaaaacatcattgatgactttttctgtgatttgcttccc

SEQ ID NO: 208732 - DNA, 122 bp, Homo sapiens
acacgccttttcttagaaaacaaggaggtagtgaaggaatttctgttataaaaataaactcgttccactccgttagcaactgggacggttaaaggctaaagatgttggattgcctcccgcgg

SEQ ID NO: 208733 - DNA, 122 bp, Homo sapiens
gctttctccaaaccaagggctgcccccaaggaaacctccagccgacccccgcccgcacgtcggaacccctccagacccgcgagcccccagagtaccttaagcgattccttgaaatcctccgt

SEQ ID NO: 208734 - DNA, 122 bp, Homo sapiens
ggcggggccagagagggcggagcattgtcctccgtctgggagggtgggccggaggtctgacgggcggttgggtggatagactagctgcgggccgatggacagcaggatacctgggaaacaga

SEQ ID NO: 208735 - DNA, 122 bp, Homo sapiens
ggagttgaccttgtccctcaggtccttctccaggaagctcaagtggccttccacgtcccccgcatgggggcccagtttctgcctgagctgttccatctgctgcaccagggctttgttgaagt

SEQ ID NO: 208736 - DNA, 122 bp, Homo sapiens
ccttgtgtttagcttcgccgcctcggggcgccttgcggcttcccaggaggtaagaggcgacgggcaaggggacctgcccatccaacaaaactacccaggggagacagcccagtcgctcccct

SEQ ID NO: 208737 - DNA, 122 bp, Homo sapiens
acgcgtgacccacggcacgttcccgcgctccgccgacgcgtggcccacggcacgttctgacgtctgccaatgcgtgacacacggcacattataatgatgtaaatattgattattgatttaag

SEQ ID NO: 208738 - DNA, 122 bp, Homo sapiens
aggttacaagtgtatccagtgtttacatcagagataaagccccctttcccctctctcctacgggagccctcaacaagacagatacacgggttgggtggagtgagaccacatccagcagaggc

SEQ ID NO: 208739 - DNA, 122 bp, Homo sapiens
gcgagtcgactattgtgttcccaaagtcgccctgaaatgaggacagaagttcgggggagccgggggcgtagagtaaaggcacgatctgattggcccgcggccgcgcaacgatgggcgggacg

SEQ ID NO: 208740 - DNA, 122 bp, Homo sapiens
cggagaagcgctggacgcagcaagaatcaggcttcagctccgcaatgtgggcaggggacccgcaaaggatcctgcgggtgaggccaccgggggggctccctggggaggaggtggagaggtcc

SEQ ID NO: 208741 - DNA, 122 bp, Homo sapiens
tgatttccttcttgcgggcgacacctacttccagcgggagacggagcggtgggccttgggcgacgggctattatggggaaaatcacctcgtgttcataccctccctcccccccgcccccccc

SEQ ID NO: 208742 - DNA, 122 bp, Homo sapiens
tcaagataacccttggtttccatgcacatccccccaacattgcatgtgctttcattcctacggtgctggggttactttcatttattgcttttgttgaccaaaaagaaaaaaacaatcctgag

SEQ ID NO: 208743 - DNA, 122 bp, Homo sapiens
gccagtttcattattattaaagaatccatttgaatgtcagctcaacacagcctcctataccgaggcattgtgaaccgcatctccccagcttctccaggcttttccaagaatcagggacactg

SEQ ID NO: 208744 - DNA, 122 bp, Homo sapiens
cagaagactctctctcagaaaaaaaaaaaaaaaagtttacaaggcttatcattaccaaatcggcatgttccctcagaagaaacagaaattcagaaacagaaactatgcaagtgggaaacaag

SEQ ID NO: 208745 - DNA, 122 bp, Homo sapiens
gcggcccgtggccttccgagcgcggcgctcagggggcgtgcctgcctgggccaatcggcgcgagcccacagtgcggagcgagcgcctcaaatgctcgggtttctcagctgattgtctccagc

SEQ ID NO: 208746 - DNA, 122 bp, Homo sapiens
cctatccaccctgtggctaatttgtcctttctgtaacagacaccctagactgtgtctatgcggttgggcagaggcgtgatgggtaaacactcctggcgggagactacaggcgctgcagctac

SEQ ID NO: 208747 - DNA, 122 bp, Homo sapiens
ggggtgatgctgggcagagctgtccctgcgagggccctcgaatccaggagtgggcgagtccgggatggttccagagcttccaaacccacatccagcccaggatgtgagaagcagcccagaaa

SEQ ID NO: 208748 - DNA, 122 bp, Homo sapiens
cccccgcacgccccagaggtacctgtaaccggtctccgccgcccttgcggagggcgcccacgatctcctgcacccgcccaggctgccgcatcaggaccgtggccttcatcagggtgctcacc

SEQ ID NO: 208749 - DNA, 122 bp, Homo sapiens
ctccggcaatctgggctctggagagtcacctcaggggagcgtgaaatgtaaatctgatctcgaaacagggcgagcgaggcagagcattcagcgtccaggatctcagcatgccgggggcgtcc

SEQ ID NO: 208750 - DNA, 122 bp, Homo sapiens
tgtcccctcgtctttcctagctgttctgggaaaggcagttcctggtaagaactctccctacggcccctttcatctcactgttcctcagggcatagataagtgggttgagcagtggggttccc

SEQ ID NO: 208751 - DNA, 122 bp, Homo sapiens
cttcttcttctcccccttccccccgctcccccgcccctccggctcctctagcccagatcacgtctctattgcactccccggaatcatccttaggtcgggagtaccctacgccacctccaggg

SEQ ID NO: 208752 - DNA, 122 bp, Homo sapiens
cctatgaaaaaagatcaagctagcaaccagggcaattgatgctttcattttcccacacgacgccagaaatatgggagacatcaggaaccggagcgaagggacatgtcaagtcaccagttcct

SEQ ID NO: 208753 - DNA, 122 bp, Homo sapiens
acagccgagacctggcactgctaacagggccacgtgctcctgggcactcacatcagcaaacgtctctactttgggtcagtggtctgggactccatattcttatatttttgctgtagtatggt

SEQ ID NO: 208754 - DNA, 122 bp, Homo sapiens
cgacccccgtcggcgcctccccgggctcctgagctccggccgggtcgggtcgggccggcgcggcaagttttgatggtcagactcagccagcgaggggttcccagctgaagacctcggaggaa

SEQ ID NO: 208755 - DNA, 122 bp, Homo sapiens
ttgtttttttgccttgagatggagagctcactaccttcacagatgggacttggcggtactcgtcagctctgatgggaagaaaattgctcctcagactgagccaaagcctgcctgattgtccg

SEQ ID NO: 208756 - DNA, 122 bp, Homo sapiens
acagggcaatgctgcggggaggaaggcaagaggtgccaaagcatgttcaaccaacgctgtcggcagagctgacttgcgtaggttcctctgagttctaggtagactgaaatagcaaagcccag

SEQ ID NO: 208757 - DNA, 122 bp, Homo sapiens
tacccgggaagccaggggtggggggaaggaaacgaaagcggagtagggcagtcagaactccggggtctcccagatgcctcggggtctcgctgccgccaacttcgcaaactgactcaccggtg

SEQ ID NO: 208758 - DNA, 122 bp, Homo sapiens
tgcgcgcaggcaccggcggaccctggcacagacacacagcagggcggcgcggacccttggcgcagacacagacccaggacgcccaaacaggccacacaacaccttgcactaacagcacaggc

SEQ ID NO: 208759 - DNA, 122 bp, Homo sapiens
aagctctgcgcatgcgcgcacccgccgacccggctcccgcccccgcggacccagcatccccgcagcaccagctggccgggcctgcccccttgctgagcacccctgctcccgaggcccggccc

SEQ ID NO: 208760 - DNA, 122 bp, Homo sapiens
caatgccatccaagttctcatttggcacttacaacagccgcgccaggtaggaagaaagggcgtccttcttacagacagatggggagagagtccaagccaccagagagcagagactggctgat

SEQ ID NO: 208761 - DNA, 122 bp, Homo sapiens
agtgtgtatgtggtgaacaaagctggcggcttgatttaccagttggacagctacgcgccacgggctgaggctgagaaaactttcagttatccgctggatctgctgctcaagctacacgatga

SEQ ID NO: 208762 - DNA, 122 bp, Homo sapiens
tctatttcttagtttcttctctatccaatgggggcaataataatgcctacttcctagggtcgtagaaggttagttgagataattcagacaaggcacttaggatgctgcccagcatgaagtgg

SEQ ID NO: 208763 - DNA, 122 bp, Homo sapiens
aacgcccgagtgaggagttggccgtagtgagagggaccgatcccttggggccgccggcggcgagagcccgagccgctcctcccaatggcgaagaagacgtacgacctgcttttcaagctgct

SEQ ID NO: 208764 - DNA, 122 bp, Homo sapiens
aaggcagtcccaggtgcatggccacggaacccagctctcagcagctgttagttaggtgagcgctgttcgggctgccttcctcctccagtggggcaggatcgaggcactgatggaaccgtcct

SEQ ID NO: 208765 - DNA, 122 bp, Homo sapiens
tctcccccaggatgacgacgatgacgacagtgatgaccgggacgagtctgagaacgatgacgaggacacagccctgtcagaggcgagtgagaaggacgaaggggactcggatgaaggtgagc

SEQ ID NO: 208766 - DNA, 122 bp, Homo sapiens
cgcgagtgcgcgggcgggaggcgcgagggcgggagggcgcgggctgggggggtccgtgcgcgcacctgtcccggccgggccgctcagcccggcatccccggctggggaggggggctgggggc

SEQ ID NO: 208767 - DNA, 122 bp, Homo sapiens
gatgggtcaagacaaaatacaaggccactctgtaatcaggtctgagtgcagacaaaaatacgaatattttccaactggattcgaaaataatcaagcagccccttaaactggccaatatgaat

SEQ ID NO: 208768 - DNA, 122 bp, Homo sapiens
tgtttttgagttgttatcctgtctgtctgattccagcctcgagggtttgatgatgcggcccgagcctggctgtggtcgcctgtcggggctggagcgggaccctcagccgggccgggcctggg

SEQ ID NO: 208769 - DNA, 122 bp, Homo sapiens
acaatgcagcggtttagctgaatgtgattgctcaggcagctagccagtcaggccccactgcggagtcccgcgtgggcatctcggccgggcgcccagccaggagccagccggtggcccaccag

SEQ ID NO: 208770 - DNA, 122 bp, Homo sapiens
ccaccagctctaggccttggttatttttgcattatgttaaataccaacattctctgattccgcttgtccaggcaacgctctctctcttctcctgccgatcttatccctaaataccctggtcc

SEQ ID NO: 208771 - DNA, 122 bp, Homo sapiens
agggagtgctcctgacaccctcggggtacatctcgcaggcggtgagcacccagtgaccatcgccgtcaggcccagcgagacccaggtgcctgcggtcacggtgcactgagccctggctctgg

SEQ ID NO: 208772 - DNA, 122 bp, Homo sapiens
gcggtggctttctggaggctgccattcggcggtgacgtgccccagcccacgtcaggggagcgcagaccagctgatcacccgcggaagggccggcgcgaaggaggcgcgagagccggcgggcg

SEQ ID NO: 208773 - DNA, 122 bp, Homo sapiens
aggtaaagcgctctgggtcaggggtctcctccagagtggtctgtttaaagttaaaaaggtcgccttcaaaatagttgtaaaatctatacacttacccagacatacacatttttcgagacagg

SEQ ID NO: 208774 - DNA, 122 bp, Homo sapiens
ctagactcgcagccgccccccaccgcaccctgggctgccgcacccctggcccgccagcctcgggctaaaccagtcaccatggcaaccataaatctgagccagcacaggaaccacttctccta

SEQ ID NO: 208775 - DNA, 122 bp, Homo sapiens
gcatttcataatctctcaaaaccggagactgctcctgtcccacctcgttagagaaaacagcgatgctcaaaggcaacctccttcctgacattgcctggtaggacgcgacgtggtgtttgccc

SEQ ID NO: 208776 - DNA, 122 bp, Homo sapiens
gaagctggaagaggaaatcagtttggagagaaaagtgatggctttgaacatcatcaatggcgtattcaaacatagcttgaaggcatttgcagagacagggctggtcctcggaagagatggca

SEQ ID NO: 208777 - DNA, 122 bp, Homo sapiens
gtttctatgtcacaatgccccactatgcccattaagctacagtgcacatggtacccatcccgagaccaacattctttttacacttctgtgcttctgacctaggaaagtcttacttttcatag

SEQ ID NO: 208778 - DNA, 122 bp, Homo sapiens
catggcagcgggggaggggccgagccgcagcgtggctgtgttgccgggcgacggaggagccgcgggggaggccgaaatctcccggtgctcagcgtcactgcgtgagcccccactctgatgct

SEQ ID NO: 208779 - DNA, 122 bp, Homo sapiens
ccagattggaaaatataataccatcaagtacccaggcacctgtgtatttagaatccattacgatggtatcctgagacttctcacacaaaggtgcctggcctaaagacactttttaatattat

SEQ ID NO: 208780 - DNA, 122 bp, Homo sapiens
aagcatccaccgggctcgaagtgcatggcccgcagctgaccactagggggcagccctccacgcagaggctcgagcgacggaggcgacgcggcggctaccggctctgctgagcccaccccaag

SEQ ID NO: 208781 - DNA, 122 bp, Homo sapiens
gctgggccactcgtgcctcagagaggaccccgggggtcccgagcatgagtctttgagaatcggagcactgtaacagcttgcggggacggccgcaggcccaggaggaggaagagcgtgaagag

SEQ ID NO: 208782 - DNA, 122 bp, Homo sapiens
tctcttaagccacaatccaacgcaaactgtccccaaagtgcagtagcgcttaagcctctccgggcccctagcacccatcgacgccgtctctaaggcacccagcacacccagacccatgcatc

SEQ ID NO: 208783 - DNA, 122 bp, Homo sapiens
cggtctcgtgggcagaggaacaaccaggaacttgggctcagtctccaccccacagtggggcggatccgtcccggataagacccgctgtctggccctgagtagggtgtgacctccgcagccgc

SEQ ID NO: 208784 - DNA, 122 bp, Homo sapiens
tccacgcggccttcactgcccctggcaccctcgggagaccgggctgagccgagggctttgcggtctaactgcctggaggaggaggacggcttggtcttctccagactcagggggaccacctt

SEQ ID NO: 208785 - DNA, 122 bp, Homo sapiens
tcactggacctacgcactcccttccttccttcccattttcttggccttaattcctggcaacgggaacccatggaccaatcacaggattgggccctttcaaggctgggctgggctgggctgga

SEQ ID NO: 208786 - DNA, 122 bp, Homo sapiens
ggtcccctggaccctgcgtatgcacagtggggaggcactttcgcccatggagtgggacgacggccttgctgtttctgtttcccttccacaaaacctttgcctcgacctcccctttcaagctt

SEQ ID NO: 208787 - DNA, 122 bp, Homo sapiens
ttggagaacgtcttagactacaagttccgggaatcagcgcggcgaggcctgagaagaagacgtttgcgcctgcgcgtcgcgggcggggcctctggggcggagcggccaccatcttggaacgg

SEQ ID NO: 208788 - DNA, 122 bp, Homo sapiens
tgccgctgacacttggcagggaactggacaacgtgcgccccactcctgtttgctctgactcgagttgtcttaatcctgagcaaatgcggccaaggggcctgcctcggccttgtcctctgtcc

SEQ ID NO: 208789 - DNA, 122 bp, Homo sapiens
ccggcgccgcttcccgggaagtttcaagtttgaaagtcctggcggagggtctgcggcttccgggaccggagtggctgagagaagggccccaagcggccggagcggcgccatggaggaggggg

SEQ ID NO: 208790 - DNA, 122 bp, Homo sapiens
agcggctcaagagagagcttgtaaccctcgaagcggggatccaacagaggtctcttcacccgtagggagcaattagccgccacctccatcgctttccagggccgcagcgtgagaattaataa

SEQ ID NO: 208791 - DNA, 122 bp, Homo sapiens
accttcctttagattctttcataaggaaaaaaaagtcaatcaaataaagttgagagaaggcggcatatttgatgtatttggttttagcaaatagaccagatgagtaggctttgctgccacac

SEQ ID NO: 208792 - DNA, 122 bp, Homo sapiens
acccccaagactccagagccagtggggcatggctcatctacttacagatattcacgggcccgatgccttcgcacagcctggggatgagaggaaaaagaaaacaggtatctacatcaaacaga

SEQ ID NO: 208793 - DNA, 122 bp, Homo sapiens
tttactgtaaaacagtattctgtgtcataccggcagtagcctcattcatctcatttttttcgattgcatcattttctcttgtgcttgatttaatctcatgctgttttgttcctcacggtccc

SEQ ID NO: 208794 - DNA, 122 bp, Homo sapiens
tcttggaggctactgtcagaaaacatcacaaactagcaggatgacagaccacgctgacgtcgactgggcggcacgcgtccaccccacccctgggggcttcaaattttctcagaacttaaggg

SEQ ID NO: 208795 - DNA, 122 bp, Homo sapiens
aaacatggaaccagcaaccttttgccaggtgtctgttctccgggtctctgggcctggaggcgggagtgtttcaaagcacttcacgctccgcggccccaccggctggctgcgctgcccgctgc

SEQ ID NO: 208796 - DNA, 122 bp, Homo sapiens
ggatgccatatagctggccttcgggtaactttcccggataaaagcctgatcccttggccgcgccctcttgccctgctctattttttttttttgttaaaggaccagcctcctttgtaggaggc

SEQ ID NO: 208797 - DNA, 122 bp, Homo sapiens
aaagtccacgcctacgtcctgacccagagccccagctccttcgggcctagtcaaggacaccgcctctgtctggcccacaccccgcccgcggcacctccgcagcccagttctactccccagcg

SEQ ID NO: 208798 - DNA, 122 bp, Homo sapiens
caaactcagcacgttattccaaataatctctgcccctgctccctcacattttgatcatgccgtatctgtgatctggggctggggactctggccctcaagatgcctccaatgctctcggcccc

SEQ ID NO: 208799 - DNA, 122 bp, Homo sapiens
ggtctgtcagtccgttgggtttcagatgcatttcaatggctgagtgctcctcagtgcttgcggggaagcgaggaggatggggccgcccctggcgtaaactctctgctgtgccacgggagggg

SEQ ID NO: 208800 - DNA, 122 bp, Homo sapiens
tttctatcatcagcgtctagtacggggagtagcaaatagtgagcactcgatagatgtttgcggaataatggactagtgtgtgcagaaggatctattaactgggctgcagcacaattcagaga

SEQ ID NO: 208801 - DNA, 122 bp, Homo sapiens
accagctccggagtgaaactgcggaccttcgcgatgagtgctacaactctgaaggcggcgcgtctggagtttttttttcctcccgatggttcagtggtctcgctggtttcagaagtaaacct

SEQ ID NO: 208802 - DNA, 122 bp, Homo sapiens
ccagtgccggcggctggcacgggcggcgcgagtggggagttggcgaagcaggagcggctccggggagcttgtctgtgcgcctggactcctagaggcagaggtagcgcggggcctccccgagc

SEQ ID NO: 208803 - DNA, 122 bp, Homo sapiens
gattctgtcttcactgtgccaacaagatggtccaagcacattatccatggccggaagcaccgaagtatcagaccaacttgcaaatatggcacttagcactctctcctgttgaaaagttagac

SEQ ID NO: 208804 - DNA, 122 bp, Homo sapiens
gagcttttctttgtgcggccctttcatctggatcactttgtgttttgaacaagtgaggctcgcctttgtgcccccagaatttcaagtacagagtcacacacggaacaacaatggcacgctaa

SEQ ID NO: 208805 - DNA, 122 bp, Homo sapiens
ctctgtgacgtttccctcacggaatctcacacgcccgagacttccgtgacgtttccctcacggaatctcacacgcccgggacctctgtgacgtttgcctcatggaatctcacacgcccggga

SEQ ID NO: 208806 - DNA, 122 bp, Homo sapiens
acggtagcccgtgaggaggggctgtgcggcctctacaagggcagctcggccctggtcttacgggacggccactcctttgccacctacttcctttcctacgcggtcctctgcgagtggctcag

SEQ ID NO: 208807 - DNA, 122 bp, Homo sapiens
ggtgtcttccagcggctcccttttggtggtggcgggtaattcagggtgtccctgtaacaacgcagcccacgatcaaacctcgcatgaaaccctgcaagagcctcccctttgtccccctacct

SEQ ID NO: 208808 - DNA, 122 bp, Homo sapiens
tttttttgagagagttttgctcttgtttcccaggctggatggagtgccctggcgcgatctcggctcaccgcaacctctgcctcctgggttcaagcgattctcctgcttcagccttctgagca

SEQ ID NO: 208809 - DNA, 122 bp, Homo sapiens
ggtcccgcctgggcctctcctcctgggaataccgggcaccggtggccccgcccctacctgcgcgccgcatctccgggaacaacagtctccctcccgagcatcacagccagacatggcccaga

SEQ ID NO: 208810 - DNA, 122 bp, Homo sapiens
gctacaggcccagcatacagggcagtgcgtggcacaagacagtggctcgtctcgctcacccggatgcagcccccaggcctagaatgctgccgggagcagaataagatgcacaacgaaggatg

SEQ ID NO: 208811 - DNA, 122 bp, Homo sapiens
tgcagggccctcttggggtagcaggaatgtaccgtaagccagtagcaggggacatgtaggcgtagtgctactgagcgcgccgtcccccatgggctgtggccgttcatttggtggccctgttt

SEQ ID NO: 208812 - DNA, 122 bp, Homo sapiens
ccctccgcaggcccgcgcccggtcccacactggggagaagccgttcagcggcgccatctgcggtagggccttcaccactaagggcaacctccaggtacacttggcactcacatgtggaataa

SEQ ID NO: 208813 - DNA, 122 bp, Homo sapiens
tgggttttgtgcatgtcattgtatagtgtcttgtagttctgttttcacttttcttatgtgcgggtcttgtctgcctcttaagctgtgagtcccttaaaagtggaaatgtaaattttaaacat

SEQ ID NO: 208814 - DNA, 122 bp, Homo sapiens
tccccctgaatatttttgatccacggttgattgaacccatggatttgaaacccatagatgcggagggctgactctatttggtctttgtcctcagtccctggcagagagctcctaaaaccctt

SEQ ID NO: 208815 - DNA, 122 bp, Homo sapiens
caccgggcgtgtctgccaagggtgtcattgggcgccgcgcagaaggggcttccgaggacccgcccctcccccgcagccgtcagggcgctgacggaggcagctgcgcctgtttaactgggagc

SEQ ID NO: 208816 - DNA, 122 bp, Homo sapiens
acagggccttaccgaagagaaggaggtatattttgcactgaaagaccccaagtgtgtcaccgaagggctccatgaaagcatcctgtcccatgcatgcagtgccctgttctcagtggtaactt

SEQ ID NO: 208817 - DNA, 122 bp, Homo sapiens
gaggagtctgcccatccccagcagcacgcgagcgccgccagcgctccctgggcacccgctcgcactcaagtgcaggcagcgtggtgacaatgccaactgcgccccctatctctgacaggctc

SEQ ID NO: 208818 - DNA, 122 bp, Homo sapiens
tggcactgccgaggcggagagcggcgctaacttatagcccgctttggggcgggccgggggcggggccccgcgggaaggcggcgacctgggaggccacccattgcccagtcccgggcccacgc

SEQ ID NO: 208819 - DNA, 122 bp, Homo sapiens
ggtctaaatgccggctctgcattgaagacatgagggaatttctttgtcttgctcttgctccggctccctgtaactgcataccatagtatctctttcctttttgggtgataatgccccatcca

SEQ ID NO: 208820 - DNA, 122 bp, Homo sapiens
cccagtcaacacctacccgttcccagtcctagtacagctgcctcgctcctccagcgccgccggtccccgccctcgggcccctggctccgttctcttgacaatggcgcgtcccctttaaggaa

SEQ ID NO: 208821 - DNA, 122 bp, Homo sapiens
tctcttcttcataatctaccagctcactaaataatgctattcctctcaatgaaaaatacacgcctttgcaagttcctagagatccttactattgaaagatgtttcagtgaccaaacagttca

SEQ ID NO: 208822 - DNA, 122 bp, Homo sapiens
gggctcctcgggggtcccgggcagtcgactgcccgggaaagcggctccttctcggagagacggaagagccgagcagcccaaaccctccatttatgcgccagaagagataccccggcgcccag

SEQ ID NO: 208823 - DNA, 122 bp, Homo sapiens
ttcctgagcccccacagtaaattcaggagataaatcagcctctgctcagagagcagcagccgaggggagggtgacagtcaagggtgagcgggaggcagcagggaaaacaatgccacttctca

SEQ ID NO: 208824 - DNA, 122 bp, Homo sapiens
gccccgccttccttcctcggggcctcgcctctcaccccgccgaggccccaccccctcccgcgcggccctttccggcacagagcccacccctagcccatgcgaagcggcggccgccggcaccg

SEQ ID NO: 208825 - DNA, 122 bp, Homo sapiens
tcccgcattagggggggtctcccggcgcgcgccccgccgccacctgttgaggaaagcgagcgcacctcctgcagctcaggctccgggcgccagccctgccccgcagccccagagcccgtcgc

SEQ ID NO: 208826 - DNA, 122 bp, Homo sapiens
agctgcgctccacagggaagagccgtcccatatcgggacctggcgcacagagatgcagagcggtggaaccaaacgtgtccgtgcatatggcacacgccgtgacattttccgtttgtctctat

SEQ ID NO: 208827 - DNA, 122 bp, Homo sapiens
gccgttcccccaacgtgactcctccggttgctgcatactatatggcagtggcggccgggccggcccggcctagccacctcattggctatttcgcattcagagggaggaggagacacagtttc

SEQ ID NO: 208828 - DNA, 122 bp, Homo sapiens
gcgagcgtggcacccctgcttgaggcaccccagagcaccctcgggccgctccttttcacccgaaagataggatcaccccccagttaagtcgcttctgggttttccgcaactcacctgacact

SEQ ID NO: 208829 - DNA, 122 bp, Homo sapiens
gatttattattatttcaagattaaagattttccattatgctccctaaaatgaggtagatccgcagagaatctgagctctcatgcaattgctttctggccaaatgtgcaaactccttctataa

SEQ ID NO: 208830 - DNA, 122 bp, Homo sapiens
ctagccctttttttggccctacgtctggatgcctgggcttcacacaagaaccacctctcccgcagttcccaaggacttgtcatttcatgttcttattttagacctgttttgtaaataaagct

SEQ ID NO: 208831 - DNA, 122 bp, Homo sapiens
aacaaagtatttccgataaaaaatattttaaggttatggatagagatacatacaaacaagcgatgggcttggatcactaatgattttggaaaggacaggaatacaggaactaagcgagaagc

SEQ ID NO: 208832 - DNA, 122 bp, Homo sapiens
atctatgtgttaattctaacctagaatcagtcatgtagttttgcaacatattggaacatacggaacaacatttagctgtagatctttgaccctgaagggatgttgacaatctacaccattcc

SEQ ID NO: 208833 - DNA, 122 bp, Homo sapiens
tgtaaaatcaagctgcagacatagataaccaagctggaagcttgcacaggtgaatgacggcggctgtgcattgcaataggggaagcctacctgggggccaggtaggttcaacatggaggctc

SEQ ID NO: 208834 - DNA, 122 bp, Homo sapiens
tcctagattgtctgttaatactatacttacctctataagaaactgtcaagtttaccgggccgcgagggtgcaggctgcgcagatggtgtggtcctgcgccccgagggccgcagcagctcatc

SEQ ID NO: 208835 - DNA, 122 bp, Homo sapiens
cctccttgggcacataatgccaaaactgtactgcttgtcaataagagagacagagactgccgatggctatggggcagattctctgtggggaaagaaggccctgaacacagctgatgagtggg

SEQ ID NO: 208836 - DNA, 122 bp, Homo sapiens
caccgccagccacaccagccccaggttttccaggggggcccgggcctccaaggtcaccgacgggcctgccacgacagccacaaggtagccttcagcagccagccgcgccccctgctcctctg

SEQ ID NO: 208837 - DNA, 122 bp, Homo sapiens
cgaactcctgacctcaggtgatccgcctgcctcggcctcccaaagtgctgggattacaggcgtcagccactgcgcccggcctttaagccatattttcagctttgggtccagaaagccacata

SEQ ID NO: 208838 - DNA, 122 bp, Homo sapiens
cgccgctccccccgccgagctcgggtgggggccacagggggcgctcggtggctccccacacggccaggtgacaaacccaaggcagttaggaagtttggggagagtgagataggatcaagttt

SEQ ID NO: 208839 - DNA, 122 bp, Homo sapiens
ctgagcccacgtcccgataggaagcctggggcgctcgcaggaagggtcacggatgctgcccggctccccaccagcctgcccctcaggacatctcctgaggctgccactgggaaagaacaaac

SEQ ID NO: 208840 - DNA, 122 bp, Homo sapiens
gggtgctccgcctgtcggctcagggtcgctgcttggcgtggggtccgcgaacagaagggtcggcactagcagagaccagcaggcagacgcggagcccgctcaaggctaaagcggccgcacct

SEQ ID NO: 208841 - DNA, 122 bp, Homo sapiens
atatttctaaatttctcataaaaggcccctcctctcaaagaagcacactgtagaccccaacggtaaacctcatgcaaacacctaaggattaccattagccctagtaaacacctaaggcatac

SEQ ID NO: 208842 - DNA, 122 bp, Homo sapiens
caggaggagcctgcttggagccagcttcctgcccctgtgagtggggccgcaactccttcccgccggggtctgtgctgcaaaaggactgcgggaactggtgagtggggaggtcatcttggggg

SEQ ID NO: 208843 - DNA, 122 bp, Homo sapiens
cttccacatctactcctggtgtctggcgtccgccgcacctggtaggtgagctccttgatgcgccgctcgctcttcctcatgcccttcaccgactctgcgttgcgcttctgctcggcctccag

SEQ ID NO: 208844 - DNA, 122 bp, Homo sapiens
cccagaaacatctgtgcaaaaaattatactcattaaagccttaaacacctcagaggaaagcgataccttcttatgctgcgaggaaagaggccagcctcatggaatcctctctcggaacttta

SEQ ID NO: 208845 - DNA, 122 bp, Homo sapiens
ggtccagcccccggcctcgctatcctagttctctgcttggggtcctgcttctgctcttgccgccgcctctcccgcttcttccgggggggacatgccgcagaatctagactgctcagtgctcc

SEQ ID NO: 208846 - DNA, 122 bp, Homo sapiens
ctcttaaaatcatgggtaaatatccaccgactgcctcctagaagcccgcactgtgctgcacgctgctggggaatactgaggaggggatgtgaaatgtctgtatgtgacccaggacctaactg

SEQ ID NO: 208847 - DNA, 122 bp, Homo sapiens
acctcagccacctgttttctcaaaggctgagcacagggtgaccccccaccccaccaaccccgccactaatgtctgggccataagtgaacatgcccctctcagaggtaacagcaagtttccag

SEQ ID NO: 208848 - DNA, 122 bp, Homo sapiens
cctggctgctggaactgctgacctcacctccttcccgcacccaggaacccaagagggagccgatcactgtgggggaaggactactgggactgcgacaagttccaggaaccacgctctggcag

SEQ ID NO: 208849 - DNA, 122 bp, Homo sapiens
aagactgtcttttttaagatgccaagaaaggtcaaaggaaccatctctggtcaaaaaaaacgtaacggattaaagcgattaagaaagtgaagggggtaacactaggaactaaaactaaattc

SEQ ID NO: 208850 - DNA, 122 bp, Homo sapiens
ccaatgtgcagggcaggggaggataatactcttcttcatagcacacggtgtgtacagccccgctgtaatatggtccttaatattccaagcggagaggatgatcttactcccaatactgcaga

SEQ ID NO: 208851 - DNA, 122 bp, Homo sapiens
atcacaccaagattaattgcacaactggagaggcacatgcgttggacacaccgttcattccgtcagttttattttgctgagcgcccactagtgcctagcactgttgtaggagctgggaacag

SEQ ID NO: 208852 - DNA, 122 bp, Homo sapiens
gcttttggaaagcaggtcccttgaacagattctcccaaagcagtgactttaggaacatctcgaaggcgacagattccagttgttaaggctacgatgaaatagcagaagactctgggaagcag

SEQ ID NO: 208853 - DNA, 122 bp, Homo sapiens
tgccggtggtgggctgggggctaaggcgctttggacctcaggtgggaggccgggacagagcggccccctcgaggctggtacagccgggcccccgtgaccgcccggctaatcccctagagaga

SEQ ID NO: 208854 - DNA, 122 bp, Homo sapiens
ggtctgtctgatggcaggaccagggctggctcaggatcccacgctgtctttccaagcttccggactggctaaggagtgggcctggctgggagagggatccggtccagggatgcagagctgct

SEQ ID NO: 208855 - DNA, 122 bp, Homo sapiens
cgatcctcacgacgatggtcccgacttcgcgactcactaccatgtcgacgatcccagctacggctacggtgacgacactgccgacctggacttcggctccgactatttctccgtctataccg

SEQ ID NO: 208856 - DNA, 122 bp, Homo sapiens
agcagcagccccatcccgccaccgcctccgcccgggcccctactcccgcgcccacagcgccgctttcttcacgccgccgcccccgctgcctccattttgaggacatcgggcggctgggtcgg

SEQ ID NO: 208857 - DNA, 122 bp, Homo sapiens
tccggaactctgaggccgggaggcggcatgcagtttccgtgtgatccccaatacttttgccgtcttctgtagcaagtcagccacaaacgcaggcccgttatctgagccgatccagaagggca

SEQ ID NO: 208858 - DNA, 122 bp, Homo sapiens
tacctgcccatgaccttccctccctttgcagacaaacctcctaaaagaacatctgtgctccgtataaccccttcctcttcccaggcctcaccccactgcattctgactgctttttataaccc

SEQ ID NO: 208859 - DNA, 122 bp, Homo sapiens
gtcacagagctgaaccaagatggttaggctgagggataggtcccgaagtgctcagatctccgggcctcaaggcccaggctggggtggcacggcaggggctgatggggaggtgcccaggccgc

SEQ ID NO: 208860 - DNA, 122 bp, Homo sapiens
atgcctgctcaccctcctgtgtctgcatttctaggaaattgtgtaaatctaaatgtgttacgaggcacatgagcaacatttgcccatgtggaaaatgagaggctagttttagtaatttaaag

SEQ ID NO: 208861 - DNA, 122 bp, Homo sapiens
cgggcgcgggaggtttgggcatggcgggctgcaggtcttgaaccctgccgcgtggggaggcggctgaggcccggtgagaattcaagcctggcgcgggaggtctggtagcggtcggggaccca

SEQ ID NO: 208862 - DNA, 122 bp, Homo sapiens
caatgggggggagaggagcaaaccctgtattatcgggagcagttggaggccatcagcgaccgtacccagcgcggaatctcgcggctgtaccataaggtacgcagggaaggcccggaggggta

SEQ ID NO: 208863 - DNA, 122 bp, Homo sapiens
ggaccgagtagggagcgcggcttctgcaggggaagcttgggactgcactgctttagtgcccgccttcagcccgcaggggcgcgggaggaatcgtgccaccctttgctcccgggatttatcgg

SEQ ID NO: 208864 - DNA, 122 bp, Homo sapiens
cccaagatgcaataatggaaaattcctttcaagaactggtgtttagacctcacaaaaatgcgcggcaaattgcattgtgatttatttgtcaatgtttttataggttaggcgttactttcaac

SEQ ID NO: 208865 - DNA, 122 bp, Homo sapiens
cccgagtcagctgggaggttcacatgaaggtggccagagagcatctggtaaatgccactgcgaactctaaacacaaggtgccatcactattattaaagaaacttttcgatctgtttgatatt

SEQ ID NO: 208866 - DNA, 122 bp, Homo sapiens
tgctcagtttcaatctcctaaactgggaatagtaagtctttttgtgcagtgttttagtgacgattaaagaggtaatgagcatatcatgcctgaaacccagtaggtcattattgatactcacg

SEQ ID NO: 208867 - DNA, 122 bp, Homo sapiens
taactctgtcttccttcagcccagcacctgagcacatctgtcactcagggcctgagggggcgggttgttaaacgttatccaatcagggacgccgggctgggaacggtccaatcaggcaccca

SEQ ID NO: 208868 - DNA, 122 bp, Homo sapiens
ccccgccctccgtgctgctggtccaacattcctcctggacaatggctgccttgggaatcccgggaatgaaggaggcgggcggcttcccgaacctgcgccctccacccccatcaagttgcgcc

SEQ ID NO: 208869 - DNA, 122 bp, Homo sapiens
cgtagacctatctgctgtcccttccttttctatcactgtgaaactcaaaccagggaatcacgtggatgatggttggtaaatggataatccacttgatcaagtgcgaaggggaatggggctat

SEQ ID NO: 208870 - DNA, 122 bp, Homo sapiens
atccagctgtagaacagactgatcacgaaagcgaagtaactgctcttcctctctcaaaggcgaaagaaacacaaatgttaagtagtcctatttcggtgatgggattataagtaatttttaaa

SEQ ID NO: 208871 - DNA, 122 bp, Homo sapiens
ggagcactgcccacctccccgagattccgcggaaggcggcctggcatcgatcaccgccgccgcagacagccacaatcacgtcgtaaaaacccggctgcggtcactgccggtctgctggcata

SEQ ID NO: 208872 - DNA, 122 bp, Homo sapiens
ctcaagggatcctcctgccttggcttcccaaagtgctaggattataggcgtgggccaccacgcccagcccctgtgtgtattttttttaaattgaggtgaaatttacacgacataaatttaac

SEQ ID NO: 208873 - DNA, 122 bp, Homo sapiens
ctaacatggtgaaaacccatctctactaaaaaacaaaatttagccgggcgtggtggcgcgcgcctgtagttccagctactcggattcaggagaataatcacttgaagctgggaggcggaggt

SEQ ID NO: 208874 - DNA, 122 bp, Homo sapiens
ttcgtaaaaggcgaatctcctgactttatcacccttactctgtcaaaagaccaagaacgacgtgaactctcagcaccttggggcaccgtgctgatgacacgcgcgctgaaatggaagttcag

SEQ ID NO: 208875 - DNA, 122 bp, Homo sapiens
cagaggactgtgtgaataaccctgagtttccaggcaatctggctctcagcccccacactgcgctgccccttggacagtcagggagttggcagtcagcagacgctggctgagtttggatttgt

SEQ ID NO: 208876 - DNA, 122 bp, Homo sapiens
ggcggaggtccgggggtgggtccggcggcgagtccgggtcggggcggacagagcagggggcgggggtccgggaggagggggccggggtccgggaggagggggcggggcccgggggcggggcc

SEQ ID NO: 208877 - DNA, 122 bp, Homo sapiens
tgtgacagctattggccatgtatggctactgggtgtccggaatgtggctggtcagaactgcgatgtgctagaaaggtaaaatacagagttaaagatttagttccaaaaatatacacacttta

SEQ ID NO: 208878 - DNA, 122 bp, Homo sapiens
cactgagagttgaacagggaggcgaagacaactttgttttttcccgggagagccctcgctcggaagtgcctcctccctccttctgcggcttgcgccccaagaccttcatccgccgccggggc

SEQ ID NO: 208879 - DNA, 122 bp, Homo sapiens
ttgcataatccgcgcggtataaatagccggcgggcgggccgctgacgcgctcggttgtgccgttatcgtgcaatgcttcatccccggtgccgttcaatcccaggtcgttttccctttcagct

SEQ ID NO: 208880 - DNA, 122 bp, Homo sapiens
taagaggaggaaaccagcacagagctggtcctaatcttagttttctgctcattttcacttcgaaacctttcgactgaagagccacctaaactaagaggcttggccgtgtgtttcatgctttg

SEQ ID NO: 208881 - DNA, 122 bp, Homo sapiens
ccgcgccacctccggaagccctggcgccctgcgcgggccgcccctccggcctgtcattaccggcagcagctgcagggtatttactggggccaaggtttgcgaacaggaacccgccctccaaa

SEQ ID NO: 208882 - DNA, 122 bp, Homo sapiens
acagaggagcctgacgggctctgtctctgcagaagacgaggcaggcgtcgagttatgagtcgcaccggcgatgttaggatggatgcagatgctgctttacctctggaatcttcttccaagaa

SEQ ID NO: 208883 - DNA, 122 bp, Homo sapiens
aattcaagcctcctccaggacttggactgttgatctccctcctcccatcagactgtgtcccgatatggcactgtgtctctccctaaggtgtgtactctcctgagagacgcttccttggaact

SEQ ID NO: 208884 - DNA, 122 bp, Homo sapiens
ccgtgggcaccctttctagttttcatcaagtctttcagagaatgtggagttttgtggacccggtcttcccatagcttagaggtatgggggcagtttccagcctaattcatttctttgcctag

SEQ ID NO: 208885 - DNA, 122 bp, Homo sapiens
ctcgccgcgcgctcaccagctaggtggtggtcctggctatgggcctcgcgtctgcgcgggcgcctcccccgaagcgctccgccgctcggggcctcctcagagtcctccttccctaagctgaa

SEQ ID NO: 208886 - DNA, 122 bp, Homo sapiens
tatgtccttatgatggagtattactcagcaatgaaaagggatgaatgactaatacaactgcggacacacacagggtgtgggggaagctggaatgccctgcgttaatcaaaagaagcctgact

SEQ ID NO: 208887 - DNA, 122 bp, Homo sapiens
ggagcttctgagaatcgccagtgacagttaagtggcctattgttgacgtcctctgctgaacgacttggttggattcagcttctgccttacccccaccccctgtggattttctgttagattca

SEQ ID NO: 208888 - DNA, 122 bp, Homo sapiens
cacagcctagccctccctgcctgtcaagggcacgcctgtcgtcacttcctcggggggggacgtacataacgtcacttccgggtacaggcaggcggaagagcgtccctctccaattttttttt

SEQ ID NO: 208889 - DNA, 122 bp, Homo sapiens
tctgccttttgctcagtgccatggttctatcttccccagggtgccgaaggtctttaaggtcgtcagctcacctactgcccagcctgtggtgtcaaatgtcctgcctcttcaaatgtgtttgg

SEQ ID NO: 208890 - DNA, 122 bp, Homo sapiens
ggtgggagccacgggtgggggccccagatcagtgccggtgaggggtgggagccgcgggtgcggcctcctgaactgtccccacctctgcctgcagcccgaggagctgactaatgctctggaga

SEQ ID NO: 208891 - DNA, 122 bp, Homo sapiens
ccatcaaaaaacacaagaacttgtcaatgctagcagtaatttttgagtgtttgtggctctcggaatgattgacttcgttcagtgactactattaagattttccaaggactgactcatcccaa

SEQ ID NO: 208892 - DNA, 122 bp, Homo sapiens
agcccttcagcctgccgctgcactgtgggagcccctctctgggttggccgaggctggagccggctccctcagcctgcagggaggtgtggagggagaggcgcggacgggaactggggctgcac

SEQ ID NO: 208893 - DNA, 122 bp, Homo sapiens
ttcagtgtttgttgctcacacatcaaatgcaaacatgtttctcttttgccccagtaggtgcgtggaggaagaggagaaagaagtaagaaagatagcaaaaattgaagaaatgagaaggggaa

SEQ ID NO: 208894 - DNA, 122 bp, Homo sapiens
ataaaagcaggaggaggtgtgatagcccatccatctgctggagcagctcttccagaggcccgagtcacctggagcattctggcatggggctgcggccaggcattttcctcctggagctgctg

SEQ ID NO: 208895 - DNA, 122 bp, Homo sapiens
ccgccggccgctccgacacaggtataaaggcctctctacgccgcgaacttgcttctagagcgcactccagcctgcgaactgataaaaccttcctcgagctccgccgcgaggccctgccccaa

SEQ ID NO: 208896 - DNA, 122 bp, Homo sapiens
ggaggcatgtggcctcccagacctcctgacctgggtggttgaggctcaagacagctcacccggtccagaagctccatgctggtcactagggtgctgtgctctctggcgccccacagcctggc

SEQ ID NO: 208897 - DNA, 122 bp, Homo sapiens
atttttcccttggggtgggctgaccgcatgtgcaatggcctgccagcacttgggaggcgccgcatgcatagtgtttacaaaaattgtgcacatgctcacatgttcccttacctgtcgagcgt

SEQ ID NO: 208898 - DNA, 122 bp, Homo sapiens
aatttggaccatctaacaaaaattatagataattttaaaaattttgtttttattgtatttcgtttgaattaatgacagaacgtcaaagaagacactgtccagattaagtgttattactggta

SEQ ID NO: 208899 - DNA, 122 bp, Homo sapiens
ggggaacgggctagaaagtttgcagcaacttttctcgagcttgcgtcccaggagcggatgcgcgtggcgtgcgcaggcgcagtggaaggaggatggccgcgcgcgctgccagcccagccccc

SEQ ID NO: 208900 - DNA, 122 bp, Homo sapiens
cttagcgccccggcgccccggcttcccaagcctggggactgagcccgcagacgcccatggcgcattggcgagcgcccggctgggagtcagcttggaaacccacaactcgcctttcttgagcg

SEQ ID NO: 208901 - DNA, 122 bp, Homo sapiens
aggctgcagggcaggcttccctaggggcaggcccaggcctatagcccgggacccgcatcccgggcgagctgcaccctcccgagaccttccccatctgtacaatggggacaggacaaggccca

SEQ ID NO: 208902 - DNA, 122 bp, Homo sapiens
gggaagcattgcctaggaattttggaaagaaaagcaatccaacagaagccacacattattcgacacagacctcccgcgcaggggaaaggaagccctaatccccacagtcctcgactccgggg

SEQ ID NO: 208903 - DNA, 122 bp, Homo sapiens
ctcacagattgtgtggtaagttactaagagaacagaagggttctaaggggtgtagagaaccggtggaggtgttttcaacgttataaaactttttattttgtaggtaatgagagacccccaaa

SEQ ID NO: 208904 - DNA, 122 bp, Homo sapiens
gcgtttaagtcaaaggccttggggctccgagtcccttcctctccccgtcctgtgaaggcacgacccagttcagctgtctgtaaagtggagccattagtccctgcctcgtagtgggaaaactg

SEQ ID NO: 208905 - DNA, 122 bp, Homo sapiens
cgagggcggggaggggagtgacagcagcaactagcgcgcgctggcaaaagcacagagtctcggaataggctaaacggccggcgcggaggggtggaggcaagagggggcggaggaggagttgc

SEQ ID NO: 208906 - DNA, 122 bp, Homo sapiens
aggactggtaggaaatgtcccctcctgaggggacgtgagtcttgccaggactcacgactccgcaggaccactccgcccctggttgggagcgcatgcaggcatggtgacggtgtcgggtggtc

SEQ ID NO: 208907 - DNA, 122 bp, Homo sapiens
ctcaggtgatccacctgcctcggcctcccaaagtgctgggattacaggcatgagccaccacgcccagccacatcactgttttatagtttttattggagaggtctttcacttcttcagttagg

SEQ ID NO: 208908 - DNA, 122 bp, Homo sapiens
aattttgtgctttctactttttgaaatgttgtcttggctcatcccacttgaacctacagccgtcagcttctttaataggggtgtctataaagaactgccctaaaatatgcttttccagtgca

SEQ ID NO: 208909 - DNA, 122 bp, Homo sapiens
tggccagtggatggcgactggtcaccctggggtgggggggtgacaggtgagcaggtgagccgcctaagaaggaaagggacaggaggcaatggagttcctgccaacagtgagggtggggatct

SEQ ID NO: 208910 - DNA, 122 bp, Homo sapiens
ctgagggctgaggacagaggagaagccagctccctaaagggagctgtgggaagaataattcgggaagtggaaagcatgtatgcagagccccaggttgcaacattctggacacactcaaggaa

SEQ ID NO: 208911 - DNA, 122 bp, Homo sapiens
cagtgggaagcaaaatctttactcttcaaatagttacagaagaggcagtatttgtagtaccgctgggaaaatgtcaacaatcacttctgggccatgaaacctgacgtttctctgatttatgg

SEQ ID NO: 208912 - DNA, 122 bp, Homo sapiens
gcagttctcctagagctaggggcgtgacagttactcaccggtcttcagtctcgaggcagacgccgggcccctttccgctcacactcggctcgcgcgcgccgcagccgccgctgccgctgtga

SEQ ID NO: 208913 - DNA, 122 bp, Homo sapiens
aatttgtctcttgtacgtcctgcttcactcaggactagctttttctagaggagactacaacgccctgggagacgtgcatgtgcgtatctagacccttcagcttccacgtatcaggcgatgca

SEQ ID NO: 208914 - DNA, 122 bp, Homo sapiens
ttcttggagctccttctcttccccttctttgttctctggcttggaacccctcaaggtctccgagagccagtaaccaaaacaaaccattcaaaaaacgaaggatttagggaaaaaaaattagg

SEQ ID NO: 208915 - DNA, 122 bp, Homo sapiens
aaacaaattttttttaaaaataaaaattatacctttttctccaacaaacggtaaagaccacgtgaagacatccataaaattaggcaaccagtaaggatgtggagaacagttaaactgtcgaa

SEQ ID NO: 208916 - DNA, 122 bp, Homo sapiens
gtcccgggttgggcagggaactggcagcatagctcctaggatgcgagggccatttgtctccggccgggggtcagatcctcgggaagccgagccatcccatccagccgcttgccccaaaccgg

SEQ ID NO: 208917 - DNA, 122 bp, Homo sapiens
caacaggctgttgacttcccctcctgctctttccaagggatgtttgtggtggctgttgtgcggctagctgacatttctggcctgttgaagccagaaggtgtttagaatctagagtagtcatc

SEQ ID NO: 208918 - DNA, 122 bp, Homo sapiens
aagccagttgctcccctagcctctactgtggcactaggaagcaagggcagccaagctgatcgctggtttcatctgcaccaccccactccctccagcaggtgatgagatggccagtgacgggt

SEQ ID NO: 208919 - DNA, 122 bp, Homo sapiens
ggcgtgtccctgctgtgacatgtgtgtatccctgccgtgatgtgtgacaccatgtgaggccggcgtgtccctgctgtgacgtgtgtatctcagccatggtgtgcgaccccacacgggggctg

SEQ ID NO: 208920 - DNA, 122 bp, Homo sapiens
gtgcgcggcccgtcggagtgcaccttgcgcctcctgcattgtgaaagggagcggggagaacggaacatggacccaaagacactggcactggcagagctccgcctggggccgatgccttaggc

SEQ ID NO: 208921 - DNA, 122 bp, Homo sapiens
cagctgcctctgagaaagattgccaggcaggagtcagcagccagaactcagctcaacaatcgtgttcagttctgtgttattgtacagcagtgctctccaaggacacccttgaatagaaatga

SEQ ID NO: 208922 - DNA, 122 bp, Homo sapiens
aacaacaagggaggctgtcattagctccttccaaagtggaggtcacttctctcccaaccccgagtcctccacccaaactcccttctcaaggtacaagggctgatcccgtaccagggatgggt

SEQ ID NO: 208923 - DNA, 122 bp, Homo sapiens
gtctctgcccgtgacatctaacctctttgtaatctaagatgggttctgtcctgggcagcacgtacacaaggaaatgcacctcaaggggcgttttcctcgtgctgattccctcttactgctgt

SEQ ID NO: 208924 - DNA, 122 bp, Homo sapiens
taagtgtgagtgggaggggaagttggggggtgaggaaaaaaagtcctgttctgacctttgcggatggggattccaagagaagtcttggtccttgcctttctgggaaccctcagtctatgtgg

SEQ ID NO: 208925 - DNA, 122 bp, Homo sapiens
acgccccctcctcccacctgccgacccgtccgcgggtaggagcctcccgggagctgcccacggcccccacccccaccaggggccacagccccaccagggccaggctctgcgcggcacctgcc

SEQ ID NO: 208926 - DNA, 122 bp, Homo sapiens
gcgcgctgggtcgcctctgctcggtctggggtctgccaggcgcgatccccccggtgcagccgagcccctccgcagactctgcgcaggaaagcgaaactacccggcaggagaaaaggcagcgc

SEQ ID NO: 208927 - DNA, 122 bp, Homo sapiens
ccatgcctgagttagcagggcagggacacttcacggtgctgagtaatactacctagtacacgcacagcattttgaaggttccccttggtgatttcattacaatcttcatcgctcttggcctg

SEQ ID NO: 208928 - DNA, 122 bp, Homo sapiens
cgtgatatttcacgcctactggtttcgtcaagcagggagtcgggtcgttgctgttggcgacgaaaggctctgaggctaaagccttgggcgtcgcccaaaccagcctctacttcgcttctgcc

SEQ ID NO: 208929 - DNA, 122 bp, Homo sapiens
tcagcagagagtgggccctatttccatgtctcctactatatagcaagctcaggggtgggacggctgaggagaaggcagtgcccggagcagatgagagtgtcctggaaaactctggaggtaat

SEQ ID NO: 208930 - DNA, 122 bp, Homo sapiens
tacttgggagactgaggcaggagaatcgcttgaatctgggaggcggaggttgcagtgagccgagatcacgccactgcactccaacctgggagacagagcaagactacgtctctctcaaaaga

SEQ ID NO: 208931 - DNA, 122 bp, Homo sapiens
cttctcaatttgcattgactctttggtgatctcatccagaagcacatatttcaatgtctccgatgctgatgactcccaaatatctctatccagttcaaaaactgcctacttgacatctacac

SEQ ID NO: 208932 - DNA, 122 bp, Homo sapiens
taacatactagttgcccacaatggcaacctgctcatgaatgcacgttttgatttccctcccgtcctcatctcacatcctcactcccctcctggtgcctcctgggatcacctcctaattgagt

SEQ ID NO: 208933 - DNA, 122 bp, Homo sapiens
aagtgagaggatgcctcccacaggaacgaacggaagagcgtttgatgcaggaccatttggcggtgcggtcagggtgaagacgttcaagatgcagatgcactcaggatctactaatagaaaga

SEQ ID NO: 208934 - DNA, 122 bp, Homo sapiens
ctccctctgcccaggcagaggtaacaagtaagagtgcgccagtctctccccatccggcggcgcgcagcctaagtccggggtaggggttgccggcgagcagctggaaacctcaggttcagggt

SEQ ID NO: 208935 - DNA, 122 bp, Homo sapiens
gcagggaaattagtcattctccttggtaaactttcttcaagtaagtccttcagctacagccgcgaacatatgctttttgacctttgagggaatccgtaagatctcgtgagaagcgcagcttc

SEQ ID NO: 208936 - DNA, 122 bp, Homo sapiens
cctccagcaggagcccccactgcctgggaagagctgtccagacttcagttccagttgacacgcccaggccatgaatccacaactcagtcagatggcagacaggtggagccctgctcccattg

SEQ ID NO: 208937 - DNA, 122 bp, Homo sapiens
ctgtaaaaggagccacagaagctaaattggccttggactgtggaaaagacagctgaataacggcaagagctaagaaactatttaacatcccactttcaatagcaacagttttacaaacagga

SEQ ID NO: 208938 - DNA, 122 bp, Homo sapiens
aggactggcgcggccggcaccctgctgggccgggcgcagggaccggggacccggagccggcggccgcccctggccctacggctcccccagccggaacgcaccccgctctcctccgcccgcgc

SEQ ID NO: 208939 - DNA, 122 bp, Homo sapiens
cctgctgcgacagtggcatcctgatagtgagatgctcagatgctgctgccctctagtggccgccagttccctgcaactcagaccacgtgatttctgggaaaaggccctccctggaggagaac

SEQ ID NO: 208940 - DNA, 122 bp, Homo sapiens
cttgcagagcacattgcgatcagtgcagttcccacgatagcagtagccttcttcagtgcacggggttccatcttgcatataaacgtttgcgggacatgtcacggtggtcccgtgacagtact

SEQ ID NO: 208941 - DNA, 122 bp, Homo sapiens
tccacctgcctcggcctcccaaagtgctgggattacaggcgtgagccactgcgcccggcccgtgatggtttttgaaacaatggttcagaatgctgaccactctggagagggctgcagcagca

SEQ ID NO: 208942 - DNA, 122 bp, Homo sapiens
ggtcttcttattttcccttcctgctccataactacaacgtgtttctgttcgtaatcatctcggcttttccttacctctgcttgtaagaaaagtcctttgcgccattcccctccaagccccag

SEQ ID NO: 208943 - DNA, 122 bp, Homo sapiens
aaacccgccttcccaggtaaagacgctcgtcacttgtccggctccttgcccagggctccccgatctcgctctccactccagccccggattggtgcagggggctctgccgcacggggcaggcg

SEQ ID NO: 208944 - DNA, 122 bp, Homo sapiens
cattttccagataagaaggggccgtaccttctgacgggtctaggcggcgggcccgcctcccgtgtttggaattgttgtgcacaaacatgttgtctgacacggccagcacgtggccgtccacg

SEQ ID NO: 208945 - DNA, 122 bp, Homo sapiens
ttggcccaagacactgaaagcaggcttacccatccctaagttttctaaactccggacactcgtcaaggttcctcaaggttgttttctgccaattgacgggaaatgtttgcacctggctctta

SEQ ID NO: 208946 - DNA, 122 bp, Homo sapiens
gttaggagttgtaagacgttcatcgccgtgttatccttgagtaaaggtgagtattaggtgcgagagccttttgaatgcctcttcggaaagctttgttcccaagcaagctttcgttcatgggc

SEQ ID NO: 208947 - DNA, 122 bp, Homo sapiens
agtacacgggcctggtgtgaaactaagccacaaacccatttaccctgtctgacctgcctccgccaccaggacccagtctcagtgaaatgggaaaggttcccttgtcctcctcgaagggcgtg

SEQ ID NO: 208948 - DNA, 122 bp, Homo sapiens
ctaatctctttgaacttcaattaccctgtctgtgaaagagaagggtaaagaatacctcctcgcagctcaaagagtcattaggaagaccaaatgagataatgtatgtaaaaatacttagtaca

SEQ ID NO: 208949 - DNA, 122 bp, Homo sapiens
gctggcccagggtccagaccctcccactccatgaccaggggcggcagctccccctgcagacgggtatccttgccggggcctgacctgccagtccacactctaggagctgccactggcaactg

SEQ ID NO: 208950 - DNA, 122 bp, Homo sapiens
atctcatgatccgccctcctcaacctcccaaagtgctgggattacaggcatgagccaccgcgcctggccacagtatgggtgttttaagctgctaaattctggggtactttgttatacagcaa

SEQ ID NO: 208951 - DNA, 122 bp, Homo sapiens
catggatcgcgctcttgccggaggagggtgcacgtgcggaccagaggcttcccagcgccacggtgccaagttgtgggggtgctgagccaggagcttcagaagagcctcacaagcagggcaca

SEQ ID NO: 208952 - DNA, 122 bp, Homo sapiens
cgggtgacaagcggcttgtgtggagtaggcctgttgcatggcttctgtgcgggcatgttacgcacgaggacagccctttccgggttccatgagcctcaggggaagcaggaggcgcctgcaga

SEQ ID NO: 208953 - DNA, 122 bp, Homo sapiens
aaaaaaaaacccaagattctagcaggcaaacacacaagcggctggaagtcgagaggatgccgggagcacaccgcaggcactggcacgccagcaggctatcgaccagcagaatgatgtggagt

SEQ ID NO: 208954 - DNA, 122 bp, Homo sapiens
cctaccctaaaccttccccccccaggccacctttcccattcagctgtgggattccggggccgcctgggcgctgcacccgccacttccgcatcgaaccgccgcttcaaccgaactcactccct

SEQ ID NO: 208955 - DNA, 122 bp, Homo sapiens
ggaggtcaggggaagtacggggccggctgctcagagtgcgggacgaggagaatcgcggcccggggagaggtgacccaggggcccctcccttctctccagtgtagacccttgtctgagaccga

SEQ ID NO: 208956 - DNA, 122 bp, Homo sapiens
tgtaaccaccacgaatactcctcagcaccccaactcccaatgggcagatggggacagcaccgccgtgtgctggggcaccattcacatcatcttctacctgtgccccagagaagcctcacaga

SEQ ID NO: 208957 - DNA, 122 bp, Homo sapiens
tccaccaccacctggcggctcagcttggcgcagatggcgttcagcttcaggccacccttgcgtttgggcgccatggcgggcttgcctgcaggcgggtccgtgcaccgggtgccctcagctgc

SEQ ID NO: 208958 - DNA, 122 bp, Homo sapiens
ggagcgtgtgatgagctgagctcacaaagggccggggtgctgggctgcagctggggagggcggggttggatcagcgcctgctcctccgccttcgtttttcccctccccctaaggattcagtt

SEQ ID NO: 208959 - DNA, 122 bp, Homo sapiens
cctcgctacaataacactcgaagccaccaacgtagttgacacacatctgctggcacacaccggcaatctggcactcatctgtgtccacacagcggtgcggatcatcctccgctggccggaaa

SEQ ID NO: 208960 - DNA, 122 bp, Homo sapiens
tgatagaacaatttatattcatttggataacgctccttcttcaacatccaggctttattccgtgacctatgcatttctaaaacagtgccattcaactgtaacttctttatgagtcttaattt

SEQ ID NO: 208961 - DNA, 122 bp, Homo sapiens
attattcagtaataccacttttaggtgtgtacccaatatacacattttcactgaaggacacgtactggaatcctcaaagtgtcaccatccaaggtagtctaaaactggaaactactcaaatc

SEQ ID NO: 208962 - DNA, 122 bp, Homo sapiens
ggggcaagaggaggaaggaagacagctcctgggagcagaggcaagcgggaatgacaagagcgaaagctgaaagaaggatgccacaagagaaaactgcacaggaaacaacattcagactatgg

SEQ ID NO: 208963 - DNA, 122 bp, Homo sapiens
tgcaggaatcagctcaacgcctcaaaactccatcaccacggtcaatgcccttgaagccatcgacagtgatcaccccaataacagaaggtctgtgagcccagaaatgccctgctcagggtggt

SEQ ID NO: 208964 - DNA, 122 bp, Homo sapiens
cgggttaggaccttatgggttagttgtgcctatctgaacctctctaagcagagcaggtcccgccctgtcctgccccacctcaccccaccccaccctaacctaggaaggtagcactgaccctg

SEQ ID NO: 208965 - DNA, 122 bp, Homo sapiens
gttgctaccgctggccgggaaggtgtagattccgctttccctctgcgcacgcgcggctcccggcacaaaattctcttgaatcgaacttatttgcatacgggcgcgcgcacgttgcgggctgg

SEQ ID NO: 208966 - DNA, 122 bp, Homo sapiens
accaagtctttctgaaaattactgtctgtgtgtgtgaaatagcatcggggaaggggacagcgcatttcaagcttttgccccgcaggtaggtaggaagcaggggctgagccgtaaaggaaaca

SEQ ID NO: 208967 - DNA, 122 bp, Homo sapiens
gcagggcagtgctcacacactgagtgtttaactcggcgaggggtctgactcccacctcgacgtcagctctgggggcagcagtctcgctgatcgcagctgcgcccccacagagcctgtctgct

SEQ ID NO: 208968 - DNA, 122 bp, Homo sapiens
aagtccgtcctaacgcgctggccggacatcagcagcagcaacgtgtgcatgagctcagctcggaaacccaaactcagattttatatcaggaaaactcacaattgaggtttttttcggggagt

SEQ ID NO: 208969 - DNA, 122 bp, Homo sapiens
tctctgagctcctctactcctgagcccctaataccagagaagatcctttttagctatcaccgtccaaagactcactggttaattaatggtcagcaacttagctgtctgcataaaaaccagcg

SEQ ID NO: 208970 - DNA, 122 bp, Homo sapiens
gcggtgcccgagccggcttccctagagcccgccctccgcgtcctgcacccccgcggcctccgcggcctccgcggcaactgctcccggtgatgcaaaccctcacttcccgcatccacttcctc

SEQ ID NO: 208971 - DNA, 122 bp, Homo sapiens
ggggagggaagaggcggtggcggcgcgggctgctgggcgagggctgctgggctagggagccgcggagagctcgcgcggaaggagggcggagcctctattgtgccggggcggcggagatgcag

SEQ ID NO: 208972 - DNA, 122 bp, Homo sapiens
cccagcagattcccaggcagggaaggctggcaccaaagctcgcctggagaacctgctgcacgccctccccaacacgcaggctctcagatgccctgcagggtcaagaggcccaggagggccag

SEQ ID NO: 208973 - DNA, 122 bp, Homo sapiens
agtccagacggtggggcggggttggagatgcagccagccctgctttgtgtctagatactccggcatgcttggcgcccccatgcccgaggtcatgtgctcctgccataatttaaacaaatgcc

SEQ ID NO: 208974 - DNA, 122 bp, Homo sapiens
ttgttttgttttgtttttgagacagagtcctgctgtgtcactcaggtttgagtgcagtggcgcaatctcggctcaccggcaatctctgcctcccgggttcaagtgattctcctgcctcagcc

SEQ ID NO: 208975 - DNA, 122 bp, Homo sapiens
cgcatccgttagacgttctgtcctataacgtgggtcgggccaaacaatagcacccatttacgattacctactgtgtgtcaggagctagtctctaatcctcaaaaccaccctgaaaggtcggc

SEQ ID NO: 208976 - DNA, 122 bp, Homo sapiens
gtgggccaaggccccctctgtcttacaaataggaagctggggtgagtgggtaagccagggcggtgcctgagccgacttcaatgggactctgttcttaaccttcacccccagctgccttccct

SEQ ID NO: 208977 - DNA, 122 bp, Homo sapiens
atgatgcagagggtgggggccagggtggggaccctccccagactgcaggtcctcagcgggcggcagccgtggtggccctaggaggccaccctgcccgagcacccgcttggccctgcggccgc

SEQ ID NO: 208978 - DNA, 122 bp, Homo sapiens
agttatccttttgcctcagccttctgaataggtgggactacaaatgaggcatcataccagcgtgtgtgtgtgtgtgtgtgtgcgcgcgtatgtgtgagatatgaagtcttactatgttgtga

SEQ ID NO: 208979 - DNA, 122 bp, Homo sapiens
ctatctctagaacaacaacagcaacaacaaagtgaaattaacaggatttaaaaaaaagaacgtgacaatttggggctgggtgcagtggctcacgcctgtggtcccagctacttggaaggttg

SEQ ID NO: 208980 - DNA, 122 bp, Homo sapiens
aatgagctgtgcgtggattccaggggcacgataacacactctctcccggaagacggaagacgtggagttgtttagggaattcacagaaccgaaccgcctggaagggaactgtgggtctccct

SEQ ID NO: 208981 - DNA, 122 bp, Homo sapiens
gacactcccccggcccatggagaaggtggcagctctcccacatccgctgggccccaccgacgcggggcacctgcaaggaggggtgcagcccccagttcatgatctcagggtctcctggccca

SEQ ID NO: 208982 - DNA, 122 bp, Homo sapiens
gtctagagaatttctctctgagaaactacgcccccgggggaatcggcccccccagccctgcgccagaatcccctgcagcaagtttcggagcaaggcctcctccatgcttccctcccagtctt

SEQ ID NO: 208983 - DNA, 122 bp, Homo sapiens
gcggggcggtgcggctcgggtggcacagtggtgaactctgcggcggctgcgcgccgctcacgctgttcctccagctgctgttacctctgcgggcctctctcacccaaggggaacggagttgt

SEQ ID NO: 208984 - DNA, 122 bp, Homo sapiens
caaagcaatctttaaaatgtaaatgaatttcaaatctggattttgtcctcctctgagtcccggcccacatctctaaccaccagattgaccaccaccacacattcaacacatctaaagataca

SEQ ID NO: 208985 - DNA, 122 bp, Homo sapiens
cacttcttaaactcgcttaaatactctttctcttcccactgccactaggagttcaaactccgaatttcttctccagattgttgaaagtcttttcagtgttctccacctcatcccttgttatc

SEQ ID NO: 208986 - DNA, 122 bp, Homo sapiens
tgggccccacgtgagagctaagcgactgccctcgcgcccgcagaacagcagggcctgcatcgactctaaggcgagaccagaaacttgctagtggagcaattctggtgcccctgcccgggctg

SEQ ID NO: 208987 - DNA, 122 bp, Homo sapiens
aaaaataatcatcgtaataggtgaaaagtaccaaatgcggccaaggaggtagcctcataacgctttcacatggttgatgggaggaaaataacctacatgtccaacagcagtggctgcttgga

SEQ ID NO: 208988 - DNA, 122 bp, Homo sapiens
gctggaactgagggctgatcccactcagaaggctgagcggtggagcaacgcagagcccaccggcgaaagggctggatctgcaggaagtgttgggatcccggtacgttcgaaggccgcagggt

SEQ ID NO: 208989 - DNA, 122 bp, Homo sapiens
cgcggccgagggcggccgggcatcccccgtgtccccgctgcccttctcagccgaccccggcgcccgcacgttggagagctgccctggggtcataggcttgtactgtggtccaccaaagccgc

SEQ ID NO: 208990 - DNA, 122 bp, Homo sapiens
tctaatcgcccaccagcagaggccacggaggcggaggcgagccagccacagccccgccaacgcgcacgaatcccacgtggcgtgagtcttttcacagaccgtgggaaacatgcacaactgcc

SEQ ID NO: 208991 - DNA, 122 bp, Homo sapiens
aaatgagtcaaggaaagggtagaaatcctgataccttatagaaagtgggcagtaaagagacggtatttaaagttgctaaaataagaagtacattactcaaagttgtaaagctaatcagtaaa

SEQ ID NO: 208992 - DNA, 122 bp, Homo sapiens
ttaactcatttcagcattaacccataagtctaagtccaaagtctcacctgagacaaggtacgttacctccccctatcatcctgtaaaatcaaaagcaagttagttacttcctagttacaatg

SEQ ID NO: 208993 - DNA, 122 bp, Homo sapiens
cccgttgctgagagagaccgggggacacgatagcctgttgctgagagagaccggggaacacggtagcctgttgctgagagaggtcatttcccggatctttgtcctgcgtccgcccacagctg

SEQ ID NO: 208994 - DNA, 122 bp, Homo sapiens
acgccgggccagaagatgggcgggcgccccggcagctcggccaggggcttggggtagccgcgcgccacagcggccgcgggcccgaagtaaacgccggcggacgacgcgagcccgttgagccg

SEQ ID NO: 208995 - DNA, 122 bp, Homo sapiens
cctcagtgtcaccttccaccctggcaggatgccttatggcaatgccacttctgagatggtcgtgggagtcagcaccactggccaggtatgtgaattttctgctaacaatggaagagtttgaa

SEQ ID NO: 208996 - DNA, 122 bp, Homo sapiens
tctcagggcccccagggaagtcacctccctgtgcctgcaacacaggaagcacctaatacgcggtgggcactgtgatctgcagcgtcccacagcacagggcttgagggcagccgccaagatgc

SEQ ID NO: 208997 - DNA, 122 bp, Homo sapiens
tcgtagaactgagcctcacggtacacttcagggatgtgctgtgtgggcacttgcccagtgcgcaggtagtccaggatgggtctgaaataggtgctggggcggtcgatgaagaagcggccctc

SEQ ID NO: 208998 - DNA, 122 bp, Homo sapiens
gatgtagacgttggtgactgaagggctggccgtgtgccgcaggaccacatagatgaccagcgagttacccagcaggcccaccacgcacaccaccaggtagaccagggggatcagaacgccac

SEQ ID NO: 208999 - DNA, 122 bp, Homo sapiens
accacgcccggcttccctgacagcccctaccccgctcatgcccgctgccagtgggccctgcggggggacgccgactcagtgctgagcctcaccttccgcagctttgaccttgcgtcctgcga

SEQ ID NO: 209000 - DNA, 122 bp, Homo sapiens
ttcatcaatgatgtccccaaacttacctattaaaacctcaaaatcagtctttccccaggtcggcctttggataactcagaggtcagtccctgcaggatcgcccagtttccatcagggcaaat

SEQ ID NO: 209001 - DNA, 122 bp, Homo sapiens
caaactcctgacctcaactgatccacccgcctcagcctcccaaagtgttggtattacaggcgtgagccaccatgcctggccagtatgtactttgataggctaggcaatatagttgcttactt

SEQ ID NO: 209002 - DNA, 122 bp, Homo sapiens
ctatatccccatgggccacaaagttttccagctggcattatttcatggtgttgcaatgctcgggtgtcctacagtgtacagagatccttgttcattcccactgagcccgcgaggatctgctg

SEQ ID NO: 209003 - DNA, 122 bp, Homo sapiens
ttaaacttcaagctcctttccagcttcaaaatcctaaaattcagcgggagtggtggctcacgcttgtaatcctaccactttggaaggctgaggctggaggatggcttgagcctaggagttca

SEQ ID NO: 209004 - DNA, 122 bp, Homo sapiens
cctgtcatggctggttcttccagtcgcacaggatccctggggagggacccggggaagacacgggttggtttatgcaaggctatgtggaccagagaggtggaaaacaaccgaagcccaccgaa

SEQ ID NO: 209005 - DNA, 122 bp, Homo sapiens
accttcacagtgagtgttacagctcttaaaggtggtgtgtgcagagttgttcattcttcccggtgggtttctggtctcgctggcttcaggagtgaaggtggagacctttggagtgagtgtta

SEQ ID NO: 209006 - DNA, 122 bp, Homo sapiens
cctgtcacccgtgcagcagcctgttccctaaaagggcctcaaagctcagcagatgggaaccgggattgaaatctgaacatctggctcaggcttttaacctctgctctacccaacagctgcct

SEQ ID NO: 209007 - DNA, 122 bp, Homo sapiens
agggggctgcgcttcacccactgctgagcgtcagattcagctgaggagattctaaaagcgcggtgctgggcccagacccaggcactccagagcagaacgcggaggggcccgaccccagtctg

SEQ ID NO: 209008 - DNA, 122 bp, Homo sapiens
tccaggcgacacgtcgtctgttgcggtcgctgtcatacaatccctttccccgtaagacggcgggtcccacagggagaaggggtgaagaggaatattttatcagccgtgtacatatgtaacca

SEQ ID NO: 209009 - DNA, 122 bp, Homo sapiens
ggccactcggagatcgttgtgcagggattgtccggcgaggacgtgctggcccggccgcagcgctttgctcagctagagctctcccgcgccggcttggagcaggagctggaggccggagtggg

SEQ ID NO: 209010 - DNA, 122 bp, Homo sapiens
ttcctgcctaatattgagaacaacagccatgtcaattgatagccgttctaacagacagtccgaactgctccaaaccactctaaaagcttgccttgatggagaaggggcctctggggcctctc

SEQ ID NO: 209011 - DNA, 122 bp, Homo sapiens
cttggagcgggagggcggggcggggcagggcgggggcgcaggccacgcgggggcgcagggcgcgagggtgcggcgcaggctggggtcccggcggcgggtcctcgcggccggtgccggctcgt

SEQ ID NO: 209012 - DNA, 122 bp, Homo sapiens
cgttctccgcgctgacgctcccggagctgttgttgggtgagctgggtccggagcctggggcgctgctgcacgcggagtctgcggaggcagaaataccctggtgagtgttactccatgcggag

SEQ ID NO: 209013 - DNA, 122 bp, Homo sapiens
agaggttgcggagggtgtctagctcctgggtgagctgctccacgcggctgcggaggcgctcgttctctgccatgtactccagcaccttctgctgcgtctccagaatgcgcctcttggccttg

SEQ ID NO: 209014 - DNA, 122 bp, Homo sapiens
gggatggtgtcttgggaatcacgtcgtggttggtatgcaaatattcctctttcttttatacgttggcattgtttttggtcatttgaatgagggttgagctcctgccatgtgctgggtgcttt

SEQ ID NO: 209015 - DNA, 122 bp, Homo sapiens
tagattccaaggcagacaggtagattgatctaggatcagaattttccagcatagttttgacggaagaatatggggtccttgtagtttgtcttaaaatgtagcatcagtttgattattgattg

SEQ ID NO: 209016 - DNA, 122 bp, Homo sapiens
ggccttctgaaaggcactcactgctccacccccaggattgtggaggaggtgcgcgcaatccgcttcaaccaggagcaggagtcagaggtgttgaacaggcgctcgtcgacgagcgggtcgtt

SEQ ID NO: 209017 - DNA, 122 bp, Homo sapiens
catcaggccagaagggaatctgtgaaatgggctttgaaacctgccttgcctttctccgcccggtcccagcgggggtccgatcggcatcaaggcttcacccactcccagagccttcgggatca

SEQ ID NO: 209018 - DNA, 122 bp, Homo sapiens
caccccctggacaataaagacaccagctctgtatcctaatcatgcggacaccctcaccctcggcaaggtgaccgctccagagtgggcccagatcccgagccccaagtacacatggttcacac

SEQ ID NO: 209019 - DNA, 122 bp, Homo sapiens
aacccaatgcatgtttgataaattccccaccttttgtaattccttggggtgggatagagacgagctctgggcaagaatatcagttttcaaactccaggaaagcatactggacctagtgtcat

SEQ ID NO: 209020 - DNA, 122 bp, Homo sapiens
ttccacttctcacccctgccactccctgtcgctgggtgtgagcaatccgcccacaccagccgggaaatgagggagagtctgttatctacagcaacaatgccagcctttgttgcctgagtgac

SEQ ID NO: 209021 - DNA, 122 bp, Homo sapiens
cagagggtgaggacccgtgggagtggcgctctgtggctgaactgaagagtccacggcttccgactaaaccggacaaatggctcaagccaagggcaacccacttcaatcccttgggaacttta

SEQ ID NO: 209022 - DNA, 122 bp, Homo sapiens
cttccaggggctgctttgatcttctccacagcagactccagaatgtctgacatgccctgccgaatgctcttctcagcctagagcttccctgtcatcccgggtcattttcccttttcacttga

SEQ ID NO: 209023 - DNA, 122 bp, Homo sapiens
gccttctgacgtcaagagttcttgacgtcatgccagcatgagatcacccgtggcactccccgccttggtttcctgtgtaagcagccaaaggagaatctcaagaaaggcaaggaaggtagtta

SEQ ID NO: 209024 - DNA, 122 bp, Homo sapiens
gtttcccagaaaaatcacttactgcaagggtcagcaaactcgttctacaaagggcccaatcgtgaatacttgtagctttgtggctgcagggtctccatcacaactgctcagcaatgctgtta

SEQ ID NO: 209025 - DNA, 122 bp, Homo sapiens
ggccgctcagcaggtcaggcgggcgtgtggggtgggggtgggggcggggggcggtggaaacgggcccctctcatcactgagctgacctgccccgggaaccccctgcctgcccaggcattaga

SEQ ID NO: 209026 - DNA, 122 bp, Homo sapiens
ctccatggtactccagggccccttgaggattcgggtctgtgggggctgcccgggaagggacggagagcgagggcccttggaggcagcctgtttgctccacacaatgacaggtgacttagctg

SEQ ID NO: 209027 - DNA, 122 bp, Homo sapiens
gctgggaggccagggacaggggggtccaggcagagcccggggtcactgggtcttgaacaccggcttgccccgcagccgcagcactctgtacgtgttgaggccgggcacgtcgaagccgggtg

SEQ ID NO: 209028 - DNA, 122 bp, Homo sapiens
gagagtgaaggttggaggtgggcatgagggttgggtgggtccttggagccgcctcctgcgcgggacgcccccgagcagcccacgtggctgggaccgcagttcctgcctgccttctccgaggc

SEQ ID NO: 209029 - DNA, 122 bp, Homo sapiens
ctgtggctgcctcattccttgggtgaagagtccatgccttgggtgtcatgaatgactcggcgtccaaagggtttatgtagcttttcctgagctctcccttgtgtgaggccaaagcacagtgc

SEQ ID NO: 209030 - DNA, 122 bp, Homo sapiens
cgggggcactgtctaggctcgggacccgcggctgtgccttaggtgggattttggatctggcgcaggtcctcacgccgcctctgggcaccttcggaaacacagcattgggtttctcatataaa

SEQ ID NO: 209031 - DNA, 122 bp, Homo sapiens
gaagccactgactcgttctccgcgctcacaggcgccgggtttccctcttcccgacgccggcgtttccttgttttgggtttagggtttgtttgtttgtttgtttccctgaccgggttcagggt

SEQ ID NO: 209032 - DNA, 122 bp, Homo sapiens
ctccctcagcaggacagggagccctctgtccccagggaacagccacagtgggcacagctgcggccacggccccagtgcgccagggcttacttgggtttcctgacgtccgtcatcttggtgtg

SEQ ID NO: 209033 - DNA, 122 bp, Homo sapiens
tcagggcataggaaagctttgtatccattactacctaatcaggaaggcttgcaattctgacggcaaatgaacagtcctctgagggtgcttgggcatgaggacagacacctcagagaatccag

SEQ ID NO: 209034 - DNA, 122 bp, Homo sapiens
accagcctggccaacatggtgaatccccgtctctacaaaaaaaaaaaaaaaaaatttagccgggcgtggtgacccctgcctatagtcccaactagtgggcagtctgaggtggaaggatagtt

SEQ ID NO: 209035 - DNA, 122 bp, Homo sapiens
ctgggcacggcactcaaatgtgctcaagatgtgagataaagaaaaatgacagttaccccacgagtgatcatatgcttagcttcccttgcgtctgtggatcagggtcagtgagataagacggt

SEQ ID NO: 209036 - DNA, 122 bp, Homo sapiens
tcgttaattttcttacccccttgttctcattttgatatattctacgctttaaacatgctccgttttcttttgtttagtctgctccctccctctttgtcctttcccccttctctagttatccg

SEQ ID NO: 209037 - DNA, 122 bp, Homo sapiens
cggacgcgggagaaggctggtgggtacaggttgcctccgggccggagcgcccatgcagggcgagctgcgctccgcacaaaattgcggtgggggcgccagaccgccttgctccgcccctgagc

SEQ ID NO: 209038 - DNA, 122 bp, Homo sapiens
tacatacctgttggttcccaggcacttggggacagggtgacctgcaggagcgtcaagctgcgtgtgttttggtagcacaacaaaggcaaacaaggtaggttgtcagccagatcggaactttg

SEQ ID NO: 209039 - DNA, 122 bp, Homo sapiens
cccaggctggagtgcagtatggtgatctcagcactctgcaagctctgcctctcgttcaaacgattctcatgcctcagcctcccaagtagctgggactacaggtgcatgccaccacgactggc

SEQ ID NO: 209040 - DNA, 122 bp, Homo sapiens
agccgggcccctgcgggtagggaaccagctaggtgtcagggcgcatgcgccagacctccccgcagcaggtggcctccgcacggctccgcccccgggtcgccgtaaccctctcggtgccagag

SEQ ID NO: 209041 - DNA, 122 bp, Homo sapiens
aggttccttcttaggggtcctcgctctgctccgcagcccctcctggggatccgggctctgcggtccagcgcgacctgcctggggccacgtgttcaagcacgaagcccctgcgtggagtccac

SEQ ID NO: 209042 - DNA, 122 bp, Homo sapiens
tctagtctctggctttcaaggactcctccttactcttttgagcagtttgttacttctggccgtgcttaccccttagtagtgctctctgctgtggtggcaggtgagagatttgagaacaggtc

SEQ ID NO: 209043 - DNA, 122 bp, Homo sapiens
tcatgtcaaaggcaggcatgggcagtgggcccagagagtggatggggtggattcagggcccgtctctcagttatgcacccagtacatggcaccaggtgctgagaccagaagccttggggtca

SEQ ID NO: 209044 - DNA, 122 bp, Homo sapiens
ccggccatgagaccgggaaacccaaagcgcgtgaggacgcgagcaaactaggccggcgcacgcgagccgaaacgctggctttggtaggacaaccaagctcacacgccgagagattccggaag

SEQ ID NO: 209045 - DNA, 122 bp, Homo sapiens
gtggataggctgacgggtgatgaatattcaaagcacaactgtaagcgactttagttacagcgaaactctaaggcacgctgcccttcggaaggaaacacggcattccccaacctgatagccct

SEQ ID NO: 209046 - DNA, 122 bp, Homo sapiens
acctgcagctggaccgcatctctgtgtactacaatgaagccacaggtaagggcaggagcccgggcagctcaggttcccttccctgtctcccacttatctgggatctctttccatttctgggc

SEQ ID NO: 209047 - DNA, 122 bp, Homo sapiens
gctgtctagaagagggctgaagggaatctgagaacaataagaaatggggttttaaagatccgcccatgaaatgcagattgctgaacacagaggctgagctaatagcagctagagagtttgct

SEQ ID NO: 209048 - DNA, 122 bp, Homo sapiens
cgctggtcaggttaaaactgaggctgcatggcacatttttcactgtaaacaacgctgccccggcaaaccctaggggaagggaggcgatcttgccctcttaatttcccagtccaaggaaaggc

SEQ ID NO: 209049 - DNA, 122 bp, Homo sapiens
caaccggggcgctttcaggcacactgcggttgcaccacaagcttcctggatggaaggacacgtggccccggggccccacaacggcttcctgtgtcccgccgcctccccctcgccccctcagg

SEQ ID NO: 209050 - DNA, 122 bp, Homo sapiens
ctgttgcaaggttgtttcatatcctgtgtataagaataagcggccgggtgctgtggctcacgcctgtaatcccagcactttgggaggccgaggtggacagatcatgaggtcaagagatcaag

SEQ ID NO: 209051 - DNA, 122 bp, Homo sapiens
tggcaaagagaactgaatactgttcatcctacttctttcccagaagtatagtggccaaagcgaaggagatttatggaaggcaatgattaacccagagaactaacctaggcagtcaagcaacc

SEQ ID NO: 209052 - DNA, 122 bp, Homo sapiens
acccctcctctcccaccaggcacatgctcaggtgtggcccagcctctgggttcaggctcacgtcctgtgtggcctggagggagttcacgcctcaggggtgtcttcccatcccaggagcccat

SEQ ID NO: 209053 - DNA, 122 bp, Homo sapiens
ctcaaagtctccagtgggttaaaaccacaacccttggggagccccagaagtggctcatctcgggtgtctccacgaggttctcctggcctggaaaatcccccctgcgagcccccgggctcgcc

SEQ ID NO: 209054 - DNA, 122 bp, Homo sapiens
gcctccccgcccagggtctgggcacagccgcccgccgcccagcacaggagggtgcagccccggccccaagttctgcgccatgggaggctcccactctcagaccccgaggggccgggaacccg

SEQ ID NO: 209055 - DNA, 122 bp, Homo sapiens
ctcctgggttcaagcgattctcctgcctcagcctcctgagtagctgggattacaggcatgcgccaccgcgcctggccaatttttttaattttatggatagtgtatttgaaaagtcacatcga

SEQ ID NO: 209056 - DNA, 122 bp, Homo sapiens
ctgagcagttctaggcctgcccccagcctgccagaaggtctgcaccctaacgccggagtgcgttgatctgtgggtccaaccgctccctggcctggggccctagccacttttgaagccccggg

SEQ ID NO: 209057 - DNA, 122 bp, Homo sapiens
ctctacccaaggcagactatgtccccaagtgtaagcccattctaaagcccaagtccacttcgagccccgccctcatcccagactagagcctcctctagccacacccccacgccatgtccatt

SEQ ID NO: 209058 - DNA, 122 bp, Homo sapiens
agaggcaggctggggttccgaggaccccagagtccatcacaggagcagatacagtgacctcgggaatcttcccggccccagcggaggcgagcggatagatagccctggctcaaggaaaaaag

SEQ ID NO: 209059 - DNA, 122 bp, Homo sapiens
gtgggccgatgcccagcgctcggatggtcgccgacctgctaagggacaggggcgggaaatcggggctgcgcttcccaggaaagagacctcaggaacatctccgtgctccgtttcccgtccgg

SEQ ID NO: 209060 - DNA, 122 bp, Homo sapiens
cctttgcgtccagagaataccatagtgcgggggagcgccaaccagtgccaggacacttaccgagctgaagagttgacagggaagtgaaatctcagaaagaaagcctttctgggttggcctgg

SEQ ID NO: 209061 - DNA, 122 bp, Homo sapiens
cacccaaggctgaggggtgcctggggtggggggcgctgagaggcatcaggctcacatctgcggggaagctgcgggctgtctgtggccgtcctgcatgggccccgctcatccctggccttttc

SEQ ID NO: 209062 - DNA, 122 bp, Homo sapiens
gtactgcaggtaactaggcactagcagcaggggcactagcagcagggacactccctatctcgcctgtcacccgcgtccagcaaaatctgatgccctgtcggcccagcagggggcggtgctgc

SEQ ID NO: 209063 - DNA, 122 bp, Homo sapiens
tttcatgtcaattaatgattaggccttgagcctcacaagaaaggtgataggcctttgagtcggtttactgcaacagtctactcaagacttgccccaggccctgggaaacatgtaggtttaaa

SEQ ID NO: 209064 - DNA, 122 bp, Homo sapiens
cctatggacaacttctgtattaatgatgttaccaaatactgcatttaataaaatccaaaccgctgaagtccttcctggctgatttccacgctagaagacacataggatggaaacacctcccc

SEQ ID NO: 209065 - DNA, 122 bp, Homo sapiens
ttctaagtttctgaatttccagtcaaaccatctgctgctgaccacaaatcagtgtggattcgtatttatagccatcactcctttgacacaaaatgtgcagtcatgtacactgcttcgagtgt

SEQ ID NO: 209066 - DNA, 122 bp, Homo sapiens
cccaccctctcactttccctcctgctgaagaggcctcagtgcccggcgggtgcacacaagcggcgcagtccctactctggcgggaaacacaggatgtgaaagtattttatgaaacagtttca

SEQ ID NO: 209067 - DNA, 122 bp, Homo sapiens
tgctggctgtgagtcccttgtggaatataagggggtagtgggaaaagtggtactaacccacgattctgagccctgagtatgcctggacattgatgctaacatgaccatgcttgggatgtctc

SEQ ID NO: 209068 - DNA, 122 bp, Homo sapiens
cccaggaagtttaataggtttctctgagggtaaagatgatgcagtgcttttggccatccccgtgagctgctcaattaaaaagttcccaggagagagtctaacgggtcctgactgggtcaact

SEQ ID NO: 209069 - DNA, 122 bp, Homo sapiens
agcctcggccgcgtgtgtctgtgagtacacggcagggtctcagcctcggccgtgtgtcctcgagtacacatcagggtctcagcctcggccttgatcatctatccttgttatataataagctc

SEQ ID NO: 209070 - DNA, 122 bp, Homo sapiens
gtttttaacgtaacttttttttcttttttgcagaaaataattttgtaaactgtcacttcgcgggcagggaggatcgatgccacgtgggccccagctcacccgggtggaggctgggagctgaa

SEQ ID NO: 209071 - DNA, 122 bp, Homo sapiens
cccggtgcgcgagggcgtgaactgcaggtccaggtaaacactcagcgcccgggccgagggcgcatcccacgcgggccgcgcgggggcgcctggagacccgcgcttgctggggcgggggcgag

SEQ ID NO: 209072 - DNA, 122 bp, Homo sapiens
cggtggcgggggccgcgagctgccgggaagccgaggcagggcccggcgcctgaactttctcgagtttgttttgaaaacgattgcaaattttgggttttgtcccttaaagcaatcaaactttc

SEQ ID NO: 209073 - DNA, 122 bp, Homo sapiens
gcgtaaaccccaccccagcgcgagcggaagaggcggctcgcgggggcggggcttggctcgcgcttccagcgagtgacaaggtttcgtggcctgggggcctgagctgtttcctcttggaaagg

SEQ ID NO: 209074 - DNA, 122 bp, Homo sapiens
accaggcctcctcctatcccaggtggaaactaaagaggaaaagatgaagccaaactcaggcggaagcaacataattaaactggtttatcgtttggcaacagagatcagaggagtgagtggaa

SEQ ID NO: 209075 - DNA, 122 bp, Homo sapiens
tccacccacctcagcctcccgaagtgctgggattacaggtgtgagccaccacgcctggcccggagagctaaatttctaatactgtttgcgtagttttttaagggcaacctctccatctttga

SEQ ID NO: 209076 - DNA, 122 bp, Homo sapiens
catcaacttgcctgcgtgttcatagacataggaagaccaagacacagcgggtctatgaaacgtgcccagggttaccataccagttggcaatctgggatttgatcactcttttcccacatctg

SEQ ID NO: 209077 - DNA, 122 bp, Homo sapiens
tatatattcatctgtaggctaggcttctctctcttttttttttcaatcagtggcttcaaacgtgactcctttttcattttgaattgattactgtacaattttttaacattctttttttcttt

SEQ ID NO: 209078 - DNA, 122 bp, Homo sapiens
ctccagtaaatgagagtcagaatctgaaccttgggctcgtgcttttaggagccacgttctcgtgaccacacagacatcctccccttcttaagaaagcaccagatgtccttggaaatttatgc

SEQ ID NO: 209079 - DNA, 122 bp, Homo sapiens
ctgttgcccgtgccccctagtgcggagctgaggaccgcttgaagttgtgccctgcagccccgcacaccacctccggctctctgaggcactcggatggcggtgtatgcggcggggaaggagcg

SEQ ID NO: 209080 - DNA, 122 bp, Homo sapiens
catttcttgagtgaatgaaagagtaacggtaggaggtccgaacagaacgctcagaacctccgggcgactaggcttccgggtgtcggtttcgttggctcccgagagggaggaggaagcgcttc

SEQ ID NO: 209081 - DNA, 122 bp, Homo sapiens
gctgccgccgcatctgcagaaaccactcgtgttgaggcctcggagcagccgggagcaccacgctggagcaaaaaagccggagggcgcagggctccagcccggctgaccatcccacccagcgc

SEQ ID NO: 209082 - DNA, 122 bp, Homo sapiens
cttcagggagcgcagcctgaggcggtgtggtgcggtgcggctgcagggcgggcgagtccccggagctgccctcagcgctgcacagtttccagcgagcggaccccggcagatgaggtctgccg

SEQ ID NO: 209083 - DNA, 122 bp, Homo sapiens
acgcgtggggccctcacctggccctggggaaggtcagcccccacctccccacccacgtcccggccccacgagcaaggaggtctggggaacatcaggcttccagaccttgccacccagagagc

SEQ ID NO: 209084 - DNA, 122 bp, Homo sapiens
gcagcctcatccagcccttctcctggccggttctgaagcacagtggtctctccctgagcccggcagccctgggctggcttctgttaatttgctgtcaggctgcctaagcaaaccaattaaaa

SEQ ID NO: 209085 - DNA, 122 bp, Homo sapiens
ctctccctaggcacacccccaaggaaattgccttttcagcaggcgcctgcgggaaagaaccgcaggagacagattccctttagagatctgcatggggaggagggagatatggaaataaagag

SEQ ID NO: 209086 - DNA, 122 bp, Homo sapiens
agtctttcctttcctgcgtgtatgtgggtactaaagagaagggcaacacaaacccaaacacgtggcctgtctggaagcaggcagcgtataaattgcaaaataagaaagcctgggtcctttgt

SEQ ID NO: 209087 - DNA, 122 bp, Homo sapiens
ctcctctccgcttctttgtttggagcggaggccccgccccaccccgcccccaggcgcactcgcccggccattccggttcagccggttccagcccccagtttctgccgctgcaggtcccggca

SEQ ID NO: 209088 - DNA, 122 bp, Homo sapiens
ttccttctgccctgtaataataggctgcctggggctcactgggctatggtttaaaaagtccgcaggtggcttctcctctctccagctaggctggctggaaagggagggcaggattgtgtgtc

SEQ ID NO: 209089 - DNA, 122 bp, Homo sapiens
gcgtacccacgaccgactgccaatggcagcaccgagtgggcggggacagaccgggagtgacgtcagttaggagcaatcagagatcgggagcgggagcgggcggagcaggcgacctgaggaga

SEQ ID NO: 209090 - DNA, 122 bp, Homo sapiens
agcccggcggggcgctcccctgccagtgggcggggaggaaactgtcaagccagcgcccgccggggaacccacgactgtgtcacctgccccctgagcgttctggagcgccaagcttcgcgatc

SEQ ID NO: 209091 - DNA, 122 bp, Homo sapiens
gtccctgtacccgaagcttgccagccgctagtacgcccaacgcaactctcacctgcattgcggcggccgaggcggctgccacgatttcacttccggttttccagtcagcaaacgcctacgag

SEQ ID NO: 209092 - DNA, 122 bp, Homo sapiens
ggcgcttggagaagaagacggtcaccgtggagtttttcctggtgggacaagacaacgggccggtggaggtgtccacattgcaggtgggtgtctggaagggcagacactgcccctgggcccgg

SEQ ID NO: 209093 - DNA, 122 bp, Homo sapiens
gtgcttgttggcgagccccggccaccgtgcacttacacgttaaaagagggactgtgtgtgcgttcagggagcttcggtcaagctccagaggctgtttatatcatggtttcggccccaggatg

SEQ ID NO: 209094 - DNA, 122 bp, Homo sapiens
ggggtgtgagtattcgttccctgaaaaacatgactttaatcttaatgaacagaaagaccacggatattagtgcggatcgtttgcagattcttaattgtatcttttcaaagcaaaagatgtcc

SEQ ID NO: 209095 - DNA, 122 bp, Homo sapiens
cactctaagctcttcttctggcctttccaccagtggtcttacactagcagttaatttgctcggaattcattgtggagctatcttgtgccaagcaaggtgccaaaggttttacatatgttcac

SEQ ID NO: 209096 - DNA, 122 bp, Homo sapiens
tcccaaatcactcattctcatccaggtcccaacctggatctcggggtcccctcctgtccacgcctccagagtcttcagcgtcaggggacagaagggccaccttctttatcagctttgactgt

SEQ ID NO: 209097 - DNA, 122 bp, Homo sapiens
tccttgcggcgttgggactgagggtcacaggcacctgtatttccgtttccggttcgcctccggagccatggcggcggcactgaagtgtctactgacattaggaagatggtgccccggccttg

SEQ ID NO: 209098 - DNA, 122 bp, Homo sapiens
atttaccaggtagagcaatacaataaggtctttctatccattcttgagctccatgtttaccgcagagaggaaaataacagcgactggtagttttgcccagagattgtataaaagaggtcagg

SEQ ID NO: 209099 - DNA, 122 bp, Homo sapiens
gcactcattctgactagcaatatgctggtggaaagtgctactccaatgcctttatcgttgcgttgctatcattttctttatatctacataaatttttttattttattaaaaaaatatttttt

SEQ ID NO: 209100 - DNA, 122 bp, Homo sapiens
cataactaggacttctagtcacaaggtagatgtggaaatgatggtccagaaggtatatttcgaggcttggcatgaggcacataagagaagacagaagcatggcctatcagcggatgtcatca

SEQ ID NO: 209101 - DNA, 122 bp, Homo sapiens
catctggtccctgggtgtggacacccacgctggctcttggtaggttgtttaaaacctgtccgttgctaggccctttccactctttgttccttggatggtattttgggttttcctaagcaggg

SEQ ID NO: 209102 - DNA, 122 bp, Homo sapiens
tagcttgtgataaaatcaatgtatataatcaatatttttttcagttgaagtaatatgttgcgtttttatggctcctaagagctccaaactttggagaaacttaagaagcaatttttataggt

SEQ ID NO: 209103 - DNA, 122 bp, Homo sapiens
cagtgcccgctcggtttttcctgaaacgcgcagccctcgcctgtagccaggagaaaactccgcgagccaggaaaacacaaactcggccaggaaacagccacccgggggtgcctgaagaggac

SEQ ID NO: 209104 - DNA, 122 bp, Homo sapiens
cccgcgacaggcaaccagcggggtgagggggcgggctccaccgcacgtcctttgcgctcccgggaggccagaacaactcccaggcctccgccggcccgactcccccgaacccgagcctcccc

SEQ ID NO: 209105 - DNA, 122 bp, Homo sapiens
cccattttgtaaacagaaagtcaacagagattctgttataatgtttaagtgtttggactccggagccagactgccttgatttgagtaacagtacttccacttgccatctttatgaccttaaa

SEQ ID NO: 209106 - DNA, 122 bp, Homo sapiens
tgcacccccaaggtctcattcctagggtggcacgccgggaagttcatctgtagaagcaggcgcgtggtaaagtgtgcctgtggtcatgcaaatactagtttttgcttcacagggtcactctt

SEQ ID NO: 209107 - DNA, 122 bp, Homo sapiens
gggtcagggacccgcataaaaaagcgcagtctggccgcttttcccacagggcagctgtaccgaaggcaccaacagctaaggctgcgaaacagcaaagatgacggccgctcctccctttcggg

SEQ ID NO: 209108 - DNA, 122 bp, Homo sapiens
agaatgggtagagagttgggggcgggggggtgggctgcagagttgaaagtgcacctgaggcgaatgggccattaaacacccaatactgagacggtttcggggaggatgcggagggaggagct

SEQ ID NO: 209109 - DNA, 122 bp, Homo sapiens
acagaacagcaagctgcggcccgaggtgctgcaggacctgcgggagaacacggagttcaccgaccacgagctgcaggagtggtacaagggcttcctcaaggactgccccaccggccacctga

SEQ ID NO: 209110 - DNA, 122 bp, Homo sapiens
ggcgagcgggagggaggccaggcagagatgtgcaggatgctccaggtgggcatggaggggcgggagaggtaagggtaggcgggaagaggggcccgggacacagtctgcagcagcagggcagg

SEQ ID NO: 209111 - DNA, 122 bp, Homo sapiens
atccctgtgcccaggttccctcatcccaacaagatgggtattagtcatgaacagatacagcggctcagctcctcccctccctcctgcaactgtaggcacagactgaggaaacactctcgaag

SEQ ID NO: 209112 - DNA, 122 bp, Homo sapiens
tccggacacggaggcgcctcctcaagtcgagctggcaggcgcgggagcaggccccggccccgtctgaggcgcggcacgcttctcccgggctgcagggcctcttactccatcccagtacaggg

SEQ ID NO: 209113 - DNA, 122 bp, Homo sapiens
ctcggattcgaaccgaggttgctgcggccacaacgcagagtactaaccactatacgatcacggcgagctactagggacacaggacctcggcttgtcgcctgaactcttctctgttgaaagcc

SEQ ID NO: 209114 - DNA, 122 bp, Homo sapiens
cagctagtggaaattgggtggtagggtgggaaattatgagtttatcaagttggaaaggaacgccttagtgcaaagtttaattattgatgaagattactattactatgattaaaaaccctcct

SEQ ID NO: 209115 - DNA, 122 bp, Homo sapiens
ggcggctggccggcaacattattagccgaacgcgccctgaaatctgatacacagttgtgccggcattatctctaggatccaaagggtggtctctaagtatcggaaatcccttcctctctctc

SEQ ID NO: 209116 - DNA, 122 bp, Homo sapiens
ggaagagctaggtgcttccaggggttttgactggcctgaccccaccttgcccttccagatcgctcaccacatcctcccgaaaagtgtgtggaggaattcaagtccctgacttcctgcctgga

SEQ ID NO: 209117 - DNA, 122 bp, Homo sapiens
aaatctgaatgtcctgctgcccgtgattcatgggtagtgataattgttattctgataggacgctaacagttttttctggaaaataaaatgtgttgtgttcagattgtcttgagagaattgtg

SEQ ID NO: 209118 - DNA, 122 bp, Homo sapiens
gtgacgtaccccgcgccgaccgtccccacgcccacacaagaccgcccttactggaggcggcggctgcacactacccacccagaagaagtccgtccatgtcaaagatgaggtgggtgacgggc

SEQ ID NO: 209119 - DNA, 122 bp, Homo sapiens
tcagaagccaagaaaaaagatcggagaagaaaagaaggaatgacctcaacttgctctgcacggaggacggggacggctcagagataaatagcatttaggttaaaactatgtcattagcaaat

SEQ ID NO: 209120 - DNA, 122 bp, Homo sapiens
ccagctgtagtgtgattttttcatggattgtttaggcatcttatattttggtggtgtggccgaggcccagaatgacatgtaggactgatgatgagcagagaaggtgattcccttttcctttt

SEQ ID NO: 209121 - DNA, 122 bp, Homo sapiens
tcagagttcggcgcgccgggccaggcggagggacctcagtctccgatccgggccagcgctcgcccctacctgagctgtacggcctggcttggcaagcccagcaagaccagcgcccagcgcca

SEQ ID NO: 209122 - DNA, 122 bp, Homo sapiens
cgcagtctgcaggcaacattcaactgcaaggcatcggccaatgggaactattgctgggctcgttcgaaagtaaacggtggacggcgcggcccgaggcaggtggcgggagtcagtttaaggct

SEQ ID NO: 209123 - DNA, 122 bp, Homo sapiens
ctactttctgggggaccctggccgtccttgctgagcctccgttgacttctctaatggggacggtaatgcctacctgaccacaagctgatgagtaaatgagctatgagtgcaaagtgtggtgc

SEQ ID NO: 209124 - DNA, 122 bp, Homo sapiens
tgtatgcattttctcattcaagctttgtaacttattcataggccagccctcagtggaaagcgttaacccatgtgcccatgtattgaaggtcaaaagacacatgccaactacatttggcattt

SEQ ID NO: 209125 - DNA, 122 bp, Homo sapiens
cttgggatggctgaaatagactgtaatgttgacccagtgagtcgagtgcacgaatgtgggcgagtggtgctcgcaccctttgttcaccaacagttactgatcacgcacctcctggggatgca

SEQ ID NO: 209126 - DNA, 122 bp, Homo sapiens
caaactgaagctgggacacctgggttacaagttaaatgaaaatccgctggctgggtggggcggggagtgcgcaccaggaggccctgctcatgggaggggcggtgactgggtcccctcacgcc

SEQ ID NO: 209127 - DNA, 122 bp, Homo sapiens
caatgaccttggaccccactgccactgctctgagaaagtacttttgccagcactcctcatcggtgtgttgttgccagttaaccagtagcaagttggcccctgcagcacagcaggtgcttaac

SEQ ID NO: 209128 - DNA, 122 bp, Homo sapiens
cttctgttttgttgtcttgtgcagtattttacagcccctcttgtgtttttctttatttctcgtacacacacgcagttttaagggtgatgtgtgtataattaaaaggacccttggcccatact

SEQ ID NO: 209129 - DNA, 122 bp, Homo sapiens
caaaaaatacaggtgaccagactgaagagccagcgcgggaggacgggttggggcctgggtcgttcaaccagaaataagacaagtgggggctgtttgacactgattgtcactccgggtttccc

SEQ ID NO: 209130 - DNA, 122 bp, Homo sapiens
ctggaaacttttctttattgatacagatgatgagcaatgcggtgataagtgtgtatcccccggctgttttcgcgttttcactaaattgatggctatgggattaccggattaacaaggtgcac

SEQ ID NO: 209131 - DNA, 122 bp, Homo sapiens
ttaagtaatttccattggatagttgcaggcaaaagtattttcccttcttcagtggctagccgtcccgaggggagaaaactgtcctcgtgaggttccccattctgtttctcctgctgagtact

SEQ ID NO: 209132 - DNA, 122 bp, Homo sapiens
gtgatggccacagattcatggcatttaaccgatgcccctctgcccgctccccgtcacacccggcccagactgggtcaggacccaagtgcatctcgggtggtgttaccttgagcgtgagtggt

SEQ ID NO: 209133 - DNA, 122 bp, Homo sapiens
aaattaatacctattgctaagatgctatttgatactccagcatgattagttacatcttaacggtgtgtatggtcttttaaatatcaataaagttatatgcaggtgttagtttgtaccataac

SEQ ID NO: 209134 - DNA, 122 bp, Homo sapiens
actccagaatgcagggggaggcccaggggctggaaaaggccagggcccgcccacagcagccgcctaagccagagcagggtccccagcaaagctcatgcccagccccctgggggcggagggcc

SEQ ID NO: 209135 - DNA, 122 bp, Homo sapiens
ccgttctggccgcgggcagcagaggagctcggggcgggcaaagctcgaggggacacggggcgagcccagaccctgcctgggagccctccccgccggagaccaaagggcagaaacgcactcac

SEQ ID NO: 209136 - DNA, 122 bp, Homo sapiens
tagagggcgtggacttgcagaactctttgaagcagcagatgctagactgcccaaaccccacgcgagagtagctctctggagttgcggagtccgaacctcccaagagctacaaatttattccg

SEQ ID NO: 209137 - DNA, 122 bp, Homo sapiens
gcctcccatccaggtggcatctctccgtgcagagcgaatcgcaaaagagaaaaaggtcagcgccctgggcccttctgcttgagtgggaaaatgtggtgactgtgacttcatccagggggtat

SEQ ID NO: 209138 - DNA, 122 bp, Homo sapiens
tccggcgcgcgtgactcggttccgctttgggctgctctgttgggccctagcgcaggagctcggtccgaaacaatggccgagccattttatttaacatgtactttaccatagttaaaaaataa

SEQ ID NO: 209139 - DNA, 122 bp, Homo sapiens
taagcccaaattgctgcacccttccatcgcacacaaatacgaacaccatacaagggttcccgtgcttacatcaaatggtaacgaggggtacagcctattgtctgagtctacttatcgccctt

SEQ ID NO: 209140 - DNA, 122 bp, Homo sapiens
ccgaggaggatgcgagcctgggaggttgttccatttccacgcgcccctcacgcccttggacgaggccctcacccctggttccactgcaggagacctgttaaaggtcatccgtggaccgaaat

SEQ ID NO: 209141 - DNA, 122 bp, Homo sapiens
taaaactcaacctgaaatttcagtctgtatatagatcaattttagttaaagcatgtagaacgaataaaataagcaaaagacaggaagcaaagctagagaaagggaaagaagtaaacaaggag

SEQ ID NO: 209142 - DNA, 122 bp, Homo sapiens
gtattatagcatgttgtgatattgaggttctgtgggttaaagacattctggatttgatgtcggattacttgagtttagctcctacgctagtacttattaagcatttgttcttaaggaagtat

SEQ ID NO: 209143 - DNA, 122 bp, Homo sapiens
tggatacggaaacctgaaaataatgtctttcttttgattttttccccaatcattaaaaaacgtaaaaactactcttaggtcgcaaggttaagccattctcagcttagcagtggcaggctgga

SEQ ID NO: 209144 - DNA, 122 bp, Homo sapiens
atgtggctttaagcaagccaatttatctccctatcggtaaaaggtgacacttggctggctcgatattctgttatgtgtcccagccccagaaatgcacagactggtttccatttttagtggag

SEQ ID NO: 209145 - DNA, 122 bp, Homo sapiens
atttcaatgtccacttagacgacctctcctccaatgacccccttgtccgccctacctcagcggctcacttctgtggtcatatccttgacgttgcaaccaagtaacaacaaccctgacataac

SEQ ID NO: 209146 - DNA, 122 bp, Homo sapiens
atgttccagatccagatctgagatgggagagggctttccacggggcctgccgggctgttccgtgagcaccagggctgctccagcgccagctgctgctttgttctgcctgggagcagctttgt

SEQ ID NO: 209147 - DNA, 122 bp, Homo sapiens
gcgagtggaggggcaaaaccatcaggtaaaaggaccaatagaggttcaggagcgagtgggcggggcacgctgtggggcgggatcggcgggggatagaccaatggtgggtaagaggcgggaca

SEQ ID NO: 209148 - DNA, 122 bp, Homo sapiens
gcctggggccacactgcgctagccctggagctggggttccgaccctcactgacggaaaggcgcggagcgaccctgcaaccacggaccggtacggcggcgttaggagcgtcccgtcccggcgc

SEQ ID NO: 209149 - DNA, 122 bp, Homo sapiens
gccctactctgggcaggaagtcaacaggggagtggagagtaatgctaagaaaacatcccccgtctttcaggagggtgaactgctttcccctgaaatcgccacatcctcagtttctcaaaata

SEQ ID NO: 209150 - DNA, 122 bp, Homo sapiens
ctttgtcgcccctgtgacgtttcctaccttgatctgtgcacagagtttacctggtcaccgcggtattgcaagcctctcctcctcgcgttgctgagagtccgagtttattcatcacaatgggt

SEQ ID NO: 209151 - DNA, 122 bp, Homo sapiens
gtccgcctcccggggaccgctcgaactgggcccagataagtggtgccccaggtgggggagcgggagccgggtcaaaagtgggctgcagctcggggcagccgtcgggggatggcactgaggct

SEQ ID NO: 209152 - DNA, 122 bp, Homo sapiens
ggggagtgccactgccacgagggcttccatggaacggcctgtgaggtgtgtgagctgggccgctacgggcccaactgcaccggaggtgaggactggggaggggcgggggtgggcctcctggc

SEQ ID NO: 209153 - DNA, 122 bp, Homo sapiens
gtgctggaacttgagccctatctggccttttgtaagtgatagagaattgagaattgaaggcgtgcttcccactgtggtgtgaccttgtgagctggagtcatctaagaaatcccagtcggtgg

SEQ ID NO: 209154 - DNA, 122 bp, Homo sapiens
cagagacagcgccaagctgaacccaactgggatttcatgaatgaggcggcttcctcttctcgcctgctgtggctcgcagctggcagagttcctgggctctgggtaaacaggactgtcttgaa

SEQ ID NO: 209155 - DNA, 122 bp, Homo sapiens
tcaacagtttcccagcagcagcagcgaggatccgcacatcattgccagtgctctaaggagcgggcgagccccagtaagcggccgctctgaccgcgctttgtcagccctgagctccgctcggg

SEQ ID NO: 209156 - DNA, 122 bp, Homo sapiens
cttccatctcccagtcgttctcggccaggaagcactgagccactgcggcatcgcagcttgcgaccgaggcaaactccacacacagaagtcgccgctttttcacctcaggctcgccctcttcc

SEQ ID NO: 209157 - DNA, 122 bp, Homo sapiens
ttttgtagctctccctgaccacctgcccagcacaacattcttttccaatgggctcagtggcgagaggaagatggaaagcatttggccagaacgcagacctcattaactcccgtgtctctcca

SEQ ID NO: 209158 - DNA, 122 bp, Homo sapiens
gtgcaagcccctcttcccgccctcaggtgcttcccacagccccctcgccgcctctgcctccgtgcgggtcaacctgtcctgccagcccgggctgttcactcactgcctccacgcagcctcag

SEQ ID NO: 209159 - DNA, 122 bp, Homo sapiens
ctaacgtctgtgtaaagagaaatctaaccaaattaggccatgtgtcaaagaccatgaaatcgatgattttcaacttggagggagctaggaaatcatgcgggtctctggttccaaatgagaat

SEQ ID NO: 209160 - DNA, 122 bp, Homo sapiens
cgaaggcccccgttcccggctggctagcccggcagatgctggaggtctgggagggtcggccggggtgggcccagatccgaactttttgtctccagcctggaccacctgggagacgcgggcag

SEQ ID NO: 209161 - DNA, 122 bp, Homo sapiens
ttaaaaaaaagttttcttccaaatcacaaagatgagacactcaactttaaaaatgggcaacggatacgacaggcaatttgcagaatggaaaactccaaaactatcacatgtatgaagaggta

SEQ ID NO: 209162 - DNA, 122 bp, Homo sapiens
gatgtgggtggtgcctccggggtccggtttgggatggagtgagcttaaaggtgcagatcacgtagaagggtacgagagctgttctcgagcgcgagttgcttttcgtggattctgggtgtcca

SEQ ID NO: 209163 - DNA, 122 bp, Homo sapiens
cccatttctacctccacccattgcttctctagcaggactggaaatacctgtctgcattggcgagctcccaaatcttgcccaggcgcctcccaccgtgtgcagctgaggaaggctgtgctctg

SEQ ID NO: 209164 - DNA, 122 bp, Homo sapiens
tgtgcacttaaccaggttttttttctaattttatttcaggttataccttattggtgtggacgttgtctaaatttcggtagccatggcacaagaatatagtaagtactatgccatacttccta

SEQ ID NO: 209165 - DNA, 122 bp, Homo sapiens
tgacagtcatccatcacgcctcctgatgagcatcccagccggctgtgaaaggacttgccccgccctcaccatatcccctggtgctcattagtagcccttcctcctcggtgccaggtttccta

SEQ ID NO: 209166 - DNA, 122 bp, Homo sapiens
ggaagtaatgggaagaaaaaggaagtcctgcacaggcccacgtgctcgcgccaacccctacgccccagcgcgccttctccacccacgcacgggcctcggacgcatttccagccccggcgttg

SEQ ID NO: 209167 - DNA, 122 bp, Homo sapiens
tggggaggaatgtgagaagggcctcctgctcctttttcccactgaactcttgctttgacacgttatcgtaacgctggggtcagtcctagagcagctggctctgtgcctccttccctggaagc

SEQ ID NO: 209168 - DNA, 122 bp, Homo sapiens
tggcagggagggaaagaagtccggatgggccctctcagaacacaatgtccaatagctgagcggcccagggaccgccagaaacaccaagcgcgggttggagtctgaacccgaggcgcctgcgt

SEQ ID NO: 209169 - DNA, 122 bp, Homo sapiens
tgcaggtttgtttcgtgcgcacctccgggcggaattaccggccggctgggaccccgctcccggtctgagccacccaggttatagaaggggaatctcgggaagctttccaagtcactgcccac

SEQ ID NO: 209170 - DNA, 122 bp, Homo sapiens
gggagacaacagtgggtccaggggaccggcactcagcacaccaaggacctgcaccggcaccggcctctgagttcccgcagtttttattgattatgatgttcattatttcagcacaaaggaat

SEQ ID NO: 209171 - DNA, 122 bp, Homo sapiens
gcttgaggccccctcaaagggggaagggaggaggccgaggtttgaaccggctccatcaaacggacttactgtcaaggtgagcctcaggccaggcagggccctggagacccccccgggaggca

SEQ ID NO: 209172 - DNA, 122 bp, Homo sapiens
ttcctccaaactttgcccatgcgcaactttcagctttgcttattttgctttgtgttttttcgctgcaataaattttagttatgaagcagactgcatgctgagtcccatgagtcctcctagca

SEQ ID NO: 209173 - DNA, 122 bp, Homo sapiens
cactctggggagcttttaccatttaaggtcaatgttacatctggctccggagctcagagccgagaagcctctggctgcagaacctcggccgcacgcctcctctgagaggggctgggacttag

SEQ ID NO: 209174 - DNA, 122 bp, Homo sapiens
ttaggcccttcaaattatgtagctggtcatggagagggctttgcaaaccaaacagcattgcgagactgcacagtgggttgctgttataaatcgtaacgacacacacattcacattctgtaaa

SEQ ID NO: 209175 - DNA, 122 bp, Homo sapiens
tgggctacagcatgtaccacctgacatagagggtcccaggtcgcccacctgtgggccagccgattcctccagccctggtgctgtacccccgacgtgctcccctgctcggcaccgccagccgc

SEQ ID NO: 209176 - DNA, 122 bp, Homo sapiens
cagagagaacgtaacaggattactgctgtggctggaagaggccaattctgcagcacccaccggtttgcatgaagtttcaaaacagctgcagacatccaaagcactgggtaaggaggccatcc

SEQ ID NO: 209177 - DNA, 122 bp, Homo sapiens
catggcaggctccctgcctccctgcgtggtggactgtggcaccgggtaagagcagctcggcgcccacccccgctcctccgcggccccgctcccggcccctggcgtccacctcgcctggaggt

SEQ ID NO: 209178 - DNA, 122 bp, Homo sapiens
cagagactggcgagggctcggagctgacgcttggcagagctggggcttcccagatgctgtcgccgcaccccctcgcaggagggcccaggtccgaagtcctgagacttggagcgcgcgcgaga

SEQ ID NO: 209179 - DNA, 122 bp, Homo sapiens
ccttcttaaactctggaaatccagatctttaccgccccctcttttttcagtacgaaggaacgaggggaaagtgcgcgcgcgcgcgcgcgtgtgtgtgagtgtgtgtgcgtgtgtgtgtgtgt

SEQ ID NO: 209180 - DNA, 122 bp, Homo sapiens
caggcccagaggctggtgaagcgaaggatgtccagctgcctccgtgcctgcaaagggcaccggggactccaggccagacttgggccagagcagcagagctgagccccacaggctccggacgc

SEQ ID NO: 209181 - DNA, 122 bp, Homo sapiens
ccccctcccctcgccggctagggtggtgcgtgccggcaggccggtcaaggaggcgggacacgtcggcgctaccaccgccaccgccgccgccgcccctcctcccgttccagctgccgctgccg

SEQ ID NO: 209182 - DNA, 122 bp, Homo sapiens
cggcctctgccctgcagccggggagggctcagatcctggggcagtggctggacagggacacgtgaccccgctgcgctgtccagcagcggcggcctctgcggcgtgggcagaggtaacttggc

SEQ ID NO: 209183 - DNA, 122 bp, Homo sapiens
tgaggtaatgtatgtaaagcaccgagtcaggtgcctgatacgcagtaggtgcttagcaaacggtagctaatactatcatcattgtcattgttattgtgacacccatgagcccacagacagag

SEQ ID NO: 209184 - DNA, 122 bp, Homo sapiens
tgctgttgtctggggaagccggtgccaacccgaagcctggacaggggaggactggaatcccggcacacgctgcccatgcactgcacgcccatctactgcagcctcttcgtggcgtcccggca

SEQ ID NO: 209185 - DNA, 122 bp, Homo sapiens
aaagaagcggaggacaggattgggatccttgaaacccgaaacccagaaacagcatcggagcggaaaccagaggggaaaccttgaactcctccagacaattgcttccggggagttgcgaggga

SEQ ID NO: 209186 - DNA, 122 bp, Homo sapiens
ccagattctccagctccttccacaggtgctcagcctctgcttgtagcttctgctccacttcggagggccctgctggaggctccgggggcaggggttcagctgagaaaggaagccgacaataa

SEQ ID NO: 209187 - DNA, 122 bp, Homo sapiens
ggaagttggggttgctaggaagccgcggcgcgtctgctaagctgcaaatggctgaagtcccggaggattatgattccggcccagatgaagatggagagctggagcctgagaggcctgaactg

SEQ ID NO: 209188 - DNA, 122 bp, Homo sapiens
tctcttcccacctgccacctccggctccgcggcagggagttctggtaacagctagacacacgggcagaaacccacaaaaagactcacacacgtgtgtgtgtattccaaggaagaagtgaaag

SEQ ID NO: 209189 - DNA, 122 bp, Homo sapiens
gtgggcaaccgggctaccaagcactgttttaccctaagggtaagaggaacatcgcctcctcgagggctctccaggtgtgcctttcacagcgtaatcccgttcacgaaaccaaaaatcaaaac

SEQ ID NO: 209190 - DNA, 122 bp, Homo sapiens
ctatctcaataatcaaacaaacaaacaaactgtccaggtgtggtggcacagccctgtagtcggagctaataaagaagctgaggtgggaggatcgcttgagcccaggatatggaggctgcagt

SEQ ID NO: 209191 - DNA, 122 bp, Homo sapiens
ggcggggacggagccatggggcctcgttggagccgaggcctacacgttgcaggggcggggcgctgggcggggaggggcggggcctaggccagataccctgcaggggcggggcggggcggggc

SEQ ID NO: 209192 - DNA, 122 bp, Homo sapiens
gctgcccacaggggcgggcccagggtggtacattttgcaccttgaagaggagacaaggatcgaatcaggccgcccagctacttaaatgaccatgccgtgagtgaaggagggccctggctagc

SEQ ID NO: 209193 - DNA, 122 bp, Homo sapiens
ttcctgtccgggcctggccttcccccacagcgcagccggccaccacatctttgctgcaagcgggactgtgtgctgcttaccggctgggactcaacatccagggagcatttggtcctcccacg

SEQ ID NO: 209194 - DNA, 122 bp, Homo sapiens
acaagatttagcaattataaaatttgagcatcaacctagattgattttattgaaaacaaccgtgcctttgtaataagaattatttaattactagtattatatatttgcctcttggaactgaa

SEQ ID NO: 209195 - DNA, 122 bp, Homo sapiens
gcgtgtatacccgctcaacgctgggacgttacagccagggccaatgggcagagcgggactcgaggccccgcccccgccttgtggcgtcacggggacgccgggggcgcgcgggctgcagggcc

SEQ ID NO: 209196 - DNA, 122 bp, Homo sapiens
ccaccgacgtccaagtccctgtttcaggattcctcaccccccagtagcttctaaaatcctcgtgtttgaccacctctcccaacacatgggacagagagaatttggctaacttcaaatcctgt

SEQ ID NO: 209197 - DNA, 122 bp, Homo sapiens
caaaggctaacgtgagagtcacttttcaaagcaccttttcagcaaacaagaatcagctgtcgagttaccagctcctgtggctccttccccgcagtctccaccaggcggcgcgccccaggaag

SEQ ID NO: 209198 - DNA, 122 bp, Homo sapiens
cctcgcttcttcgagctgtcccccggtgagctgggcttgtcatccactctgctggtaccccgctctcgttccctctcacgttcccgctccctctctcgctccctctccctttctcgatcccg

SEQ ID NO: 209199 - DNA, 122 bp, Homo sapiens
acagattggagctagagtaagatgcagcgggctacccaacgcgtgtgtcaattcccaggccgcgcggaccggagctgggctgtcggcgtccgcacccccagcctccccacctcagccccctt

SEQ ID NO: 209200 - DNA, 122 bp, Homo sapiens
gaggggctccactgcaggccgcccgggcctctcaaacaccagggctcttcccttcgaaaacgatggggtgtcactccaaccactcttaaactcgtatctgactgagagactcttgtttagga

SEQ ID NO: 209201 - DNA, 122 bp, Homo sapiens
tgagatcgaattgtcctgggtctaggcctgggacgcctgggccaggcccagttaccctcccgggctgctgtcgccgggacttggagacgaacaaagaaccagttttaaatcgtcttctctga

SEQ ID NO: 209202 - DNA, 122 bp, Homo sapiens
ttccgagcgtctgcactggggctgtcagcaccccagactctgaaggagcagccccctcggcgtgcaccgaggcccacatctccctttttcctgctcccttctgcttgcaggaggccccatat

SEQ ID NO: 209203 - DNA, 122 bp, Homo sapiens
aagagctcagaagtaagagttaaaaagcattacctttctggtccccactcttccaccagccggctcttgtatcatgtggtaagagctgtctgagctcctcttcatggtattggcactgtgaa

SEQ ID NO: 209204 - DNA, 122 bp, Homo sapiens
acagattcaaaggttccaggggagtgtgttggccactctcaggacagtacacagtagcttcgggtgtgtcccagtcagtcctaggagctgtggaaagagtagaagtgcctgaatgtggtgct

SEQ ID NO: 209205 - DNA, 122 bp, Homo sapiens
aacatttttaaatgttaattatttaaattattataataaagtggacatgtcagacagggtcgggtctctatcacctataatgatacaaattgattggttaactaattatgggtttagttttg

SEQ ID NO: 209206 - DNA, 122 bp, Homo sapiens
ccagccccgccgccgtccccctcccccgccctggctctctttccgcgctgcggtcagcctcggcgtcccacagagagggccagaggtggaaacgcagaaaaccaaaccaggactatcagaga

SEQ ID NO: 209207 - DNA, 122 bp, Homo sapiens
caaacatttgctgaacccagggtctcgtgtcttgactgtccagcagaggccgctctgggccggggctctcgggacctgagggctgagagaaggaaggccagggggtggcccagtcatcgccg

SEQ ID NO: 209208 - DNA, 122 bp, Homo sapiens
agtagctgcagagcactgaagcccccgctacagaacccggctggtactccagttctctggcgctgagacccaccttgagcccgatgagcgctcgctcagccttgagatccagacgcggacgc

SEQ ID NO: 209209 - DNA, 122 bp, Homo sapiens
ccgtaggaccgtctaactctgagccagactaacagaaagaaagtgagaaggaaggagggacgagccagataccacagggtcaagataaatactgttgttggctattaattaacaatgttcat

SEQ ID NO: 209210 - DNA, 122 bp, Homo sapiens
gttcatagagtcgcccaagatcctcacagagggacgtcttcccaaaacaatgaggccatgcggccgcagccgcacacgggctgactggggagatctcgtggtgccgcggggcggtcccgggg

SEQ ID NO: 209211 - DNA, 122 bp, Homo sapiens
aaaagtagactgtacgctaagggtcatatctttttttgttttggtttgtgtcttggttggcgtcttaaatgttaatcctacagtggagggctggcgaataggaagtaacatgtcgcctgcac

SEQ ID NO: 209212 - DNA, 122 bp, Homo sapiens
caccaacgacaggaaggatgagtgccgcacgcctagggggacggtggtcgcttcctgctccgagatgtccggctctggaacgtgagcataccctgaccagccagcctgccaccggcctcacc

SEQ ID NO: 209213 - DNA, 122 bp, Homo sapiens
caggaggccgaggatctcgtgtccaccttctttcctcagaaggtcttggagctgaatagccgagttcaggagctccggctgcaagacctgtccagaatccattcggtgccaacctcggagcc

SEQ ID NO: 209214 - DNA, 122 bp, Homo sapiens
ccggcggagaagggggtgaggtgggcggggggctggccacgtcagaagtttgccctggcccggcagggccgaatggggggaccctggccccggacagcgccagcagcggcgactcccggaaa

SEQ ID NO: 209215 - DNA, 122 bp, Homo sapiens
tttcgcgctccttatacacctatcactgggagcggtggcagcaacattccctggaccaaccgccgcctcttcaggcggccgctttgccggtcattcccgaagcccggcaactgagggcggcc

SEQ ID NO: 209216 - DNA, 122 bp, Homo sapiens
cccccaggcggctcgggccggggtctcaaccggggcgtttccgggggtttctgaagcaggcgaggggcagggcgggccaaggccattcggctatccttctggctccagaatctcccaacgcg

SEQ ID NO: 209217 - DNA, 122 bp, Homo sapiens
atcaaggctatgataaatatgatgtctctgaattctgctcttatataaaaagttcctcatcgcttggcaatgctacttctgatgaagatccaaatacaaatataatgaacattaatgaaaat

SEQ ID NO: 209218 - DNA, 122 bp, Homo sapiens
ccgacacgttcttcacattgaagccgacgttgtcgccgggcagagcttcgctcagagcctcgtggtgcatctccactgacttcacctcagtggtgatgttcactggcgcaaaggtcaccacc

SEQ ID NO: 209219 - DNA, 122 bp, Homo sapiens
tctcatggagtttatcactcagagtgcctacttaggagactgcttgcatactgaatgaaacgaaggaagaatgaatgaataatttgggaccccacctcccaacacacttccacatatcgaaa

SEQ ID NO: 209220 - DNA, 122 bp, Homo sapiens
agacctgtcctcatggtgcatggcaacaggggctcattcagatgatgagggccactggcccgtgccccctggtgacaatggccaggcaggagagctggcaagtgccagggcagccaagagtc

SEQ ID NO: 209221 - DNA, 122 bp, Homo sapiens
cccggaccagagaaggggggctcccgagccccgcccccggccgccccgaaccgccccgcccgtctcgaatcgcccagcccacaaagtgagccccgcccccgccacccaatttgggagcttcg

SEQ ID NO: 209222 - DNA, 122 bp, Homo sapiens
atttgcttatttgctttaggatgtcaggaaccccagttcaccacgccctgaatgtttgtccgattacagcactcatgcaagtgacaaaaggttaaaggaaaactccaccctcgcagcatttc

SEQ ID NO: 209223 - DNA, 122 bp, Homo sapiens
caagtgggagtgagcagccgatatctgggggctgggatggcccccgggggaggaggcacccgactgggcctcagcttcaaggttagttgtccagcggctgaaagcctgcagagaaaaccatt

SEQ ID NO: 209224 - DNA, 122 bp, Homo sapiens
aagacccagaatcactacatacaaagtctgcctgcctgctctgtgacacctgctctgtgacgaccgctctgtggtgcccgctctgtgccgtgtgaggagcgaattcacacttctctctgcat

SEQ ID NO: 209225 - DNA, 122 bp, Homo sapiens
tggcgtggaagcgagagggggcccagtttttccttgccaggttgcgggtacagccagctccgcgccggggttgggcggcgcggccgggatgctgagagccctgcgtgctcagccaggggcgc

SEQ ID NO: 209226 - DNA, 122 bp, Homo sapiens
ttcagctgtcacaggacagaatctgttagggagagctattcaaaagtaacttgagtaaggcgggacttggtaagtgcaaaaatgaagggtcacgaaagttaagcaaagtagtggcttggtcc

SEQ ID NO: 209227 - DNA, 122 bp, Homo sapiens
gcttcaacaagaggagtgaggcaaatgcacacccccttcagagcaggggctgtgtgcgcacgtgtgtatgttgcgtgtgtgcagttagagtgggggtgattcttaggtgggtctaggcaagc

SEQ ID NO: 209228 - DNA, 122 bp, Homo sapiens
ccttggctccctcaaaaatcaggtcctcaggagagctgaggttgaggacaggatgagacacgggaactgagagagagaaaaaattagtcaagatttgtttctgcctcctgctgtagttttca

SEQ ID NO: 209229 - DNA, 122 bp, Homo sapiens
cctcagtgccggatctgcttccagggcccggagcaggtcaggcctgggcacctggccgggcgcggagggtggaggcgcgcacctggggtgtcagcggagaccgcgagcaggcgcggcgccta

SEQ ID NO: 209230 - DNA, 122 bp, Homo sapiens
aatcttgctactgctcgccctttgggtccacgctgcttttatgagctgtaacactcaccgcgaagatctgcaacttcactcctgagtccagcgagaccacaagccaaccgggagaaatgaac

SEQ ID NO: 209231 - DNA, 122 bp, Homo sapiens
aacttctttaggaatcctccattcaccaagtcttcattaggcatccctctgtgtgttacccgtggtactgtgatgatctctatcaagtctttaacattctgcatttcaattttctactcgct

SEQ ID NO: 209232 - DNA, 122 bp, Homo sapiens
aacataagctccacaaaggcagggacctgggaatcccgttcgcctgcattccccagcaaacgcctaacgaacccaatggcccaggactgaaaattcctttccacttcggctttcccctctac

SEQ ID NO: 209233 - DNA, 122 bp, Homo sapiens
cattcccgacctccgcaccctacccggtccgcagggcaccttcctcctctctctcaggcacgtcctcgacctcagttgccacgtgcacatgctggtgccttccaggtcggtctttctccacc

SEQ ID NO: 209234 - DNA, 122 bp, Homo sapiens
gctgctccgctgtgcccagtgccatgaatcgcccaagggctgaggagtgcagccgcgcagcgcggggggactggtgggcagctccgcccgcggctctggcacgcgatccaccaggcgaagcc

SEQ ID NO: 209235 - DNA, 122 bp, Homo sapiens
ctttatgtaagtgaagctttttcaaagagcaggatatgaaaaattagtggctatgggaggcgtgaatacagagggccttggtagtaagtgtgtccatgaagtgctgttcagtctgactttgt

SEQ ID NO: 209236 - DNA, 122 bp, Homo sapiens
agcaggccagtaataggcatgggatacaggacccccctagaggaggtcttgtcccagcagcgtcctctgcagccctcatgattctgccccagctggactggggaagcatgaaaagagggagc

SEQ ID NO: 209237 - DNA, 122 bp, Homo sapiens
tttggaaaagcgaatcccctaccacgtacttagctcttctagataccctgggagttttagcggtcagtcccctggatctaacatttcactgactttcttcaatatccagtgtgctgctggat

SEQ ID NO: 209238 - DNA, 122 bp, Homo sapiens
caggcttcccagcgccctgggctgcggcttccacgctggaccggcactggcctaacgacacgagagtggtgcccccacaattacaggatctgaagctggccgactgctctgtagaatggaga

SEQ ID NO: 209239 - DNA, 122 bp, Homo sapiens
gctgttttcatcttgagagtagcgggttagtcagtagggccccaggggtgtgggggctcccggggaggtggatttaggggatagtaaaggggctggtcaccgtgtttctttggcctccagtt

SEQ ID NO: 209240 - DNA, 122 bp, Homo sapiens
accaattgtaatgtatggacttcattataattctgatttcaagtagtaaactgtgtgggccggaattaggaagcaatgagaaatatttgaatgctaactggatatttaatgtaaggaattat

SEQ ID NO: 209241 - DNA, 122 bp, Homo sapiens
ccgggcagaggctgcactctcggcattttgggaggccaaggcaggcagctgggaggtggacgttgtagcgagccgagatcacgccactgcactccagcctgggcaccattgagcactgagtg

SEQ ID NO: 209242 - DNA, 122 bp, Homo sapiens
cctgggcacacggactcgcgccgctcccggggaggggagagagccaggaacctcccgctgcggtccagggttgccacgcggaccccagaggttcctgaatcgcactgagctccccggaaagg

SEQ ID NO: 209243 - DNA, 122 bp, Homo sapiens
gctcccagcctggagagccagcttcatcaccctgggcccttctccggagcaaatggccctcgagaccaccacagctcacccctcatgggcacgagagggcagcactgggctcaagggcagag

SEQ ID NO: 209244 - DNA, 122 bp, Homo sapiens
atttataaagtgtttacttagctcggtgcagatgtaacatctcatttacagcgtggcctccgggcatagaaacaattggcaacaaaagagtaactccggagaattagagaaaaaacccacgc

SEQ ID NO: 209245 - DNA, 122 bp, Homo sapiens
tgaggctggtcttccgggtaggatgtgctgtgggagggttctgtttccgaggaggagaggcgcgacacagcgtgcaaggacctgcagcaccttccacgcagcaccccctgctcctcctcctc

SEQ ID NO: 209246 - DNA, 122 bp, Homo sapiens
ccttttaagaggccagagagttagctcgctcttttcctaccatgtgaggatacaggaggacggtatctgcaagccaggaaggaggccctcgccaaataccggatctgcctgcactgtgatct

SEQ ID NO: 209247 - DNA, 122 bp, Homo sapiens
ccgccgcgacgagggctgcgggcggttcaatggcaagtcgccgggggcggggccagaggccggcggagaaggaggacccgggagccggcggcccggagctgggagcgcggggaaggcggttg

SEQ ID NO: 209248 - DNA, 122 bp, Homo sapiens
gaactaggccgagggacaaaggctaaggtcagccgcggttcaagccctttcgtctgccgacgaccagcggccagacgctgcgggagcactgctgggctggaggagggctcgagctgcgagga

SEQ ID NO: 209249 - DNA, 122 bp, Homo sapiens
cggggtctgcgcttccctcagcctgcctagcccgcagtctcatttttcccggtttagaaacgctggagtgttcactatgtccccgggagcaccgttccaatttgaagcagttttaaggtgaa

SEQ ID NO: 209250 - DNA, 122 bp, Homo sapiens
cattgctttttattatcttttttgttgttgtttttcaccttagaaacctctttctttactcgtttctattactacttactccctatgaggggtatttaagactttgctttatctattcaaac

SEQ ID NO: 209251 - DNA, 122 bp, Homo sapiens
gagaaacatattaaagtaatatctttccagttagttatcagccactttcaagtttgtttgcggttagtgagtccctgatttgaggctgatcatcttgaagattttggacttcttgcaaagct

SEQ ID NO: 209252 - DNA, 122 bp, Homo sapiens
ctaggctgcaggggacagcgctggaccgtacagacctgcctaacatgccagcgcagccaacgcttcctcaatgatcccgggcatttactctggggagacaggcctgaggcccagctcgggag

SEQ ID NO: 209253 - DNA, 122 bp, Homo sapiens
aggcagcagggggctagtgtcctcaccgtcatggtgacagctcctggcggcagctcccagcggctcctggaggcctgtgctcagggtctcaactcgtggtcaagcttatatcctagaatatt

SEQ ID NO: 209254 - DNA, 122 bp, Homo sapiens
tcttcacctctgagcccattggtgcttgtagaaaagccatgaacagtagctagttctgtccgtatggtcattggtggtgggattgctaatgttattgttgtcagctgtattatttctattgt

SEQ ID NO: 209255 - DNA, 122 bp, Homo sapiens
gggtggtccaccgggactggtgtggtagagcgtctgcggggccgaggggcgggagcggcgcggggactggaacagctcgtcccctagttttgctcttcctcagctccggccggttcgcactt

SEQ ID NO: 209256 - DNA, 122 bp, Homo sapiens
gccgaagggcgggggcggtcaaggcagggtcccacggtgctgccattcgcccgggtctggcgcgggggggcgagagaagctgcgcgcagagggacgcccggtgcgagagggtgagcccctgg

SEQ ID NO: 209257 - DNA, 122 bp, Homo sapiens
ctcccagagcatgcccgaatccccaagccgggcgtcctcgaagcggaaagcagccactgtcgcccagagccactccagggtggcagccgagtgctgataaggtccagagcaccacttcttaa

SEQ ID NO: 209258 - DNA, 122 bp, Homo sapiens
cagctcataaaagcagcgcggacccaaagagtcagcagtagcaagacttattgcaaagagcgaaagaacaaagcttccacagggtggaaggggacccgagcgggttgccaacgctggctcgg

SEQ ID NO: 209259 - DNA, 122 bp, Homo sapiens
cttcgcccgggaggctgcagggggaggcggacccagccggccacaggggcaggttcgcggcgctgtgaggcggggctgggcgtgcgccgccgccgccgccagattcgtctactccagtgaat

SEQ ID NO: 209260 - DNA, 122 bp, Homo sapiens
gggcggagccgttggcgatgacaacagccccacgtgaccggccaacactgagtgttgtctcgctctggcgtcagagccgtcgtggctcgttccattctcggcggtggtacctgctcccggtg

SEQ ID NO: 209261 - DNA, 122 bp, Homo sapiens
ggagggtaacccagaggaaaccgtcttcagggcctggtaagaaagactggagcttgtgttcgcccactgcctccagccctcagcaaagaaggccacctgtgtggggcagtatacttgcttct

SEQ ID NO: 209262 - DNA, 122 bp, Homo sapiens
cgcctgcccgcgccacgccccttcccccgccctgccacgccccctccgcggcccgcgccacgccccttcggctgccctcgccacgcccctccgcccgccctcgccacgccccctccgccctc

SEQ ID NO: 209263 - DNA, 122 bp, Homo sapiens
tccctcctcctcaactgccttgtctagaaagatagtctcctgcagttctgcagttgctaccgctggccgggaaggtgtagattccgctttccctctgcgcacgcgcggctcccggcacaaaa

SEQ ID NO: 209264 - DNA, 122 bp, Homo sapiens
aagtggaaaaacaacagctgggcggggtcgcagggtggcaaacgtacgcgggcacgtgcacgtgcttttggggccgacagacgcgccagttgcctaggcgcatgcgtctggctatcccagaa

SEQ ID NO: 209265 - DNA, 122 bp, Homo sapiens
atagcagtgcttggcacgtactgagtatgaagtatttactctcgtcatcctcgtaactctcgtcaccatattctatctaacgcctgcagctcctggtctcaggaacttcagttctcgggcag

SEQ ID NO: 209266 - DNA, 122 bp, Homo sapiens
ttcgcccagccccagcccatcctcctcactcgtattaatgccaacagtgtgcttgtaacacgatcgcctcgcagcagtaaatcaggaaactagtttttgcatgaaccacttgaaacaggctt

SEQ ID NO: 209267 - DNA, 122 bp, Homo sapiens
taatcagggaggatggcatttggtgtgactactccagctggtggtgggtgggcggcaaaccgaggattacatacctccgtggctaaccagagaaccgagagctcagggttggggctgctgct

SEQ ID NO: 209268 - DNA, 122 bp, Homo sapiens
ccaccagatgcagaaagcagttctcaccattgcttcctcagttccttagcatccaccacgcgcagaactttacactttacactcaaggggtgtatgaataaagggaatgcaaccaaagttta

SEQ ID NO: 209269 - DNA, 122 bp, Homo sapiens
ctgcctggtgacagacctgatcatctggacacagtatgagatacaggtggcggcgtacaacggggccggtctgggcgtcttcagcagggcagtgaccgagtacaccttgcagggaggtaagc

SEQ ID NO: 209270 - DNA, 122 bp, Homo sapiens
gtgcaggtgccggcggccgcctttttgggctccgggacccccgggagtgggagcggcagtcggggacgcctcaactcgttcactcagggaatcctgcccatcgccttctccaggccgacttc

SEQ ID NO: 209271 - DNA, 122 bp, Homo sapiens
ctcagcccaaggagctgtcagggattggaggcggctgggtcctccggcagaacactaagacgggcccccggggcggcccggctctgcccggggccgaggcagcgacagcagatgcccgaccc

SEQ ID NO: 209272 - DNA, 122 bp, Homo sapiens
cgctttctgtaatgctgggaatgttgtatatgtgcttttcagtgtgctagtcactaagtacgtgtaaatattagtccttgaaatacaggcatgtgaattgacttttaaattttccctattta

SEQ ID NO: 209273 - DNA, 122 bp, Homo sapiens
acggggtgcgggcccgggccgcttgacaggcgccgcgtgcagctcgcgcccctcggccgccgtgcatccgtgatgggttataaaagaggaggaaagtatttctccttgctcagcagatttgc

SEQ ID NO: 209274 - DNA, 122 bp, Homo sapiens
ataaattttggatctccatcgtcaataccaggaaaacaggaaaagtccctcttaaacattcgagtccaggctttcaccacctggcatgacctgatctttctgcttgggtttctttgctgttc

SEQ ID NO: 209275 - DNA, 122 bp, Homo sapiens
cgcagcagctgcggcgcgcggggtgaagttgcggggctggcgggcgcgagggtggcggagcgcggagctagagcggcggagcgggcggaggggcgggagccgtgaggagggggaggcgcggc

SEQ ID NO: 209276 - DNA, 122 bp, Homo sapiens
cgccgtcctggcaccaacttgaggggctgtgcggcggagggcggctgcggagcgcccgcgcgggctgcacctgctcagggagctgcccctctgttgttgttgttattttccttcttggcgtg

SEQ ID NO: 209277 - DNA, 122 bp, Homo sapiens
ccactgccacctgcctgggaccctccccctgcggagcgggatgtttggcggggagaaatgcggaggggaaccctaggctggcggctttcctccttccgcagaacccacggtcctgatctccg

SEQ ID NO: 209278 - DNA, 122 bp, Homo sapiens
ctcccagcctccatgccgcctttcctgatcaccctcttcctctttcactcttgctgcctccgagcaaatggccacctccgtgaaggaatgacattgctgaagactgagtttgcacttcacct

SEQ ID NO: 209279 - DNA, 122 bp, Homo sapiens
acagctcatgagacaagcaggtaagtctgaaggcctttgcagccctctgcagccctttgccgcagccatcgttgagggaggtgtgctcgtggcgtgcagggcggcccattagcccccagggt

SEQ ID NO: 209280 - DNA, 122 bp, Homo sapiens
ttccttctggtgggttcgtggtctcgctggcttcagcagtgaagccgcagaccttcaagccggggcacctggagctggcgcgccttggagctggcgcgcctttggtcgttcctcccagtggg

SEQ ID NO: 209281 - DNA, 122 bp, Homo sapiens
cagagccacctgccccggggcccacaggcgccctccctgctctccgggcacccagcaacccgcgcccctgctttgcagaggaggaagcagcacccggggcctcatccaccagcgaaggcccg

SEQ ID NO: 209282 - DNA, 122 bp, Homo sapiens
tcagcttcataattttacttacctgtaaaataagagttgttgtgggaattaaatgacagacggcatgaaaaagcttggcaccttacctaatacatcggatcggctcgagaaatggtagactt

SEQ ID NO: 209283 - DNA, 122 bp, Homo sapiens
tagcagaagtctgttttctagttccttaattcttcctgtaagtcttgcctgccaggctttcggctgtgtgactgttctctcgcagtctgaatgagatagtgattcgtcccagggcactgttg

SEQ ID NO: 209284 - DNA, 122 bp, Homo sapiens
ggctggatatgtgactgctgctgtggtcgcccctaggcccagccccagctgggttgttaccggaatcaaaaggacacagaagccgtttctatctcagctgtgatggaacgtgattcatctcc

SEQ ID NO: 209285 - DNA, 122 bp, Homo sapiens
aggaaggcaatactgtgaacactcctaaggccgctcccaaagactctctcagtccagtgtcgaaacccattaaaagccccagcacatatcctactggccatagcaaaggcatgatttcggac

SEQ ID NO: 209286 - DNA, 122 bp, Homo sapiens
tgtgtgtttccccctttcgtatgtcaaaataataacataaaatcagaatgtaaatccagacgcattgttttgctgcgattaagttgaacgaaaatagcaaggacgaagtaaggagagagcca

SEQ ID NO: 209287 - DNA, 122 bp, Homo sapiens
ggggatctgggggcgtcccgggcgcgcccccagattccgggctcctcaccgcctcctacgcgccgccactgccgctaccgccgccatcttgtgcagagtttgctccttgaccccaaacctcc

SEQ ID NO: 209288 - DNA, 122 bp, Homo sapiens
ggaggaggaggcgcagccgctgcccgagccgcagccgcagccggagcccgagccgcggggcgggtgcgaagatgcacacgacccagaaggacacgacgtacaccaagatcttcgtcgggggg

SEQ ID NO: 209289 - DNA, 122 bp, Homo sapiens
acaaaacaatttttataaaaaccacatttggttctgctacaaaaatctaaatggctgttgcggtaaattgacatgtaagtaatgcaaggtacttaataatgagaacattcccactctatttt

SEQ ID NO: 209290 - DNA, 122 bp, Homo sapiens
ctacctctgttccatcagattactttccagaaaagctgttcttgtctgccaccttctcaccgtcactgggttttttaccattctaatatttgtcattctgccaggtgtgaaagcggtatctt

SEQ ID NO: 209291 - DNA, 122 bp, Homo sapiens
agtcacaccgagcccagcctggggaaggccccagaagcaggagtgtgcagcctcacagaccgcacccggccctccgctcggggctctctggcctgcgtgctcagagcaggaggaggtggccc

SEQ ID NO: 209292 - DNA, 122 bp, Homo sapiens
ctactccccaccagcacaagcccaccccacctgtgccggtcaggtcctgacctgcccctccgcccctccattcaggggcctctccaggagcctggggtgtggcccagcagtgggatccactc

SEQ ID NO: 209293 - DNA, 122 bp, Homo sapiens
gggtgctcacgctgtcgcccacccagtagggctggatgaagaccaccacgttgatgatggcgaagcagatggtgaagatggcccacagcacgccgatggcccgcgagttccgcatgtagtgc

SEQ ID NO: 209294 - DNA, 122 bp, Homo sapiens
cccaccgcaccgcctgctgtgatcagccggagccttccatcttcccccagaattgcttggcgtctgctcatccagacccttcctttcacaagggagcctggagcccagagagggttgtgact

SEQ ID NO: 209295 - DNA, 122 bp, Homo sapiens
ctctggagattaagagaaatacagcatgagtcccagtgagactggacctaccacgaagcgcggagaagaccttgtgccccaacaagaacacaaaagaacacccactacagaaccgagctaga

SEQ ID NO: 209296 - DNA, 122 bp, Homo sapiens
tgaggtgggctctagagtgcacacctgcgctgcacgttctgtgagtgtgcacccgcctcccggcaggcctgggctcctcccacaggtcagaggctgcaaacgacaggatctgcctgagatgg

SEQ ID NO: 209297 - DNA, 122 bp, Homo sapiens
caattcagccagtcactgggtcctgttcaaatcttcctgccggccacccctcaatgttgccgtcttctcctgttccaactctgcctctgcctaaggtctcttcttgcctgggcagtgcccta

SEQ ID NO: 209298 - DNA, 122 bp, Homo sapiens
gccgggtctggctggtgggaggtttaggattaggggcggggctcgagcctaactgatctgcggcctccaaacagcgtctggaggagatcatgaagaggactcggaagtcagaagtttctgaa

SEQ ID NO: 209299 - DNA, 122 bp, Homo sapiens
ccttccccctcacacagccagcccacaatgacctttccccagactctatcaggacacctgcgtgtgtttaataggcatagctggaaaatcgcaacatcttactaatgggaaacatgcatgcg

SEQ ID NO: 209300 - DNA, 122 bp, Homo sapiens
tccagttgctatccacagagcctttggccttgggcaggtccagctggtacccgaaggagacgctggtgtcctgcatccttgtgctggcctcaaactccacacccacctgcagctggtcactg

SEQ ID NO: 209301 - DNA, 122 bp, Homo sapiens
agaagccactgctgtagacactggggacagtgaagtgaaccaaacagacaaaattaactgcgttcagtgtagcttgtgttctagagaggacacagtcaataaaccaatagagcgaaatttaa

SEQ ID NO: 209302 - DNA, 122 bp, Homo sapiens
actggggcctcaataaacatgacctttggggaccatgtgactgcattataactaaaaccacgttgtacggacctgccaatacatatgacaattaaaactccttggacagaatcctagataaa

SEQ ID NO: 209303 - DNA, 122 bp, Homo sapiens
ggtgggactggggtgcagaacctaagatctggctattgtgttcatggctatgtggtgacccgcttcacctcacagaagaaagagctgactccccaaagaggggctggaggtccccctagtcc

SEQ ID NO: 209304 - DNA, 122 bp, Homo sapiens
ctactcaggaggccgaggtgggaggatggcttgagcccaggaaggaggtcaaggatgcagcgagccaagactgctccacagcgctccatcctgggacacagagcaagtacctatctcaaaaa

SEQ ID NO: 209305 - DNA, 122 bp, Homo sapiens
accgagagcgtttccagctgcaatctgttcccagcaattaataactgtaaataacaagtccgctcctccgcctggctccgcgctactctccgcttccctcccagcccctcagctgctcccct

SEQ ID NO: 209306 - DNA, 122 bp, Homo sapiens
gttgaaatagccctgacattcaccatgtgcccgactggatacttccctgaatgtggctagcgtcatcctcagtaacaacaaagaaggcaaaatgttcacaagggaaaaacacactttttttg

SEQ ID NO: 209307 - DNA, 122 bp, Homo sapiens
gctccaggcagcatctcctcccttctccacgcaagatttagcatgacagccggtcccgggcgggtggccaggccttctgctggagtctggcctcacgcatgtttgaaggggagcaaccgcca

SEQ ID NO: 209308 - DNA, 122 bp, Homo sapiens
tctaaagaggaagagggagatgaaatcgagacccagagattgggagaaagagagagccagcgagagaaaggcggaggactgccgtgaattctatttgtactagttgccttttgaaagcatat

SEQ ID NO: 209309 - DNA, 122 bp, Homo sapiens
tcctgaagcatcatcctggcagggaggcgcctgctccaccagctggtgggtgtttgtaatcgccaagcaccagctataggtcacagccacatcactcacagctgatcactggttggtggaaa

SEQ ID NO: 209310 - DNA, 122 bp, Homo sapiens
tgatcagcgtctcccattccctctgtcccctttctctgcccccgtaaggatggttcagcccggtattgaggctccttgagctggctggatggttgcgcccgccctaccccggaatgtgggcc

SEQ ID NO: 209311 - DNA, 122 bp, Homo sapiens
aggccggcacaggtagcggttaaaatggaactccttctccagctccaccagctgcgcgctcgtgtacgccgtccgcgcccgcttggacgccgccgaccccggggggctcttgtcccctcccc

SEQ ID NO: 209312 - DNA, 122 bp, Homo sapiens
ggaggcctcccagcactatccaaagtgggaagatacccagacccaaagtgtcttctgactcgtcatcacagctatatccctggaagaggagtgtctctccccacagtgccttcgcctctcct

SEQ ID NO: 209313 - DNA, 122 bp, Homo sapiens
tgcccaatcagccactctgtgttttaggcattcatctctggtccgtttgatctcaggcagcgtgctgaaaaggatgaaccgggcagctggagttgtccaggggcacgtagcctgcggggcgc

SEQ ID NO: 209314 - DNA, 122 bp, Homo sapiens
aaggggtctcacctggtctaggttccccgggtaaggagtcccgggcgaggacgggggtcccggccgcgggcggaggcggcagcggcgactgctcccggcaccagggaagcggcaatgcagac

SEQ ID NO: 209315 - DNA, 122 bp, Homo sapiens
gagcacgggtgagtttcctcatccctgagcccgggttttctcaactgtaaaacgtggcagcgctgcctgcctcccagggtgtttgaagactgtgtggtaactgatgtcacctgcacagttcc

SEQ ID NO: 209316 - DNA, 122 bp, Homo sapiens
ggcaggtaccccaagcgtgacctggcaccccaacccagaccccaactataaccctacccccgagccatcctccactgaagttctgatcctgagccctaagccaaccccaccactcccgagac

SEQ ID NO: 209317 - DNA, 122 bp, Homo sapiens
gctgaatcggcttcttgatggagggccagcagaggagtggctggtctgggtggggtcatccgtttgtcagaaatgcaaaagcctgaaaagacgtcttaaaaggccaatcttaggttctacaa

SEQ ID NO: 209318 - DNA, 122 bp, Homo sapiens
attacaggtgtgagccaccgcgcctggccgacctgtctcttaaaggaaaacaaggctgggcgcgctggctcatgcctataatcccaacgctttgggaggccaaggtggtggatcacctgaga

SEQ ID NO: 209319 - DNA, 122 bp, Homo sapiens
ctgggcgctggggcggccgctgtctcccaccctccacgggtgagtgcgacacgcgctgcgcgaaccagggtctagacaagaaagctgccgccactaggacttttgccctaagggacccactg

SEQ ID NO: 209320 - DNA, 122 bp, Homo sapiens
gaaaaggggaacggaacatgtttgggtatagggagccatcagactgcagtgcacacctgacgaagtctctgcccacccagattgcctgatagaggaataccacaagaggtagaaatggctag

SEQ ID NO: 209321 - DNA, 122 bp, Homo sapiens
ccttttcctgcccagatgctgttttcgctccttcgaagcaagatcccatgctcgactagacggccagtgtgcgccaggacccgcgtgtctccttccccacctgcagagctgctgagcccctc

SEQ ID NO: 209322 - DNA, 122 bp, Homo sapiens
gaccctgcctgtgctttgttacttcctgaagccgatactacccttgattcttcctcaagccgccttggtcctgttggggaaccaaaagtcttgatcatggaaatgataacctatatgttttt

SEQ ID NO: 209323 - DNA, 122 bp, Homo sapiens
gcttctttctggagaaacttcatattgaatgacattagtcagaagattagcatttgagaacgggatatcatgagaaggtgttttttgcaaacacaaaaagacaagagaagccaaaataatgt

SEQ ID NO: 209324 - DNA, 122 bp, Homo sapiens
accagaaggaatccccagattctcagaactataaggggagtacatgggactaatattcagcgagcagtaggctttgaggctttccactggcaaaacttgaaaagcaagcaatggactcccgt

SEQ ID NO: 209325 - DNA, 122 bp, Homo sapiens
tcccttgttcacaaattattaagaatttcaaaacagtgacagcagagattaaaccaagcacgaagaggatcctcctatgtgtaaagctttgtgtgactgcacagaacccacatccaatgaag

SEQ ID NO: 209326 - DNA, 122 bp, Homo sapiens
gtagggaacctcgccaaggacctggggtttggcgtgggggatttacctactaggaacctgcgggttattgcagagaagaaattctttaccgtgagccccgaaaatgggaacttacttgtgag

SEQ ID NO: 209327 - DNA, 122 bp, Homo sapiens
aacacaaatctgtgtaaatttcaaacccatttcatatgggcttgttgatacctgttagctcgtgatttcttaattataaaggaaattcccaattctattattaatgaaagttcagctctctg

SEQ ID NO: 209328 - DNA, 122 bp, Homo sapiens
aagttgaaaatgcctggaagatttctggtttctttcactacttatcctgcctttttgcatcgctgccagatttggatgatatgatattcagaggggcaccttaatcaaagccattcttcaac

SEQ ID NO: 209329 - DNA, 122 bp, Homo sapiens
agggaaggcagcgagcgcaataaatcagaacacaggtgcccattaacctgccgtgaggaacggtcagagagccttttccttgtttcattccaaaaaggtggggggagagagcaaggagaaca

SEQ ID NO: 209330 - DNA, 122 bp, Homo sapiens
gcccagccgggtgctggagttggtgttctcttacctggagctgtccgagctgcggagctgcgccctggtgtgcaagcactggtaccgctgcctgcacggcgatgagaacagcgaggtgtggc

SEQ ID NO: 209331 - DNA, 122 bp, Homo sapiens
gcgcctgcgctgcgacggcgaggcagactgtcaggaccgctcagacgaggcggactgtgacggtgaggccctccccgtcaaggctctgccaagaccctggccctgccctccgggatacgagc

SEQ ID NO: 209332 - DNA, 122 bp, Homo sapiens
ttgatggagtcagaagatgaaacgcggaccgcggtgctgcgaatccctgggagatggggccggcatgcaatatttaaagggccgtttcatgaaagggagctacccaggcttttaacataggt

SEQ ID NO: 209333 - DNA, 122 bp, Homo sapiens
cccgaagcccatgggacaaaccactggggactggaacaccagtaattctgtattgggaagcggcaccaagagatgtgcttctcagagcctgaggctgaacgtggatgtttagcagcgtgacc

SEQ ID NO: 209334 - DNA, 122 bp, Homo sapiens
ggctcagcagggcactggactcccgatctggcggctcagaacacctgagacagctctgagcgctcccacgcgcgcctgcagcctggttcaccaggccggcgtccgaggggagggtgggagcc

SEQ ID NO: 209335 - DNA, 122 bp, Homo sapiens
ccatcaccgtgtttttcaggaacgtgatctccctgacctgcaggggtgggatggaatcagcggggtcccaacctctcctcatccctcgggtctcccctctctctaccccggggtccctttct

SEQ ID NO: 209336 - DNA, 122 bp, Homo sapiens
ggctcttaagcgcgcaacagcaagaaccaggacgtcagagtgcttcctgggcctggagcacggtccgagctgcgtcccccgctgcagcctgtcgagggcgccccaggcccaggcagggggcg

SEQ ID NO: 209337 - DNA, 122 bp, Homo sapiens
agacttcagacagggagcctccctcaccacagcctgatggctcatcttccaaagggcttccgtgctttcattctttgctaacaaacacaactgaaatcaggagatctggatgcatcctggac

SEQ ID NO: 209338 - DNA, 122 bp, Homo sapiens
aatgaacgaggtatcccctcatatgctcaagtgcctgacactccagaagcttcacaagaccgaggtggagacactggagtgttttaagtggagaaatgacacactccgactcacaggagcag

SEQ ID NO: 209339 - DNA, 122 bp, Homo sapiens
gggcaggctgcgctccgctgacccggatcccgcactcgtggcggccccgcgctcagcgcacggcacaggcggcttccgcactgggtgctaacgtatagacaaggggaacatggtggcgcccg

SEQ ID NO: 209340 - DNA, 122 bp, Homo sapiens
tgcatttagctaatctcagtgttattttctctcggcagttttctggacagctgacaccttcgacagtgatatgagaagtaggctcccaaacagcgctgtccagagtccactcagagaagtcg

SEQ ID NO: 209341 - DNA, 122 bp, Homo sapiens
tgagtgagaggaagctgaagacggtgttctaccgagtcaaagagatcctgcagtgccactcgctatttcagatcgcgctggccagccgcgtttccgagtgggactccgtggaaatgataggc

SEQ ID NO: 209342 - DNA, 122 bp, Homo sapiens
tcgcagcgagagctggaagcagtgactgttcccatcacctagtgtccttctgtcaggggccgcttcggtagctacagaagcctagccgctggaagcttccttccccgacactccatacctcc

SEQ ID NO: 209343 - DNA, 122 bp, Homo sapiens
aataaaagggaaaatagaaacaagtgacttaatagggtgataggattgtagattaactttcgttttcattgccatcgctgttattggattgtgcaatgaataacaaataaataaaattcaat

SEQ ID NO: 209344 - DNA, 122 bp, Homo sapiens
gtctttcccaggccagcttcctccccttactctgaggggcctgtgccaccaaggtcccagcgtggctcaaggctcaagctcacttaaccaccatagcagctggtatcaccgcttggctccct

SEQ ID NO: 209345 - DNA, 122 bp, Homo sapiens
ctctaggcagcagcatctccaagtcccaccttcatctgaagagatcagatcacttttcttcgattgaaataggcatgcaattctgacaaacataagacttgggagaggggtcagtttctaca

SEQ ID NO: 209346 - DNA, 122 bp, Homo sapiens
gggttcgggtcccgggctaaggcggcggcaaagggagcggcagatgagcaggaagtctcgcgacagcagtagcacagcagaagggtaaagcaaaagtcgcgagaacagccctgctgccacac

SEQ ID NO: 209347 - DNA, 122 bp, Homo sapiens
aggggaacctccagccaggctccaggggatgttcttgtcctacctccccagggcaaaggccgcatggtggggtcaccagatgggagggtgggaggccttcaggtttgggggcctctgcagct

SEQ ID NO: 209348 - DNA, 122 bp, Homo sapiens
gcttttctcctattatagtaagtaaagaacacagtatccttcttaagacattttctatttcgccctcaccctcttaaactgcctgactctcttaacagaggatctggaactaatttactcat

SEQ ID NO: 209349 - DNA, 122 bp, Homo sapiens
tgaaaacaagctaggattgaaagcagaaaatccactaaaacgcctggtgcctcacattggcgccatcaccagacacagctgtgcacctgcccagtcccagctggaggtgggggcaggggacc

SEQ ID NO: 209350 - DNA, 122 bp, Homo sapiens
ccttcttgctcactttgcctatcaggtgataggcattgatcccttgcagtgttctcaagacgaggggcctcagaattattttgttagcacctgtttttaatcttctgtcctaagaatcattt

SEQ ID NO: 209351 - DNA, 122 bp, Homo sapiens
tctaaagtggaacagaaccgagcgctgtgagagggtgggacttggagacctatccttgcccgccgggccaggggagtgggctctagaaggatgacctttcaactgcgacctgctgaggagga

SEQ ID NO: 209352 - DNA, 122 bp, Homo sapiens
ctgggtgtcgctattggtgctgctggcgcagctagggccgcagcctggactgggccggctcggagagcgtctccgcgtgcgcttcaccccggtcgtgtgcggcctgcgctgcgtccatgggc

SEQ ID NO: 209353 - DNA, 122 bp, Homo sapiens
gtccaggtgctggacagatttacaccccctaccatccccccgagcgcatcctgcagaagccgcaacgaccgggaagccagactcctgcaaatggccttgtggatctgggtaaccttgaggag

SEQ ID NO: 209354 - DNA, 122 bp, Homo sapiens
tctgacccctaagtaaatgaacttgttcccatcccagtctccaaacagatcccaacactacgtttgtttttctatatcctgattgtcacacctggaagactctccttagtatacatgaggct

SEQ ID NO: 209355 - DNA, 122 bp, Homo sapiens
ggaaaggtctgcgctggcctccggggcgtggatgaccatgtggcacagccccgtggccgccgctggctctggttctgccatgtggcctccggctccctgagcagagagttctgtgccgcttc

SEQ ID NO: 209356 - DNA, 122 bp, Homo sapiens
gctcctaggagtggcagggctgagggcacccatgggtcagggatgccttgggaggagtcccggttcaggctctgcactcccagcttctcagcagcaccatggggaggggagggcttggggca

SEQ ID NO: 209357 - DNA, 122 bp, Homo sapiens
tcggccaagggcgacagccaactgctgtgagtgcacggggagaggcccaggcagcggcggcggcggcggctctcgggttgcggtgaagaatgtcagccactagcgtggatcaggtgagggag

SEQ ID NO: 209358 - DNA, 122 bp, Homo sapiens
catactctttgggctattaataattatgaactgttcttggtagatgtcagataacttgaacgtgacaaagaagaaagagcacagatcatctgaagcatgattaggtgggtgttgataaatga

SEQ ID NO: 209359 - DNA, 122 bp, Homo sapiens
acgcccctccctgttgagctgaatctaatgaaagcttcctaaatgtattaaccacacacacgcacaatctgctatcagtcactttcagtagttcatcgctgtaacatctcaggagttcaatg

SEQ ID NO: 209360 - DNA, 122 bp, Homo sapiens
agagatcatcccaggcaaaccaggatgtacagtggtccttgtcaaactttatctaccagccggaagggaaccagcatgaatcgataagatatatgaatctctaaagtgtagagagccacctc

SEQ ID NO: 209361 - DNA, 122 bp, Homo sapiens
cacccgaccttcgcttccttaagtagaaaagcccagggttccaggctccgtctcctttcccgcagacgccttgtttcttcgcgcggaggccctggacgccgcaggctcccaacctacttctc

SEQ ID NO: 209362 - DNA, 122 bp, Homo sapiens
cgtaggcgggcggcgtggcggggcggaaaaccgtttccgggagagaccttccgtggtggacgtcgccccaggctcccacacttagaaaactaaagggaacgcctaacggagcgatggatctc

SEQ ID NO: 209363 - DNA, 122 bp, Homo sapiens
cagcaagtggcacaagatggagcagaagttccgcatcgtctacgcgcagaaggtgcgcgacgccggcgggcccggggggcgggcgggccgggcgggggatccgggcatcccggggcggggcg

SEQ ID NO: 209364 - DNA, 122 bp, Homo sapiens
agatgccctgaaaagagctccacaaagggacatgtttcagtccacacttgctggtctgcacgttacggtattatgagttgctataaagcaagaggtaagctgatgtggaacatggattttat

SEQ ID NO: 209365 - DNA, 122 bp, Homo sapiens
atctggccaatctcctatgtctgggactcttgccctccccagaaggacgaaggctcttctcgaggttgtgtttgggactgggccagggatgacatttctggcaaaagcttaaatgacaccat

SEQ ID NO: 209366 - DNA, 122 bp, Homo sapiens
tggttccataaaatactcatcttagcccagtgtttcttatcaatgggacaggtcttctgtcgtcacaggcttcaccacaccagcctgtttttcacatttgtgtaactccctggtccctgcaa

SEQ ID NO: 209367 - DNA, 122 bp, Homo sapiens
cgtgtgctgacgtttgctctctgctagtcactgttctcattgtcaaggaatctcagaccacggggggtcagtgaatcacccaaggtcactcaggcagtaaatggtgaactggatttgaaccc

SEQ ID NO: 209368 - DNA, 122 bp, Homo sapiens
caggcacctgccaccacgcctagctaattttttttgtattagtagagccgggtttcaccacgttggccaggctggtcttgaactcctgacctcaggcgatccgcccacctcggcctcccaaa

SEQ ID NO: 209369 - DNA, 122 bp, Homo sapiens
tctcaaatatgctctaagcatctgttacatgccaagcactaatcaggatgctaaggataccgcagtgaaacagtctccgccccgtggggcttacattcaggcggggaatactgtcaataaac

SEQ ID NO: 209370 - DNA, 122 bp, Homo sapiens
catctggctcggttctatctccccaaggcgctgggttcccagaagtttctagaatgaatacggagggctacatatttcacatgcgcggggcggggaaactgctgggcgattacagattcccg

SEQ ID NO: 209371 - DNA, 122 bp, Homo sapiens
acaaaatcatcaggaagatgactgaaaagattattcacatattcagagctcatgaaagagcgctgttaagtttcactgcgaaagactcataccaggccagccgcagtgggtgatgcctgtaa

SEQ ID NO: 209372 - DNA, 122 bp, Homo sapiens
gcagtaaagatagcaagaggattcgaaatgaaagcagagcctgaaatgggactgaattgccgcaatgttgccatcaatcttgaatgaatgaggagctgctgcttgtggatgagcaaagcaag

SEQ ID NO: 209373 - DNA, 122 bp, Homo sapiens
cccgctcggccgcagaaacagaagatccaggagcgatgctctcccactgtcccttcttcccgcccgcgcgcttcctttctcggttcccactctgactgggaaacagaaaatcaacgcgcggc

SEQ ID NO: 209374 - DNA, 122 bp, Homo sapiens
caggactgaggggaggtgggtgaggctcctggagtgtagatgttagggaggcctggcctccgtctcctggccatgcaagtgagactccatgagtgagtgccccagacacctcttttgtctcc

SEQ ID NO: 209375 - DNA, 122 bp, Homo sapiens
ggccacgcctcggtggcgattttattagcgcttggttggggtggcccggctgcctgcgagcggggtttccccgcccctccccccttcccctccccccaggcggccggaacctccctgcggag

SEQ ID NO: 209376 - DNA, 122 bp, Homo sapiens
cgcagcccagccccagttccccgggggcccctgagtcggcgaaactgcgaggcggggaaacgcttggaggatttaagtttggggttatctaggcggcattactctttgctggagtacccttc

SEQ ID NO: 209377 - DNA, 122 bp, Homo sapiens
cactacggcactcatatctcataagccctctattcataatacacttttacatgaatagctcgtcataaaaaaattaaattagtaaaattcatctggaaccttttctcagtttctgaaaaaag

SEQ ID NO: 209378 - DNA, 122 bp, Homo sapiens
gggtgacggacggcacctggaaaattgggtcactcccacctgaatactgcgcttttccgacgggctttaaaaacggcgcaccacgagagtatatcccgcacctggctcggagggttctacac

SEQ ID NO: 209379 - DNA, 122 bp, Homo sapiens
caatattttgcatggatctcatcacgtgtccatggaggtgggggcaagcgtgagctggcacgcaccccattctccccatggagggtggtcacatgtactccacctgtgtccctagatggtga

SEQ ID NO: 209380 - DNA, 122 bp, Homo sapiens
gagtctcgggcatgtcttggcactcttggaaacaaattgcagccaagagcacggttcttccggtcctctccttgctcctctgtgcgccgctcggccgcgggactcctggaacatgttgtgca

SEQ ID NO: 209381 - DNA, 122 bp, Homo sapiens
gcaattctcctgcctcagcctccggaatagctggcattgcaggcatgtgccactactgcccggttaatttttttattttcagtagaaatggggtttcaccaggtcggctaggctggtatcga

SEQ ID NO: 209382 - DNA, 122 bp, Homo sapiens
ggcagtaatagaagcccaatgcacccagcgattggctgatggcatctttgttcaggcgatcgatgagcgccctaacccacacgctgggtggagaaatccctctgccaccctcaccttcagaa

SEQ ID NO: 209383 - DNA, 122 bp, Homo sapiens
aagtcctggcccatttgagtttgatgcttatcattttgataacatctttaaggagtaaagcgtgcgtttttaatactacggttttaaagcctttgaaaagaaagataaaacaaaagccctaa

SEQ ID NO: 209384 - DNA, 122 bp, Homo sapiens
ccatggatttttgtggagcatttttcttcctggctctcccttgagttattttcctttcttcgctatcttgggactcttctttgtgcttgcggtcatcggttgagagaaggacttcttcttcc

SEQ ID NO: 209385 - DNA, 122 bp, Homo sapiens
gacattttcacatctaacagtaacatctctgatggtcaggcaggtcaaacaatcacttggcgggaaatagataaatacagactaaattcgcacaatctgtttctgtttagtttataaactgc

SEQ ID NO: 209386 - DNA, 122 bp, Homo sapiens
ggccagccccgggcatccccatgaagaacatcaggacatcccggcggcaagaaaacagcacgacaccgacgcggagcgcgacaccgacgcggcccactcaccatgcgcacgcgcttcagccg

SEQ ID NO: 209387 - DNA, 122 bp, Homo sapiens
gccgcgcagagtttcaaatcggctgcggtgggcgaggagcagctgtgctgcggctgtgctcggccttagtggtgtcgggtgagtgcgggctgggcacaagtttcgcccttgttgcccaggct

SEQ ID NO: 209388 - DNA, 122 bp, Homo sapiens
cttgcgcgcgagcagaagcagaaggcctagttcctactctgcagccttggctgccgggcacggagaacgttttagcagaaacacctctgcaaaaccacttcctggcccgggcccagccaaac

SEQ ID NO: 209389 - DNA, 122 bp, Homo sapiens
ggcagaggctgtgctacataagcattgggtgttcatgactccatttaggccttaccacaacgctgtggacttggtactgttagtatccccattttacaaatgaagagactgaggctcagtga

SEQ ID NO: 209390 - DNA, 122 bp, Homo sapiens
tactagtaacaaataaagtatcacggaaatccccacccaagcgatacggtttccttgacgcgcccttaaccaaggcgttaagtttagcctgacagcatccctccctcctttcggttcctggc

SEQ ID NO: 209391 - DNA, 122 bp, Homo sapiens
cacctcggtgtcagctcccgcccccacccaggctagggacccgccaacgaggggtgggggcgggaggcgcccacccgtcgcactagtgggcatttgctaaactacgttttatttttttgtaa

SEQ ID NO: 209392 - DNA, 122 bp, Homo sapiens
ggacaggcaatggctttgatggatggacagtcggaccgagccaggaggtttgccttaacccgaggacctgagcccatcaacccttccaaacacacatctctggactgctttcgtcaggagag

SEQ ID NO: 209393 - DNA, 122 bp, Homo sapiens
ttaaaattaggtgccctgctcatcttctctgtgtcgttccagttttagtctgtgcactgccgaagcgagcactttgtagcattttcaatattgagaggcacagtgtgtacagaaaaaacatt

SEQ ID NO: 209394 - DNA, 122 bp, Homo sapiens
gctgcctctccagccagaggcatggagcctaaccctggctttgggaaggaatccatcctccgtgagttggctgagggcagaatgggaaaaatgtgggccccatgcacagtgtgggacctagg

SEQ ID NO: 209395 - DNA, 122 bp, Homo sapiens
catttttgtccccatgacaaccctatcaggtcaatagatactaataaaagtcctgtctgacgtggaggccttctagctttagtgaagttaaaaaagattggcacagtgttctggagctaatg

SEQ ID NO: 209396 - DNA, 122 bp, Homo sapiens
gtgactgtggtcccagctcctctggaggctgaggtgagatgattgcttgagcccaggtggcggaggttgcagtaagccactgaatcccagcctgggcgaagtagccaaaccccgtctcaaaa

SEQ ID NO: 209397 - DNA, 122 bp, Homo sapiens
ggggggccctgcagtactcgccaagagcgtagaatttgcctagtattagccacgagagggcggggtggggcgaggcggagcagggccgaggtggcggagtgggggggagccggagagcttca

SEQ ID NO: 209398 - DNA, 122 bp, Homo sapiens
gtcgatttcgtgcttacagcagttcttagcgaaggggaagctatggctaccgatagaggtcgatttccccggaaggaatattcaagttttcgtgtgtgtgctttccaggaaaatagttcacg

SEQ ID NO: 209399 - DNA, 122 bp, Homo sapiens
catggcccagactttgctttcctcgcagtggctcaagcggctgccaacccagcggagccgcgaaggcccaccagaaatttcctgtcacctggccccaccccagcgaccgctcacccaatgaa

SEQ ID NO: 209400 - DNA, 122 bp, Homo sapiens
acggtgagccaaaatgaaaagtacaaggcagtagtacaggaacctggcagccgcactggccgcccagaaacgtcagtggtgctgccccattcggcgaaaggttagggagcaggaaaagagga

SEQ ID NO: 209401 - DNA, 122 bp, Homo sapiens
ggggctgccggctgcagactccgctgtgggcagagcagcttgcttggggatcactacggccgggagaagtctggccgggaggagtccagcacgccttggaaattgaagtattctccgattct

SEQ ID NO: 209402 - DNA, 122 bp, Homo sapiens
gcatttctaccctggttggtagtggcttctttcctggcaactatgattatttgaaaacaacgtcaagagaaggctcgaaggcgccgcgggctggggtcggtggcttagggagcccgtccggc

SEQ ID NO: 209403 - DNA, 122 bp, Homo sapiens
gcgcgtctctactgtgaagacagcaactgcaaggctcgcgtaggacagtctgtgtatgagcggagggcctggcgtggcagtgactgctctgcggatgtcaggggacgctctgagtggtgatt

SEQ ID NO: 209404 - DNA, 122 bp, Homo sapiens
cctaacctctggccagccatacctgtgttggccctgacagaagctgggtagctgactgcccggccccgctccgctgtgacagtcaccacatattctacgcctggcatcaggtcagtcagcag

SEQ ID NO: 209405 - DNA, 122 bp, Homo sapiens
aactcctggattccacctgctggttggagcttacaggcaggggcccctgtggggctgtgacgccctgtgtgatgtcatcaggctttgtgagggggactgtactgccctttgagtactactgt

SEQ ID NO: 209406 - DNA, 122 bp, Homo sapiens
gaggaggacgagggagtcataattacaattttcagccaggagaggatgatgctcgggtcccggagcctgtatcccaatggctgcgtgatttcccagacgcaccctcacaaattatttctaaa

SEQ ID NO: 209407 - DNA, 122 bp, Homo sapiens
agcccccgcgcgcgctcactttgggcttgtcgaaggcgggcgtctgggccatggtgccctcgtgcgccccggcgctgctccctccgccgccgctcggtgggtctctgccggctcggtggccg

SEQ ID NO: 209408 - DNA, 122 bp, Homo sapiens
atgtttgtttttctatgctttacacataatggaaagaaaaggaaaagaaatacagaggcccgaaaggactttagaagacgtttataagagttagggttatctagcagttctttttttcccct

SEQ ID NO: 209409 - DNA, 122 bp, Homo sapiens
actgctgtgtccccagcaccatcacctagaacagtggtaatcaacaagcatttgctgaatcgatcatcaacagatgtatatatgggtagatggatgtatgaacaaatctgtttccaatccat

SEQ ID NO: 209410 - DNA, 122 bp, Homo sapiens
ggcgctggaggcggggacttcctggccctggtggggcgaagtgcactcattcctccaccgcgtctcagagcaccgcgttctttccactctagtcttcttctctgatgctttcctctcatgaa

SEQ ID NO: 209411 - DNA, 122 bp, Homo sapiens
acatccctatgtgaaaaatgacaaagcactttttcctcttacagtaagcctaggacaatgcgtagcaaagcttgtggttgtcaccactgatatttttatcccttcaaactttcaaaggtggc

SEQ ID NO: 209412 - DNA, 122 bp, Homo sapiens
aaatcgatgtcggaaagcggggggagagggtggaggtgtactaagagtatgggggggtggcgatgctgtttatttctaaagcttcaactaaagtagctttgacactgttggggctggggggg

SEQ ID NO: 209413 - DNA, 122 bp, Homo sapiens
cagatgctccatccagctcccagtgctgcctgtgcccagcacattgctgaccctcactcacgtcttcaggggatgtcaccctgcagcatagtggctgccagaggggaggcccctcaggctca

SEQ ID NO: 209414 - DNA, 122 bp, Homo sapiens
aacactgaggcgatcctatgaagtaggtactgcaatatctccatttcattgttgaggcaacgggagcataaagggactaagtgacttgcacaaggtcatatggagcaggatattttggatcc

SEQ ID NO: 209415 - DNA, 122 bp, Homo sapiens
tctctgccagaataataatgaaaaaaaagtactgtggtggccagaccccaagatgattggcgaagtgaaagttgcccagttccaaaatggccaccaccgcactttcctggcgtcggagcgac

SEQ ID NO: 209416 - DNA, 122 bp, Homo sapiens
ggccatttctagcgaggatggaaagttctctatctgccactggccgcgtgtggctcagaacgcttgaaatgtggctagtgcagatgaataactgaatttttaagtgtaatttatttctgttt

SEQ ID NO: 209417 - DNA, 122 bp, Homo sapiens
tttaacaatccttaaacaacagcctacaaattcctccccttcgttccttcctctctactgcgaaagggcccaaacttcccatgtgctttaaaatgttctgtagaaagtgttccgtccccctc

SEQ ID NO: 209418 - DNA, 122 bp, Homo sapiens
agaggcggcgcgggagctggaggagctgagcgagcggctggaggaggcaggcggcgcatccgcggggcagcgcgagggctgccgcaagcgggaggcggagctggggaggctgcggcgggagc

SEQ ID NO: 209419 - DNA, 122 bp, Homo sapiens
gttggggcaggggagggccacaacaggcattcctggggcttggggggggcagcggggcctcgtcgagcggcggcacgcacccagcccaaccgacccagcccttacagccaatacttatcccg

SEQ ID NO: 209420 - DNA, 122 bp, Homo sapiens
cccccgccggccgaggctgggctgcgggaggcggccgggcggccccgagcttcgctagggcgaccaaaacaaaggcagcatccggggctgggtggatgcaaacaaccatgaaagactgggtt

SEQ ID NO: 209421 - DNA, 122 bp, Homo sapiens
gtgggccagtcagggacacagatcctgcagcatttctggagtggaaaaaccccaggttgccgggtggtggctgctgcagtattgctggccggcttagtcacagtgggcaggcctgggaggtg

SEQ ID NO: 209422 - DNA, 122 bp, Homo sapiens
gaaatacattgggattggtataacgtatgatgtttgagacatgcgactggctgggagtgacgtgcaaggactcagtgctcttaaatgacttggataaatcaactacccctctccattgctgc

SEQ ID NO: 209423 - DNA, 122 bp, Homo sapiens
ttgaagactcagcgttactgtcaaaatgaatgagtgcctgcctagttatgattcaattatcgaggtgtttgggtctctgcagtacactcagtgactcccaggcttttcttttttctctttga

SEQ ID NO: 209424 - DNA, 122 bp, Homo sapiens
caaacaaatccaccccccttctttcatgcaggttgatgtgatatagagagagtgagcaaacgctgcacagcttgatcttactaaagaggaacttgagactaaaatgctgtgttgagtgtgtg

SEQ ID NO: 209425 - DNA, 122 bp, Homo sapiens
aagtgttctgaggatgaaatcacctggaataacatgggtaagcccttggcatatggaaagcgctcacaaatgcagcgaatagagttctagacgctggttgcttcctcttaccctagtacagg

SEQ ID NO: 209426 - DNA, 122 bp, Homo sapiens
aataaaataaataaaataaaataaacgttggcttatttcagtgtgaagtaaggcaataaacggagggctaacagttccacttcgtagagctcagacattttaagaagcgaggaggccgcgtc

SEQ ID NO: 209427 - DNA, 122 bp, Homo sapiens
ttcccttctccccaggccgacatgataaaaccagctcaactcctcactgtcttgtactgtcgttagccttccttctcacttactgaaatcctggcttttaataaccagccatttttcctgag

SEQ ID NO: 209428 - DNA, 122 bp, Homo sapiens
atagtgctagtgcattgttccctaatctttctttatatctttgagtatcactaatattttcgggagataccacaaaattcttagtaaaaaatgaattctaagttgaaatatatattatgtag

SEQ ID NO: 209429 - DNA, 122 bp, Homo sapiens
agagcccaagacaccatttcccccattcatccccctctccaaagtgtgcaaaagaggcaacgtcaagctaagctggctgtgaaggacactggaaccaaacaaagggcagctgaaggcccagg

SEQ ID NO: 209430 - DNA, 122 bp, Homo sapiens
gaaaaggataacaaccacttttggtgaggaatcagtgacacaggaactctcgtccctgctcgtaaatggacagtgtttctgaaaaacaacttgagactttaaaatgcttttagactcagacc

SEQ ID NO: 209431 - DNA, 122 bp, Homo sapiens
ccaaatgacagctccggctcgagctttggcggcgcccaggcaattcccaagacctggcggcggagtctccccctgcggcagattctcggcagaatcacttgaacttttcacgaagttcttag

SEQ ID NO: 209432 - DNA, 122 bp, Homo sapiens
tgggatgtcccaggagtcctgggtggctgggcctggctgggaaacaggcagaccccgacccggctccagcaaggctgcggcggagacctcctcagcctggaggtttcctcagacacgagtca

SEQ ID NO: 209433 - DNA, 122 bp, Homo sapiens
gaataggagtggagctcaccgtgtcttgagcaggactcctcagctgggggtccaagccttcgcctctccagcagtccagtgccggccttatatagcacagctggtggctcagcctgtggcag

SEQ ID NO: 209434 - DNA, 122 bp, Homo sapiens
cgcagcgaggtggacatgttcgtggcccaggccgtgctacagtaggtgtctgtggctcttcgggtctcggcttccattgctgccttggctgggcagccttagaacaggtccccttgtcccct

SEQ ID NO: 209435 - DNA, 122 bp, Homo sapiens
tgggtactcgcgcaggagccgctcctcatccaggaacttgccgtcacgcccattgctggccggctggaacaggccgtagttcaggacatctttcaaactctgggttaatgtacacaggatcc

SEQ ID NO: 209436 - DNA, 122 bp, Homo sapiens
acacagtccaacttattaatctaaagaacatggagtgccagttccttcatatccttaaaacgtagcttcggaattcatacatttcaactggacacattacagtggaaagatacttattttaa

SEQ ID NO: 209437 - DNA, 122 bp, Homo sapiens
cccgcccattggcgagaaacggaaatacccgctttcgagaaaaccggaagtgcgtggtcacgccccgcgcatgcgtgcatcggggcagctcacgcttcctaaatcccgtcatccagtgagaa

SEQ ID NO: 209438 - DNA, 122 bp, Homo sapiens
gagcaggccagggcagtttccgagggcgcctggagcccgttgagatgtgtggctctcctccgctcgtcatctgccgggcagagtgaccactggctggcggctgcagagtctgacaaaccagg

SEQ ID NO: 209439 - DNA, 122 bp, Homo sapiens
ggaaaccgaaacctaaaagccccagaacatcctctgatgtggcaagtgttcaaggagctgcggttagcgcggaggggtcccgcgagcctggatgacagcaagccgcccaccaaggtctgggg

SEQ ID NO: 209440 - DNA, 122 bp, Homo sapiens
tgttcctcggtggcgaccttaattatgagatgagctaatgctttactgacttaaccatggcgcagcgggcagtgtggctcataagccacgaaccgggaactccactttgtggcaccgtgaga

SEQ ID NO: 209441 - DNA, 122 bp, Homo sapiens
tctaagtcattttggggcagtgccttcttcctcctcctcctctgtggagttggggcacagcgagggattgggcctcccagggttgactggaggccactcaacctttggctgtcagaaataga

SEQ ID NO: 209442 - DNA, 122 bp, Homo sapiens
cggaaaaaacatccgggagagccggtccgtttctcaggcagactaggccattaggtgcctcggagaaaggacccaaggctgctccgtccttcacagacacagtccaatcagagtttcccagg

SEQ ID NO: 209443 - DNA, 122 bp, Homo sapiens
cagtcatgaaaaggcactggaaaatacaaggtaaaaaactagtgtgaaaacagttgaatccgaagacagtctgtggtttactgaatattagtgtaccaatgttaatttctaagctgtgataa

SEQ ID NO: 209444 - DNA, 122 bp, Homo sapiens
aactcctaccttctcgggtttctagcttgctcactttacatccagccacactggagatggcggccggaggcgggcccgaggtggggcgtgaccagcgcagtgacgtcagcgcgctgcgtgtc

SEQ ID NO: 209445 - DNA, 122 bp, Homo sapiens
cacacagcatgggcctgatcctgttcccctcgtggacagatgcagcagggcagagtgcagcgcagaccacaggcctctggggctggccacagaaaccccgttggttagagcacagtgtggga

SEQ ID NO: 209446 - DNA, 122 bp, Homo sapiens
cttgaccatagagcaacttgggcaaagaaggggtgggctgacattggagtatggaacaaacgcatgatttcaaataagcatgtgtgtatccatcccagttctgtccgctgaaaaggcctaga

SEQ ID NO: 209447 - DNA, 122 bp, Homo sapiens
aggttccacagctggagggtgaacgccccctacacctcctgggcttaatcgtaaccggagcggggtaccctcaatttccccagcccacaggccccgcccccccccccgccctttgacctgcg

SEQ ID NO: 209448 - DNA, 122 bp, Homo sapiens
gcggttaggaagatttcaagacagcaacgacagagccttaaaccgagcacagggctcttccgggtgtggggtctcttgtgactgcgcaggtcatccatccaagaagccggccttgaattaca

SEQ ID NO: 209449 - DNA, 122 bp, Homo sapiens
ctaacttcctccttctgcatcttccacagaagacccacttgtgggcattctctttctgtccgttatcagtgggtttacatccgaaggccggcggcaagacacttgaaccacaaacaccagac

SEQ ID NO: 209450 - DNA, 122 bp, Homo sapiens
gaagaggctccctgggaagcagccctagccccatccttgcctggcctgagtcaggagctgcgagcacaggggatttcctccacttcactcttcttcctggtcctcaatactgcccctgcctc

SEQ ID NO: 209451 - DNA, 122 bp, Homo sapiens
ctacagagttcacacttggtcaggcttttccacgatgtgtaaaattctacaaggtctgtgcggcatcacctttactctactttgctcaaccacgatcactgtgattaggaagcctgcctata

SEQ ID NO: 209452 - DNA, 122 bp, Homo sapiens
tgacatttgaatataatcatagaagcaacactcattaaaatcacatgaatttgtgttatacgaaaggagaggttggcactccacttgacaaagatggaagaggccctcgggcctgacaatac

SEQ ID NO: 209453 - DNA, 122 bp, Homo sapiens
gttatcccagatcactgaagctgagatggctgatgaagtaatttgcagtgaaattttaagcgactgtgactctgctgcaagttccccagatcttgaggtaaggaattgtgagaaaaagtggg

SEQ ID NO: 209454 - DNA, 122 bp, Homo sapiens
tttccggtctccgagcctcaggcagctttagcctggttccctgtagagccctagcagggtcggggagacacttcgatccttcgtcctcactttgcagaacgggacaccgaggcccggggcgg

SEQ ID NO: 209455 - DNA, 122 bp, Homo sapiens
aggagctgtgcgggcggagcgcggaatgtagcatccacgtggaggtgatcgtggacaggccgctgcaggttttccatgtggaagtggaggtgaaggacattaacgacaacccgccaatattt

SEQ ID NO: 209456 - DNA, 122 bp, Homo sapiens
gatcacgttcacttcctggttcacttcttccgggttaacgcacgctcccggcccctcctccgccactaccgctctccggaggagttgtcctcgagcatgcctaacaatggactaaaatgaca

SEQ ID NO: 209457 - DNA, 122 bp, Homo sapiens
caactcccttttttgctgcctcaggctttcctttagcttgatatgcagcaatatccttttcgtatttttccttcagcttcgcagccttcttttcaccaggctgcttgtcatctgcagcagtg

SEQ ID NO: 209458 - DNA, 122 bp, Homo sapiens
tgtgtgtgagtgaatttttcagagctcagctttctagagggtggagcagtgtctgtcacacgggcttctcatagctcaaactgtcatccctgctttagctcatctcttcctaattgttctct

SEQ ID NO: 209459 - DNA, 122 bp, Homo sapiens
gaccacttcatccaagtcagaggcaaggaaatgccctgagacttagtctgggtccactcacgcttgttttggttaagaaaccacccccaggcgcttttcctgtgcagctgttttccctgatg

SEQ ID NO: 209460 - DNA, 122 bp, Homo sapiens
caaagtttatcatgactaattcttcttccaacttaaaacatctcaggatctgcaaaagggcgaaaaagagtcaagccctattaaccacccctctccttccctcaaccaacgattcgtaaata

SEQ ID NO: 209461 - DNA, 122 bp, Homo sapiens
agatccagtttattatacagccatatccagctctgtcagaattaagttttagttcatgcccgttatcattcagcagttgaacagttaaattcatcatctgaactgtaatcattatttcccaa

SEQ ID NO: 209462 - DNA, 122 bp, Homo sapiens
cacagctgtccagcgaaggcgccggctcagtggttgagtgtcccctcctgtccccttcgccggggtggggatacgcaacttggatgtgagaactctcgaatcccctgagtgtggcgcctgcc

SEQ ID NO: 209463 - DNA, 122 bp, Homo sapiens
agaaggagcagcttggtccgtcaggatccatgtcaagagcacacccactttgctgaattacgttcctaatgtattgtaagatctgcacgtgttgggagaggttcaagtcaatatattcagcc

SEQ ID NO: 209464 - DNA, 122 bp, Homo sapiens
cctgcgcctcagtttctcccgacgtcctcgatggcgccatggcgccacactaggtaccttcgggttcgacctcccgagcagctccacacgctgaggccccgcggcattttgcggccgagggc

SEQ ID NO: 209465 - DNA, 122 bp, Homo sapiens
cagatgcccgcgcttccacggctgagaagcggcgggaaggcgccgggacacctggccggtcgcccctgacgcctcctgccttaaatgaggtgtgagggcctcgtgcttcacacagcgacttg

SEQ ID NO: 209466 - DNA, 122 bp, Homo sapiens
ccctttgttaactggagagacgacagacaataaccccggcgtggtgaaacccggcccacacgtcccgcccgccccagagccaatgctagggccatcaggtggccctggtagccagtggttcc

SEQ ID NO: 209467 - DNA, 122 bp, Homo sapiens
acaatggaaggtcatcccgtcggttgggaaaactcggggagtgccatcctcacccagcaacgagctctgctaccaggctcaggcacagcctgccttctctgggcttcgtttttttgtttttt

SEQ ID NO: 209468 - DNA, 122 bp, Homo sapiens
tagcaaccgagaccagagctggagcgctgcgcctttaattctggggcgggcggggggcggcgggaatttctgctccggttccctctgcatcgcgggggcagctgtcacctgtaaggcgagcg

SEQ ID NO: 209469 - DNA, 122 bp, Homo sapiens
tctcccctcctaggaatattcgccagcgtgaggcacagatcatcactgcagatcctttaacgtcactcatctcctagtgaacggtgtccctgccttccagcgttctcagcactggccctcgt

SEQ ID NO: 209470 - DNA, 122 bp, Homo sapiens
gtctaccctgcaggccttaaaagccttcctctctgggcagctgttttggataatgcaacccgactcctagccaatcagtttttatattttttgtagatttcaaatacaatataattcacata

SEQ ID NO: 209471 - DNA, 122 bp, Homo sapiens
cacctacccctccttccacaggggaaagtgttccccaagctacggaaacgaagcagcattcgctccgtggatatggaggagatgggcacggggcgggccaccgactatgtgttccggatcat

SEQ ID NO: 209472 - DNA, 122 bp, Homo sapiens
actgggcatgcgttgccagcccgggccccgcccccaccctcagtcctcgtgtgctggccccgcccccacagcctggccctccagttgtggccctgcccccgtagaccacgcccctctggtca

SEQ ID NO: 209473 - DNA, 122 bp, Homo sapiens
attctcacacaggctggctccttgcagcccctgatcaaagcgctgcctgatggagaaagtcgatttgcacaccccaggacaaaatcatctaatttacaagcttgggcgatagaacttttctt

SEQ ID NO: 209474 - DNA, 122 bp, Homo sapiens
ctttagttaacacccgccaagcaactgagcccacccgttgtgtgggtaacaaaactctggcgacccagatggggccgactgggattctgatcctaacttcttgaggctcactaaggtaaagc

SEQ ID NO: 209475 - DNA, 122 bp, Homo sapiens
tagcctttcaagctcagccttattttatagctttaccttgcctttttgacaccacgatctcgcctggccaccagcagcatttcatgttgcagtgcactttaattttgcagttttcttagtct

SEQ ID NO: 209476 - DNA, 122 bp, Homo sapiens
ttacagacgcaccgcggcgtcttcatccctgtgggttacagatgcacagacgcaccgcggcgtcttcatccctgtgggttacagacgcaccgcggcgtcttcatccctctggcagtcgatgg

SEQ ID NO: 209477 - DNA, 122 bp, Homo sapiens
gccgcgcgggggtggagctgagctgaagtcactggcggagcgggcgcgggcgctggcgggcgacgcgggagggagggcaggcgctgccgggactccgggcgccgcgtcccgcggccgagctg

SEQ ID NO: 209478 - DNA, 122 bp, Homo sapiens
ccctcgatatgggcacacaaagctgcagcgaatgtcccctaatcagatctcctagtcagccgttagcgacaggcgaagaaacgcaaggctgccgccatccggtcgtgatcataaccgaggcc

SEQ ID NO: 209479 - DNA, 122 bp, Homo sapiens
atttcaaaatcaaaatctgaatcccacacccacagtactattctctgtgtatgaaataaacgttaaatgaggaaagaagacctgccttccaaatatatttgatagtgaaaacttcagggtga

SEQ ID NO: 209480 - DNA, 122 bp, Homo sapiens
acgccccgtcctccacatgctgccacttggctgagccgggcgccggcgagaaggcggcgccgctgccctggcagctggactgcactttgcccccgcccggcctcagctgccgcccgcccaga

SEQ ID NO: 209481 - DNA, 122 bp, Homo sapiens
accaagcaggggcgtcaccaagggaaagccaatcaccattatttctgaagcccaagggggcgggacgagaagtcaacataatggtggtgctgctggaaatctagcacctggggagagcctga

SEQ ID NO: 209482 - DNA, 122 bp, Homo sapiens
agaacccctctaagcttatgttcctgcatgtaaaatagctatgaagtgtcaaagggttgccgagtaggtaacgagtacatgtttggaaagttctgaacccgctgccttccaaatcacagaca

SEQ ID NO: 209483 - DNA, 122 bp, Homo sapiens
tgagactcaatttcctgtttggggagatagcatcagaacccaggaactacatatacacaccgcagggccctggtaggcactgaactttgagcttcaggcagcacaactcacatttgtgcaaa

SEQ ID NO: 209484 - DNA, 122 bp, Homo sapiens
actagatccctcgggcctctgtgccttcccagggctctgcaagccggggaagaaaagaatcgttgcttcatcctgcaactcccagacggtgcttcccgaccctggtgcgggtggtgaggagg

SEQ ID NO: 209485 - DNA, 122 bp, Homo sapiens
agaaaaaaaaatcagaagcctgcaattgtgtaacatgaaaatcttttctggaccagggcccgtcactgtgatttggcaacacaactggcacatctcttttctcatctcttgaaaaaaaccaa

SEQ ID NO: 209486 - DNA, 122 bp, Homo sapiens
ctcccgccccaccgcggctcccaggccgctggccctaccggcaccccccctttggcgagtcggcagccacgtccttgtcctcacccgcagcgcagtgacgccgacccatccaacggtcatcg

SEQ ID NO: 209487 - DNA, 122 bp, Homo sapiens
tgtcctgaaaccacacggaagatcttacggtttagacggacatgtcacttccgtagaatccgcgtctcatcttggatgactgcggtcaatgttgccgctgcccccaccccagccacaagtct

SEQ ID NO: 209488 - DNA, 122 bp, Homo sapiens
aggaaacgcaaatgaaacccagaatgagattctactacacacctgttagaatctgggctgcgcaggtggcatcagcgctgctccgcctccaggaaggaacctgggctgcgcgtggctggcgg

SEQ ID NO: 209489 - DNA, 122 bp, Homo sapiens
aaaatgtaaaaacaaggaaagacattgagttaaatggcagaggatttttttttttttgatcgcagacaatcaagaagagcaacaaaatttaaagaaggaacagagaagaacttgagttggga

SEQ ID NO: 209490 - DNA, 122 bp, Homo sapiens
cttcctgtccctgcgcgcagccgactgcctcgccgcctgagcccggacctctcctggcaccgctgggggccccccgcccccaccgtcccactcggtgaccccaggcccctccggcgcgggat

SEQ ID NO: 209491 - DNA, 122 bp, Homo sapiens
tctgcatttctgctggggcactgtcagatgggtcttcttggctctgggtgctaagagtgccgctgctttattttccttgcttctctttcctgcccgtgaaagacctgacactgtgcttctct

SEQ ID NO: 209492 - DNA, 122 bp, Homo sapiens
gcagctgtgttccccatggtttgtcctggatgtctcccttgtgccatccttgcaagcccgcggccagcgcctccacccacgctccggccttgctcccactcccaccgctctgccacctccca

SEQ ID NO: 209493 - DNA, 122 bp, Homo sapiens
tgctccccccactacttaccagctgttgtttctgacctgtgtcccacccagggttgaagccgtgagggtgaagaagtaaaaggccaagaaaattcttattggacaggtactataataagata

SEQ ID NO: 209494 - DNA, 122 bp, Homo sapiens
ttttttcttaatgtttttctcttttcctagagttttcttttccctccctccttttctttgcgtgcttagaactttacaaactgttggaaggtccagaacgtgccacagtgacataggattat

SEQ ID NO: 209495 - DNA, 122 bp, Homo sapiens
cccaagtgatctgcccgccttggcctcccaaagtgctgggattacaggcatgaggcaccgcgcccagccaggaggagggtttgttttactaactgctcatggagaaggctcacaggagcagg

SEQ ID NO: 209496 - DNA, 122 bp, Homo sapiens
gcgacagcccctccttgttggagtcgtgagtgcttcttttagacattccccaaactgactcgccggcctctgcgggacgctatagctctttaaggaaaggtggagcggaccaaggagcagga

SEQ ID NO: 209497 - DNA, 122 bp, Homo sapiens
gtgtgctgccgcggggctgtggagagggtgcagtgagggtcaggagccctggagggagagcgggtcccacggcacaccatcccagccactgtcctgaaaggtgagcaatttctagtgcaggg

SEQ ID NO: 209498 - DNA, 122 bp, Homo sapiens
ggctcacaacgatgacgtagcgaggagcggaaaacgcggtaaccaaggcggccccaggcgcgcacttccgcccggccttccaccggtccaggtctgcccctccgcagcgatagttcacgctc

SEQ ID NO: 209499 - DNA, 122 bp, Homo sapiens
acaacctgcccaaccatccatgacagcctggtgttccactcatgttatttaacattcccacgcatacacctggagctctgcccaaaatacctcccctcgccctgacatacaccctttggcaa

SEQ ID NO: 209500 - DNA, 122 bp, Homo sapiens
ctttatcttacaggtgagaaaactcaggcttagtgattgacagacccttagtaacagacccggatctatttcacaccaaagctatacccctaatcactaacggtatgattttgtcctcacaa

SEQ ID NO: 209501 - DNA, 122 bp, Homo sapiens
cagtcgtgtggaacggcaactttgtcattgacaacccacagaacatccagggtgagtgggcgccccggcggggtgggcagtgggcgggcccgagctgaccgcacccctccccacagcgcacc

SEQ ID NO: 209502 - DNA, 122 bp, Homo sapiens
tttggcaactgagcaacgaggcacataaacattatgcaggccacctggccgggcaggatccggcagcgtcctccgggcagagagccgagcacagccttgagccagtcctgtgggggccgtat

SEQ ID NO: 209503 - DNA, 122 bp, Homo sapiens
gtgtcctggaactgcctgattgttgtagattactaaaaatccacagctcattccctcctgcgccctgaccacctgcccacagcgactgtgtcctcctctgagccaccacctggcggttgtcc

SEQ ID NO: 209504 - DNA, 122 bp, Homo sapiens
agcgcccgtactcctcgcggttatagatgtatctggccacaccgcgcacgcgctctgtcccgttggtgaagtagcacatgcccttaaactggaccaagaaatcctctgcggagaatcacggc

SEQ ID NO: 209505 - DNA, 122 bp, Homo sapiens
gacgctcctcagttcccaaatggggtcgcggctgggcagaggtgctccccacatcccagacgatgggcggccgggcagagaggctcctcacttcctagacgggatgacggccgggaagaggc

SEQ ID NO: 209506 - DNA, 122 bp, Homo sapiens
ggcaaacgtcgctctgaagcatcgacaatactggcaacatccacagccgccctgaggggacgggcgtagaggagagctgccgcctcccggctgctgggcccgggtgccgcgcggcgcggccg

SEQ ID NO: 209507 - DNA, 122 bp, Homo sapiens
cccttcagggctgggggccgcgctatgccccgccccctccccagccccagacacggaccccgcagggtgagtttttgggggctgaggagggccattttctttaagatttagtgggggtgcgt

SEQ ID NO: 209508 - DNA, 122 bp, Homo sapiens
ctgtaatagcgaggccgacgcgggaggtgatgccgcctggccggtcaggtgctgaggcgccgaggagaggacatggctcactggatctttttctgaggggtcagtgtaataggggattccag

SEQ ID NO: 209509 - DNA, 122 bp, Homo sapiens
gatgcttgggagacgctgctccggcaggtgcagccccggaagtttgtccatgggggtccccgcggctggggctcatggaactgcgagacccgggaccctcctgccctgcgggtccccgagcc

SEQ ID NO: 209510 - DNA, 122 bp, Homo sapiens
caggcctttgagaagcagctctgtccctgtaagccagcattccctggtttggcatgcacacgtgcacacgctggctagcctgctacttaagacgcccatgaagttgtatgttctcggggcct

SEQ ID NO: 209511 - DNA, 122 bp, Homo sapiens
agaaacgtagcggctgccaaaagcaccccactccttttattgtccccataagcctatacacgtacactagccacccccccaacacacacacacaacacgcacacgtgtgcgggagactcgag

SEQ ID NO: 209512 - DNA, 122 bp, Homo sapiens
acttatcctgatacataggaaaagggttaagcaagaatcatctgtttgagatagctgacgcggaaggaaaaggatgtgaagtttaattatggacacatttcagttcaaagtgctaaacaggt

SEQ ID NO: 209513 - DNA, 122 bp, Homo sapiens
cttgatctcctgaccttgtgatctgcccacctcagcctcccaaagtgctgggattacaggcgtgaggctctgcgcctggctgacaacctgatcatttcttaaagacaggcagttcgtggccg

SEQ ID NO: 209514 - DNA, 122 bp, Homo sapiens
agggactgacggacaggctctgcagtggcgcccgggggacgtgtcggaggcgaggcggggcggggcggtcccggaggcggggcggtctcggaggtaggggccgtcctggaggcggggccgtc

SEQ ID NO: 209515 - DNA, 122 bp, Homo sapiens
ctctcctcaaccccagttaaataacaacttttctaagttttgtcaaaagtttaataaattcgcaacattcgacagttcgccctccctcgcccccgccccccgccccagtccctggctcctcc

SEQ ID NO: 209516 - DNA, 122 bp, Homo sapiens
gagtctgtatgtgtatgtgtgcgctcatgtgcgtctgtatgtgtagagaacgcacactatcgagatcttgataataaatctaaaactcacaacaaagtaagatgcatatgaatcattaccct

SEQ ID NO: 209517 - DNA, 122 bp, Homo sapiens
agagggtgtactgggtcccccagcagtgccagcccaccggcgctgtgctcgatttctcaccgtgccttagctgccttcccgcagggcaggattcgggacctacagcccgccatgcctgagcc

SEQ ID NO: 209518 - DNA, 122 bp, Homo sapiens
aggcaaggggtccaggtcagagtttagagctttcaaatcccaacttgcccctggggattgcgcggctgatgtttagaacgcctagtcaagccaaccggctcgctcttgtttcagcaaaccct

SEQ ID NO: 209519 - DNA, 122 bp, Homo sapiens
cgccgtcgcctgctcggctgcgggatgcttgctcccaaggtcccaggcgtccaggttgatcgccagccccttaccctggtgagggaggccttgcgccctgcagaagccccgggccctgcggc

SEQ ID NO: 209520 - DNA, 122 bp, Homo sapiens
cacaggctggaatggaactgggtcactgcatgtgtgttatcttcagtgtgctccagtccccgtggggaagagccagaccacgtgccgtaccaagagcacggcgtggtcacccacggtttacg

SEQ ID NO: 209521 - DNA, 122 bp, Homo sapiens
aagtcacagtactcccgggaggtgatctcacactcgccgttggtgccaatgcagcagggccgtcctgtgatgacacagtccatgtggggaaggttggtgtggttcccggggttgtttctggt

SEQ ID NO: 209522 - DNA, 122 bp, Homo sapiens
tcttgtgtaacttggccatggcaggggttctcattgctaactaatagacgggtctggatgcgcagagtccttgaggatagtaatagtgtcaggattgcagaaccctaatggagaatgcatgt

SEQ ID NO: 209523 - DNA, 122 bp, Homo sapiens
tgtccgacacggaagcaaccagacatctgtggctagcaagctcttaaaatgtggccagtacgaaataaactgtgctgcctgtaatcccagcactttgggaggccgaggcaggtgaatcaatt

SEQ ID NO: 209524 - DNA, 122 bp, Homo sapiens
tctcccctggctccagcttcctccacgcccagggctctgccctccgccgggccgacttcccgcgaaactgcagcggctccccctacaggacaaaggaggaaacgctagcggggccccagagc

SEQ ID NO: 209525 - DNA, 122 bp, Homo sapiens
ggggaaggaaaaagagatgcacacttcccccagagaagcctccgagcgcggccgccattccgggcctcaagcccataaagaaaaaataccggagaggttctggcaccatttcggggtgccaa

SEQ ID NO: 209526 - DNA, 122 bp, Homo sapiens
tctaacaacttgagaccacgaccatgcccaggggagtgtgggctctctgcaggcatccggcgcgtttccagacacagctgaggccggacgtgctgggtcagtgagggctgagatgtgcagcc

SEQ ID NO: 209527 - DNA, 122 bp, Homo sapiens
cgtccgcccgtccgtccctcagtctctctgcggtccctttaccgtcctcagtctggctcgcgctgcctctcaggcacttccccagctcgccccggatcatctgggccccagcgcggagactg

SEQ ID NO: 209528 - DNA, 122 bp, Homo sapiens
tgaggaaggagcccgtgcctcttcatgtcatgcttatgactcagggcaccaacacttcaacgtctcaaactaaaatgtccttaacatttcaaaattccagcatttccattttcttcagtaaa

SEQ ID NO: 209529 - DNA, 122 bp, Homo sapiens
gtggtttaacgcacttttgcagagacatctaccaagagatagcgtgtgcactttgttttccgtcccacggaagaatttatcagtagcgttattcagccctactcgctttaaagcacggcacc

SEQ ID NO: 209530 - DNA, 122 bp, Homo sapiens
ctctctctgggatcggtggggacagagcaggctgcagcccccagctgctcggtcctgtcacgtctctcgctaccctcagggtgtgccctacactgcggcgtccgcctcagatgcagccgctg

SEQ ID NO: 209531 - DNA, 122 bp, Homo sapiens
cgccctggacagggaggaggcaactgcccaccacctggtcctcacggcctcggatggcggcgagccgcgtcgctccagcacagtgcgcatccatgtgacagtgttggatacaaatgataatg

SEQ ID NO: 209532 - DNA, 122 bp, Homo sapiens
gctttgcagaaaacaaataatgacacacttctctggaagcccggggcctgggcccagagccgtggcttctgccaaactttctggtcccggacaccaactccccgcctctcagcccgaggcca

SEQ ID NO: 209533 - DNA, 122 bp, Homo sapiens
acgatcagattcttaaaaatatttttggtgaaggattaccactgtaatttttcctaacttcgaccggcactggtcccagcgcccaggccatctcccagcggtggcaacatgaagccaggcgg

SEQ ID NO: 209534 - DNA, 122 bp, Homo sapiens
ctgcctttatctccagagatcccgtgagagcagggatttgtggaatgactcactgtgtagcggcgtcttctggcggtggacgaggccgggcgcacgattttccccgtgggtgagagtgccct

SEQ ID NO: 209535 - DNA, 122 bp, Homo sapiens
cttttgtgtgacattgttcttaatagccagtgggggagaggaagatattactcccaatatcgcaggaggtatacacccccttgttatattattcctatatcccgggggggagacgatgatac

SEQ ID NO: 209536 - DNA, 122 bp, Homo sapiens
ggggtgacagacggcaccggaaaatcaagtcactcccacccgaacactgcgattttccaacgggctttaaaaacggcgcgccaggagattatatcccgcacatggcttggagggtcctacgt

SEQ ID NO: 209537 - DNA, 122 bp, Homo sapiens
cgtccgaactcgtcattggctgcttcctagcggcctgtgttgattggctgcccgaagatccgccctcctgccgtgggcccagccccgcaaatgcgcagctaagcgggtggcaaggggcgggt

SEQ ID NO: 209538 - DNA, 122 bp, Homo sapiens
gtgggattcgaacgcagatggggtttggagcggctcttgtgtttaagccacacagtctgacgttagacgggtgaatccagccctcgcagggcctggagtgacctaagccgagaggagctggg

SEQ ID NO: 209539 - DNA, 122 bp, Homo sapiens
caggccagtgggggacctgcggcagacctataggagtaggagctgctccagggccccagccgttgcccgtccacggaggtcacgttcaggctaagctgggcagcccggccttgtgttgctgg

SEQ ID NO: 209540 - DNA, 122 bp, Homo sapiens
aaggtaaatatgtttatttgggtccactgcagtctccaattccaagtcttgggtgataagcgctgttttctcaccttggtatggagagggtgcccctcccagaggaatcttgatcgcttgct

SEQ ID NO: 209541 - DNA, 122 bp, Homo sapiens
ttaagagtagcctccactgaccctgggggagtcccccacaccttaaacagcctgggggtacgtgccagagagcaagagacaatcagactgtgtttcccctccccgattcaaactggatctcc

SEQ ID NO: 209542 - DNA, 122 bp, Homo sapiens
gccaattgctggactgcagccgcgagctggagtctccacccacaggaaaaattcctggcccgcccctccctcgctccctcgctccctcgctccctcgctccctcgctccctcgctccctcgc

SEQ ID NO: 209543 - DNA, 122 bp, Homo sapiens
gaccgcaagtcccgtcttatgggacttgaggccctcaaggtaatggcacagggacctgctcgcggtgggctaaggggaggtggccgaggccgtggctctgcgcctgcgcgagttgaggagcg

SEQ ID NO: 209544 - DNA, 122 bp, Homo sapiens
gcggggcaggcctgaggacgcctggaggggctccccacggtccgcggctccctttggacccgagctgggagctgctatagcagtcttaacaataagacagcagtaatagaagccatcggtta

SEQ ID NO: 209545 - DNA, 122 bp, Homo sapiens
acctccggccgccatcgtcttctcattggtcagcaggccaacgggggcgggagagatacacgtgagagaggggccgccccaacgcggggattggaagcctgaccggaagccacgccctcgac

SEQ ID NO: 209546 - DNA, 122 bp, Homo sapiens
gagaacgcaaggcaagcatcgcgccagatgctgtgagtttatcctgagagcccagccgcacgctgacaggggtgagtgtttatataaaacccattcaaactctagctcttgattttttccag

SEQ ID NO: 209547 - DNA, 122 bp, Homo sapiens
ggtttctccatgttggtcaggctggtctcaaactcctgacctcaggtgatctgcctgcctcggcctcccaatacgtgggttctttaaaaggcaggggttctatccctttccactcttcattt

SEQ ID NO: 209548 - DNA, 122 bp, Homo sapiens
gcaagcttagacatgtgcaagcctagacgcatggtcagcctagacgtgtgccagcctagacgtgtgcccagcctagatgtgtgcaagcctagatgcgtggccagcctagatgtgtgccagcc

SEQ ID NO: 209549 - DNA, 122 bp, Homo sapiens
tgagcggctgtcagctggagcaggaagccccagagcagggcggccgtggcaggggacagccgccgctgcggccccatcggactggtgggtggcgggtggggtggcgcggcgcggctcactag

SEQ ID NO: 209550 - DNA, 122 bp, Homo sapiens
gtcaccaagtcaacagcaacctgtgattttgagtctgttttttctttggactctattcctcggggatgttggaggaatgacttattgtcatctgaataagaacttcggttaaaccagtctag

SEQ ID NO: 209551 - DNA, 122 bp, Homo sapiens
gtatgaatcaatgttcataaaagtacttacaaaaccaagtgaactcaaatgcagaacaagcgctatcaccaccaccagcagcatcaccttcttcagagaggaagcctcagaaagtcagcaga

SEQ ID NO: 209552 - DNA, 122 bp, Homo sapiens
ggagttagtctgtggtcagttacgtggtgaaaacacggctgtgccgcggccgcatctttccgcggccgaggcctctctgggtgggagtgttggcttcctttccggatcgctaaatggggaaa

SEQ ID NO: 209553 - DNA, 122 bp, Homo sapiens
ttcagcgagcgctgccctcgccgccgggtctctcagaggctgggagctgggggtcgccgccgccgccgcccggtgattcccatagagaagacaactctgtgctgcctctccaagagctgccg

SEQ ID NO: 209554 - DNA, 122 bp, Homo sapiens
gccaccgtggccatcgggtccccgcctggcggaagtggccaggcgtccacgagcgcggcgcgtataggttcacctcgctcgctccgcagcccccaggggctcatggctgcctatcccccctt

SEQ ID NO: 209555 - DNA, 122 bp, Homo sapiens
gcgccacctggaggcttctaggtcctagctcggtgagcgtctttgctccgatcccagggtcgtggtcttcaatgattgtctggaggacgcatcccatctgtcactcccagaccctcagcctt

SEQ ID NO: 209556 - DNA, 122 bp, Homo sapiens
ctgcctcctgggttcaagcaattgtcttgcctcagcctcctgagtagctgggactacaggcgcacgccaccacccccagctaattttttgtattttagtaaagacggggtttcaccgtgttg

SEQ ID NO: 209557 - DNA, 122 bp, Homo sapiens
gcaccacctgtttccgcgcccggggacttccccggcggggctcagaagtgtgggatcggtcgcttggcttcccctggcgtcagcgacccagggtaacctcctccactgctgcgtgccgtgca

SEQ ID NO: 209558 - DNA, 122 bp, Homo sapiens
ctggcccagccctgccccctgcccctcaggcgtgagcccctcgctccagtgccgcgtgtgcggagacagcagcagcgggaagcactatggcatctatgcctgcaacggctgcagcggcttct

SEQ ID NO: 209559 - DNA, 122 bp, Homo sapiens
gtctgagctctgccacctgtcagatcagcggccacattagattctcgcaggagagcgaaccgtatcgtgaactgcttatgcgagggatctaggttgcgcgctccttatgagaatctaactaa

SEQ ID NO: 209560 - DNA, 122 bp, Homo sapiens
taaagttgtattgattggttggcggctggttgagtagtcatgctttcaacatgcagttgtcgtctactctgtgctagattgtttttataagtttgatgccagccccagtatgtcttgatttt

SEQ ID NO: 209561 - DNA, 122 bp, Homo sapiens
cgactctcccgtcacaaagagctgagaaaggaaagagaaaaccacagtgatgacaaagtacgacaaatggctgtgctgtgaagtaccagaaagccccaatttttggtgtatgtcgcccactt

SEQ ID NO: 209562 - DNA, 122 bp, Homo sapiens
agaacaatacgggcatgcaaacaccgagcctggcactgcattaagctctgaaaatgctttcgggaactggtggcgccgtgcacgtgcatcaatgcaagggtctttacgttctaggaaatcta

SEQ ID NO: 209563 - DNA, 122 bp, Homo sapiens
gaactccccgtgtcccggacccgggcctggcagcgagacgcgcaggtgggattgtagggccgtcggtgggactgcccggggctccaaagccctcagggcagcctgcggggtcactgggcctc

SEQ ID NO: 209564 - DNA, 122 bp, Homo sapiens
aggatttcactgtgaaatctgagggtggtcggtcacagtccacgtattcaccaagccgagcggtgggagggccgtgaaggcttcttagccagattcctcgatttgtccttttttcgtgtggg

SEQ ID NO: 209565 - DNA, 122 bp, Homo sapiens
gttcccgcgagactcttctctgcgtcctggactcaccgcagggcgccccgccgcacggatcgagaaccttggggctccctggaaacttgccacccgctgccgccaaggccggaactcctcgg

SEQ ID NO: 209566 - DNA, 122 bp, Homo sapiens
agcttttatcctattatgatctcacaaatattgagctaaattcctcctgatgaaagctctcgggtaaataaaggatctcacatgcaaaacatcaacaggcatatggatttataaatgtacgt

SEQ ID NO: 209567 - DNA, 122 bp, Homo sapiens
ggcggacagtcctgacggtgcggggcggggctggcggctgcccaggcctggctgaggcgccgcggccgggtccctctccacctgccgggcggagcgcacgggccatgggctgagccccgctg

SEQ ID NO: 209568 - DNA, 122 bp, Homo sapiens
ttagtctgggagccagagggggctcccggggatggggctgttccaggagactgcaggggtcggcaaaaggttaggagtggggagccgggccaccgggggttccctctgtgaaggtttcaggg

SEQ ID NO: 209569 - DNA, 122 bp, Homo sapiens
gttagcaaggctcaaaacgagggtgtcagctccatcattcttcactacaggatggggaaacgagagaggcacagcgctcagcctgcgtagtacccaggcatgaacagctcaaattatctctg

SEQ ID NO: 209570 - DNA, 122 bp, Homo sapiens
ctaaatccgatttctggcaatacttggatggagctgggagaaggctctggggtaggcaaccgttcccaggacactcggcctgcgacaccggtttaaggctcggtttggcctctgtaggcagc

SEQ ID NO: 209571 - DNA, 122 bp, Homo sapiens
cctcctgtcctgccagacagttgttacctcagggcagggggaaagtagcttggctattcccgacagatggacagttggtagaacggaccctcccacaggccctcatccccttgtgcagctgc

SEQ ID NO: 209572 - DNA, 122 bp, Homo sapiens
gaggccaggtaggtggtgagttacttggctcggagcgggcgaggggacgcgtgggcggagcggggctggccagcctcggcccccatgacccgctgtcctgtgccctttcccagcgatgggcg

SEQ ID NO: 209573 - DNA, 122 bp, Homo sapiens
aattcatagacctttgttgctgcatataaacttgaggataaacttgttgaatttgttcaacgtaagcagctgaaattctgcgtggggtggtgatgaacggctctagcactcggtaaaaggta

SEQ ID NO: 209574 - DNA, 122 bp, Homo sapiens
ccgaaagccccagggacacagagtatctcactccagattgggcagcgcccccccccccgccgcccccgcaagcctcctgctgactctccccgaccccggcggggggagcctggttatctccc

SEQ ID NO: 209575 - DNA, 122 bp, Homo sapiens
cttcagctcgggaaggctatatttagcaggtttccggaagttgccggactggctgtgaggcggtcctgcctcgctgccttcagtccctagtgtctgggtccccgccctccagccgcctttga

SEQ ID NO: 209576 - DNA, 122 bp, Homo sapiens
acgggaaagtcctgatttctaatctgaaacagcgctttttgtccagagaccggtgacgagcgaccctgggctcgggttttgattgggcagttcggaaactgtaaaagcgaattaaaagggtg

SEQ ID NO: 209577 - DNA, 122 bp, Homo sapiens
cctcgggatccagctccacccgggctgagcagtcagctgtggacttccatcacgcggctccgggtccccaaggtcacacagcaagccagaggcagagccagggttggacccgggtcttctgg

SEQ ID NO: 209578 - DNA, 122 bp, Homo sapiens
cccctctgccctagggggtgctcggccggtaggcgctgggtcctcagcctggaagcgccacggagagactcgatttcctctgtaacccgctgcttattgttaaggcgcctggggatactgaa

SEQ ID NO: 209579 - DNA, 122 bp, Homo sapiens
gcgggctggccgcctgccctctctcgtgctggtggtgctgctggtggtgatcgtcgtcctcgccttcaactactggagcatctcctcccgccacgtcctgcttcaggaggaggtggccgagc

SEQ ID NO: 209580 - DNA, 122 bp, Homo sapiens
caggattgttaagaacagggcaggctgagagggagtgtgtggggcttggtcagggttaggcgcagggaaagattacccagagtggctttctgcaatggggcacccctaacagggccaggctg

SEQ ID NO: 209581 - DNA, 122 bp, Homo sapiens
ttttcctggggcccgctgcctgcggggcgtttctgcttcctgggacttcaagctctgcaacggacccctgagctctctgtgttcccatcttaccgtccagccaggcatgtaggcaggaaagc

SEQ ID NO: 209582 - DNA, 122 bp, Homo sapiens
ctgccctgagtatctgcaaacccggggctgggctgggtttttaagggctgggctcgcgtgcgaggagcggtgctaaaaaggggctgcctgcgcagatgtcattcccacaagatgcaagtaaa

SEQ ID NO: 209583 - DNA, 122 bp, Homo sapiens
ttccctctgcagcggtagcacaagctcagcgatggcggctccagaaggcagcggtctaggcgaggacgcccggctggaccaggagaccgcccagtggctgcgctgggacaaggtgaggggca

SEQ ID NO: 209584 - DNA, 122 bp, Homo sapiens
tggcctgaactaagcacccccagacctttctccgtagtccacccaattaccaagccccatcgcagacagacacggtccctaagtcaagtttgtccaatcagaggccgctctagaaccagaag

SEQ ID NO: 209585 - DNA, 122 bp, Homo sapiens
catagttgggaattgtggcctgcgtgggaaggagtgagaggcccccaccggctgcatcctcgcctgattcccaccccaagcacttgagggcaagagcagctctggctcaagtgaaaacagct

SEQ ID NO: 209586 - DNA, 122 bp, Homo sapiens
ctcccggccgaataaaaaacctcttccttctttaatctggtgtctgaggagttttgtctgcgactcgtcctgccacaaattaacgaagtattaaaggggaagatctcagctgaaagaaatga

SEQ ID NO: 209587 - DNA, 122 bp, Homo sapiens
ctgcctgtcctttatgtgtgctgggcttgccccatagcagctgtggttgctggcatgtcccgctgtgcagtagctcgctgctgctgaaccccctatgcaacaagatcctgggtggggaaggg

SEQ ID NO: 209588 - DNA, 122 bp, Homo sapiens
gctagagttgggatcagagccagaggggtggcttgggacgggacgggacatgctgctccacggcgcgaggtggaggcagccacagctgggggcgacgattatggaagctgccgggggtggtg

SEQ ID NO: 209589 - DNA, 122 bp, Homo sapiens
gttgttttaagtggctcaatttcggagtgatttgttacacacaataaaaaagtgatatagcgaagaaggcagatacaacagaatgggtttgaatgcgacgatgaaagaagaaaataaagttg

SEQ ID NO: 209590 - DNA, 122 bp, Homo sapiens
cccgcgtcgtcaggggcggatcctgagccgattggcggctcggtgaggagagcggggcgacgcgagcccgctggggccgcttgggcgccgctgacacgttggctctgctcctgctcatgcgc

SEQ ID NO: 209591 - DNA, 122 bp, Homo sapiens
gcagaggctctgggcccagacagtctgcacctggtggtgtggctgtggactctgacagagcgctccgagtcttttcctgggtctagcacgttgctggctgggtgaacaccacacagggggct

SEQ ID NO: 209592 - DNA, 122 bp, Homo sapiens
ggctgcatcctagatgcgatcctgggaagggcccgaggtgatcatgctgtacggtagccccgtggctaggcaggagaccggacagagatacatcggacccgaatgtctaccacgttccagga

SEQ ID NO: 209593 - DNA, 122 bp, Homo sapiens
ccagtggccatgggcttgactccctctttccctaagggtcagacttccagaacgtgctcacgtgagcttggggccctccccacctatgctcaccccagacacggggctggatgggggctgtg

SEQ ID NO: 209594 - DNA, 122 bp, Homo sapiens
caagcgcttagaatgctaagcctggcaccagtacctaaccctattgagccagcatcccggcggctggcagcatcccctgggtgcccaggaaaggcttccattcctctccaatgagcatagct

SEQ ID NO: 209595 - DNA, 122 bp, Homo sapiens
gtgtgtgtgggcatctggaccagtccctccatagggcccgagagtgcatgtccccggagtcggttgtgtccccatgcgggtgcgaggctgggcagggctgccaggggttagtgccgtggggg

SEQ ID NO: 209596 - DNA, 122 bp, Homo sapiens
tgtcatatataatcaactcactattagaaagtattgctacctctccaacacacatacacacgtactttttttccacgtagtcataacagcttataggagtcctggaatcctttgtgcatgta

SEQ ID NO: 209597 - DNA, 122 bp, Homo sapiens
ctactaaaaatacaaaaaattagccgggagtggtgtcgggcgactgtagtcccagctactcgcgaggctgaggcaggagaatggcgtgaatccgggaggcggagcttgcagcgagccaagat

SEQ ID NO: 209598 - DNA, 122 bp, Homo sapiens
cgggcgtacacacgctgacgcgcaggctgcggtcgcgcaggcgcagtcggggcgccttcccggtataggcgccttttaccccagcgtgtcctgagtctttggttcgcgaagtgccgttaggc

SEQ ID NO: 209599 - DNA, 122 bp, Homo sapiens
cctgcactagcaggagtcgctgtggacgcccttcggcactcaaggaaaaaacgcttccagcgatgcaagcagctgcctttgctgcggctctgattcccagaggatcccaaagcttttcccat

SEQ ID NO: 209600 - DNA, 122 bp, Homo sapiens
actgagcctttttgtccctggaggcgctggggtctatccagagtcctgattgctactgttcgagcctggaggagttactgcttcttcacacgtgtatttctgtgcagttcaaagtgcttcaa

SEQ ID NO: 209601 - DNA, 122 bp, Homo sapiens
cgagtccctctagctgatgttaccgagcggtccttgtttttagagctcccaagagggtggcgggccacttccaagatggcggcaagcctcttgttctctgacctggggttcttggcctcaca

SEQ ID NO: 209602 - DNA, 122 bp, Homo sapiens
gccagagtctcattgacataaagatggaccaaggctgtgccatagcgtgggggcttgccgcggtcactgaccttcaccaccaggcggtgtagcccatggtggcgccgctcaatctccttctc

SEQ ID NO: 209603 - DNA, 122 bp, Homo sapiens
cgtttcagcaaaccacgaagacccagcacccccagggtgagctctttcaaagtggctggccgagacggttgggacggttgctccagagcccccgcccgcctgtcctggaggccggactcaca

SEQ ID NO: 209604 - DNA, 122 bp, Homo sapiens
aatgggaaaaaaatcaattaaaactgctggaaacatactgggtgcatagaaagtcccacacgaaaccagtctttcgttgtccacacaaatagtgccttagcctgaactagaagccctacctt

SEQ ID NO: 209605 - DNA, 122 bp, Homo sapiens
aaccagccctgccagtcaacctgccctcacctaggatctggacctaggagtttagggcctcggggccccaaatccaaattctggcccctcctgaggcccgaaatcctgctcctggccaccac

SEQ ID NO: 209606 - DNA, 122 bp, Homo sapiens
cagcgtgacgccgtgggcgcggctcctgggggggagggtctcagcgtggcggcctggtgccgcccacacacccatgggggcccaccttgactgagagcagccgcgtcaggtagatctcggtg

SEQ ID NO: 209607 - DNA, 122 bp, Homo sapiens
ccggtgggaggagggagaaaggaactggcaagcttggattgcctggagatctccaacagccgagggacagggcccaacttctcacctgagagtcccacctgcaggatgagagcagaagacag

SEQ ID NO: 209608 - DNA, 122 bp, Homo sapiens
tgtctttcgtaagttaaaatgataattgggccgaaacttactgccttacctaaaaggcagcgcagtcaggatattggtaggtcgggggcggctttggaaacccttaagtttacaagcatgcg

SEQ ID NO: 209609 - DNA, 122 bp, Homo sapiens
tgttccctcatagtgatttctgaagatgtttcatttcttccttaacataaatttgaatgtcgatattgagaatttacccattgtggtacatcttttgtagtttcctttgaaatgactcattt

SEQ ID NO: 209610 - DNA, 122 bp, Homo sapiens
accacctagtggaaaagtggtgcgttaaactcaccatctcattttaagttgcattttaaccgcccatttcagtttgaaatgttttgttttgttttgttttttcgacacggagtctcgctgta

SEQ ID NO: 209611 - DNA, 122 bp, Homo sapiens
gtgcagtaaatattgtcatatgaacgaattaaaaattttgatcctccttcaaaatggtaacgcgtaagactcttatacgtcaacaaaaaataaaagtaaagacaaggtcaggaactggccag

SEQ ID NO: 209612 - DNA, 122 bp, Homo sapiens
cttcattctctaccataccacttgtgcatgcatgtgatgttctaataccaattgaagaaccgctgtaggtacctccctaataagatttctaaacctatagttagtgtgatcatgactttgtc

SEQ ID NO: 209613 - DNA, 122 bp, Homo sapiens
agcctcggggccttgaacctggagccggggccttgcctgggctgtcctggctgggagtctcgtgctgtgccccccgcttcctcattcccccaccccaccctcctaacccttgttgtgtttca

SEQ ID NO: 209614 - DNA, 122 bp, Homo sapiens
taaaactttctccagcaggtgctgtgttcacgctatcaatacatcagcatcagcagcaagcgttaagcacggtagacagcatcaccagggtcaactcaggccgagtggagccgctcaacacg

SEQ ID NO: 209615 - DNA, 122 bp, Homo sapiens
cctccagcaccacagagcgggccgtgctcttcggggtcactcgcacggacacgtaggccacgcccaccctgtggggacacagtctgagctggagctccccccaccccgcccagcagaccctg

SEQ ID NO: 209616 - DNA, 122 bp, Homo sapiens
aggcggggtcggggcccgaggggagcgctcagctgcaagctgcgctcggcgtctccggggcgctggtagtaaacagctgcacgttttccagctttacgtgtagcaacaaatccctggcgtcg

SEQ ID NO: 209617 - DNA, 122 bp, Homo sapiens
ggccccgccccgtgcttccgtccctctgcaggtccaggtacgtgtggccaagtgtggggtcgccgcgcccccgccccccagggacctcgcgtccccttttcccttgtcctttaattcgggtc

SEQ ID NO: 209618 - DNA, 122 bp, Homo sapiens
gacctcctgctgctgaccaggatcccaagtgacctgccacagacgccacagttccaaacacgtccgcctcagcaagcgcctgtccccggcaaggccagggttcctctttaacggttttccgg

SEQ ID NO: 209619 - DNA, 122 bp, Homo sapiens
ccccgcagacgtcctgctatggcctccatcagcacagatgttggccacagacagcatacccgggttcgccccatgcttttctacttcctcagcacaaggaagcacagctccttgagggcagg

SEQ ID NO: 209620 - DNA, 122 bp, Homo sapiens
ccgccctccccaacccccctccccccagccgtggtcgcttgtgcccaggggactcaaggccgctctgcctctccacccgacagtccgcaaagcgggttccaaaggagaggggcgagcgaccg

SEQ ID NO: 209621 - DNA, 122 bp, Homo sapiens
tctattaaaaatgcaaaaattaggccggcatggtggtgggtgcccgtaatcccagctactcgggagtttgaggcaggagaattgcttgaacccaggaggcagaggttgcagtgagccaagat

SEQ ID NO: 209622 - DNA, 122 bp, Homo sapiens
gggctgcactcctgcaggactaaaggaggctttctctggttgagggctaccatggctgggcgggtgagcctgcctcctagtgggatttgcattagcagctcacttagttcacaggtctaaag

SEQ ID NO: 209623 - DNA, 122 bp, Homo sapiens
gaattaaggtttattcttcttctcccttgtcccccacatatgggaaatctagtcagaaatcgtagaagctccctcatctgatgccaatgtgaggtttaaatcacacaagctccttctcctga

SEQ ID NO: 209624 - DNA, 122 bp, Homo sapiens
gaggaacctaaggctcagagtggggctgggacttgcccaaggtcacacagccaggggattcgaagctagatctgtcttacttgagcaagggtcttcttaatcaccacatggtggttatcaac

SEQ ID NO: 209625 - DNA, 122 bp, Homo sapiens
ccaacgccctagcgggtggctgggacccctgggttcctcccacgtccctgcctccagtcccggcgcgaactccaggtgtcgcccccaactccggcttagagcctacggcaccccgagcctcc

SEQ ID NO: 209626 - DNA, 122 bp, Homo sapiens
ccacatttccccttggcactgccctaacaagggctctctacaggggcaccacccctgcagcgggcttctgcctaagcaagcaagttttccgatacagcctctgaaatctagggggaagctgc

SEQ ID NO: 209627 - DNA, 122 bp, Homo sapiens
ccagcatggttgggttctgtgtccctcttcctgacttgtagacagctgcctttttgttcacgtggccttgtttgtttgtttgtttggtgcatgcatgtggagagagatctttctcttcctct

SEQ ID NO: 209628 - DNA, 122 bp, Homo sapiens
ctgcccccgacgggccaaaacaaggacaagtggcgaggactgggcctggggatggccctgcgggtccgggcgcggcgcaagtcctgctttgtctccaggtgactggctgtccaggacggcgg

SEQ ID NO: 209629 - DNA, 122 bp, Homo sapiens
gttcgggaggcggaaaaagatgagcgcgctctgaagcaggagattcacgagctgcgagggcgcctggagcggctggagcaggtgagccaagcctgctgggtggggcgaggccagacgtcact

SEQ ID NO: 209630 - DNA, 122 bp, Homo sapiens
taaaatctcatttaatcctcacaaagacccagtaatggcgcgcttgtagtcccagctagtcgggaggccaaggcaggagaatcgtttgaacctgggaggcggaggtttcagtgagcccagat

SEQ ID NO: 209631 - DNA, 122 bp, Homo sapiens
ctgcgctgagccccagtcgccaacaaatgagcgagcgagtctggggacgaaccctggggccgcactgttggtctacgtgtctgtcagtctgtctgcctctcttctgccgccgtcagagggac

SEQ ID NO: 209632 - DNA, 122 bp, Homo sapiens
attacctgtagggtctccatcaggaagccctaggtgccggcaagaagggtagtggaaagacgtgacctgccctcaagcagctcagcctcacggggaaaagaaatgtgtaaagagctgaactt

SEQ ID NO: 209633 - DNA, 122 bp, Homo sapiens
atgtttttatttcagtgaccaccacttttttattcactgagagactttgttctctaaaatcgtagattatcagaaacttttctgcttgaaatcgtatcagtaagaatgaaacatcccacatg

SEQ ID NO: 209634 - DNA, 122 bp, Homo sapiens
aacggagacgcgccaagcaaagccgttacacggactgtgcacgcgcctccggtgtccctgcgcgtgacacaaatttggccccgagggagctccgtgtgctcagcctcagagccgtaggcgag

SEQ ID NO: 209635 - DNA, 122 bp, Homo sapiens
tttttcaaaaacgtgttacaagaagaatcccacactggcacggagaccctccagtgagcgcggggcatggtcttgccacttgcactgagccctggctcgcctggagctagcggaacccactc

SEQ ID NO: 209636 - DNA, 122 bp, Homo sapiens
ctcagctctcgggtgagctgagctggctgccgggtgagggggcgggcgggctgctttctccggattcgggggcgcagaacctcctccttccctcccacacaagcaccccttcctggtaggga

SEQ ID NO: 209637 - DNA, 122 bp, Homo sapiens
agccatggctcaaggccgggctctgatagtggggccgggtttcaggtgcgagtccagactcgtggcccagccgtgggccctccattgagaaagggtcttggcccaggtgggctgcggtaggg

SEQ ID NO: 209638 - DNA, 122 bp, Homo sapiens
tccgactctacggacccaggtcgctgtggcccatcgctttcgatttgacttggtttctgtcgccactcgcggaaggcgcgccccccgccctcgctcggcggcccgccccgccccgcccctgc

SEQ ID NO: 209639 - DNA, 122 bp, Homo sapiens
ttttctggaaaacaaggataaataagttttttgaacatttttctcccctgaaactaaatccgtaagagagttaaaaacccgtggaaagcgagttaagtcacttttcaagtctttgtactcag

SEQ ID NO: 209640 - DNA, 122 bp, Homo sapiens
gacctcaacgcttgtggaaagttctgaggcccaaggggaccctctataattggtgagggacgtactcagttcaaggtttataagaagaggaaatgttttgccctggccgcgtttccttttcc

SEQ ID NO: 209641 - DNA, 122 bp, Homo sapiens
ggcggggcgggacgggacgggacggggcgggacggggcggggcagggcggggggatcacgcgcctatagcgcaaagctgcggtatggagaaaagcctagaacccacagccgccatgatgacg

SEQ ID NO: 209642 - DNA, 122 bp, Homo sapiens
ccaacaatgaggagcagaatgcaaggggcggcctcgctcccctggccaccgcgggggtcgcggcctcccattacatagcgcgtgtctcgagccctggcctgctctcggcaccgccacaacgg

SEQ ID NO: 209643 - DNA, 122 bp, Homo sapiens
cgttcgaagatgaccgtgtcggcgcccttggtgtacaggcagatggcgccctctggctttcgaactgtgggggaacaggccctgctgcccacagaggctccccgtctgcccgccccaccttg

SEQ ID NO: 209644 - DNA, 122 bp, Homo sapiens
tctgaggcccagacgtagaaggacagcagcctgtcaacagcagggccgcccttggcaactcggctctgtgtccccaaaacactcccgagagctcagggaggccccggggatctcccctaatc

SEQ ID NO: 209645 - DNA, 122 bp, Homo sapiens
gccagcagcagcacagccaggagcagcaccagcggaagccacatcacgccggcgtcgggtcgggtaaatgggacagctccgactgcgctcagcctctaggactgtggctccgcccgggctag

SEQ ID NO: 209646 - DNA, 122 bp, Homo sapiens
ttgcacgccacaccacaacctgcccctcccctccctttagcccccaagtcgaatccccggcgaaactcacttgcactgcgggtgctctctggcccccaccccatcatcgcgcaacacacccc

SEQ ID NO: 209647 - DNA, 122 bp, Homo sapiens
tactttttaacccaatctgtttgggattgagggcgggactccagggtccctgggaggccccggcagccgcgcatgctcagagcacagggaccgctccacctcgtccgtggccctgcccaccc

SEQ ID NO: 209648 - DNA, 122 bp, Homo sapiens
tcattcgtattcattcacaaagacttactgattaagcaaatccctacttgacaacatctacgtattgtttgtaacttcaatttttgaaagatttcctcccaggaagagaatgcaggccactc

SEQ ID NO: 209649 - DNA, 122 bp, Homo sapiens
acggggaaaaggtggctctggccggggtggctcggtttcctggggctatgtaactgagctcgtcgacttaggggtccttcttcgctgccctcgccgcgtgctagcagggagtttccgctcgg

SEQ ID NO: 209650 - DNA, 122 bp, Homo sapiens
tactgccaggcatgtgggtgtgggtgcatgtgggtgtttacacacatgcctacaggtatgcgtgattgtgtgtgtgtgcatgggtgtacagccacgtgtctacctatgtgtctttctgggaa

SEQ ID NO: 209651 - DNA, 122 bp, Homo sapiens
ccccaccgacctgagtcgccccctttgattggccatccccacggccttccctccgccttccgccgagactcagaaatagtctgtcctgaagcaatccggcgctggctcctcattggacacga

SEQ ID NO: 209652 - DNA, 122 bp, Homo sapiens
gttatgttgtgagccgtggtattaatcagccacccctcactaggtgttggggttccaccacgcttcctccaccccccgtcaccacagcagcgggtagtatttaggttgaatattccaaatag

SEQ ID NO: 209653 - DNA, 122 bp, Homo sapiens
tatagaaacagaaagggtagtatgggttgtttagagctgagtaaaggctgtcacgcgaatcgtgtggtggtacctgaaggacacgtaagttcttcttcaggtaaagaaaatgctttaaaatt

SEQ ID NO: 209654 - DNA, 122 bp, Homo sapiens
agtgccggaaaggcgggcgggactcccagttttctggcgaccggatgggcgagtcttcgtcgggcctgcttagaccctgagggccgtttagattacagttttgcttttcgtgctgctgttgc

SEQ ID NO: 209655 - DNA, 122 bp, Homo sapiens
cgggcgtcgcgggtgcgggagctgcagcccccgagaatagctacaggctggggggcattgcggtctgagccttccctcggcgcttcttcccgccgcctcagtacatacaactggaggcaaga

SEQ ID NO: 209656 - DNA, 122 bp, Homo sapiens
gctcccaacggccgtggcgtgcgtcacccttgcgtcgcccttgcgtcgctgcacgtggggcgtgggccctcccagttctaaaaagcaaaagcaagtgaaagaaaagcttctgctaggccagg

SEQ ID NO: 209657 - DNA, 122 bp, Homo sapiens
acaaaaaaatgaatggctctttgaggtgccggttactccgtctggctcataacatcttttcgtctgcacgcccaagtttctagagtgcttttacggttaacccgcagagttcctaacacact

SEQ ID NO: 209658 - DNA, 122 bp, Homo sapiens
gcaaaactttggcgtctctgaaaacctctggtaaccagctcccttctagcgtgagggagccgggaggcctccttctggcccggcagtgagagcgtcgccgcccgaccctcccgttgcagcac

SEQ ID NO: 209659 - DNA, 122 bp, Homo sapiens
gtgctttcccggcggccatcttgggagtctgaaggacctgaggcattttgtgacgaggatcgtctcaggtcagcggagggaggagacttatagacctatccagtcttcaaggtgagggcccc

SEQ ID NO: 209660 - DNA, 122 bp, Homo sapiens
tgccagctcttcctgggcatcccaaacctccacgggctctctcttgtggttaaatgacagcgtcttacttctcatttcatcttcccagggagagcgttcactcactctcagggcctgggctg

SEQ ID NO: 209661 - DNA, 122 bp, Homo sapiens
cccttggggccttgtcagtcggtgggtgggcttcgtttgacagttgcgtgaccagcccctcggcctcgcttctatccttgccttgtgtgtttatgacgaaccctccgggcttgcgggcccag

SEQ ID NO: 209662 - DNA, 122 bp, Homo sapiens
accgccgcgccggcccgcctgggcctccccggtcgccctcccaccgcctcaaccaccctgcgccccgatcgcgcccaacccccggcggggggctcccactcacttgtctttctcggtgccga

SEQ ID NO: 209663 - DNA, 122 bp, Homo sapiens
gcgtcgagcccacacgcctagagacgcggccaggcacccccgccctcctcgccgcgcagtcgcgcacagtgagcaacagtccagcaccaacccggcttaactgcgcctgcgcactccaggag

SEQ ID NO: 209664 - DNA, 122 bp, Homo sapiens
tgggtaaagacgaatttagaacacagcggaggtaggagggcaggatggctgtcaggcacacgaaagagcattgagtggcagaaacgaaatgctttcagagggcagggttgaactgcggccag

SEQ ID NO: 209665 - DNA, 122 bp, Homo sapiens
aggtcggacgacctgctacgtaactcgcgcgtgtgactgcctagtaacagtgtctcgagtcggaagcgctcggagcgaggggcggggtgggagagctggcgcgcgcacgcgtaaagtctttg

SEQ ID NO: 209666 - DNA, 122 bp, Homo sapiens
gagctccagcgagggtagtgtccccacacccacggggcagagctgtcggaggagggcacgcggccactgggactagcgagctggcacctctgcccccaccccagctgccccgccagggtcgc

SEQ ID NO: 209667 - DNA, 122 bp, Homo sapiens
ccaggacacagttgggctgacaggtctccgcaaggcagctgccctggagggtccctcagacggcagcttggggtgcagctctgggcgtccccaccgtgggacctgcctgccttcacggccac

SEQ ID NO: 209668 - DNA, 122 bp, Homo sapiens
ccttaacgttgaagagagctcatttgtactacctacattctccagaatccacttgtatttcggggacagttacactgatgttaatgagcttattgcttatacaaccctgcaagatataatgt

SEQ ID NO: 209669 - DNA, 122 bp, Homo sapiens
ccctcccctagagttattttaaaaagtatttattgtgtaaacatgcaacataaaatttaccgttttgactgtttttaagcgtatggttctgtggcatgaagtacattcgcattgttgtgcaa

SEQ ID NO: 209670 - DNA, 122 bp, Homo sapiens
acagcatccaagggagtgggttttgtgcaagggctgggggtctcctgcctctcctggtgtcgccggtggctcattttctggcaaatggaggcacgaacgcaggggccaaatagcaataaatg

SEQ ID NO: 209671 - DNA, 122 bp, Homo sapiens
caaggctggattgagacagacaggctgaaaaagtcgcagcgcagccgcagcggcagcagccgatggccgactccttccttttccagtccacgtgcccaggcgggtctccggccgcctctcgc

SEQ ID NO: 209672 - DNA, 122 bp, Homo sapiens
tgtgaaggatgtggcactgaatagacagagagaaggacatgtttacattatgagagctgacgcaagaaggtagtgtgtccctttgttcagcctcagctgggaacatacgcatcggacaagca

SEQ ID NO: 209673 - DNA, 122 bp, Homo sapiens
tcaatgcctgcagagagcagccacagggcatcctgggccaagattccaccctgtggccaccgcaaaaaaccacagcagcaatgtggtagcttgaaaccagggaatgtggcggcaccaagcct

SEQ ID NO: 209674 - DNA, 122 bp, Homo sapiens
agctctccccaatacctctccctctatatccccgcccccgcctctgatccccgcaccgtccggcccccacctcagaaaccgtctctcgaggcgaccctcgccgcaattctcagaacctcgca

SEQ ID NO: 209675 - DNA, 122 bp, Homo sapiens
cctcacttctagcccaaactttggataaactaacataaaggttcaggctttcctaggaggcgtcgtccttgttctcccagtgctcgatctgtttctggttctgcacggtagttaaaaatgca

SEQ ID NO: 209676 - DNA, 122 bp, Homo sapiens
aacccggggagggcaggcacggcggggagcagtctcgaaggaggctggcgccaggccaagcgccgggccttgacggctggaaccgtggagtaaagtctttgggctgcgcatgcgcgatgctt

SEQ ID NO: 209677 - DNA, 122 bp, Homo sapiens
gcgggccccgcaagccctaggagctgcaggaatcctcgtaaacttacagttttcctacagcgtgcgcgtcacagcggggtgacgtcacgggcccagcagtcggggaggtcaagccacggggc

SEQ ID NO: 209678 - DNA, 122 bp, Homo sapiens
gtgtgaggagaggttccccgctgcttcaagtcggggcccgacgggttggagccgaggccccggctctgctggagctccagagcccgagtctttcttaagaggcaaagctttcttaagaggca

SEQ ID NO: 209679 - DNA, 122 bp, Homo sapiens
ctcctgcagcgccgcacccgcaggctcccgggtccccagtcccggcgcagcgcgagctgccgtcccgcacctcgcgggcgcgaggctccagcccagctcgtctccccacagccccggcggcg

SEQ ID NO: 209680 - DNA, 122 bp, Homo sapiens
tgggctggaagggaacccactgtcttgaggggtatgaccaagtcctggcagggttcatcacgtgctgactcaagagcctctgggctctgaataagcagtagtggtagccaggcagtactcac

SEQ ID NO: 209681 - DNA, 122 bp, Homo sapiens
tgtgtgtgtgtgtgtgtgtgtgtgtgtgtgtctgtgtgtgtgtgtgtgtgtgtgtgtgcgcgcgcctgaacaggacagcaccaaaaacaaggagagaaaagaaagttccactggagccagca

SEQ ID NO: 209682 - DNA, 122 bp, Homo sapiens
gggtgtggtggactgcggtggtcccaaccctatgccctgtgtccaccaggctgctacccccggtgccccaaggacaggcccatctatgaggaggatctgaagaagtgtgtcactgcagacaa

SEQ ID NO: 209683 - DNA, 122 bp, Homo sapiens
acacacacacacacacacacacaacaaaacgccaagacgtgccagtgtctacagcgccttcgggggcatttaaattccccaccaggaaaccgagaccgatgctgaggtctcgcctattcctg

SEQ ID NO: 209684 - DNA, 122 bp, Homo sapiens
tgtagcagaaccccaacccccggcctgagactccagggatcggctgagctcgcgggctaacgctgtgaagcctgcccagctaccgtgacgtcacgagacccccgctatctcgttggtggcta

SEQ ID NO: 209685 - DNA, 122 bp, Homo sapiens
tggtggggaaaattcaggagggttctgatagctacgaacaagcgatgtcctacgttgagtcgcaaatcaagaaattagccagcaattcagatgtattttctaaaggaccattttgtccccat

SEQ ID NO: 209686 - DNA, 122 bp, Homo sapiens
tgacgccctggacagggggagcgcgttgcgctgccccctcggtgccgcctcactgggcctcgtggctccgatcacgttccaacttcgcggccactgaccttgtcttcgcaggcggcgcgaga

SEQ ID NO: 209687 - DNA, 122 bp, Homo sapiens
gcaacatcaaagtttttttaaacacatgaaaatcagaccactattaattaatttagtcatcgtaatttgtctttccccaaataacttgaaacctcagacattattctctaggtctcatattg

SEQ ID NO: 209688 - DNA, 122 bp, Homo sapiens
gtatgaccaaagtacttttctctttggtggcacatcacaatggatgcaattactcagatacggtcctgaaatgagaacaaacgccatctatgctgataacagcagtcactggtgttaatccc

SEQ ID NO: 209689 - DNA, 122 bp, Homo sapiens
aagtacatggcgattaaatggtcatgtggccgtgctttccaacaaaaattccagacacatcgtcttacatgtagcatgaggactggaaatatttgaaatcagggttgtcttggactttccaa

SEQ ID NO: 209690 - DNA, 122 bp, Homo sapiens
ggggattgggcggtgagtaggtgtgcccgccctggctctgctggcactgacagccgacgccgtcgcccacgcccccctgcgcccacttccccgcctccgctctcccgcgggggcggcttctg

SEQ ID NO: 209691 - DNA, 122 bp, Homo sapiens
agaactaacacacttttcttttatcattttagttgagaaatgctatggtgaatcgaaagacggggaagttttccatggaggtgaagaagacagtggacaaaggggtacatttttctcaaaca

SEQ ID NO: 209692 - DNA, 122 bp, Homo sapiens
gcccggtcagctcggcgcctcctcccttggcgactccgcctcgggccgctgccggggctccgcccacttgagccgccgccacgtccccacctcacgctccacacgcctgcctgcgtcctggt

SEQ ID NO: 209693 - DNA, 122 bp, Homo sapiens
ttcgagttctgcatgtgtccaggtggccacagctcagggctcggagagggctccgccctgcggttctgaaacccagcagccacgttaattgcctcttaacgcgcgctgcatgttgctgtatg

SEQ ID NO: 209694 - DNA, 122 bp, Homo sapiens
gaagcacagactctaatggcttccggttgttactcaaccgttagggtcccttcccccttgcggcgcgcggtcccaaattgaccctgggtctcttgaaaaaatttctgcttgccacctcccac

SEQ ID NO: 209695 - DNA, 122 bp, Homo sapiens
ctccctggccttggctgtgctcctgctgctggccgggctgtatcgagggcaggcgctccacggccggcacccccgcccgcccgccactgtgcagaagctctcccgcttccctctggcccgac

SEQ ID NO: 209696 - DNA, 122 bp, Homo sapiens
tcccggccaaaatctaaaccaggcgcaggtgaggtcccctcaagcgcgtcaaaggggacccggctcctaacactcacaggccgcgacacgcacgcggctcaggacagacgcacacagcgagg

SEQ ID NO: 209697 - DNA, 122 bp, Homo sapiens
agacaacagcagcacagtccttaaaaatcaagcagaggggagagcaggtgcctcagctgccgccgtccgctgcttctccatgacagacgctgcgcccgtcactctgtgccagtcccccatgc

SEQ ID NO: 209698 - DNA, 122 bp, Homo sapiens
accctgaggagtccgccctgttgttttggctttgttgtgacagggggtggatctgcctgccgttcgcaagcaacgcgggtgcaaaacagccaacctgggtgcagacctcaggggcctgcgga

SEQ ID NO: 209699 - DNA, 122 bp, Homo sapiens
ctccgcacaaagtatgtgcgagtaaagacagtgaatccaaatatgaaccagcaaaatggacgcaacctctcaatgtgtatttaaagaattggaggctttgagctctgtcggggaagggcccc

SEQ ID NO: 209700 - DNA, 122 bp, Homo sapiens
cagcagactgtgcagtggggcaaggatttcatgagcatcctcctctaaacgcgtgagtggcgtgctccccccagtggcaccacacgtggtggtctttggaaggctttgggggcaagaggcag

SEQ ID NO: 209701 - DNA, 122 bp, Homo sapiens
tctggtctgacacaagccaccccctctaatttaacattatcaggaataaaggtgctatttcgatcttcatttctctggctcttggtctgtcaatggagtggttctgtagtcggagagggtga

SEQ ID NO: 209702 - DNA, 122 bp, Homo sapiens
atgacgtgatcgactgcgaataaagacctgggaacagcctgcccagcaaatggtaacactcggcagaaagtggggccgtcacgaacgctggacaggagggttcaagttaaaaacagtctaga

SEQ ID NO: 209703 - DNA, 122 bp, Homo sapiens
ctagcagtgacctcagggtaaaattgatgtcagtgttcctttggggtcgactgggcaggccgtggagacagtctgggttttcaacaagcttccatctccagaagaggtcctggggtcgctgc

SEQ ID NO: 209704 - DNA, 122 bp, Homo sapiens
aggaggcctggcgggcggcggcgagaggctgtgccccagtttgtgtccaatcagggagtgcgggctgtgccccgagccgggcagcaatgcgtaaacaaacccacggtaactcctccgccccc

SEQ ID NO: 209705 - DNA, 122 bp, Homo sapiens
ttttctcctagggatgctatagatagactgggttttctcaagaattttcagagaatttatcgtgtttctggtgaatggtgttaaagagcctctttctgattacagccctgccttggacaaga

SEQ ID NO: 209706 - DNA, 122 bp, Homo sapiens
gacgtcggcacacgctcgaagcagcggacaggcacctctctgtggacaaggcagactgggcggccgagattccgcatagatgcctgcttcctccacgacctccacgtgtggctggcccagtc

SEQ ID NO: 209707 - DNA, 122 bp, Homo sapiens
ttggagcgtctagagtctggctactgttcctccgcctccctctcgggcagctccctaagccggctgggacgcgcagagtgaaaatggtccaccattcaggctccattcagtcctttaaacag

SEQ ID NO: 209708 - DNA, 122 bp, Homo sapiens
gtttggctgcgaggtggctgtccctgcattctttcaccaggtttcaagactccttgcattcgcagtacccccattcccatccacagagggcaggccgtagacactgggttggcagggcactg

SEQ ID NO: 209709 - DNA, 122 bp, Homo sapiens
cggcgcgcggggaggactcgggggcgccgagaggaactgtccgggaaggggcgcgcgggccgcgggcggcgcggggtcggtaacggcccgtgcggtgggcggcggcgcccgaggcccctccc

SEQ ID NO: 209710 - DNA, 122 bp, Homo sapiens
cgcccgcccccctggcctggccgaggaccccggggtttggacgtgccaacgccactctcgcgcgccgaagctgtgacggtttactaagcagagacttgcgaggcacacagagagggaatgag

SEQ ID NO: 209711 - DNA, 122 bp, Homo sapiens
cagtgggagacctctgggctgccaaacataccagggagaggaaaggtgatgggccccaggcgttggcacagctgcccagtgaagtggggtggaggcagcattcactcaggaaaggttacagg

SEQ ID NO: 209712 - DNA, 122 bp, Homo sapiens
tttccaacttgagccaggcatttgtctccaagcattcacgcgagatgggcagtgcggcctcggaaagatctgagcaaaaacttcatcctatccccctttccccgttctagagtgaagctccc

SEQ ID NO: 209713 - DNA, 122 bp, Homo sapiens
aatggacacagtaaagagcagaatctgaattgggaatggagaatttcattcaccttggcacgttttacatggagatctgagttggtaaccagatgaacctagtgccatgggtctcttctttc

SEQ ID NO: 209714 - DNA, 122 bp, Homo sapiens
gtggcgagagcagaggatgagaagagttgagaaaagtgtggggggtgctagtatttaaaacgtacacacaaagttgaggctgtggagttggcagcagtgggaatagcagggctggagtgagg

SEQ ID NO: 209715 - DNA, 122 bp, Homo sapiens
attgaaacacctgctcctagataaccagtcctgtttccagaattgtagaggaatcattatcggaaaggaagatgtctaaagaactgtctgagctttctaatcaaatgtgaatagatctcatt

SEQ ID NO: 209716 - DNA, 122 bp, Homo sapiens
gagtgtctgaatggaaactaactcccgacagaccatgcacaacgtttcttccacagcacccggatctcgaagccccactgggcatcaactgtcagtccctcactaggggggatgaaggggga

SEQ ID NO: 209717 - DNA, 122 bp, Homo sapiens
caggtgcctaatggcaaagccactaaggcactgagaagtcagaatgtggatcacatcttccgtccttcttcccagtgtgtgaatgcatcatgcgtgggaaagagagagaaggaaccattcaa

SEQ ID NO: 209718 - DNA, 122 bp, Homo sapiens
gattcaggaggagctactaggatgaatggctgccttgtgccacagctctacaggctttcacgtgtgtcatctcacgtgatcttctggggcgctggtgtctccgtttactagaggaccaatcg

SEQ ID NO: 209719 - DNA, 122 bp, Homo sapiens
gccataaaaatacaacatgtactacagcaggggcatctttaaagtacattgacgacaccccgcattgtgggcgggggtgtgtgggggaaggtttccaagaaataatgcataagctgggcctt

SEQ ID NO: 209720 - DNA, 122 bp, Homo sapiens
agtgatcctcctgcttcagcctcctgagtagctgagaccacaggcgcatgccacaatgcccggtgaattttcaaatttttggtagagataaggtgtcactgtgttgcccaggctggtcttga

SEQ ID NO: 209721 - DNA, 122 bp, Homo sapiens
ttgtggccccttggctggccatggcccttccctcttccctggtgctcagactcccaagaacgaagggtgaagcctggggtgggtcactcccatgccttccagtctcctgaaagttgatctgg

SEQ ID NO: 209722 - DNA, 122 bp, Homo sapiens
gaagttttttaaatatttgccccttggagttccccagagagaagcaagcatcggattcaacgggcaaagagcgtcaacttcaaaagtcgttcgttggttgtcataccacaaacatttactgc

SEQ ID NO: 209723 - DNA, 122 bp, Homo sapiens
agcgtgagggctccggtcacgcggcgcgcgagacgaacgagcgagatgcttcccgaagcgcggggcccagtgcaggggctcagccggggctcctcccaaagctcacctggagcccagcacga

SEQ ID NO: 209724 - DNA, 122 bp, Homo sapiens
tcgcgcggctgattcgcattcgacgctcactgtgcccggggagaaagcgcatccagcccgcgggagatctagcctctgtgcgggcttcctccgcccacgctgccccgggctgctgcgccaga

SEQ ID NO: 209725 - DNA, 122 bp, Homo sapiens
gtttggcgtgttcacgggcagcagccctgttttattcggcgtgttcacggtcagcagccccgttgtgcttggcgtgttcacgggcagccccgttagactttgggttttacctgtcaggcttt

SEQ ID NO: 209726 - DNA, 122 bp, Homo sapiens
ttacttcgccgagagggtgacctctctgggcaaggacttgcctcggccctgcctgaagtgcgagaatgtgggaagacgctgacctccgagggccacgctgagcacgaaagcaagccctactg

SEQ ID NO: 209727 - DNA, 122 bp, Homo sapiens
ggctcaggaaggagattgggctcgctccacacaccctgtcggcgacgttgctggtcagcacgagctcctggtgctgtccctcggcccctgcactgcaccgtctgcccctcagcccttcattt

SEQ ID NO: 209728 - DNA, 122 bp, Homo sapiens
ccctcattgccagggccggcgagttgctccgagtgagggcccgccaagcccacacccacccggaactccagctggcctgcaagctcggcgtgcagccctggttcctgctcgcgcctctccct

SEQ ID NO: 209729 - DNA, 122 bp, Homo sapiens
ctgaaggaggccaaggagaacgccatgcgggaccgtaagcgctaccagcaggaggtggatcgtatcaaggaggccgtgcgggccaagaacatggccagaagggcccattcagcccagatcgg

SEQ ID NO: 209730 - DNA, 122 bp, Homo sapiens
gtgcattggtgtggtctatactaatgctggcgtttggcttacttttaataaagtagagatcgtcagtacaataaaaggaccttttaataaaaggagcgggatggcaaaagggagttaactcc

SEQ ID NO: 209731 - DNA, 122 bp, Homo sapiens
agggggtcaggcggagaccaagagtagcagggggcgagggaagcccgggcaggccggcgccgctgctggcgcccgcagctcctgcccccacgctcacctgggacccggccgccaggaagcgg

SEQ ID NO: 209732 - DNA, 122 bp, Homo sapiens
gggcagggagtgcggtgctccccctgggaggctgtgccctgggtgctcgggtgtgggggtcgcccgcgctcctgggagccgagcaagggcgcgcaccccgcagtgggagaggggcttcctgc

SEQ ID NO: 209733 - DNA, 122 bp, Homo sapiens
atcctgtgctgaggagaatgcagctccgccctcccaaaggcacacagcgccagcgcagggcgccgagaagcgcacccgaacctgaatcctaaccctaacgccttcctaagagccctggggag

SEQ ID NO: 209734 - DNA, 122 bp, Homo sapiens
ttgatggccccccacaatacccactctctcacttttcaataataatagaaatgttttggccgattgtggtggctcacacctgtagtcccagcattttaggaggtcaaagcgggaggatcatt

SEQ ID NO: 209735 - DNA, 122 bp, Homo sapiens
gggcacactgcccagcaaacggcgcagggtggccatgcccggcagtgcccctgggcccggcgaggacaggcctcctccccggggaagcagccccatcctgagtgagggctctctcccggccc

SEQ ID NO: 209736 - DNA, 122 bp, Homo sapiens
cctccaacgtggcaagatggcacccacagctccagcagcctaacggaaatagatcttctccgcccagatgtttccaagacaatgacctgacctttggcactgagtgtgtcacatgagcaggc

SEQ ID NO: 209737 - DNA, 122 bp, Homo sapiens
gaccaggccgaggtcacacagtgacaagtggctgggctgggacctcactcactctcctaacgtcatggcttccatctgtttaaccctacgtgactgctccttccactgacagctgaaagaat

SEQ ID NO: 209738 - DNA, 122 bp, Homo sapiens
ctgaccaactgagatcagatcagggaggtcgtttgatcctgtgtacaccacagctgaccgcgtgtgcagcaggaccctcggcatgctctcaggagctgcagtccgggaaacacaggaaagct

SEQ ID NO: 209739 - DNA, 122 bp, Homo sapiens
cggaagatggaaaggcgagagtccaagacacttccgggctctgtaccgtaaagggcggggcgtagcctccaaaaggcgagatgttccggtcggggaggccctgagcagaggaacccgggtgg

SEQ ID NO: 209740 - DNA, 122 bp, Homo sapiens
aggttctattgcaaagtgctcgccttgtttctctcaatagctgactatgagatgataaaccgcttaatacactgtgctaattggatgagagcaaaaagagatgggaattaaggcgaggcaaa

SEQ ID NO: 209741 - DNA, 122 bp, Homo sapiens
agctaacttccatagacatcacataagagtgcacacaaacacagacacacaaccctgtgtcgtaagtttatgatttgggtgtgcttttgtgcaatttctctttgtgtcttatctctttattg

SEQ ID NO: 209742 - DNA, 122 bp, Homo sapiens
accctccctccctaaggaatgtgggccccgctttctgggcctgccagaccgagcgcctaccgcttcctccgcaggcaggagccgggacgctgccttcaccccaccctccgccaggatccagt

SEQ ID NO: 209743 - DNA, 122 bp, Homo sapiens
taggttacagtcatgcatatcagaggctgtgatgagcagggccatgaataattcccaaagcgagggggtctttgggctcattgctgtgtgggccagcccacattatcatacactaaaaatat

SEQ ID NO: 209744 - DNA, 122 bp, Homo sapiens
ggccgttcggctctcatagtggcggtgctgtgctacatcaatctcctgaactacatggaccgcttcaccgtggctggtagggactcacttctgggaggaagatagtctaggagaggggagcc

SEQ ID NO: 209745 - DNA, 122 bp, Homo sapiens
tgttttaagcttggccggcaatatggtgtctgtcctcgacaactcaactctgcattgaagcgcaatagcagccataaacagtaggtaaatgaatggccaaggtatgttccaacggaagttta

SEQ ID NO: 209746 - DNA, 122 bp, Homo sapiens
cccgactctcggtggggcgggggttgcggagactgaggagtaagcgatacggacgccccccgcactggcagtgcgggcgcatgcgcgcttggccaggtggcgcgcgctctcccagcccgagc

SEQ ID NO: 209747 - DNA, 122 bp, Homo sapiens
cctgggtgcatttcctctctgcacctgtttatgcccctggctttttgacacactgctgagcgcccgccgcccgcccctgttctagacacactgctgggcgcccgccgcccgcccctgttcta

SEQ ID NO: 209748 - DNA, 122 bp, Homo sapiens
acgttccctaggcgccgggtccggacagcgccgcgcagcccccgcgcaccccgcgccccccgcgccccccgggcccgccccgtatccctgaccgcgtcccctggagacactgcggcagcggc

SEQ ID NO: 209749 - DNA, 122 bp, Homo sapiens
ttaaaattggtgcaattcatccaaaacatttttcaaatgccattatttttcagcgttaagcgcttaaactgcttagagtgaaaaaggtctccatcagaaagatcgacttgcagaaaccaact

SEQ ID NO: 209750 - DNA, 122 bp, Homo sapiens
agatcctaggagcctctactctgccaagctttggccttggtaaaggagctgcagtgcctccgctttgccacagggtggcaacagttgcttcccatttgaggatggcggggtgaagcaaacct

SEQ ID NO: 209751 - DNA, 122 bp, Homo sapiens
gggttgagctttaggtatatttggttcaacttagatttcactctggcacagcaatggaatcgcagcactgtgacaatgcggaggactaagtgatttctgcctgcttcccagcctctcctcca

SEQ ID NO: 209752 - DNA, 122 bp, Homo sapiens
ggaactactccgggcggttaccaggcaggagcggcaggtggttgcccatgttgtgcgcagcgtcctgctgatctccttcgccggccatgtctgtttacccgcaaaggaggctgggacagggc

SEQ ID NO: 209753 - DNA, 122 bp, Homo sapiens
ccattggcacaggcagagctgcctctaggcgacttgcagtacctggtgcgtagggaaacccggctgtaccaggtgcacagagaacgggaagccggctccacggaggccgtgtgtctgccttg

SEQ ID NO: 209754 - DNA, 122 bp, Homo sapiens
cctctgtttcaccttttccgaggttggaagcggtttgctctcagctccatgagaagacagcgggggaaacgcggcaaggagcaaagcttggccagaaagcatctcttctttttatgtaacgc

SEQ ID NO: 209755 - DNA, 122 bp, Homo sapiens
aaggagggctccagggagaatgttggggccaacacgcaaagcgcgtcaccttccaaccggcggagagtgaaggaaaacaggtacggctcggcttgtaaccttcactggaaacagaaaccatc

SEQ ID NO: 209756 - DNA, 122 bp, Homo sapiens
ctcatcccaagaagaatcttctggaagcaaagacaacggtggggaagaggccatggttttcgtttcagaactatgcaaggatatttgaggagaggttatccgtgttatgttcgcttcattca

SEQ ID NO: 209757 - DNA, 122 bp, Homo sapiens
acctcccccacaggcgcacacgctggctgcttgcgttggcagcgacacacatccatggtacggctggttttcactcggattgattatgggaagggctatggattagagctcctgtaaagcac

SEQ ID NO: 209758 - DNA, 122 bp, Homo sapiens
aaataaagatctgggagtcatttataattccaaccagacgagtagatgggctggcccaagcggtgtgtagactgaagagattctaactcatgcaagataagcagctacgtggctcacggtca

SEQ ID NO: 209759 - DNA, 122 bp, Homo sapiens
ccagcctcattccccattctgtgtcccatgtcccgtgtctcctcggtcgccccgtgtttgcgcttgaccatgttgcactgtttgcatgcgcccgaggcagacgtctgtcaggggcttggatt

SEQ ID NO: 209760 - DNA, 122 bp, Homo sapiens
cccctgccttcgccttgtctctcttgttgtccatcttgcacctgaagagacaaaccggtccgcatcccaggttctggacagctacgccgcctccagagacctggaccctgctacctcactgc

SEQ ID NO: 209761 - DNA, 122 bp, Homo sapiens
tctcaggggccctggccctgaccgatacttgggcgggtgagtgcggggtccagagagaaacggcctctgtggggaggagtgaggggcccgcccggtgggggcgcaggactcagggagccgcc

SEQ ID NO: 209762 - DNA, 122 bp, Homo sapiens
gccgctagatgccgctccctcccaacgggagccgggcgcgggttcgtggccgacagatggcgcctgcgcgttccattcgcctccaagtcgccgaagagcgaacaccccaaacaatcccgaag

SEQ ID NO: 209763 - DNA, 122 bp, Homo sapiens
ggtccacgcagaggctgggctccagcccattggccggctccctccacggccccacggtcccgctcagttctgacacctggggagcttcaggagctaagctacgctacacggttcatggtgag

SEQ ID NO: 209764 - DNA, 122 bp, Homo sapiens
agggagtcagcgtctggaggggtggacacggcggcgcgcaggagctgtttccaggacaaccgagggccgccccacagtgtccgccccacagtgtccgccccttgcgtctcgccgctccgccc

SEQ ID NO: 209765 - DNA, 122 bp, Homo sapiens
gtcgctgatgcgcgccgcgtggcagaaggcgagccccgcgtgggagcgccccccaacccccgcagcctgggctgagccgcagagcccgctgcttcttgaagtagtagcttggagaagagagg

SEQ ID NO: 209766 - DNA, 122 bp, Homo sapiens
ctcaaggcctaggggcagggggcgctcgtacgttcgggcctcaggactccctgccgccgccgatgctgctgccccatctcagcacaaacagcctcagaccgccctggtgcgggggcgcctct

SEQ ID NO: 209767 - DNA, 122 bp, Homo sapiens
ggggtcaccccaaagcatcaagaaggcccataagggaagatatggcttgaaagcggaggtcgaggcacctgtggaaggaaaaaaaatggcacggccaaaaaagggggtgtgggaccttacac

SEQ ID NO: 209768 - DNA, 122 bp, Homo sapiens
gtggccaccctcaaccgacgcatccagctcgttgaggaggagttggacagggctcaggaacgactggccacagccctgcagaagctggaggaggcagaaaaagttgcagatgagagtgaaag

SEQ ID NO: 209769 - DNA, 122 bp, Homo sapiens
ctccttctcccctcccaggctgtctggactcctggactctgggcagcgcctaaagtagtccgtggaagctggcaatcactgtgatgtcactgatgaaacatctcaaaggaacaccctccgaa

SEQ ID NO: 209770 - DNA, 122 bp, Homo sapiens
ggccagagcctcagtccctgaacagtccccctgacattgcatggaaattcctaaaaccaacgtcatcattcttgaaacctccctctacaacaccataaatgcccttttctcctgggctgaat

SEQ ID NO: 209771 - DNA, 122 bp, Homo sapiens
gggatccggccaggaaccccccggctacaggcccttcaacaacacagccatcgtcaaccccggacttcctgctagttaggcccgcctcttccgcagccgaagtcccgccccttcctcccggt

SEQ ID NO: 209772 - DNA, 122 bp, Homo sapiens
cctgttccatcgttgtgtatgtgtttctgggtgagcatctgcatggaggggaaggactgccggacaggaatgcacagtccagttagggaagtccaggaaggaagaacacagccccacacctc

SEQ ID NO: 209773 - DNA, 122 bp, Homo sapiens
gccaggggggcggtttcgggactacgaagggtcggggcggacggactcgagggccggccacgtggaaggccgctcaggacttctgtaggagaggacaccgccccaggctgactgaaagtaaa

SEQ ID NO: 209774 - DNA, 122 bp, Homo sapiens
tcaacataccatgctttgatggtaaatcactaagtcgtcacttagtttgcctggtacgttcgagtagctgttgaagaatagatttcagtttaagatttcctttgtggctgtttttaaaatga

SEQ ID NO: 209775 - DNA, 122 bp, Homo sapiens
gaactagccatgatcgcctcatgtggagggcaaagttgcgccggggaacttgtgagcctgcggtgaaaggtaaccagcccccactcgaggtgccgggagggcgtctccgagtctcccacgcg

SEQ ID NO: 209776 - DNA, 122 bp, Homo sapiens
ggtggctccccgactcggggccccccaaggggcgtgcagttcttcggaggctcttgcctacgcgctccccggcctccacttggcctcgagcctggggaaggcgccgcgcttggctcttgaat

SEQ ID NO: 209777 - DNA, 122 bp, Homo sapiens
gcctgccttagttttcccctgcggctccagggccatcatcctccacaaaggatgatgaatcgaggctgtggacgaccacccaacacaagaactggactaagtccaagtaacactgacgcaca

SEQ ID NO: 209778 - DNA, 122 bp, Homo sapiens
tttgtctcccaagggacatttggcaatacctggagatctttttggttgtcatcatgggagcgggaatgctactagcagctaatgtttagtgactagggatgcgactgaacatcctgcaatgt

SEQ ID NO: 209779 - DNA, 122 bp, Homo sapiens
ggctgggggcatggggtggggacatgggggggggcatggtcagcctctcgaggccccggccgcagtctccctgtgcgcacccccaccccagtctcagctctggagacgcccggcgggtctcc

SEQ ID NO: 209780 - DNA, 122 bp, Homo sapiens
gccctttcaacccttacaatgccggagggcgcaattcctgggtcctgtgaccttggtgaccgacgcccgggacaagtcagaaagacccaagggcgtggaaaacgctcctcttaccgataaac

SEQ ID NO: 209781 - DNA, 122 bp, Homo sapiens
cctctggctagtccgaagaacgcgaaaagccaggcccaaggcactggttgtcatggcaaccggggcgctggtctccctggcgacctcgtccctagggaggaggtggagctggatgccaggcg

SEQ ID NO: 209782 - DNA, 122 bp, Homo sapiens
ggagctataaaaggcctgggtggggcgggcgcggcggcaggacagccgagttcaggtgagcggttgctcgtcgtcggggcggccggcagcggcggctccagggcccagcatgcgcgggggac

SEQ ID NO: 209783 - DNA, 122 bp, Homo sapiens
cattataagctccttaggagtagaaaactatctttaacatgaagcagtgtgttaggttcacgatggatctaaataagtgttgagtaagtgaaattatatgaatgactttgcgtatatatata

SEQ ID NO: 209784 - DNA, 122 bp, Homo sapiens
gactctccccacagcctctggcagtgaccagtctaccttctgtgtctgtaattttcactacgctacgtgcctcttgtaagtgggatcacacggtgttcgtcttacctccctgagcctaacgt

SEQ ID NO: 209785 - DNA, 122 bp, Homo sapiens
cgtgcccctcatcccgtagtccccgaccccaaggtcaccgtgaactaagcggatgatgcacgcgaaatctcaggagctcctcatggggacaaagcatgtgtcagatcctagacatttcagag

SEQ ID NO: 209786 - DNA, 122 bp, Homo sapiens
cactaaggctttcattgcccttagtgaatataacaggaaggttctccaggccatttttcacgtagccacctgtgcttcttagctctgcctttctatatatacctggctgccattcccacttt

SEQ ID NO: 209787 - DNA, 122 bp, Homo sapiens
gccaatgggaggccgcgagctgacgataggcgagattgattggaagcggccgtgggctctcgccgcgaggggcgtggcgcccccgccgggctttctgcctgcccatttcccaccgccgggcc

SEQ ID NO: 209788 - DNA, 122 bp, Homo sapiens
agaaggaggggccccccggtgggcggggccaggggcgggaccataagggaggtgttcgaccgggagagatgggcggggcttaggtgggtgggccgggtcagcggcgggagacagacttcaag

SEQ ID NO: 209789 - DNA, 122 bp, Homo sapiens
gtttgtgtgaacaaaatgatgacatctggaagagtcgtgatttcagcctgtcttggtcatcgtgtgtcaatagtttttaacaaggtgctggatgaaggtgactaaaaaatgcattctcatat

SEQ ID NO: 209790 - DNA, 122 bp, Homo sapiens
tgtttcttacacgctttctactccaggagctgctgctaaataatttctgctcagccatgtcgccggctccagatgcagccccggctcctgcgtcgatctccctgtttgacctcagcgcggat

SEQ ID NO: 209791 - DNA, 122 bp, Homo sapiens
ttcctggtctaatagcaactttgtgtcaaaagaaggaaaactgaaatctatatatccgtacgatggcattgctaaatggtgccaaattctgcatttgttttactaagatttttatagttttt

SEQ ID NO: 209792 - DNA, 122 bp, Homo sapiens
cgaaatgctatgtaatcttcaattactttttaaaatataacgtggaggtataaatcaccccggtaagaggtaccttttaattacgaggtgcagtggaagagctgaacattggaatctagctg

SEQ ID NO: 209793 - DNA, 122 bp, Homo sapiens
actccatacacagtcgctctgagatttgcttcagggcggagatctgaattcctgagattccgatggggccatgtgggcgtggtctcggagaggagataggcgtggctgggcggcatggaggg

SEQ ID NO: 209794 - DNA, 122 bp, Homo sapiens
tttatttaatttttgccttgcagtgtgcatgggagtgtgtcaggggaaagggaccggatacggcagtgtaccgagccctacgatgacattttcagccaagaagaagaagaatgcttcatcaa

SEQ ID NO: 209795 - DNA, 122 bp, Homo sapiens
tacccccacctgccccaccatatcccactgggataggctggggagttgtggcagtgtgggcgggcctggtgttgtgggtttgagctgggccgctgcccaagtctaccctgtggtcccagccg

SEQ ID NO: 209796 - DNA, 122 bp, Homo sapiens
cccccgcagctagcagttctgcagggctcgcagtctcctgcagggttttgtccgcaccgccgaatctcgcgcccagcctccctcaagagccgccgtttgaatctgcgcacgcggccctgaac

SEQ ID NO: 209797 - DNA, 122 bp, Homo sapiens
acctttgccgaggcaggcgtcgcagtacacgtgcccgcagttggtgaggctgaagcacgacgtcctgtggggcggctggaagcagcgattacagaacacccagttggccatgccaggcgggc

SEQ ID NO: 209798 - DNA, 122 bp, Homo sapiens
cggcccctttgtttcccgggcagggcgcggctatatttaggcggcaggtgtgggagcccccggcagccgggtcgcccgccggtcacgccccccacgtgacgcccgggcgctataaatagccg

SEQ ID NO: 209799 - DNA, 122 bp, Homo sapiens
aactctcagtgctaagagtagaggatgctagaatagggcaatgggaaacgcctgagtcaccggagggcctctttgattccgacagcccaatcactgaaaaggaaaaagagagagagagtggt

SEQ ID NO: 209800 - DNA, 122 bp, Homo sapiens
cgggtccctggtatccacggcgtcgagtcttccagccggagagaaaaactcacctaggaccggacctgggcctcgccgcgctgggagctggcattcccaattcaggaccagacacggtggag

SEQ ID NO: 209801 - DNA, 122 bp, Homo sapiens
gttcctgaaagggggaagaaaaaaaaaagctccctcttaaaagcctccctctgcctcagtcgaggacttctaaatgctatgaagtttgctagggctaaggcttcatggcaaacgtgttgtga

SEQ ID NO: 209802 - DNA, 122 bp, Homo sapiens
gtgtggagggagagccgcgggcgggagccggggctgcgcgcggcgctcgtggccggcgcgcggtctcggcagtcgccgaacttcactgtcaactgacgtctgctgggcttgactagggaaaa

SEQ ID NO: 209803 - DNA, 122 bp, Homo sapiens
acaaggttcctggtctcgggaagcttaccatgggggtgtctgtacgcgtgtgtgttcgtgcgctcagtggtggaagacaggacagaaaataaacggatcaacatccaaagcaacaaggtcat

SEQ ID NO: 209804 - DNA, 122 bp, Homo sapiens
ggtggataaagaacctgcctagaatattagcagcagaagtataattagaagctacctcttcgattaaaacaaacattcacaaatagacacttgggattttagtcaccactatttcaaagtag

SEQ ID NO: 209805 - DNA, 122 bp, Homo sapiens
cctcctggacggcagcgctgagttcgacgggaaggagctggtgctggagcgggttcccgccgagctcaatggctccatgtatcgctgcaccgcccagaacccactgggctccaccgacacgc

SEQ ID NO: 209806 - DNA, 122 bp, Homo sapiens
ggctccctgcgagtggcagaggaggtccaggaggcgctggagcagcagctccccacgctgcgccatgagcgcagccagctgcaggagcagctagcccagctctcccagcagctgagcgggcg

SEQ ID NO: 209807 - DNA, 122 bp, Homo sapiens
cgcccgcacgcccggccccgccccacgtcggcggatgcttgcgcggagggcccgcccccacggcccagccacgcccccacagctaggccacgcccccagctcaggccacgcccggttcccag

SEQ ID NO: 209808 - DNA, 122 bp, Homo sapiens
ctcggagccgcgagcggcccgagatgagcagcaatgactcctcccttatggtgcgtggcccgggcgctgtccgagggctccctcgtgactccccgcccctgacccagagaccgtctgccctg

SEQ ID NO: 209809 - DNA, 122 bp, Homo sapiens
tccctctgccctcaggaatgtgatttacaatctgatgaggccataaacctctacttttcacgtctgaaaaacagcaaagtatgggaaagaatgtaaattataaatactgaattcctatggtc

SEQ ID NO: 209810 - DNA, 122 bp, Homo sapiens
tgaaggggaaagggcaagcggagaccaccgtggtgtgccatgctccagtgtccagaggaccgtcacattgctcaaatccgcagccaggtggcacctccgcaagctgggcgtgtgatgcggtg

SEQ ID NO: 209811 - DNA, 122 bp, Homo sapiens
tatatttctcagggaaagacagttttggtctttggtctggctgttgtgggaaacgtatggcgagagctctggaaaaatccttagaaaattaaaagcttttgttgggaataggtctaaaaggc

SEQ ID NO: 209812 - DNA, 122 bp, Homo sapiens
actgcggagctaagcctcccatgtgcaatttgcatttttcctgtgaaaaaaagccgccttcgctgtagggagtcgcctcccttctccttgaagtcccctaagtcttagtttctgcatcgggc

SEQ ID NO: 209813 - DNA, 122 bp, Homo sapiens
acgtataaaatcctgttgccaagcagagactagaaccagatgacaaagactgaaaacacacgccatgtattgactttcctataaaatactcattacaacctaatccagtcatactcatttct

SEQ ID NO: 209814 - DNA, 122 bp, Homo sapiens
actgcactttgagaaccatgtcctaggccacatgctcagctcctgttgggaccagcttcccgcagagatggcctgccttatctctaccccacctgatcagaattctacagacaagggcccag

SEQ ID NO: 209815 - DNA, 122 bp, Homo sapiens
cttttcttccatctcctacctcctcccaattacatctgacttgggcatcaaaacaagactcgcctgggtccctgggctgaaaaataaagcttgcttgtgctggtctctacaccttgggcagg

SEQ ID NO: 209816 - DNA, 122 bp, Homo sapiens
actcgagagctagctgagcgaatgggccggcgactgtggagttagcgtcctcaatgtggacgccctgagctcccattaggagccgctggctgcggcagcaggggactagcgtgagaggtagg

SEQ ID NO: 209817 - DNA, 122 bp, Homo sapiens
gcgcctccgggccggtgaatcatcccggcagacaccaagagccgcggcagcagagaggagcgctgaaacatggctgaagcggccacgggctttctggagcagctcaagtcctgcatagtttg

SEQ ID NO: 209818 - DNA, 122 bp, Homo sapiens
aatagtgtttgtgctccatcttcttcatctgcagctaacctttccctctgggtggggatacgtgacttgaatatagtctggtgatgaagggatgagaggagggtcccttgttccaatgtgga

SEQ ID NO: 209819 - DNA, 122 bp, Homo sapiens
aataggaaagggttcatgaagctccagccctagtacagctggcgtccatcctccgcctgtcgctgccaacagggctgggagatggccactctcctgagcacactggactctgcagctgggaa

SEQ ID NO: 209820 - DNA, 122 bp, Homo sapiens
cctattcataatgatatcctcctgcaggatttgagccttctcctttgttgtgacggcagccgaggaggtggctgactgcccagacagccttatctctttcctacctttcaaggttattgtaa

SEQ ID NO: 209821 - DNA, 122 bp, Homo sapiens
atgacaaatcccttagatgaagagcaaatataggggcctgggaagacagcagtgctaactcggtgtgggtccaatcacagaatttaagagagatctttgcattatacaatcagtatgcatta

SEQ ID NO: 209822 - DNA, 122 bp, Homo sapiens
ctgattccaaattcatcttttctaactagctgcatctcacttgtcccttaaccaaggtgccgtcccagttcccatagggggccctttgtaatgacaggtacacaccttcatctcttagtttt

SEQ ID NO: 209823 - DNA, 122 bp, Homo sapiens
ggctccctgggatctgacagccgagggtatgcgccctggggtgcgccgggacccagagggcgagtgagcctcggttggtcggctctggagttcggttgtcagaagaacttttatttttcttt

SEQ ID NO: 209824 - DNA, 122 bp, Homo sapiens
ggggcttgccaagtgataaacagacccaggcgtgtgtggtagagttcgggttttttagcacgaagtgggtggctggagtttgcttgaaaacatcaattgactttgtgatcattacagaaatg

SEQ ID NO: 209825 - DNA, 122 bp, Homo sapiens
ctcagtaacataagggcaaggccaggtgcaagtagctcacgcctatcatctcagcattttcggaggctgaggtgggaggactgcttcaggccaggagttcaaaaccagtgtgtgaaacatag

SEQ ID NO: 209826 - DNA, 122 bp, Homo sapiens
tggaggaatttttggggacaactaacagactctgctacagactagaaaaagcacagcccacgacagaaaggaggcagtaagaagggtgagaacaacttcctgtgctgcttcctgggaagatg

SEQ ID NO: 209827 - DNA, 122 bp, Homo sapiens
actccccgagcgcgctgcggttcacacccgcagcctcggcgccggacgcgttgtgcggctcgctggcatttggagagatccagctcccgttatgtcccatggcgaggctgggactccggctc

SEQ ID NO: 209828 - DNA, 122 bp, Homo sapiens
aggccgggacgcatgcagcttggtgggggctgtgtccgaggtccgcagggagaagctgagcgacagccccagcagggacctactgctggcgcccactccccgcggccgctggccaagtgtgg

SEQ ID NO: 209829 - DNA, 122 bp, Homo sapiens
atttcccatcctcagaggtgactgtatcattctgttctcttatcaaatctgcaaatccttcgcctccactcaaagtttctggcttcacttgatatttctttgagaaaattaaaataattgga

SEQ ID NO: 209830 - DNA, 122 bp, Homo sapiens
gcagctctagatccctggagggaagcccaggctcctcccaagtgactgcacacagtgagtcggctgcatcacaccaggaataccattgagcaataggagacttcccagcactggtgactcca

SEQ ID NO: 209831 - DNA, 122 bp, Homo sapiens
tgaaaccctggctctacctaactccagactctttttctttgagatgggatcttgctctgtcgcccaggctggagtgcagtggtgcaatcatggtgcaatcacagctcactgcagccttgacc

SEQ ID NO: 209832 - DNA, 122 bp, Homo sapiens
tggccacagcaggatacattctctcaccgtagccttcgggcagttccggggactggtggccgtgtggtcggttctggggcgtctgtagtgaacctcgcacatcagggtttcgaagccgctgt

SEQ ID NO: 209833 - DNA, 122 bp, Homo sapiens
ctgaattttttctctcctggagacattgtgaaccacagaaggcaagtcagcttttgggggcgagttttaagtggagaaatatctccttctctaatgcttgcagttggctctgagggttgtgg

SEQ ID NO: 209834 - DNA, 122 bp, Homo sapiens
caggagccgtgggagaagcagggagaggcctcacaacctggcagctcgtagttcaaaaaacgatccatgtgaggctgcctcccggtttggggggctttgttatccttcgactgtggcttggt

SEQ ID NO: 209835 - DNA, 122 bp, Homo sapiens
cctcccgtgagcaagaatggacggggtagacgtgggtggtctgccctctgcggtcctctgcggtggatgagaacagatgtcgctcagagaacacaagcttcattcatgatgggggcggggct

SEQ ID NO: 209836 - DNA, 122 bp, Homo sapiens
taagcactaagcaaatcatgtagagacttccgtggccacatacaaaaaaaatacactgtacggaactggttctgaaaagacactaaacaaacaacaaaacccagcaataacatccctgaagg

SEQ ID NO: 209837 - DNA, 122 bp, Homo sapiens
ttatcgtgaatcactggagggcacggaacaagtcttacttctagaacccccagggcccagcggagtgtctgacacatgatagtcgatgttgattaaataataaatgaatgatgaacacatgc

SEQ ID NO: 209838 - DNA, 122 bp, Homo sapiens
acaagaaaatgggggcaagagacagccagtccccattcattccagctctgcataccctgacgtttcaccccagtttttctggaacaccctgattgatgtcaggtaatgaggacaggtgcctg

SEQ ID NO: 209839 - DNA, 122 bp, Homo sapiens
ttcacccttgtagtgtacacttctgtgagtctgggaggctttgacggctctgattcagaccgttttttttttacatgccccgccccctcctccatcaatcctctcatgcgcttttggagtca

SEQ ID NO: 209840 - DNA, 122 bp, Homo sapiens
ccagtccccttgctgcagttcatgaaaactggcactattctatggcttcccccaaataaccgttacttcagttaattagaaacaaaacataaatggttcctgatgacattcttgctccctgt

SEQ ID NO: 209841 - DNA, 122 bp, Homo sapiens
actttcagctgttagccaggcactgctcaatatgctcttgaaactattcaatctatgaaacgactctagccctcattaatagaatgaagagaaaaatggtatggggatatttttcccctttt

SEQ ID NO: 209842 - DNA, 122 bp, Homo sapiens
aactctttcaacatatgcaggtctcactttaaaaggtcttgaaatggagttcctaccagacggcctttccctagggttcataaagaccctttcaagccaccctcccgcgcgccgcgttacca

SEQ ID NO: 209843 - DNA, 122 bp, Homo sapiens
ctgcacgagcttggcgtctactacctggtgagtgccggcgcgcgggagggcgggtgagtccggccgggcgggagccggggtgaccatccgtgcccctcgcagcccgacgccgagggtgcctt

SEQ ID NO: 209844 - DNA, 122 bp, Homo sapiens
gatgcccacctggcaggtgagatcagggcgggcttccgggggtggggtccggcctaccctcgcgggtaaggagagaccgcaagtcctgggtgcgcagctcttcctggcgccccgcccctggc

SEQ ID NO: 209845 - DNA, 122 bp, Homo sapiens
tctgggaacccgcgcttttgtccttctgcgttgaaagacctgtattcagaacatcctcggcgctgataggtaggcttagcacacatatgaggagtcatggctgtgggaagactcagggaact

SEQ ID NO: 209846 - DNA, 122 bp, Homo sapiens
ccaagtgggtgttgatccagtgttgctgattaaagggctaagagttccctcagggccgcacgcgaccatccacacacatcccactcacaccccgagaccatcctgctcacatctgctcacac

SEQ ID NO: 209847 - DNA, 122 bp, Homo sapiens
ccaccccgcccctaccccgccccgtccccgccgcgtccccggcttcgccccgccccttctcgcccctccagctggtcccgaggaccagagcacctgatagggcggggcccctgcctccggcc

SEQ ID NO: 209848 - DNA, 122 bp, Homo sapiens
atcagtggcagtggtggggaagggtcaccccggggtcaggaactcctcttttttttttcgcgcctttctgggtggctgcccgacctcctgaggcaccttggctagcaagcgagccagtcttg

SEQ ID NO: 209849 - DNA, 122 bp, Homo sapiens
tacgtgtctgatttgattaatgcaaggtacatctttcaagaattccagataaaggagaaccgaaaccagtacttaaggacacagactctggagtcaaaaatccctgcccagccactagttgg

SEQ ID NO: 209850 - DNA, 122 bp, Homo sapiens
gccgcccggctcgctgaactctcgggactttgaccagaacatgaacgacagctgtgaggacgccctggccaacaagacgcggcctcggaaccgagaggaggcacggtgcccactaccgccac

SEQ ID NO: 209851 - DNA, 122 bp, Homo sapiens
ggtgtttttagtgtttcatttctgtttctcagcttttactcattttgctttggactgcagcgctgggtgggagttctcagttccattagctgaagaagttttagtgcccacaccccgttttc

SEQ ID NO: 209852 - DNA, 122 bp, Homo sapiens
acttccaccccggcaagcccctctgtcctatgcagaagggcgctcaagggaaggaagtgtcgttgctgttagagcctcacgtggaggagtcacttaaacaccagttttttactgcttaattc

SEQ ID NO: 209853 - DNA, 122 bp, Homo sapiens
tcgcccaataaggagtgtaaggacttggtccaccgggtcagaggggaatccggagatgcccgcccctccggctcccccaacccatcttcgttccgcctggtgttggaagagacaggcatggg

SEQ ID NO: 209854 - DNA, 122 bp, Homo sapiens
gccgctctgcacggaggcagcgccaagcaaatgtcgccttcccctcgccacccccggggccgccgccgccgccagcgagccccgagctcagtgtcgctcaaacctcccctcccggccccgct

SEQ ID NO: 209855 - DNA, 122 bp, Homo sapiens
ggggaaaatgttctaacaagtgaatgaagccttagtagcctaatattagtacctctaaatcgacagctctgaagaatatataaaaaattaatgcacgaaggacactgcctggcatgtaagtg

SEQ ID NO: 209856 - DNA, 122 bp, Homo sapiens
ggtattgctttgctcactgctgaggctgatggccagatggacccaggggttatcagaaaccgaagattaactacacagctccagaagactcagacctcaaaatacagaggtgctcactaatc

SEQ ID NO: 209857 - DNA, 122 bp, Homo sapiens
atgactgcctatagcacagtctgcatctcttctctgactcagcttctgtcagcagagcagcggggttacgagagctctgcagtgatgtggtccacaaataagatcttcccctccctttcctg

SEQ ID NO: 209858 - DNA, 122 bp, Homo sapiens
ggcgggggcaggtgtgtggtgggtggtggcctgcggtgagcagggccctcacacctgcctcgccccccaggtgtgaaacgccccagatgccctctgaattacttcgcctgccctagtgggcg

SEQ ID NO: 209859 - DNA, 122 bp, Homo sapiens
ctttgctgtccttaagtgcctgcccaatgtggtgttctgcttacagggggccttgtgtgccgggctctgctttctgtcatggatgatcacaacgtggattctttcatctccctctcctctcc

SEQ ID NO: 209860 - DNA, 122 bp, Homo sapiens
agaaggacgaaggggactcggatgaaggtgagcagggaggccgtggctgcctggccctcccggagtccctctttccccggggcagagcctgagcaattgtcagaaatacttctgagccaaaa

SEQ ID NO: 209861 - DNA, 122 bp, Homo sapiens
acacaagtccagtaattgacatgaagactcggagtcctgcgtggacggagcagccagcctcgacatccggaagtcacgcaggcaccagaacgcagcagatgcagtgacctggtaggctggta

SEQ ID NO: 209862 - DNA, 122 bp, Homo sapiens
accccagtcttcatctgccagctcttcaccatgcttctcttatctcagctaaaatgtttccgggccaggcgcggtggctcatgcctgtaatcccagcactttgggaggccaaggcgggtgga

SEQ ID NO: 209863 - DNA, 122 bp, Homo sapiens
ttctttgactaggaaagggaactccctgaccccttgtgcttccttagtgaggcaatgcctcgccctgcttcagctggtgcacggtgcacggacccactgacctgcgcccactgtctggcact

SEQ ID NO: 209864 - DNA, 122 bp, Homo sapiens
tgggggagggcggcgagtttgcggggctgcggcttagcatggcgggacctgcatttcctgcgggccgcgggttctgcgcttcctgggggcagcctgggctggaggccgcggccccgctccct

SEQ ID NO: 209865 - DNA, 122 bp, Homo sapiens
aagaacatagagtccttttgaaaacattaccagaataaaagatctacagagatctactgtcgtagataacaaaggaaagagaagcgtaatcaatcgatagatacaaacatttgggttaataa

SEQ ID NO: 209866 - DNA, 122 bp, Homo sapiens
tcacactgtggccaaggcgcaatctggacatgccatagcagctgagccaccatcacgagccgggctctgcataccgggtagggacgctggcccttcaggtccctaacaagcgcagcatgccc

SEQ ID NO: 209867 - DNA, 122 bp, Homo sapiens
tcctctactcactaccagccttgtaggccaggactggcagatcttcatctcacaaacccccgccccaccttcctcctgcctcttcccagcagcgccctagctgagcacctcagggacttctc

SEQ ID NO: 209868 - DNA, 122 bp, Homo sapiens
gaaagtctccggcaatgtcgcccacctgttagcgagcttgttcccctctcacctggggcccgggcctttgcaattcccctggggcccaagaaggaaggggcatgaccttgctgggtctaggc

SEQ ID NO: 209869 - DNA, 122 bp, Homo sapiens
cccgcctacctatcaatcatcgtgctccgctgtccagttggctggccaagggggcggggccgtcgtgtgacgtttgcagcccgccggccaggaagccgcgagatgcgtgacgagcgaagcgc

SEQ ID NO: 209870 - DNA, 122 bp, Homo sapiens
acgagtaaatctgagctgctcggggactttgagtaaacacagcctcccttctgccctctgcgtagctgcggtgtaagtttcacaatgcattttcacaacttaattaaaagctttcccctatg

SEQ ID NO: 209871 - DNA, 122 bp, Homo sapiens
ctcaagccccacctatacacaaaggctcactgtaagaattaaagaaagaggaaagaaacacgaatggtggctcaccagtcaagacagattttagagaaaacaaacctgagaggagtttctgg

SEQ ID NO: 209872 - DNA, 122 bp, Homo sapiens
gccctgaacccagaactgttttcttctgaaccatttttttcattattattaactaaagtccgtgtttattaaaattttcttaatttttacctaatggcctttttctgttccggcatcacacc

SEQ ID NO: 209873 - DNA, 122 bp, Homo sapiens
tagaataacgaatttcactttcctcagcattaatctgaggttcaaaccgctccatcgtgacggcggacaaatcctcaggttcaagactccatacgtcgactccttctgcagcccctgccgcc

SEQ ID NO: 209874 - DNA, 122 bp, Homo sapiens
tctcaacatcgcgagagttccggagagattgccgagaagacttgcgcgcaggggcggtctcgcgttcttttcgaggtcggccgcgtggctggaagacatggccactccagtcggtgttgagc

SEQ ID NO: 209875 - DNA, 122 bp, Homo sapiens
actttctggtttctgtaaagaattacttaagtgttctcttttaattatgtaggtgggagacgagtagcaggggaaggttagaacttaatgtgtatttttaacacgcaaaggaacttatgtgg

SEQ ID NO: 209876 - DNA, 122 bp, Homo sapiens
gctccaagttaaccagaacacaagaatcgaaaaagcctgtgagatactggtgctcgtgatcgtaagctccaggtcggggggttttcagatgaacacaaaaagggggctgctcccgtcccaag

SEQ ID NO: 209877 - DNA, 122 bp, Homo sapiens
gaataggaaagcccaaagctgaacaggcctatgagttgttcagtagctcaataatgttatcgaggacccaggctgtttctttcaccctaccctcttgtacacattggcttcatcctccagcc

SEQ ID NO: 209878 - DNA, 122 bp, Homo sapiens
atcttttacccatactatagcttaagtggtcatcctaatccataaccctgacttcactctcgggctccagtgcttcctagtgcctccagataaactcatcaccctgacctatgaggtccccc

SEQ ID NO: 209879 - DNA, 122 bp, Homo sapiens
acacgggcgagcaggtcccccctgaccacggcgcatctcacacgggcgagcaggtccccccgaccatggagcatctcacgccggcgagcaggtcccccctgaccacggagcatctcacgccg

SEQ ID NO: 209880 - DNA, 122 bp, Homo sapiens
cttgggaacagggaaaaagccggtgaccaggagatgacaagtcaaggttctccatctcaccgcccgcttccagcggaggcaacgcgcaggggggtgccgggagagagggggccgagccgggc

SEQ ID NO: 209881 - DNA, 122 bp, Homo sapiens
tggccataaatcacgtgatcaaaaattttttaattgaaaaagtataaggagatataagagcgtatagtgagggacctaatctgatggggtgggtagtcagcaccccaaatgaggactatttg

SEQ ID NO: 209882 - DNA, 122 bp, Homo sapiens
gcagagaacccttcctacatttggttgttttcaattgccttcagctcaaaatggtccttacgtggaagtgacatatttttatggtggtggtatattctgatctctttcaataataattgtgt

SEQ ID NO: 209883 - DNA, 122 bp, Homo sapiens
gaatctctataaggagaaggaaggaagttgtttttagcaaccatcatttccctgtcttaacgtgacactacttctgaacctcaaacactgaaactaggttggagcatttgtatgtgatactg

SEQ ID NO: 209884 - DNA, 122 bp, Homo sapiens
catgaatgcagcatttctgtcagtccctgcatgtgcatctgtgatgctgcttgattttcacggaataaatctgtgttttaagtgcactccagaagaagctatcaagggagtccagatctggc

SEQ ID NO: 209885 - DNA, 122 bp, Homo sapiens
cctgtttgccttggttctttctccccggggtgcaccggcgtttgtacgcatttgtgtgtgcgtttgtgcagggggaggggtggccagcgcccacggagcagcctccggttgcccgaaggcag

SEQ ID NO: 209886 - DNA, 122 bp, Homo sapiens
ctttgggtagcctccttcaaatagctgtggactctgagcaccctcaatgatatctgattacgattccctcaagtttacagttctggcagtctatcttccttcctctagtcaaaattctcttt

SEQ ID NO: 209887 - DNA, 122 bp, Homo sapiens
gggaggcagagtgtagggtgagagtgccggcacaggagcagatggcttgggttcgaatcccggctctgccactttgggtaaatgacttagtctccccacacctcactctcttcagctgcaga

SEQ ID NO: 209888 - DNA, 122 bp, Homo sapiens
atttttatataaggttacaactgctttataaaaatgtattcacaatgtcattaatctttgcgtttgtgctttatatcttctcagggcagaggttcttgaaatatgtactcaatcatttaact

SEQ ID NO: 209889 - DNA, 122 bp, Homo sapiens
ccggatccgtcaagtccatgggaaaagaatgcgcccctcgcgcttgactgacgaggcttgcgggccaatcggaatgtagtcaaaggagccgctaggcgatccaataggtagtagggggcggg

SEQ ID NO: 209890 - DNA, 122 bp, Homo sapiens
aggtgtggagtacggcagacattccaggaacctggaatgtgaaacgcacgtggaaacgtccggccctgacatgcacggtggtgggaatgtggctgctcaaagcaagtggggaatcaagactt

SEQ ID NO: 209891 - DNA, 122 bp, Homo sapiens
aaacccaagtagcgccttacattgtcgggcgaggaccagactccaagttaaaaggccggccgggctatcagtggcagagagcagagcctcaaacacgaaaagccagaaagcgctgcagaggc

SEQ ID NO: 209892 - DNA, 122 bp, Homo sapiens
gcttacaaattatcgccagccaccaggcagccccgcgctcctcacctaatgcaaatggagcggaggcctctgttattgtattatctgactttactatcagcattaatccggcttagcccgct

SEQ ID NO: 209893 - DNA, 122 bp, Homo sapiens
atatataaggagagatgagggcaaaagagcatcctcgagcaactaaaacatcctgttacacgtaacaggttcatatagatgttaatatatatttagtccaattacactacatttcccttaca

SEQ ID NO: 209894 - DNA, 122 bp, Homo sapiens
ttgagaaattgggggaattcatactacctgggatcaaattgtggccccagcctgagcagtcgtgtgaccttggggagataacttactttctccatttcagtgtcttctgtaaaacctgtaaa

SEQ ID NO: 209895 - DNA, 122 bp, Homo sapiens
agtgcctggcggggcagagcgagtcacatttcagcctcactcacaggccagcttgaaattcggcccagccgccactgcctcctgagaactcctccggatgcctgcaggcttatgcggggctg

SEQ ID NO: 209896 - DNA, 122 bp, Homo sapiens
cctctctgcaccgcccagacccgtgcgtggcaccccttcctgcctggcagtgcaaaggagcggctgcccgacctccgcttggtgattgcagcagcagatcctggtgcccgtgtgggttcctc

SEQ ID NO: 209897 - DNA, 122 bp, Homo sapiens
cctgtggtagagtgacggatgtcttgggtgacttggcagcagcaggccggtgggcgcggccgtcacagacatggtctctctgtgttccttgcaggttcccccgcctgcacagcgcggtgatc

SEQ ID NO: 209898 - DNA, 122 bp, Homo sapiens
caaagggaaccgctccgagtttctctctccctctcccgttcgtcacctctcctttgttttcgtggcaatgcgaagtgcttctgcaagtctctgggtccccaggcagagcgggcggatgatat

SEQ ID NO: 209899 - DNA, 122 bp, Homo sapiens
cgtccaatgccctacaagatatctagaagctgccctgctgtccctgcacggctcttgggccggaagcgtgctgggggtggtgggggccagggaatagcataaagagggaaatgtggagcaga

SEQ ID NO: 209900 - DNA, 122 bp, Homo sapiens
cctgcttccgccgggactcctttttggcatggggctgagttctgctccttggagctccagcgggtagctcctggaagccccagcgggtagccaggcggagttggttggagacctgccaccca

SEQ ID NO: 209901 - DNA, 122 bp, Homo sapiens
cagccccttacgtggcttatttcgtgtcaattctagggaggttctaccgtttccgttcgccgggggtctggaacgcgcacgggccctgggcgagcctccctgagcgccgccacgtccgcctt

SEQ ID NO: 209902 - DNA, 122 bp, Homo sapiens
cgtgtgtgccccagggccccggggcccggggtaccgagggctcctcccaggtcctcggaacggcagagtggccccacttcctcggcccccaggaaggatgcttggctgagccgagtgtccag

SEQ ID NO: 209903 - DNA, 122 bp, Homo sapiens
tccatcctggccttcccagccacgtgagcctttttcttttttgcttaagctgactggagtcggtcctgactgataccatgaaggcctgcttccttccctgagttctaaggtgagcccagctg

SEQ ID NO: 209904 - DNA, 122 bp, Homo sapiens
ggtagccagtgtggcttggctcccaacatggctgaggggctctgcaacccacaagtgccccggtcttctgcccctcttctgtttccgctcctctccctggattctcaccgccggcaccctga

SEQ ID NO: 209905 - DNA, 122 bp, Homo sapiens
tgctaagaaaattaggttgaaactgctcaccatcatctacaatggatccaaatcctgtgacgaacacacttgttttaggtggcaactttatagatgagtctgggaggcaaactctctggact

SEQ ID NO: 209906 - DNA, 122 bp, Homo sapiens
taccacacctgttgccagcagtcttgggatagtgctgaggtgcacccctacttcctcctccgcccgaagaagcactatttaaaagaaaaaaattgtttactgtatcccaactatgtctcact

SEQ ID NO: 209907 - DNA, 122 bp, Homo sapiens
cttcctctctccgcccacagtcttgcactctaatacttgtttgcttgcctctgacacagccggtccctctggctggctcacccagatggatatcaggagcctgggttccactgcggagggag

SEQ ID NO: 209908 - DNA, 122 bp, Homo sapiens
agactgagatgctcttctctccttcctctaagcatcagggttctctgtctgcatcctatgcggaccagggcaaaataaacttgaaattcactatgttagcctgtatgcaattttgggtgatg

SEQ ID NO: 209909 - DNA, 122 bp, Homo sapiens
cccggcacgggcgcgggagggcggggcctggagggggcgttcccagctttgccagtgccacgaggagccggttcgcccgccccgcctgggaccttccgtcctacccagtcctggccggtttt

SEQ ID NO: 209910 - DNA, 122 bp, Homo sapiens
ctggcgcccaacctgggcccgttgctgtacgacgtgggcacgctcggcctacagcccgggcggcacctcaagctgctggacagcgggctgctgctggcctcgcgctacccgctgctgcgcgc

SEQ ID NO: 209911 - DNA, 122 bp, Homo sapiens
gcacacctctcagatcgctagagaaggctttctcaccgagggtgggtcacactccccacacgccagtcgcccctcgtcgggcccgcagaggcgctcagggacgcctggggaagggagggggc

SEQ ID NO: 209912 - DNA, 122 bp, Homo sapiens
tcagcagcacatagaggggaccttcctggcgtgcaaagcgcttcgctgtcgcgatgtcggcgccgaggtctcgcagcggccgctggggcagattcggagccgttcccttttatttcccctcc

SEQ ID NO: 209913 - DNA, 122 bp, Homo sapiens
aatggtgttcttgttgacattcaagaggaaggccacaggccatatggagaggtatttaaccggcatggagctggtatccaggagggctgcagaatcctcttgaaccagtcgtgtggcggtcc

SEQ ID NO: 209914 - DNA, 122 bp, Homo sapiens
tattggcaattagctgtgtaacgggatacttttttttttaaatatggagaagatggttatcgctatcctgtgaagggtcagttgcgttgccttcttagtagtatagatgcagcagctcttct

SEQ ID NO: 209915 - DNA, 122 bp, Homo sapiens
ccacccacttcctgtctgacgatctccttacgtcaacggtgcgctggagcgagtgagcagcgatacctagggcggaagtgctctcggcggaagtgatcgctgtgtgaatcgtgggtgggatg

SEQ ID NO: 209916 - DNA, 122 bp, Homo sapiens
acttggggctgtggagagtggttgggtctagtgcaggcagaagacaggctgaagtagctacgtctcttaacacaatgctcaggcaacttctttttgctgtgtgggagttcacagttcacacc

SEQ ID NO: 209917 - DNA, 122 bp, Homo sapiens
attggctgctttctgttctccctgtttcttctgggaagcttctccgtctccctggcaacgcgacctgccaccaattgcagctaaggattggtggtcacatggcctctgccccttcccaagca

SEQ ID NO: 209918 - DNA, 122 bp, Homo sapiens
cccccttctgcaaatgagcaaacctagttcccatcccacagatgcctcttaccaacaagccggcattctttatggccaggggaagccccaggagccctgtgccaatgttgcatttcaacaag

SEQ ID NO: 209919 - DNA, 122 bp, Homo sapiens
aatgttgaggttactagaatgcggaggtttgtaggagaggcctcctggagttggtcagaccgctgagaaagggccactgccccactggtggggtgcctctgaggggacaaaatgagactctc

SEQ ID NO: 209920 - DNA, 122 bp, Homo sapiens
cttgctgggaagaccgagggtcctgcggaaaggattctgcaggctgaaggctaggcgcctcgccactctaggactacaattcccgagaggccttgcgacggaagccatctttgttccccacc

SEQ ID NO: 209921 - DNA, 122 bp, Homo sapiens
aagagagccctgaactgagaggggagggagccagcgtcagcttcgtggcagtggtgttgacgctgacccatctcccaggactgtctggtggatggcagggctccagcagccacaaagtgagg

SEQ ID NO: 209922 - DNA, 122 bp, Homo sapiens
accccagggggatgactaagccttgcctgcgagcagactcgagcatgccaagttatgagacgatgataactctgccccgagcctctggggtcgtggccgtgggccggcaggggcgaggcggg

SEQ ID NO: 209923 - DNA, 122 bp, Homo sapiens
gacagggcccctgagtgcaagtccagaatggatgcctggaaaagacgttgtggagtaaagcgtgcagccgcagcaatggcaatggctgttaaaagtcatggatggtaaatgcgagtttccaa

SEQ ID NO: 209924 - DNA, 122 bp, Homo sapiens
cagttgcaggaagaagttccagattcaatcactgctctgtgaaaggctaggattcagctccgggtctacacttctgagacaccatttatcacctcagaagctgcagtttcagaagttaagat

SEQ ID NO: 209925 - DNA, 122 bp, Homo sapiens
gcgctggaaagaacctggaagccatagcaagtgagccccgcttccaaattgctgtagcaccgccccccactccaaccccgccaataacagaagagctgtttgctgcaaaaaccaaaaccaaa

SEQ ID NO: 209926 - DNA, 122 bp, Homo sapiens
tcagggagtggggaaggcagggaagagcagtaggtagactggggtccaggaggagatgtacgcacagcatcaggtgagggtgtgggggatgatgactgtctttcagcagctactaaagcaag

SEQ ID NO: 209927 - DNA, 122 bp, Homo sapiens
cctctactcttccagttgcggcttattgcatcacagtaattgctgtacgaaggtcagaatcgctacctattgtccaaagcagtcgtaagaagaggtcccaatcccccactctttccgcccta

SEQ ID NO: 209928 - DNA, 122 bp, Homo sapiens
tttcttcttgctttttctaattttccctttctgtctcccatccacacaatgataagtttgcgtgtagcactcacccaaacttggccctttatacctctttagtcaacatctgtgcccatgtt

SEQ ID NO: 209929 - DNA, 122 bp, Homo sapiens
acctcaggtgatccgcctgcctcggcctcccaaagtgctgggattacaggcgtgaaccaccgcgtccggcctattctgtctactatctatagttcatcaacttggatgattagagtggacag

SEQ ID NO: 209930 - DNA, 122 bp, Homo sapiens
caccaaggaagggggtcttcatgcagccggtgcagagctggtccatccagaggggtgcctcgtgctgcagcggcgtacggcgtgggtagaaggtgaagtccacgcggtagttgagcaggcag

SEQ ID NO: 209931 - DNA, 122 bp, Homo sapiens
gggcagagttagcctctttgattggctgtacgagtccgaggtgctgggtcaggggcggggcgagctgtcgcaagcctgccctgggtctgcggcttctgagaggggtgggccgcgaagcggag

SEQ ID NO: 209932 - DNA, 122 bp, Homo sapiens
caggaggtgctgcagggagctgtggcgaacgtggtgagggtttctggtgggccacatgtgcgccgtgtgcgaagcactggcgggggccggggaggagaccctgcaggactgcagaatcccca

SEQ ID NO: 209933 - DNA, 122 bp, Homo sapiens
ggggttcagtaacttgtccaaggccatatggctagctgtgagggcactgaaatccgagcccggctctcgcaggccagggctttacccctgacaccgcgattcctttctcgatagttcttcat

SEQ ID NO: 209934 - DNA, 122 bp, Homo sapiens
ttgctttttcctaaggattttgctgcaaagtctccttcggaacccgaactgcaagctgagcgcctgcccagattctcccatgggtatttcacgtcgaaaggacgctgttacatatgtataac

SEQ ID NO: 209935 - DNA, 122 bp, Homo sapiens
gctgggccttgtgggtcctgagcctgagtcccggagggctactggagggtgtgcggggaacggggactctgagctgggtggaagggccaggtggatggggtggtcggctccctgggcatggc

SEQ ID NO: 209936 - DNA, 122 bp, Homo sapiens
ctcgactccgaggactccggggctaagtctccaggcatcctgggctacaatatctgtccccgcgggtggaatggcagccttcggctcaagcgtggcagcctccccgccgaggcctcctgcac

SEQ ID NO: 209937 - DNA, 122 bp, Homo sapiens
cttcttggcagtggtctcacccagcacttcataagctgagtcctcccctcagggctgtaacgtcctcaggagtcagccgggaccacctgggatgaaggagcaaagtcctgacaagattctgg

SEQ ID NO: 209938 - DNA, 122 bp, Homo sapiens
cgtcagacaagggccaggtcagaagaccaagctggagaaatgcaccaggccctgcgtcaccgggacgcctgccttgcacgcgactcccaggctctccacctccccgcctgcagagcccggcg

SEQ ID NO: 209939 - DNA, 122 bp, Homo sapiens
ctaggcacgctctttcacaaaaccaggggctgtgaactctgtcaaggttcccaggtccatcgcagttaccaaggcacagtaaaagctcgagtcaactatcaggcacatcctgcaaaagacga

SEQ ID NO: 209940 - DNA, 122 bp, Homo sapiens
ttattagtcttcccctgctcaatcacatggacaaagtcataggtgaggatgaatgggacacgctgacggttgattccaaacgtggtcttgaaattcccccagaaagtggcaaaaatcaatgt

SEQ ID NO: 209941 - DNA, 122 bp, Homo sapiens
gcggaggacacctttattcttggctggttctagcatgctgcttcatgtcccctggagcagcgtgcccttctgaaaacctgtggctaaatgtctcttctgtttatatcaggcgtgttacacct

SEQ ID NO: 209942 - DNA, 122 bp, Homo sapiens
agataacatctgggttcttagctgcactaagttaagcctatttacatctttttttgtcttcgactgcacttttcctatcacatcacactccagcaatgccaagctgtgccgccttctacccc

SEQ ID NO: 209943 - DNA, 122 bp, Homo sapiens
aggaggtgccggctaagaggagggcgagcctgcgtctgcgacccgagctgcccgcggagccgcacgcgtgtgtgcaaataatggccagcctgtgacaaacgtgccaacgcagagttggccag

SEQ ID NO: 209944 - DNA, 122 bp, Homo sapiens
tgccattctacctttttaatgctaaaaagttctgtttcgtgaaatgatggtgatagtagacggcatttatttgcttgacaactttgtatgatctcagattttctgtgtgttttacttttact

SEQ ID NO: 209945 - DNA, 122 bp, Homo sapiens
cctttgaacgcatcatgtgaggatgtaatgcccaaggctaggagaaaggcaagagggcctcggtgacactgacacagagctttgctgctgaacacccagactgtgagaaaaatcaacccttt

SEQ ID NO: 209946 - DNA, 122 bp, Homo sapiens
ggtgggtgggttttggaggggtgggagcagaggcaggggggtgtgccgggactccccagacgctccactgcccaatcatagctctttgatatcccagcccggctggagaaagttagatggta

SEQ ID NO: 209947 - DNA, 122 bp, Homo sapiens
cggccaaaaaaggaaatggaatggacacgtgctagaacacgatggaccttcaagacactacgctgcgtgaaacagccagtcaccaaaggacagacactgtgtggggttccactcgtacgaga

SEQ ID NO: 209948 - DNA, 122 bp, Homo sapiens
gcaaaatggagaaaataatagtaccaacctcacagaatactgagtggactaattaggtaacgaatgcaaaccattaagcatactgctggcacctataaaatgttcagtaaagttagctatta

SEQ ID NO: 209949 - DNA, 122 bp, Homo sapiens
tggagatggacaggaagctgcagtccctgttggccttgacggtgaagatgagaggctccccggtgagcacggccagctggcccaccatctccccggggcgcgtgaggaacaagcaggtgtcc

SEQ ID NO: 209950 - DNA, 122 bp, Homo sapiens
agagttgggctggggccagatcgttttttcccttgttttacattcgagggaatgagtaaacgctgaagaattttaagcgatgaagtaacatgattatatttatatttcaaaaagtacctctg

SEQ ID NO: 209951 - DNA, 122 bp, Homo sapiens
gctaattgaaaagatcagtcggggcgcttgtggcagccttgtcactttgtgacagtgctccgctccgggaaattgcatcgtcacgacaaacgggaccgtgataaaacgaccctttccgtcct

SEQ ID NO: 209952 - DNA, 122 bp, Homo sapiens
gtttggaaacaacctacacgtccattgacagtggaatgaataaacaaatgacagcacattcgtgcaatggaatatgctgctgaggtgaaaatgaatgggtgcacacagcatgcattaacatg

SEQ ID NO: 209953 - DNA, 122 bp, Homo sapiens
tcttgctgcttctagacttcttctagtcattaagcatgttgagccatttttctgtgcatccgatctgacatttttgctctcagatgaaacacgacaaagtaagctgagccaccaggattcct

SEQ ID NO: 209954 - DNA, 122 bp, Homo sapiens
gagcgccaacccttaagagactgagtggtttgcataaagtcataatgttagcaactacaccgaaattataacctagaaattcttcccaatccattgttctattacctcatgctaaatcactt

SEQ ID NO: 209955 - DNA, 122 bp, Homo sapiens
cggggcgggaccgcgactcgggtttaatgagactccattgggctgtaatcagtgtcatgtcggattcatgtcaacgacaacaacagggggacacaaaatggcggcggcttagctcctacccc

SEQ ID NO: 209956 - DNA, 122 bp, Homo sapiens
atgaagttcataatccttacagcatacagatgtaaaacaagatattggtgaagacagccacgattgacaggaaaagaacaaagagggcccacagttgttggtgcctggagacagacttgaga

SEQ ID NO: 209957 - DNA, 122 bp, Homo sapiens
gagctggggatgcaaacccagcaggcgagggatgaaagggctggtggagaagacagttcacggtagccagggtcagagcatggccaaaggatgaggctcgaatcaggacaccaaagaacgcg

SEQ ID NO: 209958 - DNA, 122 bp, Homo sapiens
ggcttccccagccctggggatcatttttctcttctgaaccccagaagcaatctcgactttcgcatttgagattccagacaggactcggctctccctctttcatacccaggggaaactgagtc

SEQ ID NO: 209959 - DNA, 122 bp, Homo sapiens
ttccaaatcttagcttggatttccccaaagtggagcctgaaagaaagacttacatgtgggcgatgtcaaacaaaaattgtgggaagccactgttttctactgagctcctccatgaggcccca

SEQ ID NO: 209960 - DNA, 122 bp, Homo sapiens
ggagaaaaatgtctgagaatgatcacagtcggacacccaggccggcctttgtcaaggagccggggagacagcctcggcttttattctgctggggctacttacggctccaattaaattaaaca

SEQ ID NO: 209961 - DNA, 122 bp, Homo sapiens
cttgatggatgtgaaactcctgcagatctttcacaggccttgtgcaaggcccctcctctccgaagccattttcctacacatcgggctggagtaattgggagccgaaagatggcaggcagaat

SEQ ID NO: 209962 - DNA, 122 bp, Homo sapiens
acaatggaaatctacggggaaaatgccagggctggttctgctggagtcctgggaactctgcgtgggagggagtttgtgactgcggcccaaaagccacctccatacagtgccgtgggatgcca

SEQ ID NO: 209963 - DNA, 122 bp, Homo sapiens
tttcccagggattgtgcattacgtgcaggacgtgcctaacccagagagactcaagtgtgacgccgcgctcctacttccggggcggctggttcttcccgtcctccccaccccggggacacgct

SEQ ID NO: 209964 - DNA, 122 bp, Homo sapiens
gatttaaaagggtgctcgtggtcccagattctttacctagggagaggcagagttggagctcgaacccaagtctattttcagagatatggtgtttacctctgtgacagagaaggggtatcata

SEQ ID NO: 209965 - DNA, 122 bp, Homo sapiens
gccggcccgcggcctctcttccctttgtgagcgcctccttaccaggggtggtgttggtggcggagggctgcgcgtgggcccgcccgccgaggggccgcggcgggggaccgagagggcctcgg

SEQ ID NO: 209966 - DNA, 122 bp, Homo sapiens
ttcgttgtgtgtgtgtgtgttttggctttgttacaattattagtgcttttcttcaagcggcgagcactttatcatcgtacttttgtagcacttcacgttgaatagttgttatttgcaaacta

SEQ ID NO: 209967 - DNA, 122 bp, Homo sapiens
agaagtggcaggctgacaagggcagaggcacaagcaggagggtgcagcctgtggaaggcccggcccatgccaatgctcatttaccctgtgttcctcatccatgaccttcctcttcctcttca

SEQ ID NO: 209968 - DNA, 122 bp, Homo sapiens
acactgagggcaggtcttcttctcccagtcacccactcagctgtcaatctcctctggcaacgccctcacagtctcttgagaaagaactttgcccagccatctaggcaccctcctccagccac

SEQ ID NO: 209969 - DNA, 122 bp, Homo sapiens
agtgagtttcccgagactcagttttttcatctatgaaatgcgggtgatgacgcgcggctgcgagttaggactgcccagtacacgaagaaccctggacaaatgtacttttattagtcttacta

SEQ ID NO: 209970 - DNA, 122 bp, Homo sapiens
ggattccatcgcttttcccgctgtcgcggggaacctgcacgaagcgcccccgcctctccccgtccctgaatctcccagagcccaaggagctcctgggtgtggaaccccagaggacacggagc

SEQ ID NO: 209971 - DNA, 122 bp, Homo sapiens
ggacaggaattgcttactcagggagctcggtttttgagacgtgagtcttgccgatgctcccggccaaataaagcccttccttctttaactcggtgtctaaggggttttgtctgcggctcgtc

SEQ ID NO: 209972 - DNA, 122 bp, Homo sapiens
acgcaggccacgtgcaggccacgtgcagcccacagctctggggcgaggcaggccctcaaccgaacacgtagtaagacacacagggctccgaagggaactcgtctcatcaggaagataaatct

SEQ ID NO: 209973 - DNA, 122 bp, Homo sapiens
cgcagggccccggcggatacttggcagaggcttggggtcgtggcgggggcgcctcccttccggtgcgcgaaaaagcaaacgcgacgcgcgggctgcagagactgggccgggcggaggagacc

SEQ ID NO: 209974 - DNA, 122 bp, Homo sapiens
ttttcctgctattcttgcctggagtgatatcaagtgagcggtagctaggcggcttctcctcgggccagtgtggggagtgcgagccgcggcggtgggcccgccagctctggggctgcctctcc

SEQ ID NO: 209975 - DNA, 122 bp, Homo sapiens
atattcctcaagaatataaaatgcctcatcaacatgagacaacagcaggaagcacccattcgtagtaatcctctgtatggaggaggctgttacataaccacaaaggcacaaagctgcagttt

SEQ ID NO: 209976 - DNA, 122 bp, Homo sapiens
ttcccaagccccctcctctctagtcgtagaagcgaagcaggcgggggccgggagctccggcgtctggagagacatccagcggctgtggggccaggacacctcctgccccccagttctctgaa

SEQ ID NO: 209977 - DNA, 122 bp, Homo sapiens
catccacgacagggaaggctacggggaaattggagccctcagccaggcctctgagcacaacggctgcagagaccgccatcgctagggaccttataacccagtcctaggggtctgtccaaagt

SEQ ID NO: 209978 - DNA, 122 bp, Homo sapiens
gtaggacgaaagggttgatcaagcaattcccagaccaagacaccaggagggtcccgccctcggccccgcctccagctttgcatacatctcctgattggtcggcggcggcaggccccaccccg

SEQ ID NO: 209979 - DNA, 122 bp, Homo sapiens
agcttccttcaaactgtcacattaacagagccatttctaagaacgcacaagtctcaccctcgcagactgtgacctctgactcccaaggctgagccctagacactgaccagcaccaacacagg

SEQ ID NO: 209980 - DNA, 122 bp, Homo sapiens
tgtcctgatactcactcactgctgtgtgaccttggtgaagttctcaacctctgtgagcctcggctgtctgtcttcacaaacaccaccaacctcagcaagtggagtgaattaagtaacacgca

SEQ ID NO: 209981 - DNA, 122 bp, Homo sapiens
cttctctgtccggccagtgaacggtgggtggtcgacgtggaccgagtggtccgtctgcagcgccagctgtgggcgcggctggcagaaacggagccggagctgcaccaacccggcgcctctca

SEQ ID NO: 209982 - DNA, 122 bp, Homo sapiens
tgtttctttccatggagtacattccaccgtcccgttttcccaccacaccgcgtggcctgacgctttcctctgtcatgaacggctctgatacaacgtgagatgaaattccatctcagacatgc

SEQ ID NO: 209983 - DNA, 122 bp, Homo sapiens
acttaaaagacagaaaaccaactttgttgagatattcctcaattacttagttgatatcatcgtgaaaaagagatgatacaacataggaattgactcattaaatgatacaatatcatttagca

SEQ ID NO: 209984 - DNA, 122 bp, Homo sapiens
atctgtgacgcctgcctgccaaaggccaggcctcctaggtgctgcccagggagctagagtcgcctgcctgccaacagctggttcgcctggctgctgcccgggagctggagtggcagaaacaa

SEQ ID NO: 209985 - DNA, 122 bp, Homo sapiens
ccacaggctgcagtgcagtggcttgatcacagctgtccgcctgtatctgctggcctcaagcgatactccagccttgtcctcccaaagcgctcagaggtgagcgaccgcgataggcatgttta

SEQ ID NO: 209986 - DNA, 122 bp, Homo sapiens
tgtgtgcttgtgcctcgccgtctcctggctatgcgtgttgggagtccctgggaaccatgacggataaagttcatctcatcagtcaggaaaattcatgccctcacacaccacccgtctgagtc

SEQ ID NO: 209987 - DNA, 122 bp, Homo sapiens
aagggaggcaatgcctcgccctgcttcggctcgcacacggtgcgcgcacccactgacctgcgcccgctatctggcactccctagtgagatgaaccccgtacctcagatggaaatgcagaaat

SEQ ID NO: 209988 - DNA, 122 bp, Homo sapiens
caccaggctcccagccggccttgaccttcccccgcgcttaagcggctcagtggggtaggacggatggtcgctgtccctcccgccggtgctgaagtccgccgcaccccatggatggagggagg

SEQ ID NO: 209989 - DNA, 122 bp, Homo sapiens
gcagctacccccctcccccagaaggcgagctctaaggaaccttgacgcaaaccaaagctccgagaggtggaaggagttgcccagaggcacccagagaattcgcagattctgagttctccgta

SEQ ID NO: 209990 - DNA, 122 bp, Homo sapiens
tcacctgtaaaactgggttgataatactccctctgtttgcactgaattctcaggaatgcacgagctgtttatgcaaaagggcttttggaggaactaatgaatacactgagtgaatattactt

SEQ ID NO: 209991 - DNA, 122 bp, Homo sapiens
acgcgaggcgcgcggtggcggtttggatctggcccctggggaatcgcgttatgtcgcgaccgaaggtaggagtcgacctgacccagatgcttttatcgtccctagaaaaagggaggaaagca

SEQ ID NO: 209992 - DNA, 122 bp, Homo sapiens
agcgcccacccggggcaggtcctccagctgtggccactcagccaatatctgcacaggtggcggttgcccggtcaagggcgggctcacaatctgcggggcggggagagggaaggagccaggga

SEQ ID NO: 209993 - DNA, 122 bp, Homo sapiens
atgaacctaccagaaactgcctccagcgaggctgtgtcctcaaagactcagggagacctgcggacaaaacacgggttttgttagttgacatcgcatgtatgcagtttggcatgacgacaccg

SEQ ID NO: 209994 - DNA, 122 bp, Homo sapiens
tattttagtggctatcagaaacacatctcaaattgcttttcagaaagtttccttcaatcacgcagccattagcaatcgattgcaccacacactgtatctgactccctttatgaacattgtgg

SEQ ID NO: 209995 - DNA, 122 bp, Homo sapiens
aggtagcaggccagaccagtgtcctgtggctccacatgtccgagctgcagagccattgagcgtccatccttcaggacaggcgaacttgcacacagtgccaaacacgggctccccactgcagc

SEQ ID NO: 209996 - DNA, 122 bp, Homo sapiens
tagtttaaaaattatttccttctaactgagacgtttaccctcttgtctcccttcagtctgcgggccaggcatcgacatccgcaacgactatcagcagctgaagcgcctggagaactgcacgg

SEQ ID NO: 209997 - DNA, 122 bp, Homo sapiens
ttaacttttttctcattttttagacagcaaatacaaatggaagttccagtatgttctgcccgcactccagtgggcggtcttgtgcacagcccacttgggaggcctcggcgctcaggtgtggt

SEQ ID NO: 209998 - DNA, 122 bp, Homo sapiens
tttgctctttatcgctccacaccccttgtgtcttgattctagactgtcatatgcctataccgattctgtccccttcagaagtagattcgcgaggacctgactttatgtgtctcttccagacc

SEQ ID NO: 209999 - DNA, 122 bp, Homo sapiens
gtgatagtggaggcaacctggcaatggtgagagggcatgaggaacacagtgattgggaaacgggcagtgacaagatgtggcctcacaaagctccgtgcactgcaatacaatgtcctggaaca

SEQ ID NO: 210000 - DNA, 122 bp, Homo sapiens
gggcgcggccatgttggaggctccgggcccgagtgatggctgcgagctcagcaaccccagcgccagcagagtcagctgtgccgggcagatgctggaagtgcagccaggattgtatttcggtg

SEQ ID NO: 210001 - DNA, 122 bp, Homo sapiens
cctatcagaatggctaaaataaagtgataacttgaaatgctgataaagatacagggaaaccggatcattcatacattgctggtgggaatataaaatgatacagccactattacggactaaat

SEQ ID NO: 210002 - DNA, 122 bp, Homo sapiens
ggacaagcacagggatctcgttctcctcattttttgggggtgtgtggggacttctcaggtcgtgtccccagccttctctgcagtcccttctgccctgccgggcccgtcgggaggcgccatgg

SEQ ID NO: 210003 - DNA, 122 bp, Homo sapiens
ttcttgagtgtgtctaagtgattccccagagacatatccaggtggttgatgtgcaaagcccggcacttcctggaaagaaacctctgctccagggctgacagtgaggcctcccagagcctcca

SEQ ID NO: 210004 - DNA, 122 bp, Homo sapiens
taccagctagaggagctggagaaggcattcaacgaagcccactacccagacgtctatgcccgggagatgctggccatgaaaacggagctgccggaagacaggatacaggtaacagccctgag

SEQ ID NO: 210005 - DNA, 122 bp, Homo sapiens
taacagccccctgaactttaaatagaaaaggtagctcctatcctggaagaactcacagttcggtagggaaagggaggcaaggagcaggaacagatgagtcaactgaaattataataccctgt

SEQ ID NO: 210006 - DNA, 122 bp, Homo sapiens
gcttcctcctctaactttccttctgctgtgctttcccgaagctgacagcagcaccttgaccgcagtgttatggttctcaaagttttctgtccattggaatctgccgggcagctggctaaaaa

SEQ ID NO: 210007 - DNA, 122 bp, Homo sapiens
cggcgccgagaaacagcggctgcgggcgggagcggcgggagtgagcgacacagagcgggccgccaccgccgagcagccctccggcagtctccgcgtccgttaagcccgcgggtcctccgcga

SEQ ID NO: 210008 - DNA, 122 bp, Homo sapiens
gcaggacgaggggcagggagggctgaacaacgaaaccgcccttgcctccggggatgcctgcgggaccgggaatcaagatcctgctgcttccgtcaccacagtctccagccaagcatctccct

SEQ ID NO: 210009 - DNA, 122 bp, Homo sapiens
tgaggaaaagatcatattatagaagaggaaactgacactccaagacgcttgttaacttgccgagaaagtgagtggcaaagtctgagttggaagaagttgggtctgacttcaagttcagtatc

SEQ ID NO: 210010 - DNA, 122 bp, Homo sapiens
tagttgatatcattaaaaaattttttttctgctccgactccaccgggagatatcatttaacgtataatttgtacaactggagttgactggtgtgagttggttgtggttaaaatgtaaacagt

SEQ ID NO: 210011 - DNA, 122 bp, Homo sapiens
agaaagaagacaagaaacacaactactcagctcaggcattgagcgctttaattatttgtacgctacagagtccggctctgggtgaagacagcgccttatctcctgaagaatagagtgcagta

SEQ ID NO: 210012 - DNA, 122 bp, Homo sapiens
gtagttgcttaagaaatacttgttgaaggaataaattaatgaatgaatttgtgcttacagcggctggatggcagacaaacctatgattataggaacatcaggatctcatttggaacagatta

SEQ ID NO: 210013 - DNA, 122 bp, Homo sapiens
acgctgggctggctgcagcaggaagaggagaccagcagaaccgccttctgcccgcccgctcgctgtgtgtgtggcagggcccccaaactgttgccaccctaaatcagagccacgctccaccc

SEQ ID NO: 210014 - DNA, 122 bp, Homo sapiens
gttcctgctctaaggtctgtgctctgtaccctgcgccgcgcccctcccagccccgcccagcgagggaggaggacccaaatgtccggcaacccgcgccctgaacttcgctccaaaacagctga

SEQ ID NO: 210015 - DNA, 122 bp, Homo sapiens
ggctcaggcatggcaggctgcaggtctggagccctgccccgcgggaaggcagctaaggctcggtgagaaatcgagcgcagcgccggtgggctggcactgctggggggacccagtacaccctc

SEQ ID NO: 210016 - DNA, 122 bp, Homo sapiens
cttggcattgaagtagaaagaatgggatggcaacaacagtgggtcctacttttcttcagccgagtctgcaaatgtgaatgtgagcttattacgtgccaggcccccaggacactgagatgaac

SEQ ID NO: 210017 - DNA, 122 bp, Homo sapiens
agacagggagctgtacagtggaagaagggatgcaggggtcactgtcatcccagtgatgtccggggaaatggacataacaacctctaagggcctgggcttccctgaccctgtaggtggaggag

SEQ ID NO: 210018 - DNA, 122 bp, Homo sapiens
agctagggcgcgggagcagcggagtcctggttgagtgaccatccaaggaatatgtcctcgcgcgcggccgccgttttccttttcggaatgtgggtaaagaatttaccgctaacagacgacct

SEQ ID NO: 210019 - DNA, 122 bp, Homo sapiens
cccggcgaccgacgccccgcggccctcgcccttcccgcccccggcgctgcacgccctccacggcttggcccgcgcgctgctgttcccggcctactgggccctgcaccagctgcagggtggct

SEQ ID NO: 210020 - DNA, 122 bp, Homo sapiens
gaggaagaccccatcagaaggggccgtgggtggaggcagcaagggcctggcggtacctttcgcgagggagatgttccgcagtgcgatggagtgctcccagtccttgaggcgcaggtcctcgg

SEQ ID NO: 210021 - DNA, 122 bp, Homo sapiens
gtgtctttctctctctttcccatccgtttttttggtgtggtacattattatttcatttcacgtttctatatcttttactgtttattaaaaatattccacaaaaagcagtgaggtagtttaat

SEQ ID NO: 210022 - DNA, 122 bp, Homo sapiens
tcaccctggaagccctggggcctggaaaagtcaaaatggcctcaggccttctgacagctccgctccaagagacttgaaaccctcacctttcctcccaagaggattttgggattaggggaagt

SEQ ID NO: 210023 - DNA, 122 bp, Homo sapiens
ccctaatgatgcacgaaaggcgccgcaaacaagaactaggcccttcgatttacagagaaacgggaaccgcacccttccttagggccaagaaaggatgcttactggccaaagaagcctgtctt

SEQ ID NO: 210024 - DNA, 122 bp, Homo sapiens
tgagggtttactggcatgctgattgaatgcagtgagcagagccacctgtgtcagggtaatcgaaaattctcagacagccggggataaacaaataccctcgagtctctctcttactttctgta

SEQ ID NO: 210025 - DNA, 122 bp, Homo sapiens
caggattggaggggtggggccagttggggatgctgcattagggaaggcgtgtccgccaaccgggctctctggtgttcagcagcgccgaaggtgtcggtggggcccccacgcccaaggggcag

SEQ ID NO: 210026 - DNA, 122 bp, Homo sapiens
tactaacctaattttgcagatgagaaaactgaggcttaaagttgttcaaggtcaaagtcacgatgtccatcatgctgtagctcaatgaatgagtctcacattgtttcatgttgttttatttc

SEQ ID NO: 210027 - DNA, 122 bp, Homo sapiens
aatccggctgaagtgccaaaattctttttcctctgcttagtcggaaactccgggtgccctcgacccttgggaactccggctccgatggccggcgtggcgccggagcagcagcccacctgctc

SEQ ID NO: 210028 - DNA, 122 bp, Homo sapiens
ggggcgggaagggccgggagcgggtgtgcaggctgggtgcacaggccgcctccaccgtttcgggaaagtccgtctgattctccacgcattcttgagggcttggtcacccgctctcgccccct

SEQ ID NO: 210029 - DNA, 122 bp, Homo sapiens
cgccccatctctgacccctcttctcttctggcaccaccgcctctcctaaaggacctcttgcgccaggagctccggcagttgctccagggtctccgccacaaagccatctgtgagggcaggtg

SEQ ID NO: 210030 - DNA, 122 bp, Homo sapiens
agactggtagttcagtggcatgttctcggctcattgcaacctccacctcccaggctcaagcgattctcgtgcctcagcatcccgagtaggtgggactacaggtgcccgccaccacgcccagc

SEQ ID NO: 210031 - DNA, 122 bp, Homo sapiens
gctgagtggtgaggttgtgaggtggctgctggctgcctggcagtctcagagcccagtagccgctgtgtgctggccattggggagagattctgatggtgacatactgagagtgattaaatctg

SEQ ID NO: 210032 - DNA, 122 bp, Homo sapiens
ggccgcagcggacagacagggattgggttccgtgtgcctgccacaccaggcaggctcttgcggctcccaactaggcggcctaaatgagggaggaaagaggaggcgcatcgctgattcaccgc

SEQ ID NO: 210033 - DNA, 122 bp, Homo sapiens
gcagctcttcctttctcatgttggaaatctccagtgacctgaccttggaggcatcccacacgccctcagtcccccggcgggccctgccaccacccctcagcgttgccggatgtgcggctgag

SEQ ID NO: 210034 - DNA, 122 bp, Homo sapiens
cctgaagctgacgacacccacctatggggatctcaaccacctagtgtccttgaccatgagcggcataaccacctccctccggttcccgggtcagctcaacgcagacctgcgcaagctggcgg

SEQ ID NO: 210035 - DNA, 122 bp, Homo sapiens
cggacccacatggcttgttacctggtcatcagttcgagacatctcagcaatgggcactaccggggcattaaaggagtcttcaggggacccctgtgcaagaacggatctccctctccggtaat

SEQ ID NO: 210036 - DNA, 122 bp, Homo sapiens
agcccctgcccaagcccagcctggaccgtaccggcgtccaccaggcggagcacctcagaacggatcatgcgcagcttcagccagtcaggaagcagcagcgcctcctccgatgtgtccaccag

SEQ ID NO: 210037 - DNA, 122 bp, Homo sapiens
tgcagctggagtcagcagggaggtcccgcaggcaatgccgcctttggtgaagaggcatctcggtgtgttcttgcccgtgctgatgtttgacccttgagcagaggttgcccttggtgaattcg

SEQ ID NO: 210038 - DNA, 122 bp, Homo sapiens
cactggactagagaactactgacaaccctttccagagtaggggtcggcgtcagtcagggccggcactaacaggaaaagcacctggttccttgtatcttcacatctttaccatcactgccaac

SEQ ID NO: 210039 - DNA, 122 bp, Homo sapiens
cttctcgcagggaattccgcgtcccagactgtgggcggacgccgcagggagggaggctcgcgaccccgagagcgcaccgcgtcccctggcctgggcgagctctgcttccagggccgtggctc

SEQ ID NO: 210040 - DNA, 122 bp, Homo sapiens
gggcggcttgtcagcagatgcaggggcgaggaagcgggtttttcctgcgtggccgctggccgcgggggaaccgctgggagccctgcccccggcctgcggcggccctagacgctgcaccgcgt

SEQ ID NO: 210041 - DNA, 122 bp, Homo sapiens
ttggaggcaatccacagggtctgtgtacatctaagaagtgtcttttcctcttttctggaacgtggcaaactttgccctgaataaggacatgagtaaatttagctaatatttttactcagcca

SEQ ID NO: 210042 - DNA, 122 bp, Homo sapiens
cagcggggtgggggtggggggttgccatctacgccgttttagtgtgagggacactgggaacgatgcccagaggctgctctcctcccagcctcaaaggttgtcagctccaccagagcagggtc

SEQ ID NO: 210043 - DNA, 122 bp, Homo sapiens
tcaacccagcaaccaataggcgacgtctgggaagatcgtgaccccatcgtacttagcctacgaggaaccaggggagagacttgtgcactaggggataaatagcttgttgtaaccgtactggg

SEQ ID NO: 210044 - DNA, 122 bp, Homo sapiens
aggggtcagggagttccctttccgagtcaaagaaaggggtgacggacgcacctggaaaatcggatcactcccacccgaatattgagcttttcagaccggcttaaaaaacggcgcaccacgag

SEQ ID NO: 210045 - DNA, 122 bp, Homo sapiens
gtgcctgccttagtgctggactgactcggtgctggaccgacacggtcctgaccctcctgccgagccttctggtgtcctggctggtgcccagacctcggggtgttatctgcaagctcccctta

SEQ ID NO: 210046 - DNA, 122 bp, Homo sapiens
tctggcttcttacaggtgcctaagtctgtgtgttccagcgactgtcttgaagggcaccagcgagtggttacgggtttccatcactgctgctttgagtgtgtgccctgtggggctgggacctt

SEQ ID NO: 210047 - DNA, 122 bp, Homo sapiens
aggacagagctcctgggtcggggcattgccggcctgcaacgcaggagcgggtcgggggcccgcactggtgagtacagctccagcgttggtgtgctagggccactgtaaggaggtgcctccaa

SEQ ID NO: 210048 - DNA, 122 bp, Homo sapiens
aggagcgccaccgccgactccggccccgcctctgggacgttggggtcgcgggaactgaggcggcaaacacaagctcgcgaaactgaaggccgcgccacgcctgctgactggtcagaaacctc

SEQ ID NO: 210049 - DNA, 122 bp, Homo sapiens
caggacgaggaatgctagatgatcagactaatacatttaagctcttccaaaaatgtgctccggaaaagcaatctccgtggagaaacaggttgaagattaaattgcccctccctgggggcacc

SEQ ID NO: 210050 - DNA, 122 bp, Homo sapiens
ccctttcagtagtagggtatcctgttcagtgtgttgctgtgagcccgtatgtggttggcccggctggcgcgggcgtgtttagggtggtggtaattactgggatggcccagccctaatgagtg

SEQ ID NO: 210051 - DNA, 122 bp, Homo sapiens
ggctccaccctcattatcgtatcacccccccaaaggctttgtctcctaattgtatcatatcgagagttaggatttctacatatcagttttggaggaacataaacattcagcccattgcataa

SEQ ID NO: 210052 - DNA, 122 bp, Homo sapiens
cctcccaaagtgctagggttacaggcatgaaccaccatgccaggcctattttgggtattacgttttcagcatattctacagtttttttgagaactgcaagcaagaaagggggtgagaattag

SEQ ID NO: 210053 - DNA, 122 bp, Homo sapiens
tatagtcagccctcctcttttctacccctgatcaaaacaccagggcatacatcttgaaaacgacataaagactaacctaatttttattttccttcttccttaatctttctccgtgtcaaatt

SEQ ID NO: 210054 - DNA, 122 bp, Homo sapiens
cctggaaaacatggatgtggaccgagcacagaaaaccgccgggcgcctgggcacagctcccgggccccagcccttcacacacagcagggactgccgagtcacagaccaccgctcatctgctt

SEQ ID NO: 210055 - DNA, 122 bp, Homo sapiens
tacagtagaaaatatcaggagtgtgccctacaaagtaaagggtagcattctatcaagaaacgtgtgtgtgtgtgtgtgtgtgtgtgtgtgtgtgtgtgtgtgtgtctgctgagtcatgatgt

SEQ ID NO: 210056 - DNA, 122 bp, Homo sapiens
gccgcctgtctccctgcttcacctccctaagagcttgagcagaaagcagggctccagaggcgcacccctggcttgacgcccatgtgcctctggtctcagggactacaacagctgcaccgctg

SEQ ID NO: 210057 - DNA, 122 bp, Homo sapiens
attcttagaaaatagggactcctttttgcggaataatccatagggggcgaggccaactctcgcgagtcgaggtatcttctccccaaccactgctcttattttaattattgcagacggaagtt

SEQ ID NO: 210058 - DNA, 122 bp, Homo sapiens
attccgcattcccgagaagcctgccaatcatgcagtggaaacacctgacctggtgcatcgcgcacccctccctggccaggctgccctccctggcacacgccccgcgctggccggcaacaaac

SEQ ID NO: 210059 - DNA, 122 bp, Homo sapiens
cacaagtcagagggcaaggaatgtggcagaatcagctgatgggacccataaaggttggcacgagaccaagcggagacggggagagagtggatatgaggagcaagcgaaaagtgtccacgtac

SEQ ID NO: 210060 - DNA, 122 bp, Homo sapiens
ctagcaatcagcgagactccgtggggcaggaccctccgagccaggtgcgggatataatctcgtggtgcgcccttttttaagcccgtcggaaaagcgcagtattcgggtgggagtgacccgat

SEQ ID NO: 210061 - DNA, 122 bp, Homo sapiens
aaccagatcttgagttgtatctgtgtctctgtctgcctctgagcctgggtttctgtcttccgcctcggcctaggctctctccctgttactcttgtgctctgtcggtgaccaggacgccctct

SEQ ID NO: 210062 - DNA, 122 bp, Homo sapiens
aagagtcctaagtataatgcctaagccattttcttgaagagtacaaccttccttctgtaacgtatgatgacaagagaagacagtacatcaacctcaaagcctctgattcaaaaattcaagaa

SEQ ID NO: 210063 - DNA, 122 bp, Homo sapiens
tgggacatgtgaaagtgagaaatcacccatattttcttaggaaaaaaaccaaaaaccaaacggccattaaccagtggctcgcgctgggacatctgagacgtctgctttttttttgctgaatg

SEQ ID NO: 210064 - DNA, 122 bp, Homo sapiens
gccaggtctcaaggcgacgaatgagaaagttgtttagatgccaagacaattctgggagtgcgagtgtgggatcttctgggtcttctggaaggccactcaccattaacatgacccactgaccc

SEQ ID NO: 210065 - DNA, 122 bp, Homo sapiens
gccggagctcccggctgtgggcccaggaactacatttcctagaaggatgtgctagatactcgttcgcgtcgggacgcaagcaccggcccgaactcgctctaggaaatggagtctgacgcctg

SEQ ID NO: 210066 - DNA, 122 bp, Homo sapiens
ttcacactggagatcccggagggtgtggaatggaagggagctggttccgagtgctcagcacgctaagctgggaacccagccagacgcaggctttgaaagccatatgaccaagggaatgtaaa

SEQ ID NO: 210067 - DNA, 122 bp, Homo sapiens
acttccctcatttctgtttgccagcataatttcacaagcctctgactctgtgaccatgtgcggctctgtggagggatactttggagacaagacagaatagtgggcatggcccccatgtctct

SEQ ID NO: 210068 - DNA, 122 bp, Homo sapiens
acgcaaagcttacagttttggggacttcgtacgctatctgagtcgacacgccgcccatgtcgagaatgcccgctgtccttttacggacaatggcttcgctgctttcacttccaggaatgtta

SEQ ID NO: 210069 - DNA, 122 bp, Homo sapiens
tttgcagaagagtaatttgatactcagattgtttataaaggttgcatagctataagtacacggcctgggatgttagactcacctttggccccatgggctcatccttctatagagttgcctct

SEQ ID NO: 210070 - DNA, 122 bp, Homo sapiens
ggcgccgctgttcgggctggttgctttctgggctcctgagcccggtgctgtcccaccctccgggaaagtctaaagcaagaggtgccaccgccctccgtgtcctgcaggctgaggagcagtga

SEQ ID NO: 210071 - DNA, 122 bp, Homo sapiens
gttcccagagtaaatcatttcatcccctctcctcccaccggatgcagggagttggggaggcgtggggcttctgcatgagctactgcactcagagccaacaatgagcacggtggttgccttga

SEQ ID NO: 210072 - DNA, 122 bp, Homo sapiens
gtgagcataaaccagttcacagaaggtgcacagcagaatcactttagattattttccaaacgttgcatgatgggcaccatccacaaagagactgacacagtaggtctgaaattggttctgga

SEQ ID NO: 210073 - DNA, 122 bp, Homo sapiens
aacctaaacatctactgcaatgaaaaccaacagcaatgtcagtaggcgtaattcaaccttcgttgaaaacatgaaattgaatacactcttgttttccctggacctggcatctccaggtgtca

SEQ ID NO: 210074 - DNA, 122 bp, Homo sapiens
gggctggagctggggctgggggtggagggcagcctgcggcagggcgggctgcacggggaccgcgcacaccacgcgtgtccgcgccccccgccggcacgcaggcggcctggccctttaagcgt

SEQ ID NO: 210075 - DNA, 122 bp, Homo sapiens
gcgagcgctgaccgggatctctgggcagccctctctgtgtgcactggcttgctgaaggctcgcgacagcctgggcccgggcgcgcattccagcactttctaccctccggcttcagagtgcat

SEQ ID NO: 210076 - DNA, 122 bp, Homo sapiens
atggagaactggaaacccggagaagtggagcaagcagctgaggtgataggagccgataagcgacccgatcacctggctggaacccagggctcctgactgtccggaatagcacgaagaagcct

SEQ ID NO: 210077 - DNA, 122 bp, Homo sapiens
ctaatcaatttctgtgcttctaatattctcctcatgcacacactttgtgcatcctgccaccgaggccatgcgtcttctagaatgtagatgtgcttctgtctcacatgagacaccataaatca

SEQ ID NO: 210078 - DNA, 122 bp, Homo sapiens
acacgtatttgtggaagaagactatagctctgagctggttttgtttttttttctctctctcgccattaaagaatttaagacaaaaatacagtagaaggaagagcgcgaggacacgagaaaat

SEQ ID NO: 210079 - DNA, 122 bp, Homo sapiens
gggattggactatattgtagtgacagcagctttctttctgttctccaaacgtacctgcttcggggaccttatacttggggttggttctctgtgcattgaacactcttgctccagctcttcca

SEQ ID NO: 210080 - DNA, 122 bp, Homo sapiens
ttaccaaacccatttacccattcctcaactcaataaatgacagctccatctttagaggtgcgacgaaaccttcagagtcatccttgaccctcctctttctctcatatcccaaatcatatcca

SEQ ID NO: 210081 - DNA, 122 bp, Homo sapiens
ccggataatcacaagttcactcttatcttcaagtctctgccccagagtcagcgatttcaacgatgttacgtaaaattactgaccaccaacccctatactgttctacttttttccctagccat

SEQ ID NO: 210082 - DNA, 122 bp, Homo sapiens
aagatggccaaataggaacagctcctgtctacagctcccagcgtgaccgacgcggaagaccggtgatttctgcatttccatctgaggtaccgggttcagctcactagggagtgccagacagt

SEQ ID NO: 210083 - DNA, 122 bp, Homo sapiens
cttagaggccatttccaccctctggctccctgcaggccccctaccgggataccccctagacgcacccacacacccactctgagggtcactcagaatggccattgttctgtaggctgggaaag

SEQ ID NO: 210084 - DNA, 122 bp, Homo sapiens
actttcttttttagttggttttacattacagaaagctatttaaatgtgttataattatgccgacaaaattggcagcataattactgtaattgaaaaatctgatattgtccaggaatgctttc

SEQ ID NO: 210085 - DNA, 122 bp, Homo sapiens
ctcatagggtccatcgttaggattaagtgagctaatgtgagtaaagtactcagtacctggcgtatagtaagaactaaacttcactataatatatcactccatgggctaataggtcactttta

SEQ ID NO: 210086 - DNA, 122 bp, Homo sapiens
ccctcctccaccgtcaagcggcagctaccagccaccagaccagatcccttcgaaggtgcccggagtaccagactgacaaaagcgcccgtacagtgctcagtcctgtaaccaaagctgtctag

SEQ ID NO: 210087 - DNA, 122 bp, Homo sapiens
gacctcaggtgatccacccaccttggcctcccaaagtgctgggattacaggtgtgagtcacgtgcctggcctttgactggaattctatttctgctgttactctgctacatgtctgtcctgtc

SEQ ID NO: 210088 - DNA, 122 bp, Homo sapiens
tgctcctagggctggctctggaccctgccaggacccccacatcccaccagagggagtgggcgggtcccctgatgggccaggagcctggccagcccccaacactcactcagcttcttggagct

SEQ ID NO: 210089 - DNA, 122 bp, Homo sapiens
atccccccgcctcggcctcccaaagtgctgggattacaggcgtgaaccaccgcacccggccgctggggcgcttcttaatggccagattaaaaatgcacacacctggccgggcgcggcggctc

SEQ ID NO: 210090 - DNA, 122 bp, Homo sapiens
gggttctagggcgccatcctcccccggcctggccccgacattaacagggccaggaggaaccgctacggccaccaccgccacccgccgaggagccgcccaagcccatttgccgccacagccaa

SEQ ID NO: 210091 - DNA, 122 bp, Homo sapiens
tttgcagtctcacctccgcagtgtgtgccgccagaagcgatgagcggaagctgttccaggcgccaacagaagctgcctggcccctgcctcaggaaagcgtcttcctcccacagcaggcgtgg

SEQ ID NO: 210092 - DNA, 122 bp, Homo sapiens
ttgagggtgcctggcaaggacagccaggccaaaactgcataggaagatggcaggagtttccgtccgtcacctcttctgtggctgtgtctctcttcatctctcagggcagccaggggactctg

SEQ ID NO: 210093 - DNA, 122 bp, Homo sapiens
cccccagagtgtaaagaggtcctgggacaggctttgcacgttccacaagaggtgagcacccggactaggacttccatccgtgtggcccttcctatagcccgattcgcccgggccagagcgcg

SEQ ID NO: 210094 - DNA, 122 bp, Homo sapiens
acaattcaacagcacacaataagctttgttccttccatccaactaccgacatgcttctaccgttgcatcaacagaaaggctccagccgtcgtagtaggtaatttctcttcagtcaataggca

SEQ ID NO: 210095 - DNA, 122 bp, Homo sapiens
atatggtcctcgtcctcgtaggacactccaggcacctgcctagagtaagatggcgcttttcgtaagcacctctccaggacagagatttccataacgagagtcacgcacttgcaggccatctt

SEQ ID NO: 210096 - DNA, 122 bp, Homo sapiens
catggatcagagctgagactggagggagaggcattttgggtagcctaggagggcgactggcggcagcagaaccgaggaaggcaaggttgtttcccccacgctgtgtcctgtgttcaggtgcg

SEQ ID NO: 210097 - DNA, 122 bp, Homo sapiens
acagggagggacctccagggaagcgaaactgaaactttgcgcccagtccgcagggcgggccgcgcctttaccgcccagctgcctcccggagcccccgcgccctcccgacgcgcagagccatg

SEQ ID NO: 210098 - DNA, 122 bp, Homo sapiens
atgcaaacatcacgaagaaggttctgagaatgcttctgtttagataggtgaggtttatcccgtttccaacgatatcctcagagaggtccaaatatccacttgcagattctacaaaaactgtg

SEQ ID NO: 210099 - DNA, 122 bp, Homo sapiens
cagggtggcctcatggtcagagagggggtggtgggtcacgtgtgtctttgggggttctgacgggaagagtcagaaaattcagacactttgcatctctcttgggacactccagcagcgcccat

SEQ ID NO: 210100 - DNA, 122 bp, Homo sapiens
ttttttttaactgtacatatttacatacatacacatatggtgagggagagaacgtgatgacgtgagactctccatggagagtaggaggtaataaagaaataaaacaggtgtctgaggagagg

SEQ ID NO: 210101 - DNA, 122 bp, Homo sapiens
aaggaaagacaaggaaatacacagttctagaggcttctctcactccagtcctcaggggtccggaaagccggagggagtagaagaggaagttcccaaccccgtcacagacgcgcccgaacgca

SEQ ID NO: 210102 - DNA, 122 bp, Homo sapiens
ccctcagccagccttgtacccacaggcccaacaggccacttggctatgaggccagagcgtcgccataggggcccgaacgctagcgtttagggaatccgcaggctagaagtggaggcgggacg

SEQ ID NO: 210103 - DNA, 122 bp, Homo sapiens
tgttatttcatctgatgaaagttgtgggggctgcgggcaggagtgctaattgtctaattgcgtctgaagaggatagagcagaagaaaattcatcagtggcagggccaggaattgtttgctgg

SEQ ID NO: 210104 - DNA, 122 bp, Homo sapiens
aatctctgagccttaggccttggggaggagccactcggcagtcccgcggaatgaacattccgtgtgacacactgccacccagtggccacaatggagactgtcagaaccaggaaactgatccg

SEQ ID NO: 210105 - DNA, 122 bp, Homo sapiens
gtcatgttagagaaattaagagggaaacagcctcccagcctgccggctcagctgggcggccgctcttcccgcaatgcagccctaattgaatttcgctgttaacaatggaaacacattggctg

SEQ ID NO: 210106 - DNA, 122 bp, Homo sapiens
aggtctcagggaagtacttccggactatctctttcacttgcaatatctgaggttcttcttcgatcattgggtacattatttctacggctcctgggggtacacctcgcagacctggtcctgga

SEQ ID NO: 210107 - DNA, 122 bp, Homo sapiens
gggcatcacgagagatgtgagcttgaggccaggaggggtttggggggagccagtcctgaccggtcctgacaggacccagacatccagtcccaggttatttttatactgtggtttgtgcccaa

SEQ ID NO: 210108 - DNA, 122 bp, Homo sapiens
tgctacctgaaggtgaaataaaaggttttggcaaatcaccaacctgggtggaggagaaaccgccctgggcattctgctgcttcgtgatccacttcacgatgttggttgcagaggtcaggtcc

SEQ ID NO: 210109 - DNA, 122 bp, Homo sapiens
tggctccgggggaggggagggctcggtgggtccctgaagactgtcctccccgcgcgacgtcgcaggcgaagcagccccaggcaggacctcaaaaagcgacctgcagagtccgagcccctgac

SEQ ID NO: 210110 - DNA, 122 bp, Homo sapiens
gtaattaaatctccggctctgtttggaaaacaagaatctcatttagtgcctttgccccggcgctccctaatatctgcacccgtgttttctgctgggcaattactgtgtcctccgcggcttga

SEQ ID NO: 210111 - DNA, 122 bp, Homo sapiens
agcctccagagactcttcgtccattggccagcgagagtgtcagttcccaggctcctgccgcgcacgggcgagcccttctaggcgggaaaagttcagctgagagatataaaagagcagtcttt

SEQ ID NO: 210112 - DNA, 122 bp, Homo sapiens
cccagtgacaactcactgctgtcctctccccacagtgccctgggcttgctgtacttcatccggcgaggaaagcagtgtctggatttcactgtcactgtccatttctttcacctcctgggctg

SEQ ID NO: 210113 - DNA, 122 bp, Homo sapiens
cactgagaaattaggcagagacagctctgttcagtggaaagaaagtgctttggagccagacgtgactgggctcagatcctggctctgcctgttgtatgctttgcgatctttggcaacacagt

SEQ ID NO: 210114 - DNA, 122 bp, Homo sapiens
ggttccgtaactgacctattttacagggaaggaaagtgaggaacacatggggtgagctgccgccgagaccccactgctagtaattagcaagctgtggttcaatgcagccatctggctgcccc

SEQ ID NO: 210115 - DNA, 122 bp, Homo sapiens
ccgcggatgcgcgcccctcccctgcagccagcttactccgagggtccccgcgcgggcggccgcactcacccatgttaacgaagctcatgaccaggtcggcgcggcccaggcgccgctccgcg

SEQ ID NO: 210116 - DNA, 122 bp, Homo sapiens
ctggtgacgggctgcgccgaggtcgagacgccaggcttcaggtacacgtaccagaaatgacgtcacaggcggtgccaggcggggatccacgagctctggatgcttgcttggccggaagcgac

SEQ ID NO: 210117 - DNA, 122 bp, Homo sapiens
taaaacatctgctatgactttactttctcctgatagggtggctttccatcgttggcacttcgttggccttattggtatgctttatacactggttctcgtttccaaattggcattattattgt

SEQ ID NO: 210118 - DNA, 122 bp, Homo sapiens
ctcacctaatggagctaatgagagcaccttacccactgggttgctaatgaggatggcaggcggtaataattcctgtggaatccctagaacagtgcccggcgcatgcgaagaaccacgtaaat

SEQ ID NO: 210119 - DNA, 122 bp, Homo sapiens
gagaggccaccccgcccgccctctgtggccgccgggctggccgggccctcacctcgccctcggccctgctgttctcccagatcgctctgatccccccagcatgtcatcccggtcctcagcct

SEQ ID NO: 210120 - DNA, 122 bp, Homo sapiens
aatgctgaaaacaaaatagaaacaggctatcatgacttggttctgctgtaagtccagctccgtctgtctctcctacagcccctttgctatgtaaacagaggaaacacctcccacaaggaaag

SEQ ID NO: 210121 - DNA, 122 bp, Homo sapiens
gagggcggtcaccatgacggtggtgggatgtgccttcagcgcaggccaggcggcgctgggcggcctggcctttgccctgcgggactggaggactctccagctggcagcatcagtgcccttct

SEQ ID NO: 210122 - DNA, 122 bp, Homo sapiens
ccagcttggtggtgggaagcacctgcacccccaacagcagattcaacagctggcacttgacgttacaatcctggccgaggatcagtatgcaagggaggcagtccacaatctgctggaggtac

SEQ ID NO: 210123 - DNA, 122 bp, Homo sapiens
ccgtaacgcgaggaaggaaatctcgcaaggctggagtccttttggcgcccctggcggaggcggttagcagaggtgtctcccccgccggtggtggggctaaacgctactggcttcacggccac

SEQ ID NO: 210124 - DNA, 122 bp, Homo sapiens
tctggctaagttttgtatttttagtagagacggggtttcaccatatttgcaaactggtctcgaactcctgaccttgtgatccacccatctcaggctcccgaagtgctgggattacaggcatg

SEQ ID NO: 210125 - DNA, 122 bp, Homo sapiens
tctgcaggtctgaagccaccgtgcgcaggctcagcagactcagggtatcggtgtcgggggcggggccgggccccaggctgctgccctcctccagccccgcaccctcggccccctcaatcccg

SEQ ID NO: 210126 - DNA, 122 bp, Homo sapiens
gctcaccggctcggtggtgggctggtacgggctgctggcgcccgagatcatggaggtgctcgaggcctcgccctcgaagccgtccagctcctcgccgctccgcatgctgccgcccggcccgg

SEQ ID NO: 210127 - DNA, 122 bp, Homo sapiens
gctgcgaattcgtgtgctctctttggagtcaaaattgacacctcacgctaggccagtggtcgataggagagatggaacatttgggaaagttcctaatctcatttttccccccttaccttttg

SEQ ID NO: 210128 - DNA, 122 bp, Homo sapiens
ggccccgccccaaaccccgccccctgcgctccgggaaagcggagccttgcggctccaccccgactcccgagagaatcccgcccccaaaagagagacccgcccttaactacgccccaccgtcg

SEQ ID NO: 210129 - DNA, 122 bp, Homo sapiens
ggagtcggaaagaggtggctgcggcgcggcaagtgccgccagtgccagcgagcgcgacgtcgctcccaagcccccgtctctatggcaaccgagtgcgtctctaggaccgccactgcgcaggc

SEQ ID NO: 210130 - DNA, 122 bp, Homo sapiens
attggacgtccgcgcctgtcaatcttgggtgctgtcggccgacggaagtgacgatgggggcggtgggcggatgcctacccgagagaccaggggagctaagtgattgatggagcttccggaag

SEQ ID NO: 210131 - DNA, 122 bp, Homo sapiens
ttgggtgggcagagacaactgaaagccacaggacccggttggcacctttttggccgcctgcgcctttgcctgcagccccgctccctgggtcacccgaaggaggagctggcgctctttccggg

SEQ ID NO: 210132 - DNA, 122 bp, Homo sapiens
gggctcctctgtcccagctctgcggcccagggggtgacgtgatggcggcagcggtgctgacggaccgggcccaggtgagtggacggtggcttcgcggttgccgcttccttgccagcgctgag

SEQ ID NO: 210133 - DNA, 122 bp, Homo sapiens
tgctgaaggggacagcgggagcggctgtcacctggcgggggctgggaggctgggggtccccgagctcttccccgacctgctctggatgctggagcccctgccctccttcccttccctgtgcc

SEQ ID NO: 210134 - DNA, 122 bp, Homo sapiens
gcatgcatcttcctttcgtaggtttgttttctgaccaggccgtgggtctaacaggagccccgaacctctgggtgggctccgtgtcgcttgcgtgcctcactcatctggcaccgtgaccgcgc

SEQ ID NO: 210135 - DNA, 122 bp, Homo sapiens
aagcccaggattttaaaaagaattttacttctgacggagggccacagtgcccgcagggcccgtacctgctatcctgggaggtttgagggttggggtggtggggagaggagagtctctttcgg

SEQ ID NO: 210136 - DNA, 122 bp, Homo sapiens
ccgcctccccgctcccggcctcagctgtcgttgtccacaggaagggcggccccgcccagccgtggcgtccgaacgcagccgaggcaaccgaagtagcagggactggctgctagggattcgag

SEQ ID NO: 210137 - DNA, 122 bp, Homo sapiens
atccagatgtaaagaaaacttacgccataaacttcaaggtagatttcagttattactgcccggtggcaggaacctaggaaggtgaggtcaaggtgtggtttagtaagagacagctcccggga

SEQ ID NO: 210138 - DNA, 122 bp, Homo sapiens
gaggcgtgcgggacgcagagtgagttcctcggcgtggggaccggggctcgggggctgcaccggggggccaggaccgcgcttgccggagccaggcgatcccgcggcgcctggagacccagctc

SEQ ID NO: 210139 - DNA, 122 bp, Homo sapiens
atgagcccttggaagttcccaaagaggctgtggaagagccgctggtgctgctccaagctgcgctgagtggcgaagagtgcgttgtggaggccgtgaagggaggcgttgagggaggcggcccc

SEQ ID NO: 210140 - DNA, 122 bp, Homo sapiens
gcaaacaaagacaatggggtctttcctgattcctttagtttggagatgcagagaaccccacgtttctctaagtgaaatggcaagaagttatttgttagaatatggaactggtaacaaattca

SEQ ID NO: 210141 - DNA, 122 bp, Homo sapiens
aggtgtggttgtcggtctggagaacagcttggagcaaatcaattagggcttgtggcttttcggtataggacggtgtattgtttttccagttgagaaggtcgacgcaggtgaagggctggtaa

SEQ ID NO: 210142 - DNA, 122 bp, Homo sapiens
ggagaggtgaagttgagattcatcttgagcggagcacctgccacaggacaagggccgggacgaagtggaggacgcaggcagagtctccaagcctgctcgaaagccggcaaccaccctccgag

SEQ ID NO: 210143 - DNA, 122 bp, Homo sapiens
aaacgggtttagagaactctccagaaatccttttccttggtcatgtcttccctcttcatccggatgagaaactcactctgacctgtttgcttctccccccagcactttctggcccgcatctc

SEQ ID NO: 210144 - DNA, 122 bp, Homo sapiens
ttctatcacagccaaatctatactgcattttattcccttcaatgagataataataaaatccgtaggattttgaaacgtcactaacatttttaaaatgtatctgaagccccagaatccttata

SEQ ID NO: 210145 - DNA, 122 bp, Homo sapiens
gagccttggcgaactgcgctgccgtagccattccgccctagcctctgccgtgctccgcggcgattccgtccagaccggaaccagcgtgcgtctggctctcctccgccgctctgggacacctc

SEQ ID NO: 210146 - DNA, 122 bp, Homo sapiens
ctctggatgtagctgccaactcagcttgtcattcaataatgttaggttaattaaaatgtacgtgcagacagaatttgagtttaaaaactatactacttaattttctattcaaggggctagtt

SEQ ID NO: 210147 - DNA, 122 bp, Homo sapiens
gagaggccgggggtcccagcgggctcaggtctgtcggcttcccagcgtcgggcggagctgcgtcggagaaagctgctcatgaactcggaacagcgcatcaaccggatcatgggctttcacag

SEQ ID NO: 210148 - DNA, 122 bp, Homo sapiens
cacttgccaggtggtgcttggcgaaggcaagcagctcccacccgcccggggaatacagcgcgacccccggcggcatgctcttcagcaccaccccaggaggtaccaggatcatctaccactgg

SEQ ID NO: 210149 - DNA, 122 bp, Homo sapiens
cagtatctcccaatccatgaaggaaaatcaccgccgcggtggccttccaggtggcgggcacgatggctggcagcggggctgacatgttattgctgcacatacaccggctcagctcacagcgc

SEQ ID NO: 210150 - DNA, 122 bp, Homo sapiens
ttggcaacatcaacatccttgttcttgttttgccatctacttccatttagaactaggatgcggggggatggggaagaacaaggactttttggtgagagtgaaaatcattcatgactcaactt

SEQ ID NO: 210151 - DNA, 122 bp, Homo sapiens
gctttcttcccattggttgacaggcatcctactctctccgcccctccggtcgcttggtggcgtctcaggacgcagcgtgatgacgtaggtccccgacattccatatacaagatggccgcagt

SEQ ID NO: 210152 - DNA, 122 bp, Homo sapiens
ctgagtccccctgcagggctctccctagctgctctgcagcctctaggcccaggccacacacggcgctgtgtcactgtatactcgtggtttattttccaagacacgcatcctaattaagcaaa

SEQ ID NO: 210153 - DNA, 122 bp, Homo sapiens
agtgggaatgttgggcctggcaagatatttttttggcctggcaggcctgtcaaagcccatcgaatcacacatttgcctcacaaagggccaacccagagcaaagcccatggggacacttcgcc

SEQ ID NO: 210154 - DNA, 122 bp, Homo sapiens
aggaagtacttctggcttcctggaacttccttatattgagactgaattcttggctgggcgcggtggatcacgcctgtaatcccagcactttgggaggccaaggtgggttgatcacaaggtca

SEQ ID NO: 210155 - DNA, 122 bp, Homo sapiens
ctcctcaaacgtggcaggcatttttctgcctcaagaccttagcacttgatagtgactctgcgtgaaacctttctcccctcaagagccacagcctcatgcttgtgtctgtcaagagcacgctc

SEQ ID NO: 210156 - DNA, 122 bp, Homo sapiens
ctgaaaattggcttttggaactccgtccttccttaagcaagtaagaacctcagtagcaatcgtattttaaaggagaaaacaaaggtcttcactttcagtattatgacaaggtcaagtttgca

SEQ ID NO: 210157 - DNA, 122 bp, Homo sapiens
ggccatggttctgtaggacaggaaaattatactttagggtcttcaggagccaaggtggctcggccaacaagcagtgaagttgacaggtaggtttggtttggtttggttttcccatgtaatgg

SEQ ID NO: 210158 - DNA, 122 bp, Homo sapiens
gcctttccagagaaatcccttaatgcctccattctgctggtggcatatatagggagggctcggccttggctccacactgcgctgcccagaggccccgctgactcctgccagcctccaggtcc

SEQ ID NO: 210159 - DNA, 122 bp, Homo sapiens
gaaactacgcgcagttgttgaatagactttgcgctaggcaaagacaggttaatcgagggccgcatcgcgaaaacaagcgagtgttgtatgtttgcactgaatccaaatgtctgcattttcct

SEQ ID NO: 210160 - DNA, 122 bp, Homo sapiens
ggaggccccgccccctttcatgcaaaacccggcagcgaggctgggctcgagtggaggagccgccgcgcgctgattggtcgctagaaacccatttattccctgacagcccccgtcacatggat

SEQ ID NO: 210161 - DNA, 122 bp, Homo sapiens
aaagcaagggaagggctggccactggatgtgcgagcttctaccagaggggtgaggtcgggcgctctgaagggtaggatgagatggaggccacagagcgcctgtcaccgaggaccttcattcc

SEQ ID NO: 210162 - DNA, 122 bp, Homo sapiens
aagcctcttgagccccgccttgctgcttgcttcgcccgcttggcctggcagttcccggcgcggctctaatgtcttgctggcgcgactggttttgatcctgtccgtctgccctcctttttggg

SEQ ID NO: 210163 - DNA, 122 bp, Homo sapiens
gaggagcgggagagctggcagggaggtgcctgcagcccaggctctgtggctccccaagatcggtgaaccctttttatgcatgattggggctgaaaagtctggaacccccgggccagggaaat

SEQ ID NO: 210164 - DNA, 122 bp, Homo sapiens
actccgcacagtcgcccagggcaggaggctgggggtctgtagacctgtgccatccagagccggagtcggcactcggggaggactggaagtggctttcttcaggaaagggaggaaaaacattt

SEQ ID NO: 210165 - DNA, 122 bp, Homo sapiens
gatctaagctgcagtcttcatgctgtctgcattcctgtgaaaactgcacggaacttggcccgagcaagattgtgagattgagtccagcattttgccaatgcaggcgtggcgtgctagtgtgt

SEQ ID NO: 210166 - DNA, 122 bp, Homo sapiens
cctctcagaggaccacatcatctgggatggtaccttgggggggccagagcatagtgtcctcgatctctggaggactaaaccacccaaaggccaggcccccactgatagaagctccagagatg

SEQ ID NO: 210167 - DNA, 122 bp, Homo sapiens
gctcaaacttcatcatatgggaataaatggcctagaaagaaatgtgattaacccagagcacggaggttttagggagggatagctgaaagatgcatttgatgggttttcctaaggaagagagt

SEQ ID NO: 210168 - DNA, 122 bp, Homo sapiens
gcctcaccacagagacttgattctgtccaaaataaagacacctgagatgtggtggcctcacgtcttcccagtgtggagctgtggtggcgtctgaagtgaccgctttgcacttggcattttga

SEQ ID NO: 210169 - DNA, 122 bp, Homo sapiens
agttatccccgtaagtggataaagggttctcagtaattcagactctcacatggcttctgccgtatgcctgaggtgacggcgacggcggtaacagtgtgtcagagccaggtggagatataaga

SEQ ID NO: 210170 - DNA, 122 bp, Homo sapiens
gcctctcttgacgcagctgtaaaatgcggatgacaccatctggttttgctcagaggaatccggtttgggaaagggatgtgttttcttcccgggccaagttaccaccacccgcggcgcccact

SEQ ID NO: 210171 - DNA, 122 bp, Homo sapiens
gcccgcggcctaaggtaagagatgagtctgtagttcagcctgtcaatcacgcgcccctcccgcccggcccacaactcgggctccgggaagggcatcgcccagcaaacttgggcaaagcccgc

SEQ ID NO: 210172 - DNA, 122 bp, Homo sapiens
cggagaccccaggagaccgggctgggcccccaccctgaggcggcagcagccccgccccgtcgccacccgccgccctgggcccgcgacatcacctctggggtgccccaggcccttcgcggcct

SEQ ID NO: 210173 - DNA, 122 bp, Homo sapiens
ctccggcgcccgctactccagcctacggccggccggtttagctccaggcccgctcccccgcggagccggaggacacccagggactggagacttcgcgggactccccacccttccacgcctct

SEQ ID NO: 210174 - DNA, 122 bp, Homo sapiens
cctttcattccgcttccacctgggggtgcaggcagagcagcagcgggggtaggcactgcccggagctcagaagtcctcctcagacaggtgccagtgcctccagaatgtggcagctcacaagc

SEQ ID NO: 210175 - DNA, 122 bp, Homo sapiens
aaatgacgacaacggtgagggttctcgggcggggcctgggacaggcagctccggggtccgcggtttcacatcggaaacaaaacagcggctggtctggaaggaacctgagctacgagccgcgg

SEQ ID NO: 210176 - DNA, 122 bp, Homo sapiens
ccccggcccttggtgggctttctgttcctcatgagagcagtgaagtctcatagctgtccccgaccacctgcctggctgggcccaaaagacatagggaaaggtttctagctctagaaccagtg

SEQ ID NO: 210177 - DNA, 122 bp, Homo sapiens
gacctgaatcacaacgggccagctctagtaatacgaaggtgaggtctgggatgctgcgtgcggcgcgacgacaggaggtatgacctgggtggggtcagggaaagtcttagctgagaactaag

SEQ ID NO: 210178 - DNA, 122 bp, Homo sapiens
ggaaggtcaccgcccggtgggaccagtgagccaggtgtgaggggtggggggaggcctgcccgagtttgtcctgccatctcaggtggccagcggttccctggggcccggttggcctgtgcccc

SEQ ID NO: 210179 - DNA, 122 bp, Homo sapiens
atgaagtgctaatgatcctctaagcctcaagtctagtctcagccttagttcttgcccttccgagctgccttccctgaggctctgacagcattactgtcctctgcttcaccaacattcaatta

SEQ ID NO: 210180 - DNA, 122 bp, Homo sapiens
gggacagtcggcctcaggctctgggtgcccagcttcatgctcgcccccaaaagccctctgcgctcaaccttaaagggggcagtgaggtggcctggcactgcctggacatgatgtctcggcct

SEQ ID NO: 210181 - DNA, 122 bp, Homo sapiens
aggaatccttcacggccgccagagggcgcaaggagctgcggctggaagtactcggagggccggcggaggaggcgcgcggagcctgtaactcgcagcgcgcgctggaggtgggcgcggggcgg

SEQ ID NO: 210182 - DNA, 122 bp, Homo sapiens
ggcttgcaagccccagcctgctctccaaggatacacactgtcaaaggttcccataacacccgtggggcaaaacagaccaggctgcagggaggtggtggaaaatgggcttatggagagggaga

SEQ ID NO: 210183 - DNA, 122 bp, Homo sapiens
tgcaagtgcatacagattactgtaggaccatttcctgtgccttttaaaatttccttttctcgttttatttcacatattcctttgttttttacaactccccacccccattgttttatataccc

SEQ ID NO: 210184 - DNA, 122 bp, Homo sapiens
cgggaaaaatgaggcacacgacagcggctccgggacgaagagacccgaggaaaagaccgccgtggaacttccagtttccgggcccgccacctagtgtgccccaaatccgcacgcccatcggg

SEQ ID NO: 210185 - DNA, 122 bp, Homo sapiens
tgtccttccccactttctaaaatgatcaatccttagggcgtgaagtccccgaactctgtccgctgaattcactaaggcaagcagacccgatcctgaactctgcctccgctactgagcccgaa

SEQ ID NO: 210186 - DNA, 122 bp, Homo sapiens
tgcttcttaagggcctctgtactgtagcactcacacctggcactgacatttctgcttccacgttcccactagcccccggggtcttttcaagggcaatgactctgcatctcggtctttgcatc

SEQ ID NO: 210187 - DNA, 122 bp, Homo sapiens
gtgggacatccataaaatggaataccaccaaaaagcagcaatatggattagtctcaaagacgttgtactcagtgaaagaagccagtctccagaggtcatgttatgcattatgacatttatgt

SEQ ID NO: 210188 - DNA, 122 bp, Homo sapiens
gaaattctgcaagtcctttctggggtgcacccctgcgctaggctagaaggaggagaatttcgagaagcatggaaagcgtaagggctccttccagataaggcagacacaggaacaaaagctaa

SEQ ID NO: 210189 - DNA, 122 bp, Homo sapiens
cctttctgcatctgtgtcctcgggcccacgccgtgctctggagacagctgccatgagggccgcgggcgactgcccgggcgggtgaggctgtcctgtgtgaacgtgccacgcggctgtgccgt

SEQ ID NO: 210190 - DNA, 122 bp, Homo sapiens
acaggcaggggacagcgactgcttgggcctgggcaggtgagcgcagcgcaggccagggcccggcgtgtccgcggtgagcgcgggcggccagcagagggcgccagagagccaggagcggcccg

SEQ ID NO: 210191 - DNA, 122 bp, Homo sapiens
ttcaatagtgtttcatcttaactcaggctgagccatgcaagagagggaaagccaaaagcacggaaggtggccttggttttgtttagcgctgtctcaggatcagaatgggctggcaagctact

SEQ ID NO: 210192 - DNA, 122 bp, Homo sapiens
ccggcgctttacgcaggcgctgggggcccagccaggccgccacactcgcttcgctggtgacgggaggcacaggcttccagatgtgaaacgctaacaggctgtaatggcttgaactgaacagg

SEQ ID NO: 210193 - DNA, 122 bp, Homo sapiens
ggccacttgcaagagactgagcggcgctggagactcgggaagacctagagggcgggaccgcgaggcccggcccagcccggcgctcttccgtccgccctgccgggtgactgcagcggggcggg

SEQ ID NO: 210194 - DNA, 122 bp, Homo sapiens
gccctcgacgccgccgcgctgggccgggtgctcctgcagataaacccggacgccacgtcccgcctcggctgcttatttagcaaggcgccttctgcgcatattttacccggctgggggcagtg

SEQ ID NO: 210195 - DNA, 122 bp, Homo sapiens
gttccgcgacgctgaccgtgtatgtgacccaagagacttctttaccaaggccagcacggccggggacccggatttcacctgggagagacattagagctgggggtgcacattctgcagagtag

SEQ ID NO: 210196 - DNA, 122 bp, Homo sapiens
aacaaccagagacaccccccacccccaggtttctttcagctcatttctttaataaggagacgcagttcattacaaaataacaatttgacaagagatcagacaagaacaagagtccacataag

SEQ ID NO: 210197 - DNA, 122 bp, Homo sapiens
gcggaggtcacacccagcaatggctcaggctctggctcgcctgacaggttcccgtttgggcgccttctggcagtggagcagactttgatctctcctgggacagctgctgccagccagggcca

SEQ ID NO: 210198 - DNA, 122 bp, Homo sapiens
tactaaaatgaaaaagagctccaagacacggatgctaaaaaaaaagaaaaaaaaggaagtcgaaggatgatactatactgtactgtactatttaagacttgtcaatctcaggttctcccacc

SEQ ID NO: 210199 - DNA, 122 bp, Homo sapiens
ggtgcggggcggaggcggagcgtgggccgcggagatccggcgttcgcaggaggcttggtgcgcggcggggctgcacggggccacttccggagtagtactgcgagcagcggcgcgacagtgcg

SEQ ID NO: 210200 - DNA, 122 bp, Homo sapiens
cagaccagtaagggatctgggggctctaaccccattcatcgtaggcttcccctggagtgacggcttacaccataggagctgccttcttggtggaaggtcaggggacaggagacgaaacaact

SEQ ID NO: 210201 - DNA, 122 bp, Homo sapiens
tagactaaatctagactgcactaaaattcggggagtttttagaactggaaagaagggaatcgttttggcaacacatctcacaccaagcaagagtcagaggccaggagacggctggcacacac

SEQ ID NO: 210202 - DNA, 122 bp, Homo sapiens
agccctgcagaccccggcccagtcctgcagatgaagacagcaggtgaggccgtggtcacgcgagggcaacccaggtgggccgtggcctacggtgcggggtctgggtccggtccgggccctct

SEQ ID NO: 210203 - DNA, 122 bp, Homo sapiens
ggaggcgaggttgcagtgagccgagattgcgccattgcactccagcctgggcaacaagagcgaaactcagtctcaaaaacaaaaacaaggaggtgatctggtggggggacgctgtttcattc

SEQ ID NO: 210204 - DNA, 122 bp, Homo sapiens
gggctgcgcgggtggcagcgccgcaaaagggaggacataattgggctctgtgcttggagccggcagcgcaagccgcctctagtccgggacaacaatagtagcactgattcttttaaacgtaa

SEQ ID NO: 210205 - DNA, 122 bp, Homo sapiens
atcttcaactttaccatggaagcaatatggtggcttaccttcctgccccccgtgttgatgcgaagaggtgtcagaaaggggtcgaagatcatgtgactggtctctatgttgactggcgactg

SEQ ID NO: 210206 - DNA, 122 bp, Homo sapiens
gagagagagtgagctacagaggaagaaagaccacgcaaaagggagggggagagaggggggcgaagaggatgttctccggctcactcctacattaggtctctgtgcaaaggcagaggctgtgg

SEQ ID NO: 210207 - DNA, 122 bp, Homo sapiens
ttgcgggtgcgagagcctggaagggtgcaggggcgcacggagaacttggcctggcctcctcgcctcgcctgcaggggccacgcgcccggccggtctcctgagtgatgtcgccggcgatcaga

SEQ ID NO: 210208 - DNA, 122 bp, Homo sapiens
ggcggggacccagctgcgccccttcccgcggccctcctagggcctgggtgcttggaggctcgaggccccaagatccatgtcgcccggaatcccggtgcctaggccttgtcgcgggccctggg

SEQ ID NO: 210209 - DNA, 122 bp, Homo sapiens
aaaaggcatgaaccctgaccttctgttatttgtccttttatcatcaaatattttagcatgcgtggcatatagtaggcactcacaataaatgttaaactattaagtatctgtaactggcagtt

SEQ ID NO: 210210 - DNA, 122 bp, Homo sapiens
aattatccaaacagtgggcagcttcctcccccacacccaagtatttgcacaatatttgtgcggggtatgggggtgggtttttaaatctcgtttctcttggacaagcacagggatctcgttct

SEQ ID NO: 210211 - DNA, 122 bp, Homo sapiens
gtctgcgtcttcataagaaaggacgtgtttccgagcggccactgagaactacaggcaggccgaccggcaaaccacccacagccagcaccgggagctgcagaagccacggggccctcacaggg

SEQ ID NO: 210212 - DNA, 122 bp, Homo sapiens
gcagccgcctctgtgagtctcatctgcgagtcccgtggatgtggacagcagccgcctctgcgagtcccgtggacgtggacagcagccgtctctgcgagtcccgtggatgtggacagcagccg

SEQ ID NO: 210213 - DNA, 122 bp, Homo sapiens
cctccggggcccttcccgccggaagaaagcttctccgctcactaatcactcggcggcttccggagagcccgcctcctcgctcggcattctgggattggtagttttagtccagattgtgacgt

SEQ ID NO: 210214 - DNA, 122 bp, Homo sapiens
ggagtggccgaggcggttgggcggaggcggagcaggcgccatgtcagcccgggaagtggccgtgctgctgctgtggctgagctgctatggctccgccctttggaggtagagagacgccagtc

SEQ ID NO: 210215 - DNA, 122 bp, Homo sapiens
gagaaggagcatgaaaaccaactgtttgcaacccttgcctgccccatgcatcagccatgacgtggtgaccccaagaatttctagacaacatggcaggtccaatgcccaaggggtgtgtctgt

SEQ ID NO: 210216 - DNA, 122 bp, Homo sapiens
ttttcagtctgtcacaatcctgggtcgtcgggggactgtaccgagcgcccttggagtgctcgcagcagggaagaaggagcgagcagggaggagctgaggagggtcggagcggaatggacacc

SEQ ID NO: 210217 - DNA, 122 bp, Homo sapiens
acggaaacgcctccttcatgcagcggcggtgctgggccccccgaggctgcacctggctctcggctgaggattgtcaccccaagtcttccagctggtggatctgggcccagcaaagactgttc

SEQ ID NO: 210218 - DNA, 122 bp, Homo sapiens
cttaaaacctctcagtggcttaccaacacaattagaagagttttacattttactcagcctcgtgaagttcgagatgacctggcaccttcaggaatgaacacacacacacacacatacacacg

SEQ ID NO: 210219 - DNA, 122 bp, Homo sapiens
tttctcttaagttttgggtgagagattttttttttttaaggaagaaagatattctacaatcgaatgtacaactgagataatgcttaggagagaatgtatactgggtttgtgccttggaagtt

SEQ ID NO: 210220 - DNA, 122 bp, Homo sapiens
ctgccccgcgccccctttgtccccggccattgtttctgatttcatgctatcagaggtctgcgtgtttttctgcatgaagttgtcagcaggataaaagctcaggagcagggtcacgttgagag

SEQ ID NO: 210221 - DNA, 122 bp, Homo sapiens
tcaggcagcattctgaggagcttccctggggggtgctgggaacaccctgcaaacagcctccgatacggggagccggtggataccatccttttccagggagggaggccaaggcctagggaaat

SEQ ID NO: 210222 - DNA, 122 bp, Homo sapiens
gggggagaggggccagggggccgccctccaggaccagctcagggtttctctgcacggtctcgactggaggcagacggggagagaacagaggacaagaacagacacttgcatgggccatccag

SEQ ID NO: 210223 - DNA, 122 bp, Homo sapiens
gctggtgggtggctggagcccagggctctaggcagagcctgagcccactattgctccagccgattcctgggtcctggttagttcacaacagcaccagaaccagaagcatgcaaaatattctc

SEQ ID NO: 210224 - DNA, 122 bp, Homo sapiens
aagtgcaaaacccaagccatgtttgcttactgtcagcatgtcaggctttggtgccagacacgggaagttcctgggaagtagttaagacatgcaagagtttcagaggatgactagaaaaagat

SEQ ID NO: 210225 - DNA, 122 bp, Homo sapiens
gcccgaggctccctcccgcctccttgcacgcaccgtcgtgcgagcgctgggcggtgtgtgcgtccgtcgcgccctgtgttcgtcatcagccccgctccaggatgcacgaggggcgtggatac

SEQ ID NO: 210226 - DNA, 122 bp, Homo sapiens
tggtcactatttttggaattccttttggtttaccctgtccttccaaaaaatgtggtgccccgcgtgaaggcaacaaggcagcagcagtaaggttttgaagtcaatcaagtataaaaattatc

SEQ ID NO: 210227 - DNA, 122 bp, Homo sapiens
ctcggcccccgaaacctgcgggagccctggaaccagactggcggctgcgggagtgaggctcgctccgcctggccagggacgcggccggcggctgcacgagtcaggcttgctccggctggcca

SEQ ID NO: 210228 - DNA, 122 bp, Homo sapiens
gccgatcatctgccggctgaggcccttgcgctgcagcaggaagtgggccaccccgacgggcgtgtcgggcacaaagccacgctcgatgaggtactggactcccttctcaggcttcctggggt

SEQ ID NO: 210229 - DNA, 122 bp, Homo sapiens
acctgtgtgcatggcaccaaaacctggctctctctgtagtccttcacaccccgtgagtgccggtctcagctggtggctgcctgcaactcccctgagtgcccccctcgggtacaagcacaccc

SEQ ID NO: 210230 - DNA, 122 bp, Homo sapiens
gatcccgagagagggggagggcctggttggaactggtgggaagtggatgtggcgagactccggcctccctgcagtagactccaaaatccgcggccaggagttctccttggcgcagctcggcc

SEQ ID NO: 210231 - DNA, 122 bp, Homo sapiens
attctgtcctctagtcctttgagccttctctccttcagcagtttggcaatgcaggccccacgttttccaacaggagacagaaacccagtccctgtcatctctctctaaaagcctgtgataga

SEQ ID NO: 210232 - DNA, 122 bp, Homo sapiens
ttggggaaaccactgggaggaatgcgaggtggccagcatgtgtcccggcaaccccactgtcggggggtatgtgtgactgatgggccatctctacacaaaacctgcactgggccgggccctcc

SEQ ID NO: 210233 - DNA, 122 bp, Homo sapiens
atgatggggcccctttattgacaaagacatgttgcttttaaggtgttggcagttcttttacggtggcaaagttgtcctaaaaacagcccaaacagcccgaccggggtatgagtcagtggaca

SEQ ID NO: 210234 - DNA, 122 bp, Homo sapiens
ccatattgcctcttaaacttctctaaagatcctagctgtgaactcaagcttagcttcttacggacgattggtttggagaaaccaattaatttatctgttttcctactatcattggaaacgtg

SEQ ID NO: 210235 - DNA, 122 bp, Homo sapiens
tatacttccatgttaagatgctgtcgcatcggcgactccagctgagtgcaggacagggagcgaggggttctgaggaactcagcagacctatcctggaactgtgcttccagccctcactggga

SEQ ID NO: 210236 - DNA, 122 bp, Homo sapiens
cccgtccctgcgcggcctcggcggcctcggcggcggcggcggcggcggcggcggcagcagcgcggcccctttaaacgcctgcggcgccccccgcccccgccatcgcgcctccattttcccgg

SEQ ID NO: 210237 - DNA, 122 bp, Homo sapiens
tgacaatgcccttctagtggaaatcttttcccagggcctctgtcccaaatgctccaggcccgcaggggttaactagagtcccgcccatgagcccatctctgggaagctgacctgcttctact

SEQ ID NO: 210238 - DNA, 122 bp, Homo sapiens
aagcctgctctttctatccgctgggagctccaagagagagccagcatgggagcccatagacgaacagacctgcaaatgcggaaggtccctgggcttgccttttggtttcagttctcacagaa

SEQ ID NO: 210239 - DNA, 122 bp, Homo sapiens
cagaaggacagaacattttgcaggaggggccagaagccagaaacaagcccttctcagcaccgagcaggcccttcctccaggtggcacagagcctctaggaggcgggagagggctggaaagac

SEQ ID NO: 210240 - DNA, 122 bp, Homo sapiens
ttgcattttcctggaatcctagactcttaacattggaaaggatttctttgccaagtaattcgccctcatcattaacctctaagaaatgcagaggtggaattagaaggtgcgtgtctctttct

SEQ ID NO: 210241 - DNA, 122 bp, Homo sapiens
aagacccaagggcgtggaaaacgctcctcttaccgataaacttgaagcgactcatgactgcgcatggaggacctccccagcggaagcggaagtggccgccggcaactccgcccttccggctg

SEQ ID NO: 210242 - DNA, 122 bp, Homo sapiens
caagcaaacctgtgtgagtggggtgtcccgaggcggcagcctcccgcgatcctccgtgcacgccaccacccggctcatgctccaggcgctgcgcacaccccagtggccgcccaggacgtgcg

SEQ ID NO: 210243 - DNA, 122 bp, Homo sapiens
agccaaggcaatgcaaatcaacaagcttttttccatccctaaaattaaaggaagtttatccgccctcccaacccccagtcccttgagggaagtgctaaacatttcttgccctttccaaccgg

SEQ ID NO: 210244 - DNA, 122 bp, Homo sapiens
gcgctctcgctgcgttccagagggtaagggggcggggccggcgggcaggagcgcgctcggcgattcctcccgtgggatttggggagggcctggaaattgtccggtttccttcaggagccagt

SEQ ID NO: 210245 - DNA, 122 bp, Homo sapiens
ctccctgtgtgggctccccgctcccatgtcttcctgagagcctggctcttcccccggctgcgttccgtcctctatttttgctttgagttcagctgttgtaagtcaagcccacatgagcctca

SEQ ID NO: 210246 - DNA, 122 bp, Homo sapiens
tacagtatttaaatagtgaatgctgggcggcgacggcgacatggagagcggggcctacggcgtggccgaggcgggcggctccttcgacctgcggcccttcctgacgcagccgcaggtggtgg

SEQ ID NO: 210247 - DNA, 122 bp, Homo sapiens
cggcttatgattatacagatcttggacatatcacggacctgaacgtcaaccctgcaacaccggataaaacatctaatgtagctggaatagactctgaaaggacgttaggcattatctaaatc

SEQ ID NO: 210248 - DNA, 122 bp, Homo sapiens
ttacacccaaagctcagccttggtcctgtggctcagactcggcaaaaagcaacaacttcccggattagtttctatgcagagccgaggctctcacaagcacaagctaaaggctaggctgtata

SEQ ID NO: 210249 - DNA, 122 bp, Homo sapiens
gggtgtctgtgtgtgaggtcaccctcaaactgcaccgccggccagataccctcctgaccccgaggacttggtctggtctctctggtggctacaaccccagagttttaaggacttggaaagga

SEQ ID NO: 210250 - DNA, 122 bp, Homo sapiens
aaggggctccatgtgctgggacaccaacaggaaagggcttctgcctctccagcccacacccgagccacctcctgacccctggctgcaaaagcaggaaggggcaggagccagcacaggacccg

SEQ ID NO: 210251 - DNA, 122 bp, Homo sapiens
tcaaagctggtcttgcatgttgctctggcggcctctgtagcaggagttcactctgttttccgtggaggaggagtggaaggagggattcaagctctcccctagagacgctagaaagacagttt

SEQ ID NO: 210252 - DNA, 122 bp, Homo sapiens
gctgggacagatgagtcggagacaggccaagccggaacctcgctgggtaaggaacaggaccggagcgcgctccgggtgggagaggcttgcgctcctgcagccccttcccagggcctgcgctg

SEQ ID NO: 210253 - DNA, 122 bp, Homo sapiens
actttaagaagtgtctgggacacagtaattcctcaataaattctagctattcaccttatccgtgatcaaacttcgttagccacccttgtcaacagtcttttaaatgtgcctccactgttccg

SEQ ID NO: 210254 - DNA, 122 bp, Homo sapiens
cactgtctcctgccctgctattttaggattgcaattgttcctctattttgttcaaggctacggtattttcttggggacatttctgaatagggatattcagaacataataatcttcataaaaa

SEQ ID NO: 210255 - DNA, 122 bp, Homo sapiens
acatcaacacattgaaatacagctcttggctaaactccgcgagctgactttgaaaggtaacgggaagaaacatttcctttcaaaaggaatctggcagcctttgagcctttgaaacacaccca

SEQ ID NO: 210256 - DNA, 122 bp, Homo sapiens
ggccgacgggccaccagcccccagaaagccgggctccacggtcttggggagctcccgtgccgctgcagccggcaggcacagccactcaccaggcgtgagctcctgcttacgtcccgctccct

SEQ ID NO: 210257 - DNA, 122 bp, Homo sapiens
caccctcatgccttcctcaatccaatgcaattcagtccttttcattgccagcactgaaaccgtgcttgtaactggtgaattgcagaattagtggatgctactcagcctttacttcagttgag

SEQ ID NO: 210258 - DNA, 122 bp, Homo sapiens
gcctgtgagtgtcttgggggagagaagacttggtagcaggaactgcacgtacggaggttccgaggtcagaacaagcttgcaacgtccaggaaacgacaaggaggctcgtgaggccagaccac

SEQ ID NO: 210259 - DNA, 122 bp, Homo sapiens
agctgggattataggcgcacgccactaccgcctggctaatttttgtatttctagtagagacggggtttcaccatgttggccaggctggtctcgagctcctgacctcaaatgatccatccgcc

SEQ ID NO: 210260 - DNA, 122 bp, Homo sapiens
ggaggaggccggaagagggcctcagcgtggtcgctgaccagagtcctgctggctgctccccggcgtgcagccgtccgtgctggggttgcagtgacgtctcggggccgcttggtggtagccgt

SEQ ID NO: 210261 - DNA, 122 bp, Homo sapiens
cggccccgcctccttgtaggccccgcccccagccgccaagtcctgcctccggataggccccgtcctcacacctcccagccccggcataggctcccgcccaggcaggccccacctcccgacag

SEQ ID NO: 210262 - DNA, 122 bp, Homo sapiens
catcttagagcaccggtgtggatgcgcttggccccgagggggccgcgccctgccccagtgcgtgcgcctcctgccccagcagggacccgccctcaccaagtggcctccagtagcccctgtgt

SEQ ID NO: 210263 - DNA, 122 bp, Homo sapiens
cacaggaggcccacagagcccacttgggctgtgagagggactcctaaagggcctcgtcaccgacggccctcctcttttggtgcccactcctgccctctgtatgtccccaacctctcttgcat

SEQ ID NO: 210264 - DNA, 122 bp, Homo sapiens
cagcttctacacagtgggtgatgtctcatctcgcccaagagccctctaggtccgtggggccgatttgggattgctggggctgggggggtggtgtggcgcggggtgggggggcatgccaagaa

SEQ ID NO: 210265 - DNA, 122 bp, Homo sapiens
agccctaggttcatacggggcaaccatggcactgccactgggggtgagggcgcgggcctgcggaggtgaagggctgggctcagggttctcaccatggtgccggctcagggttcaagacaggg

SEQ ID NO: 210266 - DNA, 122 bp, Homo sapiens
ggggggtggaggggctttgcatggccagatatctccacaaattgcagtgaccctggccttcgagacagaaggatgcattttcaaagactggctctcactggctatgtgaccttgaacaagtc

SEQ ID NO: 210267 - DNA, 122 bp, Homo sapiens
acaggtgtgcagatcatggtgaaatacagtataggataaaaatggaatgtttaattcaaacgtcctttattgcaggagaacaacatttagaacagagatgtggtggtgctagttgaggaaca

SEQ ID NO: 210268 - DNA, 122 bp, Homo sapiens
tagtatcgggtggtgaatcgcatttcctctctgctaccctgtatactgactaatgggtggcgtatggggggtctccaagaggtgtgtttactccaattcagaagctataggatttcagtagg

SEQ ID NO: 210269 - DNA, 122 bp, Homo sapiens
cactgacttcaataatgaagccgcggaccctcgcggtgagtgttacagctcttaaggtggcgcgtctggagtctgtcccttctgatgttcagatgtgttcggagtttcttccttctggtggg

SEQ ID NO: 210270 - DNA, 122 bp, Homo sapiens
ctagggctcccagcagagcaggtttagggaaatctggcctcctaagcaccatgcccagggcgacatcctcccactcattcccactctctgaaaggtttactttgggtctggaatcttgccat

SEQ ID NO: 210271 - DNA, 122 bp, Homo sapiens
cccatttccaccgtctggggactccttttaccctcactcggactcaggagttcactgcctcggatctttggccctctgcggctgttcaaaggtaatctgtaggagggtagaccttgtctgtt

SEQ ID NO: 210272 - DNA, 122 bp, Homo sapiens
cacgaacaaatgcatcctcccaaaccagtctgaatccctccggacagggtgatgttaccacgcaactggcctggcctaatgagctggtttctgtcatccctcctggaaggttaccctgtaac

SEQ ID NO: 210273 - DNA, 122 bp, Homo sapiens
gcggccgggcgccccctccctccccacgaggcggcccagacaggccggctacgccgcccgcgcgctcgctggctctccccggactgagcctaattgatccagacttcctcggaaaatgcccg

SEQ ID NO: 210274 - DNA, 122 bp, Homo sapiens
ctagctcgggaagaggtaaaaattacttgacagtgtctctggactctcacccatccaaagcgtaagagaggatggggagtgtcagagtgggtgggcattggggaaagtgagttcttaagaac

SEQ ID NO: 210275 - DNA, 122 bp, Homo sapiens
acgacatccacagtaacagacacggctcaggtcagaccttgtggtgggttatgcttccctcgcgcaggcttctacacgcccgcactgggcccgccgtgtcgagacgcttgcgtgtggacaag

SEQ ID NO: 210276 - DNA, 122 bp, Homo sapiens
aggtgcccagcccttggtgtggtgaagctcaggctcttcctggcgccctggtctcctgcacggagctgcggtgagcacatccgggtcccgatggatgcatgcgtggggatggagggcgtgcc

SEQ ID NO: 210277 - DNA, 122 bp, Homo sapiens
cgcctttacctagtgagggccgccctgcttcagtgtgggctgtacagaaccgagtgtagacgggctgcctttacctagtgagtgagggccgccctgcctcagtgtgggctgtacagaaccga

SEQ ID NO: 210278 - DNA, 122 bp, Homo sapiens
gccttgcagtgcatgacttctgttaaactgtgtgtatccaaacctgtgtgcatcttaaaccggcagtctctgaactgggcaacatacatcctttacccttaaccttgagaggaacataaagg

SEQ ID NO: 210279 - DNA, 122 bp, Homo sapiens
ggctcactcagggtttccctgccttcggcccaggtcatcaatgccgtggagcaggattaccggctgccaccacccatggactgtcccacagcactgcaccagctcatgctggactgctgggt

SEQ ID NO: 210280 - DNA, 122 bp, Homo sapiens
aagcctggcgcctgactcctatcccagcttcggcctcttagttgctttcccttcaggcctcggtgctctcgagaggcctgtgcacgcttcatcgatgtgaagtgctcacaacagaggggccc

SEQ ID NO: 210281 - DNA, 122 bp, Homo sapiens
cttttcttcccttttgtcttaactgcattcagaaaattccacctctgcccctttcccctgcgaatgcccctggtcccagctccttcctgagtcctgttgctccaggtgcagtggctgtgggt

SEQ ID NO: 210282 - DNA, 122 bp, Homo sapiens
gccagaccctgtcttaaaaaagaaagaaaagaaaaagggaaaagatgccgtgtaaaatctcgttctgtgtctgaattgccgtagggctcagatcttcatttgaggttctgtgtctgaattgc

SEQ ID NO: 210283 - DNA, 122 bp, Homo sapiens
cgactgtaccttggactccctaaaaaggtttccgtttccacttccgtccagggagacttccgggagagcccggcgctccccgccacgcatccagcccctctacctccggcctccggcggact

SEQ ID NO: 210284 - DNA, 122 bp, Homo sapiens
accgaccggatgttagcagatttcccatagtgcctcgctagtggcgggcatgataacacacgccggagggtcgcacgcgggttccagttgtgattgctggagttgtgtattgccaggaggct

SEQ ID NO: 210285 - DNA, 122 bp, Homo sapiens
aagtggcagccagattaacccaggaagctctaaagcctttgctttggggagaactgccaacgtctggtgatttgttggggcgttttctggttgtcacaagcagctaggggaactggcattta

SEQ ID NO: 210286 - DNA, 122 bp, Homo sapiens
cgtggtctcgtggggccacagggccagcctgccggactgcccggttttatttcctgtcctcgagaacatttacagactggtgacgcaggcatgtggctagagaaaagtctgcaggtcccaat

SEQ ID NO: 210287 - DNA, 122 bp, Homo sapiens
ttacactaccctaaacattcattgagtcatttcctgctgataaatgtctatatgtagtcacgattatcacctatgcgtgtgatactaaactgtcctctctctttttaaaccaagatagcatt

SEQ ID NO: 210288 - DNA, 122 bp, Homo sapiens
tgaaatggcccagcaaagctgtctgttggggaatcttgcactctgtggagaatccctgtccgtcactaggtctttctggagagtctgacacctttcaaggccctgatagtagacattcacat

SEQ ID NO: 210289 - DNA, 122 bp, Homo sapiens
ttttcgttttttgattttttaaaagagacagtttcgctatgttggtcaggctggtctccacgtcctgggctcaagcgatcctcccgcctcagcctcgggactacaggcatgcaccaccttgc

SEQ ID NO: 210290 - DNA, 122 bp, Homo sapiens
accagcttccaccatccagatggcggatcctagattggcagcctgcgtctctctagctaccgtctctatggttcggggaatctccaggtcggggcttgaccggtccgacttttgcgcgtgcg

SEQ ID NO: 210291 - DNA, 122 bp, Homo sapiens
agcgcaagcgctcctcctcagccgggcccctgcgggtagggaaccagctaggtgtcagggcgcatgcgccagacctccccgcagcaggtggcctccgcacggctccgcccccgggtcgccgt

SEQ ID NO: 210292 - DNA, 122 bp, Homo sapiens
agagtaagcagatgtcttgttaggtggcatctcttcttgctgttaaggaaggcctgagctcgctcttatattctttgttcaacagatttgttaccggaccattgcctattctgtttttaaaa

SEQ ID NO: 210293 - DNA, 122 bp, Homo sapiens
catccctgcagcctccaccctgggcttcctgacccccactgcgtccggcaccgctggttgcgggcctgctccggctctctctgcccagctggctggcctgcctctgttccgacctcccctgc

SEQ ID NO: 210294 - DNA, 122 bp, Homo sapiens
gtccagatttacaccaaaaaggaccccctttttcctctccggaccacgtgaccccgcccacgtgacgtcccctccgccaatggccgggccgtctccccacggctcccggtaatgtggaaaaa

SEQ ID NO: 210295 - DNA, 122 bp, Homo sapiens
ggacccgggtttccgaggcagggatccagcagtctccggcttcaggggcttctagcttcccggctcccggcggggcgggcccggggaggagctcggcgggtccccgcccagaggcggagcgg

SEQ ID NO: 210296 - DNA, 122 bp, Homo sapiens
cgagcgcgtacgaggctctggggagggaggcggcgcagatgactcagccagggccacccccgaggagctcacattcaggttaatggaggtgttgccattctctgttgaagaagtgggggagg

SEQ ID NO: 210297 - DNA, 122 bp, Homo sapiens
agatttggggtttcgcagttcctggggtcgggggcgggggtgaagtgccctcagagacctcggcggagccccagttgcgctcccatctccagcccccactggagagagggggtccagggccg

SEQ ID NO: 210298 - DNA, 122 bp, Homo sapiens
gcaggccccgcccacactcccggacctggggttcgcggccgcagcgcctgcggcccagagcggggcctgcccttccacaccagtccgcattgcctctccctgcagcgagcggggaaaggacg

SEQ ID NO: 210299 - DNA, 122 bp, Homo sapiens
tctagaacttctgcatattggaattccagctgccttgcctgaggttttaaaatcctcactcgggagagataaaacccaggccttggtcttcatttccatatgtggggaagagcagtgaccca

SEQ ID NO: 210300 - DNA, 122 bp, Homo sapiens
cggatttggcacgggaaacatcttggtcgtttgccatttttcggctttggggagtgtttgcgtttcttctccgtttggcagtgaaacacatctcagaaaggtgggagggagagactcacgta

SEQ ID NO: 210301 - DNA, 122 bp, Homo sapiens
acactaccctcacggagctgccccgagggtcaggtgaggtcttcatgtggttgtggaatacggctcttggcacatgctgggtgtccacaaagaatccattttcttccacttttctctccctt

SEQ ID NO: 210302 - DNA, 122 bp, Homo sapiens
caaaagctgtctcattgctccttaagaacatgcatcccacaaccacggtcttcttcccggcgtgtgtgcattctgacttgcatgatctggcctcaagagcattgttggcatactgttgtttg

SEQ ID NO: 210303 - DNA, 122 bp, Homo sapiens
cactgatgatagctaatgagaaaaaaactcacaaataatctcgtgtttgcagaaagtttacgaatttgtgttgggccacatataaagccatagaccatgagtcggacaagcttgctataaat

SEQ ID NO: 210304 - DNA, 122 bp, Homo sapiens
attactctaggatactctccaaactcaggctatccccaaattctttgtttgccttcgatccggccgaagggcgttcgttttctttattttcttcccctccggcaccacgtccaccgccgcta

SEQ ID NO: 210305 - DNA, 122 bp, Homo sapiens
gcctggcgccgctgcgctgtgctgccagcgctgcgtcagtggccagctcatccccgcggccgctttctgcagctgcagcgggagcacccgaggccactgcccccccagcccccgcagtgcgt

SEQ ID NO: 210306 - DNA, 122 bp, Homo sapiens
taaactggttttccagcctgtaactaacctctgacccagtcagtctcttctgtgcaaccacggtaatcttttgaaagtgcaagtccaatcgtgttttcccgaattaaaaagcttttgctggc

SEQ ID NO: 210307 - DNA, 122 bp, Homo sapiens
atccctagttcaatggccttagtttagatctctatcaaaatagtaactattggcagggcgcggtggctcatgcctgtaataccagcactttgggaggccaaggcaggcgggtggctttgagc

SEQ ID NO: 210308 - DNA, 122 bp, Homo sapiens
caggtcccccaccacagcctgggccccgggagccctgagggtgaggacggggcgagacaccggaactgagggaggaaaaatagttcactggcagttttacttaagtaggtatacaagagaac

SEQ ID NO: 210309 - DNA, 122 bp, Homo sapiens
ctcttcttcttggggatgtcaattcctgttctgagcccgccccccacccaggcccttttccggtggtatgtgccagccggtcctgcatcccacatccccagctgttgacatttcattgccat

SEQ ID NO: 210310 - DNA, 122 bp, Homo sapiens
cattagctcagcaattaggaagcagttgttagaatgtgccagatgggctgacactgagggcgtacacacaataaggggagggagaatctgctcaccatgggccaggcactgtgctaagtcct

SEQ ID NO: 210311 - DNA, 122 bp, Homo sapiens
cgggctcgcaggcggggtgtctgggcccagccttccctggcgtgtccttggctctagctgcgggcgcgggacgcggcgcgggagacgctctccgggctgagtgacgcagagcgctgcgggcg

SEQ ID NO: 210312 - DNA, 122 bp, Homo sapiens
gagcgctaagtgtgcgtgagtcctcaggtctctccccagggcactgtgttggtttgtgtccgtcctggacgcggcgcgtctccagtaacgcgatgcgccggtgtcccggagtccctgggaat

SEQ ID NO: 210313 - DNA, 122 bp, Homo sapiens
cgcgcaggccccagcgagcgctgcatgctgggatccgtaggccggggcggcggatgtttgcgcagcttccttgagatgccaccgcccgctgcgccgcgcagaaacggggagcgcagcgcacc

SEQ ID NO: 210314 - DNA, 122 bp, Homo sapiens
gaggcggggtctcgtccagcagggagcaggcgtccatggccagctgcgccagggagggcgcgcagggccgtagggccgggaccacgggctcctcaccgaagtcgatgagcgtgacctcagcc

SEQ ID NO: 210315 - DNA, 122 bp, Homo sapiens
gagattccgagagtggcccggccggcttttcggctgccgcctgcgcacggtgtcaggcggcgggtgatggatcggctcggacacactccacaatagctcgcagacactctattacccggtga

SEQ ID NO: 210316 - DNA, 122 bp, Homo sapiens
ctattatagcaattatcacattttagaattagaattattatagttgtgtttggatctgaacgacccctaagtctgcaagtcctaggagggcaggggtcagtccttgacaatttttggaaaat

SEQ ID NO: 210317 - DNA, 122 bp, Homo sapiens
ggagcagatgagcgggtaagaccggcaaatccgtcacataccctcaggacgcagggagcgcggctggaatcagcagttatgcagaaaacgcaggccaggttactggactggaacatgcgggc

SEQ ID NO: 210318 - DNA, 122 bp, Homo sapiens
gactggatattaatcgatttccctcaagcctgcccttgctgtgaactagtgctacaagcacgggaaatccatctgctctctggcttaaaatatgtatctcatctaaaattgttcgttaaagt

SEQ ID NO: 210319 - DNA, 122 bp, Homo sapiens
agagagagaaaaggagagagaggaagaacaagaaagacataatcaacgtgtagaagaatacggtaacccacacaccaaaacagttgttgtctttgggcaggaggaataggtggccaagggtc

SEQ ID NO: 210320 - DNA, 122 bp, Homo sapiens
cggaagcaggacaaggataacacaatgaatgtcatccatatgctggagaatttcaccttccgcaaccacatctgcatgacgtttgagctgctgagcatgaacctctatgagctcatcaagaa

SEQ ID NO: 210321 - DNA, 122 bp, Homo sapiens
ggtcctatgacattaagcgggaagcactccagattgtgaataggttgttgggagacaaagcgggaagcgaatccgagatctataaagcaaaaatgaaaattgagggggagtgctggaagaga

SEQ ID NO: 210322 - DNA, 122 bp, Homo sapiens
cgcaggggccccaggtggaaggcgttgtcggcagactcatctactgtgggaggcggggagcgaggcaatgaggccgaagactctgagtcagtgtagcctgagcgctcgctgaccccagcgtg

SEQ ID NO: 210323 - DNA, 122 bp, Homo sapiens
tgctggaggctgggggcaggcggtgcccggtggcacgggcgccctggggcggtgttggtacgaagggacacgtgagtgtaatggtctttcagaaaccacggctggcctggctttggtttcac

SEQ ID NO: 210324 - DNA, 122 bp, Homo sapiens
catcgtgcaggttgtcaaagggcagcagggcccggccgttgtcttggaagcgctggttgacggccagcagccccagctggttggacatgttgcgcaggttcctggccaggggctcctcgctg

SEQ ID NO: 210325 - DNA, 122 bp, Homo sapiens
ttcccattatatttcataatcctcttctgatttcattaacctctccataacaaagacgggcgaactcaatctttcattttgcctttttgacttctgggatatcttctcttttctcctggctc

SEQ ID NO: 210326 - DNA, 122 bp, Homo sapiens
gactctggcagagtgactcaggctttttgcctgtagaaatcctgcctacactttagggttcggttgaaatgctacctctttatggatctgcccttgatttcctcctggctatttctgagctt

SEQ ID NO: 210327 - DNA, 122 bp, Homo sapiens
acacatgtccacccacagcactggagacagggctcagagctagccccgccgtggaggtctcggtaccacgttggtacccagagaaatttcttagccaccgcggtgcatcctcccacacaggc

SEQ ID NO: 210328 - DNA, 122 bp, Homo sapiens
ctctgactgcccaggatcacacctgaagactagggctggtcccacatctgtatttcatctcgtgcatctgagcgcagacttctttcccatgctcacccttgcaacctccagccccttctcag

SEQ ID NO: 210329 - DNA, 122 bp, Homo sapiens
ttttttttttgaaatggagtctcgtactgtcacccaggctggcgtgcagtggtgctgtctcggctagctgcaacttctgcctcctgggttcatgtgattatcctgcctcagcctcccgaaag

SEQ ID NO: 210330 - DNA, 122 bp, Homo sapiens
gaggaacagggtcacgggatagggcagacacccggctgctttttgtttgctagacaccagcgccagcccctgcccggccctcccggtctcctaagggttgggggggtgtcttaggctccaca

SEQ ID NO: 210331 - DNA, 122 bp, Homo sapiens
agtgctttaagtcaatgaattcctccttgggacccactatcgagaaactatcagtggtaacgttttaaaaaatgacaaattcaatctgctcttgacttgtgtgtcctaagatttccactaag

SEQ ID NO: 210332 - DNA, 122 bp, Homo sapiens
gcgcgcgccgctccggggcgggctctgcctcacgaggcgcggggcgcggagtggcaagagcgcagcatgggctgcgcagaactgaggcagacacccagaggctgccaaattgtcatctgagc

SEQ ID NO: 210333 - DNA, 122 bp, Homo sapiens
gtagaccccttagagttgtaagcccttaaaaggcctaggaatttctttttcggggagctccgctcttaagacacgagtctgccgacgctcccggccgaataaaaaacctcttccttctttaa

SEQ ID NO: 210334 - DNA, 122 bp, Homo sapiens
tttgaaacggagtcctgctctgtcgcccaggctggagtgcagtggtgcaatctccctcaccgcgacctctgcctcccgggctcaagggagtctttagtctcagtcccaagcagctgggactg

SEQ ID NO: 210335 - DNA, 122 bp, Homo sapiens
tgggctcctgttcccgcttcctgcgaaggcgattctgaagctctttcaaggtcaggccatcgctgtcactatcggaggtgtcatcgtggtcatcccctcctttcaccttttcagaagaggct

SEQ ID NO: 210336 - DNA, 122 bp, Homo sapiens
gcctctccgataaggtggcatttgggcaaaggcttgaatgaagtgagagagtgagccatacgtttatctgagagagaggcagataattccaggcaaacgggacagctaacctaaaagctttg

SEQ ID NO: 210337 - DNA, 122 bp, Homo sapiens
tcgagaccagcctggccaacatagtgaaatcccgtttttactaaaaacacaaaaattagccgggtgtggtggtacacgcctgcagtcacagctactcaggaggctgaggtgggaggactgct

SEQ ID NO: 210338 - DNA, 122 bp, Homo sapiens
accccacacgaggcagtggtgtgggagccagtacccggaaccgtaaaagcacgactttcccggagcccaggcactgaatggcacccactgcgcatgccccagagcggcgacgaatgggagcc

SEQ ID NO: 210339 - DNA, 122 bp, Homo sapiens
ttccggaagttgcaggtcaacctggcggcaatttggcaccaggagccaccagtgtggccgcggcccctgaccctgtaatcccacatcgggcacccagcctaagaaaacgacacgtttgcttc

SEQ ID NO: 210340 - DNA, 122 bp, Homo sapiens
cgcggcggccgcggggaacgatgcaacctgttggtgacgcttggcaactgcaggggcgcccgcggtccctgcccccacgccctccgcgcgggccccgccaccccggccccgacggcgcctgc

SEQ ID NO: 210341 - DNA, 122 bp, Homo sapiens
agggttagtcccagaccactgatgccaattggctgactggtcaggggttgcaggagacctcggaggttacattactgcccggaccctctatctccttcccctcacagcataactcaaacgtg

SEQ ID NO: 210342 - DNA, 122 bp, Homo sapiens
ggtgcttggctagcaaagggaagcttcactgtgtctattagtacatccccatacactccacgcctcaacaactgtcagcactcactccctcccggcccctcacagggccctttgcacccaca

SEQ ID NO: 210343 - DNA, 122 bp, Homo sapiens
tcagtcccgcaggcagaggggctgcgcctgggcctacgctcgcgatacccagaatccactcgcacctgcgaaggcgcccctgccctgtgtgaatccagcgggctcttcgtaccttcccgacc

SEQ ID NO: 210344 - DNA, 122 bp, Homo sapiens
agggggatccccagcagtgtgctggcggcagggaccctgacaaggtctggagcctcagagcgcacctgcccccacttacaagccccggcctcggggattgggtggagtgtcccctgcctcca

SEQ ID NO: 210345 - DNA, 122 bp, Homo sapiens
ggcgaagcaccatccttacacacgtagtgcctttccacctgtcgccactgggtggcatgacgagaccatcaaactgctaaggagggaggaggccttcagcccagccctgcctaagtgctcac

SEQ ID NO: 210346 - DNA, 122 bp, Homo sapiens
taagatgcgcggacggcgggcgcgcctctggggtgggggctgtggccgtgtctagctgttcgggtgtgctgtggtcatcctccctgcgcacctacagccgcagaccgccggtggggggcggg

SEQ ID NO: 210347 - DNA, 122 bp, Homo sapiens
ctttgtggggaaatgagggaaggggagagaactagcctggacggagcacctaatgtatgccggcggtgtggattaaactattccattacggctcaacattggggtattgcgggagtaggtga

SEQ ID NO: 210348 - DNA, 122 bp, Homo sapiens
agcccggctccttcccctcagcacttggccggagcccgcgcggttcctctcctcagcgcgcgtcgtcccctcagggctcccggttctcgcagttgatcaagtgaggcagaacgggtagtgcc

SEQ ID NO: 210349 - DNA, 122 bp, Homo sapiens
attggtgtatctcatcctataaagcaggtggtatccttcccatttcacagaggcatagtgcgtctccaggctgttaaacagcatggcctaagctacatagctccaaggtggtgtggctagaa

SEQ ID NO: 210350 - DNA, 122 bp, Homo sapiens
cccccatggagcagcctgggccagcctctccttttcacggctgaaccgtattccaccgcacggatcagcctcacgatgctgacccagtcctccgcccagggacacatgggcagcttctgccc

SEQ ID NO: 210351 - DNA, 122 bp, Homo sapiens
ggcccagaccccaccacgtgaaagattcagtttggggagtcgagagagaggatcgtgactcgaggacgttcctcgggatgtcctgcaatcaccagtcttcattcataattcccgctcctggt

SEQ ID NO: 210352 - DNA, 122 bp, Homo sapiens
tcctcgcccatgtccctgtccttgttgcatagccggcctccagcgtgtggcttcgtgcagcgaccagaccgtcgtgtgactttctgccacggttgctggggttggcactggggcagacctgc

SEQ ID NO: 210353 - DNA, 122 bp, Homo sapiens
ttagtggggtggaaggtgaaacccttcttataacaacctaaatgctaggtggcatatgatcggggctataaaagtgtctgtgtggacaacctgagacctgtggggctcagggaagggactga

SEQ ID NO: 210354 - DNA, 122 bp, Homo sapiens
gttcctagctttggagcatgaagcagaagaaggagctgagcactgcccgggtaggggattcgaagaggcatgctccgctgccagtggtgtcaccttctgttgtgtaaatcgcagctcctgcc

SEQ ID NO: 210355 - DNA, 122 bp, Homo sapiens
ttgccagttctcatccacccaggaaggcacattgtggctgctgggaaatggatgcgcctacgcccttccctcccctcgcagtgttttccaggactggtccagtcttagcggtggagtttctg

SEQ ID NO: 210356 - DNA, 122 bp, Homo sapiens
aacagctagcctggaatggagagagaggcccctgcaggggaagcgcgacccccgtgctgacgccggggctccagcaaacaccaggcaaagcaacaaaaagcttcagctggaaccttcaggaa

SEQ ID NO: 210357 - DNA, 122 bp, Homo sapiens
ctactactttgtctaccacgcgtcgcatacagccaacctgtgcgtgctgctgtaccgcagcggcgtcaaagtggtcaccttctgtggccacacgtccaaaaccaatcaggtcaactcgggcg

SEQ ID NO: 210358 - DNA, 122 bp, Homo sapiens
ctgctacgacgaggcctttcccatctcccacattcgcctctgggtgctgcagatcatcttcgtctccaccccgtccctgatgtacgtggggcacgcggtgcactacgtccgcatggaggaga

SEQ ID NO: 210359 - DNA, 122 bp, Homo sapiens
ctcggttctcgacagcgcccgtgtgatgatgatgctcacgctccggtgtgacacagacggcgcgggagctgcacgggagagtgctttggaagtggaagccgcaatgtcatgtaagctgttga

SEQ ID NO: 210360 - DNA, 122 bp, Homo sapiens
gcccagaaggagccctacactctacagctccttgacactccaggagagagggcagctctgcgcttccagccaagatctgagacccacttgctcacctgtgctcgtgtagtggatcttccagc

SEQ ID NO: 210361 - DNA, 122 bp, Homo sapiens
gaatcagagcccctccttccctcccccactgcccaggttttacagccatttccaattgctcgcttatttcttgaaagacattttagaaacttgattggggtgagagtgggaaggaatgacga

SEQ ID NO: 210362 - DNA, 122 bp, Homo sapiens
tctgacccccaccccaccccacttcctgtcatgacctgaactagtttttcaggtttctttcgaatctcctttgttgagaggggatgcattcagtcacttgggggacttttattttatttttg

SEQ ID NO: 210363 - DNA, 122 bp, Homo sapiens
tggactggctggatcacgtggttggcgtctgaatttttcagaaacggccaaactgttttccggcatggctgtgccattgtgcctcccacccgtgatgtgagttccagcccctcctcaccctc

SEQ ID NO: 210364 - DNA, 122 bp, Homo sapiens
gtcacttcctcggggggggacgtacataacgtcacttccgggtacaggcaggcggaagagcgtccctctccaattttttttttttttttttttttttttgagccagagtctcgctctgttgc

SEQ ID NO: 210365 - DNA, 122 bp, Homo sapiens
gcacatggctgctgggactcaagcgctcgtgttgtctgcgcctctgtgggactctggggacgggaggcaggggaggcccccgcaggccggccaggggctgggggctgggggccgggggccgg

SEQ ID NO: 210366 - DNA, 122 bp, Homo sapiens
tatgcaaataccaaacattacccacataaccccaaaattattctgcatcagcatcactaacgaggtcttcccatgcagaacaggaagagctcagggtggaaacacaggccacttctaagagc

SEQ ID NO: 210367 - DNA, 122 bp, Homo sapiens
ttttaaataaagaagatgagcatcgccccctccatcatccctgcccacacctctcaccagcgcccactgcctgggtgtggaccagcccctatcgtccccatcgcccccttcgcccccttctc

SEQ ID NO: 210368 - DNA, 122 bp, Homo sapiens
ggtgctggcggcccaggcccgaggtcgcccacggccgaaggggggactcctctctgagaccgcagaacggggctgaggccctgaaccccgtgtgctcgtcctaaaactaggacgaatgtacc

SEQ ID NO: 210369 - DNA, 122 bp, Homo sapiens
cagcattaaaattatccactagaaaatatttatgcctgttttgaaaagtctggctgggcgcggtggctcacgcttttaatcccagcactttgggaggctgaggcaggtggatcacctgaggt

SEQ ID NO: 210370 - DNA, 122 bp, Homo sapiens
gcagtatgttgcggcacttgaattccaggtgccttagctcctcctccagcatggccatctcgtggcccaggctctcgttgcggttgacgtccagggcgctgttgcctccggaggcccgggga

SEQ ID NO: 210371 - DNA, 122 bp, Homo sapiens
ctgcagccccctaaacccaggaggcgccctggcccgcgctcgccccccagggcctcatgtcggaaccacagcctgacctggaaccgccccaacatgggctatatatgctcttcctgcttgtg

SEQ ID NO: 210372 - DNA, 122 bp, Homo sapiens
acaatcagcgtttttatattcagggaaatcaggaacactgccacccgcccgccaggccggcgcccatgccagacccagccaaggtgcttctggccacatcacccctgctggcctgcagggag

SEQ ID NO: 210373 - DNA, 122 bp, Homo sapiens
ggcgactgagcctgagaagtcttcccctgcagggtggtccaggcctggcagcagaggcagcgctggattattgggggccctctgtctggggtgaggcccgcctcagtcctccctcggcatct

SEQ ID NO: 210374 - DNA, 122 bp, Homo sapiens
ttttttttttttttttttttttttaattaactcttcaaggccacatgattccagtacaaccgcttgcggggttccaagccacttcttggctatgtaaatgcagcacatagactagccatgtg

SEQ ID NO: 210375 - DNA, 122 bp, Homo sapiens
gaagagtatcctgaggtgttcactcaaacgtgtcccaagcctgcctccgagtctctcgggcggtcgcatccacacactcgcacgacgatgacctgcttgcatcaaacctgcacacatcacga

SEQ ID NO: 210376 - DNA, 122 bp, Homo sapiens
cctgtagctctcttgattcaaatgaatacatcacttagaagttaaaaccaaaggacatagcgtatatcccagatgaacagcaaggatgggtctttgaggtttgctttttcaacagcagtttt

SEQ ID NO: 210377 - DNA, 122 bp, Homo sapiens
gcatccaattcttgcagccttgcagcctggtgctctgccctgcatgtcagagttggcatccggctggatccagaggaaagggaaactgctctctctctctcctctgcctccacttctcttgg

SEQ ID NO: 210378 - DNA, 122 bp, Homo sapiens
gggcgcgctggagcagggcagccccccggacatctccccgtacgaggtgccccccctcgccgacgaccccgcggtggcgcaccttcaccaccacctcccggctcagctcgcgctcccccacc

SEQ ID NO: 210379 - DNA, 122 bp, Homo sapiens
tgtaagtgcttgtggtctttttagatctatgcgagaggaaacatggccggtccttcattgcgttcttctgagcgcactggatagatcaatttttggaggccctctggtgcctgacatgtagt

SEQ ID NO: 210380 - DNA, 122 bp, Homo sapiens
agatcagcctctttcccaaggacagctgggcttggtgaggtctggggccagagtcagcttcgggaggtaaaaacagccagggaaaaccttcacgtttgtctctaactttccatagctggaat

SEQ ID NO: 210381 - DNA, 122 bp, Homo sapiens
tttcttttttttttttttttttttttttttacattgaacagacaggatctctgtcctttccgtttaaacaggctggaccggttcaagttcccagccagaccaggggtgggggtggcgagtgt

SEQ ID NO: 210382 - DNA, 122 bp, Homo sapiens
gggacacggcgtcagcgtccagcttgtccagcgcctcggtgctgccgttgaagcgcaccacgacgtccagcttccggtcctgcaggccggcgcgctcctgcctcagcagccgccgcgccgcg

SEQ ID NO: 210383 - DNA, 122 bp, Homo sapiens
ataactggaactactcttttaagtttcttttgttttctttgtatgaattcccggcaagttcgttttactaaaagcaccaaaggttttcaccagacataacagcttcctgaggtgctaggcct

SEQ ID NO: 210384 - DNA, 122 bp, Homo sapiens
acgtttgctgtggactaaacaggagccactggactagagtacacttgactctcggctctgcggaccaaaaattccaggactaaggaatagcaaggttaggctgaaacagtccacacagggct

SEQ ID NO: 210385 - DNA, 122 bp, Homo sapiens
ctacagcagcaaagtaaccatacagcggatcctgagtttgtccgggaaacgcaggccctccgggagcccctccatactgtgaaacaggaaacacatacacgtcattctgccgaatcaagttt

SEQ ID NO: 210386 - DNA, 122 bp, Homo sapiens
cgcctggcaggacgactgagcaaggctttggaaaaccagagagattagagcggtgagttgcgctggtcacattggatacctgcgcgttaggagattctggagccagacggagagccgaatgg

SEQ ID NO: 210387 - DNA, 122 bp, Homo sapiens
ccgctcgccccgccgcccacctgccaggggaaggagcgcagtgcacgcgccgccaggaagcggcgctccaaactctgcagcaagagttcggtccccgcgttctcctcgggcgccatgacgtg

SEQ ID NO: 210388 - DNA, 122 bp, Homo sapiens
aggcttcggagggactattcgtatgaaagagtgggtcctacctcttgccggggtcggggccgaggcgagtattttgccagagggaggggttttcgggggacctatgggggacgagggcgggg

SEQ ID NO: 210389 - DNA, 122 bp, Homo sapiens
atcagggtccactcttgtatatcatgactacctattcccacctcaccctattcctcattccgtcagtgactttcagccacccgcaggcttacaaggttctgcgtcgccctaggcattttctt

SEQ ID NO: 210390 - DNA, 122 bp, Homo sapiens
aagtaaatgtcagaaaaactagtatttggaactttgagacaagggttggccctagcaatgcggtctggggatgggtacggttgcttctcattataaactcttctgcaaagttgtatttattt

SEQ ID NO: 210391 - DNA, 122 bp, Homo sapiens
agccaggcttttccttgtctgcccatacgaagaggagtccccgagcctccatggtgcgcccggcccccaagctgcagcacggaacgtgacacatgtcccggctcccgctccctgcggggtcg

SEQ ID NO: 210392 - DNA, 122 bp, Homo sapiens
tcaacttacctggacagagcaatctcatttttgctcaccatcataagttgttaagagctacgcatctctgactgccatatggttctcttctttccttcctttaatgggactttttttcctat

SEQ ID NO: 210393 - DNA, 122 bp, Homo sapiens
tcccaaggggggcggcacacactacggcgtggctctgcgctttgccttttccataacttccgtaggatccgccagcagtgtactttcagtttctactttgcgcttggtctgcaggttcaatc

SEQ ID NO: 210394 - DNA, 122 bp, Homo sapiens
ccgcgttttcctggggaagcggcgggcggggtggagcagccagctgggtccggggagcgccgccgccgcctcgatggggtgagtgcgcggcacggagttgggaggctcccggcgcggggtcc

SEQ ID NO: 210395 - DNA, 122 bp, Homo sapiens
ggagaacgcggagaggcgcggcgaggctgggagcgggagacggcgccgggaggcgggaagcggaccagagaatgggagaagcccggcaggtggacaggaggaaacaaaacccaaacgcccca

SEQ ID NO: 210396 - DNA, 122 bp, Homo sapiens
ctcacgcaggaggcggagctacgctgcgcagccaccgcccgtctgtgtgactacatctcccgaaatgcatttcagcgtcgcaagagatcgtcaatccagcctcatcccggcatgcatcggtc

SEQ ID NO: 210397 - DNA, 122 bp, Homo sapiens
ttctgtgactgtagaacagatgttggtggtgagccctgacccaggctcctgtgcacacaccgccgcagggcccccgggacagctgcacacgcatgttgtgtgtgcacatgcactcgtgtacc

SEQ ID NO: 210398 - DNA, 122 bp, Homo sapiens
gtttctctggctgtagatgaaaaggttcagcatgggggtgaccacagcgtacatcactgacgccacgacaccattcctggggggtgctgccacagctgaagtcaggtacacgccaatgtctg

SEQ ID NO: 210399 - DNA, 122 bp, Homo sapiens
gcctggaagctgaaccagagacaggcggtcagcggattacatgggtggccacggagggggcggagcctgctggggaagcccaggaggcactcacacctgcctccccgtcccgggctcacctg

SEQ ID NO: 210400 - DNA, 122 bp, Homo sapiens
cttgatagagtcctagaagtgggtgaattcatacgcaatttgtcagatattgccagattccgctccagggtgtttcccgtctgcattcccaccagcagtgcacgagagcacctgtttcccca

SEQ ID NO: 210401 - DNA, 122 bp, Homo sapiens
gtcttgtgagggctttttgaaggatgagtttaaagacaatgagactggcataagtgaacccgttgaaggctttctcagtcaagtaggtgagggaagatgaaacttgaggtggtgccaatggg

SEQ ID NO: 210402 - DNA, 122 bp, Homo sapiens
ccactgtttgacacacaaccgcttcagctaagtcaagagtgatctctggcctgggggtcccgggctcagtgaagtgccgagggcacgcagggaggtggcggcgaatgactggggtggcgtgg

SEQ ID NO: 210403 - DNA, 122 bp, Homo sapiens
ggcaggaaacacccagctcacgccagccgggggcggaggcggggccggagcgataacttccgctgtccgcaccccacttccgccccgcagagggcaacgtcttaagccgtccgttgtgcgcc

SEQ ID NO: 210404 - DNA, 122 bp, Homo sapiens
cgcgctcttcgccagcgtctacaagctctattttggcatcttcatcgtggcccactggtgcgtcatgaccttctgggtcatccaaggggagacggacttctgcatgtccaagtgggaggaga

SEQ ID NO: 210405 - DNA, 122 bp, Homo sapiens
aggacttggacatacgattctaaaatccgtgaatgcccacatgtgtgacgaccatatgcccgtgtcctgaggttttctctccagacagattccagttgcccacgagagggcgctgcagaatc

SEQ ID NO: 210406 - DNA, 122 bp, Homo sapiens
agcaggcaaggccagtatctgagaacagggccagccagatgtggacttctccaaataaagcgaaggcaggaggtgctgattgagctttagggtctaatggtaaagaaaacaatttttaggtt

SEQ ID NO: 210407 - DNA, 122 bp, Homo sapiens
aaaattacttctcttctggaacctcagtttccttatctgtacaatgggaagcctgatgcccgcttgattgtgatgttgcgaagaaccgaacacgtgcgtgtactagttccctcttacccgac

SEQ ID NO: 210408 - DNA, 122 bp, Homo sapiens
ttcgcagcaaatgatcttattttctgaagtagcagctttctattgaaattcttcatcagtcgctgtcatggggaatttctcccccttttctctttctttctaactggtgaaattgacagtct

SEQ ID NO: 210409 - DNA, 122 bp, Homo sapiens
atatgtttagctgtcattattattactgccaagacaactgtgcaatgctgtgtttgttttcggttttaacttctagactaagaactcttcgaaaacaagggctgtgtctttatcatatcccc

SEQ ID NO: 210410 - DNA, 122 bp, Homo sapiens
cctcctcctcctcctccttggtaagaaccgaaacgataccaacccccagccttctgtcaccgggccagcagctctaactccctccagtgcggccccgcactctatcctgcctgcccattccc

SEQ ID NO: 210411 - DNA, 122 bp, Homo sapiens
cagggttggggaaactgaggcaaaagggcaggccattggaaccaggctctaggaagaggccgggagtgactgtgaccaactgtgcttgcagagtgtggtgatggttgtcttcgacaatgaga

SEQ ID NO: 210412 - DNA, 122 bp, Homo sapiens
gaaggcaaaggaactctctatctgattggtttccattcagcgtttctgattaataagagacgtccctcaaataggaagatattgccgctgatggcgctgcagggcgccaggtttgggcttgg

SEQ ID NO: 210413 - DNA, 122 bp, Homo sapiens
aagctcagtatgttaattcgactccaggacagctttcagagacagtggctaagagaagaacgaggtcccagggggatctcttgaggtgacttattttgacactctttgggaaagttatctag

SEQ ID NO: 210414 - DNA, 122 bp, Homo sapiens
atgagcaactgcgcccagctcttgtgtaccttatgtgaggaagtcctgctcaatcaggatcggtcacgcaggccctgatcttgctactctggttccatgtcctatggaagaccaaagtttac

SEQ ID NO: 210415 - DNA, 122 bp, Homo sapiens
tgcctggcactgctgggtgcagaggaagggaagaagcaccaggggtgggcttggccaggacgtgccctcctttcaagggtccagccaccttgtttaatgtaagggaaagagaattcatcttg

SEQ ID NO: 210416 - DNA, 122 bp, Homo sapiens
tggggcagcacactttaggcgtttcaccaagaggctggcgacatgctaggtcaggttgtccggagaatcggggctgaatgggagagatcttgagggcaagagcctcagagaccttcaggcac

SEQ ID NO: 210417 - DNA, 122 bp, Homo sapiens
gctgcaggaggaacgtggcttcacgagttcggctcctcggccatccacagcccgggcctccgcctctgctgacctggcggctgtagaaggcagaagaggcctgaaacctgcagcaggagcac

SEQ ID NO: 210418 - DNA, 122 bp, Homo sapiens
ggctgcagtgagccatgatcgtgccattgcacttcagcctcagtgacagtgtaagacccccggctctataacaaaaaagaaaaaaaaagaaaaacagtacatagattctctcaatagtgaat

SEQ ID NO: 210419 - DNA, 122 bp, Homo sapiens
gcggtcagataaatcatgttaaagccattccaccgatgaccataaattagggggcctggccgccgtccctcccaaggacaccgcagactgagattattctgtcggccgcactcggcccccaa

SEQ ID NO: 210420 - DNA, 122 bp, Homo sapiens
gggggggggttggaaggggggtggggggcgttagggaatcacgtgcttttgttgaccagtcgtaaattctcgctgatgacctcaagaggtaattcatgctctatggttacaaataatgacga

SEQ ID NO: 210421 - DNA, 122 bp, Homo sapiens
cccccacagaggcaagcccactagagctgagattcactccgagttcctgagcgcctgagccgcgggcactgcgtctctgcagcttccagccaacacctgcgcccgtgaccagacgaacgcct

SEQ ID NO: 210422 - DNA, 122 bp, Homo sapiens
atatatgaaatcccaattacctgtacttatccatcgctagttcacttcgctgcagtccttcgtaaaccaaagagcaggtagaacgagttcaccctgaacacagcatccctttaaatgaccct

SEQ ID NO: 210423 - DNA, 122 bp, Homo sapiens
agggctgagtgtatgaagcgttaatgaaggctgccattggaaccagtccacgtcccgtcccggctggcaggtttgctgtccaagaagtctcttgctggaggcctgagttcctgagtgtcggg

SEQ ID NO: 210424 - DNA, 122 bp, Homo sapiens
tgaagtaacccctgtgcttctttgagatctgattcctagatttcgaccgcccttatggatcggctcagactacgggcctgcgtttttggctgccttggtacagaagacggcaaaggtattgg

SEQ ID NO: 210425 - DNA, 122 bp, Homo sapiens
ctgcgtctgctcaagggaggcgaggccctgtcccccgaagcacccccttcatcccacccacgcaatcccccagtttttgtgcaagggggccactagtcgggctctgcccgcccctcatcttc

SEQ ID NO: 210426 - DNA, 122 bp, Homo sapiens
agtcctgataagccacctggcaggagtggctggcagaccggctgcgtctggggcaccgggcgccgcccctcccaggcccgaagcccccggcccgcgcagcagggacactccgccaggggccg

SEQ ID NO: 210427 - DNA, 122 bp, Homo sapiens
ccaaggaaaatcctgaggaagcggtggtgggggacccctcacagccctactggctctgcacggtgtcccttggctcaggccagcacctccgtgatgcttccatgacatggggagaaaccgcc

SEQ ID NO: 210428 - DNA, 122 bp, Homo sapiens
ctcacagcgcaggggggcgctgaagggctcctggagcgcggccagagcggacatggaggccgaggaggcgccaagagcgagcgagggctgctagcacgttgtcatctctcatgatgttgtaa

SEQ ID NO: 210429 - DNA, 122 bp, Homo sapiens
agaaaggcgagtttggaagcccttgcaggccagaagccctctctccaaatttgcaaaccacggaccctcgcctgcctctcttccggcagtgaagggagggaaccatcaacgacgtgtcctgc

SEQ ID NO: 210430 - DNA, 122 bp, Homo sapiens
ggacaaggataagaagtaggtaaagttaggagtggcctctagtgctgcctgtggcactaacggtggcagataaccaaagcccaaggccttagagttcatgtcctccagcaggtgggtggtgg

SEQ ID NO: 210431 - DNA, 122 bp, Homo sapiens
cgccgcgcgcacgcgtgttttgtcctcgagctggcaggaaccagccgaacaggaagcgggcgcgcgacggctcctccgggcagcgcagcgcgggcgcctcttccactgtgaccacgggcgcg

SEQ ID NO: 210432 - DNA, 122 bp, Homo sapiens
tcggggcggggaaggggccagggtgcggggacccagcgaccgcctgggccttacctgaggcgggggcggcggccgcgcttggcggaggaactggggtcccgctgcggcccagacctcccggc

SEQ ID NO: 210433 - DNA, 122 bp, Homo sapiens
ttgaggtttctcagagactggctctggctgtctgtatgcaggatccccctcttcatctggcgcatgactgtctcataatcgggggttggcctgtacgagggcacgatgatcgcgctgtgccg

SEQ ID NO: 210434 - DNA, 122 bp, Homo sapiens
aggcgctccacggagggcgcggcaggacgccctcctcccgcgctccttccccggcgccggcggagtccgaccctccccacgcccgcggccggctccggagcccctcacccgccgcgcgcttc

SEQ ID NO: 210435 - DNA, 122 bp, Homo sapiens
tccatcattaaatatatatttattgaatccctactagtgccaggccctgtagcaagccctcgaatatgaaggaacaagactgagccccactgtaagggagtttacatcattgaataaccagc

SEQ ID NO: 210436 - DNA, 122 bp, Homo sapiens
cagtcagacttgtgttattaacaatattaaattatttgattttgttgagatttcctttatcgtcaagtacatcatgaagtatttttaaatgtcccatgagtgcttgaaagactgaaagttac

SEQ ID NO: 210437 - DNA, 122 bp, Homo sapiens
aaaacaaaaaaaacctctgtttccgcccagtttcgaaccggggacctttcgcgtgtgaggcgaacgtgataaccactacactacggaaaccacacgcggaacctgcgcggcaaaacataacc

SEQ ID NO: 210438 - DNA, 122 bp, Homo sapiens
acagagtagagatttcagaagttgtctataacggcaaagaacagaacagtgacgtgggggcgtttcacactcagatgggtccgggggtaaatgtggggggtgcagggggaggactctgagtg

SEQ ID NO: 210439 - DNA, 122 bp, Homo sapiens
ggccccggccccggccgcccgaccagctcacagaggaacacctgtgggggggcctgtgggcggttcacagagggatgtaggaacgtgcctgtgggaggccgtagccccggagagcagaggcc

SEQ ID NO: 210440 - DNA, 122 bp, Homo sapiens
ccgcgcggcccggaggaggagccgctcctgcagagagggcgggcggcgggcaggcatccgcgccccgggctgcggccgggctgcagggagagagaggggagggagcgcagatttgagtggag

SEQ ID NO: 210441 - DNA, 122 bp, Homo sapiens
caggagaaattctatgctacattagttaggtacgttggggatcgcaaaaacccagtctgtcgagaaatgtccatggcgcttttatcgaaccttgcccaaggggacgcactagcagcaagggc

SEQ ID NO: 210442 - DNA, 122 bp, Homo sapiens
tccactgggggtcatcaggaggtaggctgcacacagtgcccagctggcttgttaatccagcgcaatttaacaactgtctgccgagtgcctgttgaaggcctggggcgggaaggtgaaaggta

SEQ ID NO: 210443 - DNA, 122 bp, Homo sapiens
gctcaaagcctatttcctgaaatggttccaatcatttctttctctcttagaagaaagtaacgtggataaaaattgtccccaaaccagcccttggcaccatttttagaggcggaatatgaggc

SEQ ID NO: 210444 - DNA, 122 bp, Homo sapiens
aaacaaattttgttaaattaagtaccgtgactaaatactttaattccttttcttgtagcccgtaaggatcatttgactttgaaccttttaagtcaaagaggagtagtctgaaagcctgaact

SEQ ID NO: 210445 - DNA, 122 bp, Homo sapiens
gcccctgcttctgcctgtgcctgtgtgggatgcctcctgggcctttccctgctctgtccccgcgcccaagctggagccacaggtcccacctccccaccctcactctcatggttgtcacctcc

SEQ ID NO: 210446 - DNA, 122 bp, Homo sapiens
ttccatcctttgtcggcttctccatctcctggtgaacgttgccccttggagaggcgatggcgtggcccggccccggcaggtgtctgagggcctgaaggcacccccgtaatcccagcacactc

SEQ ID NO: 210447 - DNA, 122 bp, Homo sapiens
ggagttactcataattttatttaaaatcctgaataaagatatcaccttagttttatggtacgtttgtcattccagcttgttaggcatgagtgtgttgttactgacagagcccctggaggaca

SEQ ID NO: 210448 - DNA, 122 bp, Homo sapiens
tggtaccgcccctgattattacatagaggaggacgcggactggtgatacgcgctcccctgcgcctgctgcccgcaggcgtgtctgtgcgtgtgggcgtgtgtgcaagcgagcgtgggtgcgc

SEQ ID NO: 210449 - DNA, 122 bp, Homo sapiens
tatgttcccactagcagtggttgcggggccggtttctccacgagcacggctggtttctgccgtctttggattctagccgtcctggtgggtgtgcagtgccttctcgcggttttggtttgtgt

SEQ ID NO: 210450 - DNA, 122 bp, Homo sapiens
acataatcttctcaggttcttattagaagaaatttccatcctctcccgttctagattaggcgcagtggagtccgctccatcaatgaagggactaaggtttcgtggacaataatgtggcaatt

SEQ ID NO: 210451 - DNA, 122 bp, Homo sapiens
aaaggacccgggtcagccgggtcttccccactccgccgcgtctcccgaaggctgggaggccgctctttccgaacggattttgaggggcgagagcaggctgcagctaaccccttccctccggg

SEQ ID NO: 210452 - DNA, 122 bp, Homo sapiens
ctgcatgaactgccggaacttgtccaccctttttgctagaggcacgataacattgataagcgtgttggccatgttgagcttttcatttttcactttcatgatggggccgaatggtcgaaata

SEQ ID NO: 210453 - DNA, 122 bp, Homo sapiens
aaccgatgggggagggaggggcagacccgctttccaaggccacagtgccatccatgcccgcggaaatgatcctcgtgtccttagtgttcctattgtcagcaagggaggggagaggagaaagg

SEQ ID NO: 210454 - DNA, 122 bp, Homo sapiens
ctcccttctccagcagcgaggctcgtcacccacagcgcggccgctggaaggtgacctgagcggccagacagggcctcctgctcagagtttaaagctctgctgtcgccatccttaagttctta

SEQ ID NO: 210455 - DNA, 122 bp, Homo sapiens
aggccgcggaggcggcgccgcgggcgctctcacttgtaagctccttgaagaccaggacaccgtttaattcagcatcttactgttcacagtgtctagcaccctgtcttgctcatgcgtagcag

SEQ ID NO: 210456 - DNA, 122 bp, Homo sapiens
cgcccggctaatttttgtacttttagtagagaccaggtttcaccagatcagggccaggtgcggtggctcaatgcctgtaatcccagcactttgggaggctgaggcaggcggatcacctgaag

SEQ ID NO: 210457 - DNA, 122 bp, Homo sapiens
cgcactgccccagctcccctcttgtttctgtgtttttccattttggattctttcccccaacgccttctgtactgggcattttgtggtctcttctttttctccgagaactctgagggctacca

SEQ ID NO: 210458 - DNA, 122 bp, Homo sapiens
ctcttcgtggacaaaggcgttcgattttccagaggaggccaagaatgggagccgtgggtccgtagcttggtgtagggcgtgagttccagtggtgagcagtgagacacgctgagctgggctgg

SEQ ID NO: 210459 - DNA, 122 bp, Homo sapiens
ctcacctctgcttgaccgcagggagaagctcagggtgcgcttgacgccctcacagttgcccgggtcttcgttgatgatgcccacgttggtgttccaggtggtccagttcacctcgtccaccc

SEQ ID NO: 210460 - DNA, 122 bp, Homo sapiens
taagtgcaaagagcgcagccgtgtcggccggcttgagagttttgtgctttctagatgaagcgcgtcttcgcatacgtgcggtcgcgtgatctcacaagatgcttggcatgtgagtattctta

SEQ ID NO: 210461 - DNA, 122 bp, Homo sapiens
attttcttgctgtttccctctgcaaatgccaggcctcaaagcaggaggaccgaacacaatcggtcacatcgctccttttcttccatttcttttgaaccacgacgccaatgactcgggagaca

SEQ ID NO: 210462 - DNA, 122 bp, Homo sapiens
ctctccaggctgccatggggcccagcacccctctcctcatcttgttccttttgtcatggtcgggacccctccaaggacagcagcaccaccttgtggagtacatggaacgccgactagctgct

SEQ ID NO: 210463 - DNA, 122 bp, Homo sapiens
tgcagagctactgaagagccggggcaggatttgaatcctggctgtgcttcgtccttagcccggcagcccggggaaccggaaggaaggctcagggttctaagcccaagtcgccccggccaggc

SEQ ID NO: 210464 - DNA, 122 bp, Homo sapiens
cagccatgatggcgggcgcagaagaaggccgcggcgccattttgtctacacacatacacacgaacaaggttctgggagccgttcacccactgttggaacgtagcagaaaaatatccctggct

SEQ ID NO: 210465 - DNA, 122 bp, Homo sapiens
cctcgccccctgccaggcggagaacgcggagcccagcgggcacgcgggaatggagctaggcgccggcagggcaactgggcatgctcagaagccgggcaggttttggtctcaagcacgcagcc

SEQ ID NO: 210466 - DNA, 122 bp, Homo sapiens
atccaaagcacgcaaggcaaaaccagagcgaatctgagaaccagccagcccgggttggatcgctttcaaaagagagagtgagagcgagcgagcgagcgagcgagagcgagacagtgagagag

SEQ ID NO: 210467 - DNA, 122 bp, Homo sapiens
agtggtaacaattacacattacacaaaagtactgtaccattgcctttatcttgaaggtttcggaagcctctacagttaataagttaaataaagggcttgagtacataaatatttgtctagga

SEQ ID NO: 210468 - DNA, 122 bp, Homo sapiens
cccgtccccccactgcgggctctgcctggcctgagggccgggggctcagggggtggggcccgccgaggagagtcgggggccagggtttcgggaggatcgggaaggtggggaaggagggaggg

SEQ ID NO: 210469 - DNA, 122 bp, Homo sapiens
ctttgtcccatcttcagcaggaggggctgctctccatggagatgaggctgacagggtcagcggagtagcctgtgacaggcaggttttaataagttcattttcagccaacccctgaaatgggt

SEQ ID NO: 210470 - DNA, 122 bp, Homo sapiens
ttgagagcagttacagtcatagtcatttctgtccctatgtgcaagtaccatagtggtttgcgggaaaaatgagtgaaaacatgtttgatgtgtgactaaataataaccaaaatttctagtaa

SEQ ID NO: 210471 - DNA, 122 bp, Homo sapiens
aggggctcattcgattcgttgaagcttttcatggactccctgagctggcacctgggagatcgtcccatcccagggtcccgagtgtcaggtttggctagggtctgggggagaggtggtcctcc

SEQ ID NO: 210472 - DNA, 122 bp, Homo sapiens
agtcggcctccctgccagggcacttgcggtgtcaggacgcacctgggtgcctttcatgcccgtggggtccaggcacctgcatcttcacacacctgccacagcccgtccctcacacggctcat

SEQ ID NO: 210473 - DNA, 122 bp, Homo sapiens
cccaccccgcaactcctgaaagcggcgcaactcaattacttgatccttatatgccccacgcgggactcatactacgtttcccgtgaacacgtgcagtccaaaccccgcccctgatatttatc

SEQ ID NO: 210474 - DNA, 122 bp, Homo sapiens
caacatcacccagctggctgggagaaaagctgagaacgtgggtctcttgactgtccgcaacgcaaggcagagcacacccagagttcaaacccgtctataacattgggcagttgtgtccctgt

SEQ ID NO: 210475 - DNA, 122 bp, Homo sapiens
gctgtacggctacagcctgggcaacatctccagcaacctgatctccttcaccgaggtggacgatgccgagaccctccacaagtccaccagctgcctcgagctcaccaaggacctggtcgtcc

SEQ ID NO: 210476 - DNA, 122 bp, Homo sapiens
gagcatgcgcctacgccgggccaattgaaagccatagtgacagtaaccctgattcaggggcgggaaacactgaccacagaagacaagttgaggtgagaatccccttacaagggggtttgggg

SEQ ID NO: 210477 - DNA, 122 bp, Homo sapiens
tctagctcagctttgctacattagcttccagaatttgcattccagctcaccccatcctcccgggcctcggaaggaagagcccagcgtctggacccctctcggtgatcccctccccattcttc

SEQ ID NO: 210478 - DNA, 122 bp, Homo sapiens
cagagcaggggagggaccggatcccagcacggtggggtcggcttcccgctgtcaggctggcgctgtgtcgggcgcctgtgacccacagcccacgtccccaagctcaccggcgctgctgcccg

SEQ ID NO: 210479 - DNA, 122 bp, Homo sapiens
ccagagactgggagacaaaggctctgcggttccctgggaaaggactgaatgaccaattggcgccacctagtggtctgcagtgcatggggagcgggagggcccggctgctccgggattggggg

SEQ ID NO: 210480 - DNA, 122 bp, Homo sapiens
tagggaagacctgggggcggaggtcggtctctgaccagccagcgtccctgcaggggactgcgagtaggaggcgggtattgcccacgccagggcctgtggtctgagagggctggcccttgacg

SEQ ID NO: 210481 - DNA, 122 bp, Homo sapiens
tgataacgtccacccccttcacgagcttctcctaagaagcccaggaaatatgaatgggagcgaggctgtcacgggttgtgtagtccgatggaggcgggggtgatccttgacttgacccatag

SEQ ID NO: 210482 - DNA, 122 bp, Homo sapiens
agagcaacttcctgctgcaggcgctacggcaagtgaagaggttcaagcttgccgggaatgcgacgagacagctccgcctcccgagacgaaagcccgcccctcagcccgccggactcaggctc

SEQ ID NO: 210483 - DNA, 122 bp, Homo sapiens
tcactgcccctctctgggcctccctcctgtgctgtaaaatgatggagctgcaatcggggccgcctgggcaattgttacgccactcatgaccttctcttggttcttttcctctgtgttctgct

SEQ ID NO: 210484 - DNA, 122 bp, Homo sapiens
gagaattgtggcccgagaaggctctgctccttgagagtgtggggagagaagctgcagtcccggaagcggttttagggggccgcttccttggcctagaggagctccccaacccgagggggcaa

SEQ ID NO: 210485 - DNA, 122 bp, Homo sapiens
tcccagatggggtggctgccgggtggagaggctcctcacttctcagacggggcagcctgccgggcggaggggcatcctcacttctcagacggggtggttgccaggcagagggtctcctcact

SEQ ID NO: 210486 - DNA, 122 bp, Homo sapiens
acacacctgcggcccacgggcttctgctcagctgtcgctgtgtcagtgacagaaaagtaacgtatcccagtgctttattagtaattactttctgagacggggtctcgctctgttgcccaggt

SEQ ID NO: 210487 - DNA, 122 bp, Homo sapiens
agtaaaaagcccctgcaagaaacttcagccctttcttttcctgctagggagacctagcagcgttatctaagctgatggaggacaaaagtggagcacactagttctctaggtcattgcttaga

SEQ ID NO: 210488 - DNA, 122 bp, Homo sapiens
ccgacccccagctcaggcccgggcctgaacccgcttcgggtcctgcgcccgcctagaaagcgggaggagctgagtgacagtccccacccacctgtggacagccccttcttgccctcacctcc

SEQ ID NO: 210489 - DNA, 122 bp, Homo sapiens
atgcataaacacagcgtggtccagccacacaatgggatgtgacacagccacaaaaaggagcgaggctctgacacaggccacagcctggatgcaccttgaggacgtcatgctgggagagacgc

SEQ ID NO: 210490 - DNA, 122 bp, Homo sapiens
tctctttgtcctggacccctgggcggccgacacccccgcactctccagtcccagagcatccggccctgacaccctggcctgtgcactgccccccaggaagagttgtcctggggctgctttca

SEQ ID NO: 210491 - DNA, 122 bp, Homo sapiens
ccccctctctcagctgccagcctggcctctttctgctgtcggaatctctggaagaggcgccggacagggtggtccgggggcaagatcaggggggcctcattctttcgtttcatgcgttcttc

SEQ ID NO: 210492 - DNA, 122 bp, Homo sapiens
ggagaagcaggtttggcatccggaggccgctcggctgcctgtcctgcgcccagctcagcccggacccatcggccaccttaagtagccaagggggcaaggaaaatgctgccagggcccgggaa

SEQ ID NO: 210493 - DNA, 122 bp, Homo sapiens
actgctgtcaaaatcgcctgcatggaaccatccctgacctggactaacagcatgtattagcgtgacagagactaaaaagctaagaaccgccgtgcgatggccggctttgggcaccgggggtg

SEQ ID NO: 210494 - DNA, 122 bp, Homo sapiens
ctctcagccagcgcccgccaacggtttcaaccggccgcggggagcacgtggactcgccgccgccagcccagcgccgcagctacctgcctctcaggcttcgcggtgcagaattcgcttctgaa

SEQ ID NO: 210495 - DNA, 122 bp, Homo sapiens
ctgacagcctgtgatgccacatttcatccaatccaccatgcgctctctttcccatggtcacgtctccgagatcaggatgtgtcttataatcaacagcatgtcataatttaattggctgcctt

SEQ ID NO: 210496 - DNA, 122 bp, Homo sapiens
caggcgaagttagtccccgggccctggcggccgcggcgtcctcacctttggaaaacagggcggccaggctgatgagtaccggcgaccagtggtgccacagcgtccccatctcagacgggcac

SEQ ID NO: 210497 - DNA, 122 bp, Homo sapiens
cgagcaggccctggggctggcagcttccgccgggcagagggctgcagcgcagaaaagcagcgtgacctcggcgctccacacctccccggccatggctccccccagccacattccggcccggg

SEQ ID NO: 210498 - DNA, 122 bp, Homo sapiens
gcgtgttttaacacattaggtcaggccaccacttctccatctgtctggatgaggcaacagcgaacagcgctcagcagaccttattaagtactcaggtcttaaagaccctctgtttggtgggc

SEQ ID NO: 210499 - DNA, 122 bp, Homo sapiens
gattccattttaacaaggggagcactgtgcgctctcggatgctagctatgtgtgtgaatgcggagtttaaggagcttcgctgtttgttcgacatccgaaagtgaatcacagtccttgttcct

SEQ ID NO: 210500 - DNA, 122 bp, Homo sapiens
tgctccaggcccaggagagatcaacaccctctgatgatattttaaacttaattcagttcccgatgaagattgtgacaggttccgtggccacagcagaaaagatgtttgcacttcaaaatccg

SEQ ID NO: 210501 - DNA, 122 bp, Homo sapiens
tccctcttacacaggagtgctcacatgcacacatacactcttttaacaactttatggatgcgagagaaaaaccttaagacagcatcaaggaaataaaaggggaactgaaataagttgcccta

SEQ ID NO: 210502 - DNA, 122 bp, Homo sapiens
gtgaaggcccggtgggtagccaggaaggctgacatgaagctcacatcagtccctgatgtccgggtatccagtaggtgtctgaccagggcctccagagtgccagctcggagccgtcgggagga

SEQ ID NO: 210503 - DNA, 122 bp, Homo sapiens
cccccagggcccgccccgcgtcgctcccagcaaccatggctcgtcgggccggcctctgcgcgagtgcccagccacaagcagccctaagttcaagcaccgcctacgcggtcggccagaagtag

SEQ ID NO: 210504 - DNA, 122 bp, Homo sapiens
tggctccctctcccgtgtttcctcaaagctgcctgaggatggtttaggatgatttatcctcgtggggtggattatttgtcccaggaatactccaactttggctggaccagagagcagtggtg

SEQ ID NO: 210505 - DNA, 122 bp, Homo sapiens
gggagggtggagtaaggcgggcggagtacggccgcgcgtgcgcagggagacaatgttgggcgtagggtggaaccaactgttgtcacgcgccagcgagagagcgcttgaacgcgagctgcgcc

SEQ ID NO: 210506 - DNA, 122 bp, Homo sapiens
agtttggaacaccacataacctgagggtagaggtaggtactctgtatcatacaactttagcgcaaaattatagatgccttctaacagtagcatgaaatagtgcgacagaattgaacctattt

SEQ ID NO: 210507 - DNA, 122 bp, Homo sapiens
ccctcaggcacgttcagggcaggagcggtgggagcctcttagtgaattctcctttcacagcgaaagcattacgttggtgtagtggcgcggcatccgggagcacagatttatattcacgttca

SEQ ID NO: 210508 - DNA, 122 bp, Homo sapiens
ttgaccaagcaagatgactgttaggcagatggacagatgctctgaggtgcctatcttgtacgtttttggtgctgccaacggccaccagctcctggcaatcctatgggcagcactcatcgcct

SEQ ID NO: 210509 - DNA, 122 bp, Homo sapiens
gttccaatttgggagcatttcatattttcagataacagatgctccacctgtatacacacacgcaggaataaatatgtattattaggagtgcgaacaggaaaatgcaaatcatctcaagtatt

SEQ ID NO: 210510 - DNA, 122 bp, Homo sapiens
gctgcctcctccttctcactcccctcgcggtgagaagaaggtctcatgtccctgtggccacgccttttgtggacttgagtttcagaagcagccacagagcagctactccatgccagcaactc

SEQ ID NO: 210511 - DNA, 122 bp, Homo sapiens
gaaaattaatcgggaggtgacaaaatagtttgaaccaagtggatatagtaggcaagtagacgatagaaaataattgcaataatataagcatgaagagatgacagcccaaatcagcgtggcaa

SEQ ID NO: 210512 - DNA, 122 bp, Homo sapiens
tactcagccccacctctcagttggctctttccatgcactcatctctctgcggggctttctcgaggtgtggtcctgggaccaccggcatccgatcacttgtggcacttgttaaagctgctaat

SEQ ID NO: 210513 - DNA, 122 bp, Homo sapiens
ctacggcagggcctggggcaggaatggggggtgtgtctgcagcaggactggcagtgggtgcgccctggcaggcagcccagatgtctgggtagccactgactcttggcttttgaggggatcag

SEQ ID NO: 210514 - DNA, 122 bp, Homo sapiens
gtgggccagaacccaggcggaaatcggtaggtttaataacaacacacgaggccgaaacagcgtccccaagggttgcccacgatggctttgttctcgccagatgtgcacgcccacagcacgtg

SEQ ID NO: 210515 - DNA, 122 bp, Homo sapiens
tttgcatttttgctgaagttatcaggacagcagctttttctttctctggcgctgctaaatcggtagaatgaaaggctgaagggtcttgtagcccatcttgccactccttcagagtggctgcc

SEQ ID NO: 210516 - DNA, 122 bp, Homo sapiens
ggcggctagtgtttgggaaacttggagcaggagagcctggcgaagcctgtgcaggaagaccgagcagctcgccgcgtcaggtcccaacgggtggggtgctctgagcggctggcgcacagcgt

SEQ ID NO: 210517 - DNA, 122 bp, Homo sapiens
gaatgaacggagcttgtggttctatgattaaataaaagaaaaaaataagaataaaaatcacggcatggctaaaatgtggcatgtagaataaaatggaacactgatctgagaagctggggccc

SEQ ID NO: 210518 - DNA, 122 bp, Homo sapiens
gcagcggggttcgtggatgctgggtggccgttggaggggcaggctggcccttcccaggtgcgtgtggagcgcgcgctgggtagatgagtgtggaagggtccttggcccgacggccctctcca

SEQ ID NO: 210519 - DNA, 122 bp, Homo sapiens
ggcctgcgctgctacgggggacgccatcttaaacaggaaactcggcacggggcagtagggcgggcgcgggcaggggaaggaggcggaggaggagcagcgggaggaggggtcagaggagaagc

SEQ ID NO: 210520 - DNA, 122 bp, Homo sapiens
gcccgcgggcgggacggaattggagagctttcacttgctgacctggcgtcaccaccgctccggttcttgtggccaggtcttttacccctgccctggggaggactcaggcgcaggggagggat

SEQ ID NO: 210521 - DNA, 122 bp, Homo sapiens
actgtttttgctgtgtcttacatccctttccatgtgatgaaaacgatgaacttgagggcccggcttgattttcagaccccagcaatgtgtgctttcaatgacagggtttatgccacgtatca

SEQ ID NO: 210522 - DNA, 122 bp, Homo sapiens
aactcaagtccatcctatcattctttctgttaaacatgatctatacactcagtgtttggccgtttactccattaaatggaatcatgtacataaaatacctagtgcagggtttggggcctggt

SEQ ID NO: 210523 - DNA, 122 bp, Homo sapiens
tgggaatttgctgagggcaagggctgtgtcaacctctctcagactggaactctctaggggcgggaatggggtttacctcattagattgggagctcccctaggcaggagtgactctaaagcag

SEQ ID NO: 210524 - DNA, 122 bp, Homo sapiens
cctaaccccctactgttacagatgggggaactgaggtgcagagctggaaagctacttgttcgcagttacagagaaagccagggacacccactagactccagttgcacaatgcagtgcccact

SEQ ID NO: 210525 - DNA, 122 bp, Homo sapiens
ggggctttactgggggatttgaggctggggagggggagggagcaaatgtcatggctggctcgctcaagcatccagggaaccgaagctaagcgcatcctgacgggcttttaaaatgacattga

SEQ ID NO: 210526 - DNA, 122 bp, Homo sapiens
ccggagcccgcaggctggagctaggcgaggccctggcgctggggtcgggctggcgtcatgcgtgccacgctctcctctacgcgccggaccctgggatgctcttcggccgcatcccgctgcgc

SEQ ID NO: 210527 - DNA, 122 bp, Homo sapiens
caccagaccatctcccggcgcgggtggaattcccgcgatctgtctcattccctgcgccgccgagaaaagtgagatcccgcgagactcccagggtatggtctctcaagagccctggaaacgtg

SEQ ID NO: 210528 - DNA, 122 bp, Homo sapiens
cactgaagccaaggaagtcagtggtcgcccggaagcaggatttgcacccacatccttgcccggggcacattggacaacagggctcagttggttgacgactcccagcatttgagggttgcagc

SEQ ID NO: 210529 - DNA, 122 bp, Homo sapiens
gctgtggtccacctaagaaatttctttttctgtttacttgatctgatttgctgccttggacgaatctgaggtgattccacttagctgtggaagttgagaaccactgacagagattaagaaaa

SEQ ID NO: 210530 - DNA, 122 bp, Homo sapiens
gcacggcctggcgtgttcctggcggcagaaaggtaaaggaaagcagcagaaacaggccagcgcagtggggtgcaagctggtagaagctccaccccactgggtgtaagggaagtgagccgtgt

SEQ ID NO: 210531 - DNA, 122 bp, Homo sapiens
ggcaacatggtgagacccccgtctctacccaaaaatacaaaaatcagccgggcatggtggcgtgcggctgtaatcccagctacttgggaggctgaggcaagaggatagattgagcctgggag

SEQ ID NO: 210532 - DNA, 122 bp, Homo sapiens
cgggggcagccacagccaggagatccaccaggaagctgctgctccagtactgcctcacgacgcccccgcgagccagtgggatgacaccatccaacctctcttccacgcaggctgcaaaatcc

SEQ ID NO: 210533 - DNA, 122 bp, Homo sapiens
aggttttgatagcaaggacttcctagcttcttcctttatcttccattctctagtcacttccgtgtttttatcaaacaaggctacgtgtaggctttcctacaaagtcaggttgagtcagaggt

SEQ ID NO: 210534 - DNA, 122 bp, Homo sapiens
ggggtcagggagttccctttccgagtcaaagaaaggggtgacggacggcacctggaaaatcgtgtcactcccacctgaatactgtgcttttctgacgggcttaaaaagcggcgcaccacgag

SEQ ID NO: 210535 - DNA, 122 bp, Homo sapiens
atcaagcctcagccttgttccactcaccggtgcaggcgcagcaggagagtgaagatgtcccggtaatattccagcaagggaacaacatggtcagcaaaggagagaaactccaccagccaggg

SEQ ID NO: 210536 - DNA, 122 bp, Homo sapiens
agctacgcgacccagcacccggcccctcctcacctcaggccgcgccgcctcgaccctccgcgtctccacagcgcacgaaccccttggcgccaggctgggccagacccgtcggcctggcaggc

SEQ ID NO: 210537 - DNA, 122 bp, Homo sapiens
cacgggaggtggagattgcagatcctgcaacggcactccagcctgggtagagcgagactccgtctccaaaaaaaaaaattctacaaaacttctaatatctgcaccattcttcataacctctt

SEQ ID NO: 210538 - DNA, 122 bp, Homo sapiens
cagaaactgagcagaacaaaaccgccttgccagccactggcaagaccatgctttcaatggcgcctccgccaggggcttccctgcagaagttttaggggaagaggtgcaggtcaaggggaaaa

SEQ ID NO: 210539 - DNA, 122 bp, Homo sapiens
aagggcagagggcagcatgggttgactctagttggaattgtgccagtcttctctggaggccgactcactcgtggagtggggaaaggggtggccaggccccagtctagaaaccccaggcctat

SEQ ID NO: 210540 - DNA, 122 bp, Homo sapiens
actccctgaattctctaacttcctctttatctctgagcttcggtttgctcatctgctagacggggggtttctgtgagtcccaggaccgccacagggatcacgagaagtactgaatgtccagg

SEQ ID NO: 210541 - DNA, 122 bp, Homo sapiens
ggcggcgacggtggtctgaggacgggaatagacgcctttgcggaaacagcgggtcaagcccggggcggcggagcgcgaggagcactgcggcgtgcccgggaggacgcgcgctgccctgcgcg

SEQ ID NO: 210542 - DNA, 122 bp, Homo sapiens
caagggagcgcccgccaacgctgccctgccttcacttgtaggctaagcccagccctttcccggccgacccagaaagctccaccctcggccctggggcagagccgctccctagcggcttgaga

SEQ ID NO: 210543 - DNA, 122 bp, Homo sapiens
tcagcgttgaaaaggctaaaaagctcctgctcttttgcttgggaaaagtattcctacagccgaggccccagcgagatttgaactcgcgacccctggtttacaagaccagtgctctaacccct

SEQ ID NO: 210544 - DNA, 122 bp, Homo sapiens
ggcgccccccccccgcccgcgcgcccccgccggccgcgcactccatgaagggcccattagcgcggcaggtgcctcccgggctgtaaattcgccccgatttatctccccggggacgaaataaa

SEQ ID NO: 210545 - DNA, 122 bp, Homo sapiens
gcgcgtggcgatggtaactggtgggccccccgggctcgctctaggcggaggctcccgggacgcccacgtggcttcgaattccagctccaccatcactgtgatgcgtcactctggactaggca

SEQ ID NO: 210546 - DNA, 122 bp, Homo sapiens
gaggcagggaaggaaatcgagcgccgcgcccctacccggcgccaggcccggggttgcgagcggtgatcttcaacgttgatcgtcgcatcttcaaactcgctgccaccgccaagatgctcctg

SEQ ID NO: 210547 - DNA, 122 bp, Homo sapiens
ggagcccgcgagggctcaggccggccaggatggagttctctatcccagttcaatttcccccgcctttttgatgtcacatcctgtcccagcctgcttccccgccggccgccgccctcctcccc

SEQ ID NO: 210548 - DNA, 122 bp, Homo sapiens
cgccttggacacgtcctccagcggctggatgaccttggccttcagggcggccatgggggacgcgcggggcgatggcggcgggctcaccgccttgccatagatgctcgcagggccggcagcca

SEQ ID NO: 210549 - DNA, 122 bp, Homo sapiens
cgcccaccccgcgcgccatggaccccaaggaccgcaagaagatccagttctcggtgcccgcgccccctagccagctcgacccccgccaggtggagatggtaaggggcccgtgccccaccccg

SEQ ID NO: 210550 - DNA, 122 bp, Homo sapiens
gcggctctgaggcgggccggctcttcagcactgggaggtggctgtcctgggggagggtcccgtgccgggcagcagggagaagtcgggactgaggcctggtgggcacggagatcctgtgggag

SEQ ID NO: 210551 - DNA, 122 bp, Homo sapiens
ccacccctactcaagcctgcaatggggaagactggcaaataggtttcacccagatgccaccgtatacagaggactgaagtatttgctagtacttataacaatttcatcaggcggatagaagc

SEQ ID NO: 210552 - DNA, 122 bp, Homo sapiens
cttggatgccttggggtcacggagttaactgcagactcagactaagtggggccccagcagcggtcagccccagaaccaagttccggagccaacacccgaacaggaaggggccttgccccagg

SEQ ID NO: 210553 - DNA, 122 bp, Homo sapiens
tgccagaatcaccagggttgtgcaggccctcctggtaccaagggcagcactcaagcaccccgagggatgagatgggggtcctcccagggcagaaggatggaggagggcaacgccctctgaca

SEQ ID NO: 210554 - DNA, 122 bp, Homo sapiens
agcgatcttcccacctcagcttcccaaagtgctgggattacaggcgtgagccactgtgcccggcactttaaaccttggaaataggtctcggtttttggaaaactgagttgtgggaggaggaa

SEQ ID NO: 210555 - DNA, 122 bp, Homo sapiens
ttctctccaggtgggctcctcattttcctgggctcctcactttccttcggagccaagactcgggggcacagggctgtgggcatgatgggatttgatgggggtcagcagcagaagacgaccct

SEQ ID NO: 210556 - DNA, 122 bp, Homo sapiens
agctgaggccacaggaaaaacagcaccactgaccccagagcaggactcgggccccaagtgcgtcacccaaagcatttgtagtgtgatttattcctcctcttataggaacaaaagtccccctc

SEQ ID NO: 210557 - DNA, 122 bp, Homo sapiens
cagcccctctgggaagggtccccacggatcccagtgagatagaagcctggcaaaggaacacgtgttttttttttctctctctcttttccagacatgtattttaattttttaaaaaagctttg

SEQ ID NO: 210558 - DNA, 122 bp, Homo sapiens
ccctggcgcccccgggtgctcaggccgtcatgctggatgcctggcgccaaacctccccctcggccacctgcccttcctgctcgcacccgacccctgctggccagaagccttcctccttcctc

SEQ ID NO: 210559 - DNA, 122 bp, Homo sapiens
atcccgttacccatgggcaggatgcactcctctcagtggctggcgaggcgcagcctggtgcgggcgccacggggtcgggctgtgatcgcctgtggcctccctgcagggctgtgactccctga

SEQ ID NO: 210560 - DNA, 122 bp, Homo sapiens
tgagcccaggagttggagattaaagtgagctatgattgcaccactgtactctagtctggccgatagagcaagaccatgactaaaaagtccagcgaggcacgatggatcactagaggccagga

SEQ ID NO: 210561 - DNA, 122 bp, Homo sapiens
ctgaggacctccgggtcacagcggcgtgaatcctgcccgcaaggcgcgctgactcggttccgaaccctttcgcgggccctagaccccgtggagagttcacctgcccggcagccaggccttca

SEQ ID NO: 210562 - DNA, 122 bp, Homo sapiens
cagtgcggcctctccacagcagccccagggaaaccctacgcctgccaagaggcaagcgcgcggcattttataaaaatggtaaggataaaaaaagtcggggatgttaatttaaaacaaaaagg

SEQ ID NO: 210563 - DNA, 122 bp, Homo sapiens
catagtgagcccttgtctctacaaaaagaaataaaaataatagctgggtgtggtggcatgcgcatgtagtcccagctactcagaaggatgaggtgggaggatctcttgaggctgggaggcag

SEQ ID NO: 210564 - DNA, 122 bp, Homo sapiens
aatagtactgagaacctataacgtagccgtcccacctgtgccactgatggtttcagttcacgccacacacaatggcgcactcagcactacgtatggcgccaggaaagcagcaagcaactagg

SEQ ID NO: 210565 - DNA, 122 bp, Homo sapiens
cttctgagtgcacacattttgacaagggtctctgcgatccccgaggtctcggggttgtaccgtccacaaagggccttagcagtggggaactttgtaacaagtgacgggcacctgtgcaatcc

SEQ ID NO: 210566 - DNA, 122 bp, Homo sapiens
aactcccgttctcaagcgatccacccaccttggcctcccaaagtgctgagattacagccacggtgctcggctcccatcttgaaatcaatacctgacagaatattaaagaaaatgaaaattgg

SEQ ID NO: 210567 - DNA, 122 bp, Homo sapiens
cacaggggacggcccggggtcccctctgcgccccgcctcccgcagctctccgaagagctccgacaagtccaagagcttcagcatagacagcatcctggcgggaaagcagggccagaagccgc

SEQ ID NO: 210568 - DNA, 122 bp, Homo sapiens
tcttttaaattttttttttttaagtctgcactatctagcttcatccccacccaattataccggtttacacatagacaagggtctggaaggacaggaagtcacaaataacactccctaacagt

SEQ ID NO: 210569 - DNA, 122 bp, Homo sapiens
ccctaccttgttttccccgccgcagctcggggagaacggatgctggagttggggcagactcggggccgccgggacttcgggagtaaggaggacgtggagccaccagaaaggcgcccgccatc

SEQ ID NO: 210570 - DNA, 122 bp, Homo sapiens
ggcgtagggccctccgagccaggtgtgggatatagtctcgttgtgcgccgttttttaagccggtctgaaaagcgcaatattcgggtgggagtgacccgattttccaggtgtgtccgtcaccc

SEQ ID NO: 210571 - DNA, 122 bp, Homo sapiens
cggcagcggcagctcctggacaccatcgcagcctgcgaggagatgttacggcagctgggccgccggcgcccggagccggctggtggcggggttagtgcccaccctgggctgggctggggtgg

SEQ ID NO: 210572 - DNA, 122 bp, Homo sapiens
agggtatcatagtgaggttacagtgacctagtagtcagtgtgtaatttctaggatttaaacggtaagctgttttctctgtggagaatgacactatagtatactatttggggttatgggcaag

SEQ ID NO: 210573 - DNA, 122 bp, Homo sapiens
ccagagggacgggttcagggagcgtccggtgagcctaagacgcgcctttgccggggttgccgggtgtctgcctctcacttaggtattaggaaccgtggcacaaatctgtaggttttcctctg

SEQ ID NO: 210574 - DNA, 122 bp, Homo sapiens
catgttgagaaatgactccaggagcctgagaagttgaagtccttgcgggtggtccaggtgcgagtcggcggaggccccagccagggaagaggcagggagctggagcgcaggtcattgacggc

SEQ ID NO: 210575 - DNA, 122 bp, Homo sapiens
ccagctgtggtgctgcatcgtgttctccgggagcgggccctctgggatgaggatctgctgcgggcccaggtgctggaagccctgatgccgggtgtggagctgtaccactatgtcaccgacag

SEQ ID NO: 210576 - DNA, 122 bp, Homo sapiens
ggggtccccaggctcagggccaagtggagtgctgggaggcgtgagcaagcaggacgagtccgtgtgcggggggccagcctgggagcccccacggctgggttgccttccagggggggcctgtg

SEQ ID NO: 210577 - DNA, 122 bp, Homo sapiens
cccccttcctccccttcacctgccgcagacccccatccccagcgccggggaccgggtctccgctgccagaccctggccaccacctcccagagtcggctggcctgagcgacccggcctaggca

SEQ ID NO: 210578 - DNA, 122 bp, Homo sapiens
tacccctgcaggcagcacttgtgtgcatgcctgtctccacacagcacacacatgtacacacgtgtgcacatatgtatcatcagggatgtttaacctccacaagtttcccagtctccagggcc

SEQ ID NO: 210579 - DNA, 122 bp, Homo sapiens
ggcctctcggcgcgaccctggtcctcaatggctcgtcgcgagctgcgctagctgctctctcggcagcgggttccccaggacacacccagtccccaccccccgagagctggcggccagctcag

SEQ ID NO: 210580 - DNA, 122 bp, Homo sapiens
aatgctagctgaacatcccaaaacctttttttcattgaatattatatggctcaatgattccgtagcacatgttgtaaaacacagggttcaaatgatgttcaaaacactcatctttgttttat

SEQ ID NO: 210581 - DNA, 122 bp, Homo sapiens
aatttttcctggggtgacacacagcaagacgcaaagagaaaagaccaaggcccccgccgccgccgtctgtctagactcaagcgactgaaggggccaacagagctggtgtttaaagtagaacc

SEQ ID NO: 210582 - DNA, 122 bp, Homo sapiens
tgaaatgtctccaagatagattgttaagggaaaaaagcaaggtgcagaacatgtgtataacgtgctaacttttgtgtataaagagagaatgtgagactctacattcccatttgcttgtatat

SEQ ID NO: 210583 - DNA, 122 bp, Homo sapiens
gggagacgtgacttatccagcccacagggactgctacctgggagacctgtgcaacagcgccgtggcaagccatgtggcccctgcaggcattttggctgcagcagctaccgccctgacctgtc

SEQ ID NO: 210584 - DNA, 122 bp, Homo sapiens
acccaaatacttacagtgtctgcatcttacaatgtgttggtgttgtggtaaacctctgcccgttaatgtttccacactgggtgaattggcacatgatagaagtatgactggaagctgttcat

SEQ ID NO: 210585 - DNA, 122 bp, Homo sapiens
tagggcaaaaattgtgagatagtagaagatctgtaaatttaagcatgcacaatttgacagcggatggtcgtagcatattttgtaaattcaatagcaagccccaccacgcccttaaatgaagg

SEQ ID NO: 210586 - DNA, 122 bp, Homo sapiens
ccagcattgaggcgcccagatggcatctgctggaaatcacgggccgctggtgaagcaccacgccttacccgacgtggggaggtgatcccccacctcatcccacccccttctgtctgtctcct

SEQ ID NO: 210587 - DNA, 122 bp, Homo sapiens
ggtaaagcagctattagtgggagccaacaaaaaagcctaggaaatctccatttattattacgttcacatgctaagatgaaaaatggtccaaaataatctaagataatatacagtaaatttta

SEQ ID NO: 210588 - DNA, 122 bp, Homo sapiens
aacaagtaagtccttggcaagtggtggaagttgggacattttgttttcaaaattgttcctcggcttctcccatgtctgtgtacggctgccaaagaacttttggtttattcgtttgcttcttg

SEQ ID NO: 210589 - DNA, 122 bp, Homo sapiens
gagggcggggtggaaggggaggtccaggtcgggaggggccgcgggcgcgggtggctagtgcgtcaggctgtgcgtctgcgctgtccctgacgcggacgccaagtgttggtcagagggtgtgg

SEQ ID NO: 210590 - DNA, 122 bp, Homo sapiens
tagggagccctttgcgcatttattaagaagctactggtgtatctcgggctgcgctaggcacggcgcatgcaaagatgaagcaggcagcatcccagcccttccgcacctcagacggtcagttg

SEQ ID NO: 210591 - DNA, 122 bp, Homo sapiens
tcaaggcttccaggaaatggaaggccactcctccagagaccttgggcccggctttatcagcggcagcacagtgtgggttcagggcttacttattagacgggattctttccctcctgtggaac

SEQ ID NO: 210592 - DNA, 122 bp, Homo sapiens
acgacataaagtaaaagaatgatacaggagcaggtagacatgaaaccatgattaccaaaacggatatggttggtgattaaaaatcattattttctttagtctgggagaagatggcaatgatt

SEQ ID NO: 210593 - DNA, 122 bp, Homo sapiens
gggatctgggcggggcggggccggtgaggggtcgggggtgctcctgctattcagccggtgcgcgcggcggcgggaggcagtggctggggagtcccgtcgacgctctgttccgagagcgtgcc

SEQ ID NO: 210594 - DNA, 122 bp, Homo sapiens
aggaccgtgtgaggaactccataaaattttatggagtgaatgaactcgccgtgtttggctcgagcaagtgacaggcttgccagctctgaaggtctgttaaaaggcagatgggaagatccgcc

SEQ ID NO: 210595 - DNA, 122 bp, Homo sapiens
ggccgagggcactttctacgccatttgtcctaacaaggaggagcactactgaccctgcctcgcccgggctgcggggtcgtgctgtgaaggggtgctccttgctgtctagtcagaggggcctt

SEQ ID NO: 210596 - DNA, 122 bp, Homo sapiens
caaagggttgctgtacagataacttcaagtaacaaaccacaaagttggctgcagaacagacgctagccaggccaccaggctccttggcctcacagccccctgacctggtccacaccttcccc

SEQ ID NO: 210597 - DNA, 122 bp, Homo sapiens
tttagagtgctcaccctatgccaagtgccagcagaactctagggggaggacacacacccacgcacagttcctggatgtgaccagggatggagatccaggtggtctcgttctccatgcctcat

SEQ ID NO: 210598 - DNA, 122 bp, Homo sapiens
cctctggccagccacggggcctggccatgaactttgcgtccgggccaatgctgcagtggccgggcggtggtgagccttccgttccccgcctgtccctcccggcccctcccctcggtctccgc

SEQ ID NO: 210599 - DNA, 122 bp, Homo sapiens
tagtaagatattcggatattgaagtattgaaagcttctgagaggtcctttctaaaccaaacggaatccagaaaactgtgaatgatattggttttgttaaacccaaatgcatcattggaatct

SEQ ID NO: 210600 - DNA, 122 bp, Homo sapiens
tcagcgcccggccttcccgcgcggctgccgccctttccacggtgacgccgtctgcactagcgccgcacccgcttcaactgcctgcaaccgccgctgaattccctcatccccacgctgagagg

SEQ ID NO: 210601 - DNA, 122 bp, Homo sapiens
cgcagccctgcacccccacgccctccagggaacgccggcccgcccgtccccgggacctcccgtcccctaagccaaggccccccaagcccagtgcccgcgcgccacccctccctccgaccctg

SEQ ID NO: 210602 - DNA, 122 bp, Homo sapiens
acatcaagcaacaagataatgctagtagtacctttatcttctactctgataccctttcctcgtcgtcacatttttacttcactaagatgtgtgtattttagtgccaggtatactgtaatcct

SEQ ID NO: 210603 - DNA, 122 bp, Homo sapiens
gctccgcgcggggagggctgcggggcccggggttggctgtgggttcggcccggagaccggcggcgcgtttgcaccgggcgggtcaggggatggggtcagtccgggggcaagagccgtggggg

SEQ ID NO: 210604 - DNA, 122 bp, Homo sapiens
gctccccggctcctcaccggcagcgccagaaccgcgagcgcgagcacgcaggcgcgtgcacgcagaggccgggacccgccgggaaatctcaaccgggcagcccccaccccgctcgaacgccg

SEQ ID NO: 210605 - DNA, 122 bp, Homo sapiens
tgcgggccagcgtggagaggcgggacgtggcgcccgggggcggggcctggcgccagggggcggggcgcagcgagccgggctcccgctgtctgctctcagcggcggcggcaggggctgagggc

SEQ ID NO: 210606 - DNA, 122 bp, Homo sapiens
cacggtcaagtgtcgatacagtgttgccagccgggtgccaactatgaataagtccaagggcgcggcacgtgggccgaaacgcgatccttccgcggagccgctgcgcgcagggccgtccccac

SEQ ID NO: 210607 - DNA, 122 bp, Homo sapiens
tgcgcgatataatctcctggtgtgccgttttttaagcctgttggaaaagcgcagtattagcgtgggagtgacccgattttccagatgcccactgtcacccctttctttgactaggaaaggga

SEQ ID NO: 210608 - DNA, 122 bp, Homo sapiens
gggcggctgctagaaacgagaaccaggagaaccacgcagccaggaagccagtggccaccgcgcacttccacccagaaacgcattccccagaacctggtgtttcatgcccggtaacaacataa

SEQ ID NO: 210609 - DNA, 122 bp, Homo sapiens
gggagaatgacatctgagcctgaaataggatatttgtgttgtaactttttcagtgtcatacgataccattttttgaccacttagttgatgcctctgaaaggaagagagaatcagatcgctaa

SEQ ID NO: 210610 - DNA, 122 bp, Homo sapiens
cggccctgcgcacttggggcgacggggccaggcgcgggggacggctgcgggctgggagggcgcgcggaggagacaccgctgaggggacgccgctgagggcgccacgcggggggcgcggctga

SEQ ID NO: 210611 - DNA, 122 bp, Homo sapiens
caagggaggaatgctgtcagtttctttgactgctgtgtggtcagtaccagggcaatgcctcgcacagagtagccctctctccctaaatgtttttgaataaatgaaataaatgagctaagtgg

SEQ ID NO: 210612 - DNA, 122 bp, Homo sapiens
ggggaccgaggaggggtctggggcgaaaggaccgcgagagggcgcccagggcgcggggggcgcggtacctgcaggccggcaaagtcttccaaaccggtcccgccagacccgcgcggccgccg

SEQ ID NO: 210613 - DNA, 122 bp, Homo sapiens
cagaggccgccgctagggtgcagctgtgggctgacgtgggagccaggcctggggtggagccgcgccggagccgggccggcagcgctggcgaggaggttcgggtgttgtgtttccactgtaac

SEQ ID NO: 210614 - DNA, 122 bp, Homo sapiens
tcctgggactcgggggcggcggcaaggccacgggagtctccggcctcaatggggaatctccgaccctgcgggggctcctgggcgctcatgtccaagccccggggcgctctgcgcggggagtg

SEQ ID NO: 210615 - DNA, 122 bp, Homo sapiens
gaccctgataggcgtacacctctcactcccactcacgcgccgacgacatgggcttgtctccgttactcatccaagtttgtcttgagactgggctgtgagccggcactgcagtgaaacgccgc

SEQ ID NO: 210616 - DNA, 122 bp, Homo sapiens
ggcgttgcagtttattgttttaaatggatagctctcaagggcattgggctcgtgtccccacgcaccctctgtccgtcctctcccaggtcctcgggtgatgctccctgtaccaggtgaggaca

SEQ ID NO: 210617 - DNA, 122 bp, Homo sapiens
catggagtgggagggaaagctgaggagagcgggctttgagcctggagaactcgtcacgcacgttcacgcaagcttggaggaaacatttgagctcaggagcgagcttacctcgcgggaggctc

SEQ ID NO: 210618 - DNA, 122 bp, Homo sapiens
agtgtgggaacaacagtctctcctgtccacgttactgaatccagaaaaaaggtgaacttacgaacatgggaaaagaaatccagctaaagcctaaggcaaatgtctcttcttacgttcacttt

SEQ ID NO: 210619 - DNA, 122 bp, Homo sapiens
ccacggccctcggcgacccggggtccccgggatggagcgaggctctgggccttcagcagacgccggggccccagacgcccctgaaccgagctccagagacatccgagcccaggctcctagag

SEQ ID NO: 210620 - DNA, 122 bp, Homo sapiens
ttaaatatttcattcctgagctctaaaacctatttacattgaagcctgatgtcctaaacacggtaattacaaagctgggtaatggtctccatcctttcctttcatgaatccatgtatgaaag

SEQ ID NO: 210621 - DNA, 122 bp, Homo sapiens
ttttgtctttaagctttggggggatttatgttgcgtttccaaactgcttctgcctgtcggcgcctgtgtggaaactgcgacgagtctgggagcggctgccggagaggcggggcagaggtgtg

SEQ ID NO: 210622 - DNA, 122 bp, Homo sapiens
tgccctccgtgtccttagcttccggctgagttctcaccctgctaagcttccccaggagctcgagccattcggggaaacagccaggaggaccagaatgagcaggtctgagccgtgagtcctcc

SEQ ID NO: 210623 - DNA, 122 bp, Homo sapiens
atgggctcagaggactttatcaggattgattatcaaaactaatatgttgtttttccaagtcgataaaacattgcagagctcaaagcaggaggagcaacatttccccagaaaatgagagtttt

SEQ ID NO: 210624 - DNA, 122 bp, Homo sapiens
gttggccctggcctggccggggaaggtggcagcggcaccggactgacctgcagtgacccgcgatgccgcgccacgagggacacttatggcttcattcgagagctgctgccaaaacgcctggc

SEQ ID NO: 210625 - DNA, 122 bp, Homo sapiens
gcagggtcgcttccgctttgccagaaagcccttctgtgtcatcggtaatgaggcgcgccccgcccgacctgacccctgaccccaggagccagggtgacgcctttactcccaatcccgactct

SEQ ID NO: 210626 - DNA, 122 bp, Homo sapiens
gttgagcaaaagatcaaaaggactgaaaattcttggagtttctgttacaacaagtggcatcggtgttctacataatgcaagaatgagcttgctgggcttgactctgtttgccacatgggaca

SEQ ID NO: 210627 - DNA, 122 bp, Homo sapiens
tgcagacacagaagagggcaatgagcctggaagtgggcgggggttagcagggctcagctgcgctcccccagcctaccaaggtctctcagggcacaagtcacatgccgagccccacgctgctg

SEQ ID NO: 210628 - DNA, 122 bp, Homo sapiens
ctaaggagcagagcaggagcagcatttagggaggtagagtcacctgatcagttctcccatcgcatcctccaataacacattggtaaaaccttctggaattagaatatggctatctggcaatg

SEQ ID NO: 210629 - DNA, 122 bp, Homo sapiens
tagctttaaaaggtggttgggttttagaagttaggcaaaagcagcaggcagttaaaataacggggtattgtgcagcagacatcttacagaggtcagaaatcaggatgcgtgtttgggatgtg

SEQ ID NO: 210630 - DNA, 122 bp, Homo sapiens
gccagctgtcctgctgcgccaccttcctctgtcctcgcatccgctgatgggatttccggtcgcttccactttgtggctcttttgaagaatgccgctaggaacattcacacgcaggtttttgg

SEQ ID NO: 210631 - DNA, 122 bp, Homo sapiens
acgtgggtctcccggatgggggtgtgtgaggtggcggggggaataccagggctcgtaccgcgtccctgagacgcagggcatgtcgtcttggctgccccctggaagagacagagggcgccctg

SEQ ID NO: 210632 - DNA, 122 bp, Homo sapiens
caggataagatgtgcaggggggtggccaagggggtgggcagctccagcctcaccaggtctcgcccacaggccgcgtggcctccttctcgatacctggctcctcatcccgctactcgctgggc

SEQ ID NO: 210633 - DNA, 122 bp, Homo sapiens
atttccgaatgtcgcacagtagaaagtggaccagcaaccagggttgcagatcccaaagtccgggatcttcaccatttcacccaaccgccttagagacctcccagcaaaaggtctaagcacga

SEQ ID NO: 210634 - DNA, 122 bp, Homo sapiens
ctgagagggagaggcgcttttcaccaaaaggtgttttgcagagggcgggagggagctccccgcttccagctcccggagtggcctggagcctgtgcccaaaggtaggcatggtggagcggttg

SEQ ID NO: 210635 - DNA, 122 bp, Homo sapiens
ttcaacaccacaggcttcttgggtgactcagcgggaatgctccgattcaaggcgatggaccgcccgagcgtccccatttgtgaaatgtttccccatgaagaccctggcattctccttccttt

SEQ ID NO: 210636 - DNA, 122 bp, Homo sapiens
gcccacatgccccagtgagaatggtgcccaggctcttcttaggctctggacccaaagctccgagagcaggagaggcttaggggttcgaagtcacaaccagcaacatgtctataagccaggtt

SEQ ID NO: 210637 - DNA, 122 bp, Homo sapiens
atttgatttgggctttctacggagtgcgcgccgtctctgagctttcgtgatttcatcttccggaaggcgaaaatcatccctctgctgaattgggttttgatttgctggtgttcacctgacag

SEQ ID NO: 210638 - DNA, 122 bp, Homo sapiens
gggatccgaggctcggagccagtgggagcctctttctcaacctcacagcggggggacttccgcgtcccgcaggtggagaaaccgaggctctaagccggctcctgcctgtggcccgggggtcc

SEQ ID NO: 210639 - DNA, 122 bp, Homo sapiens
ttggagttgatgtgtaaattacacgaggcatagaacgatgcggactccagacctgcaccgcggaaaactcactaaagctgtctccaaagggctgcgaaggcgaccatgcctctacccaacgt

SEQ ID NO: 210640 - DNA, 122 bp, Homo sapiens
taacccgagaagagaggaatttcgacagccccgtacacaaggagagcatgatccagcacccggcgccaggtctgctctgacggcacggccagaacagcgggtcccgcacgttcccgctcatg

SEQ ID NO: 210641 - DNA, 122 bp, Homo sapiens
agctgccttgtacactggtacgtgtgtctcttgcttaatagcgccttagcgtattctggtcggcttggcttcccatcaagtgtttttccgtgtgtgaataatggtttcacctcctaatagtt

SEQ ID NO: 210642 - DNA, 122 bp, Homo sapiens
tggggtctgtataggtggctgtcatgtgtgccgagcatagctcagtatagctgcatgaagcgttccaccgggcagacggtgttgatcctccagtctctgagccacagtggtcctccgagtgg

SEQ ID NO: 210643 - DNA, 122 bp, Homo sapiens
atgtataaaattgagcataccaagtagatttggatcttcttgcctgagaaaattctcaatcgatcgtggactctattaacctgagtctgggaagattcaactgttaatctatttcttccatg

SEQ ID NO: 210644 - DNA, 122 bp, Homo sapiens
aaccaatcaaacggtgatggccacactccacccccaggacctgacagccaacagtcatcacgcacctggcaggcccacagctctctgcacatacacatgcctcaatttcccaggcatggggg

SEQ ID NO: 210645 - DNA, 122 bp, Homo sapiens
ttcccggagcctccagcagaacccagccccgctgccacctcgactgcagaacggtgacaccgtgtccgattcccgacctccagaaccgtgagataacacgtgtgctgttttaagccactgca

SEQ ID NO: 210646 - DNA, 122 bp, Homo sapiens
caggtgtgtcctgagtcggcatctccccgtcaccaggtgtgtcctgagtcggcatctccccgtcaccaggtgtgtcctgagtgtgtcctgagtcggcatttccccatcaccaggcgtgtcct

SEQ ID NO: 210647 - DNA, 122 bp, Homo sapiens
gtcacagtcactgtggtgctgggcgagccaccctggaggctctcgcacacaggtgccatgcggggctccccagcacccacgctggaacgggtcatggcagcggtgctgaccgcatggctgtg

SEQ ID NO: 210648 - DNA, 122 bp, Homo sapiens
ccccgtcgcagaaggccaggtcgcgggcggaggcatcggacaggcgggaggacaggctggcggggtccggcttctccagcaccttggcaatgacgcaggtggggacgctgtcggcgtaggcc

SEQ ID NO: 210649 - DNA, 122 bp, Homo sapiens
gcttctgcaggggaagcttgggactgcactgctttagtgcccgccttcagcccgcaggggcgcgggaggaatcgtgccaccctttgctcccgggatttatcggcatgacagtgggggtggtg

SEQ ID NO: 210650 - DNA, 122 bp, Homo sapiens
gtcctggctcaccatgctgaagtccaggaggtcactgagctccttgtctgtgcccacaggcgccatcctctgcggctggttcattctcctggggccagggcgggcacctcaggcctggaaac

SEQ ID NO: 210651 - DNA, 122 bp, Homo sapiens
tagttcaagacttttagattcatcgttctactttcattgtggctagctcatggccatccacgtagtgaattaataaagctttgttgagtggcacttgcttgacagcgacacttttgtccact

SEQ ID NO: 210652 - DNA, 122 bp, Homo sapiens
agaagttccaagtcagcaggttcagcaagagggggctgttgccatggctctgatggtgcccggtcccctcatgtgctgcttgtctttctcataagctgcttgtctttctcataagcgtgttt

SEQ ID NO: 210653 - DNA, 122 bp, Homo sapiens
agtgtactctattgtgagggctgtttcttcagttacagaggttggcgaccagttacccagcggtcaccataatgaaaacacacagatgtttccacctgtacagcaagagacacaagacgcaa

SEQ ID NO: 210654 - DNA, 122 bp, Homo sapiens
tatatcatgctgaaaaatggacacacagaacactctgtgtgtgtgtttttcacagctttccgtgacattttaactaagtgtggaggatattgttctgcttttcattacacttggtatggcta

SEQ ID NO: 210655 - DNA, 122 bp, Homo sapiens
ccccttgccctttatgatgtttacatgggcggagggatccctcccagctgacagccacaccgcgccggcccttctttttttaaagagcctagccacgggcgctgactggccggcagccgggc

SEQ ID NO: 210656 - DNA, 122 bp, Homo sapiens
attaagtcccacctggcacagatgaggcatgagcattaggcagaggccacatcctggtgacgtgtgtgccaggtctgtcctgcagatgtgctacattttgtttggcttttaaacgtgctaca

SEQ ID NO: 210657 - DNA, 122 bp, Homo sapiens
aaagagccacgagaacaactaggcgggatgtacttttgagccctgccgggtgtctccgatcggagtctggggttgagatttgggctgcacttgtccccggtgtgtctctccggcggagtacc

SEQ ID NO: 210658 - DNA, 122 bp, Homo sapiens
cttggccatcgcggggtgccggctcgggggaagccagacaccggggtccggggtggcgggcggcgggcgctggactgggcgccgcagggggggcgggccggggaggaggcgggggcgggggc

SEQ ID NO: 210659 - DNA, 122 bp, Homo sapiens
ccgcgcggcaccttggaaagaccgcgagtggggacgggcgcctcccgaatgcacagcgggcgccgatgggctttcgcaagagacacccgctgcgtgctccggggctccggggcgggtgggca

SEQ ID NO: 210660 - DNA, 122 bp, Homo sapiens
gccccgctgaaccattactccctgtaggggagtctcgcttgcttctcttcagatgcaaaacgaaatggaccttcacacagctggggcatcctccaaaacaactttatcaagttcctgactct

SEQ ID NO: 210661 - DNA, 122 bp, Homo sapiens
ctcgagggcttggaatgtgggtgcacagctcccgacgctgcagggggcgaggtaagccgtcgcacagagggttggggtggagcgtcccgagacccgaaaacccagggcagagtgcccgtcag

SEQ ID NO: 210662 - DNA, 122 bp, Homo sapiens
aaaggctgtgattgtccaagcctaggtagggccacggagagttccttacaaaccccaagccggggatgatgggtactgctaggaagaaacctagccctgcctctgctgccctcagttctggg

SEQ ID NO: 210663 - DNA, 122 bp, Homo sapiens
tccacacagcacaccaatgtgatacttccactgaccggctgcagctctgcatgaaggactcggggtctggatgccatggaatcactgtggctcttgttgcagttttgtactctatacttggt

SEQ ID NO: 210664 - DNA, 122 bp, Homo sapiens
tcggcgaacctgcatcgctgcgtcttcgtcacccggaggccatcgttacaggagggttcacgcctcgtactggacgttctgtgggtttggacaaacgcctaacgtcacgcattacagagttc

SEQ ID NO: 210665 - DNA, 122 bp, Homo sapiens
cgccgcgcccccgcgcgcttggcttgcggggggccgggcctgcgggcggccgccgcgccgcgcacccatggacggcccggccatcatcacccaggtgaccaaccccaaggaggacgagggcc

SEQ ID NO: 210666 - DNA, 122 bp, Homo sapiens
gctcttctagttttggctaatacgttctatttaaagggtctcccagccacagtttgccagcgggcaggcggcgccgcaggaagtgaccgggcaagaacgggggtcgccgcccagctcggcct

SEQ ID NO: 210667 - DNA, 122 bp, Homo sapiens
ggtgggggtcttcaggttggccatggctggagaggagcatagttccagaccaggcttgtccgctggtctggaaggaaaggctgcaacgtgcgggggcccaggccttactgtggggcctgcca

SEQ ID NO: 210668 - DNA, 122 bp, Homo sapiens
gcctgaatctgcctataattaattataaataggtgacagtgggcctctaacctaggatctcgatcaagctcaacagctgagtcatggtgtgtatgactcaccatggaagccctgcataggaa

SEQ ID NO: 210669 - DNA, 122 bp, Homo sapiens
gggcgggctagtgtgtgtctctgtcagtctgatcttccagaggatgagtcagccacgcaccgccctcctccagcgccgccctactctcccgccagctttctcaccctctagcctccccacgt

SEQ ID NO: 210670 - DNA, 122 bp, Homo sapiens
cctgcgttccctcctttcatcccggagcccggaacctccgcttccggctccacgtccgcccggaagaagatctgctgcacacttccgtttccggtccgtgcccttggggctccgtgtcctgc

SEQ ID NO: 210671 - DNA, 122 bp, Homo sapiens
tgaggcgtgcgctgtcctgggcggcagcgactccgagaagtgctcctactctcaggtgggcgcgcggcccgggcctcctctcccccggctcccgccgaacctccccttcccggcccggctgt

SEQ ID NO: 210672 - DNA, 122 bp, Homo sapiens
gtaagttccacatgggacgagggctgtgggacaggtgccacctgtcaccaggagtctcggcgctggggcctgcctgctgcggtcctggaagcccgtctgatgctgaggagacccgcgaggcc

SEQ ID NO: 210673 - DNA, 122 bp, Homo sapiens
aggaagagggagaaagtagatattgaagcttaatgcagaaatacaggaccagtgttgttacgtcttcagacttttaaaggagactgaaatataggtggtttttttattttttattttttgag

SEQ ID NO: 210674 - DNA, 122 bp, Homo sapiens
tctgggaggcgcaggacatccagagcccttcatagaggcccacggcagtgatgatggcgtcgcctgcgtaggaagactgcttccactgtggcagggctgtgctagcaatgatgcccacccag

SEQ ID NO: 210675 - DNA, 122 bp, Homo sapiens
tgagagcgcaacatcagaagttgcccagtcctgctggttttgccaactcagacttgcctgcgcagcctccgttgatggccccactcctgttgtcagatcacagagcactctgggatctctac

SEQ ID NO: 210676 - DNA, 122 bp, Homo sapiens
ctccggttcccacctcaccctgcaagccttggggtcctgggcggatggagccggctattccggggctcccaggattctgcctactccgcggcacggcgcagagacggggacttggggaaaca

SEQ ID NO: 210677 - DNA, 122 bp, Homo sapiens
attgatgtttgagcatacttctgaactggcttttgttgagactatcagtatagaagcatgcgctgtcccaaatccgctgttactatgagaaatgaagagctgcttttaaggtatgttgttgt

SEQ ID NO: 210678 - DNA, 122 bp, Homo sapiens
cacctcgtctatccctgcatgggtctgcagatcattgtcaaccccagggtcatgctcagacgacacctttgctccccttccccatgcttcctcctctggcccatccttaggcctggctctca

SEQ ID NO: 210679 - DNA, 122 bp, Homo sapiens
gtttcaacttcctgcagctcagaagaggggtccccacccgagagcgccgggaccctgtcccgcgctgcctcccaagccggatggggttgagcgcgcccaccccagtcccaggagctcaggcc

SEQ ID NO: 210680 - DNA, 122 bp, Homo sapiens
cgggagggaaggagggactcaggtgggggtcccagctccgagggcgtccgtggcctctcccggctggggtggggctgcccacaggactctccccacgcccatactcgggaaccaggggaagc

SEQ ID NO: 210681 - DNA, 122 bp, Homo sapiens
caggctgctctttcattggcagtcaagggtgtcaatcactgtggccctgccaatcagctccgaactaggtatctgtaagcgattagctttctttgttagaacactgaaccctccaaggacta

SEQ ID NO: 210682 - DNA, 122 bp, Homo sapiens
gatagggcgcggcttaggctttatacaccttgccagccaatgaccgcgccgtctcctttccggtcggcgatccgaccaatccaagaaggttggtgcaatcttcggctctactcggctgtttt

SEQ ID NO: 210683 - DNA, 122 bp, Homo sapiens
ggttgcagtgagccgagattgcgccactgcaccccggcctgggcaacaagagcaaaactccgccttaaaaaaagaagaagaagaagaagaaagagaaggagaaagagaagaaaaagaaaaag

SEQ ID NO: 210684 - DNA, 122 bp, Homo sapiens
ggcagaggctggtgttcctgagccctgaggagacatccagaaatagatgggggcgtgtcacgtttctgagcagctgtgtgggggaggttcaaggggtggggactaacaatatcaaaaagaaa

SEQ ID NO: 210685 - DNA, 122 bp, Homo sapiens
caagttgctcagctgctcctgggtggcctggcatgctgtccaaatggcagtggtttcaggcgggcggtcgctggcagctgtggcaggtggagaggaagtgggggaatcgctgggacttggga

SEQ ID NO: 210686 - DNA, 122 bp, Homo sapiens
agggactgacgggacgcaggctgggacccccaatcctccggggcagactggcggggaagacggcgtgcgcccgcaggcagctccgaggcgcgctgcgcagctccagcggtcgccgggccagg

SEQ ID NO: 210687 - DNA, 122 bp, Homo sapiens
taccactctgaacttgtgcgcgtcgtgtgaggtgttctcccaggggcgctccgtgagggccggggaccacctggggccgggttgctcacgagccgggcacagtgcactctccctttagttgt

SEQ ID NO: 210688 - DNA, 122 bp, Homo sapiens
ggcaccaagactcaggcaccgtggtgacagcagcaccaagggacaagcacaggagaaagacgcctcccctacaaagcctgatgagggtggtcagcaagtctaccctgcatttctttttctgt

SEQ ID NO: 210689 - DNA, 122 bp, Homo sapiens
gctgcggcggccaatggcgagctccccaggacaggacgcgggggctgcggagcaggaactcgccccgcccacccctcgcgcagccccgcctccgccacgccaaccaatggcgcgcgccgccg

SEQ ID NO: 210690 - DNA, 122 bp, Homo sapiens
ccctactttgggatcactgcacttgttgttctgtctcttctgctctcagtggtgatgggccgtgtctttcatattttgctgattaggacactggggtccagcagagccccacatgggtcctc

SEQ ID NO: 210691 - DNA, 122 bp, Homo sapiens
atgagacggttatttttaactcgcgttaaggtaatgaacggcgcggggggtttgcgggttcgaaagttcagcgcccccagcccccactttctgcgggtctggggggcccctctctgcacgcc

SEQ ID NO: 210692 - DNA, 122 bp, Homo sapiens
tgagagattttgccgcggcctgtgacacagctccacctaatgtaaaggtgttagaaagctcggttttcccgcgtggccaggaagaggagaaaaagaagtgtcgctggatcactaagacttgg

SEQ ID NO: 210693 - DNA, 122 bp, Homo sapiens
acctccaaacctcgttctagtccgcaggagcgaggcacacttacactcctcgattcgattcgattcgattcgtagtgagctgtctgacttccacactgcgggtccgttcagggcgcgaggat

SEQ ID NO: 210694 - DNA, 122 bp, Homo sapiens
cgggaaaatctgggaaacttcccaggttcagggagggatgtaaccctggatgctggaggtcgagggacatccaaggccagcctgttttgcttcacagttttgcttcaaagtggatcttgcta

SEQ ID NO: 210695 - DNA, 122 bp, Homo sapiens
ccgcccgccttccctgcagtgagacgatcccctggggggttccttgggagcggagggactcgggtgaggcctaactttgggtgacctccccttgcagtttcaacgtcggtaaacccaggaga

SEQ ID NO: 210696 - DNA, 122 bp, Homo sapiens
agtttcaaaagacacgtccactccggcttttgccttgcagtagctgccggcggctgcaaacgggccgtcacatccgcctccttattggctgcgaacctcgcgcgatatcaccttggacgcca

SEQ ID NO: 210697 - DNA, 122 bp, Homo sapiens
aacattagcacataaagtagagaagaaatttttcactgcttacttactgccagtcacattcgaataagaaagacaaggatttgctagactaagggaaaacatggctctaacccaatatgatt

SEQ ID NO: 210698 - DNA, 122 bp, Homo sapiens
ccatcttcccctaagtgttccggagccgctcgtggcaatgtacacaaacccttgcacgtgcgcgcacacaggcccacaggtagctctttgatatctaaatttctgcagatgcttggagtgcg

SEQ ID NO: 210699 - DNA, 122 bp, Homo sapiens
ttggctgaggcagaaaagtgcccctgcctcggcgctttcggttttggctgggatcatccgcggcggccgggctcgtggggcgcctggagtgagggttctggttcccgccggcgaggtgagcc

SEQ ID NO: 210700 - DNA, 122 bp, Homo sapiens
ccactctaacacattaccatagaccgaaaggcttataaacaacagaaattcatttctcaccgctcaggaggctgggaagtccaagatcctctgctccctcattctcacatcccaagctgctc

SEQ ID NO: 210701 - DNA, 122 bp, Homo sapiens
tatagtaaccggttttgttgcacttgtctgtggctgaaacacttacctgcagtggaaagccgagcaaggaggaggtaaacattggagatgtttgtgaaaatattactcttgctgtgaggttt

SEQ ID NO: 210702 - DNA, 122 bp, Homo sapiens
gaaccatctactctcaatatacccaaaaaggaggctctgatgggctgccttcctcccatccgatgtggagtgtcctcaccacatacagtttcgggcagccccctcctggctacctttcatag

SEQ ID NO: 210703 - DNA, 122 bp, Homo sapiens
tggccatcccggagctgggactggctgtcgctgggcccgaggttttcaagggttccggagcgcggcctccgtggctgggcctcagagactaacagactcaggctgcccgcgccccagctcag

SEQ ID NO: 210704 - DNA, 122 bp, Homo sapiens
ccagaaaacaggtgaggggggcgctacccctctttaatggaggcccacagtatgtgccaccgtccgcagaacaaatgcttctgatgagttctccatcagtcaaacgctgccatgcaaccagt

SEQ ID NO: 210705 - DNA, 122 bp, Homo sapiens
tgctcactcactgctgtgaacctggctccctccgaagcatggcaaagttccacttaaggacgctccaggtggatatggggtaaagctagggtgtttcccggcatgtacatacactggggtcc

SEQ ID NO: 210706 - DNA, 122 bp, Homo sapiens
ccattctgccgggtccaagttggaaaggaagagcgcgagggattgagggagaaggaaagccgagaatctatgtcatttaatagatcatgctttgggtgtcaagtctaagaattctttggcta

SEQ ID NO: 210707 - DNA, 122 bp, Homo sapiens
tgtttgactaaaattaagatcttaatacccactgtgtgctttgactttcattttagctaccgtgaattgatgagcaaatctaacataggaggcatcctcttgagtccctgctggatagtaag

SEQ ID NO: 210708 - DNA, 122 bp, Homo sapiens
tgcggcagtgcgcccaacagcggactccgagaccagcggatctcggcaaaccctctttctcgaccacccacctaccattcttggaaccatggcggcagtggcggcggcctcggctgaactgc

SEQ ID NO: 210709 - DNA, 122 bp, Homo sapiens
ggcgcggggcaggccgggtctggagatgctatctccttttgcgcacaccaactgggcacccggagtggtggggttagctctcgtctggcaggcctcggaggatcccgtcccagtgacggtcc

SEQ ID NO: 210710 - DNA, 122 bp, Homo sapiens
caggctccggagcgacggctccgacggggacccgttaaataatttattgatgatacaaagcgactcgcgcccacccggggccgcccccggattctgcaaaaatagattcgcccccaccccgc

SEQ ID NO: 210711 - DNA, 122 bp, Homo sapiens
aggagcaggcatcctagtcttgttcctgttattagggagaaaacttttaatctttcaccacgatgtattagtgaactgtgtgggcttttcacagatgccctttatcaggttaagaaaattat

SEQ ID NO: 210712 - DNA, 122 bp, Homo sapiens
tccccgcatctcggtccaaaccccccaactgacactcccgcatcctggattgtggggccacgcccgaccctgcgtctgggacaccactgagcttgggctctagcctcctgcctccctggctg

SEQ ID NO: 210713 - DNA, 122 bp, Homo sapiens
accaggatggtgaacatgcttttccccaggccatggaggtagctagtgaggagccgagcccggatttgaacccagatctgcccttcttgaagtcctctaggactcaggtctcactgccttcc

SEQ ID NO: 210714 - DNA, 122 bp, Homo sapiens
cccaagttatagaagttcctcttcctggattttgtcttcaattgtaactgtagttcctaccgtgtggttgtatgtgttgttagtttgtttttgttttgttttgtttgggaaaggtgacattt

SEQ ID NO: 210715 - DNA, 122 bp, Homo sapiens
tgtgcagaggaggctgggtggattttggccacaagtaggaagcttttgcactccactcgtcgccttcaccggagaaggctgatcgattggctgcagcattaaagcgcctctggacattaggg

SEQ ID NO: 210716 - DNA, 122 bp, Homo sapiens
ggcgcggctctggaccctggagggtggggaccccgggacccaggacagactggggtgttccgcagcctcccggctctacctgctctccgagcccagctttctggcctcggccgggggcgttt

SEQ ID NO: 210717 - DNA, 122 bp, Homo sapiens
tctcctccaccaacttcttcagagacttggacatggtctgcaccgaacaacaacaaagcacgtgggcgatgacagcaagcgcagaggcggaaaggcaagaggccttcgctgccactctgagg

SEQ ID NO: 210718 - DNA, 122 bp, Homo sapiens
caaaatactccctgctgctcaattcgtttaactatttgccttgccttgcttcatagaacacgtgtttggcttcatgctaaaagtattcccagatatatgaagaaaacagaacaaactcaccc

SEQ ID NO: 210719 - DNA, 122 bp, Homo sapiens
tagcaagagggctttaaaagttcacctaagaaacaccgaaacggggtggggagtgggtggcggggcttcgatggataaggccaaccttaaagcatctcggactcaaacattttaaaagccaa

SEQ ID NO: 210720 - DNA, 122 bp, Homo sapiens
tgtcaccgggctccgctcagtcaccaccaccgtcgccgccctcttcctcaggctcctcggcgacccgcccacttaaccgcaaccaatgagagcagagggagacagaaattgccgtacggagg

SEQ ID NO: 210721 - DNA, 122 bp, Homo sapiens
ggcgctacaatccagaacgaggagcagcgatataggagctgcagacagaaaactgaattgcgctttacatgcgctgcaaaatctgagctgcagaagagtagcactacaaaaaacgctacaaa

SEQ ID NO: 210722 - DNA, 122 bp, Homo sapiens
gggggaggggaaatggtgagggggggtctgggagacgtgagtcttccctcaatctttcaccgtaggagattgtctggttttaaaagagaagatgtgtccacatctaaccccgatctgagcac

SEQ ID NO: 210723 - DNA, 122 bp, Homo sapiens
gagaggctgtgcatttcttccctgctagatgctacaggtctagccatagacacatccctccgcaacttcccctcctacccagttccagctccagtagcactgctccctcccctgcccctcac

SEQ ID NO: 210724 - DNA, 122 bp, Homo sapiens
aagggttaaccctcctgttgaaaagtctacctgactgcaaggcactgacaaagctgctcgcgggtgtcttggggttcaggcacccctttgtctgggttactctactgcctcagccctgcagc

SEQ ID NO: 210725 - DNA, 122 bp, Homo sapiens
aaatgttatgtgaccatcttcccagccccccgttaaaatcccttcattttttcgagcaagcgaactagtcagagaagacagaaaagttaagtaaagaaagtggcagaaaagtgaagcaaagc

SEQ ID NO: 210726 - DNA, 122 bp, Homo sapiens
gagccccaagccactctgcctcccggaacagccctgaacctgaacctggttgtctcacttcggcccctggggtccctgcccatgggcatcctgcagagcccacccggtgctccacccccagc

SEQ ID NO: 210727 - DNA, 122 bp, Homo sapiens
agataatacaagcctttgtccgtgcagagactaacccagttttcagaggcagtcaaggcccgttcagtgagacaagaccacaggccacatttcctctaagtagtgggactttggtttatgga

SEQ ID NO: 210728 - DNA, 122 bp, Homo sapiens
ttagtcagactctctcgatcagtttggcctgaagccttaaatgaatgcagtgcatggaggcggtctgcaggaggctcattagaatgacctggaaaagagctccttagctcaaggaagtagga

SEQ ID NO: 210729 - DNA, 122 bp, Homo sapiens
taagagcccccgcctggcgtcgctgtaggcaaatcccaaagaacgtgtcccttcagcagccggctggggcgccacaaacactatctgttgtcttcgctttagtttgtgtcaaagtgactcaa

SEQ ID NO: 210730 - DNA, 122 bp, Homo sapiens
tgaaggacacaggcaaccgcggacaagacttagttgctcagcggaactcactgcccctaccggtgcctctcactgctgatcttagggtcttggcattccttaggggcctggtgctccatgtg

SEQ ID NO: 210731 - DNA, 122 bp, Homo sapiens
ggaaggtgtcatggcggccgcgctcttgagtcacgtgcccagggcccgccttgctacttccggtcacgtgccctcagactcctcgcagccagcgatggaggcgagaccccctagtaacagag

SEQ ID NO: 210732 - DNA, 122 bp, Homo sapiens
tctctgccaggaggcagggtgtctgtggtagaggagtgacccacacatttgagattttcccgggtcacactggaaaccctggattcctgcctggtttatttcccttggattcaatccataaa

SEQ ID NO: 210733 - DNA, 122 bp, Homo sapiens
tgtgcagttacacccctcagaccctcatcatgatctcctgggtccctaagactcttccagcggtgactccaacattcctggagacagatggaaagactcacttagcaccttgcagatccaac

SEQ ID NO: 210734 - DNA, 122 bp, Homo sapiens
cgggagaagtcaggctgtgagaggcgagcctgccaccagcccgaggcttttcaccgccagcgtggatgaggtaacacccgcaaaatcagcatttgcacacttgccaggggctgattacaggc

SEQ ID NO: 210735 - DNA, 122 bp, Homo sapiens
gcccccaaccccaagaccaagcttagtcctgggagaggacagggacttcgcagaggcaagcgaccgaggccctcccaaagaggcccgccctgcccgggctcccacaccgtcaggtactcctg

SEQ ID NO: 210736 - DNA, 122 bp, Homo sapiens
actaatcaaacatgatagtttggttctatggaaaaggcaccaagattgttataccacctacgcattatcacaactccaataagtatggagagagaccccacaaacttaagggtaagggacca

SEQ ID NO: 210737 - DNA, 122 bp, Homo sapiens
tgcattcatacaatcaagaatgacaattcctcattcttgattgtatttatgacaatgattcgactaaacaagagttatgtttcatgtgcatggttttgttgaggaataagcccttccacgta

SEQ ID NO: 210738 - DNA, 122 bp, Homo sapiens
tctcccccagcactgctacatgatccccatatatgctttaatgctgtggtctgtagagggcgacatcttgagactacacactcaaccgggcacattcacagtccactggacacacacacagt

SEQ ID NO: 210739 - DNA, 122 bp, Homo sapiens
gttatcctcatctccatcatcaccttctgcttggagaccctgcctgagttcagggatgaacgtgagctgctccgccaccctccggcgccccaccagcctcccgcgcccgcccctggggccaa

SEQ ID NO: 210740 - DNA, 122 bp, Homo sapiens
cctttgttgtaccagcagatcaaggacatgttccccttcatcttgatttggtactggccccgggccgggggtgtggctgggttggtcagcatggacagtgggaggccggtgcagtcactctt

SEQ ID NO: 210741 - DNA, 122 bp, Homo sapiens
ggagggcgggcggccggggagacggggtggcggctgcagcccgggtagggccaggagacccggtccacgtttgcaaacgcagccgaacgcccaggccgacccgtgccgcccgagcgccgcgc

SEQ ID NO: 210742 - DNA, 122 bp, Homo sapiens
gcactctgcaggcttggggagggacttgcggcggaagaggccggctcggaggcgcgtgcgcgggggctctgcgctcgctgtccggaaacgcctcgtacctgttagccacctggtgtgtacga

SEQ ID NO: 210743 - DNA, 122 bp, Homo sapiens
tgcccaagagcgctacgtcgccggcgggcagcagcagcgcctacaaactggaggcggcggcgcaggcgcacggcaaggccaagccgctgagccgctctctcaaagagttcccgcgtgcgccg

SEQ ID NO: 210744 - DNA, 122 bp, Homo sapiens
gtgagggttagggggcataggtagtggggagaggggttgaccccactgctgccctgcaggcgtgtgcaaatgcaggcatgcctgtgtgctctgtgtgagtgtgcaggtctcagagccagggc

SEQ ID NO: 210745 - DNA, 122 bp, Homo sapiens
ttgccaaaatcaaggcggaggagcgcaccgccgctaggatccaggcggagaagcccaccgcggccaggacctaaggatgcagtacactgctgccaggatcttgtctgtggagcgcagcgcgg

SEQ ID NO: 210746 - DNA, 122 bp, Homo sapiens
agacggaatacccaggagtcgagtacttgggcgcatgcggcaaccgtatctcagttctcgcgaggtttcgtcttcccggaagcgttggaggacattccctgttgactgcgtcgcgatgtgtg

SEQ ID NO: 210747 - DNA, 122 bp, Homo sapiens
tagacagtagcgatgtgaggcttttgcttgttccatgggacactgggacaccttgtgagacgtttgtgggaaggaggggcttgggggcctgtgggaggctgcccaggcgtgactgccacggt

SEQ ID NO: 210748 - DNA, 122 bp, Homo sapiens
gctccctgcagctggaatcctgtgggaggcaggagctcccagcagcacctaattctccaccgggcctggtctgctctgcagccctgtaatatcccctctggagataacccctgaagcccctc

SEQ ID NO: 210749 - DNA, 122 bp, Homo sapiens
gcaagtcgagggcctctgcctgtttctgttgtagaagcctccaggaaggcctcacatcgccggtagatgtcctgggtaccgcggagtgcacttcctttcccgtccagatcgggcagggtgaa

SEQ ID NO: 210750 - DNA, 122 bp, Homo sapiens
accggtcggagccacaatagctcggggtgtcggggatctcctttcttccttttgaccttacgcagggtgatggagccaatcaggagaggctcacccctgacgtcacccagtccccagggcca

SEQ ID NO: 210751 - DNA, 122 bp, Homo sapiens
agcggacgcctgggccaggcctcacaacgtccagagctggaatgggtcttttgctttcggcgcaggggtgacgggatcagcggagggtaggggtgtacactagctgcggtctgatttagccc

SEQ ID NO: 210752 - DNA, 122 bp, Homo sapiens
tcccttgtgatgagtagagcacacattaataaactgcttgtttttcttttgttaatttgacgtttgttttcaggagagtgtcaactaataacctaaaaagggaaatttaaaaaaaacttgtt

SEQ ID NO: 210753 - DNA, 122 bp, Homo sapiens
aggggcaggtctggcaggtgccaacgaagctgaagctgtgagaatcagaacctggggtgccggccccagctctgcttggctgtgtgacctcagacaagtaactgtccctctctgggcttcag

SEQ ID NO: 210754 - DNA, 122 bp, Homo sapiens
tcaggcaggccagccaggcagctggctgtcatatctgtcacacctgagccatggtgtccacgacactcctacctagtgggggagaaattccatttgttgaagagcagaaagagcttgggcct

SEQ ID NO: 210755 - DNA, 122 bp, Homo sapiens
ttaagtctcctaagtattagttcctgaactcttttaagttctcagcatttttcttctttccgatttttgtgctacttcacaatgcaacagttctctgttgcaaggtagcagtagaatgtacc

SEQ ID NO: 210756 - DNA, 122 bp, Homo sapiens
tgctacagatgggaccaagtcgggggccacggcagcagaaaaaaaaggacacgatgcgtacgattaggttttggcctttagtctgaaaaagtgttgattgaaagtgtacaacagagagcggg

SEQ ID NO: 210757 - DNA, 122 bp, Homo sapiens
aactgcagctgggctagctcgggccggcagctggggatccggaaacactggaagaggggacggctcaggcagcatggcagtgtttagccacagagaaagctgcccaccgattgtgctcagag

SEQ ID NO: 210758 - DNA, 122 bp, Homo sapiens
cggcgcggcccccagccctgcggcactggttcagccactcaattcctctcgctatcttcgcgctgctgctgctttatctcagtgttcggagcctaggtgagctgccccttccctcacttgct

SEQ ID NO: 210759 - DNA, 122 bp, Homo sapiens
atctgcctgcctcggccttccaaagtgctgggattacaggcgtgaggtactgcgcccggccgggagggatggcttttataagcatagggtattgcacagttaaaatgtatttgttagagata

SEQ ID NO: 210760 - DNA, 122 bp, Homo sapiens
aaacgacagaaagaaaatccatattggtcaccacaaatcagtggcattaacagctagatccgctgaatccccttgccccgcatctccattggtcattggagagcttataatacaagctaaac

SEQ ID NO: 210761 - DNA, 122 bp, Homo sapiens
ctccccccggcatctgtctcgtcgcgggaagtggaaactccatccttcagtctcttgggccgtaatccttggagtcctccatggctccttttcgttcttccccctctcttctgccccatatg

SEQ ID NO: 210762 - DNA, 122 bp, Homo sapiens
cgttaaacgggaagcacttaaccaatgaggggcgaaggcagcaacgaggaattggaggggcggaacgacagcttgacgggcacaaaagccagccagtgagagccggaagcatcctccctgcg

SEQ ID NO: 210763 - DNA, 122 bp, Homo sapiens
gcagcggaagccgcctgcagcccggggccctgcgaggcgcgcgtctccgccctccgacggcgcccgggccaccttcctcgtctaggcatctcgcagcgcgacccagagcccgcggcgactct

SEQ ID NO: 210764 - DNA, 122 bp, Homo sapiens
cggctggcaccggctggctgccccaggcagtgaggggcttagcacccgggccagcagctgcggagagtgcactcagtcccccagcagtgccggtctgccggccctgcactcgaattctcgcg

SEQ ID NO: 210765 - DNA, 122 bp, Homo sapiens
tgccgtggaaacccatacatggacatcaagtattcatcagtcacatcatccagcttaaaacggtccaatgtccggtgaccacggccatatagcaagaggtcacagtcaagcactgttattgg

SEQ ID NO: 210766 - DNA, 122 bp, Homo sapiens
ttaatttcactgcagtgcagggagatgaattatagaattacagtcgccaattatcaatcacgcctttgctctgcgtctcttggctgcccagccggctcaccctccctctcgcaggccggggg

SEQ ID NO: 210767 - DNA, 122 bp, Homo sapiens
ggcccccgcgccgggggcggggcctgcgggcttgacgaggggcgtgggaggggcgcggcgcgcgttcccgcgggcctggaaaatggctggtcgcgagaggggcggtggcgagctggctgctg

SEQ ID NO: 210768 - DNA, 122 bp, Homo sapiens
gccactgccgccgtcacagccaccgggaccatggaggtactcgcagccattttcccgactcgggccactccagccaatcatcggcgataatactggctgcccatctgcaccaaaaatatctg

SEQ ID NO: 210769 - DNA, 122 bp, Homo sapiens
cgctcttctggggcgctcacggtgacaggctggggttaaaactggctgccccaggagaagcggaggcctggaattaaatacgtttcggcgcactggatttaaataagtttcctgaatataca

SEQ ID NO: 210770 - DNA, 122 bp, Homo sapiens
acagcaaacacgctgctccccagcacctcctgcagtccagccccaccctccttgctgctgcgcttagaggagcagcctgagaccagacctccaggtctctttcatccaacccacctgcctgg

SEQ ID NO: 210771 - DNA, 122 bp, Homo sapiens
gccgattagcgccaggtgtactaatccctggatggttccctgaccagatgaaacatcagccgatgttctaatgcccgtcccctgggcactgtccccgagagggaaaacctgttttctgaccc

SEQ ID NO: 210772 - DNA, 122 bp, Homo sapiens
aacatttaatcattgctcagagcatcgattggaaaatcaatttctttgtctctccgcacgcggcgctggagaagtggggggagcgctgacctccttctgctgccatgtaaagtgctgcacat

SEQ ID NO: 210773 - DNA, 122 bp, Homo sapiens
acaggcatccgccaccatgcccggctaattttttggtttttagtagagacggggtttcaccgtgttagccaggatggtctcaatctcgtgacctcgtggtcgacccgcctcggcctcccaca

SEQ ID NO: 210774 - DNA, 122 bp, Homo sapiens
gcggagccaaatcttaaaggatccgggagctaagccagacccgggtggcggtggcagctgcgaaacccagggagccgatgccacgtgacccaatgtggacttcttttaaacctttctaatgc

SEQ ID NO: 210775 - DNA, 122 bp, Homo sapiens
gcggggctccccgggctggcgggggctgctcagacccggagtctgctccatctgcagggtcgaggtctgggttgcgaccccgagcgcctctgcggcctgagcaggtcggggtggggcgttcc

SEQ ID NO: 210776 - DNA, 122 bp, Homo sapiens
attaatttcgctgtttaaaataatattttatactcctgtgcactgattatcattgctctccgaattaaaactaaactacaattaccttgctagaatgtccagtagcatatatattaattgtt

SEQ ID NO: 210777 - DNA, 122 bp, Homo sapiens
ggttggtgcgctctaccgtccatcagtgacattgcacagacctattggtcaaatcaacgtcgctctagacgcctctggttgattggttaatagtgctgtcggtccccaatgttccaagcgct

SEQ ID NO: 210778 - DNA, 122 bp, Homo sapiens
acaggctgtaggcgccctttttttagctacaatcccgagagctcccacgtgtcaggggtgcgcagacggtaggcgcggggtgcaggactccaattatcaattcagccgagcccagcgctggt

SEQ ID NO: 210779 - DNA, 122 bp, Homo sapiens
cggcgcccagctgggtcaagttgttgtagctgaggtcgaggaacacgagcttggccgagccgctgaacgtgccctcctccagcgagcgcagcgagttgttcctgaagtccaggtagaccagg

SEQ ID NO: 210780 - DNA, 122 bp, Homo sapiens
ggcgctcctctgggccagggctgacccaggaacacagttctccgaggagctgctggcaggcgtgggtgagatccgcctgtctcacatccagaagggtgcgtctagggattccttcagtggca

SEQ ID NO: 210781 - DNA, 122 bp, Homo sapiens
aagagcaatacagactggaatgcaacgaagcgcccaaatatgtggctcaggggtaagggtcggtcaccagcctttccacataagccgatgtggcagagaaaagcaattactgtgtatcctgg

SEQ ID NO: 210782 - DNA, 122 bp, Homo sapiens
gggtctgcggtccaaataggggcgggctagataattaacttccctctggaccttcaaatacgtctcaggagataatgagtttgatgggctccactaaatgctagaacctccaggaaaacttc

SEQ ID NO: 210783 - DNA, 122 bp, Homo sapiens
gtatgtgtggtaggctttgctttttctctttggagacaatactcaggagggttgccccttcgtgaacaaggctaacctgctgagcctttgaagcaaggaactggagatggtccttttagggg

SEQ ID NO: 210784 - DNA, 122 bp, Homo sapiens
catgtgtttgtgtgtgtttaatccttcaacatttatgtgtgtatgcctgtgcttctcagacgcaagccacatgcaaacatttcccctgcaaagtttggtgcttttaagttatttatgtgcaa

SEQ ID NO: 210785 - DNA, 122 bp, Homo sapiens
ctcccagactcaacctatcatcccgcctcagtcccccaagtagctggggctacaggcgcgcgccaccatgaccgtctaacttgtgtattttttgtggagactgggtttccctacgttgccca

SEQ ID NO: 210786 - DNA, 122 bp, Homo sapiens
gggcgccggctcttcctgtggcctccacgctggtgccgcagccagtgcggttttaaataccggagaaggtccccaagtcaggagagtctctcggcgccacgggttcctctgggagtgcgccc

SEQ ID NO: 210787 - DNA, 122 bp, Homo sapiens
ggaaccgcgaggcagcagcggtgtggggaaggcactcagctttcctggaggagcggctcccggtggcggcgggctgcctggaggaggaggcagggccaggctgggcgctgaggaggccgccc

SEQ ID NO: 210788 - DNA, 122 bp, Homo sapiens
ccctcacagccgaagcgtctggcgccatcttgggtcagggcggcgggtccctgaaggaggcggaggctctgggagctggtagctgggcgactggctgatgggcgagggagggcgagggaggg

SEQ ID NO: 210789 - DNA, 122 bp, Homo sapiens
gggatgatatactgtccatcctctgttgtcctgcagttggagtaagtcaattccataactcgtcccatgtccacattccgcagattgtcccagccccctccaggtaggacttccaggacagg

SEQ ID NO: 210790 - DNA, 122 bp, Homo sapiens
ctgagtcaggatttgaaccagcagatcatctgaccccggagccagtcgtgggcggcacagcgggagctgcaaccgaggctcttgactcctgcgtcgtcattccctgaggtccacaggacaac

SEQ ID NO: 210791 - DNA, 122 bp, Homo sapiens
cagagagaggaaatgtggctagattgcatataaaaaccgagggactccgaaaactgacctcgaagtcattttaccaaaagatactctctgcatttctgcagaattgtccttttatttaaaat

SEQ ID NO: 210792 - DNA, 122 bp, Homo sapiens
gggtgttgtgctcctggagaggggaagggcttgggaaatgtaacttacgaatcttcttaacggttgccaacaaaactccgcagctgagctgcaagcactggacaaggggcgcccggcagctc

SEQ ID NO: 210793 - DNA, 122 bp, Homo sapiens
cacacaccaagcataggtgctgggtcctgccctgtgccggtggtgggctgggggctaaggcgctttggacctcaggtgggaggccgggacagagcggccccctcgaggctggtacagccggg

SEQ ID NO: 210794 - DNA, 122 bp, Homo sapiens
cagacgggcggggtggggaagacgcgcggggcccgcacgagggtgggtgtagccgaggggcggggccagtgggtgggtgggtgggcgtagccggggggggggggccctggtgggtgcggtcg

SEQ ID NO: 210795 - DNA, 122 bp, Homo sapiens
taccaagcagctaactgacttcaggcaagtcatttcacctctgcatgccacagtctcctccgctgtataatgaggggcttgagaacaagatgttctcttctaagaagatttccagctgtgac

SEQ ID NO: 210796 - DNA, 122 bp, Homo sapiens
tacttctcttgggtaaaactcattctccaagtgtccttagaagtcagcagggggttcttccgtagccaccctccctcacacttcttagaggcccaggttagagatgttaggaaccttctttt

SEQ ID NO: 210797 - DNA, 122 bp, Homo sapiens
ttggagtggcatgctgttttcaggccctctacctttgtagcctgtgccatttgaagctgccggttactgtttttagcttggcttgacaagagagcttttgttgtcactcaggaatgcagggt

SEQ ID NO: 210798 - DNA, 122 bp, Homo sapiens
ctggttaccatttccttaggatgggtccgggggtcggggggaattctctccccactccttcgcggttaatcccagctgctctatccctcccctgcttcccccaaacacactcaggcaactgg

SEQ ID NO: 210799 - DNA, 122 bp, Homo sapiens
tgaaggagctagacagcattttcccacgctctgaatatctcgacgtgttcgctcggtaagcggcttgctctggagcttcccagttcccaggactctggggctcttccctggacgcctttggc

SEQ ID NO: 210800 - DNA, 122 bp, Homo sapiens
tgccccggcgctccctaatatctgcacccgtgttttctgctgggcaattactgtgtcctccgcggcttgattaacaaatacaggtgcgggatgcgctcaggagggatatcccaggacggaag

SEQ ID NO: 210801 - DNA, 122 bp, Homo sapiens
gggggtccttgaggatgggatggcctgtgtcacgcgctttgtctttgtgtttggttgtatcggggtctctgttctgagtgtgtcttcctctcatgtactcaacacagtgggcagcagcctgg

SEQ ID NO: 210802 - DNA, 122 bp, Homo sapiens
ccaaacgctcgctttctttggtaaacaaaaaccgctcgagccatcctggagaaccgcaagcggcagctcggtcccccagccggatttatgctccagtttacggtctgtggtttgcagtaaga

SEQ ID NO: 210803 - DNA, 122 bp, Homo sapiens
ttgtgacaggaaatggcaaatgtaatagaaagtctaaggagaaattagagggaaactgaacgcagtataaagtctagtactaaagtaaacagcagactttgaggggcacgagaattaagaaa

SEQ ID NO: 210804 - DNA, 122 bp, Homo sapiens
cgtcatgtattttcatgacagcgttccccttcggagcccttaggctgcttctatcttctgcgcctctagcctctgaggagtttttcattccctcttgctggttggaggtggctctgattcgt

SEQ ID NO: 210805 - DNA, 122 bp, Homo sapiens
ccaggagccggaggggagagcggaagtgcgcgcgcaggcccctgggagatgtaggctgggcgggaccaagaaagaagaggaagaagggattagaactctcggccaccatactgcctcgttct

SEQ ID NO: 210806 - DNA, 122 bp, Homo sapiens
ctactttcaaaaagctcctgttttattcgtagaaaatacaaacattgaattctgtggtggcgaggtttctcaaaagtttactttggctactcaaaatatttatgaatgtgtatagccagctt

SEQ ID NO: 210807 - DNA, 122 bp, Homo sapiens
taagccacaaaggaaatcacctgaagtcaaagctcccctcttttcctagcaaggcagggacgacggcaaagagaaagtaggtcccggggcgctgcaacccgtgcaacttgccggctggcgtc

SEQ ID NO: 210808 - DNA, 122 bp, Homo sapiens
actcctttgaagacaatgcagactatgtgtacgatgtcatgtggtcccccgtgcatcctgcgctttttgcctgcgtggacgggatggggcgcttggacctctggaacctcaacaatgacacc

SEQ ID NO: 210809 - DNA, 122 bp, Homo sapiens
gttcaacaagcactactgaacacaaagcctggtgtcatagagaggctctgcttaagatcccgtggtaaatgcctcactaaaacctaagaaagaagggcttcaggcaagtctagactaccaac

SEQ ID NO: 210810 - DNA, 122 bp, Homo sapiens
ttctggaataggctgtcagtgggatctgccacaccatgcttaggaatttggactatatctcgtcagaataagaaactactatgggaccacaagatgggctaaaaaaaaataaggaactagtg

SEQ ID NO: 210811 - DNA, 122 bp, Homo sapiens
gtttatatcaggcgtgttacaccttcacacgcactagggatccaggtaagcccagcggcccgaacgtcattactgactggtgacactgcagtaagtaaaccttttttgccgaacacttcata

SEQ ID NO: 210812 - DNA, 122 bp, Homo sapiens
gaggaaggaggagccggcccaggcctgggctgggagaacgggacagggcttgagaacatccggggggtggagtgacttgggggaaaattccctggggctccaccttccacgacagtcagggt

SEQ ID NO: 210813 - DNA, 122 bp, Homo sapiens
tggtggtacggcagtgggatgcacattttcctttgaccagcgttctcccagctgtcgcaccgctcactcccatgctgttacaggtcacctcttgcaggggcatatttgatcgctgggcactt

SEQ ID NO: 210814 - DNA, 122 bp, Homo sapiens
gcgccgccgccgccgcccgccggccgctgtgatttattatttaccaacgcgcggccgcgccgtgtaaggtgagcattgtggctgctcgcagaactgttacaatctggcctcgttagtggcct

SEQ ID NO: 210815 - DNA, 122 bp, Homo sapiens
gaccgtcccggccgaggcccacggccacccggaaccccagccccctcaccattcgatccgcggcgctgccttccgtcgagcattccggttcagacgctttcggttgacactgtaaccaaact

SEQ ID NO: 210816 - DNA, 122 bp, Homo sapiens
ggagtccgtgggggctccggcgaggtggcagccggcgcgcccaccctccgccgtggccggcgagctcccttggaccttgtccccgagggcaggacccctcccggacccccgcggagcagcta

SEQ ID NO: 210817 - DNA, 122 bp, Homo sapiens
cgtgagcccacgtgcttgtgttctgagcaatgtcacctcagcagatacacagcagccaggcggtcccaggctccacaggcagagactcaggttgggtgttggctgtttcttttttccaatat

SEQ ID NO: 210818 - DNA, 122 bp, Homo sapiens
ggacaggctggatggagtgcaagatgaagagccaaatctggccagcctcactgtcttgcccggggctgatctggacattttaccttagggctgactcagtgctgtggttaacaggtcagagg

SEQ ID NO: 210819 - DNA, 122 bp, Homo sapiens
tgggaccatggggaggtacctgggagcgtgtggggaggcgcctgggagcgtgtggggaggcgcctgggagtctgtggggaggcgcctggcagcgtgtggggaggcgcctgggagtctgtggg

SEQ ID NO: 210820 - DNA, 122 bp, Homo sapiens
agctgctgcagcccccagttgaggttctgttgctcttcccccaactccaattctccagaacgcttctctgctcccacctctagccctagactgatgataaagagggggttcctaggagaggg

SEQ ID NO: 210821 - DNA, 122 bp, Homo sapiens
gtttttcatcctgaaagtccaggatggctttggcataataaaggtcatatctcctaaccacggtaatgttcacagagcaacctgagctccaggcagggccaggccggcctctcagtattccc

SEQ ID NO: 210822 - DNA, 122 bp, Homo sapiens
tctttctctgtttccatagtccttacttattacctttaaaaatactaaatactggcggggcgcggtggctcacgcctgtcccagccctttgggaggccgaggtgggcggatcacgaggtcag

SEQ ID NO: 210823 - DNA, 122 bp, Homo sapiens
ttgtacccacacaacttgctctaaatgggcaatttattaagtatattttgtccctgttcccgccgcaggcccctgccggaccgtcgcccacaagctcccatagcccgtgagtcctctcagcc

SEQ ID NO: 210824 - DNA, 122 bp, Homo sapiens
tttcgaaacgccaataagacttcggtacactgagagacactacttgaaaatactcaatttcgattgccatcagcctgaaagaaagcactgggattttcttaaagtttaggagaaaataaata

SEQ ID NO: 210825 - DNA, 122 bp, Homo sapiens
tgctaaggttctggactgtctgcatgttttaatattcagcacctcctgagacccgagccccgtgtcgggattgctaggaaatggcagcgagcccaggccgcagcctgggctggccccgtcac

SEQ ID NO: 210826 - DNA, 122 bp, Homo sapiens
caatttacctctggagcccggaaagctgcctgaggaaataaaccaggacaaacaagtggccggtgaggtgctggccatctgctcatatcagtgcaggcccttcctccctcccaggcacttca

SEQ ID NO: 210827 - DNA, 122 bp, Homo sapiens
acacactatgttgctggtttcctagtcttcagcaagaaagtgtaggagagaagcaaaaaacgtcctgttcaacccctgctcctggatgtggcaaggaagaggagttacccggcttgaaacaa

SEQ ID NO: 210828 - DNA, 122 bp, Homo sapiens
attacagttgagagcagagcaaatcctttaattgtataagagcatcagattaagcagtaacgtccatgcagttcattctgctagctggtagtctcttctcagaaacaaatgtttactaagta

SEQ ID NO: 210829 - DNA, 122 bp, Homo sapiens
ctaattgtttagacacattccttcctacccttctctagtctcaggagatggtaactgggtcgcatttcagtctctgactgaggcctcagccatttttacggaagttcttttctgtctgacct

SEQ ID NO: 210830 - DNA, 122 bp, Homo sapiens
cagatgctgctgggcttgcaaaacctgcacgtgactagaggttctgcaagctattgggagcgacgcccatcgcgctacctccagaccaggaggtagggctaggctgcgtctgctcaactggt

SEQ ID NO: 210831 - DNA, 122 bp, Homo sapiens
cacccaggtgagtggcactgtggggcgcggcgcagctaggctggccccgcgggttttcctcgggctctcactttagaatagcagttctgatctctttggatcacataaattatagaaccaag

SEQ ID NO: 210832 - DNA, 122 bp, Homo sapiens
tgccttcagtaacatgagagggaaagcagaacaaatgggcaggacaggcaaggaggggcacgggctaacaccaactctgaaggacacagagaacatgttgggattcaacacccactctaagg

SEQ ID NO: 210833 - DNA, 122 bp, Homo sapiens
ggcagcacacgcacacacacgcggcacacgcaggcagggtgtgtgatgagttcacaggcacgaaggggagaacatggccggcgagcttctccagagagggaagggagcctgggggatggcag

SEQ ID NO: 210834 - DNA, 122 bp, Homo sapiens
acctgcctcctgtgacccagaccaccaacaggaatctttggggtctaaaccgcaaacaggcgaaattcccgccaccgcgcgcccgcgctccggaaaggcggggccacggcgcagccctcccc

SEQ ID NO: 210835 - DNA, 122 bp, Homo sapiens
cccacccgggacaccttccacgccaacatccacctgggataggctgctaaggatgagccccgtttcttgatacctcctgtgtgtggggagcagctgtggccaggccggggtctggggtcccc

SEQ ID NO: 210836 - DNA, 122 bp, Homo sapiens
ggaccaagatctgctgcgcctgcgttgtgggcgttctcggggagctgctgccgtagctgccgccgccgctaccaccgcgttcgggtgtagaatttggaatccctgcgccgcgttaacaatga

SEQ ID NO: 210837 - DNA, 122 bp, Homo sapiens
tctaagcctttcctctggggtccataaaaacaaaactcccgaggagctgtgggggtgcaccgtggccaggatcgtcgccgaatacagcccgcacacgtcgcagctttaaataagtagggccg

SEQ ID NO: 210838 - DNA, 122 bp, Homo sapiens
tggcccggccgccccggcccctcgccctccgcccaggcccgccttgcggctccggcgcggcgctgtcaccgccttctccacaccgggaggcggaggctgcacgcagagctagggcatttccg

SEQ ID NO: 210839 - DNA, 122 bp, Homo sapiens
agccagacttcggaacgggtgtcctgctactcctgctggggctcctccaggtaaggggaccgagatcggtctcagacgacagcctgccaggcaacccccagccgcaccagggccccaggctg

SEQ ID NO: 210840 - DNA, 122 bp, Homo sapiens
cactgccatgcaggactctggggcacttggcttgtcattggctaaaagatgggctgggttcgaggtgcagatagctgcattttagccgctggtgctgtctcgcttggaggaatgctgtctgc

SEQ ID NO: 210841 - DNA, 122 bp, Homo sapiens
catcactttttatgcctacccttgatgatatgtccctgctgtctggggagggaccgaggacgaataggacttggtgatgtctaagtaattagtgtatgttggttccagctgaacaaactgga

SEQ ID NO: 210842 - DNA, 122 bp, Homo sapiens
ggctgtttctggaacctaagcacacgtaccacctccccttcctctgacctaatgagggctcgagttggaaaccacaaaccctcgttggccccacaggagccagcctctggcttctctctgca

SEQ ID NO: 210843 - DNA, 122 bp, Homo sapiens
aagggtgcacagacagggaggcagcagtgagaactccaagtgcccctaatcataaaagtgcgtcatggctgcgggtggatggtgtagagggagagagagctggtgtcttctccagtaaggta

SEQ ID NO: 210844 - DNA, 122 bp, Homo sapiens
cacgctgccctcctctgtgcgcatctacctgcacggccggcagctgtccgtcagcaggcacgaagcgtttcctctccgtgtcattgactctggcaccagcgacttcgccctcagcaaccgct

SEQ ID NO: 210845 - DNA, 122 bp, Homo sapiens
atgcctgagcccccccaccgccacccgccatgggcacctgcgtggcccgagcctccccaacgagcgccgcccctgttccgcagtgctcagtcccatcgactgcccaagggctgaggagtgtg

SEQ ID NO: 210846 - DNA, 122 bp, Homo sapiens
tgtggaatggatgtgtggcagctggggacattgggccgggctcccgggcttggcctggagcgactacccggcaccatcagagggagtgagaggaagtgggcgctggtttaatgtggtcagct

SEQ ID NO: 210847 - DNA, 122 bp, Homo sapiens
gagcctacagaagggctgaccaggctcacctgacgccccaggtcgacagcaaaccccgtgcgccccgttggcccggtcacgcccgcagcctgctcaggcgcctcctgcctcgggaccaggaa

SEQ ID NO: 210848 - DNA, 122 bp, Homo sapiens
tgtttcttacgtttttagaggcttcgtgacggagttatcagagacattgagaggcaaattcggaaaaaagaaaacattcgtcttttgggagaacagattattttgactgagcaacttgaagc

SEQ ID NO: 210849 - DNA, 122 bp, Homo sapiens
ggtagatcgcatacatagttacctgcagctacaaagaagtctggtgaagttacttaatctcgtgaaagggagcaagaagatctatgattgacatagatcagttttgatttattccttcaggt

SEQ ID NO: 210850 - DNA, 122 bp, Homo sapiens
cttctgcactgccctgacacttcagtgcactaagtatcacgaaaggagttgctaactgcacgaatacctacccccgccctcccaaaacacagtcttaaatataaaaatgggaacactggtct

SEQ ID NO: 210851 - DNA, 122 bp, Homo sapiens
atgtccacggaaggtcccattctgagctgccgaggtccaggacttcaacatatctttctgcggagacagttcagcctatagcattagctcatgtgccctctgttaggaagttccctgacaga

SEQ ID NO: 210852 - DNA, 122 bp, Homo sapiens
gcttcctccatcgccaccgccgggctccgctgcggctcccgggctccgccgggtgccccgcgccatccccatcccgcgttcaccggaaacgcgtgcgagctggaggctcacctggagcgcga

SEQ ID NO: 210853 - DNA, 122 bp, Homo sapiens
ggtggtgcctgggggcgtcggtgccgtggagcctttctcccccttggtctcgcacactctcgcacactgattctcaagagtgtttgagaatggcggatgccgtcagtggaagagctcttaca

SEQ ID NO: 210854 - DNA, 122 bp, Homo sapiens
cggcctccagctcagacagcttggcgttggcatccttatcggccagctccccacgctactcggcatctctgatggcggcctccagggaagccctctggcctttgaggccctcagtctcagcc

SEQ ID NO: 210855 - DNA, 122 bp, Homo sapiens
gggcgccgggggaccggggtgggaactgtcaaatagtgaaccacggaggggctcggccggcgcgcgcgccgcgcaggcgcagtggtgcgaggatgagctgggcgaaattgtgaggcgctcgc

SEQ ID NO: 210856 - DNA, 122 bp, Homo sapiens
gaactgaggaccagaagttagatatagcactgttatgtgtatggttttgtgaaatccttccgaaagctctgagaattggcccctgtggttagagatgagtaaagccttggagatgggaagtg

SEQ ID NO: 210857 - DNA, 122 bp, Homo sapiens
ttaactccgttttacaggtaaggagatcgacccactgaggtcaggagtgactgaccaaggcggagccaggactctagcccccgcctcccggccactggtcccggtctccttccccgccacca

SEQ ID NO: 210858 - DNA, 122 bp, Homo sapiens
tccgagccaggcgaggagtcctgaatgggggggaacgccccccacgggctattggctccccggcgctcacgtcagtcaccctgggcccgcctccgcccttcgccccgcctcttccccttcat

SEQ ID NO: 210859 - DNA, 122 bp, Homo sapiens
cggcagggcctgtcaatccctttacggacagggaagcagaccaatcagaattcccaggtccgcagctgtgcgaaggaccaataagaggcctttttgaacagtgacgccaggcgccctggcgc

SEQ ID NO: 210860 - DNA, 122 bp, Homo sapiens
cctgcagatggatactcaggtgagaaggttgttaagcccccaacatggaaacaaagatgtcgtctgctcatgacattgtacatacgtgatctccagggtcaatgattggagaggctgtttct

SEQ ID NO: 210861 - DNA, 122 bp, Homo sapiens
agtaacctacaggcaaaggagatcactcagaagaccagagatcagagttggaaactacatcggggaataagtcttttgccttagtgattcagcagagcttgctataaacagatgagtaatat

SEQ ID NO: 210862 - DNA, 122 bp, Homo sapiens
ttgctcaagtcgtgggggcgggaccaatgggcgcccttagatgctgggcatcccagcatgcgttgcgagatcccaggtcccagcaagcgcgatctgaccagctgggacagctcccaccgagg

SEQ ID NO: 210863 - DNA, 122 bp, Homo sapiens
gtctggccgcgcagtcaggccacgcccccagcgtagacgcacaccggcgtcggagctttccgcctattaccgggcagcgattgggtcgctataccgcatgtcacgccaaggacgcactctca

SEQ ID NO: 210864 - DNA, 122 bp, Homo sapiens
cccgcctctccccggtcagcggagtccagcctttctgctctccttccccgcgcagttccgcggtggaacctggctgcgctgggttttgaacgtgcgctttgcccctgttctctgtgggtggg

SEQ ID NO: 210865 - DNA, 122 bp, Homo sapiens
cctcacatccggcatgcgccgtgctcgctcacagaactacactttccaactctccccacacgacccgtgacactctgtggaccgcgagcacggagcagggtttctacagctgctccccactt

SEQ ID NO: 210866 - DNA, 122 bp, Homo sapiens
cttccttctctaacttgcctccaggagagaggacctggcctgcgctgctaatgggtagtccgttcgcagcaggaccagccctggcctaaggaaacaggaaagagtttgagacttccttctaa

SEQ ID NO: 210867 - DNA, 122 bp, Homo sapiens
gcattgtgctgaaccctgtaggcaaaactccccattttacagatgagggcgctgaggctgcggggttagggaatgagtggtggaggcagagtggagctcgaaagggccctctcctcccctgt

SEQ ID NO: 210868 - DNA, 122 bp, Homo sapiens
gacaagaagattcacgtgtacggctattccatggtgagccgcagccccgtcccgccctgccggaggccccagtaccagcttcgaggcccacctgagcctgctgccctgacccgtggccccag

SEQ ID NO: 210869 - DNA, 122 bp, Homo sapiens
gagtagtagacttgagagtcctctcagtggatcgggcctttgagcaggtccgtggtaaaacgccacctcagttcccgagaagagcagcagaagaggaaagtgagccgggccgaggaaggacc

SEQ ID NO: 210870 - DNA, 122 bp, Homo sapiens
acaacgccgctaacagccaatcctcgcgagaggagccgccggaagtcgtcgaaagtgcaacgcaaaagagccttttggatcatagaggcacagtcacttccggcagctagagcagctactga

SEQ ID NO: 210871 - DNA, 122 bp, Homo sapiens
cccgtgtgggttcctgagtctcgaagaggcgcccagcttgcggaaaggcgactgcggcaacgcctagtgcaagtcaaccggaggctggagtcactgcaggatctgctgacccacgtgattcg

SEQ ID NO: 210872 - DNA, 122 bp, Homo sapiens
tgagggcatcgtggaggggggtgatgccttcgcagccctggccacctgggtcgtccactgcggccccgtggtccagcaggaagcggacaatttctgcagaccaggagacgtaagcccagctc

SEQ ID NO: 210873 - DNA, 122 bp, Homo sapiens
ctttgggatgggcaagaagagacaccctaaacttgaactcctgtctgtgcagcctccagccggccaggcgctaaataaggccacggcccgtttcctccttcaaaagtcccttgtaaagggcg

SEQ ID NO: 210874 - DNA, 122 bp, Homo sapiens
gcagagtccggaggctggtgctttctgcgcgtccccaggactttgccatgggctgggggccgcggaggctgcgagcggccgggcgagggcagcggcggcggcgtccgcaccggggctgagcg

SEQ ID NO: 210875 - DNA, 122 bp, Homo sapiens
tcatcacccgggaaaaggccaagtgtcccaagaacataaatgtccgcttccagatggtgccgcccgtggccgccagggggcgggccagccgagtctcccggacacactgggcaggccggtcc

SEQ ID NO: 210876 - DNA, 122 bp, Homo sapiens
taaagagaatgcttttaaggaagacgcagtgatggttacaggctagaggaaactctccatcgttaagcattcatagaaaagagtgaaggaggcacccatacaccagcaggaaaacgacagga

SEQ ID NO: 210877 - DNA, 122 bp, Homo sapiens
tccatgcaagaagaaatgcactgtcctccgatcgaaagcacagcatctttaggagtttaacgacagttttttaacgactttagtgagatgatttgatttcctgcctctgagtcatctaagag

SEQ ID NO: 210878 - DNA, 122 bp, Homo sapiens
gagcggatgttacgactcccaaaatcgcagtgggcggagacctcccccgtgatactgttccgaacatccaaaggtggagaggatgatatttcttccaatgtcgccgggggtgcccaccaccc

SEQ ID NO: 210879 - DNA, 122 bp, Homo sapiens
atggtttacactgtcacctggctgttcttcggcttcatttggtggctcattgcttatatccggggtgacctggaccatgttggcgaccaagagtggattccttgtgttgaaaacctcagtgg

SEQ ID NO: 210880 - DNA, 122 bp, Homo sapiens
ggcccaagctttgcccttactcttgaaccctgccagcaaaagcccacaaatttcaaagcacgcacagttggacagggagcgggctgccagtcagcagctgcccctcctgccagatcaccatg

SEQ ID NO: 210881 - DNA, 122 bp, Homo sapiens
aattcaatgttctgattgccagcccatctctaattcagcaagtgggcctttgttcctccccgaaagcataatgctgtcagaaaagaatgtgagctgtagtgtctatggcttttggcttctct

SEQ ID NO: 210882 - DNA, 122 bp, Homo sapiens
cccaccccgctccagcgtggagcaggagcaacggcgtggcccgtggagccccgcctctcgcggcaaccacagagaagccggactgggccacgtctaggaagaggtaggaaaggatcggcgca

SEQ ID NO: 210883 - DNA, 122 bp, Homo sapiens
ggacgtgtttctgcgctcgcgtggtcatggaggcgctgccgctgctagccgcgacaactccggaccacggccgccaccgaaggctgcttctgctgccgctactgctgttcctgctgccggct

SEQ ID NO: 210884 - DNA, 122 bp, Homo sapiens
tgaacaattaaggtgcctactcctgccctttatccaagcagacttccttcccatccatcccgtagctatcactggggtgtctacccactgtgttcacttctgcaaacttctctgacagaaga

SEQ ID NO: 210885 - DNA, 122 bp, Homo sapiens
gagccatcgcggctggccaagaacttgggcctttatcctgagagagggaaagctttgaaacggaagagtgacatgactaggtttctttttaaaagactcatcctggctaccctatggataat

SEQ ID NO: 210886 - DNA, 122 bp, Homo sapiens
atgtatatattcatataataaatggaagatgaaaagggggaaacgaggcattggtggagacggtagcacgaccaaagtaggatagcaggaaaatatttgttgtttaataaaattcacaggca

SEQ ID NO: 210887 - DNA, 122 bp, Homo sapiens
ttttcctcagagtcccgcagagcggccggacccaacggagacgcttccctcacggggctccggcgtgaactggtttatctctaacgcaatcctcagcctcttgttttgcagagttctccgcg

SEQ ID NO: 210888 - DNA, 122 bp, Homo sapiens
ggtgggggcggggagtggagctgacaacctgtcaaatccactttgggacgaactaggtcacgcgctccgcgggtcgggcacccccgcccgccaggcacggccgcggctccttcctcttcctg

SEQ ID NO: 210889 - DNA, 122 bp, Homo sapiens
tcatcgccagctctcctggtaccctcgaacacttcagaaacacacacaagtcaagtccctcgatggctacactaggcgcctatggctggagcctccttggcacgagcgcaccatccgaggca

SEQ ID NO: 210890 - DNA, 122 bp, Homo sapiens
ctcctcagcccttgggcagttgatggacctgggcgccgtgcagcagggggcggtgctcttcggggaggctccggccgcacaggaacccacggaggcggggaaggctcaggcatggcgggctg

SEQ ID NO: 210891 - DNA, 122 bp, Homo sapiens
agcaatggtgaacaatttctcccaagctgaggctgtggagctgtgttacaagaacgtgaacgaatcctgcattaaaactccttactcgccaggtcctcgatctatcctctacgccgtccttg

SEQ ID NO: 210892 - DNA, 122 bp, Homo sapiens
tatccatttcacccttggcctatccctctcagataggtggggtaggattttcctggtgaccgagtaaagtgagaggcaggtgagacggttcacccaatcacacgggaaggggcgcgcgctgc

SEQ ID NO: 210893 - DNA, 122 bp, Homo sapiens
ttctctttatgggggtcggcaaacctttttgggaaagggccagggagttaatattttcgtcgttgaaggccacgtggtctccaactcaatcatccagctttgcccttgaggaagaagcagcc

SEQ ID NO: 210894 - DNA, 122 bp, Homo sapiens
gtgtgggtaaaagcaccctggcatccagcagaccatgggtgttcagcagctccacgtcaacggcacagcgcatggctgcctcccacctccagagttgggagggaggtgtggaaatggcccac

SEQ ID NO: 210895 - DNA, 122 bp, Homo sapiens
ctgggcggggcggggcgggaggggcggcgctagggccccggggagcaggcagcaggagcacggctcacccgcccgcccgcccgcccagcgctcccggctcccagcccggggtcccggagcag

SEQ ID NO: 210896 - DNA, 122 bp, Homo sapiens
tgtttcttaatttccataagaaacaaaaaaatcacaggaaggcctggttcctctcccggacgactgcgtccccaggctctccaggaatcttcgccttatccgagcttcttcgcagccctgga

SEQ ID NO: 210897 - DNA, 122 bp, Homo sapiens
cagctgactgggtctcgtgacagcctgggcggtggcgacgcaggcgtattagagcgcgctcgctcaaagcctgagcgaagatggcggcctccagagtgaaactctgagaggcagagggagga

SEQ ID NO: 210898 - DNA, 122 bp, Homo sapiens
ggataaacattcaaatctatgtccatcaaaaacattgcagaaataaatcttacctgaatacgacttccttaacaaagccatgcttctttataagctggtcctacccagacaattgctgtcta

SEQ ID NO: 210899 - DNA, 122 bp, Homo sapiens
aaatctaggaatcaggtctcgaagaagcacacgggttacttcacgagctttctcagttagcgttggataagcctccacccacccagagtaggtacacacaagaactagtacatacttgttac

SEQ ID NO: 210900 - DNA, 122 bp, Homo sapiens
ccgcctcttctagtgccttctctgtctagcggtgcgctcccgtggcgccgtgggaaagcgcgctggtttctgccaaatgcagttagctttgcttcgcttccctaagtgcgttcccccagggg

SEQ ID NO: 210901 - DNA, 122 bp, Homo sapiens
atttgtgaaacgcttttattgcaccccgccatggtggattccttgtcccaaatattcttacgcaaaatttattcgggaaggagaaagaaagggcatgcgagttcagaacctgtctcacgcct

SEQ ID NO: 210902 - DNA, 122 bp, Homo sapiens
gctacccgcattctcgccatcgatgctcagcacccagtcacccacggccactccggcctgcgccgctttgcccccaggagtgagctgtggagagagaagcaaagtgaccgaggccctggacc

SEQ ID NO: 210903 - DNA, 122 bp, Homo sapiens
cggaataatggcagttggtggttacagggcagttggaagcgcgagatgacgccccggccacgcagcctggaagaggtaggcggctgggagagcccaggtgggctgaggttgggtgtggtgcg

SEQ ID NO: 210904 - DNA, 122 bp, Homo sapiens
ttccccttctgcaccctccgagcactgtggtcatctgtacatgcggcattcacgttagtgcgcatgcgcaaaaggtgcctaccgccctgcgctgcagtgtgtgcattctgtattgttgtccc

SEQ ID NO: 210905 - DNA, 122 bp, Homo sapiens
gaatcccacttagtctctcaaaactttggagtttatccgtttagtcgattaaaaagtgaacggaaagcaaatcccattacggaaggaggaaagttggggacaaataagggattcgtgcagaa

SEQ ID NO: 210906 - DNA, 122 bp, Homo sapiens
gtgcgcagggagggaaacctacccaggaacgcgcccggccgggtccaaaggccctccgcgcgcgggcccgcgccctcgccccagaccttaccgccttcggctgcagaagaactggcggccaa

SEQ ID NO: 210907 - DNA, 122 bp, Homo sapiens
aggctgttttaaacggcagagcccgctggccaatcaggcggctctcgtggaggcagctagcgcgaggctggggagcgctgagccgcgcgtcgtgccctgcgctgcccagactagcgaacaat

SEQ ID NO: 210908 - DNA, 122 bp, Homo sapiens
ctccctgcgccgcccccgggctgcgtcacctgcgccccagccaatgaagtccccgggtcgcgatcagcccccactccagttgtgcgccaggtgtgccccagaagtgcccgcgcgctgtgtat

SEQ ID NO: 210909 - DNA, 122 bp, Homo sapiens
agatttattttcctttcacattctatgacctggaacacaaggaattagtattattattgtcgtcgttattgttatagtgtcaggcatccaggaaggccccaataaataatgaataatagatg

SEQ ID NO: 210910 - DNA, 122 bp, Homo sapiens
attctttatttccgccccgccccccccaccccatggtttatttcacaagagtgtgtttggcggcaactttgctgtttccagctagaccagacccaatgggattgttttggggtgcacagcaa

SEQ ID NO: 210911 - DNA, 122 bp, Homo sapiens
tggggtggtgggtcacgtgtgtctttggggggtctgatgggaagagtcagaaaattcaggcgctttgcatctttcatgggacaccctaggaccacccatgtgaccagcctgagaatggacag

SEQ ID NO: 210912 - DNA, 122 bp, Homo sapiens
tagaccaggagttctcaggtttttggccagcccccggatacatggccctttctgatactccgacttctttcggcccacgttcacaaagttttccgtcgaatacctgaaacctttcgaccgct

SEQ ID NO: 210913 - DNA, 122 bp, Homo sapiens
gattccgggaggggcggggagatcgggttgctgggcgatcctggggtgctggaggcggcgcggcgcggccggggcggggaggggtgcggcccgcctcctccctgccccacccccagccccgg

SEQ ID NO: 210914 - DNA, 122 bp, Homo sapiens
gtttactgtccggcacaggggagacccacgcgtgtttactgtccggcacagggagacccacgcgtgtttactgtccggcacaggggagacccacgtgtgtttactgtccggcacagggaaga

SEQ ID NO: 210915 - DNA, 122 bp, Homo sapiens
tacacacacgaaagagacacagggagagaggcttccattcacggtcactcacaggcgcagcggtttctgtgccatctgtccgaatagtatgggttgcgactgccacctaaaattgggaatgc

SEQ ID NO: 210916 - DNA, 122 bp, Homo sapiens
cacttcgcgacaaagccgtggtccgcaacagacggcatgcttcctgtgggtaggggagtccggtcacctctaggaccctcaagagcagtcgcgctccaggcctctctaggccaaacagccgc

SEQ ID NO: 210917 - DNA, 122 bp, Homo sapiens
gaagtgggccgagggaactgaggccggggtgggtgcggaggtggctctgacggggagcgccgatccaggatctggtccggaccctgagctcggcaggacctgtgcgcacgcaggtagcgtcg

SEQ ID NO: 210918 - DNA, 122 bp, Homo sapiens
cagatgaacaagtgacatatatttttgaagacaaaagttacctaattggaatagatttgtcgatatccaaaatggttttgggaaatgagttttgaggttctcaatcctatcgacaaagcaaa

SEQ ID NO: 210919 - DNA, 122 bp, Homo sapiens
taacataaaatgcaagtcaatctgcagagccccattcagctccatgccttcagtagagaacgtgtgtgtgtaacactgggctatactgccccaagtgagagttctcccctatgatgggtagg

SEQ ID NO: 210920 - DNA, 122 bp, Homo sapiens
tctggagcaagacctggggaagctggaggaagagctgcgggcagttcaggccacgatgagcgggaagagccaggagatcggaaagctgaagcagctgctctaccaagccacagaggaagtgg

SEQ ID NO: 210921 - DNA, 122 bp, Homo sapiens
agatggtggttgacgttggaataacagtctgatcctgaccctggacgcacatctggggcccgtggcacctggggcagggaggggcgctcggtcctgggctggggctgggggagcgaccggca

SEQ ID NO: 210922 - DNA, 122 bp, Homo sapiens
aaaaaaaaagaaaagaaaaggaaactggaagcagagaaccagcgtggctcaatggcagcacgagagcaaatgccagccttccagtggcagagatgcacttgcttttcagagtaaactgggcc

SEQ ID NO: 210923 - DNA, 122 bp, Homo sapiens
aaactctctgagcgttggttccctcatctgtaagatgaaaacagtaactacatgtcacggcgtcagtgaaaagattaaataagataatgtatataaagcactatcagagtccctggcccaga

SEQ ID NO: 210924 - DNA, 122 bp, Homo sapiens
attcacttgagagacatcgttttttatgccagggctattgttttcatgtaagaaacaccgcgcaaagagaaccaagttgtcccagacacaagaacataaacactgtgctcaactgcagtttt

SEQ ID NO: 210925 - DNA, 122 bp, Homo sapiens
gatgagcatccaaggacaccgtggtaaggacagcgtctgctaacgtttttattagttcaccgtcagatttcgtacaggtccgtatgactagaaagagccgtgttctgtctgcggctcacctt

SEQ ID NO: 210926 - DNA, 122 bp, Homo sapiens
cccttccacgccctgggatacttcaggggcgccaggcccagctgggatctccccgggcgtcgtgcgcactgcaccttccctggcggaccatccgttgggccggcaggcgcgcgtacccaggt

SEQ ID NO: 210927 - DNA, 122 bp, Homo sapiens
gccttcggcccttacctgacctccctcgttaaaggggcccacgtgggagaaccacgctcgcgagcagaaccaggtgggcatgatcaccgtggggccatttgaggtgaaaacctagaagcaat

SEQ ID NO: 210928 - DNA, 122 bp, Homo sapiens
tgcccttggtgaactggcaagctttccaggcctgaggagcggagggcgggatctggtacacggtctggccccacacacccctgcccgaagcctgtgcagctatcaatgccccaggccttccc

SEQ ID NO: 210929 - DNA, 122 bp, Homo sapiens
ggtggccccacagcaacactcatgcatgaagggggcagtcaccatcaccattctcctgggcgtgttcatcttctgctgggcccccttcttcctccacctggtcctcatcatcacctgcccca

SEQ ID NO: 210930 - DNA, 122 bp, Homo sapiens
acattctcagtatccagtttatgcccattaactaagttgattcctgttgattgatagtcacgtaagtcccctgtgggcttcggtgttttgcagtgttaggtaggactatttctgcatctgtc

SEQ ID NO: 210931 - DNA, 122 bp, Homo sapiens
ccacagtacaggcctgtaatggcggcaccagcgactcccagtcggcgtgctccctcgtgccgcccgtggcctcctctacttgagattttaagcagcctagcgctccacggcaacgcttcccc

SEQ ID NO: 210932 - DNA, 122 bp, Homo sapiens
aagatggccaccaccagctggctgtcccagggacagctgccccgagcacagttggggggccgtttgggctcaccgtacttgggatcgaaacagaagactggccagatcacggcggcgctgag

SEQ ID NO: 210933 - DNA, 122 bp, Homo sapiens
tcggtcctgtcacgtgaccacgcctactacaccagccacgtgagcttctgagccggcttccgcgcaggcgcagtggatctctcttgcgccattccaaacatggcggctccactagggggtat

SEQ ID NO: 210934 - DNA, 122 bp, Homo sapiens
ggcggcggaggcgggctgccccgacagaagcagaactttaggggtcccgtcggccgggttcggcgcggctgccaccaccaccatagctccagactacgcaccgcgcaccgcgcgccgcagcc

SEQ ID NO: 210935 - DNA, 122 bp, Homo sapiens
cgaatggctgctggcagtgcgatcgattcagcccgaggagaaggagcgcattggccagttcgtctttgcccgggacgctaaggcagccatggtactacaggtcttttttggtatttagagcc

SEQ ID NO: 210936 - DNA, 122 bp, Homo sapiens
ggggagctggtcgtggagcatcgggcgtccggggagctggtcatgcagcatcgggcggtccggggagctggtcgtggagcaccgggcgtctggggagctggtcatggagcacgcttagaatt

SEQ ID NO: 210937 - DNA, 122 bp, Homo sapiens
agctttggggagactttaaaggctttagggatccccaaagatcctacctctctcaccatccgtcaactctgctatgccctccctgagccacaccccctaagaggtacccacttctggatggg

SEQ ID NO: 210938 - DNA, 122 bp, Homo sapiens
tttcaaggggctggtactcaattgctgccgcgccttccctgtcaacatggtggtcttcgtcgcctatgaggcagtgctgaggctcgcccggggtctgctcacatagccggtccccacgccca

SEQ ID NO: 210939 - DNA, 122 bp, Homo sapiens
gagccagaggccgagctcaggacgcagaggcagcgagcgaacccctcctcggcgccgacgcgaagccccgagagaacagtgccccttgtcctccagcatagaacagtcgccttcgaattccc

SEQ ID NO: 210940 - DNA, 122 bp, Homo sapiens
ccagcttcacgtctgattggatgaagtgtcacgcagggagcctctcagcaaacctacctgcgttgaaggtgactggatggtcccgttgcgtggcatctcgtcaaccaatcacagtgggcgtc

SEQ ID NO: 210941 - DNA, 122 bp, Homo sapiens
ggggagggaagagttgaagagctttcaaatatgaactcacaagtcagtgggctaggtcttcgcagaactcaatgccattctttggatgtgagtctggaatacagtttagattttaattagag

SEQ ID NO: 210942 - DNA, 122 bp, Homo sapiens
ggaagcctctctctggctgagcgaacggtgggtgctgcgcatgctcatctacagaaacgccgcttggcctttggactacaccatctgtcgctcgctctaacgagccggcgttgccgccaggg

SEQ ID NO: 210943 - DNA, 122 bp, Homo sapiens
ggcgcaaactaactgggcactgcgtcttcacaagcgcggctcttactagtaatctcacaacgcgcgcacgcaggaaggagccatttcctagagatgggggcctaggcccaggcggagtcctc

SEQ ID NO: 210944 - DNA, 122 bp, Homo sapiens
actaagtactgaatgacgtttaatgaacaaatgaggaattggttatttatactctgtggacgtttattaaggctctggcaacactgtggagctggcctgtgtccccgagaagaagagtcagt

SEQ ID NO: 210945 - DNA, 122 bp, Homo sapiens
tgaccgtgcctctctgggagcttctgcaccggatgcacctgaccttccctttcagcaaggcgtgacagtgcctctctgggagcttctgcaccggatgcacctgaccttccctttcagcaagg

SEQ ID NO: 210946 - DNA, 122 bp, Homo sapiens
gcctgcgcagttaaaagaacggtggtgcgcaggctctaacactagtgcgccagccggctgcgagaggcggggcctagctttgggggcggggctggagcgccctctgcaggctcagagagctc

SEQ ID NO: 210947 - DNA, 122 bp, Homo sapiens
cggccagaagtcactccttttacagccgggccgaaggcacctgttaggtcctctcccacccgctacaccactagctaatggtaatcatagcacccattcccctgggagccccaaaccagccc

SEQ ID NO: 210948 - DNA, 122 bp, Homo sapiens
ccgacctcaggcgatccgcccgcctcggcctcccaaagtgctgggattacaggcgtgagccgccgcgcccagccgtgattctgtttggcttcttttacgctgtgtacttctgaggttcaact

SEQ ID NO: 210949 - DNA, 122 bp, Homo sapiens
gggctgggggacgcgggggtctgctcccgctcccttttgggggtcctggggagctggaatcgggagaaagggggacttgctttgctgactcgtcgccgatcgggagaactcgagttgtgggg

SEQ ID NO: 210950 - DNA, 122 bp, Homo sapiens
cacacactgctttggattcccagtgattcccagtggcccagtcttttaaaacatctacgtcgactttttacatctcctattatactatgacataaggaataaagatggagtagccactacag

SEQ ID NO: 210951 - DNA, 122 bp, Homo sapiens
agtggcccggggctgcctctctatgttcgcgtacacgggctccggtgggtcgtccacctgcgggaggagaaaggaggaattttgtgttttcagaaaccttccaaaatggtaacagaggtccc

SEQ ID NO: 210952 - DNA, 122 bp, Homo sapiens
gtctatgttaccaccattgtgggaaacctccttatcatggtcacagtgacttttgactgccggctccacacacccatgtattttctgctccgaaatctagctctcatagacctctgctattc

SEQ ID NO: 210953 - DNA, 122 bp, Homo sapiens
cgtgggagctcagccctctgccccattagtcatggattcttttcattgtcgtcatctctccgaacacaaatattgttaaactcttggctgaactccctgtgcatgttggcgctgaaaaatgt

SEQ ID NO: 210954 - DNA, 122 bp, Homo sapiens
gctgcaatagaggttcctgcgccttggcccttgcagtccatccgcccagaggttcgcgcccgttttcggagcttattatctcaggtagcccagaggtccgactgagctggaattagccaggc

SEQ ID NO: 210955 - DNA, 122 bp, Homo sapiens
atgtgcgacactccctccccggccccgcccccttatgcgtctcccaggcaacgcgccgcgcggggctccaggttccgcccagggactaactccaggtctgcgcgcgtccaacgagcacggct

SEQ ID NO: 210956 - DNA, 122 bp, Homo sapiens
tcgcaggggccggatggcgttagattgctagctctgacttggtcgaggtgcagttcccagcgtggccttaaatggctgccgcccggtgcgcgaacttggggggaggggttggcgaagaaggg

SEQ ID NO: 210957 - DNA, 122 bp, Homo sapiens
ggaccggggaactgagggcgtccccttctctccggggcgggggtggggggcggagcccagcgcgccgctccccagcccccagggctggcggggacccccccaggggaggggctccgggtgag

SEQ ID NO: 210958 - DNA, 122 bp, Homo sapiens
aggaagacggcctggcggctgtgccgagggcatcgtctggcaaagggtacgcaaagccagcggagctgccctctggtgcgttcagcagggagccagcgccccagttccagccgagtaggtcg

SEQ ID NO: 210959 - DNA, 122 bp, Homo sapiens
tgtaaagtttaaaatatgcgaaggcaacttggaaaagcaagcggctgcatacaaagcaaacgtttacagagctctggacaaaattgagcgcctatgtgtacatggcaagtgtttttagtgtt

SEQ ID NO: 210960 - DNA, 122 bp, Homo sapiens
taaggagggaattgcgctttttcttcttcattcgagaaatgatcggctcccgccagtctgcgtgctttcactcaacagcagctgcaagccctaggccagcgtcgcagaaacggccaggaacc

SEQ ID NO: 210961 - DNA, 122 bp, Homo sapiens
gaagagaaaggaatgtcctttccccaccacccctgttttcactgggtgattgtgagaatccggtgaggtattgtatgttgaagccataataaaccactaagggcaagggagctgcttcaaca

SEQ ID NO: 210962 - DNA, 122 bp, Homo sapiens
ggggagctggcgggcggggctggcaggggcgctgccctggcacagctcggggcctggcagcggcgggtggggcatcggctaagagctgccaccgccgcggggaggggagcccggcccgccgg

SEQ ID NO: 210963 - DNA, 122 bp, Homo sapiens
cgcgctccgccgggagtcgaagcaaaagacactgacggaagaggactgcgagagcccgagcgcccgtctctcttgtgccctagcagattccgtcgcttcttccggagccgtacgtggcaccg

SEQ ID NO: 210964 - DNA, 122 bp, Homo sapiens
aggtgcagctcggtgccgcctctggttggctggcgtggggtgacgtaatggcacatggcccgtcgccattggctgggcggcaagctccgccccctggactgcggcgcgggtgggggttgtgc

SEQ ID NO: 210965 - DNA, 122 bp, Homo sapiens
ggtgaccaaatttgaaaaaaaaaaaaaaccgcgccaactcatgttgttttcaatcaggtccgccaagtttgtatttaaggaactgtttcagttcataccttccactgcgataggaatcatgt

SEQ ID NO: 210966 - DNA, 122 bp, Homo sapiens
cggagtcggttgtgtccccatgtgggttcgaggctgggcagggctgccaggggttagtgccgtgggggtagatgggtgagggagggcctgtccctacgcacatggactaggcatgcccccga

SEQ ID NO: 210967 - DNA, 122 bp, Homo sapiens
gcacaaaagggccgctttattacctcccgcgggccgggaattgctgctctctcccagcagcggccggagccgctttattgtgttaacccatttgcgtgtcaagagctattgggcgctttctc

SEQ ID NO: 210968 - DNA, 122 bp, Homo sapiens
ggccaccatcttgggctgctgctggaattttcgggcatttattttattttattttttgagcgagcgcatgctaagctgaaatccctttaacttttagggttacccccttgggcatttgcaac

SEQ ID NO: 210969 - DNA, 122 bp, Homo sapiens
cccagctcccagtctctccattctgaactcccggacaagctcctaaggccagggttgtcacgaccagaatgcaaatcagtgcctttatctttaaaggcaattaagtgctacaagtgcatgcg

SEQ ID NO: 210970 - DNA, 122 bp, Homo sapiens
attcgtgtgctttccactgtgctcactgtggatgcttcctgttagttctggggagggattcgtgtgctttccactgtgctcactgtggatgcatcgtgtagttctggggagggattcgtgtg

SEQ ID NO: 210971 - DNA, 122 bp, Homo sapiens
gagaacgtggttatgtgtgtacttgtttcagccaccggtagaagctgggcagtctcgacacgctccctcggtgcctcttgatgttgctggatttctgcctatagccgactggttctccttag

SEQ ID NO: 210972 - DNA, 122 bp, Homo sapiens
ggcaggggctgtaagtcacaagacaccgcccccgccaagagaggggagcccgaatgtccacggataaggaggatgcaggccagccacggttatttttaggagaggccacataaaatgtaagc

SEQ ID NO: 210973 - DNA, 122 bp, Homo sapiens
gcggggccgagagcagagcccaggcaggagcctggggcatgggcggggccagggttggggcggggccaggctgagagcgtagccacgccgcattcgccatcgctagcccgtggcctcctctg

SEQ ID NO: 210974 - DNA, 122 bp, Homo sapiens
tcacgctcggtgctgagtgtcccggctgggattctaccatcgagtcggggtatggggaggcgcccccgcccacggagagcctggaagcactccccactcctgaggcctcgggggggagcctg

SEQ ID NO: 210975 - DNA, 122 bp, Homo sapiens
acctcaggtgatctgcccgcctcagcctcccaaaatgttgggattacaggcgtgagccaccgtgtctccatgcatttatgatatgtacagtttttctgtgtgtatgttacacttctttcccc

SEQ ID NO: 210976 - DNA, 122 bp, Homo sapiens
gagaacctctcactcatacccaccaacacactccaggaagggcattaatctgttcatgagcgatccactcccatcacccacacacctcctgctaggccctacctcacaacactatcacactg

SEQ ID NO: 210977 - DNA, 122 bp, Homo sapiens
gagttcagatgactgctaggagatgaaatcctataccagagagaagaaagaagagtgacccgttctgccctaggtcttttggttatttgaagtagctgcttctccaccccacccccagaaac

SEQ ID NO: 210978 - DNA, 122 bp, Homo sapiens
agaggggggtgctattactccccgcatcgtggggggagcccacccccctgcgatgtggatcgtaatatccagggtgggagaggggggtgatattactccccgatttttccgaggagatttcg

SEQ ID NO: 210979 - DNA, 122 bp, Homo sapiens
accaggcccctgccccatcccgccgcgaggagcggagggggtgatgtcacccggcccgcgcgccccctggcgggcgtcaggccccactgctctgcgcttctgcgtcctggcgggtgggtgac

SEQ ID NO: 210980 - DNA, 122 bp, Homo sapiens
agctgcgtccattccactgcaggcagcaggagtgggcgttgcggcccagccggccgcggtcgtagggctcttgtggggagaagtcttcggccatgacccccatgctgacccagccctcgata

SEQ ID NO: 210981 - DNA, 122 bp, Homo sapiens
gggctcaatgatgttgtcagaaatggaattgtctttcggtccaaagtgggtacacccaaccgtaagctaggctttaatgcagaaactatataaactacaaagacaatggacattgtttggct

SEQ ID NO: 210982 - DNA, 122 bp, Homo sapiens
tcagatcccagggcggccgcctaaagcctcacctgtccatcattactacctgcttaagtacgccgggatctctgtagactaagtcagtcatcctgtaggccccactgcccacgctgtgccaa

SEQ ID NO: 210983 - DNA, 122 bp, Homo sapiens
aggaccctgctcccgacctcggtggcagcactcccctccccgcccggctccctggcgtgccgctgctcttcggaggctggcagcctcgccctcaaccaccgccctcgggaaagtcctcgact

SEQ ID NO: 210984 - DNA, 122 bp, Homo sapiens
ccggctgaataggcagcaaaagacctctctgtgtacgggtcctagtatgcttcttcttagcgccaacgagtccttgtccccaaagttgccaaaactttaaaggaccccggccaaggagaccc

SEQ ID NO: 210985 - DNA, 122 bp, Homo sapiens
ctaaccgtggaactgaattttcctgggcaaatgagtaacattatatagatctcaagtttccgattatctaatgcctagcaccattcctgtccccaaagaactacatataggaggctctgtac

SEQ ID NO: 210986 - DNA, 122 bp, Homo sapiens
ccggtccactggtggattttttaatgaacccttggagcaaggtgctctgaacagcatccccgcccccacccccacccccacctccatctactgcttacagggttcccggaccctaggacagg

SEQ ID NO: 210987 - DNA, 122 bp, Homo sapiens
tggctggtagacagtagccagccaactcctcttgtatttccaagcaaacacaaggcaaagcgatgtttttttataccttttataaacaatctgtgtttaaacaaggcatacacaatgctttc

SEQ ID NO: 210988 - DNA, 122 bp, Homo sapiens
actggcttgccactctcccagtccctctcttaccatgatccctggggctggaaggggtcacgcttccactacctccatgtcccctgcagattctctccaacttggcatgcatgacaactctg

SEQ ID NO: 210989 - DNA, 122 bp, Homo sapiens
gggcaactggccccgcgtactgcgtcctcgccggagcgggttctccccaacctctccaagcgtctggctacaggccagatgagggaaatagaaaagtaaacttaagtttaattagtatgtgt

SEQ ID NO: 210990 - DNA, 122 bp, Homo sapiens
ggcgatggactgggctaggggtcagtgtgatgatggtgaatgcaagaatatcaacaaccacggctccgtctcctgtgggctagacactgcctgcagggcacgagatgattatttcgtttcat

SEQ ID NO: 210991 - DNA, 122 bp, Homo sapiens
cgggctctccggagccctgagggtcgtgggcagtcgtgacacgcggggtcgggctgcagccgtctcccccaacaccgcgggcttcccacgagggctgagggaggcagggagaggggatctgg

SEQ ID NO: 210992 - DNA, 122 bp, Homo sapiens
gcgcccggccaaggaagtcttaatgtacctcttttcagacaggaaaactaaagtgtagcgcggctaagtaacgtaggaagcatcaatcatgtttctggtcaaagaagcgaaccaagtcaatt

SEQ ID NO: 210993 - DNA, 122 bp, Homo sapiens
ccgcctcccgggttcacgccattctcctgcctcagcctctcgagtagctgggactacaggcgcctgccaccacgcccagctaattttttatatttgtagtagagacggggtttcaccgtgtt

SEQ ID NO: 210994 - DNA, 122 bp, Homo sapiens
gggccaggactgcaggaagagccagaggtacaggagtggcaaggaactcaaggcatgattcggggcaagagcacccacacatatctggacaccagagggaggagaggagccagctatctaag

SEQ ID NO: 210995 - DNA, 122 bp, Homo sapiens
tcagagtttgggtgggagtggtgggcgtggacgcccttgctcctgatctggatttggcaccgtcgagtgtgatggtgcatgttgggttttcgccagtgccctttatgagtccgaggaagtcc

SEQ ID NO: 210996 - DNA, 122 bp, Homo sapiens
taactggccctctcaggatgccaagaacggctccgcgtcctacactgagctagtcccgggcgcaaatacgaggaaggaaaactccagggaagcattgagagtagcctgagaaattcgtggag

SEQ ID NO: 210997 - DNA, 122 bp, Homo sapiens
tccaggagactctctaggttcatcacttgtattagaacatgatggcatcaaagtattgaccggggcttagagatgttaaacagagatcttctggtaatagtttttataagaggatttgattt

SEQ ID NO: 210998 - DNA, 122 bp, Homo sapiens
tgcatcccaccactccctggaggcattagacacccaagtggaaggtgctacaacctgaagcgcaggaaagaaaggcccattcccctcgcacagccgagcttttactccctgagcacgggccg

SEQ ID NO: 210999 - DNA, 122 bp, Homo sapiens
ccagacggtggagggaggtctcaccttcgtggttgaccttgtagtgcagcgtgacggggccgctgcacctctggatggtccagtgggcttcctctttggtgcatgtgtccaacgggacactc

SEQ ID NO: 211000 - DNA, 122 bp, Homo sapiens
gctaatgaggcgctggtgcaaggcctctctgttattcctggcaggcacactgagacacatcgcctgctgctctgctcttttcctcagtagtctactgcaaataataaatatggggaaataca

SEQ ID NO: 211001 - DNA, 122 bp, Homo sapiens
aaggtccaaaggctgtctcgctggttcgcaagcctgaatgcaggtgcccctccttcagctcgtgacatgccacatcaccgtgggactcactgcccgcgttcaagaacaaggatggcccagat

SEQ ID NO: 211002 - DNA, 122 bp, Homo sapiens
ccaccgtcctacagctctcacctgtactgagacagctcccagcaaggcgtccatgccccgcgagtgaagcccacagcctttccaggcctccgcagcctgactctgtaccttcctgtgatggg

SEQ ID NO: 211003 - DNA, 122 bp, Homo sapiens
ccaacccccaccttgcttttttcctgctggaactcgatctgaatgctggtcagcttggcccgcagctcctcgttggccatctgcaccgcgtccgtctccatctcgggcttctcgcccttgct

SEQ ID NO: 211004 - DNA, 122 bp, Homo sapiens
cagcacgtcccagtggttagggactgtgcgtgctggtccagctctccatgtcttccaggccgcgcgaccgtgagcaagtcactgatcctctctggccctcttttcccaacctgtaggatagc

SEQ ID NO: 211005 - DNA, 122 bp, Homo sapiens
ataaacgatttcctaatttgtatctgtttcatgccagcgtgaaacttctgtaggcagagccggctgcgctgccagcactttcttctgctcgtccccacccacctctgcctcccccacccagc

SEQ ID NO: 211006 - DNA, 122 bp, Homo sapiens
gggcccctctgggccaggctgcgtccacttgggagaggccgaggacctggcgccaagaggcggcggtgtctgcgctaggggccgagcgggtgcgctgtgtctgcggggccaggccaaggacc

SEQ ID NO: 211007 - DNA, 122 bp, Homo sapiens
cgggtgtctgcatcgttcagccccggggcttttgtgtcgggtctggcctggctttctgtccgcaagtttttgccctgctccgcggcgctcctccggggcgggagccgcgaggcccgggcgag

SEQ ID NO: 211008 - DNA, 122 bp, Homo sapiens
accaacagcacagctggggccctggcattgtgccaggggcaggatcacacagggcagtgccgcggtagcacccgtggtgccacaggtgtggtggctcctggtcccaactccaccccaccagc

SEQ ID NO: 211009 - DNA, 122 bp, Homo sapiens
ccccagcacctagggcgcaatggaatattccattgcccctcctgtcctgggtctgtgttgcggggaacgctcgcgcggttgccagagaaagccccggacgtgacggatttgcgcgaccccaa

SEQ ID NO: 211010 - DNA, 122 bp, Homo sapiens
ttctttttgtttctaaacttgggatgttaatttttaagtggtgtgaaaatttttaagtggcgtctattcattatttcattaaatatttattgagtgactttgtgggtaattaagatattcat

SEQ ID NO: 211011 - DNA, 122 bp, Homo sapiens
cctctgccagtgaaggcggggaaggtgaacctgtggccgtcggcagatctgcagatctgccggactgcgggtcggggcgtggcaggggcctagtccccgccccggccgtcagcctgtcgcct

SEQ ID NO: 211012 - DNA, 122 bp, Homo sapiens
gtggcacccacgatggaacaccacacagcaacggagaggaggggctgctaccacccacaacgtcacggacgaattgcaccagggtgctaaggggtgcacggaccagaaaaggaggaaaagga

SEQ ID NO: 211013 - DNA, 122 bp, Homo sapiens
ctgtatcctgcaaagattggtccaggtggaccttggacccactggcccttgttctaaccacgcaaaacacaccttgtccctcattcaaaatgtttgaaaagatcaaatgaactgtaccaaag

SEQ ID NO: 211014 - DNA, 122 bp, Homo sapiens
cgccgcgcgcgctccgctccgccgcgctcctgcgctcgcccagcagcggcggccgctccccggcaggaggcaacaggaaatgcgaacccacctgctggcccaagccctccaggccgcccaga

SEQ ID NO: 211015 - DNA, 122 bp, Homo sapiens
gtgttgggcaccttcgccggggagccactcggctgccgcgccgcctgagcgcccagcgagcgggctccttccagaggtgcctggagcttgcttgggtctagcttggatcatcaggtttgtct

SEQ ID NO: 211016 - DNA, 122 bp, Homo sapiens
tggccctagcaggaggtgaccttccagtaatgtttgtattttaagagtccccgggccgggcgcggtggctcacgcctgtaatcccagcactttgggaggccgaggcgggcggatcacaaggt

SEQ ID NO: 211017 - DNA, 122 bp, Homo sapiens
aagggttatttctagcaaaacatccagtgacaccctcaggagctgagtctagaggggagacggttaagaacagagtgcatggagcagaggcacaagcagtgggtgttatgggggtgcatggg

SEQ ID NO: 211018 - DNA, 122 bp, Homo sapiens
agagggacctggtggacggcgaaggccgaaaggaggaaaggagccggggcaccggccggccgagcctagggcaccacagagggaaactctgggaactcggaccaactttcccgtaactccgc

SEQ ID NO: 211019 - DNA, 122 bp, Homo sapiens
agacaagttttcttaaaagaatagtttgcacttgctatctccacttcctcacttctcacacgctcctcaatgcttgcagcctggcttccactggaattggttttgtctagggcacaacgatc

SEQ ID NO: 211020 - DNA, 122 bp, Homo sapiens
gaagatctatagagatataatatttctggaaggatacataagaaaatggtcacagtgaagcggagttgaatggctctagctagagtcttgaggttttgcctgattcaataagtacatgccaa

SEQ ID NO: 211021 - DNA, 122 bp, Homo sapiens
actgagacacgatgtagaggacatccgtatcctagaacacaaaaatcacaaaacagtatccgtcaattcaccgcctgcttaacacaaattccttataatatactttggttgtccttattcaa

SEQ ID NO: 211022 - DNA, 122 bp, Homo sapiens
cctctggggacgtagtgtggttggatggggctcagtgtgtgatcataaaaggagccaggccggctgaggcagccacttaactcactaaagcatcagccatttacttaacactcttgtgttcc

SEQ ID NO: 211023 - DNA, 122 bp, Homo sapiens
tgaccagcctggctgcccgcaaggcctggagcccggcatctggaaaggatcagctgccaccgctaaactcacccctccacccacagctcattcccggagtctctgaaggcggggctgagctt

SEQ ID NO: 211024 - DNA, 122 bp, Homo sapiens
catacctgtggtggcgatgcagtcaaagcccacgaaggcatagaagcaagtcgctgcccccgacaggacaccagagaacccgaagggcatgaatccaccaacaccgggcttcccttcttttg

SEQ ID NO: 211025 - DNA, 122 bp, Homo sapiens
ggaacgtacacttggaagaaggccaagcgggtgacttgaaagatcaagtgcgtggtctgacgttttgacttggggttttgtacgtcagcatgtgtccagggtcttgcgtcctttcttccctg

SEQ ID NO: 211026 - DNA, 122 bp, Homo sapiens
tggcggacagccgcaaagctggcaacccctgaccttgcaggcatcaccagctgcagggaccgcagggccagatgccttctaggcgcctaattcaggcggtcggcctcgcagctgcagcaggg

SEQ ID NO: 211027 - DNA, 122 bp, Homo sapiens
atcctattttagcaagccacacagcattagagggcaaataatagtttggtggcaggagagcgatgagacgggaaagtgtggggcaaagcttacagtcattggtccagattctaactggcctg

SEQ ID NO: 211028 - DNA, 122 bp, Homo sapiens
aggtgcgagggtgcacgcccaggcacactctcacaaggttacacaggccgtgcattcaaacgagtggccctggagcaaaagctaaggcacagccacattaccctacccatccaggacccacc

SEQ ID NO: 211029 - DNA, 122 bp, Homo sapiens
ttttggcctccctgttggattgggggagaaggggagcagaagcaggttttgagttgaaaacgattccccaccacaaagaggagtgcctgtgttcgagaaggaagccctctccagcagtcacc

SEQ ID NO: 211030 - DNA, 122 bp, Homo sapiens
ggagtcccctcttttcctcacccccacccaggatttggccgggaggggctctccccatttcgggtgaatggatgaaccaggatgatgcgacttccattcaggcgaagagatagaaggagaac

SEQ ID NO: 211031 - DNA, 122 bp, Homo sapiens
aggtctcaatttatttttcccaacttaatgtactcacaacaaatgcttgcatcaccccatcgcaactctccttcttaacaatgaaggtaaaactcaggaccaaaagagagctcctagagctg

SEQ ID NO: 211032 - DNA, 122 bp, Homo sapiens
ttccacgtttgggttattacgaataaaactgctccaaatatttctgttcagggttgggctcggtggctcatgcctgtaatcccaacactttgggaggccgaggcaggcggatcacctgaggt

SEQ ID NO: 211033 - DNA, 122 bp, Homo sapiens
cggccgcgtgctgtacagtgtgagggaacgtgtaccaaacgctcgcgggatacctgtgcccgtctagccaagagtgcacccgtgtgcgcgagcgggcttctgggacgccgccgtggtcgggg

SEQ ID NO: 211034 - DNA, 122 bp, Homo sapiens
aaccataaaactctataaacttaataacctttccttaaatatatccaaaaagttactatacgagatacatgtgataaatttaaccaaatacttactctataaccaagaaaggggggaaaatc

SEQ ID NO: 211035 - DNA, 122 bp, Homo sapiens
aatgctcatggaatagtacttttccatcagttggcccaattctaaggtgctaatttaaagcgatcttaacttccggactctagcaccatttatagcgctgcattacttgatgtcttatatta

SEQ ID NO: 211036 - DNA, 122 bp, Homo sapiens
ccgtgggccggcctgccgagatcctgaaacgcaggcagagccgagacgctcttcagagcacgggtgtgtggcggccgaacacagcacctgaccctgggcttagtcttggacttctggaagaa

SEQ ID NO: 211037 - DNA, 122 bp, Homo sapiens
cccggttgagttagctgtaagaatcaacctcccaggattactaccaggtgcaaagaagagcgtgcacataaaagccacgctgtaaactgtacaacactacagacatatgaaggatgattctc

SEQ ID NO: 211038 - DNA, 122 bp, Homo sapiens
gtccccacaattggaacaagaaagtgaacactaacaaaaagccagcttgtatgccgccagcgcctctgggtctctcggaaggacagggacggcacacgcccagacatgtgtgcttctggaca

SEQ ID NO: 211039 - DNA, 122 bp, Homo sapiens
taattgatgttctaggttaatcccctgtcaatgactttccagaactgtcccctcctttaccgctcccaggagagagaggctgcttgggagccaatctctggcttaggggtgggccttgagta

SEQ ID NO: 211040 - DNA, 122 bp, Homo sapiens
cgccctcctccttcctctctcctcccttcaactcttcatccgcttccacctcagactctgcgcgcacccaattcagtcgcccgctcccgttcggctcctcgaagccatggcgggacctgggg

SEQ ID NO: 211041 - DNA, 122 bp, Homo sapiens
acaggaagcagatgagaataagcccgtgctggtgcggaagactgtgctattgaagtggcgcgttgcaaaggcctgtccgtgccctctttcctcgcttagctcctgcctgctgcccgccgccc

SEQ ID NO: 211042 - DNA, 122 bp, Homo sapiens
cagggccgcgccccggccactgccctcctccgactcgatgaaggtgatctcgcagctgggcgtcagcctgcgcacgctggcatggaaccgctccttgaagctgggcagaagagaagcagggc

SEQ ID NO: 211043 - DNA, 122 bp, Homo sapiens
cctccttccctgcgaaccctggagaacacggccttgtgatgaagcaaaccccagtctcctcgctttgcatgggcttttctatccaccgcgagctgaaacttctccctaaagcaaccgcgtct

SEQ ID NO: 211044 - DNA, 122 bp, Homo sapiens
ccctatcccgcagccgcccagccaagcaacattgttccagaccacccgggccccgaagagcggcccccaagtgctcggcccacccccaagcactcagtctctggctcaggattcgcgccccg

SEQ ID NO: 211045 - DNA, 122 bp, Homo sapiens
ccaaccaacaaaaagggacaagttcaagtatgtctagttgtgggatttcccccaagattccgattctaaagagtggtgttttagttcatctttacctttcacatcctccattctgttaggta

SEQ ID NO: 211046 - DNA, 122 bp, Homo sapiens
cacccatgtgacttatacacatagtctagcacactccaaatcacaaacgtccctggactacgcatccggccgcccaccacacccccactctgtggggtggggcatcccatgaggagtcttct

SEQ ID NO: 211047 - DNA, 122 bp, Homo sapiens
acagggaatatcacaaactcgaattctgacgatgttctggtagtcacccagccagatgagcgcatggagttgggggtggggggtgtcaaagcttggggcccggaagcggagtcaaaagcatc

SEQ ID NO: 211048 - DNA, 122 bp, Homo sapiens
agtaattttctttttgacttagtatccggcacacaaagtgggttagtactacagtatttgcgttactttaagtactaagtatgcaggtttcctggtaccattgagttgctgctattaaagct

SEQ ID NO: 211049 - DNA, 122 bp, Homo sapiens
tacaaagaatgacttcttactttcataccaggagtactagttttctttccaaagcactatcgagttaatactcagtggttcttaaggaacaagactttgattgatgtgctcaaaatatttgg

SEQ ID NO: 211050 - DNA, 122 bp, Homo sapiens
tgccaggcccctccgcatcgggcacccaggctggagccctgcagtttgtcgtctggagcccggaacccgaggtgaaaggcctccgctgagctcccagactcctcagccgagcatatgctgca

SEQ ID NO: 211051 - DNA, 122 bp, Homo sapiens
ggtgccgcacgaaattccttgcctttgtgtattcacagcctcggctggctatagccaagacgtggcgttgatcctagtgaaagggaacttggggatccgacaaacctgagttctggtcctag

SEQ ID NO: 211052 - DNA, 122 bp, Homo sapiens
cgaccactcaacaccagaggacccacagaagaattctctccacgcccacccccacagcatcggccttcaccaccgccgccgctgccggaagcgcccccacgtctccacgccaccaccgtgag

SEQ ID NO: 211053 - DNA, 122 bp, Homo sapiens
agggggtactacagtagaccactacactgctctacaaggggccagggtgcccttcagaaccgggtgagcccagctcactgctaatatattatctggcctggaaggtggcagcaaaaaccagc

SEQ ID NO: 211054 - DNA, 122 bp, Homo sapiens
tggacagagcagaagggtagagtggacttcccagagctttagtacctgagactggggactcgggaaaagttcggactgctcatccggattcagcctctcatcctcttcagcccagagtttca

SEQ ID NO: 211055 - DNA, 122 bp, Homo sapiens
tctattcaccatccattctctcatgactcttagatgtacttctccaattcagactaagcccgggagctactgacccatgtattcaactaactctttaacatctccttgtagctttcttatat

SEQ ID NO: 211056 - DNA, 122 bp, Homo sapiens
ccaggcaggaacagggcaggttcctgcgggcaggtcctgagtcacactgacagagaaccacggagacgccaggactccccgcagcagagaaacgggccgacacccagggaggcgcgagaata

SEQ ID NO: 211057 - DNA, 122 bp, Homo sapiens
tcgcccatgatgaaagagggctcgcttctcggctcagggtctctattcgccagcgggggccggatgatcaagggaaaaaaaatttaaaagcccgtgctttccagaagagaatgaagcggcgg

SEQ ID NO: 211058 - DNA, 122 bp, Homo sapiens
tggagacagattgccagctttaagagccagagttcctgagatttcttccaggagacaacccgcacaccctgataactccgtggcaaagttgtttcttcctcctctgctgcaacaccttttcc

SEQ ID NO: 211059 - DNA, 122 bp, Homo sapiens
aaggttgagtgctgctgtgtggagctggcactgcccctggggacagtgccagccagccaccgcaacctgcacagacctggggaccagcctttgcccacctctcccctgccaggcagagggcc

SEQ ID NO: 211060 - DNA, 122 bp, Homo sapiens
gtaaatgtaaatcaatatgtaatgatatgcgcccaggctgcacggcctgtcacttgcgggcgcaaccaccaggggcccaggtgtgtcctccgtgtgcgcctggtggagccgggcctgggccc

SEQ ID NO: 211061 - DNA, 122 bp, Homo sapiens
gctgagcaccaggaccgtgtgggcccgctgtccaaacggagacctcgcccggcggtacggcgtcacagacaagaaccccgccggggactactggaagaaaattcccggcagcgtgtcgtgtt

SEQ ID NO: 211062 - DNA, 122 bp, Homo sapiens
ggatgaagacttcaccgcctccgatttgaatttgaaagtaactccttccgtggcatatttcgctgggcagatagaacaaaccatgtcgttttcccccgtctctaaaatagacatattattat

SEQ ID NO: 211063 - DNA, 122 bp, Homo sapiens
ggccgccagtgaggggctcgggatgtcagcggctggtctctgtccctatggtctgggctccggttcactgctcccctgccctccaggtcggtcactgactcagttactatccagcgggctcc

SEQ ID NO: 211064 - DNA, 122 bp, Homo sapiens
ccttctccccaagctggtcttgtacaaacatgatgcacgtccattgggtgacaagtctgtcgtaagtgaaacgtttacaggcactacaggaatgacctggtgcctcgcccacttcattagaa

SEQ ID NO: 211065 - DNA, 122 bp, Homo sapiens
ggcgtgcaccttcatgtggttcttaaggaaccagggctccttgaagcagcggccgcacaccggacacgcatgatcgaaggaggccttgtgcttacgcatgtggcccttgagaaaccaagact

SEQ ID NO: 211066 - DNA, 122 bp, Homo sapiens
aaggacatcggtcccttggacgcagtgcctgcagcagcggctgcttggggagacctccatcgtgccatgtccaagagccgcggggactggcaccccgtgcggggcacttgcagacagggcca

SEQ ID NO: 211067 - DNA, 122 bp, Homo sapiens
ttaagcctcgccttgttcccctcttctctctcttcatgaactactccgagtcttggtctccgtccctctatctctggctcctgcatctgtctcggcttctggccttcctctccccctcccct

SEQ ID NO: 211068 - DNA, 122 bp, Homo sapiens
acctgttcttgagtgtgttgagcatgccgtagagcgtcacatcattccactcccaggtgtcgatgtgatcgttgcttatattggcaaagctgtagatgatgtgggtacagaggaagcggtca

SEQ ID NO: 211069 - DNA, 122 bp, Homo sapiens
ctgtcagcatttagatgatatttcaaagctatggaatcagaagagagggaaggtaagaggcgggatgactgggtcctcgagcactccaagctttaaaggctgcgctgatgcagaggactcaa

SEQ ID NO: 211070 - DNA, 122 bp, Homo sapiens
ggtcaaggcccaaaaggaaagttccagaagtgagcgcagacctttggacctcagtctgtacggagatcgagtcaccgtctattcaatccaggttttgttccacttgctgatgattagacatc

SEQ ID NO: 211071 - DNA, 122 bp, Homo sapiens
gtctttgtattctttggctttatagagacaatgaagccacaggagtttttccaagctgttcggaacatgtcccatttgctatccttccttctttgctgttcttatattcctcccccagcctc

SEQ ID NO: 211072 - DNA, 122 bp, Homo sapiens
taagggttgaagaaaatgtgaactccaaacccttgaaatcccaacatggaaaccaggtagcgatccctaagatactgcaggaaagtaaaatgctcactgtggagaatcagagagcaaactta

SEQ ID NO: 211073 - DNA, 122 bp, Homo sapiens
gtgatgagggatcccatattgtttggagacttccagatggctctgcacgaaggagaaccacgcatttatgaagacatccaggactacgaggcggccaaggctctgttccaggtggggatgag

SEQ ID NO: 211074 - DNA, 122 bp, Homo sapiens
cgccgcatccggtagcgagagttcaacttcctgactaggagccaatcagcggggccgcctcgctgtctacgacagagggtggggcagacgctccgtttccggtggcagggtctggggaagcg

SEQ ID NO: 211075 - DNA, 122 bp, Homo sapiens
caccttgggcagaaggcctttttgcaaaaagactcggcagcccgggccccgtaggttcggcgcatgcgcagcgcgctcggcgcccgggttccttcctccgcgccacccggaagcctcggcgc

SEQ ID NO: 211076 - DNA, 122 bp, Homo sapiens
ttttctggcaaaatgcctccactatactctgttattcaagcttcacagctatcaaacagacgggacagccttttttgctttagactattcacgcacagaagaaccaaaagggaaacttgtca

SEQ ID NO: 211077 - DNA, 122 bp, Homo sapiens
gtgaactctaaaacaggtgtagtaaattttcactggacaccatgatactgcataaacattcgagctgtcgaggtttccaatgacccaaaaataaaatttagcctcaaatagagacttgtaaa

SEQ ID NO: 211078 - DNA, 122 bp, Homo sapiens
aatatctatagctgccgctgccaatactaggactagggctgttggctggggctccaattccgcaaactgatcagatcagagtcctgtgtacatacacaccgagtatataagcgggtcctctt

SEQ ID NO: 211079 - DNA, 122 bp, Homo sapiens
cgctgcgctgcgacagcacgtagggcgcggagggcgtgtgatagtagcagctgtaggtgccgggggcgcgggcgcccagcagcgtgaagtcggcccagggctgcgcggagtggcggtactgc

SEQ ID NO: 211080 - DNA, 122 bp, Homo sapiens
gaagttgcagggttgagttggtcccggcaagtccttgagcagtttgttcctctgtcttcccgcttcctggtgccccgactgcgtccccacgaacgccccgtccttaccgccggctgctgtgg

SEQ ID NO: 211081 - DNA, 122 bp, Homo sapiens
cgggcatatggggcgtcagaggctgagaacgttgccgtgaagaggcttaaaagcaagacccggagtggcgaccttaaagaggacggactgaagaaacgcgggaatgagctccagacgcggga

SEQ ID NO: 211082 - DNA, 122 bp, Homo sapiens
gcggtcgccgccgcggcgggcggtgggccgggttctcctttgaaggggcggtgggaccggcggactctctgggcactggctaccacggagacgccgctacgcttcggggcggggcccgtctt

SEQ ID NO: 211083 - DNA, 122 bp, Homo sapiens
ctcattaaaatgcacattctgatttcttacacctggggtggaccctgaacagcttcatttcgaacaaaaatccccagtgtttctgatgctgctaccctttgagtagcaaagttctattgcaa

SEQ ID NO: 211084 - DNA, 122 bp, Homo sapiens
gaagccgaagaagacatcccacagccccagggttgccagaaagaccatgaagacataaaacgccaggttccagagattaactgagtgaagaaacatggtgccgccaccaccgccgccgccgc

SEQ ID NO: 211085 - DNA, 122 bp, Homo sapiens
acagcagaggaaccttaggctcaggtggaacagcctcaactgattcagtccctgaacttccgtacacagccctggagtcgtcttagagccatgatttatttaactgttctttcattttacag

SEQ ID NO: 211086 - DNA, 122 bp, Homo sapiens
acgtacacggtaatacctacgggcgggcacacgtacatgttcgcagtttacacagtcacacgcacaacacccactcaaatgtacggacacgcagacacaggatcacatacaccatcacaccc

SEQ ID NO: 211087 - DNA, 122 bp, Homo sapiens
gatcgaagaaactcgatcctaatcctcgacggcacttcaggaacaaagctgctctcccatcgtccctaacctcactaccgtaaaggtcgcagcagagcccctgctccaaccgctagcgccat

SEQ ID NO: 211088 - DNA, 122 bp, Homo sapiens
cttcagaatatttaattctgacttgccatatcaaagagcagaagcgatggactcagatggcggacaaggttgcccaccactgcctcctctcggttttgaagcccacgtggtctggacagcca

SEQ ID NO: 211089 - DNA, 122 bp, Homo sapiens
cggccacctgtgcggttcaggcagcctctgtcgcctgccaagagctgcgctgtgacctcccgctgctgcccttgactcaacaacggccagacagagctttccaagatacaaatcagataaca

SEQ ID NO: 211090 - DNA, 122 bp, Homo sapiens
ccccggttcactttgagcggtcccaaggcctgagggcctactgtccagtccccaggttatcgtcctgagcaaagacagaccccgagccctgcggtcttggggctcaaacagtccctggatgg

SEQ ID NO: 211091 - DNA, 122 bp, Homo sapiens
aacccgatgaaagagccatcatgacgtacgtctcttgcttctaccacgcttttgcgggcgcggagcaggtactcaacacttgtccgtccgggctgttgtgttactctctgttggttttagtt

SEQ ID NO: 211092 - DNA, 122 bp, Homo sapiens
aaagctgggcgccccatcgaacaggaccctccgccccacgcgcccgcaaccggccagccccggagccctgcccgcactgccacccccagcccggcgcccggcccccagcccccggtgctcgg

SEQ ID NO: 211093 - DNA, 122 bp, Homo sapiens
gattattaaggctgtgtccttgatgcttgctagcagaagccctttaacagtttcacagcacgacaactgtatgtgaaggaggcaggatatgcaggggaggtgggggaagcctggctagggac

SEQ ID NO: 211094 - DNA, 122 bp, Homo sapiens
agcagatgtggcgtggccacctgagtgtgcgcctcagagggtgcagaaggacccaggggtcggtaaatggtgctggaactggctggagacaattggaaaaatggattccctacatcacaccc

SEQ ID NO: 211095 - DNA, 122 bp, Homo sapiens
tacgaggttttcctttgtttcttcagttttttgctgacgttggggtcactggctaggcggcgggcggcctccgtaatctgggactgaatggcaaactctcgttccaggcgttccagctcagc

SEQ ID NO: 211096 - DNA, 122 bp, Homo sapiens
gtcctgcagtgggtgagtgaaagcgagagaagaggagctcaggtcctcagcctccaaactcgtcttcttggagagcttcagtgaaggagatggccttgaagtcctgggtacaaatcctgact

SEQ ID NO: 211097 - DNA, 122 bp, Homo sapiens
ctaggtggaagttcagattttacattcttttccagaacacaagttaaaacacactgcatacggtcttgtatatagctaagcactcttggccctcagattacattccttcatttttgatcaat

SEQ ID NO: 211098 - DNA, 122 bp, Homo sapiens
aggaaaaatattcccggtctcctgtgagtgagtgcctaaggtcccattcatctgaaagagcggtgcagcgcagctgaggttgctggcaggcattacaacagagcagttaagattactggctc

SEQ ID NO: 211099 - DNA, 122 bp, Homo sapiens
catcagtggaagttatccagcagcagtggacatgactgcgaatcctccagaaaatggcttcgctgcgctccacggatctgctctcccaccccacctgcggcttgcacagcgacacacaagcg

SEQ ID NO: 211100 - DNA, 122 bp, Homo sapiens
ccaccacatgccaagtggtggcgttcctcctgtccatcctggggctggccggctgcatcgcggccaccgggatggacatgtggagcacccaggacctgtacgacaaccccgtcacctccgtg

SEQ ID NO: 211101 - DNA, 122 bp, Homo sapiens
ccccctcagggtcttttgaggctgggtggactgaggccctccccacagaagggcagccaccgaaacggatgggttgtgagcagaggccacccaggtaactcgaggttgcacttgtttttgtg

SEQ ID NO: 211102 - DNA, 122 bp, Homo sapiens
cccttaaaagctggggcctgggacaggaacgacagacaatgcagccaatggcgtcacgcgcggtgccccgctacccaatcgaaaggcgtggctgagggaaacgcggtgggaaccgcccccga

SEQ ID NO: 211103 - DNA, 122 bp, Homo sapiens
tgacgcctaatgatgatataatagccgacctctggcccagaactcaagacgacaggggctcgctctgtgcggcacttcctgtgtctgcgcgggatgatgacgcataaaacagcgcttgctca

SEQ ID NO: 211104 - DNA, 122 bp, Homo sapiens
ggccaagatccctaggtcctggagcagggagccgggcccacgccgccgaggtatcttttccgtccgggccaccgtcgcgggggctcactggcagcggcttctgcgcatgctcggaagagcgg

SEQ ID NO: 211105 - DNA, 122 bp, Homo sapiens
gaaggctgggagggaggcagggcacaggctggaaaccgcggctatttgcagcgtcgccctcgggctgcggtcaggctggcgctggcagtcctggcggccgagcccgccgcccctcccggtgc

SEQ ID NO: 211106 - DNA, 122 bp, Homo sapiens
ctagggctagggaggggtggctgggcctgtgcaaacttctactccccacccctatgtcctcgtcttaaaaaaaaaatcggcctggattttgagcaggtcgttatcaggggtgagggtccatc

SEQ ID NO: 211107 - DNA, 122 bp, Homo sapiens
ttcactatttaaaagttttatttttcttatatcaggcctagaagcaacttccacatcagacgcactgtttacaaaaaaaaaaaaaaaaaaaaaaaaggtcccataaagccacaggtcctctg

SEQ ID NO: 211108 - DNA, 122 bp, Homo sapiens
agaaagacacagaatacacacaaatacaggaacaaaaggcctcccttcctaacactttaacgacctccatccccttctcttcctcccactctgacgctaagtcgatcgttctcatccctgtc

SEQ ID NO: 211109 - DNA, 122 bp, Homo sapiens
gtacctttactctttagataacatgccacagaaacacagacataggtgcaccaaacgacacgtgtgcaccacggtcacggtcgaaaaacaggaacttggatgcctaggagcaatggaaggag

SEQ ID NO: 211110 - DNA, 122 bp, Homo sapiens
tcaatctatgcctgcctgttctgaatggtttcactgtaatcctcagatccttcaaatcaccggttgccctaacgatgtcattaccaatgtgttttggagacagacacaggggtttgatctta

SEQ ID NO: 211111 - DNA, 122 bp, Homo sapiens
gctcgactcagcgcctccatcttgaatcccagagcctagcccctctggtgggggcggagtcgcggacaggaaagtgccatcgaggcaaaattcccccatctgcgtcagtcccctcaacttcc

SEQ ID NO: 211112 - DNA, 122 bp, Homo sapiens
agtgagcaccgcctatctgggacactgagccaccggcagccttgacagagccaggacatgcggccccacacagggcaaacacaaggagtcggtgtgctggcccctggctccggcccctccgg

SEQ ID NO: 211113 - DNA, 122 bp, Homo sapiens
cggggtcagcatcgccgcaccggacgcaagggccggcgccgctcgctctcactgccgccgcgttcccgccacgcaaactctccaactccccacgcgcaggaactctcggtgtgagggacgga

SEQ ID NO: 211114 - DNA, 122 bp, Homo sapiens
gtgagggcagtgcctggcgcccagtgggtcgtcctcaatatcgactggactgaaaagaatcgatggggggtgggagccgattcctcaggaggcagggacaggctgaggctgcccctagaggg

SEQ ID NO: 211115 - DNA, 122 bp, Homo sapiens
tagttcaggggaccgtgcgcgggacaaggactgccagacatttgcctcggtcctgcgagtcgtgggactggacacccctcaccgatttctgcatcgctgtgacattttctgaaactttgtat

SEQ ID NO: 211116 - DNA, 122 bp, Homo sapiens
acagccaatgagtagtgcctaataattgtactgcctttctgccaggtgccaactcatgttcgccaatgtttgaatacattttcaaacttaatttttacaaaaaatgtcatgaaataggcact

SEQ ID NO: 211117 - DNA, 122 bp, Homo sapiens
cactaaaaaggagtctgactccatttcaactcccatcccaaaaatgtgggcacaagtccacgtgtctgtattcattctgtgtttcttgatgggtgtttgaatgtctgtataatttttacgtt

SEQ ID NO: 211118 - DNA, 122 bp, Homo sapiens
ccgcggctcccccaggaactagagctagagtagggggcgccgaggttggtggctccagggcgccggatcggctccttcgagggcccaccgcggcccgagactcctccccggaagtttcctcg

SEQ ID NO: 211119 - DNA, 122 bp, Homo sapiens
gcccgggtcagcctcgccgcgcagcccgggggcggggcgggggcggctccgctgcggacacgccctcactccccgccccggccccgcccgcccccgggacccccgcctgcccctggccgccc

SEQ ID NO: 211120 - DNA, 122 bp, Homo sapiens
gagtggggcgcggtggggaacacagcttggacgcctaggcgtcctgagcccggcaccctgcgcgcagagcagacccaggcgctctcgcgagctctagcgtccgtcatgtttcctctcttctt

SEQ ID NO: 211121 - DNA, 122 bp, Homo sapiens
ctggatgagtctcacccgccagcctgagccccggtccatactcactggatgagtctcacccgccagcctgagccccggtccatgctcactggatgagggtctcatccaccagcctgagctcc

SEQ ID NO: 211122 - DNA, 122 bp, Homo sapiens
ctggactctgccctaagccaggcgactgcaggggcagccggggcgcagtcctgcggggcgcgcaccacgtgcttttcagccaatcgccgcggccgcttgattcaaagtgaactcctcaaagc

SEQ ID NO: 211123 - DNA, 122 bp, Homo sapiens
tatatagaatatgtaataaataaatctgcccaactatgaaacttgctgtgcttgggcgttcgtgtatgcaggatctaatcgtgcatatgtggatgcatgcataacctctgtgagtgatggag

SEQ ID NO: 211124 - DNA, 122 bp, Homo sapiens
tcaaaaaatatttactgtacacgttacatgtgcctggcattgctttgtattctggggatgcggaggtgactgagacagatcaagtcgtaagaagtttgctgtagagtcaaaaaggcaaataa

SEQ ID NO: 211125 - DNA, 122 bp, Homo sapiens
ggggcccgcgatggcgggggcctggctcaggtgggggctcctgctctgggcagggctcctcgcgtcctcggcgcacggccggctgcggaggatcacctacgtggtgcacccgggccccggcc

SEQ ID NO: 211126 - DNA, 122 bp, Homo sapiens
ggcgggggaagcttgtaggccggctccggggacagttattgagcacgcgcagaggcggggcgtcgggtgcgcgcgagcgggcgggcgggccgacccggaggcgggcttcgggaaggggcggg

SEQ ID NO: 211127 - DNA, 122 bp, Homo sapiens
gaagccctgaccataacacgcaagggttagtggagttgtgggacttgaactcagcttctccgttgagtctgtctgtctctgggatgcaggcacgtgcttgcacacttccacggtggcgatcc

SEQ ID NO: 211128 - DNA, 122 bp, Homo sapiens
atgtaagaaaacacacatggtatcgatgtctgcgtctgttctcctaagcttccacggccccggccgcagcctcacctcaatgccctgcagctgtgccgcgatgcgccccttctccttcatgg

SEQ ID NO: 211129 - DNA, 122 bp, Homo sapiens
agcttgcgggcaggacttgagctgttccaccgagcagggagctcagaggcagcagggactcgccagcctgggatgtgaccatctggggctgtttgccaagggcaggagcaagtttgcctgag

SEQ ID NO: 211130 - DNA, 122 bp, Homo sapiens
cgtctgtgcgcttttcctctccgcagccttcctgggccgcctcacgcgcgctcagccctgcgcgagctgcgcctctccagctctcaacgtctcaactgctgttcatcgccagggctctaaga

SEQ ID NO: 211131 - DNA, 122 bp, Homo sapiens
catccacctctgcagccccacaggctcacgaccccgccctcccccacggctcccttgctccggccctgctcagccgcgccagccctgagccctgggacgcccttcttcatcctccgtgatcc

SEQ ID NO: 211132 - DNA, 122 bp, Homo sapiens
aaggataggacgagtaaacagagggccacagccaggcccaggccccggctgctggttctgcgtctgctcagccaccaggctcgggcaaagccgaaaacgtcaaggaccaacagacaggccat

SEQ ID NO: 211133 - DNA, 122 bp, Homo sapiens
gaccccgaccgtcggcctctttggcaagtggtttgtgcatcaggagaaactttccacctgcgagccgaaccggcgccgagtgcgtgtgtttctgcctttttttgttgtcgttgcctccaccc

SEQ ID NO: 211134 - DNA, 122 bp, Homo sapiens
ccgactccagtgaagaccattgatggtgttttgctgcaggaagtggaatatgcatatgcacggaacaattctggctaaaagcagcctatgcctcccaattgcagcaccgcgtaaaatgccca

SEQ ID NO: 211135 - DNA, 122 bp, Homo sapiens
cggggcgacgcgggctcacttacgggcggcggtgagggcgcgggtgggccggagctcatgcgggcgacccccgggcggcggcggctgagcgggagccggagcccgagcggcgcgggcggcgg

SEQ ID NO: 211136 - DNA, 122 bp, Homo sapiens
tcttgtcctggggcagggacctcaggatggaaaccagcagcctgcaccgcccgagaaggtcggctgggtccggaaattctgcgggaaagggattttcagggagatttggaaaaaccgctatg

SEQ ID NO: 211137 - DNA, 122 bp, Homo sapiens
gcacggatgcagatgccgcactgtctagcagcgtgagtgctgctgtgaccccttctcaggcgcttactgagtgctggagacagaaacccctcacacaccctggttaccacacggaagcagaa

SEQ ID NO: 211138 - DNA, 122 bp, Homo sapiens
ggcttggttatgctccttactcaccccaccacattgaatccctcaacaagctgtcagcagcgacgtcattagtttcatttcacagatacacctctgaaatgaactcgtgttttactttggtc

SEQ ID NO: 211139 - DNA, 122 bp, Homo sapiens
cttgcagtctgcaggacaccgaggaatcgtatgtgggaacgtccccgagaaccacacgagcgtgctgctcagtgctgactgcagaatgaaatagaagcaaagtgttacaggatcagtgtttt

SEQ ID NO: 211140 - DNA, 122 bp, Homo sapiens
gtcaggggtctgcaagggacaggctccccgcagctggtgccccctcgagaggggcgctgccgcagttggtaccccgtgtgagaggcgctgccgcagtaatgacttactgataactcactgac

SEQ ID NO: 211141 - DNA, 122 bp, Homo sapiens
gcatcgtgctaatctctggttagcagaaaacatgctgactcttgctctcttggcgcctaccgtctggtgatggggtccaaggtgcttcactgactggaccaaaagtttaccgaacttctttt

SEQ ID NO: 211142 - DNA, 122 bp, Homo sapiens
tggcacaatggcccctttgtccccctcccctcctgtcctgtacacactgaaaccacacaccggccccacaccacgtgatgcaggctcagagctgcccatggggcactgccacacaaggctgc

SEQ ID NO: 211143 - DNA, 122 bp, Homo sapiens
gagggtggaggtcatcaggggattcccgctgagaaagtgggaaggaagagagtttagaaacggattgaagttccactacatcacgtgtgttgttagagaattcgcctattacgacgacagca

SEQ ID NO: 211144 - DNA, 122 bp, Homo sapiens
cgttcaaaatggtggggagtgcgatttatcttcttgtgagcattgccgaggcaaaggtggcgggttcttctcccaaatcccaggcggtgcccggagaccacctgccttccacccccgcaggt

SEQ ID NO: 211145 - DNA, 122 bp, Homo sapiens
cctacacgccgccgcttgtgctgcagccatggtaagactggaatccgtgccgtgatccagcggcatcgcagctcgggcaaggaaagccggctgtcagggttctggaaacgtcctgccctgag

SEQ ID NO: 211146 - DNA, 122 bp, Homo sapiens
tccagggactggggggcatagagcagcagatgagtggtttctctgaagcccagagtaactcggatagattagtttggttgataaacacagagcacagcaggctccaaaggcaactgaggatg

SEQ ID NO: 211147 - DNA, 122 bp, Homo sapiens
gtccttccccttgtcatctttctgtcctagactgtgtcctaactgctcacaagggttcagcggcatgcaaacagtctttaattggttttcttcaaagaggcattgttgactggaaagactgg

SEQ ID NO: 211148 - DNA, 122 bp, Homo sapiens
gaggagggagtcgctgtcccgcagccacacggccgcccggctgggcctctcaggtggccccgtgtgccccccggtcgtggccccgataccaggtggtgttaagagactccaccctctcgcag

SEQ ID NO: 211149 - DNA, 122 bp, Homo sapiens
gacctggcggacgggtcagggagccccgaaagcccgcgattcgtgcggagagttctgtttcggcaggagacggctccgtcctggtttccttttcccgctcagcgtccgtgcgttcctccccc

SEQ ID NO: 211150 - DNA, 122 bp, Homo sapiens
acaaggaactcgacctggattgtactaaaccagttccaagattctgtttttcggctgtggcgtccggcgctgcatccactacggagtcgccttggaagccaccggaagtccttcgacggaga

SEQ ID NO: 211151 - DNA, 122 bp, Homo sapiens
tcatttccagaatgcaaattttaattttcaggaaaaatattaggtgtatgttcttagttacgctctcagatatgtagttgcaggagaagtactttaattctgcttaaactgagcagtttggt

SEQ ID NO: 211152 - DNA, 122 bp, Homo sapiens
ctgactgggttaatccattgtgtagccgaggttcggtttttctcgagtgtctggtgttcacgttgacgtacttcggccagtacaaggtagccaatttatggtgatcgctgtgagagcctcgt

SEQ ID NO: 211153 - DNA, 122 bp, Homo sapiens
ttcaaaacaggtaatatctactggaatccagccacatggagagacagctgccaaatgcaacggggatgttatcaggggtcttgagcatgaagaagcccgagaccttctgggcagattagaga

SEQ ID NO: 211154 - DNA, 122 bp, Homo sapiens
gagaagactgaggtcaggccagagcaaggactccgcaggccaggcccacactggcggccccggctgcctggcccatcactggggtcaccacagcccatggggagcaccaaggacaccaagaa

SEQ ID NO: 211155 - DNA, 122 bp, Homo sapiens
cacaggaggagtctgggggctcccgcgtcacaggggcgtggcccagggcatcaggtggggcggtgggtactgggctcagagtggccttgggctgtccagtccctccctttctccccaggacc

SEQ ID NO: 211156 - DNA, 122 bp, Homo sapiens
gatcccgggctgcagcgggagcctgtggtggggccgacactccaaagcactggctaccaccgacctggctggagccacggggccacttttgaaaatatccagattctctcccctgggttcct

SEQ ID NO: 211157 - DNA, 122 bp, Homo sapiens
aaaagggggaaaactccttagtatcttcaaaccctcccactcgaggtgttcattggcccgcggctacgaaaaccagatcttctcccggtattcggccaatagcctgttagactccgggttga

SEQ ID NO: 211158 - DNA, 122 bp, Homo sapiens
gccggcggggcggggccagaagcccggcggggttgggggcgctctcctagtgactcaaggcgcgcagcgctgggcgcaaagcgccagtctccgccttgcgagctcagagtgtgcccgctgcg

SEQ ID NO: 211159 - DNA, 122 bp, Homo sapiens
ctatctaaaccccagttttctcatctctataatggggaaataatccctgtctcaaaaggtcgtcatgaagctaaaataagattatgggtttgacatgcttagccccatccgtagcactcagt

SEQ ID NO: 211160 - DNA, 122 bp, Homo sapiens
ggacaccacgggcccaaatgggaagtctgagacgtgcctccgttttgtacatccgcccaacgcgagcagccctggcaggctcaccgaggggagattctgggaaggaatctggcctgacctct

SEQ ID NO: 211161 - DNA, 122 bp, Homo sapiens
agtggaggtgggaaacggcattacgcccctttcccttttcctggtcccgcggtgctacctcgtgtgccacccttaaagcgtagtccccgccgagaccgcccccgcctgagtggcaaggggac

SEQ ID NO: 211162 - DNA, 122 bp, Homo sapiens
tgcggcccccttgcccaacctcgggtttagggaggagggttcacagtgtttttgtgggggcgggggaaggaagaggcagccccgcccccgccatctgttctccatcagtgtgcgcggcccag

SEQ ID NO: 211163 - DNA, 122 bp, Homo sapiens
gaaactgagacctagggagatttggaaacttggtggacaccacagacttcttgaggagctcgacaagggtgatctgtgtgggtccgccctgagtggggtcctggacacagctgtagctgccc

SEQ ID NO: 211164 - DNA, 122 bp, Homo sapiens
agcctctgcttccatctgtaatgcttcttctttgtccacatcttttgctcttgttggttccggatgtgaagatggacattctttaaatccgctgttgctagatatctgagccatgtccacta

SEQ ID NO: 211165 - DNA, 122 bp, Homo sapiens
ccctgattctccagcaggcttcctccctgtgtactgtaattattttccagactctggacccgtccttcactagaccatgagcactttcatgacagggatggtttcctatttatttttgttta

SEQ ID NO: 211166 - DNA, 122 bp, Homo sapiens
tgatcaccgcgctgctcctggcgcactagtagggtctgtagcgtatcccgaggatcattccgactttcccgccccgtacgtgaggggccgccttgaagcctcttccgccacggacactcgaa

SEQ ID NO: 211167 - DNA, 122 bp, Homo sapiens
taaagcggtgaaaacattcagttaactactgacaggaaagagctgagctctatttcgattcgtgcagagatcatctgggcatttttaaagggacgttttaaaaggagaaaggggatatgcgg

SEQ ID NO: 211168 - DNA, 122 bp, Homo sapiens
aagtacattctagcacaccacttatgatttgagaatactcattcacttacttattgcttccgcaaaatttaataagactctactatgtaccaagcactattttcagtgatagaaatacaaca

SEQ ID NO: 211169 - DNA, 122 bp, Homo sapiens
gaagaagatcgcgttctgagagcgagtgggggtctgggatggaattccaaaggcgggactcgggtgaggatgccttggggccagggttgccaaccaagcttgtgtccccaccccagtgggaa

SEQ ID NO: 211170 - DNA, 122 bp, Homo sapiens
gagtaacaggggattaataccactgcatcctggtaactcccctcacttcattctagccaacggcaaggaggttgttgctcctctgtttcaccccttgtcttgtctgaaaggtaaacaaactt

SEQ ID NO: 211171 - DNA, 122 bp, Homo sapiens
cccgctctccaagatgaagaagctccagggagctcacctccgcaaggtagggcacgagggcgggggcgctgggggtgcacctggaggagggttggagagacccgcccccaacgaggcccctg

SEQ ID NO: 211172 - DNA, 122 bp, Homo sapiens
ttgcatactggcagcgacaagttgagacttgttcaacttgacacagtcctgtggtcatagcgaatctttctaaagctctgatcagtcaagaagggggttgtatcaatcctcagaaccctgag

SEQ ID NO: 211173 - DNA, 122 bp, Homo sapiens
gaaagcccgggtcgtcttcactgcaatgaagacatcgtgtagctgtagcttagggggccccgggttcggctggctcagctcgggggtcccttgtacccgctgcggggacaggttcaagtggt

SEQ ID NO: 211174 - DNA, 122 bp, Homo sapiens
atcttttaagtgaggtgaattttcctgggctgctgggaaaagtctcctacacccctctcccgccaccgcgagccgctcctagcccagtgacagcctctgcgggccccgcccacgccccgcgc

SEQ ID NO: 211175 - DNA, 122 bp, Homo sapiens
gggcccgggcggaccgccctcactcacccggtgtagaaagctcaggcggtcccgtagcggcggcgcggcagccatgatccaggtcccctcccggtctgccccgcttccgccaggcccgggcc

SEQ ID NO: 211176 - DNA, 122 bp, Homo sapiens
accggcggctcctcaccgcccccttggggatttcttgataattctttgccacgatgcgggcggatgttgtggagctactgtttgtagatcgcagtagcgtgacagcacttaatcatgactac

SEQ ID NO: 211177 - DNA, 122 bp, Homo sapiens
caggtgaggcgaccagcggcatgatgcccgggtggaacacggatttctctccagggtggccgaagaatggtttagaagcagcagtgggatgagggagaatcccgaccccgtctcaaaaggtg

SEQ ID NO: 211178 - DNA, 122 bp, Homo sapiens
ctgaccaatgggggggcgggggcggggcctgggagcgggggccacgcctgcgagggggcccggggctgcggccggtgtcgcgggtggggagaccccgaggtgctacctgggcgtggcgggtg

SEQ ID NO: 211179 - DNA, 122 bp, Homo sapiens
caggacaagttcattgtctggcaccaagctccttggggtgaattttcttccaaaagagtccggggagtccaggtatggaatgggaggcagaaagttcaatcaagggactgggatttcggaat

SEQ ID NO: 211180 - DNA, 122 bp, Homo sapiens
gggggcattctgcagtgtttgggggctggggaaagaacattttctcaccacttgggctgtcgctggacctcaggctccttccacagagacactgcagcatatgcactcctttcttcagagaa

SEQ ID NO: 211181 - DNA, 122 bp, Homo sapiens
cccgctgcccgccccacctcgggaccaagtcccccccaggggggcccgctgtgatgacgacgtccagccccagggggcctgaagtgaggacaggtcatcagatgggccctgggaaatttcca

SEQ ID NO: 211182 - DNA, 122 bp, Homo sapiens
tgttttgcaggaaatgtgcagtgacaaaacctcgtaccaggctgtggaggctgcaccgcccgctgacattcacctgaggcttgggaatctaacagggcctggccgcagagcctcccctgccc

SEQ ID NO: 211183 - DNA, 122 bp, Homo sapiens
aaaaaattagctgggtgtggcagcgagcacctgtagtgactacaccactttgttgacggccgtccggacctgcagctgtccgggccaggtggctgcccccgcctccccccggccggggcgct

SEQ ID NO: 211184 - DNA, 122 bp, Homo sapiens
gacaagaacctgacttctggccgacaccacgagtgtgtgttttgaaggtgggagaaagcacgtgtgagaagcctggggcagtcaccagcccttcatcttaacaggtgggtggtttttccttc

SEQ ID NO: 211185 - DNA, 122 bp, Homo sapiens
ccataagttttaaaaatctatttttttcataaattgagtattttgcattactctgatatccgaataagacacttgaaaatcttagtaatgtatcttgctgtgaggtggtaactggtgtcaga

SEQ ID NO: 211186 - DNA, 122 bp, Homo sapiens
cctgatggcacacacctttccatgaggcccttttgacgttactgttcaccttcctcattgcgggggcccaggatgggacttaaactgtccctatttcattatgttgttctttttctgcttta

SEQ ID NO: 211187 - DNA, 122 bp, Homo sapiens
ccaactgggacccattagcccctcttaccacctgttagcctccatctttgattatggaatcgatttgctggagaagctggagcttttcctcatggagctaaatctgctgctgccatgggtgt

SEQ ID NO: 211188 - DNA, 122 bp, Homo sapiens
gactgcccctcagtcccaggagagctatgaggcctcactgggggcagaacttggggagaccgaagccggcccttccactcccctaaacctacagtcctggaaggtctctgctggaagagact

SEQ ID NO: 211189 - DNA, 122 bp, Homo sapiens
agtggtcggaggatgtgtgtgtggcccacctcacccagcgggacgggtaccaggccaccacgcagggacagctgaaggagcagctctaccaggaaatcatccactacttcgacaaaggcaag

SEQ ID NO: 211190 - DNA, 122 bp, Homo sapiens
ctcattggtaataaaatatggcaaggtctaaagaaaataggaaaatgtaaatagctaaaacgtgattgacttttaattttgccagagaggatgttaggagtcagagacagagtcatttgagt

SEQ ID NO: 211191 - DNA, 122 bp, Homo sapiens
tgcgcagtgagtaaacatgagcctctggtagataagagaaaccgcgatcggagtacggcgcgtgcgcagatcagggatcgcgattgcgaatcctccgctgaggtgatttggatatccctaga

SEQ ID NO: 211192 - DNA, 122 bp, Homo sapiens
cagcaaaagtttacgagtgcataaacctcaaagaccattccctatcggttgttataaggccggtatttagagcttccataaattcttcggccttttcccaaagcaaagttttcagcgactat

SEQ ID NO: 211193 - DNA, 122 bp, Homo sapiens
ccccgggcctcgtcgccgctccgcctccacctccacctccgggtccagcaccggggcactcgctgccctggaccgttacctctctgggctcctccggatgctgccccatcctccacagaccc

SEQ ID NO: 211194 - DNA, 122 bp, Homo sapiens
gcaggccgacctgggcagccaggcggggagcgcgcagccacagcccgcgtttccgggctccgtgtccttctggaggccgctccttggccatgggccctcggtcctcgccctgagcagcgcgc

SEQ ID NO: 211195 - DNA, 122 bp, Homo sapiens
tcccagtatggagcgtggtcaggctgatcccaggaaatgcttcagaaaagagtctactttcgatttccagaaaccacctgacatagatgtcttccgggattggctgctgctgatactcccca

SEQ ID NO: 211196 - DNA, 122 bp, Homo sapiens
gggatcattcctattctactgatgaggtgagataacttgtccaaggtcgcatggtgaagtcgctgttgaaatctgtcttctgactcgttgctctgtcttcatctgaggaaagacttgtgagg

SEQ ID NO: 211197 - DNA, 122 bp, Homo sapiens
ctattctttgtatgatgtatttggaattatagttctaaatctgttctggaacagaaaagacgatggagacatttgcgagatgaaaatctgatgactttcgggctcagggtgaatttacaaac

SEQ ID NO: 211198 - DNA, 122 bp, Homo sapiens
gaggcaggtgggtcatgaggttaggagatcgagaccatcctgggtaacaaggtgaaaccccgtctctactaaaaatacaaaaaaaattagccaggcttggtgtcacgtgcctgtaatcccag

SEQ ID NO: 211199 - DNA, 122 bp, Homo sapiens
ccaggtcaaggaaactccttcctcacttaatgctgtcaagggtttaagctgaggaaactccggaagggcattttcagtattggtacctgctctctgtgcgcatgactgtgtatgggaaggtt

SEQ ID NO: 211200 - DNA, 122 bp, Homo sapiens
gtcgtttcctccgcaaatgcagcagtgcatgaaaggcccaggtgggaatgctggccaagacgccctcccgtggccccccacgcggcagcgcctctcatgccaccctccgaagagatgaacag

SEQ ID NO: 211201 - DNA, 122 bp, Homo sapiens
ttatcttggaaggttttcccacaatccctgcattgatagggcttctcccctgtatgctctcgttcatgagccctgcgcttacagttatgacgaaaggctttcccacactcctcacacctgta

SEQ ID NO: 211202 - DNA, 122 bp, Homo sapiens
gtgccatggcggccttcagcaagtacttgacggcgcgaaactcctcgctggctggtgccgcgttcctgctgctctgcctgctccacaagcggcgccgcgccctcggcctgcacgggtaagaa

SEQ ID NO: 211203 - DNA, 122 bp, Homo sapiens
tacatacagagggagtcaaatgggatctcattttgagtcctgccttccgcacactcagaacggcagccccaaggcccggagtgtccaggggcttctggcctgaggtgaatctgccaggccca

SEQ ID NO: 211204 - DNA, 122 bp, Homo sapiens
gagcgaggggagggacaaggtctgtctcaggtgagactctcgctgctgggcacaggggctcggaagtcttgttgaatgcacggatgaatcatcgtggccctggcgtattttgaaaggaagaa

SEQ ID NO: 211205 - DNA, 122 bp, Homo sapiens
tcttcacctccaggcactaccgcatcctcccactgcagaaggccaaggttcacaggtgtgcgatgagactgaggactgagtctgtcactagaggacttgacactttttataaaaaaaatgag

SEQ ID NO: 211206 - DNA, 122 bp, Homo sapiens
gatctttactgagggttacattctgtcattgtcagccttttaaggaggccttgccaccagcgcaggggaggtgaagtctaagggaaggtaatattgtcaatgcctgctaattagttctaccc

SEQ ID NO: 211207 - DNA, 122 bp, Homo sapiens
ctcaaaataggttttcaattccattttccggcagagcagctggagtctctggaatttctacgtcccgtgcctctgccttccacctagcacaggacaggacccccgagggcggtggccctgca

SEQ ID NO: 211208 - DNA, 122 bp, Homo sapiens
acttctgtgaatatctctttcaggctgaggaccgggatgacatgctgggctggatcagagcgatccgggagaacagcagggccgagggcgaggtgagggcccggccagcccggcagccacag

SEQ ID NO: 211209 - DNA, 122 bp, Homo sapiens
gcgtggtacccgttcttccgaggcgttaccatcaagaggtgagatgggagggggttcgcccggtcgaccggcaaaagggaactgcgacttctgagcgaatcttactgctatccaaaaaaatg

SEQ ID NO: 211210 - DNA, 122 bp, Homo sapiens
cagccggggaggagggtcggggaatgaggccgccgggggcgggacgccggctcccggggccgcctctcccagggccagaggcgagccactcgggacaacttcctcttatgcccctggcccgg

SEQ ID NO: 211211 - DNA, 122 bp, Homo sapiens
gagcccacatcagcccttccctggacacctgctccgagactagctgtgctctggaagccacggtcctggggaggataaagcccagctccctggctcaagggggccacagtcccaggaaggag

SEQ ID NO: 211212 - DNA, 122 bp, Homo sapiens
gatggggggtgtggtcgagagtgtgggccccgtctcagagcctgatgcgcaggggtgatgcgatgcgcctcttggaggctccatcgcagggccctttgaccagctggaagaaatcctaggct

SEQ ID NO: 211213 - DNA, 122 bp, Homo sapiens
cgttctctcgacttttggactctctcctctgaatgccttataggtatagtttggcaatctcgctcacacctgggtgtgaacctgcgtgtacccagcccgggagatatcggggtctgtacagg

SEQ ID NO: 211214 - DNA, 122 bp, Homo sapiens
atccctggagaaataagtcatgcccgggtagagagggagtgccagcaccagagaggggagcggcgctgagacacagaagggacgtcagtgctcctgctgccccgggaaccacatagccccgt

SEQ ID NO: 211215 - DNA, 122 bp, Homo sapiens
acacctgattgacacatgactaacacgtgacattgactcatgatcgttatgtgatcaacacgtgtgtgacaggcgtgttatgtgaccatatgtgacacgtgactgacatggcttacatgtga

SEQ ID NO: 211216 - DNA, 122 bp, Homo sapiens
aaattctcagtggctcatctggccacttatttaggaatccccaatgtccatatctttccacgtatcttttgggctggtctaatttcccacggaatattttccccatctcttgaccaaagagt

SEQ ID NO: 211217 - DNA, 122 bp, Homo sapiens
gaatgagcatgcgcattctgacaaagcgaagccaaaggtggccattttgactaatgtcaacggtttttcggttttttttgtttttttttgcggtgccctttccggaagtcattcaggatgcc

SEQ ID NO: 211218 - DNA, 122 bp, Homo sapiens
ccgctcccctgtcatttcatcgcggactgtgcggcctgggggtggggggcgggactctcacggtgacatgtttacagctgggtgtgactcagtaaagtggatttttttttcttttctgcttt

SEQ ID NO: 211219 - DNA, 122 bp, Homo sapiens
acttcctgccttggctagcttgtgttagagcagattctgccaaataataccactataaaacgtgtcttcaaaaaagctgtatcttccaaaagatgatgtaacagttgctctagggaggcaat

SEQ ID NO: 211220 - DNA, 122 bp, Homo sapiens
aagtaaactgagattgtaggggcaaggattagttgttttcttatacgaaagaaaagctttcgaggtcaaagatttgagaactcagagcctcataactagttatctattattcactgacatat

SEQ ID NO: 211221 - DNA, 122 bp, Homo sapiens
aaaagggcggccgctctgcgggaggctgggcttgaaccgagcgcgggtcctggaggggcgcgtggcgcggggacagaggctgggaggggaggcccgcgcttgcaaatccagagcagagctgc

SEQ ID NO: 211222 - DNA, 122 bp, Homo sapiens
ggctgtgagccccgttacctgatgaggatgcactggttgtcgtggcgcttccacaggcagcggtagcactcgttggcgatggcgaagatgtgcgggggcagctcgcccaggtggcgccggct

SEQ ID NO: 211223 - DNA, 122 bp, Homo sapiens
aatggacaccaatgtcattgtctgtaaaatgcatatacttcagttattatgcttaccttgcgaggcttttaggataaataaatctgaaaaggtattataatctgtaaaagatttttatacaa

SEQ ID NO: 211224 - DNA, 122 bp, Homo sapiens
cgtccacgggcaccagtgcacacccggcgcagcccacgtgcgtgcagccctgaaggcgcccgtgcctcgcgcccctggccatgcacaccagctccgggccgcactcacctggcgccggcgcc

SEQ ID NO: 211225 - DNA, 122 bp, Homo sapiens
ggcgtggcgccgcggtgggtgttgagaggcccgcgaactgacgggccagtgagcgggcgtcgggagtgggcggatgcgttggggttcgggtcgtgggtgttgaggcggagaggaaggcgtgg

SEQ ID NO: 211226 - DNA, 122 bp, Homo sapiens
cgtcccaaccgcccagccgacctgcaccgcattcccgccccctcaacacggctcaacggccgacgctgggggcccgcctccttagccaatcggggtcctagtgcccttaagtccctcctctt

SEQ ID NO: 211227 - DNA, 122 bp, Homo sapiens
gctggggccggggactggacgccctggcacctctcccaccagcccacggccccacctctccgtccacactctcagtggccatgcacttgtgccccgccctctcgctgatgcggtcaatcttg

SEQ ID NO: 211228 - DNA, 122 bp, Homo sapiens
actggagtcctctcctaaatgctcaaacacaaacccacaacgagggcttaggggcaagttcgctgtctgtaattctctggtgttttagttttgaaggcctggccagttctcctcttttggca

SEQ ID NO: 211229 - DNA, 122 bp, Homo sapiens
gatgaggatggagatgacctgctccatcaccaccacgtgagtggtagccgccgctgaggccgagcctgcactggggccacccagccaggcctgggggcagcctctccccagcctccccgtgc

SEQ ID NO: 211230 - DNA, 122 bp, Homo sapiens
ctctgaggaaagtctggaactggctgagctgcggcgagggggttggcgacgagccgggggcggagctctgggccttaaagaggccgcagccctgtggtcaccctgtgaagggaagggcggtg

SEQ ID NO: 211231 - DNA, 122 bp, Homo sapiens
gcgggcttcagggaggaggcgcagaggccggggagacagcagatggggccctgcaggcctcgctgcgccctgacctgttcctcgcctctttagccaacctcccgggaaggcaggagccggtc

SEQ ID NO: 211232 - DNA, 122 bp, Homo sapiens
gggtggggctcacccgggcccctgccctccggcgatgctgtcctcagtgccccaggaggacgaggccccccagctactgagcttcccagcgagtcccatgcaaccctcagccgggcggcccc

SEQ ID NO: 211233 - DNA, 122 bp, Homo sapiens
tacctacgtagcgaggtggagtcctctagtgaggggacgtcaggcgagccagcactaggccggtaagcatgggcagccaggccgagggcagcttgcgccgctgaaggccgggagaacggaat

SEQ ID NO: 211234 - DNA, 122 bp, Homo sapiens
tcggagagtgatcctggggttattttagaacgtgtcccttgcttcccagaaaaattcagtcgttaactcaagtccagatgcccaatgaccattcggataaggtgagctaaagcttcaatgcc

SEQ ID NO: 211235 - DNA, 122 bp, Homo sapiens
gaggtccacggcgggcggtggggccaggggagcctggccgaagagcagaggcccccacggcgccctgtgtgtggaaacctccggatggccgcaggggggtggggggagaaccaaagccctgg

SEQ ID NO: 211236 - DNA, 122 bp, Homo sapiens
taacctaggccatctggctccagaagctgaactcttaaccacactgctctcctgcagggtcgatgagcttgccatgcctcttggtcattccctaaggtgtggcattttgtgattcgggatct

SEQ ID NO: 211237 - DNA, 122 bp, Homo sapiens
gtttcctcaagtgttccaaccactttttcagcaagagtcacctgcttggcgacgagcctccggaccgccccgcgctatctgttccacccggcgggggccacgcacggggttccgcgtccctg

SEQ ID NO: 211238 - DNA, 122 bp, Homo sapiens
accagcctgggcaacatggtgagaccctgtctccacaaaaaaattaaaaacttagccaggcgtggtggcacacacctgtggtcccaactacatggggaatgatgcggaagtatcccttaatc

SEQ ID NO: 211239 - DNA, 122 bp, Homo sapiens
tggatgcggcgaaacgctgaggcgcggccttcgctgtgtggtggggactcacaagaccgacgtcaagatggttagtggctctgaatagtaagggagtactttgagtaggtcctgaggctggc

SEQ ID NO: 211240 - DNA, 122 bp, Homo sapiens
agggaggcatagggattttttttcaatggtagtcaccacagacggttgagggtaaattggcgttgttctcaataagggttattgtgaccatggtccaaagtctggcaggaatttttttttat

SEQ ID NO: 211241 - DNA, 122 bp, Homo sapiens
aagtacagaattttttactggggttcatatcatgaatgtttcggctttcttcttcagagacgtgggaacaacgcaagtcccacttacaacacttaagaacattctcatgatgaccgttgaac

SEQ ID NO: 211242 - DNA, 122 bp, Homo sapiens
acaataaatagaagggacttttagaacacaaaggtgagaaaacattaatttttaaaaatgcgagtgtctgaaatgtcagttctgggtatctctcaaagcaaactcaaggaacagttttactt

SEQ ID NO: 211243 - DNA, 122 bp, Homo sapiens
cgcggccgggggcggagaggcaccgcgaggacagagggactagcgaaggtctgcaaatcccggagggccaagggagcgtcaaaggggacagcggaaccggaaaagctttgacagaaagacgc

SEQ ID NO: 211244 - DNA, 122 bp, Homo sapiens
acttccctcctcgtctataaaatagggactgaacacatccttcccagttctgtaatgctacgacctaccaactcccttttctcgctctgtttcttctttccatggcaggggtattcagatat

SEQ ID NO: 211245 - DNA, 122 bp, Homo sapiens
gggagaagacggagcctgggagctgggactggaggagcgggaagcgcagtatcgggaccacggctctgggaccaggaaaaacgcagactctccagagtcaatgtctacttcagccagctcaa

SEQ ID NO: 211246 - DNA, 122 bp, Homo sapiens
tggtggaggtgagggagtcggcctgggcgtctccggtgggagcgggggcgccgagggggacgagccaccggggctcgggcggctttgcaggcgtattccgcccgggtcagagcctccggccg

SEQ ID NO: 211247 - DNA, 122 bp, Homo sapiens
ttgaggtcccggaaggttgtcaagtaaccggccaggagcttgagggcaggacattgtctccgacacttgattcagtgcctggcacacaggaggtattcaattatgctgaatgaatgagcaac

SEQ ID NO: 211248 - DNA, 122 bp, Homo sapiens
gaagtgggtggggccagataagagaataaaagcaggctgccggagccagcagcggcaacccgttcgggtcactttccactgtgtgcgaggtttgttatttcactctttgcaataagtcttgc

SEQ ID NO: 211249 - DNA, 122 bp, Homo sapiens
gactcttctctgggcccgcttgtgtccctccaagaggatcacagcatgtcctactgtgatcgtcctcttctaattcttgattttacaaaatacccttggatttttcagctcatctctaacat

SEQ ID NO: 211250 - DNA, 122 bp, Homo sapiens
agcttcctctccctagaatcccagccttacctgcaacagttccttttaacggaccaaggacgagaaaccactccccggatgcggtggcggccaacaaacccacgaggcagggctccctcctc

SEQ ID NO: 211251 - DNA, 122 bp, Homo sapiens
cgcaccgcacggtcgggcagcgccaagccctccctcaccagtcgctagatgaaactgcgccggtggattccgcagggtccacatagagccacaaagggactcatcctcagtgaaggcaataa

SEQ ID NO: 211252 - DNA, 122 bp, Homo sapiens
cataggactctcctagccaggtgcgggatataattctcctggtgcgccgtttcctaagcccgtcagaaaagcgcagtattcgggtgggagtgacccgattttccaggtgctgtcaccccttt

SEQ ID NO: 211253 - DNA, 122 bp, Homo sapiens
ggtggccccagagaataaagaaccccagtagctacaaattagataaaaccattctgtaagcgcaggaaattcaaactaaaaatatgcctctatccagccgttagaccatctgccggagaaga

SEQ ID NO: 211254 - DNA, 122 bp, Homo sapiens
ggttcctcagatattgcggacagtctaattcgccccgcgacgtgagggagaacccaggagcgggctccggtagagaaagaagcttccggtcaacgaccacatccacctgaatcatgagcagg

SEQ ID NO: 211255 - DNA, 122 bp, Homo sapiens
tctcagatcccagctcccttcctgctcagatggcagcgagatctgggtgagggtgggggccgagagggaggcacgttcgggctggctcacccagctgttctcacaccggcctccctctgggc

SEQ ID NO: 211256 - DNA, 122 bp, Homo sapiens
ttgacttctgtgtgtacatccctctgtcctggggtttctgtcctcttcagcctattttagcgtttcggggagctcccctgacttcacaggtgccccgcgctctgaaggcttcattgctaccc

SEQ ID NO: 211257 - DNA, 122 bp, Homo sapiens
cctttcctagtcaaagaaaggggtgacacacggcaccgggaaaatcgggtcactcccacccgaatactgtgcttttccgacgggcttaggaaacggcacaccaggatattatatcctgcacc

SEQ ID NO: 211258 - DNA, 122 bp, Homo sapiens
ctaggacatggtactgggtggaggacggctagctctttggaaagtgaaaggtttgggtggcgtgggcctcatgccacactgattggtcagtagacagggggcacatgccaaacaccacaggg

SEQ ID NO: 211259 - DNA, 122 bp, Homo sapiens
accccatatttgagtgctagtccagccagggtgtctccgggctccaactgatgctccaggcgtctttccctcactggggagcaggccgattgcaccaggcttccatatgaacgagcccggct

SEQ ID NO: 211260 - DNA, 122 bp, Homo sapiens
cgctgtgatcactgtctccagcctgctgaagctcagagggctctgattcagaaagatcatcggatccgtctgagcttggctggtcggaagtctcatcatctgcttccttcgggttaaacacg

SEQ ID NO: 211261 - DNA, 122 bp, Homo sapiens
atcctggaagcctgacaatgagcccagaccattcctgtgccttgaatggtaggttttgttcgactttggaatattctgctcagagagaagagcttttccttacagctgttttcttccttcag

SEQ ID NO: 211262 - DNA, 122 bp, Homo sapiens
cagtgacgagcaaagaccagagactgctgagccctcgcatctgggtggcggaattgcctgcggggttttgcccttggtttactgaggggggtcttggttgctgctgaagccccccacccctt

SEQ ID NO: 211263 - DNA, 122 bp, Homo sapiens
ctctccctgcctctccctgggccatgtgaagatgcgtgggaagacagctgtctgtaaacccggaagaaggcccttgccagacaccaagtctgcccagcaacctggtctcaaacgtccggccc

SEQ ID NO: 211264 - DNA, 122 bp, Homo sapiens
catcacaagtttcagcatatccagagcaaagatgagcaggtgcttggagcaggggtagaacggggacaatcctgctcttgccgtagacagaaagtggtgctttgacctcctcgtcctgttgc

SEQ ID NO: 211265 - DNA, 122 bp, Homo sapiens
caagcatcacccctgctccacagacaaggagggccaggcacaggaagtcagggactcacccggcgcagctgggctttgagcccggctctctgcacccactccttgctcctggagtgctgggg

SEQ ID NO: 211266 - DNA, 122 bp, Homo sapiens
aatataacagaacaaattaatgatttttgctattagtcaaagagatgcaaaacagaatggcgtgctacttacatacctttacatgcaaagaactgtttaaaagagtggagcattggaaaaaa

SEQ ID NO: 211267 - DNA, 122 bp, Homo sapiens
agtcaaggtcttcctggaggtgccttgaggcatgctgggaatagtagtcttttataaagccgataacagccacagtattgattgactggaattcttcagttagagctagcaaaatgatctgc

SEQ ID NO: 211268 - DNA, 122 bp, Homo sapiens
tcttacctggcctaaatattctaggcgccaggcccagaggtgggacgcgcctcggggtcacgaggcttttggggaggcagatcggggctttgggtcgcgggtcagggcagctttgccaacct

SEQ ID NO: 211269 - DNA, 122 bp, Homo sapiens
ctgccttgtcagccgtttgatctccaaccggcgaggacaagaggagttgtggggcctctccgtggcccggggacaaggccagaccacggcccccgtggacaccccccattccccaggctgtg

SEQ ID NO: 211270 - DNA, 122 bp, Homo sapiens
cgaaatctaaagagcaggttttgcgttgctgctatgctcgggccccgggcttatataagccggcgctgccctgtgattggtggagcgtccaatccaccgccctctggccgccgccgctcgcg

SEQ ID NO: 211271 - DNA, 122 bp, Homo sapiens
gtcgcccgacgcctcacgcgcgaggttgccttggcagtggctggagggcaggtgggggcgcgtgcgcgcagaagggcgggggagggaccaccgcgcgccagcaggtgggcgcgttctcccgc

SEQ ID NO: 211272 - DNA, 122 bp, Homo sapiens
atggggtgatcggtcactaaacggggtgagatgacaggtcattaatgggggcgtagtgtccggtcactaatagggtgtgatgacctgtcagtcattatctcttgcataagagacttcccagg

SEQ ID NO: 211273 - DNA, 122 bp, Homo sapiens
gcttccccacgggacaggagcgcgttctttggattcccctggtgcggcgtgcacaaccttcggacgaagagtccacgcctgccacccaggaggaggcccaggcgcaggcaggagtggcggcc

SEQ ID NO: 211274 - DNA, 122 bp, Homo sapiens
ctcagctccctcctcggggtggctcggggctgggtttctaaggtgccctcagccctcccgcgccggccgcagagtcagtcccggtgcccccgaccggcgctgcccacccgggtctcacaccg

SEQ ID NO: 211275 - DNA, 122 bp, Homo sapiens
tctaggcctcctgcggaacccaggcctgcgtgaaggtaaatgcaaatcagctccgcccagcgcttcccgcagaaggagggttttctgtgtgcgcgtctggtttcctccgccttcagccagaa

SEQ ID NO: 211276 - DNA, 122 bp, Homo sapiens
ttcagatcactcgacccagtcctagcaaagaactgaacctaagaggacctgccgagccaccgtagggactgtcggccaacccgcgcgcgcacatcttccacccgtggactcgtcagggcgtg

SEQ ID NO: 211277 - DNA, 122 bp, Homo sapiens
agccaccgctaattatccggcccatggagaggtgagcgcagcaagggagcgcggaggcggcgcagaacccgggttccagcccaggctcgcgcagcgggacgctggcacgacgctcttcatgc

SEQ ID NO: 211278 - DNA, 122 bp, Homo sapiens
gcgcagaggccccgcccaggccccgcccaagccccgccctctcgactgtgacgcaacatccgcacagcccgcggcctggaatctaagagactgccacccagaggccccgcccctggcgcgta

SEQ ID NO: 211279 - DNA, 122 bp, Homo sapiens
ccagagcacgagagtgacaccaaacacatgggacagcagcaccgagtcttggacaaggggcgcgaaggagtcaaggatgttgccaggcctgtggccgaaactgagaacagaatagagaagca

SEQ ID NO: 211280 - DNA, 122 bp, Homo sapiens
gcccccccaacccctcagctggccccctcccccaaggcttgcccccgccgcccagagctgcgccccaattacctagttaggccccaaagtctccggtccggactcggtggcgcggcagtaac

SEQ ID NO: 211281 - DNA, 122 bp, Homo sapiens
ttgaagcaagtgacacactgaagttgtgagaaatagtgtgcgctgggggaggctgtcctgcggtcgtaacgtgtctgtcctgttcccaacagggctccacgtgttccccacgtttgtggcgt

SEQ ID NO: 211282 - DNA, 122 bp, Homo sapiens
tcaacttcgcaacttgggctttctccaaaaccaagaaattggcggtgcagctctgcatgacgtcataccacaggcactccaatcccacgtgggggagctcttggtcccgcctctcctgaaat

SEQ ID NO: 211283 - DNA, 122 bp, Homo sapiens
agcagatgaattccgaacttggcgtctaacagcatttattgcttcattttcatgtcttcccggcttcagtttgggccaaagttgttaatatttttttcaggttcggaaaggatgggaggagg

SEQ ID NO: 211284 - DNA, 122 bp, Homo sapiens
catggcacccttcatttgcgtattaaaaggctagggtggaagggccagctttttcgcgggcgacgtgaatgacctgcctactcaaaccaatcccctgagacctatgcaaattaaacactgcc

SEQ ID NO: 211285 - DNA, 122 bp, Homo sapiens
ggttggccaagggtggcctgactctgtgtttgggacatgtgcggggcatggatagggacccgccagagaaagcacgtggcccggggactccaggcttcgatttcaggtgtggcttgcaaata

SEQ ID NO: 211286 - DNA, 122 bp, Homo sapiens
agccttcgctctaggctgagtgagcagcctaggcagcctgacttaaggatgaatctgagccgccagtccctaacgaagcatctccaagaacccagttggggggaaagcatgaggagatgggt

SEQ ID NO: 211287 - DNA, 122 bp, Homo sapiens
gtgagatggaaccctctgcccagcctccgcccaacgggctgtacctcctcctcctccatgcgccgcagagtctcgctgatgaacttgatgtactggctcgtcagtgtggtcagctcgctgta

SEQ ID NO: 211288 - DNA, 122 bp, Homo sapiens
aggggagcaccaacctgaacatggccagtaagaacacaaactagacctcccagattctcccgcaagtaaggagagatcagggactgttccaatttttggcgttcatattttttagacagttg

SEQ ID NO: 211289 - DNA, 122 bp, Homo sapiens
aactgctcactccaactcagaatctcctaaacctgttctcttctcacctgtactccaacccgttcttaggttttgggttagtgagtggtgtatcagcagcccttactagcaaaagtcctatg

SEQ ID NO: 211290 - DNA, 122 bp, Homo sapiens
atgaggctcaaaacataagaagtaaagaaatgggcaaaattcaattagtttctggtgaaacgtcctaaatccaaaagaaaggtgaccagaaatagagaaaacggagtgtgatcttttgcatt

SEQ ID NO: 211291 - DNA, 122 bp, Homo sapiens
cgactttgaatggtccgttaatgtggttacaaaacgtgactcggttcatcgggagccctccgtaagcaagacaagcacccacctgcggtcagagcaggggtccggctcgcggtcggggttgt

SEQ ID NO: 211292 - DNA, 122 bp, Homo sapiens
agggggaagaggaactggtgtctgggtggagtgcagaggggaagaatgaagacagagatccgcccccttgcagggcctcaaggttctcaccagaggtggatggagggcaagagggaggggtg

SEQ ID NO: 211293 - DNA, 122 bp, Homo sapiens
cgaccccaggatgcaacagcaccgaatgccagtgccacagagagcaggctgtgccacacgcgggcctggcatgacctggtgcccaaacgcagctggcaggacagccttggatggactggaga

SEQ ID NO: 211294 - DNA, 122 bp, Homo sapiens
ctgataagcgtcatcatcccatatacacagcaccccaaggacagcaccctatcgcccacgcgtccaccagcccccgaaaatactggagacaaaagctgacgtcggcagagcgctcctagtcc

SEQ ID NO: 211295 - DNA, 122 bp, Homo sapiens
gctactttacactctgtgctttgggatagcaaaatcccgcatttaagcaatccgaggaaacgagcaaatagacctccctcgcctctccgagcacactcaacagttccggttgcaaaatgttt

SEQ ID NO: 211296 - DNA, 122 bp, Homo sapiens
gagcgaatgggaaaagaaaacggccttacggagaacctaaagccagatcgccaagtggtgcggccggggccgcgtcgtagcggaggcggcgcgggggcgcgggccgggccgggccgggcggg

SEQ ID NO: 211297 - DNA, 122 bp, Homo sapiens
gtccctagagcaatagtgacttccttcactccaccttcaaaattctgctgaaatgcctctcgttggcagaatttaatgtgaaaaactgttgtcaggaactctggaaaacatagttctctggc

SEQ ID NO: 211298 - DNA, 122 bp, Homo sapiens
aatcccgaaaactgcgcggcaaaggcgggttccgcagaagtcgcgcgtgacccggggcgccgccctcctcggggcccattcggatctgccgcccgtcctctccagagcgccccctggcgccc

SEQ ID NO: 211299 - DNA, 122 bp, Homo sapiens
tgagcagtgacagggatcctggggacacgtgaggaataacgcagcagccatgcagcttcacggcacaggggcccggccgttctctctggattctggctcgaattttcacacgtgccaacctc

SEQ ID NO: 211300 - DNA, 122 bp, Homo sapiens
taggagtttattaaaattgtgatgggaaagggagggaagagagatttgatgaaaacatagcggagagattcaaggccgaaaggatatgacagctttccattctgaaacaccttcctttgtca

SEQ ID NO: 211301 - DNA, 122 bp, Homo sapiens
caggtgaggcccgcaggaggaaaagcactcccctggcgcaacatgactccagcgcatctgcgtctaagccacaccgtgctcctggtagattaaaaattaattctaaaaaaaaaatctctcct

SEQ ID NO: 211302 - DNA, 122 bp, Homo sapiens
tgtgggaacagccagggcggcagcagagccatagatggtagccttagccctgctgctgtgcggccttgggagccaaggagccttcagaaatcactgcttacacttggggcgagggcaagcga

SEQ ID NO: 211303 - DNA, 122 bp, Homo sapiens
tgggagtgagcgtgtggagaagccaggccattgggaagacaaaggggccattggagcccccgctgctgccacaagacaccgcctccgcatccatggaatcttccactgggcgccgctgccgc

SEQ ID NO: 211304 - DNA, 122 bp, Homo sapiens
agaacatgtactacttctcagagctggccctgaccctcaacgagcacgaggagggcgtagcgccaaccgacagccgcctgcggcccgaccagcggctgatggagaagggccgttgggacgag

SEQ ID NO: 211305 - DNA, 122 bp, Homo sapiens
gttccttttcccgccccccttcggatccctccgacctgcggcgggaaagtcgcgcgcctgcgcactaagcatctggttcggtctctggcccgagggaagccggtccttcccggctgagctcg

SEQ ID NO: 211306 - DNA, 122 bp, Homo sapiens
gtgggaggaaaccggtgcccgacccagaggacgaatgctggtgaggctgcaggtttggtgcggggacaggagggctggcttggacaagctggtctgagctgcttgtgagccagatgttgaga

SEQ ID NO: 211307 - DNA, 122 bp, Homo sapiens
ggcaggggccaggttgtgccacgggctccacttggtgggtttgctggttttgctggagggcgggaagcccgggccctggggacggtgtggaggaagtcacctgcacgttggcaaagtccacg

SEQ ID NO: 211308 - DNA, 122 bp, Homo sapiens
cacacctccattctctcacacacgttgcagacacaaatcactgacggtttccacgtgctgcgctcgtgagcggaggtgttcaaagagggggcagatgagttacttcccgagacggaaccggg

SEQ ID NO: 211309 - DNA, 122 bp, Homo sapiens
ggcgccagcaggaagtgggagaagaggcgacccaaggcgggctggcgggctggcggcagtcgctacttgcctagtagcctcagccgctgtgggctcctggggagatggaggggccggggctg

SEQ ID NO: 211310 - DNA, 122 bp, Homo sapiens
tgcttgccaggtactttggtagacattttatttattcctctcagtaatccagtgaggtggcgtgggtaatgttaaaatggcaagaggagacttgctgaagattagaaagcaggaaggagtca

SEQ ID NO: 211311 - DNA, 122 bp, Homo sapiens
agccagcgtgcctgggaaggccagccttgctgagaaggtggtgtttgagatgaagcatagcgataatgagaagccagttctgtgagtctggcaatcccttccaagccaacttggtcctctga

SEQ ID NO: 211312 - DNA, 122 bp, Homo sapiens
acctgggccactttccacattagaccaggagagctggaggctgcagggcggggctctttgcgctgctgtccccagacccctgtccccacacccctgtccccacacccctgtccccacacccc

SEQ ID NO: 211313 - DNA, 122 bp, Homo sapiens
cactccggccctcaactggtgatttgcggctccgcggccccaccccggcgagccgattcgcgctgccttgcggaaccccccgagacatttacattcggtgacctagccaggccctcctctgc

SEQ ID NO: 211314 - DNA, 122 bp, Homo sapiens
gggctgggaccccgggatccagcgaggagcacctggagagttaccacacgaccccgacctcgccagcccaggcgccgcgtttaatcttgggctctttgtgccagccaccccccgaggctggc

SEQ ID NO: 211315 - DNA, 122 bp, Homo sapiens
gcccccgaggagcttctgcagaaaggactctggggctgtccccaccgttcccccgagagacgtttgcaaatcatatatgcagccaaaatggcgctgagaataaaaatataatttaaaggcag

SEQ ID NO: 211316 - DNA, 122 bp, Homo sapiens
acgtaaattactctttctccatcgcaattcccgtcttgataaattggctctgctaggcagcgggcaatgtgaagccattgggcagttacaaagtcaccagtgtctctgaacctacagggatg

SEQ ID NO: 211317 - DNA, 122 bp, Homo sapiens
acctcgtgatccgcccgtctcggcctcccaaagtgctgggattacaggcgtaagccaccgcgcccggcctatgatttgatttttataataaaaagggataaatctatataaactgaaagatc

SEQ ID NO: 211318 - DNA, 122 bp, Homo sapiens
tcttcaggcagaggttggacagggtctgtggcgtggtcctctgcacgttcttcatctgcacgcactgcgtggccatccccagcaccgtgtctcccacgcgcttgacctcggctaagggacat

SEQ ID NO: 211319 - DNA, 122 bp, Homo sapiens
caagcgagagctggacggaaacggtgggaggccgtaggcggcggctgggggcgcgggacccgcgcgcgggcgcggaggcgggcggggaggccccgcagcccgcgccgccgccagccgccccg

SEQ ID NO: 211320 - DNA, 122 bp, Homo sapiens
ggttggcgggtcttggggcggggccaggatagggcgatcctggaagctgggcttcggaagcgtccaggttggtggcgtcctggaggcagtgccttgcgtgggggcaggataagagtcctgga

SEQ ID NO: 211321 - DNA, 122 bp, Homo sapiens
tcccctgtccacgcgtggggttggcggaggggcataaatcactgagtgaccaactgtgggcgttcctttcagagaaaccaaacgcgacagttgtcttcaaaccccgctctgtcccgtgccgc

SEQ ID NO: 211322 - DNA, 122 bp, Homo sapiens
aaatcctaccccttctctcaggttcctgtcaaagactctgcttctgcaggaattcttccccgatcgtcccaggtagaatttaatttttggcttttgtaaatatctatcgaatttatctgtac

SEQ ID NO: 211323 - DNA, 122 bp, Homo sapiens
tttcggctctgctggttcctcccggaggtgggtgtttggtgtctggccttgctggcccggcgtccaaaggtgagccctttaacttctccagaatcgcctcccctccgcttccttcctgtgca

SEQ ID NO: 211324 - DNA, 122 bp, Homo sapiens
gggagcccgaggaagtgccggcaccacgcagcacgcacagggcggggacagccccacggccgcttcagatgctgcctctccacatggagggtccttccccggagctcctcagggcgggcaca

SEQ ID NO: 211325 - DNA, 122 bp, Homo sapiens
agattctaccttcctcccctctaagccactgatcttctccataacctgtgttcatccctccgtgtaagataagcatgcctgagaggcaggtgccatgtctttttcaagtcagagtgtcctct

SEQ ID NO: 211326 - DNA, 122 bp, Homo sapiens
tagagacgaggtctcgctatgttgtccaggctggtctctaactcaagattcctctcacctcggcctccgcaagtgctgggatgacaggtgtgagccaccgcccccggcccctcgcccgcctt

SEQ ID NO: 211327 - DNA, 122 bp, Homo sapiens
ggcatttctctatgccattctcatgcctggtaaaggtccccacagggcaactgctgcagacgcgcaggcttgtgttggtacaatgctcagagacataggttcctgctggacacttgtcacag

SEQ ID NO: 211328 - DNA, 122 bp, Homo sapiens
gcctcttcaagaaaaataactctacgaggcacatggaaagcactggcgaggcacaaagagcgaaagaacagcgtatacttgggaaacacagaagcgtcccgagatgctgtaggcaaatgaga

SEQ ID NO: 211329 - DNA, 122 bp, Homo sapiens
agaaaatgatcctaagataatataaaataacgtattcaggttgcagctctcataggagagcgaagctgggagtgggagtgcaaagtagttttttttacaaatatattatcccagacttaaaa

SEQ ID NO: 211330 - DNA, 122 bp, Homo sapiens
gggccgggacgcaggacctgaggctggggaggcctggctgagcctgtccagggagggcctcgaatgccagctgagtccagactatactgtgtattatagaccgcgtgtaggaaacaggtttt

SEQ ID NO: 211331 - DNA, 122 bp, Homo sapiens
agatgatctccagaaataagaagtcaaaaagaaaacagatgtttggagagatctacagaacgcttaagtgccaaaatgagtagaccaatagggactggagaggaggttggaaaggtagggac

SEQ ID NO: 211332 - DNA, 122 bp, Homo sapiens
tggtaaaatagtgaagtactctctaccactggaaaattgctgctgctgctgccctgcacccgaggggcccttcccagacccactagccaggctgggagctgaaggacccctctccagccact

SEQ ID NO: 211333 - DNA, 122 bp, Homo sapiens
caaggctcacctcagtggcgctgtctcctcaccagaggcactgcagtgtgggaactgtcccgaggagctggttctcagctgaaacaaagaggtgggggagaaagggggggcagcgggagagg

SEQ ID NO: 211334 - DNA, 122 bp, Homo sapiens
ggtgttccacctgccttggcctcccaaagtgctgggattactggcatgagccactctgcccggccaattctagccattcatatgtgtacagtggtagcatttttgcttttaatgtcgtataa

SEQ ID NO: 211335 - DNA, 122 bp, Homo sapiens
ccccccttgccttgccccctctcactctaggccctcagctccagcctctggccctgacctcgagctgtgtcctgattctgtctctgccccaggactgcagggctccaggaggtctgggctgc

SEQ ID NO: 211336 - DNA, 122 bp, Homo sapiens
ggaaacaaaagcaaacagctaacgtggctatgtgttgaggtcagtatttgagggaacatccggtgtgtgttttattcagtattgtgtagtacagaaaagatcacacatgtatatgtcagaag

SEQ ID NO: 211337 - DNA, 122 bp, Homo sapiens
ggctgtaagccagacctttcctgggaaggacgctttccaatgtagggggctgcatccaagcgatctggacttcgtttgcgggcgccatttaaagaaatgtacccagtcctggctgctgacat

SEQ ID NO: 211338 - DNA, 122 bp, Homo sapiens
ctcatagcataaatgtctccatacagcaaatgacagagaatttttatctgctgctaataccgccaaatgcaacagaagagtgaaactcagaaaagcctagattagataaagaccgtgacagg

SEQ ID NO: 211339 - DNA, 122 bp, Homo sapiens
ccggaggtcgtcgaagaaggatgcaccttctgaggtggcgttgggggtctgcgccccgcccgcgcccggggggcggaggaagagtggcgccagtagcagcagcagcaacatctaagtgagag

SEQ ID NO: 211340 - DNA, 122 bp, Homo sapiens
gggagaagcctgcgagggcatgagctttaggcattggacagagggagggtgggtgggaggcggggacttgggggatctcaggattggggtactttgttgtccctcccactgctgtatgaaaa

SEQ ID NO: 211341 - DNA, 122 bp, Homo sapiens
catgggcattcacaaagcttgacttattcacttccctcctttgcaagccagggcaacaagcgtgtcccccattgacaaggagccctattcagactgcaggtgcgaagtgggccggcgcgccc

SEQ ID NO: 211342 - DNA, 122 bp, Homo sapiens
gaaaaacctattagtgtgttgtcaggaccttctggtgataactgaccagctctcgccaatcgatgctcttcacttgtggagctcctgattttttaacagcataatagtttttttaataatgg

SEQ ID NO: 211343 - DNA, 122 bp, Homo sapiens
actctccctagagtggccacagtactggagatccaaagatgacttaagacatggtacctacgctggctctagtggaggagacagacacgtagtcaactgaactattttacaaacctgaaata

SEQ ID NO: 211344 - DNA, 122 bp, Homo sapiens
agagcgccagccgttcagggtgacagaaaagcacagaggcagggcccaggcgcctccaggcgaaggcctccgctcccaccgctgcgagaggaggcgcgtccacgacggaataagcaggcggt

SEQ ID NO: 211345 - DNA, 122 bp, Homo sapiens
tggtcactcaccgccgtgcagaagtagccgcagcccgggcagcagtggtgtttgaccatgcgggcgcggtgggtctcacagagcaccatcagggccacacggctggatggcctcatggtctc

SEQ ID NO: 211346 - DNA, 122 bp, Homo sapiens
ccctcacctccggcccccacgcttccaaacccaactcctctctgccagctccagctccagcgtgtgaacacgggactgcccaccccaccatgccaccccggagccggcgccgcagggccatg

SEQ ID NO: 211347 - DNA, 122 bp, Homo sapiens
tctgccttctgtagaaaatgggttgcttctatagctgattgctgcagccaagacaaacaacgatttctttctttttttctcacaagactgggagtgagaatatttggattccgacattgttc

SEQ ID NO: 211348 - DNA, 122 bp, Homo sapiens
cacttctgcagcttcttgactgtcactgccggcggcctgaggaaggaggggccttcctggcggtctcctttgccactgcgtatcacagaggaccccgctggatccctgaaagggcttcccga

SEQ ID NO: 211349 - DNA, 122 bp, Homo sapiens
gtccctcaccagaaaaagctgttcagaaatatctgagtccaaaaggaacacaggaacatccgctggatgcacagatctgcttcgttattaaaatctccctttaatatattttgagacccaaa

SEQ ID NO: 211350 - DNA, 122 bp, Homo sapiens
ccgggaggctccagagaataatttgcaggctgcctggctgggtgagcccacctccaaccacgcgagacaacagctccggcctgggtgacgtgagcggtgcccattgatggggaacatcttcc

SEQ ID NO: 211351 - DNA, 122 bp, Homo sapiens
tagcgttgctggaactcttccagagcaaaatttgttactctggtggctgttcctggatttcgagtgaaattcaaacactgctgtttgtcttgtaaggtgttaagctgactgatcctaatgta

SEQ ID NO: 211352 - DNA, 122 bp, Homo sapiens
gccaaacaaccatgtactgtatgattccagcaacacgaaaggcccacagaagaaacttaccgagacagaagtggatgagtgttaggggccgggactgatgatgaaaagagtgagggaattct

SEQ ID NO: 211353 - DNA, 122 bp, Homo sapiens
tgtgatgacgacagattccccaccgacccagaggaggcatcacatttacataaaaataagcgctatctcccttatctctggctctgtaatctgagatctctttccaaggcaccgccttcacg

SEQ ID NO: 211354 - DNA, 122 bp, Homo sapiens
cactgagcagacatggaggcccccggccctgcagcagagctgcctgtcagcctgggacagcgcgtgcagccactagagggccgtgggcacacgggggccaagcacccaccattctgtgccgg

SEQ ID NO: 211355 - DNA, 122 bp, Homo sapiens
ccctgtgtccacctctgcagcgtggaatcagggcagtctggggtgttgagatgggccaggcgcggctgatccctttaccctattttcggaaggattaaggtcggattcgcatctgaaggtag

SEQ ID NO: 211356 - DNA, 122 bp, Homo sapiens
acactaataaattatgttaaaggcctaatgaagaaatacttcaacaactatgaggtaacacgctagctgtaggcatgaggaacgtttatattggctcttctgggtgtatacattaaaagcaa

SEQ ID NO: 211357 - DNA, 122 bp, Homo sapiens
cactgcgaacgacaggtacaagatcttcgacgcgcccggagtcaccaaccgagtctgccgcgacctagccgcggtcgtcatggcaacctggcccccccgccaggcctgccaggaaagccggc

SEQ ID NO: 211358 - DNA, 122 bp, Homo sapiens
cgcctcgcccctgaccctctgccctgttctccatgttgcatttctcgtcagtttctcgggcggtgtagctgccgctgccaccagagccggcggggcatcgcgctgctcattcatccggccgc

SEQ ID NO: 211359 - DNA, 122 bp, Homo sapiens
aaagaaacagaaagaccaggggagaggtgaaggagcctctctgaatgatgtgaaggagatcgtgggtcaaagctctgtggtgtcctaaaaaataaacagtgcagaatggagcaggaagacag

SEQ ID NO: 211360 - DNA, 122 bp, Homo sapiens
acacacacacacacacacagtcagaggcaaaggagaggggcatgggaatgaggtagaggccgatttgattttaattcactgaacatttactcagtgccaagaactgtgctaaggggtatgct

SEQ ID NO: 211361 - DNA, 122 bp, Homo sapiens
aaccattgtgctggccacatcctcctgagaacctcagccgctgagccaggcccttgaagtcggcagtggcttcaggtgggaagctgcatctgtgcttgcagaacctttacttgtctaagttg

SEQ ID NO: 211362 - DNA, 122 bp, Homo sapiens
gagccccaagagggaggagaaaggacatgaggaaggcgagcccaggaaggctaaaagtcccggacgggagagaaggcggatacagggagacaaacacccacacccactgcacagacccggcg

SEQ ID NO: 211363 - DNA, 122 bp, Homo sapiens
ctgactcaggttccacagaagggaactgaggaagaactagaagtggatgccttgtgacatcgccagcttgtttccctgggcaactgactccgaggggtgagcaaatccctcagagaaatgct

SEQ ID NO: 211364 - DNA, 122 bp, Homo sapiens
aggagttgagggcgatgagagcgggtactgcgaactgccgggcgatgctgtcgctgccgccgtgatacggagagcaacagttccccagcaacacccctccccgacacaggcacacacccccc

SEQ ID NO: 211365 - DNA, 122 bp, Homo sapiens
gtttaaatactgagctgggaggcagggaaggaagtagtggggctggcttaagggtatagccgcctcaggggagtcacccagcagcagtcacctggtaggtccagagagtgagatgggatcag

SEQ ID NO: 211366 - DNA, 122 bp, Homo sapiens
ccatcatcctgatggttctccagacacatccacagcattggggcaggtcctcaggctgcccgtggaatccctgcagtaaccaggaggcctctgtcataacccaggggccatatttttaggat

SEQ ID NO: 211367 - DNA, 122 bp, Homo sapiens
ctccgcggagaggactccgcagggccaggggtgcacatttaagatcaggcaggatcagaacgcggggcagcagcattttagaattcttgtaacccgggggccggaagaagctccccagaatc

SEQ ID NO: 211368 - DNA, 122 bp, Homo sapiens
tgctctttattagggtggggggtcccctgacaagtgcctgtttctccattttccctcattcgtaggaaagcttgggagtctggaagcgtctgacgggaactgaagggagaatctaaagcagt

SEQ ID NO: 211369 - DNA, 122 bp, Homo sapiens
gtggagaagccccatccttaaaattccccagtgccttctccacccaagcaacagtgctctcgggataacactcatatcatgagtgggatgtgctgtctcctagggagtggctggaaaggaga

SEQ ID NO: 211370 - DNA, 122 bp, Homo sapiens
cacatttaataagcccccttccccaggtgagagaaaacaagtgatcccgaaggagggccacgaagggcagcatctggcactgcctataaccatggctgcttccttattaaaaaacaaagagg

SEQ ID NO: 211371 - DNA, 122 bp, Homo sapiens
ttctgggcaaaggggctcctgatgatgaaacaaagccgacaggtggtacctgcaaatccccggagagggacaggccggccggcgccctctccctccccagagcccagcatctgagccctcgg

SEQ ID NO: 211372 - DNA, 122 bp, Homo sapiens
gctggtgggcctgggttctgttgcacttcttggggaggagcatgacaacagcagtgccagcgtaggtgcagagaggcagaaggtggggccatgctgcagatgggaggggcaagcaggaccca

SEQ ID NO: 211373 - DNA, 122 bp, Homo sapiens
ggcctcatcgggaaaagctcagatgtggaagacagcccaagacacatgggggaaacacagcgtggaggaaacagacactatccagagagaaaactttaacacgtaacagcatagcagctagc

SEQ ID NO: 211374 - DNA, 122 bp, Homo sapiens
ccactctgcgaagtttggctggggtgggagtgggggcggagccgggcagggggcggattccgcagcagcaactccccggacgcgcgcaggcctcaaagccccccagcttcagtgccccctcg

SEQ ID NO: 211375 - DNA, 122 bp, Homo sapiens
cttgagttctcctgacctggtgggtctcccgccagtgtctgcaccaggagcaggcccaaccggctaagcttgtcgtaagccttctgcacctagatcactgttctaggcatttgatgccttgg

SEQ ID NO: 211376 - DNA, 122 bp, Homo sapiens
tagtatgtatggatggggcgtttgtctctaactatattccgtgtaacgcaggcttgtggtcgcttcataaacaacaacgcggttaccaagatggcccaatcatccagtaaatcccctgagtt

SEQ ID NO: 211377 - DNA, 122 bp, Homo sapiens
ctgctggtggtggacaaatgcgacgaacctctgagcatcctggtgaggaataacaagggccgcagcagcacctacgaggtacggctgacgcagaccgtggcccacctgaagcagcaagtgag

SEQ ID NO: 211378 - DNA, 122 bp, Homo sapiens
gtcggtggcgtcatcgccgtcttggtgcagcaggcatggggtgaaggtgaggggacagggcgcagttgcaggtgccagaagcttctcaattggcccagttgggctgcccctccctccccgca

SEQ ID NO: 211379 - DNA, 122 bp, Homo sapiens
gtagagtcatggcctcgagcacaggtgaccggagccaggcggtgaggcatggactgagggcgaaggtgctgacgctggacggcatgaacccgcgtgtgcggagagtggagtacgcagtgcgt

SEQ ID NO: 211380 - DNA, 122 bp, Homo sapiens
aaatcctatcaattgataggtattatgtaatggcattaacaggctctgtgctgactactgcggatgctgttttgaagctcctgtacagctattatattatcagtggtgatttccttcaggat

SEQ ID NO: 211381 - DNA, 122 bp, Homo sapiens
agtcctcctctgggctgtcagatccaaggttgcgctcaggtggcttgtgcccagccctaccgtggaccccacctgtgggcctccctgcaggctgctgccaggaactaggggcagcaccagaa

SEQ ID NO: 211382 - DNA, 122 bp, Homo sapiens
tcctcctccctcttcctgggggtgctgctacttccccggccttgtgtgcaggactggggccgccgttacctttcctcgacccaccagacccctcaaccacacaacccgagacgaattcccgc

SEQ ID NO: 211383 - DNA, 122 bp, Homo sapiens
cgctgagcaacggaagcggctttcaagatccgggcagaaactttactaattcgcttgaatcgttccgcttgcctgtggaacctgcatcccactaacaacttatctaatgctttcagtccctg

SEQ ID NO: 211384 - DNA, 122 bp, Homo sapiens
aacccctggacccagagccatctgcctgcctccgtctcccgaagtgctcacaggcagagccgcagcgcccagcccaaggctgttttttaaaagaagaaacttgataccaggccaggcctcaa

SEQ ID NO: 211385 - DNA, 122 bp, Homo sapiens
ttgaagtctcctttaggccttcagagacttaataggatctagtgggcttctgcagaacttcgctgattatcttaaagaaataggggttgaatgaaactttgagggcactcagaacactgaga

SEQ ID NO: 211386 - DNA, 122 bp, Homo sapiens
cttccctcagctactgcatactattatctgtctactcgtaaatcccttcttattctctatcgtttctcacacattctcactttacttgttttccttaaacattagcttatttcttttatttt

SEQ ID NO: 211387 - DNA, 122 bp, Homo sapiens
tgctaccagagggactgccaggggctgcagccgggcctcctgcagaggctgagtcccacacgcagggaacagccatgccactgctagcagaccagtaagagaatggccacctggggcctgag

SEQ ID NO: 211388 - DNA, 122 bp, Homo sapiens
agccatgggagagccccttaagccttgtaagtcctgaaactaacatggggagttaccaagcgactgtgtgatagcactcctccgggaaggaagctcctgctgggccccacaccctccctaag

SEQ ID NO: 211389 - DNA, 122 bp, Homo sapiens
gccttgctacagaggaaggctggaaaaacaaacacagccctcatcacgaggctggttcaccgttggacggaaaggttgctttatccgtttaggattaaagtctaaacgagtgacagagtcac

SEQ ID NO: 211390 - DNA, 122 bp, Homo sapiens
acccttcattacattgcaatacctagtgcagtgcccaacgcactgtaggctttcactaaacgtttgtggattgagtttctggagaatcattgaggggaggcaagcttgctctctgacccttt

SEQ ID NO: 211391 - DNA, 122 bp, Homo sapiens
ataacatttttcattaaagttaatagttttatgtatttttgtgaggactaactgataaaacgttatgtttctatgctgactgcaagattgatgggatttagtattacatagtatttgaaaat

SEQ ID NO: 211392 - DNA, 122 bp, Homo sapiens
cttccggtggtgacgtgtattcgcttcaccgggactaagttcctcctgcgcggtctatggcgggtaggtataaggaaagccaaaagcactccaagcgaggctgcagtattgcgcacgcgcag

SEQ ID NO: 211393 - DNA, 122 bp, Homo sapiens
cagctcatggggcggaccctgcgaatagaccgcccccgtataccccgcgctgtctgtgcgcgccggaccgccaaaccgagattagcaaggaccaggaccttaatataaacccagctccccat

SEQ ID NO: 211394 - DNA, 122 bp, Homo sapiens
ctctagaccctgcacctctgaactgttaactgaggcagaaataaacttctattctgtttgcgtcactgtacagcagtgagccaaaaccctaagtgaccactcacttggctgccccacagaga

SEQ ID NO: 211395 - DNA, 122 bp, Homo sapiens
ttcaatttaattttttgggtttttaaatttgtttttcttgtcctatgttttgagagtaaacggagacaagggatattttatggtacaggggatcaattccaaagaaccccaatgtatggtgt

SEQ ID NO: 211396 - DNA, 122 bp, Homo sapiens
cgttccccttaaataagacatcacgatggatcacgggtctattaccctattaatcagtcacgggagctctccatgcatttggtattttaatctggggggtgtgcacgcgatagcattgtgaa

SEQ ID NO: 211397 - DNA, 122 bp, Homo sapiens
gggctccggtagcgaaggccacacagaagtcccgaggaccctggcagcggccgtctcctgcgtcttggtccctgaggaccctgggccttcctggcagtggaggctggtgtctctcactctct

SEQ ID NO: 211398 - DNA, 122 bp, Homo sapiens
ttaagcagaggcgccttcaacacatctgcacttgcttgaacccaaagttaaaaacactggcgtcggtgccctctccccgtcatccgactcacgggcctgttctttccatgctgatgttcgtc

SEQ ID NO: 211399 - DNA, 122 bp, Homo sapiens
ccagcagccagcagggcctggcctatgccacagaggctgtctatgaaagcgcagaggccccgggccactatcccgcaggtactggggccccacgctgcagcgccctgcccagggcagggagc

SEQ ID NO: 211400 - DNA, 122 bp, Homo sapiens
ccccaaacaccaccaaatgtccacaggttctgccccggacatgcctcgtttggctccaagcgatagcagggagtgaccctctgagatccagcagcacacacccccagctggagggtcagggt

SEQ ID NO: 211401 - DNA, 122 bp, Homo sapiens
agctgttactcccgccttccccgcagccctgtgaatgctcagccttgtgaatgctcatcccgccgctgttcgctctcccgcggttgctgcttgcatagggtttcagatccggaaatttgagg

SEQ ID NO: 211402 - DNA, 122 bp, Homo sapiens
catgggaatgtgggtcagtagcaacaggcccagaagggcagccacagtggaattgtcaggcgtggaccctgaaatgacaatcacaacgtcctctaaaggaaaatgtaagcctggtgtgagaa

SEQ ID NO: 211403 - DNA, 122 bp, Homo sapiens
ggtcccctccgcgcccctccggtgctctcggccctgccgcggcctgggcgcccccgaccgcggactgccgggcacctcccggctctgcaccttcctgcccgccttcccatccctaaccccca

SEQ ID NO: 211404 - DNA, 122 bp, Homo sapiens
tgaaccggcgactggacgcggtggaggcgtgggattcggaggccgggaccccaagctctgcgctggaggcgtcaggagccgcgaggtcatccggtctcaacctcaggcgcccctgtgcaggc

SEQ ID NO: 211405 - DNA, 122 bp, Homo sapiens
tggtgatgtactattataaatcaacttcactggggcatccttaatttattttcttgctgacggattccaaccggctcctgagcctctagaaaaatgcccccttcacctcctaggccgcaaaa

SEQ ID NO: 211406 - DNA, 122 bp, Homo sapiens
ggtcgccatgcttagtgtggctactgcctctgtgctacttgaggctctcctacggcttttcgatgccttcgatgaacctctacctaagcacttcttccctttcaccgcgaactcctaccttc

SEQ ID NO: 211407 - DNA, 122 bp, Homo sapiens
gtcccctcctctcccgcaaggagagacaagagggtcattgaagtcggagtcagcgtggatcggcccgtccacgaccttcagttaggaacagggccagactgtgggtccagtcgcagggacag

SEQ ID NO: 211408 - DNA, 122 bp, Homo sapiens
gtcggtgcacccggctttcccgggatgtgttggcatgagcggtggccgcactgggggtggcggggcggaggccggcggtttgcgctcctctcccttaccctgttgtcagaaccctccttccc

SEQ ID NO: 211409 - DNA, 122 bp, Homo sapiens
cgcgggagccgagggttccgctccagccttcctggagacccgggtagggctggcgtatggcgaggcagaggtggtgcaccccgttcagctgggcagcggcacgagcgggactgcggatcagt

SEQ ID NO: 211410 - DNA, 122 bp, Homo sapiens
cgcgacaccgacccaaggttagagagacctgcggaggccggcgccccttgagacggtggacgtcgcaggctcacggggagggttggggagagagacaatgagagatctcgaaagggcaagag

SEQ ID NO: 211411 - DNA, 122 bp, Homo sapiens
gaggcctccggacgatcggaagtgactgagcgtccgggtccgtgaggccgggggtcggcccgccctaagactcccacctggtcccggttctccgtccgctaggctggccgcggggcccctgg

SEQ ID NO: 211412 - DNA, 122 bp, Homo sapiens
ggaccctttgctgtccctgccctttggtccatccctctccatgaaggcccgttctcacttcgccttctctggtagcctcaccatggctcttggggtctggaagcctctctgagtctctgtct

SEQ ID NO: 211413 - DNA, 122 bp, Homo sapiens
ccgcacgcaagccgcgtacagcactgcagggtccgcgctttgggcggcgcttttctccggcggccagttcggacctttgcgcttttaccgtcacactccaacgcactttcttccccgagttt

SEQ ID NO: 211414 - DNA, 122 bp, Homo sapiens
cttctctcttccttcagcatcccctccatctctcagggacaacaggtcggggaggcagcccgggccctattaacagaggtgagagttccccagcagggctggttcccagggccacaggccac

SEQ ID NO: 211415 - DNA, 122 bp, Homo sapiens
tcccgggaagccccacagcccggatggccctcaggggagcctcgcggcccttcaccgtcgcgggaaaagccaagttggtggcaggaggagcccaccaccaaggcgatctcactgcggaaaaa

SEQ ID NO: 211416 - DNA, 122 bp, Homo sapiens
acggtgagaaagtgagctagagagatgccaggctcttttaaacaaccagcccagctctcacgtgacgtaatagaacaagaactcactaattaccaacgggaaggcaccaaaccattgaggag

SEQ ID NO: 211417 - DNA, 122 bp, Homo sapiens
agaaccgtggattggtgtagatgtgtctggttatttacaggagaacggcttgagaggatgcggagcccaacgtggggattcgcacaatgactcaaaagattcttctccctcttttttttttt

SEQ ID NO: 211418 - DNA, 122 bp, Homo sapiens
tagcatggtgcctggcatatggtagcaactcaatacaataaatatttgctgatgaatgaacgaatcacacagagcttacaacctttggtgttaagtcagtctttgtctcaaaatgacaaggt

SEQ ID NO: 211419 - DNA, 122 bp, Homo sapiens
tgcgcggagagagcagcctgggcgccgaggcagcggggtgctcggttcccggagtgatggcggatgaggctgcctgtgagcgtgtccgaggcggtcctgtgatgttaaaggtacacgtggtc

SEQ ID NO: 211420 - DNA, 122 bp, Homo sapiens
tgatcaagcactcgaggctctgtcggcttcactgggcacccggcaagcagaacctgagctcgacctccgctcaattaaggaagtcgatgaggtactgaccttagagttgatttacaaagctt

SEQ ID NO: 211421 - DNA, 122 bp, Homo sapiens
atagtgtaaagaccaacttctatttcacccaagaaacaagctgtgttatacatgtcatatcgtctctgggacttctgtggtgaccagttctcggtttcatagtttttactatcagtttgcct

SEQ ID NO: 211422 - DNA, 122 bp, Homo sapiens
ggttggactgggacgtgggactcggaccacggcctgggcgtgggcctaacgacgcgggaccggcccgccctcgccgctccattggccacatctgtgcagaaaaggccccgcggcccaggggc

SEQ ID NO: 211423 - DNA, 122 bp, Homo sapiens
caaggcttttccactgaggttcaggacttttccggaagttaccgtgctgtcaaatccctccgccccctgcaggaaacggaatccttccgcagctgcacgacgcctgtgtgtctggcctttcc

SEQ ID NO: 211424 - DNA, 122 bp, Homo sapiens
cagactcttgagcacctgctggccgggagctggacgctaggtggcctccgctagccctcccggttggtctggaaggcaggcacaagtttctcaggagaggaaatggccttagaatgagcact

SEQ ID NO: 211425 - DNA, 122 bp, Homo sapiens
ttcactcctgaagctagcgagaccctgaacccaccagaaggaagaaactccgaaaacatccgaaaataagaaggaacaaactccggacacgcctcctttaagaactgtaatactcactgcga

SEQ ID NO: 211426 - DNA, 122 bp, Homo sapiens
ccgcatagccgtgcacgatgcgttacgatgaaaaagcggaaattgtgttaggtttaagcccgctcagatgatgaggctcccgtcaggccggctgttccactaacagggttccttctgaggac

SEQ ID NO: 211427 - DNA, 122 bp, Homo sapiens
ccagcctagcgcgccggggcgagcgctggaggttgcccggggactgctcgggatagggcccggaagggagcttggggtcagcgcctagaagttcctgttattgtcgttacttacccttgccc

SEQ ID NO: 211428 - DNA, 122 bp, Homo sapiens
cgattttcccacaagtcaccgggaggatgtcactgtgcatagctgaccgtcgtcctgtgccgagggtctgctcaagggacagaggaggacggtgctgtcctggggtttcgtctggcttcctg

SEQ ID NO: 211429 - DNA, 122 bp, Homo sapiens
aaatagtctgtaatttcctgtttctgcatttcccttcagtatctgtgacaggctgaagaacgatgactaaacgaagggaatttacacaagctagtctggtggtgtttgcaaaccatcgccat

SEQ ID NO: 211430 - DNA, 122 bp, Homo sapiens
tgtacgggggccggggccccgcctctcacatgcagcacccgggccagctccctgtgtactcgaggccgcagctcctccggcagcaggagctctatgctttgcagcagcagagggccgcccag

SEQ ID NO: 211431 - DNA, 122 bp, Homo sapiens
ggtcctccttgcctgtggtcttcctttccggtggtcctccttgcctgtggtcttcctttccggtggtcttcctttccggtggtcttcctttccggtggtcctccttgcctgtggtctgtctt

SEQ ID NO: 211432 - DNA, 122 bp, Homo sapiens
tgtccgacggccctgtgaccagcaccagctctcgggagaaggtgctcccagatttctccacgctgccgagatgcacgcgccgcgactcctgcggcagccgcgactcggtcacggtgcgcgag

SEQ ID NO: 211433 - DNA, 122 bp, Homo sapiens
tgcgggggcatggggtggcccagcatgctcaggtggtgccagggagcagcctgggagctacgaggatgagtaaagtgcctggctggacttgctaaaggcaaatttttatataccgaccctgc

SEQ ID NO: 211434 - DNA, 122 bp, Homo sapiens
cacctggtaaaagaagatgggatcacaaacgctgtggtccagaagggaacatcagtaagtcggttcaccgcttgcaagtgggggcacttacatataaatgaagaaaaaacaagttcttaaaa

SEQ ID NO: 211435 - DNA, 122 bp, Homo sapiens
cccgcacttcggggaaggcgggcggcgcggcggcttgaggtgtcatgggcccagtggccacggagcgcgtctcggcggcgcccagcgacacctgcaggcccgcatctcggcgcgagggcggg

SEQ ID NO: 211436 - DNA, 122 bp, Homo sapiens
cacaagccgggctgtgctcctacaccatccgaagagcgaatcgtgcagagaccgtgtctacgattggcctctccctgacaaggatttaattttgaatttttctttatggcgtgggagaggcc

SEQ ID NO: 211437 - DNA, 122 bp, Homo sapiens
ctgtgccctcggctgacttccagccggtggcacagacgcctccagggggcagcactcaagcgcatcttaggaatgacaggtgagaacatcctccgggccccagatttctctcctcgccgctc

SEQ ID NO: 211438 - DNA, 122 bp, Homo sapiens
ccagccctgctgagagccacggtgggacagcatcagacctccacagcaggagggcccagccgccagtgccaatgagacaaccacaccagaggcggacgcacccggcccccgctctgcggcac

SEQ ID NO: 211439 - DNA, 122 bp, Homo sapiens
ggaggctccagggtaagacagggctggcaggagcagactgcctcagcccatgtgccctgccggccagggcgtgggctcccctcggctgtggtgcctcctctggccccccaggtccacgtcct

SEQ ID NO: 211440 - DNA, 122 bp, Homo sapiens
cttcttgagatgaccaagtcctatgggagtttttttccccgcacctcccttcatcctgtgcgattcttcccagacagaagtttttctccactggactatttccaggcaagaagcccctgacc

SEQ ID NO: 211441 - DNA, 122 bp, Homo sapiens
taccccacggccccggccctgccgctcagacgtccccaggaactgctccaggtcctcgaacgagctgtccttgtctggcaatccagatgcggtgtcccccaggggtgagggagaccccacgg

SEQ ID NO: 211442 - DNA, 122 bp, Homo sapiens
tagataaaactgttacgtaggcaaaaattggtttatgccactcctctcatatgcataccccgcccagaattatattaactttactgtcgcggtttccagggctgaatggtagagatgtaaag

SEQ ID NO: 211443 - DNA, 122 bp, Homo sapiens
cgccgggagatgggaatcaaagcccccgttcttccagcgcccccaccgcggcccccaccgcggcccccgcctctcggatccccgcggctccgcgcacccctgctggcaaccgcgggaagtgg

SEQ ID NO: 211444 - DNA, 122 bp, Homo sapiens
ctcagactttaaaactctgcatcaacatcaccttccaggttcttccttctctccactatgcgatgcctggcattgaaaatttctgtatatgactttatcatggtgtgttatagttatttaat

SEQ ID NO: 211445 - DNA, 122 bp, Homo sapiens
tgcccccaatgccacaacaccctggctgggccgggatgaggagctggccaaggtggagatcggagtcctggccactgtcctggtgctggcgaccgggggcaacctggctgtgctgctgaccc

SEQ ID NO: 211446 - DNA, 122 bp, Homo sapiens
actctattgccttccaaagagcaccacaatatcctgagcctgccaagtcagcaggtctgccgttttctacataccagctgttattttcagattttggctttctctggggtttccccctggct

SEQ ID NO: 211447 - DNA, 122 bp, Homo sapiens
caccacctttcttttctctgctcttcctggggatctgaaaactcctcctaacaggcctttcgggctcttcggggcctctgggcagggcggccgcgcccgcctcagaggagtcctgaggctgc

SEQ ID NO: 211448 - DNA, 122 bp, Homo sapiens
gctgggatcagagcaggagcatcctctgctggttcctgactggcaaaggaccagcgtcctcgttcaaaacattccaagaaaggttaaggagttcccccaaccatcttcactggcttccatca

SEQ ID NO: 211449 - DNA, 122 bp, Homo sapiens
ctccaggacgcaccagggcaagcttgggcaccgggatctaatttctagttattcctgggacggggtggggaggcataggagacacaccgagaggtactcagcatccgattggcaccagggcc

SEQ ID NO: 211450 - DNA, 122 bp, Homo sapiens
ccgccgcccgccgcctccgtgggtccgtttgccagtcagcccgtgcgtccgagcccctcgcgccccgccgcagccccggccaaccgagcgccatgaaccagatagagcccggcgtgcagtac

SEQ ID NO: 211451 - DNA, 122 bp, Homo sapiens
agccacagctatttctgtgcctgtctctcctctggggccgcccacccggctcacatcctccgtgggacttcgcccatccgcacaggccagtcacctagtcacctattaggaggcccaaggag

SEQ ID NO: 211452 - DNA, 122 bp, Homo sapiens
ctgctggaaaaatcttggtggcagtggtgggaggtggtggttttggtttttagcagagcgcgggagcaccctgtcacaccctcctgagaccgccctaggaccgtcctctggaatatcttgga

SEQ ID NO: 211453 - DNA, 122 bp, Homo sapiens
acccaaagacaggtggagtgttccttaggacggccgccacaccctgactcgacacgagaacggctgcatttccaatccctgggtccctggccgagtgcccccgctgcctccagtgctaccgc

SEQ ID NO: 211454 - DNA, 122 bp, Homo sapiens
cattgaaggggggcccgtgatgttgagtgttcaccgtctttcagaacgtttgtgcggtggcgtgtcccttctgtaaattgctgtgacctgggctgcatgctccacagtcagactcgcttcgc

SEQ ID NO: 211455 - DNA, 122 bp, Homo sapiens
ctccttcctcctccctcctccctcctcctcccgctcctgaagagcgcgccgcgtgggggacggcccggttacttcctccagagactgacgagtgcggtgtcgctccagctcagagctcccgg

SEQ ID NO: 211456 - DNA, 122 bp, Homo sapiens
cagcggctctgccacctggcagccgaggccatgcaagatttcgcaggaggagcccatggccgcggggaggaggagtgggcgcaggagcccacggaacaggccaggcaggagggaaggaggag

SEQ ID NO: 211457 - DNA, 122 bp, Homo sapiens
gccctggcgtccactcgggaaagaacgaggtcaggagtcggtcctgcacatcgcgtagagcgaagagacgacacctacctgaccatagacgctccccatccgcccagcaaccgtggtccatg

SEQ ID NO: 211458 - DNA, 122 bp, Homo sapiens
cagccccggtttctcgttttagagtgagttcccacctgccctacctaaactgacctgaaacggaaagttgtatgcccccacgaccatcctcactgcagaactgcagagggttttaagctcct

SEQ ID NO: 211459 - DNA, 122 bp, Homo sapiens
tacgcggccacacctgtcaggccaggagagagagacaagcagaaagagagggggggtaagcgatgcaaacagacaggcatttgtgcaagtgaacaatagctgtgccaggactccctgccctc

SEQ ID NO: 211460 - DNA, 122 bp, Homo sapiens
cccggccctggccctgcgtacgcctgtcctccgcgcacggcgggctctgcctttctgtctcggtgtccccggtgtctccccgcctcggggggtctctccgtgtttctctccccagcacttct

SEQ ID NO: 211461 - DNA, 122 bp, Homo sapiens
cttctgttcaccacagagcagggtttccctggggaccagtggactggcccagccccacaccgccccccagcccctcctggccacagcttgagctgggaggagggtggaggctgggccgcctc

SEQ ID NO: 211462 - DNA, 122 bp, Homo sapiens
gtgtatataagctgttcattctgtacagtgaattttccgaacctctcaaagtatgttttccgttcttccacagaaatatgcaaaacagttcatccttttctactttatttattgttcccttg

SEQ ID NO: 211463 - DNA, 122 bp, Homo sapiens
gaggagagaatttcaaagacagagagtgcacaatctatctgtcccatggtccagggactccggtatggctcaatgagttagggaggtgatatggcctctagttcattgcatttcccctccca

SEQ ID NO: 211464 - DNA, 122 bp, Homo sapiens
atacgtcccagaacacttagctttgtttttaactacggtgcagccgcaaaagggaaataccggctcaggacccaggggagttgtagttctctaatccaaagaaatcattatttggcaacgta

SEQ ID NO: 211465 - DNA, 122 bp, Homo sapiens
ctcccccgctccctggctccccggctccctgactccgtaatctgcgcctcggcgcagttgcgagtcagggcctgaggctgacccctgtttccactgtgcttcattagaaagcgcttcacaag

SEQ ID NO: 211466 - DNA, 122 bp, Homo sapiens
attgtcgagcgcggagcccagttcctaacctgcagttacctgtagctgccacggcggggacggggcttggtccccaaagtcacgcagctaccaagtggccgagcttgtggctgctccaagac

SEQ ID NO: 211467 - DNA, 122 bp, Homo sapiens
agcacggctggcttacagtaccgaacaaagggagggagtgccgcgtgggccggcccaggccgaggaatgcggcttcagggttctgctccataaatttaaccagcacgacgaaaaggagataa

SEQ ID NO: 211468 - DNA, 122 bp, Homo sapiens
ccttaagcatggatcccaggggaaagggggtgagttagacacaagcgaagggctgaaggccggctctccatcagctgctgggctgtgccgtgccccacctgtacttggcgaagagtgatgag

SEQ ID NO: 211469 - DNA, 122 bp, Homo sapiens
aattcctcaggcgtggcttctgggggggcggggcggggggaggaaaggggcacgggttcccggtctcgtagacgctgcagcggagcagagcctctaggcatgccctcatctagagcagctgc

SEQ ID NO: 211470 - DNA, 122 bp, Homo sapiens
taggtagagtacagacgtcagccccgctctggcggggcccggacagaaccgggcatgctccgggcacctcccatcatgcggaccgtcccacaaacacacgttagcatgtttagaaagggagc

SEQ ID NO: 211471 - DNA, 122 bp, Homo sapiens
attcgacgacgcggactcctctgacaggtaggcggccgtacagtgccctggctctgggtacggctctctccttgaccgcccccttggggtgtggactcttgtttgcggtttagagggagact

SEQ ID NO: 211472 - DNA, 122 bp, Homo sapiens
agccagacccaggttctgggggccaacctgctggccctggcgcggcgggtgaggccctggcggtgctgacttcattcgggaggcggttgctggtgctgatacctgtgtatttggccggggca

SEQ ID NO: 211473 - DNA, 122 bp, Homo sapiens
aaaaaaaatccttccaacactgcatactctaacaaaggccacctatcggaaatgtggtctcggcattccactactgcaaccacatttttaaaaaaacagaaaatacccctctttacacattt

SEQ ID NO: 211474 - DNA, 122 bp, Homo sapiens
cctccaggtctgctccagttcctagatgctccctggcctccctactctgttccttcttcccgacactctgtctctcaggtgtcagttttgttctcagccccactgggacgctcctggatgct

SEQ ID NO: 211475 - DNA, 122 bp, Homo sapiens
ggggatggtgagcccctgaaagtcctcgaggtgggccacagaaggcaggttcccttgggccggagaacgccacctcctatcagtctgctctgtccccacctccatctcagccactaggcgcc

SEQ ID NO: 211476 - DNA, 122 bp, Homo sapiens
tttttacttcctccatcttcagcgaggagcagggttagcccgggacagctggtcaaaccccgagaaaccgatccggtggagcccgagcacatctcccccgccggccgggctcgcgcagacgc

SEQ ID NO: 211477 - DNA, 122 bp, Homo sapiens
ttccgaagctgtaaatcaggatgttacatataaatagtttccctataaaaacgcctttgccgttagctagtattataagacaatttttgctaaaatgaaaataaaacattttgttatacttt

SEQ ID NO: 211478 - DNA, 122 bp, Homo sapiens
cctgctaagcccctccagcctgcccctatccacacccgtcctccgcctctgcatctgacccggctcccacatcacaccgctgggggctcctacctcctgtgggcctcactgcctaagagtct

SEQ ID NO: 211479 - DNA, 122 bp, Homo sapiens
cagaggcttttctaggccagctctgggatggatgctagagatgcaaaggtgcactggccacgtcccttgcctcgaaagagttctcttcttagaggagggattcacacgtaattatgtggtca

SEQ ID NO: 211480 - DNA, 122 bp, Homo sapiens
ggcccatgtaaaatctaacttttgtaagcagccgggaaagttgatttgattggggatattcgtgtctctcacacggtagggtgcctggcacacagtggtgtgcgctcagcccatgcccagtg

SEQ ID NO: 211481 - DNA, 122 bp, Homo sapiens
gtaaaacacacttctgtagtgctggaatgagtcaggtagttcaaagtacattgacggagtcgaataacatatatccagtgagtcctgcaagacttcaggctcttccacttccatcagcatgc

SEQ ID NO: 211482 - DNA, 122 bp, Homo sapiens
agaaaaggccctggcgtccactcgggaaagaacgaggtcaggagtcggtcctgcacatcgcgtagagcgaagagacgacacctacctgaccatagacgctccccatccgcccagcaaccgtg

SEQ ID NO: 211483 - DNA, 122 bp, Homo sapiens
agggatagaagggagctgggtagtcaggggccgcggccatgctgacgtcagggcagccggcgctcagctccgctcgctgccacagtgcagagacctccctgagggagggggacagcctcgcg

SEQ ID NO: 211484 - DNA, 122 bp, Homo sapiens
tagtcacttcttgcagttttcctcggaaaagcctctctgaagtcaaggctgtggggaacacgggaaactcactctcgctgtcggtttccacaggccgccctttgctgatgagttcgcttctc

SEQ ID NO: 211485 - DNA, 122 bp, Homo sapiens
ctgctgtcactcacatcgcagtcggccaacctgggtgaagcagggcgggggtcagggtgccgggcgtgcctggcaccgcactgaccggcagagcaggcctgggcctggggggcgcgacggac

SEQ ID NO: 211486 - DNA, 122 bp, Homo sapiens
ccattctcttgccatgatttcggggatccaggcagaacccccactccggtggccttgctccgagcatgcatcagccctgagtgcctggccctgattggctgggcactggagcgtgaagagga

SEQ ID NO: 211487 - DNA, 122 bp, Homo sapiens
atttcatgctccaggaccctgagaaagtgctggtgtccccctcatgggtgagaagctcagcgggaaactgtccccgtgcctgcggcgaggagtggcccagcagccaagggtcagcccttcga

SEQ ID NO: 211488 - DNA, 122 bp, Homo sapiens
tgtgctaggtgggggttggggtaggggccagtgtagaatgcccctctgtggtgacacatccgggattgttcaaaagagtgtcgtcttcgtttcccgtggcgcggaggggctggggttgggga

SEQ ID NO: 211489 - DNA, 122 bp, Homo sapiens
ctcaagtgatctgcccacctcagcctcccaaagtgctgggattacaggtgtgagccaccacgcctggctctttgcttggttttcagtatatatgtatgtatggaatattatgataggacata

SEQ ID NO: 211490 - DNA, 122 bp, Homo sapiens
tgggctgctgtgtccgcatcacagttccgcatcctaacgagatgtttccttgcagcttgtcgtcacgcagctgggctatgacacacgtgtgaccatcctcgggcacgtgcagagaggaggga

SEQ ID NO: 211491 - DNA, 122 bp, Homo sapiens
agaacaacagtaaattgttcaaggtctatcagtggatgcagaacacccttaccaaatcagcggtagctcatttttcagaaggctgtggcatgtaccacccacaccctgctctaccaacaaaa

SEQ ID NO: 211492 - DNA, 122 bp, Homo sapiens
aggtgcagggacagaggcggggacaggcaacccctgcggttcgaggggtaggtggccacacgtcagtccctgggagggccaggcaggaggtgggcccagcggggctgggaaatgaggggcca

SEQ ID NO: 211493 - DNA, 122 bp, Homo sapiens
tgttctgaatgatgcctgagaagagtgttaatctggcgtgtgtcggggcaaggggaggcacggtcgagggaggtgttaaactgagttggctgacttgttttgtctgtcttcagcccagtagc

SEQ ID NO: 211494 - DNA, 122 bp, Homo sapiens
ttcccggattgagtgaggttcccgtgctcagccggtcttggaacgcaggcacgtctgaaccgggtggggtcccccgctgcgagggcgtgcgggttttgtgttcccctcggggcacgcaccgc

SEQ ID NO: 211495 - DNA, 122 bp, Homo sapiens
ggacttggagaggcagagcacgttcgactcttcactgaccgtctcgcggtacgagacgaccgggtcagatttctgcaaaaagaggttaagtcccactcttgcctggagaaagaggtgacctt

SEQ ID NO: 211496 - DNA, 122 bp, Homo sapiens
ggtgggaagcagaggtgggaggggtcgaggttggagcacctgtcgtctgcatgacgtggacggctggttctggttgtattttaaatgaaatctcatcccagcgtagacaccacgtctggaat

SEQ ID NO: 211497 - DNA, 122 bp, Homo sapiens
gttgaggcaactgagctgtgtttactgtccggggcgacaattgcttggagcgccagtccccggaggctaaggcggggggcgggggtgcggggagggagcagttgttgttgttgtttttcaaa

SEQ ID NO: 211498 - DNA, 122 bp, Homo sapiens
ccccctccgcggctaactcggctccgggacaaaggactttctgtgtcgccgctttatctccgttccctgtgataacttggtctttcttggaagcccaagtcccttccaggccaggggacttt

SEQ ID NO: 211499 - DNA, 122 bp, Homo sapiens
acaacctttactctttgtaaattaacattcctaaggagacaggacacacagacagactgacgttattctttctgtgactatgttttttcggagcatgaagtgggggatgccaagatttcagt

SEQ ID NO: 211500 - DNA, 122 bp, Homo sapiens
gctgccccgaggccgggccgcggggctctggggattgtctcgccgcagcctaaaggaagacgcagaattcagctcccctagcctcccggagcgctctagcgccccgggccccagcgggaggg

SEQ ID NO: 211501 - DNA, 122 bp, Homo sapiens
aacaaataggctgacagctgatcatccccaacagcaatggaagccacaaggcaagcaaaacgcacatattcaaagggcagtaaaatagcatctacatggaattacccaccttcaaaagtcat

SEQ ID NO: 211502 - DNA, 122 bp, Homo sapiens
ggattctttcagcagctcagcgtaagctgtcaggtccatcctgtgaggagacgggggagacgcttgctgccagacccgtgcagggcatgttcaccttccggtctgcattgctgaaatctgga

SEQ ID NO: 211503 - DNA, 122 bp, Homo sapiens
cctggggcttgcctctgtgggcgcctcagtgcgagtttgcgtatgtcgtgcgtgcttgcgcgcgacgccccttcgcctgcgctcccctctcacgtgactcggtgccgcgtgctcccaggggc

SEQ ID NO: 211504 - DNA, 122 bp, Homo sapiens
ccccacccccatcaattctcctccctcagctgacccctcttcccatgctagtccttgaatcgccagtccttcagcttctggctaggttctgtcaacaggagatgagaggactggaggctaag

SEQ ID NO: 211505 - DNA, 122 bp, Homo sapiens
ggaggtttgctgactcccccaggccaccttagttcctctcggagtctgtatgggtctgggcgagatgcaggcagcttatctgtttatggggctgcctcctccagtacacggagagctctttg

SEQ ID NO: 211506 - DNA, 122 bp, Homo sapiens
ctgcagccaaacttggcaggctgctgcgttcggagggcctttggcaggctggagggcagacgtgcagagagtgcttgcttgctgcctctggctggctgtgtgcccacctcactccgagtcac

SEQ ID NO: 211507 - DNA, 122 bp, Homo sapiens
cttttgttttcaaacccttcttggtctttttggtaagctcgctttccttgggttccacttcgtccgagggcttggaggctgtgtctttgctgcttgggccaggctcctcagaactgtattcc

SEQ ID NO: 211508 - DNA, 122 bp, Homo sapiens
actcttctcttcccaggggatgtgagcatggccaggtcccactcaccagtgacaagctcacggacctcgttgtcccgggcagccctcagcaggcgcaccagggcaggcacaccaccgcagtc

SEQ ID NO: 211509 - DNA, 122 bp, Homo sapiens
gagggctccacacagacccaccacacgggatctgcactcggagggctccatacagacccacggcacaggacctgcacttggagggtcccggaggactcaggaatccatgtgtttgtgaaaca

SEQ ID NO: 211510 - DNA, 122 bp, Homo sapiens
atcgccatcggggatgatctccactccgtccgccctgtcacagtggtgccagatttcagccgccagcttcggttcttacgagcgggctctgacgggctcatgcttggccacagcagctggtc

SEQ ID NO: 211511 - DNA, 122 bp, Homo sapiens
ggtctctcctatcggggaaccccaggtccctggagagacactgtttgacggttcacccctcgccctccgcagaggaaggagactcgcgcggggactgggagggcggcgggcggggagcgccc

SEQ ID NO: 211512 - DNA, 122 bp, Homo sapiens
acaagtttcaataggcttctgacctaaaatatccagtttttatgacaaattatctgagaacgtaatagctgaacttgaaattttagcaagaagaaagccgaggttcactttttccttgggtc

SEQ ID NO: 211513 - DNA, 122 bp, Homo sapiens
acctcgtgatccgccggcctcggcttcccaaagtgctgggattacaggcatgagtcacggcgcctggcctagtattaaattctttagggatgatcagcaggactcattttgtcctgatagta

SEQ ID NO: 211514 - DNA, 122 bp, Homo sapiens
ccccagacacactcatcatttcccgctgatatctggaagattgtctgtgagcctagatctcgttcctttttttttttttttttcttgagatagggtcttactcttttgcccaggctggagtg

SEQ ID NO: 211515 - DNA, 122 bp, Homo sapiens
cttgccgccggcgggaactctgggtctcgcggtttgggagcgctactcgccaggtggactcggagtccgcgagcgtcgtcggcaagcggccgcctttccacggtaaccgcgcgccggcgggg

SEQ ID NO: 211516 - DNA, 122 bp, Homo sapiens
gatggctccaagttgggagtctggaacctgctgagggagcttccgttcttgccttcccaccgcagagtataaccaagattcttcgagtctgtgaacttagttttggtctgaattgatcagga

SEQ ID NO: 211517 - DNA, 122 bp, Homo sapiens
ggcctggggaagggagggggcctgtggtaccaggaaaaacctgcgtgcggcaaccttgagcgttcgcggtcagggcggggaccggcaggtgcgagcgtgagcgcaactccacaagcccccgc

SEQ ID NO: 211518 - DNA, 122 bp, Homo sapiens
gcccgagccccccatcccttccagagtccgagaagaaatcctggcgcccctcgacctttccgggcccccgctatttacacacaccgaggtctcaccactcccgccctggcctctcgcctcgt

SEQ ID NO: 211519 - DNA, 122 bp, Homo sapiens
ccggtcccggggcctctaggccgggagggtgtttacgttctctacgggctcgggtggaaccgggaaggaacgcccgtgtcccgccctcagtgtgtaccgcgtgtctgccccctcccccggga

SEQ ID NO: 211520 - DNA, 122 bp, Homo sapiens
ccagcaagagcacagactgtcggtgacagccagcccttgatcttgcttcatcttctaacccgtgtcagccagcctggggcagcggcagggaagaaaaagggaagtggccaattctccaggtc

SEQ ID NO: 211521 - DNA, 122 bp, Homo sapiens
gacatcagctcggtgacaggtaggaggtgggtccgaggaggggtcgggtctgggagcctccgcccccaactcaaggcaggctacacaagatctgtctccgttggcgtcccggtacctagctt

SEQ ID NO: 211522 - DNA, 122 bp, Homo sapiens
tgcgttccttggtcacccggccggcctggaagtcagccatcagctgggcccgctgctcctcggggatcaggtccgactgcatcacctcccacagggacatggtggagccgccgtggctgccg

SEQ ID NO: 211523 - DNA, 122 bp, Homo sapiens
cagggagccctgcagcctgcccagcttcctgtgctctggcttcttcctcactggtttcagcgattccacactggagcccccagaggagtaatcagactggcttgtcagtctcctccttgtgg

SEQ ID NO: 211524 - DNA, 122 bp, Homo sapiens
gcccggggagcagaccttctgggaaatgtagtccagagcttgacagcctcaggctggctacgtgggagcgctgccgccaacgctggcagaagttgaattatacatcgctaatccccaaccat

SEQ ID NO: 211525 - DNA, 122 bp, Homo sapiens
cgggcgcgccgaggcgccgggtgggagcggaggtgcggatagggactctttaccggaagtcggaggggtcagacggaagcagaacgtgaggtggccccggggccgggagggacacgtgagga

SEQ ID NO: 211526 - DNA, 122 bp, Homo sapiens
gatttcctaagagcctcggatgctacatcatcaccagaaacctttaggcgcaaaacacaccgctgccggccagggctgcagcaccgacgcgctcggcaacagacgcgccccacctgggccaa

SEQ ID NO: 211527 - DNA, 122 bp, Homo sapiens
ccaaagtactgggattagaggcatgagtcaccacgctcagccagcttcctcttatcttatcgtctgtgccgtttttatttcatatgaagtgtacatttttctccatgtttatgttttaagat

SEQ ID NO: 211528 - DNA, 122 bp, Homo sapiens
cggatgtcgacgggtgccgctgagaaccataaaacttctggccctgctgccaggactttccgtgggtgggaacagggaggcaacccaccaagccaaggcgccaggctgctgtggggaagaaa

SEQ ID NO: 211529 - DNA, 122 bp, Homo sapiens
agctgcaatgttatagcaggtagcgggtctgacatgagcaggccaggagagggcttcctccgacacacactgggaatatcacgcgaccatcagtgatggtcaggtggttgtgaactgtctct

SEQ ID NO: 211530 - DNA, 122 bp, Homo sapiens
gcaggactctggtccttcctgtggttcgtgggcttctgcttcctcaccaatcagtggcagcgcacggcgccagggccggccacgacgcaggcgggggacgcggcgcgggccgccatcgcctt

SEQ ID NO: 211531 - DNA, 122 bp, Homo sapiens
agtctgtgtcgtggaatgtagactgctctgctgcataagaacataaggcatatttagggccgggcgcggtggctcatgcctgtcatcccagcactttcggaggctgaggtgggcggatcatt

SEQ ID NO: 211532 - DNA, 122 bp, Homo sapiens
tgaattaagaaattgctttgatcagggaaatgctcagttatagaacttagggaaacaaagcggtttcctaatacagttctggttctcacagtagaggactgctgatttctaatgtgactttt

SEQ ID NO: 211533 - DNA, 122 bp, Homo sapiens
cacctggtcgaagcagtatggtgtgttctggaagtccacatgcagcaaggttgcccagcccgggcagtggcaggggacctggcgggtagcgtgcagcccagcgttggtgccggtgcatcagg

SEQ ID NO: 211534 - DNA, 122 bp, Homo sapiens
tgttacaaatgcaaaacaatcctagagacacccagaaatgtgttttaacaaggtctcctccgaattctcacggttggataaccattgcattattatttttataaaaaaaaattttgagacag

SEQ ID NO: 211535 - DNA, 122 bp, Homo sapiens
tcacacgctccagcagtccagccttggcccggtccaaatttgcagcgaggcccgtgatggcgatgatgtcagactgcagctcaggtgccgggacatgtatgttcacctacgtgaagaggggg

SEQ ID NO: 211536 - DNA, 122 bp, Homo sapiens
ggccgctgctgctggcgctcctgtcgttgggtgagtgtgcgcggggctcagcggggcacacggggactggcgaggccctggagggctcggcggggcgcggctgcagcgcgcggcctggggcg

SEQ ID NO: 211537 - DNA, 122 bp, Homo sapiens
acttcagtgggactgggagttggtgcctgcggccctccggagatctgaactggcccctcacgttttgctgataactgtttatcctgtgcctgggcagggaaaggacccatgggtgtggaggc

SEQ ID NO: 211538 - DNA, 122 bp, Homo sapiens
tagagacccacggtggcctctccatggattccctaatgcggccgattaacattgtccatgcgttttgctatgtcctttagcttgtttagcctggtcttattgtcacagttcaagaagaactt

SEQ ID NO: 211539 - DNA, 122 bp, Homo sapiens
gagcgcagggttgccgttagttaccgaggaacgcggaagggtttctattgatgtcgatttcgtgcttacagcagttcttagcgaaggggaagctatggctaccgatagaggtcgatttcccc

SEQ ID NO: 211540 - DNA, 122 bp, Homo sapiens
gggctgcggtgggtgactgcctttcagtgcccggagcctgagggccgggggaaacgagcacgaaatcttcggaggtctctccgtctgacgttcccctacaaacacggcctcgcccggacccc

SEQ ID NO: 211541 - DNA, 122 bp, Homo sapiens
ttttcatggtgcctttaggacccaagttggtccgcagcacatcctgcagccctcgggcggcgcatatattgacagccaaagctgcccgggcccgcgccacctcagccttggagttgacggcc

SEQ ID NO: 211542 - DNA, 122 bp, Homo sapiens
gcaggagacagtggccagggcacgctcgcagcgaggtccacccagagcccaacgagggcccgaccctgccgcgctgggctaagggtgtacccagatcccacgcccacactccctaccgcggt

SEQ ID NO: 211543 - DNA, 122 bp, Homo sapiens
ccctgcagattacagctgtacctccaacctaataattcttcatcctaagatgaatctaaacgcttatcgaatctatttgtgtgttttgcttatacagcagtccagagtaatgagttccatag

SEQ ID NO: 211544 - DNA, 122 bp, Homo sapiens
ggccccgagtcccgcggcgtcctgcgcaagatgagcgacctgctggagctgatggtgaagcgcatggacgcactggccaggctggagaacagcagtgagctgcaccgggccggcggcgacct

SEQ ID NO: 211545 - DNA, 122 bp, Homo sapiens
gaccagatccagcatatcagatcctccctgaccacaccctcactgactagacccccatcacgaggcctcactgactagattcccgctgacaggcccacaatgaccaggactccactgatgag

SEQ ID NO: 211546 - DNA, 122 bp, Homo sapiens
cacggccctccccccacagcaaggcaggtgtgtctgggggcctcggcgggtgccggggcgcggggcggatggtgccccccgggcgcaggccagggaggcccgagcgccttccccacgccccg

SEQ ID NO: 211547 - DNA, 122 bp, Homo sapiens
gacatcccttaaaacattctcaagtaattagacccctggggctggtgcagtggctcatgccggtaatcccaaccctttgggaggctgaggagggaggagtgcttgagcccaagagttcaagt

SEQ ID NO: 211548 - DNA, 122 bp, Homo sapiens
gcccttgaccaaagagtaatcttccaggctttggggcagaaggctgtcatggcatagagacggagtagggggacaccaccaaaacaagatcacattatcatgatcacaaaacatgtaccagt

SEQ ID NO: 211549 - DNA, 122 bp, Homo sapiens
ccagttataaaatatagcaaaaaagctagctttaagggggtgtagctcagtggtagagcgcgtgcttagcatgcacgaggccctgggttcaatccccagcacctccatgtattatgctcatt

SEQ ID NO: 211550 - DNA, 122 bp, Homo sapiens
ccaggctgatgggctccaccgcctgcaccacggacggcgccagcagcagcaggcccagcacggcccggcccagcttcatgcccggacccgcgccaccctgcttgttctcgcgccgaccgcga

SEQ ID NO: 211551 - DNA, 122 bp, Homo sapiens
gacagagcgagactccgtcgtctcaaaaacaaaacaaaacaaaacaaaaaaacaatgttccggggaaaatgggtctctgagctgcaataagagaaatgtgagttagatccaagaaagtacat

SEQ ID NO: 211552 - DNA, 122 bp, Homo sapiens
ctagtgatccctgaaaagttccagcatattttgcgagtactcaacaccaacatcgatgggcggcggaaaatagcctttgccatcactgccattaaggtaagtgaagtagggtaaggaatagg

SEQ ID NO: 211553 - DNA, 122 bp, Homo sapiens
aaggcgtgcctccgggcgcctagggcgctcagctgtttcatccggcgttctttggaccgtcggttctgaaaccacacctgggacagaggagggggctgtgaacccaggatcaggagtgtcct

SEQ ID NO: 211554 - DNA, 122 bp, Homo sapiens
agcggggactctgggagtctggatgtcaagctggtcccgtctccacccgccttgagttctcggttctcgacagcgcccgtgtgatgatgatgctcacgctccggtgtgacacagacggcgcg

SEQ ID NO: 211555 - DNA, 122 bp, Homo sapiens
agcctcgcttaattatggcgggtgtccttgggacggacagtgatccttcactcgccagcccgcgctccagccctccgcccgccggcccgcccccctccccgggcccaatctgttttcaaagt

SEQ ID NO: 211556 - DNA, 122 bp, Homo sapiens
actcacggcacccaccgcaagagagaaactcaaggggggacaatgaccgcaggaccaaggcgcaggaagggcatctgaacgacctcggggctgtaaagaccattatcgttaggcaaccaggc

SEQ ID NO: 211557 - DNA, 122 bp, Homo sapiens
tcaaaaggtgaaatgccctcagcagccagaaggattatgatctgcagattctcctctccccgcccgttgaagatgggcttctttttttactgttctcttttggtcagtgcaaccccaaggta

SEQ ID NO: 211558 - DNA, 122 bp, Homo sapiens
tgcacactggggggctatttaggatggttgttgagggcatttagtcactcagcagacaaccggctcatctcaggtcctgcagaggtgttcactggtacctccctgtgcagggcgcttccttc

SEQ ID NO: 211559 - DNA, 122 bp, Homo sapiens
ggttcaggggcccggcgatcccggcagtggcgacgccaagccggccctgcacgcccttttcgaccgtggagatactgcccctgtcagtgtctgctccgggctacttcagtgtttgttcaatg

SEQ ID NO: 211560 - DNA, 122 bp, Homo sapiens
ggctcctcgccggtggacactgcggttcgttctcaccgggaggagataacgcggacagcgcggcagctccaccagtcacagcaagcaagaggctcagcctaacccggaggcgaatcgctgag

SEQ ID NO: 211561 - DNA, 122 bp, Homo sapiens
ctggtgccatggagcagggggcggtgctcgttggggaggctcctgctgcagaggagcccacggagggtcaggggaggctcaggcatggcgggctgcaggtcccgagccctgccctgcgggga

SEQ ID NO: 211562 - DNA, 122 bp, Homo sapiens
tctgcccccaccttatagccatagtgatatttctagaatacaggtctcagactatcctgccgcttccgtgccctcctgtttttgatctttcccttgttccatctgtctggtacacccaccac

SEQ ID NO: 211563 - DNA, 122 bp, Homo sapiens
ctggcttctgctgggattacaggcctgagccaccgcgccatgcctggaaattctcagcttcgaaatggtaaatgtgatcgctgtggtgctgatgcctgtaatcccagcactttcggaggccg

SEQ ID NO: 211564 - DNA, 122 bp, Homo sapiens
cctccaaaccaatagttccagcatctctgtatgcagaccttagaggacaggaagcgactgcgagccccacactctccagacacggaaactctaaatgcagagagaacgaagcatattttgtc

SEQ ID NO: 211565 - DNA, 122 bp, Homo sapiens
agctctaattggcctagctgttgtcacgtgctctccgatggcccaatcactaaggctggacgatgctgcactgtgaatggccaggcccgagtcatgtgcccggagagggcggggctgggccc

SEQ ID NO: 211566 - DNA, 122 bp, Homo sapiens
gatctttttcacaattgctcttaacaagcaggtagaccctgagaacatgagtagcttccccgcaggtaacttgagtgcatgagaacttttgctttacaaccatgccaatctcacctcagcag

SEQ ID NO: 211567 - DNA, 122 bp, Homo sapiens
ttaagatgcaccccagcacttttccagcacgcagtgcagtcttcttccccagaggcccctcggccattaggttctaagcccgagaagggtcctgtgcacctgccaggcggccctgaccctca

SEQ ID NO: 211568 - DNA, 122 bp, Homo sapiens
ctaacctttcccaatacacggttttgaatctgcttttggtacttactagctatgtgatctcggacaatttgcttatttctttgttttaaagattagtatgtcacctggctgtcgtgaattaa

SEQ ID NO: 211569 - DNA, 122 bp, Homo sapiens
cgccgccgccggaggggtggggttggaggctgcgagctcggttcacgttcacccgtggcccgcgggcattattgctggcagtgccacgaggcgaaagggcacggactgggcgccagaagact

SEQ ID NO: 211570 - DNA, 122 bp, Homo sapiens
ccaccagaaacaggctcagtgtcagcttcctctgcatcatccacaatgattttgttcttgcgcatgagagcctcaatggagctagcccacgtttcatgaattaacatgttggtgatgtggtc

SEQ ID NO: 211571 - DNA, 122 bp, Homo sapiens
cgctcctgcctcctgcctgcccgggcagcacctgggggcggggcagccccacccgcggcgcgcccgcattcctgcgccccgcgcccgccgccagccccagcccgcgcccccggcccgcgccc

SEQ ID NO: 211572 - DNA, 122 bp, Homo sapiens
gtctcctgggctgaaatggaagcgagaagtgatcgggaacattgtgctggcagttggatccggctgcaccgagcgccagccttgaaataagtaaaaccgatgcccttccgcccctaacctca

SEQ ID NO: 211573 - DNA, 122 bp, Homo sapiens
gtatttcacgttcaggtttccctgaagttaggattcagccttaagagagattctttctctcgtgacaaccagagagcagagtagtattatgtgacagtaagaagtagtaaaagccttctcag

SEQ ID NO: 211574 - DNA, 122 bp, Homo sapiens
aaacagccaattactacatgtgcagaataatggtggcaattgtcactttgctgtcccctgcgaagcaactctttagttctgtctcctctctcagaaatgaattgctccttctcctcctctag

SEQ ID NO: 211575 - DNA, 122 bp, Homo sapiens
aaaacctttctcttgtggagcaggattctaacgttagttggctagaccaaggcttcattccgacaggttgctgaaaactcaagttattacataaacactaactacaaagtgtacttcctcag

SEQ ID NO: 211576 - DNA, 122 bp, Homo sapiens
attttttgtaaaaatagagcagttaattattctcttaaaatcggtgaaaatagaaatgtacgttttttgatgaatcctggtgaacagggaaatttttggcacagttggtttgagatggtaga

SEQ ID NO: 211577 - DNA, 122 bp, Homo sapiens
gggaaactgagtccacgtccacattggatggtgggagagaacagaggcaaactgagtccacgtccacatttgatggtgggagacaacagagggaaactgagcccacatccacatttgagggt

SEQ ID NO: 211578 - DNA, 122 bp, Homo sapiens
tttcccccagacagtcctggtctgtgtgacactggggaggatcggacttgaagcagcgtacgttgtcagctgggcaaacccctgctttctctatacctagtggaggaagccacaaggtgata

SEQ ID NO: 211579 - DNA, 122 bp, Homo sapiens
cctcctgcactgcatggagcataattccatccattcaattttaggtgagtttctggaggtcgttggccagaggacattgataccctaaaattacagtgtccggatcagggcaaggaattctt

SEQ ID NO: 211580 - DNA, 122 bp, Homo sapiens
gtcggacggtgacagggtgggtggagagaggcggaacgggagcccgggaagcctgggggtcgccctgggagctccagacaccctgtccaggaccgggcagctgcagccctccccacgcaggt

SEQ ID NO: 211581 - DNA, 122 bp, Homo sapiens
cttggcggcgtagagcgccagggtgccaacttcgcttccaggcctgtgggttccgcccggcgcgtgctgctgtcagtcaacgccctcggcccgcccccgccgaagctccaccaatcgtagcc

SEQ ID NO: 211582 - DNA, 122 bp, Homo sapiens
cagtgctggcccgggacaaggccctcgggtcttcagctcaaggcccaacaggaaacagcacgggtcctcccttgcctttgtctacggggccttgaatactcggaccttcccaccctctccta

SEQ ID NO: 211583 - DNA, 122 bp, Homo sapiens
ggaatgtgggaaagcatgcatgtcgacctgggtggcgtaggacacctgcttccagatcagcgccaggagggcggaaggcccaggagcggggcggccacctcccccttcctgggtccccctgg

SEQ ID NO: 211584 - DNA, 122 bp, Homo sapiens
acttcccaccctgagacaagctaatcttatcagataggtagggtttctgtcattgtctcacggaaatcagttctaaatgaaactagagaaagatcattctatgagcagcatttggctttaag

SEQ ID NO: 211585 - DNA, 122 bp, Homo sapiens
agaggggtgggcggtgctggcagtgatgaacgactccaggggggcccgtggccccgagcgcgcattcattactcgactgacaggcgggtggcgggccgggcgggctgcgagtggacgtgccg

SEQ ID NO: 211586 - DNA, 122 bp, Homo sapiens
gggggtctctcctccccagctgtgccgaggctgcactcgctcatctggaaaggcttcagccgcgcaagggtttcacctgccgcggccttcccgctccggccgtgcgcatctacccccgcccc

SEQ ID NO: 211587 - DNA, 122 bp, Homo sapiens
tcccatccagcctgggaatcgcctgtcttggctacgtgaaaatgctgagtttaacgaaaacgcagtgagcaggtgtcatcaggtcagcgccgctcaaccgtgagagacaatcatggggaaga

SEQ ID NO: 211588 - DNA, 122 bp, Homo sapiens
cagagccgatctgtgtgcccattcagctgtgtcaccttctgctcaggcatgtcaccttcccgaggtgcccagagctggtctgtgtgcccgctcaggcgtgtcaccttctgctcaggcatgtc

SEQ ID NO: 211589 - DNA, 122 bp, Homo sapiens
cgcaccggcctcgaaaattgaccaatcggttgtgtagctccgctcttagtcccgcccccacgctgaaactgacacttcggatcgccgagtaacgctcaccagacgtcccggccctgcccctc

SEQ ID NO: 211590 - DNA, 122 bp, Homo sapiens
tggaggcggtggtggcagcagtaggagtgtgtagagtgcgggattggggcccaggccctgcggagggcgggggaagttgtcttcttttttttccggaggggccggtaaacctggtggctgaa

SEQ ID NO: 211591 - DNA, 122 bp, Homo sapiens
ctttgctccctcggtggggttttgtctcctggcttcccccaagtgcgaggcagttggtctcgcccagccgggtcctgggcgcggcggcggcagccgcgtcactggcgggcgggatccctccg

SEQ ID NO: 211592 - DNA, 122 bp, Homo sapiens
tgaagacagtaatacttctggagtttcttttagaagattcatggagtaatacatgtagagcgtcaagcataatatggtatatgggagacaagatttggctattttatgtcttgtaattattt

SEQ ID NO: 211593 - DNA, 122 bp, Homo sapiens
gagttgggcgagggaggtttggattgtaggctcggctcaggtaggagcgcatgcgtagagcggagaggcggagaggggcccacccaagtcaaggagctgactcgcgcctcccccacgccgcg

SEQ ID NO: 211594 - DNA, 122 bp, Homo sapiens
gggttccttctcgctaacctcttcgcccggaagtggcaacaagactgcaacatcccctcacgcctagtctgtaaagaactttgtttaacccggaggcggggccagccagctccgcccctcca

SEQ ID NO: 211595 - DNA, 122 bp, Homo sapiens
tgatccccaacttgtcccactacaaatgccaaaagttcaaaggcctcaagaaggcaaggccgcactcagtgctcaatggcgcccaggctggagtgcagtggcgtgatctcggctcgctacaa

SEQ ID NO: 211596 - DNA, 122 bp, Homo sapiens
gcacctgcgtgacgtgatcatcctgcccgagatggtgggcagcatggtgggcgtctacaacggcaagaccttcaaccaggtggagatcaagcccgagatgatcgaccactacctgggcgagt

SEQ ID NO: 211597 - DNA, 122 bp, Homo sapiens
agttacggaagaggcggccttgagagggtagtgtgccattggctcgatgtcctgcccctccgaaacctaagtcttcagcttccaatcaggactcagctttgggaagagcgccacgcggtggg

SEQ ID NO: 211598 - DNA, 122 bp, Homo sapiens
atcccccgtgatattgttcgtcatatccagggaggcgcaggatgacattccatagaatttcgtgacaggcgtacacgcagagtgtgatattgttcctaatatccaagaagggagaggatgat

SEQ ID NO: 211599 - DNA, 122 bp, Homo sapiens
taagcagcaggtggtgacctcactccttcctggcctaagcactccgtcccgcacccctggcggtggctttaaggaagtctctgaagctgagctcagggtggactctccctccctagtgaatg

SEQ ID NO: 211600 - DNA, 122 bp, Homo sapiens
tcggccggctgctggaagttgacgtaggcatagcccagggagcggcgggtgatcatatcgcggcagacccggatggacagcacaggccccgcggggctgaacttttcgtacagcatggcctc

SEQ ID NO: 211601 - DNA, 122 bp, Homo sapiens
cagactagctctggccctgctgctgtcgctgcaggttgtcgtcttcttcctggtggtcctcgggcaggggcggctcctccagccctgcagaggatgtctggagctcccgggtggacccggcg

SEQ ID NO: 211602 - DNA, 122 bp, Homo sapiens
ctggcccgggctcgggcccccccagccgcccgccccggccgcccgcccgccccgcccgcgcgcccgccgcccccggccccccgggtcccccctcggccgggcagcccccaatcccgcgccgc

SEQ ID NO: 211603 - DNA, 122 bp, Homo sapiens
atgacctgttcatagcagccgagagctcacccaggcgggggtgttgtgggtacaggccatcgaccctgtgacccctcaagagccagggactcggtttcccccgcaggcctccctcccctgtg

SEQ ID NO: 211604 - DNA, 122 bp, Homo sapiens
ccgcgaaccgggaggagcgcgggccccaccctaaagagggcgcagccgggagctggggagcgggtgccgcgctccagagattgtgtcgtgggcgccgtcctagtggcggggagcgcacctcc

SEQ ID NO: 211605 - DNA, 122 bp, Homo sapiens
cggacacgcctctttgcccgggcagaggcatgtacagcgcatgcccacaacggcggaggccgccgggttccctgacgtgccagtcaggccttctccttttccgcagaccgtgtgtttcttta

SEQ ID NO: 211606 - DNA, 122 bp, Homo sapiens
tccgtgacccgcagatccccctaggcctcccccacccagtccccgctccagcgcctagcacgcagcgggaactcagtcaacctcgcgtgccaaggaggtgcacaggcaaggccctgcgcagt

SEQ ID NO: 211607 - DNA, 122 bp, Homo sapiens
accccatcagcagccatgactgcggcagcggcggggcctggggaggccgagccggggttgcggcctcggcggagtggtggctactgctgctgcctctgctgccgctgctgccgctgcagctg

SEQ ID NO: 211608 - DNA, 122 bp, Homo sapiens
tcgtcatttcacacatcagcaaacgtgcctctggagggagtgctctcgcactgagcttggcgtggctggctccttgtcatccaggtctcggctccaatggcccctccccagagagtcctttc

SEQ ID NO: 211609 - DNA, 122 bp, Homo sapiens
tttccttgtgctgagcggctgagacccaagctcctgttccagttaatgtggggagcttgacgggacccccattggacaggtcaggctcacccccaccgatgggggacagtgatcacctcttg

SEQ ID NO: 211610 - DNA, 122 bp, Homo sapiens
cgcctcccccttccccaccacccagtgccgccgctgggcctctgtgtggattctgtggcacgggtgggatagtagcctgggccacccagaacgctggcctcacccttacccaagtttcagta

SEQ ID NO: 211611 - DNA, 122 bp, Homo sapiens
ttaaacaaacagaacagagaatgagtcatactccaggtaattagagaaggtgggtctccacgataaagttgggatgcttttcagagaacagacaccacgccagacagtcctgttcctggcct

SEQ ID NO: 211612 - DNA, 122 bp, Homo sapiens
ggcaggagtcaatgaggcatctcccagcccaggtgtcaggtgtccggtgcttgtaggacacgaccccaccatggaggccagaagcctgttcttgctctcagaggactcccacccccgagcac

SEQ ID NO: 211613 - DNA, 122 bp, Homo sapiens
gcgtgcaccaccacatccaactcatttttccatctactttttgtagacatggagactcgccgtgttgcccaggctggttttgaactcctgggctcaggcagtcccaccacttcagcctctgg

SEQ ID NO: 211614 - DNA, 122 bp, Homo sapiens
aggggctttgtgttggctgccctgccccgggctgaccccagacgctcgccttttgtgctacgctgctctcgcccctcgggaacctttgtcccattgagccccgccattgcctggggcccctt

SEQ ID NO: 211615 - DNA, 122 bp, Homo sapiens
ctgtggtggatgggtactggtttagggacccagaacccaggcgtgcaggcctcccagccccggcccaccagccttgacccgtggggcttcacgggtgcctggagctcagcgttacagagcgt

SEQ ID NO: 211616 - DNA, 122 bp, Homo sapiens
gtctctgagtctcctcaggtgccctttcatcactcttcctgctacttggcatcaaccagccgggatgagacactgaaagggatgccaggtctttgttatgttgcatccaaatgctagctagc

SEQ ID NO: 211617 - DNA, 122 bp, Homo sapiens
acttcctggtgactctgggtaaagtcattgttgctggaagagaagggaaatgcatgtttccggtgagttttgccttatgtggctaaaatgtgaggaacttggcaaatttcccagtgcaagaa

SEQ ID NO: 211618 - DNA, 122 bp, Homo sapiens
gtgacgccagagagtgcgcgtcagcagtttattagagagctctgtagccagcctcttctgcgcacccacctgctgcatcttagttcagtcggctcttagagtagtaaccgccagaaaggagt

SEQ ID NO: 211619 - DNA, 122 bp, Homo sapiens
catcctgcccacgttggacgcccagagacccttttctggttttgattaaaccaggggatgcgtagacagcacaaagtaagtgctcaataaacggactagcacaaagtaagtgctcaataaag

SEQ ID NO: 211620 - DNA, 122 bp, Homo sapiens
gtgcgttactttttctcttgtagggcttcccccaggactttgctcctccttgggcattttcgttgggaggctgcctctgagaaattgggggacttggagccaaatggcgattcctctgtcta

SEQ ID NO: 211621 - DNA, 122 bp, Homo sapiens
ggctttcctgagacccaggaccagcacagagccacacacggttgtggggaacaacggaagcgatgggaggggaccaagataaaagcacaagtgacagggttggggctggcaacggccgcacc

SEQ ID NO: 211622 - DNA, 122 bp, Homo sapiens
tcgctgagcacaggctggcacggaggccagggagggctgccccctgggtgttgctaagcacgccgccccaggagggaaccggctctggaagctgctctcacagcagggtcagctgggatgct

SEQ ID NO: 211623 - DNA, 122 bp, Homo sapiens
ggcctctgatggggacagctgataaaggagctgccaccccctcctccagctccccacccccgtgccccactggaagacaggcttgatttccacatcctgcctagcacgggcttggtgaagct

SEQ ID NO: 211624 - DNA, 122 bp, Homo sapiens
tcagccaactttatcttggatctctgctctctttatcttttctctagagctgggccagggcgctaactggaagcttggggttaaatggtgcaggaacgtagaggcggaggagtccctgggat

SEQ ID NO: 211625 - DNA, 122 bp, Homo sapiens
gccccgtttaaccgtcgcgggccctgatctcgcagtctattggcaggcggtgggccgcttcgcctctctcattggctaagaagaacacaacaataccctaggcattttgggaaaagtgtcac

SEQ ID NO: 211626 - DNA, 122 bp, Homo sapiens
ttcctggctccaagctgccacttgggggagcccacgcgggtgccgatcctcgacgttcgccgggcttagctgagcctcgcaaaggcctgaagattgcccgtctccctgcagccgcgcagtgg

SEQ ID NO: 211627 - DNA, 122 bp, Homo sapiens
acggcgggcagaggtggtgaagtcctcgcaaaagctggaaacatgaccccgggctcctgacgcatgggccattgtcctttgcactccaccgcgccaccttcctgtcaggtgtctggtaaaca

SEQ ID NO: 211628 - DNA, 122 bp, Homo sapiens
acttagcggtgcctgcaggataattttcaaactctttgttaggttctgggaatatagaaacgaatacgtgattattaggctctcagaaaaggggagccgcctccggacttggaaaagcatta

SEQ ID NO: 211629 - DNA, 122 bp, Homo sapiens
ctccgggctccgctgagctgggctgggccaggtttggactctgtcgggattcagtccaagcgggggcgaccttggcctctgcctcctgcttgtcccgacgcattcccttggcgccagttccc

SEQ ID NO: 211630 - DNA, 122 bp, Homo sapiens
cgtgggggactggctggactccatccgcatgggccggtaccgagaccacttcgctgcgggcggatactcctctctgggcatggtgctacgcatgaacgcccagtgagtgatgggtggggctg

SEQ ID NO: 211631 - DNA, 122 bp, Homo sapiens
gggaagcgggtggggtgtcccggagcggtgctgaggcgctgcaggcccggcttctggctgcgggggagctgtaccctgaagcctcgccggaactcgcgtctggggccagcagggggcactag

SEQ ID NO: 211632 - DNA, 122 bp, Homo sapiens
gacaccgacgagcgcttttcatctcgtcccagttactttgaaaccgaaagcgcctgctggcgtccggccggtccccgaccggcggggagggcgcgaggcggcggctgggccgggggaggcgg

SEQ ID NO: 211633 - DNA, 122 bp, Homo sapiens
gtttgttattgtttcttgcaaggcttttccactgaggttcaggacttttccggaagttaccgtgctgtcaaatccctccgccccctgcaggaaacggaatccttccgcagctgcacgacgcc

SEQ ID NO: 211634 - DNA, 122 bp, Homo sapiens
agatcatgtagcccaggaacgccttcatctccgtcagcgtcacctccacccaggctccgtcgctcccaaaccgctcctggaacttcttggcatacatgtttgtctgcaccaccatgttcttg

SEQ ID NO: 211635 - DNA, 122 bp, Homo sapiens
agagttctggggggagggtctcttctccccctcccaccagaaccttcaactgtcaagcaccgagctagccaccagcatgctgtactccccaggtaggcactcatggggccttgccccactcc

SEQ ID NO: 211636 - DNA, 122 bp, Homo sapiens
gagggggcgcgcggaggggagcccccggggcctacagagggagctctgaagcctgggcagcgaggcgctcccgccctgggcccggggcaatgcggaccttggcgcaccgggcgagggctccg

SEQ ID NO: 211637 - DNA, 122 bp, Homo sapiens
ctactgcagggggcagaacatgggcacgaatacgtaagattcagccgggcagccctccagcgtcaacgaagacattcttagaaggaaagtactttgtttgggacggaaacagcctattaatt

SEQ ID NO: 211638 - DNA, 122 bp, Homo sapiens
cttgcattaatggaaaagatgatcttactcattgggattggaaaaaaaaaattcaaaaagcgtcaagaatgaaaaagccgcatatggcaatagactaatagacacttttggttattattgca

SEQ ID NO: 211639 - DNA, 122 bp, Homo sapiens
ctcgaactcctgaccttgtgatccacccaccttggcctcccaaagtgctgggattacaggcgtgagccaccgcgcccggactatatatgttttaaaaatcactaaacaatcccacatagtgt

SEQ ID NO: 211640 - DNA, 122 bp, Homo sapiens
tacctagtaaccttaggagcagtaccacgtgtcaaattgcttcacacttttgtcatatgacgtcacaccagtcaatccaggaactccctgcccttccctcccctgacctctggggtctatca

SEQ ID NO: 211641 - DNA, 122 bp, Homo sapiens
acttaagtcaccaggaagccgattagccagaggcccatggggtacaggcaacagcgggtccgaccaggagccccagttagagctctttccactcctaagatcacagctgcactgatcagtaa

SEQ ID NO: 211642 - DNA, 122 bp, Homo sapiens
agtcgtgatgcggtactgggtccacttctccaaggcctccagcaggatctgagtggtggtcggggggatgccgttcacctccttgggttccgggtcctctgagcccagcggtcggtagcgga

SEQ ID NO: 211643 - DNA, 122 bp, Homo sapiens
tggagccaagcaggctatggctaccaatcagcgctcagaaaagacgcatgcgtcttcgaacgaacgcgacgtacggttaactttgacccaaagacaacctcttctctcccgcttctctcgct

SEQ ID NO: 211644 - DNA, 122 bp, Homo sapiens
aagtcttggctctccaaaaccagggcctggtcgagagttttattggacaccgagttcctgcgaatatctcacttttcacacaggcactgccaatccctaccctccagtacccttcctcagcc

SEQ ID NO: 211645 - DNA, 122 bp, Homo sapiens
ggccgagtgtttgcgaacccgggctgactatgtgaaagaggggtggtcccacctctgcaacgcagataaagacagaggatccagatctggcctacccagaggccgtctagttgaaatggcaa

SEQ ID NO: 211646 - DNA, 122 bp, Homo sapiens
cgccgcctgtaccctccacaccacccggcctctcggtctcgctcccctttcccagcaccgcgtgccgtgggcctcttctcaccgtccggccgaaattcgaactccagaaactcgtgcccaaa

SEQ ID NO: 211647 - DNA, 122 bp, Homo sapiens
gggtcattcctgactgtgagatggttggggggcaggggttgtagagtctgtgggaggcctcggctgggcctcagagaggggtatctcttctgcagaaaacccagccacccttaccagatgcg

SEQ ID NO: 211648 - DNA, 122 bp, Homo sapiens
ttggattaaaaaggttaacttttgaataaaaaagctaggcatgtgtgatgcgcactaacacgtgccattccttcttcagaatgctgtgtcctctgaagaaaccaatgactttaaacaagagg

SEQ ID NO: 211649 - DNA, 122 bp, Homo sapiens
atggggctttgtggtgagaggaacctctgagaagcctcgtgcggcttgagtttagagtcacgccctgcccagcgacattctcccgcgcacgggagaacctgcacttccggtctccaaccctc

SEQ ID NO: 211650 - DNA, 122 bp, Homo sapiens
atcattctgggctccttactcttgttgcatcctttattacactttaaggatgcctggattcgatttacttgagcgcatatatggcttaattttgtatttctggtaatcatttattatatttc

SEQ ID NO: 211651 - DNA, 122 bp, Homo sapiens
acaaagtgagcacagtgtgaccgtaatgtcccactctggcgttcatggagctgcgccaggcgccgtgtgcgattctggggaggaagaggtggtaggagctgagctgagatcggaggaggctg

SEQ ID NO: 211652 - DNA, 122 bp, Homo sapiens
ggctggagattagcactctgcctctcctctccatcgcttttagacttctcatcctcccctcggtgcttttagtccattcagcagaagcggatcgaagcaggaggctccccgcgccgcattag

SEQ ID NO: 211653 - DNA, 122 bp, Homo sapiens
taggagagcgtggaagtgagtcccgaagagactgagttcaggacgtgaagagaaagaggccgagaaaaacgacccaccagcgatccttcttgaggtcgacaccgagcaggggtggagtcgga

SEQ ID NO: 211654 - DNA, 122 bp, Homo sapiens
atgcagctggtcagccgcctgacgagggaagcttggccctttggagaagtggccgtgcctcgtggtgagctgctgacagagctggaatttgaacccggggctctggcccggagtccactccg

SEQ ID NO: 211655 - DNA, 122 bp, Homo sapiens
gacgatggggtgacctgagggcacagaaggcgccacaattacctgagtcgggcgcctcggcgcagccgctgccatcggactacttggggaagcacggcccgggagcagtggtcgccgtcacg

SEQ ID NO: 211656 - DNA, 122 bp, Homo sapiens
gccggcgctacagcccctaagcaaccggccggaagtcggccccacctcctcctgatgtcacggaaatgaagggcttcgcagaggatgtcccgcccgctcccttcagacgggcgtagctggca

SEQ ID NO: 211657 - DNA, 122 bp, Homo sapiens
gggaccacaaatgctgcgctcttggcctggcagcgggacagcccatgcgtgactaaggaacgccgaggaggcacgaggctggtgcagagggctctgcaggggccgggggaggagagcctgga

SEQ ID NO: 211658 - DNA, 122 bp, Homo sapiens
caggtgtctgcccccggggagcccctgaatcactctgcttgggctgacaggtgtggctgacggggccgtccatggtacccggcgcagtgttgatggagacgcagcgaggagctgtgattgtc

SEQ ID NO: 211659 - DNA, 122 bp, Homo sapiens
gaagtgaggggagatactgggtgaggcgtaggagctactgtgcacccggcgtgagtcacccgcacacccccgccccgtacaggcgtgtctctctgtgacccgagtttggccaacaggcattt

SEQ ID NO: 211660 - DNA, 122 bp, Homo sapiens
tcatttctgagtgcttttttgcccacccttgaggaaaaatagcgaagagtgaaaaacggacgcacataaccgtaatacaaggtggtgtgcagtgagaaggacagctacggagagggtgcaca

SEQ ID NO: 211661 - DNA, 122 bp, Homo sapiens
caggggcggggtcgggggcctggggcggggtcggggaccggggccaggagcgggggagctcggctgggagctacggctgccccttcgcggggggcaaggggctgttcggaagaaggtggggg

SEQ ID NO: 211662 - DNA, 122 bp, Homo sapiens
gtgcttattgaaatggtctcatcacagtctctgagtaatagcccctacccaaagcattcacgctgtctgtctatgaaattctttaaaaggtctatggctgagaaaaccctacagcccagtcg

SEQ ID NO: 211663 - DNA, 122 bp, Homo sapiens
ggagagagggacggggagacacacaggctgagcggtcgggcggcggggggcgggggaccgcgggcggaatcgcccggtgccagcggccccggcagccccccgacttacccgatcgcagctcc

SEQ ID NO: 211664 - DNA, 122 bp, Homo sapiens
cgcccgaggctcgtgcgtgtgagcacgcgcgccggagacggttagaaatggcggttggggcggagcagggggctggcgcgggaagcggggctgtctggctcggttacgcccccacctcgcca

SEQ ID NO: 211665 - DNA, 122 bp, Homo sapiens
gagcgctgactggggagggaggcggggagcaagggaggcgcgtcggtctgggaagtcgcgcgcactcgctgctcctgggaccgacgtttaactcttgccaagtctcgtcgcagccgccgcgg

SEQ ID NO: 211666 - DNA, 122 bp, Homo sapiens
tctcgcgagacgcagtaaggcaccggctcgaactggggcgggccactgccaggaaagcaacgcccctgaatgcttatgccggtggttggtagaggaaatggaattccccagactggtaagag

SEQ ID NO: 211667 - DNA, 122 bp, Homo sapiens
gcctgaggcaggcgaacgccttgccgggggacacggctgagggtgggccagttgggcacccgggcaggtgtgtgggactagggaggcgcccggcggcgggcgtgggctccctgggagctggc

SEQ ID NO: 211668 - DNA, 122 bp, Homo sapiens
tcgcagcgcgaggtgccaagtcagtttcagctgatgaaacaattcaacagctctctgctccgggtgcgcgagggctacgggcagctgaccgtcggggacaccggcctggactgcgaggcgct

SEQ ID NO: 211669 - DNA, 122 bp, Homo sapiens
acctcaggctctccaggttgccctctgcctcaccagtgcccagctggcttctccacgctgcggcttgtggcgcagctcacacttctgatttatgtgcaggcctggctgccatggctcccagc

SEQ ID NO: 211670 - DNA, 122 bp, Homo sapiens
gggctttcaccatattggccaggctggtctagaactcctggcctcaagtgatctgcaccccgactcagcctccgaaagtgctgggattacgggcctgagccactgcacctggcctcttgttt

SEQ ID NO: 211671 - DNA, 122 bp, Homo sapiens
tttccgtctggcgccgatccggctgcgtcacgccggccgaacgacaccccgctgagtcgccgccgcagggaaggtaccttcggccccaacgggaaaagccaatttccagtaattcgcgcccg

SEQ ID NO: 211672 - DNA, 122 bp, Homo sapiens
taggaagttctaaaaacgcttatacatgaatgaatttaatcccacatttacaggcaaggccgaatgagggacatgatgacatggatttattggaggtggtggcatggtgatgatgatgatgg

SEQ ID NO: 211673 - DNA, 122 bp, Homo sapiens
actccttccaagttcattagcaaaggtgctacctcggcctgcgggaacacagcggatgcgcggccccagtcagcgcacggtgaggggcgttaacaccagacctccccctccagggcgagcct

SEQ ID NO: 211674 - DNA, 122 bp, Homo sapiens
cagttgccggcggagttttctcgctggtgggcggacccgagcggaggcccggaggacagccgggagcgcaggctcgacgccaggtgcccggctggaccgcgagggacccgggcgtcccctcg

SEQ ID NO: 211675 - DNA, 122 bp, Homo sapiens
cgtcctgaagctggacggggttctggccagagagcgccagggccgaaggcccaggaaggacgcctgggcaggcgctgtccaagcggtcgagcgacggctgcaagcgcctccccctccctctc

SEQ ID NO: 211676 - DNA, 122 bp, Homo sapiens
cccttttcctgcagatgatgggagaggaatataagataaagctataagatgtagcttggtcgagaactaccttgtagtgacagggtcatgtgcacataatttgccttttccaaagtgagacg

SEQ ID NO: 211677 - DNA, 122 bp, Homo sapiens
ctcctgggattcccaggagttggcgtccacctgaggcgcactaggggcgggcgggtacaccgggaggattctgcttggcagcttctccagcctgcttgtctccttagcaggttgcatgcacg

SEQ ID NO: 211678 - DNA, 122 bp, Homo sapiens
cctcttgctcactgaccttcttttatgctggcctttggttcagaatggcacatcattcctcgtttttgtcttcagtaaatgagacaagattctgagaagacagccaccgtaatgttgctgcc

SEQ ID NO: 211679 - DNA, 122 bp, Homo sapiens
agcagagcagactgaggcggatagccgcctccacggcccgggagatagagtgcttttggtcgaatattgaacaggcgagtgctgccgttgtcatggggtcgtaagaatcagtctgtcggagc

SEQ ID NO: 211680 - DNA, 122 bp, Homo sapiens
cccctaggcttggctgctgccaggggttctgcgctggccacctggccgcatccctgccctcgaggtgaggaaacactgcaccccggggaccccagggtttcctgcccgcacagcctcttccc

SEQ ID NO: 211681 - DNA, 122 bp, Homo sapiens
cagaaattcctgcctttggggtggggacaggcggagtgaggctgctcgggtcacactctccgctcctctagcttgcagccctgctctctcctttctgggggaggccgaagaggagttgtggg

SEQ ID NO: 211682 - DNA, 122 bp, Homo sapiens
cagggcgggctttcggggatgcggtctggattctggaggaggcctcggcgcgcagctgggcgagtactaactgtttgcactctcatcagacctgcctcggtcatgggagaagttgaagactt

SEQ ID NO: 211683 - DNA, 122 bp, Homo sapiens
gcgggcacctgcgggtggggcggggcctgaattagcgggagcgcccgggaggggcggggccggggcctgcgtgagcgggtcggggagggggcggagcctgcggggggcggggcctgcgtgaa

SEQ ID NO: 211684 - DNA, 122 bp, Homo sapiens
atcagaaaatgatgcctcttccagggggtcatagccccacattagacaaaacagtgtggtcggcaagcagtgtctttgtgaaaattaaaagaaggtaccagaagcacatagatatagccccc

SEQ ID NO: 211685 - DNA, 122 bp, Homo sapiens
tggttgtggaggccctgagggtggagtgggagcagtcaggtggctgtgaccacagccccacggcccttcctggctggcccagcacccagcccacctgcagggagattccatagatgacgtcc

SEQ ID NO: 211686 - DNA, 122 bp, Homo sapiens
gaatgaaaggaaagccatcggtagacagccagtaagtacatcatgataacaactgctgtacgagcacacacacaggcacactcacacccacgccaggacagtcgggaggaggaaatggcact

SEQ ID NO: 211687 - DNA, 122 bp, Homo sapiens
tcttcaggccacatagctgcttcttttcatgatgtgtagattagaaaagtcagtgtgccccggggcccttgattgcaccttggtttccctaacaaggatatgggatccctgctgacatttca

SEQ ID NO: 211688 - DNA, 122 bp, Homo sapiens
gagtttaaatatcagcaattttgtatatggaaacatattagcttcatatttaattggggtcgtggtgcactgtgaagtacagcacttatgtgcacagacttgggtatgatgtcccacagaca

SEQ ID NO: 211689 - DNA, 122 bp, Homo sapiens
ttagaagggactcagaacctagggccaagacttaggtaatgcagcagcacacttccctcacgtggcctttgctccttctttctggacactgtgctctctgtggaggaatactttgattacct

SEQ ID NO: 211690 - DNA, 122 bp, Homo sapiens
gccaggccctgcccctcaggacgcaagatcttcccactctcctagccctacccctggggccgaaggtggcagctctcatctcaagaaggaatcttgtgtccttctgaacattgagcagatct

SEQ ID NO: 211691 - DNA, 122 bp, Homo sapiens
gtggtcgaccatcattggtcggtggtgaggccaatagaaatcggccatctgggaacccagcgttccgaggcgcagcctaacatagtgaaccgacgaaggtccaatggaaaaagacggccatg

SEQ ID NO: 211692 - DNA, 122 bp, Homo sapiens
gcggcatgggcaacaaggtgaaacaccatctctactaagatacaaaaaacattagctaggcgtggcggcatgcacctgtaatcccaactatttgggaggctgaggcaggagaagcgcctgaa

SEQ ID NO: 211693 - DNA, 122 bp, Homo sapiens
ctggactctggactctgaaacgagcccaactggaaagcagcatcactgccaagacacatccggagtccacacacaaatacaggaggctgccggcgaaactctcccgcagccacaagagtccc

SEQ ID NO: 211694 - DNA, 122 bp, Homo sapiens
aatgtgcctggatgaggcagtaatagaattagagcctccacaagctggactcaggactgtcgtgaacattctctggttttgcatgaaacatgtgagagagagccttgggattcatctcttag

SEQ ID NO: 211695 - DNA, 122 bp, Homo sapiens
ttccccgcccttcaggcccccactggtcgcgtccggcgctggaggagcccagtcagccggcgcctgccgggttagcacgtggactccgaggggccaactatcagctttccctgacaaaatgc

SEQ ID NO: 211696 - DNA, 122 bp, Homo sapiens
gctgctggctgctgctgcctcgcgcgctggggttccatggaggaactgggcctgccgccccggcctcacctgctgcccgcatgctggggtcccatggaggaaccaggcctggcgccccggcc

SEQ ID NO: 211697 - DNA, 122 bp, Homo sapiens
tgaatgcccgccgcacgcccagggctttgcacacggtgggcacacggtgccttttgagcgcgggagagggttgtgagctgtttgtgtgcggagcctgtgtctcactcatctttgcagcccct

SEQ ID NO: 211698 - DNA, 122 bp, Homo sapiens
cgggcagggctcactcccggcctagaaactggagcccgccacccccgccccgcaggcgaccgcagggatcccattcttggagcccgagctgccatgttgccttcgcggaggccgccagtcac

SEQ ID NO: 211699 - DNA, 122 bp, Homo sapiens
accatctccttccattacctctctctgccttccaacctgaagacgcccatcacgctcttccgcatggccacagcctctgcccccggccgagctgggcccaacagcctgcggtttgggatcgt

SEQ ID NO: 211700 - DNA, 122 bp, Homo sapiens
agaacagtgtccttggggccagaagaggctgtcccacaagggagaaagccactatctggacgtgtccttgtgcctaacaaaaagccatttgctatgccaagagaacagagcatgcaaactca

SEQ ID NO: 211701 - DNA, 122 bp, Homo sapiens
acttggcagactttttgcttggcagtgaagatacaaagtcaagaaaagacagccatcgcccgtgaggagcctacattccagtggaggaaccaaaactaaaaggcggaggaaagctctgggtg

SEQ ID NO: 211702 - DNA, 122 bp, Homo sapiens
ttcaacacaaatgctggcccctgcagacgtctgactaacagaaagtcacatcagcagagtcgccaaggagcaatccctgtcttccctccccatcttcctggggaaatacattggtatgtgtc

SEQ ID NO: 211703 - DNA, 122 bp, Homo sapiens
taggagggggtgtgggagcccgtggagcacaggtgaactgaggccgccttcccggggcgccgctggccagccccaaagggttactttggccttggctgtgggccgaatgcgaaggtggggag

SEQ ID NO: 211704 - DNA, 122 bp, Homo sapiens
ccagcagcaggttcttaggagggcggccgcgcttacgtttgagaataatgggcatctcaccgggtgggaagaccactaccacgttccgcccattgttcttcatcttcagcagcggggtgggc

SEQ ID NO: 211705 - DNA, 122 bp, Homo sapiens
gaagctaagcgggcatcagtttgagaaccactacttcaagatttcctacatcccggatgacgaggtgagctgcccttcgccccctcagcgagcccagcgtggggaccactcttcctgggagc

SEQ ID NO: 211706 - DNA, 122 bp, Homo sapiens
gctggtccccctgctggtccccctgctgggctccaaagccgaagaacccgggctgagctgcgcgggatgctgagctgcgcgggatgctgagctgcggggggatgctgagctgcgggggatgc

SEQ ID NO: 211707 - DNA, 122 bp, Homo sapiens
aggtgggagtctgcactcttcaaggggcctgggctgctgctcacgggtattaaagaactccgcgttgttcatggctgaggcgatgcattaggaagatcctggacctagagaacaagtccccc

SEQ ID NO: 211708 - DNA, 122 bp, Homo sapiens
aagggaggaaacccatgggggagtccgggagaggtaacagagcttcgactgtcctgtccccgtggtgtctgggctgtgctaccttccgggcaccctgtgtgactgcacggggagttctgcca

SEQ ID NO: 211709 - DNA, 122 bp, Homo sapiens
gggccttgggaaactctgttgcctccccagtgccctcccatccccagctgggagttccctcggcctaaatcctccaccagctgggctggagctgggattagcacagggattgggcctggggc

SEQ ID NO: 211710 - DNA, 122 bp, Homo sapiens
tttttaggtgcctcattcgaccagtcccagtggtattttgtcttttagccttggcactgccgttatactttctcttgcgcttggcggggtagccacatttgccacaggtcaacttctgaagg

SEQ ID NO: 211711 - DNA, 122 bp, Homo sapiens
gccgccttgcgcccgctcccttccttccctccccgcccaccacctaggcgagcgcagtcgcggctccggagccgaaggactacccgcccggaagcctggacaccgcctctgccgccgcgcgc

SEQ ID NO: 211712 - DNA, 122 bp, Homo sapiens
ctctgtgatcggcaggtgcagggatggttttggggctgaagacgtgggatcagaggtggccggcgagaaaggcaggatgatctctgccaaccgcagcccagaatgtgccccagaatcgagta

SEQ ID NO: 211713 - DNA, 122 bp, Homo sapiens
tcctcccaggctcaaacaatactttcacctcccagcctctctagtagctgggactacaggcgtgtgctaccacgcccggctagttttctttctttttttttttaattaagaggagagtctcg

SEQ ID NO: 211714 - DNA, 122 bp, Homo sapiens
gagagggaaaggaggaacatctacccggctaagagacgccgccagagtccctaaagctggcgggggacggaggccggggtcccggatcttcagagcgcccgcagccgggcttctgggctcct

SEQ ID NO: 211715 - DNA, 122 bp, Homo sapiens
aggaagtgctacttcctgggcatcgaccgggacatcgacaccctcatcctgaaaggtgagcggcgggcgcaccccgcgtccccggcgcccgcgcgtggagcgcagcccgcggcttcccaggg

SEQ ID NO: 211716 - DNA, 122 bp, Homo sapiens
tgactctgcggcagctccaagtcccgttgccgggcaggacttcggtgctccggaagggtgcggggcagcaacctggccagggcagcgcctcggtttccttccaattcattctcgattcccag

SEQ ID NO: 211717 - DNA, 122 bp, Homo sapiens
cacccctgagggttttgggggaccagcccccgtatccgggtgctgcgggatcccctgaggcgagcgcgcaccgctgtgctcgggctccggctttgtggggacccggccttcccggcccgcac

SEQ ID NO: 211718 - DNA, 122 bp, Homo sapiens
ttttgtatttctcggctgtccatggctcgcagcatgccctgcgatgcggggcaggcctgtcgtgggtcccttggtgtttctgtacaggagagagtcacactaatgagtggcagtattttata

SEQ ID NO: 211719 - DNA, 122 bp, Homo sapiens
aatgatcgctgatacaaaacatgccaaggacaggggcgctgagggtggagggagagagggcgctttaaaaaagggaaccatttcatccgttgttacgaaggaccaaccttgctgtacaggat

SEQ ID NO: 211720 - DNA, 122 bp, Homo sapiens
ggagccgggagctgcgtgatccagccgagatgtgctctgactgaggccctgcagggcatacgggtcatggaaggggtgctctgcccccggccagggctccccctcctacaggaagccggggg

SEQ ID NO: 211721 - DNA, 122 bp, Homo sapiens
ctcaggctgcccttgcacctccctgctcagacccgtcacgtgtgagcttcctcacagaggcggccccattgctgaggaagaaccatgagcatctccaccctggaacagttgcagaatcctcc

SEQ ID NO: 211722 - DNA, 122 bp, Homo sapiens
acgtctccagggcaatgtgggcaatctcagcctccgtcttccccaggaacatctgacaggcggccgccaacatctccttgttctgcccctggatttttacctgtagccagagtaggggtagg

SEQ ID NO: 211723 - DNA, 122 bp, Homo sapiens
gctaagttgaaggtgaaacaatgatgagcgcctcttggaagagcagtcctgggcttgtagcgtctctcttggtatgtgatgtctctgcagccagctacagttttttttttttttcctacaga

SEQ ID NO: 211724 - DNA, 122 bp, Homo sapiens
tgtatggcattcgatgtaactgcttgcaaaaacaacatccaattttaatattggcctaatcgtggctaaatattggtataataatagttaactatctgctaagttctattttaaagctttat

SEQ ID NO: 211725 - DNA, 122 bp, Homo sapiens
tctgtgttcgcgctcccggcccccttcctcagacacgcgcagcctccggccgggcggcggcgcactgcgtttccacctcgcatttcctgtactccagcgcgccttgtccttcccagagcgtc

SEQ ID NO: 211726 - DNA, 122 bp, Homo sapiens
gggatgtgcccgcgaccctggcgctgggaggcagtgctgcagagaggagtggtgtccgcacggctgtcaccagacatcctcatcaccctccgcaccgcacagcccagcgtctccttccacaa

SEQ ID NO: 211727 - DNA, 122 bp, Homo sapiens
gattcaggctggcttcagagtcggtgctcttaaccgccatactatgttgccttctgttgtcgttgttgactgtggccatgtagcttcgcagtttcctcatctgtaacagtaaataactcaaa

SEQ ID NO: 211728 - DNA, 122 bp, Homo sapiens
gacccagcagcccggccccgcgccctccctgtcccgcggcccgcaggcccagccctcaagcgcccagcctccgcggcctttgtggcgtcacagccagcctgaagaatggttgccttggagac

SEQ ID NO: 211729 - DNA, 122 bp, Homo sapiens
cgaaaagcaacgctggccttacaccgtgacgcttttaaaaactctaaaaacccagcgtgacggggggtaggtttgcctaaagacaggtgaggcagccttagttaactgagaaggttaattga

SEQ ID NO: 211730 - DNA, 122 bp, Homo sapiens
ttgtcacatcagtggaatcttgctttcacaaaagatttctctgtagcatgcaaagctgttcgctagtattttacccaagtagaacttctttcaaaattagagtcaagcctctcaaaccctgc

SEQ ID NO: 211731 - DNA, 122 bp, Homo sapiens
cccacccccgcctcctggtcccggtggtccagactttgactgcagccagcctggccaaggcgagcaccttccgttcctcctcccctaacgcctccccttcaaccttattccggagtccccct

SEQ ID NO: 211732 - DNA, 122 bp, Homo sapiens
aagttagaaatcccctaattagctttccgagtcctctaacctcgcacactctaatctcaccgttgggaaatacatgggggtaacaaccctgcaaacgcctgaaaatatggttatctttagaa

SEQ ID NO: 211733 - DNA, 122 bp, Homo sapiens
gccccctcacacagttctttctcaaggtgttagtgaaaggctgtcttccagaccccccagcgtgggtgagtaggtctgaaatgacaaacccactctaacacatcagcctccctagcccttta

SEQ ID NO: 211734 - DNA, 122 bp, Homo sapiens
cctcgcagaggctgggcatgggaggacggccgccccgggtaaaggacagggccctggaaacgcgggtctgccgggagcaggggacaggaaggagaccgcggctctcccagtcctgctgcccc

SEQ ID NO: 211735 - DNA, 122 bp, Homo sapiens
atgaggaactgactttccctcatcacttagttaattagtgacaggtcctgtattggaactcgagtttctgagacttcctacagttacaagccaaaggactgagatgatgcttggacagcatg

SEQ ID NO: 211736 - DNA, 122 bp, Homo sapiens
ccaggctggccttggaggtgccaagtgaccctgcctgacagtgtcagctgtcctccgcagcgcgccccctccactgcaaccttctaagagccctggctcaagtctcctgctgggacacacct

SEQ ID NO: 211737 - DNA, 122 bp, Homo sapiens
cattaaaatcttactcacgatggggtctggcttccttgctttcatcaaattgctacctctcggcaggaacccagacaaccagggtgcctgcatcactctgtgtggttttctgtaggaagctc

SEQ ID NO: 211738 - DNA, 122 bp, Homo sapiens
attcacggacttcctggccttcatggtcctctttaactacatcatccctgtgtccatgtacgtcacggtcgagatgcagaagttcctcggctcttacttcatcacctgggacgaagacatgt

SEQ ID NO: 211739 - DNA, 122 bp, Homo sapiens
aggaaacaggatccaccagccaggcccgctgaccatttggaagtggagcgtgcacacaggcggctgtgcggtcatcgtctggcaaacaaatgatgggaccggaccaggagcagactggctcc

SEQ ID NO: 211740 - DNA, 122 bp, Homo sapiens
cgtagagaacgggattgaggccacagcgggcgagggccaagccgctggtcaccagcagtgcgacatccttgcgtttgctggcagggcagctccgctcgcgcgcagccagtagatcggcagta

SEQ ID NO: 211741 - DNA, 122 bp, Homo sapiens
gtgattaccggggccggttggtaaggtaaacaaaccgggtatcaaagagaaggcagtgagcgctgcgtccatgtgccagactgagaagtcctgccttgctaaaatccgtaaatgccagaaag

SEQ ID NO: 211742 - DNA, 122 bp, Homo sapiens
gcattggaacaggggtcctgagcaggaggggcgaggtgggctgggaggggcgcggtagggcgcactggaacaggggtcctgggctggaaagacacgttggaacaagggtcccgggcttgggc

SEQ ID NO: 211743 - DNA, 122 bp, Homo sapiens
accccgagaagcaggcggacatgctggactcgctgcggatctacctgctgcagtacgccacgctgctggtggagcacgccccccaccacatccatgacaacaacaagaaccgcaacagcaag

SEQ ID NO: 211744 - DNA, 122 bp, Homo sapiens
ggctggactcggggctggactcggggccgagacttggggctggattcggggcctccctggcggggactcggggcttcctcgccggatctcggggccgctccggccgggactcggggttggac

SEQ ID NO: 211745 - DNA, 122 bp, Homo sapiens
tagattcaatatataagtgagaacatgtggtatttgtctttctgtgcttgacttattttacgtagtataatgttctccaatattgtccatgatgttttaaatgacacaattctgtcttttta

SEQ ID NO: 211746 - DNA, 122 bp, Homo sapiens
aaatgggaacgttgaggcatgtagaggttttgaagcagagtgtcggtccttccttccatacgcctgaaacgcataatccggggctttttgagagcaaaaacatagtcagaaatgtgccctga

SEQ ID NO: 211747 - DNA, 122 bp, Homo sapiens
atcaaatatataatgaaaaatatctcagtagcccagtccattttccatcaggtgagccttcgacaagatttaaacatctttttatcattcttctgaaagcaatctataccgattatctggta

SEQ ID NO: 211748 - DNA, 122 bp, Homo sapiens
gaagcgacgtcaaggtgtggttccctctgtaaggcggagctaaacggtgcattcgcccagcggggaagctagaactaaatgaccgctctgccgactggagccaacgagaatcggcgtaggcg

SEQ ID NO: 211749 - DNA, 122 bp, Homo sapiens
cgtccgtctgctctgatcggctccactgaataagacgatttgaggatgtgcaggcccggccgcgcagctccctgtttattttaccacttgatggctagaaagccctgacctttcccggctac

SEQ ID NO: 211750 - DNA, 122 bp, Homo sapiens
aaaccaccatggcgcatgtatactatgcagcaaacctgcacattccgcacatgtatcccacgagcaacagatgctcatgatggttgtaaaggatcaactgtattttaaaacataatttaata

SEQ ID NO: 211751 - DNA, 122 bp, Homo sapiens
cagggagatagacatatgaagatgtaagtgaaatagtgttattgaaatgtggcttctatacgctatgcagacaacgggaaaagatgaggcactgcagagaaataaataaattctagtgggaa

SEQ ID NO: 211752 - DNA, 122 bp, Homo sapiens
gtccctcacccttctgcagtcgccaccgagcactcgtggtgtggcccacagggcatcctgcgagagcgtcacaagcaccccacgaacaagacacggcagcgtgcttcctcgatctccccgct

SEQ ID NO: 211753 - DNA, 122 bp, Homo sapiens
gggagtcaccatcatgtaaactcagtttgctttggtcattgttaggtcatgagctcagcccgtgtgaagctctcttttatttttggagattcagccaggcttaaactattctcaacaagtga

SEQ ID NO: 211754 - DNA, 122 bp, Homo sapiens
gagaacatatggcaagctggtggctgaaccttggtccgctaccagccccagggagagcaccggagcacggccccgacggcagccgcagcctcccgccgtggagggtcgaggctcggaatgac

SEQ ID NO: 211755 - DNA, 122 bp, Homo sapiens
acttggggaagaagaaggacccagcgcgagcgtcctctcggcggagctggggagtctgagcgcgggctcgttgggtccgcgcggcgcggagctgggcatccgggcggcgcgggctcttccgc

SEQ ID NO: 211756 - DNA, 122 bp, Homo sapiens
ccggccgggctaggggaagagcgctgggttccgtccaagcactgttgaagcaggaaaccccgacgactctcggcgaagaccgtctccgccttctctttctttagttggtgttttttaaattt

SEQ ID NO: 211757 - DNA, 122 bp, Homo sapiens
ttccctctgcagttcggactgtgacgttgtggggggaaaaaactccaaactcggggctcgcgactccccaggatctgacagtctggttaatgtccgtcattggaaacgaccactgaccggcg

SEQ ID NO: 211758 - DNA, 122 bp, Homo sapiens
gcaaaataataacactgtcctaactgcgatttggtgactaaattaaataagaatatcggccgggctcagtggttcacccctgtaatcccagcactttgttaggccgaggtgggcagatcacg

SEQ ID NO: 211759 - DNA, 122 bp, Homo sapiens
actgtcatttagaaagcgcttactgtgttccaggcactgtgccaagctctttctatgaaacgattaatttaattctcccaacaaccatgctagttaaggtattatcattatttgtatcttat

SEQ ID NO: 211760 - DNA, 122 bp, Homo sapiens
acaaagacattgggacataaacatgaaaggtgtgtgtggaacagagagaagactagtctgcgtgaagcattgagccccttccaaggctgaaaagaaaggttggagacaggtagtaaggactt

SEQ ID NO: 211761 - DNA, 122 bp, Homo sapiens
ggatgagaggtggggcgggggcgggtccatgcctgtggtacggaagcggccaggccaggccggcgggtggggtggcagggagcccttgggtgtgtgtgagaagcagcggtgactcggggaga

SEQ ID NO: 211762 - DNA, 122 bp, Homo sapiens
ctctctctgtcctctagggctccactgcacagtctgatgagggtcatattattcatgccacgtttcctctgcctgctcagccacagacctcccatggacacatcttactcactcctgcctcg

SEQ ID NO: 211763 - DNA, 122 bp, Homo sapiens
taaaaggccatgccgtagcaggcgagcgataacaggctttaatctttttaaagcgtgctgcgggatggcatattggcgttgagtggggtaagggtgattaggttttaatgagatggtaaggg

SEQ ID NO: 211764 - DNA, 122 bp, Homo sapiens
cttagtttaggtaaatttaatgactgtaaaagctgttcacatagcagctttaaagagacacgttttccactgacataaagttgcttcgccccttgcagcttatctccaccttcatgacctgt

SEQ ID NO: 211765 - DNA, 122 bp, Homo sapiens
cgtgccctccccacgaggcctgggagcgggtcctgcccggctgcgcaagggtgggggtcgcgcagttagctgcctttgggatgcagagcacaggggacccaccgccgccactgctgctcctg

SEQ ID NO: 211766 - DNA, 122 bp, Homo sapiens
tgctcagactgtgtccaagggctccctgtgcccgcagtgagatgacagctttcctgctgccggtaacactgaggaaggctgattgagcacagcttaggggacaaggtccctgcaaatcaggg

SEQ ID NO: 211767 - DNA, 122 bp, Homo sapiens
ctgaaagggacattgaaggggtaggaaagacagtcttaaatcccaacgccatccctcccccgtctcccatcagcggccctatgctgcagagagaaaatctgtgtacttgggagagggacagt

SEQ ID NO: 211768 - DNA, 122 bp, Homo sapiens
gcctcattaccatgcacgaccagccgcagctgaggccgcagaggcctttggcaggggggccgggccggcggcagggacggcgttggcggtggtggacgggagtgggggtctgtcctgaacag

SEQ ID NO: 211769 - DNA, 122 bp, Homo sapiens
cagggagcctgggaatgtatctacagctcggcgattggctgagcctgagttcctccctaccgctcactaggcagggcaggcagagagaattccaacgcttaatatgccaagcatctgattgc

SEQ ID NO: 211770 - DNA, 122 bp, Homo sapiens
ggccctcttcctcacattgtagtggcagcacacccgcctgctggcagctgggcacactgccgggccctcttgctcgcattgtcgtggctgcacgccacatgcaggcacatggggactacgca

SEQ ID NO: 211771 - DNA, 122 bp, Homo sapiens
tggggaaccaggggttcagtccttccaggatggactggcttgatggtggcttttcaagctcgttctgttcccagccactgggcatcctgtccatcctggaggaggaatgcatgttccccaag

SEQ ID NO: 211772 - DNA, 122 bp, Homo sapiens
actccggagtcaggaggcagcagcggcggaggacgaggatctctggcagtcagcgccgctcggacgccgccggcaccatgggctgctgcaccggacgctgctcgctcatctgcctctgcgcg

SEQ ID NO: 211773 - DNA, 122 bp, Homo sapiens
agaccaaaagtagctgatgcttatctgtctctgtcgaattcccaggaatcctgcgggtggcgggggcgggagggggggtctgagcccacgtgggaagccttgttagcctgtgcctgggggcg

SEQ ID NO: 211774 - DNA, 122 bp, Homo sapiens
gcccccgacagcgctttgcacatgcgcagagagtactacgtggttgccctacgacacttccggccgatgcctccgggctggcgtccctgaagccctcgctgggagcccgaacccgcccggac

SEQ ID NO: 211775 - DNA, 122 bp, Homo sapiens
ggtgcacacacgagcttcggtgggcaatctgcgggctcgggggccggggtggcgccgacacgactccctcggggatgcgacggccaaggcaacgacagccttctccgcctcccgggctccgc

SEQ ID NO: 211776 - DNA, 122 bp, Homo sapiens
cggacaggcggctgactttggtcatgagggtgaagacagagggtcttggtttctctctgacgactggaggttgagcctggagcggctctttccagcgctgcagttgaaactcggagaaagac

SEQ ID NO: 211777 - DNA, 122 bp, Homo sapiens
cccgggaaaggaaaaacagtgggcgagggaggtgggagtggagggcatgaaaatggccggcgctcgaccaggaccagggtcactgacttgagaccccaaaacgacagatgcttcccgatggg

SEQ ID NO: 211778 - DNA, 122 bp, Homo sapiens
gcataaaataacagttctacagacataaacttcatccttccacatatgcgatctgtccagcgtggggagctgcttgctgagcatgttttgagcacagggaaggcccatttcaaaacactaac

SEQ ID NO: 211779 - DNA, 122 bp, Homo sapiens
tgggaggttttcagagcagaacttgcacttgccttaattatggagcctgtagggaggtgtcgtgcccagaggggatggctttactaaaagaagggaatagggttagactccaggaaaaattt

SEQ ID NO: 211780 - DNA, 122 bp, Homo sapiens
acaattaaataatgcttttctaagtgggaaaacagagggcctgggaacccaactctccgccgatctctgctcagctagaggagaggttcggcacctctgtgcctaacaaccgcccctcacca

SEQ ID NO: 211781 - DNA, 122 bp, Homo sapiens
gtggcagattcaagtcacacaatgcagacccgttccctgcaggcacctgccacatagcagcgcccccaacgccacgtcagatgcgcctccccccaccgacccgctgctcacctggcttcatg

SEQ ID NO: 211782 - DNA, 122 bp, Homo sapiens
ggtctcacacccatctagaggatgtctgtctgcgacgtggggtcggacgggcgcctactccgcgggtatcaccagcttgcttacgatggcaaggattacatcgtcctgaacgaggacctgtg

SEQ ID NO: 211783 - DNA, 122 bp, Homo sapiens
ggtcctctagagacctcagtagagtaggtaagctaaacttaaaccatgttccaattaagccgaactgcaaactgcaactgtaattcatgttagcaaagaacatacttatgtagaaatatcta

SEQ ID NO: 211784 - DNA, 122 bp, Homo sapiens
acaaagatgcccagctgggacccacctacagtgatggggtgatggggtttcacctataagcgggcaaacaggcactcctcctcactgtccagtcacctgacgtgctttttctgcgcactcag

SEQ ID NO: 211785 - DNA, 122 bp, Homo sapiens
cggatgctgggcgggaccacgcagctttgttttgataccccgggtgtggaaatacaaacacgtggtctgagttgtggcgctttttacctaacccggaccttagcgttctttattgtagtctt

SEQ ID NO: 211786 - DNA, 122 bp, Homo sapiens
gaggtcaatttctttgcgctcggggttggtcggagggaaaaacaggaagcggaaaggctgcgaacgcaaagcagtgtgggttgattctgaggtgcactgtgggaaagagcttgtcgctgcgg

SEQ ID NO: 211787 - DNA, 122 bp, Homo sapiens
cggtggagccacggggcgggcttggcttggtgtgacggcggctgcggcggcggtggcggccgcgaccaggtgagtcctgactggccctcgtggcgggggcggctgggagtgtgcttaaatgc

SEQ ID NO: 211788 - DNA, 122 bp, Homo sapiens
agaacctggcagactccagcagatggttcaaggtccagcaacaccctggacagatccctgcgttgccattgatcagattggagaagaatatagttccatgaccaagagcaagacaggtctgg

SEQ ID NO: 211789 - DNA, 122 bp, Homo sapiens
gctcgcgtgtgtgttggtgggagagtaatggtaacatacaagtcccaaacctgttcttctcggacctgggaagaaaagctgtcaggtctggcaaaaaggtggaaacttggtctctgccagga

SEQ ID NO: 211790 - DNA, 122 bp, Homo sapiens
caggcgagattcaaaccgagaaactgccaaaggttgtgtgcagggcagatcctaggataccggagacccagcccgttggcttgacctcaaaactcgggggcttttcggcccatgctgtccct

SEQ ID NO: 211791 - DNA, 122 bp, Homo sapiens
aaactacacaacctttcagtgggtttccagcccaggcgtggactgcactgctgagggctgcgagaatgacagcctcatatgtctgaaagctgacacttcagccttgaaaagaaatgggggaa

SEQ ID NO: 211792 - DNA, 122 bp, Homo sapiens
ttcaggtaaataattgtctgtcccaaaggcctgataactccctgccacagtaaggccatacggaaatgcattcatggcttccacaattgagtcatggctcgtccaaatactgaactattcct

SEQ ID NO: 211793 - DNA, 122 bp, Homo sapiens
ggggctcctccctacctgggagtccggaagttgtcggacgggtggctagcagagctcgggcgcgaacctgggagggaggaaaggaagggcacgccgccgtcccacagccggcgacccgctcg

SEQ ID NO: 211794 - DNA, 122 bp, Homo sapiens
gggcaataaaattcaatctgtgacctattaaacctcacctgatgtaaattactaagagaacgtgcttaataggcaagattcagggcagtcttaaatacttattgctttactttccaggctaa

SEQ ID NO: 211795 - DNA, 122 bp, Homo sapiens
gctcctccgccgggtctttatttgactttggcactagcgggctcttctagcttaatctcccgccgcagcccaaatccaccgccgagccatcaagctcagagggggagcctgggaagacttcc

SEQ ID NO: 211796 - DNA, 122 bp, Homo sapiens
gcgccgagcacgtccgtaccgcaagatggctgctcggacggggacagagctcgcctctgccgcctcgacaactgctcctgggtcctctaagaggaggaagcgccacccatggcacacagtgt

SEQ ID NO: 211797 - DNA, 122 bp, Homo sapiens
acccttcagcccagagattcatttccaggtacttaccctccacatgtatgtgaaaatgcacgtgggcaaagacattctttcatcttcattaggaggagccacgcaggcctggttaagtaaca

SEQ ID NO: 211798 - DNA, 122 bp, Homo sapiens
tttgtgcagcccgcgccaccagccccgcctccaacaaaacaggcgatggcggggcgggcccggagtgtccagataatcctccaagagtcccagacaaccccattcaccagcccgcccgcggg

SEQ ID NO: 211799 - DNA, 122 bp, Homo sapiens
agggctgtcgcgcctgccgtgtggtcctggagaatgaggcttaccaaaggctcaagacagcgtccccatggagtgacatggttaaagtgttgaaagaaaagaactgttggcattgaattctg

SEQ ID NO: 211800 - DNA, 122 bp, Homo sapiens
gcccccacctccttcctccaacagccgctcgctccgtcactccgcttcccacagtccccgcgcggccgcccgaccccgcagccaatcgcgcagccgcttactcaaaccgccgcgcaggcgct

SEQ ID NO: 211801 - DNA, 122 bp, Homo sapiens
gtgagattcagtgtggaaggtctctgggagcaggtcccagcaggtaaagtccccaacagccgaggtccccagtaggcaaagtccccaggagacatccccagcaggccaggcttccgcagggg

SEQ ID NO: 211802 - DNA, 122 bp, Homo sapiens
caggtacttcaggtctttcacaagtcacaggtgtagtggctgatgggagcttcaggttcccggtctgggacttcacataacacaggcttgacaccagaaagatgtatccaactatctaatcc

SEQ ID NO: 211803 - DNA, 122 bp, Homo sapiens
tgtacaaccagttctgggcaatgaaatgtgatcagtgctctcttttccaagctaaggctacgaaaaattcacggggattctttagccattttcttcctctgctgcagagaataagtttctgt

SEQ ID NO: 211804 - DNA, 122 bp, Homo sapiens
tccaccgaggccatgaccttcttgtaatgtgttgacttcctctaccgccagtgtttctctcgagggacctccatctgcatttgtttgtggctgtccctctcagtgacatttcctcctttacc

SEQ ID NO: 211805 - DNA, 122 bp, Homo sapiens
gcgccgccatcttggggtcagggtcctgcaagcccctagggcgcctaccgcagtgcctgacgggccgcgccgcaggtccaccgcgcatgcctgaagaggaagcccaggcccgtaagtgcaaa

SEQ ID NO: 211806 - DNA, 122 bp, Homo sapiens
gtccacgcccggcacgcaggcgcagggactcctccggggcccgggggcgggtccaatccccgggcccgggggcgggtccaatccccagccccgcccttgactccgctccttccgtgccgctt

SEQ ID NO: 211807 - DNA, 122 bp, Homo sapiens
gctgacgaggcccggaagggccagcagtcatgccccctctgtcccccaagccagtggcagcgctgacccccaggactgttcatccagatgaaggcgcttctctgggaagggcctaagaccag

SEQ ID NO: 211808 - DNA, 122 bp, Homo sapiens
gattaatttgaaaagtagagggcgggggttctttccagctggttgaccgcagtactgaagcggccaaaaagtggtcttctcctgagcctgatctttcaggcgtttccgaacagatccccaac

SEQ ID NO: 211809 - DNA, 122 bp, Homo sapiens
ttagtggatactggagctaatgctctgttttctccagtcgtcctccagaggagcgtcccccggggcttcccctgcctcccccacctcccagcagttctgctgtcttccgcctggaccaagtt

SEQ ID NO: 211810 - DNA, 122 bp, Homo sapiens
agtcttggtcatggctggattgtacattctgttgtcactaagtccctgaccctatggcaacgacatcataatgaccccaaatgcaagtaaagtaaacaaaatcagggcagggctacaggtga

SEQ ID NO: 211811 - DNA, 122 bp, Homo sapiens
ggtctaagaacagaactcctgaggaccctccgtttccaaccgaagccagtctttgctctgcgtcttcccggccgcagcgccaggaccgaccccttaggacccggcgggcggggcggggcgcg

SEQ ID NO: 211812 - DNA, 122 bp, Homo sapiens
ggttgtgctgcttccttccagagttcacatcaagggcagggaggttatacaagccagagacgtcatggtgtatcagtctttctagttggctcaatcccagagcaatgctctgtttttactct

SEQ ID NO: 211813 - DNA, 122 bp, Homo sapiens
gcccaactcggtggatggcacccacaactctggacgtgaaaggaaaggtgggtgggtccacgattggaccattgtggtattttaaaaagtcagccacaacctgctaaggtgagggcactgcg

SEQ ID NO: 211814 - DNA, 122 bp, Homo sapiens
agaagaaaaccggaactattttgctgtgtagaaagtcaccatgctacacgtcatggcccacgaagggctgattatattacagaaatattatattatataatattatatacaatatataatat

SEQ ID NO: 211815 - DNA, 122 bp, Homo sapiens
gcgcttccccagcgccctccgcgtggaaccccgcgcctctggaacagaaggggcgtgtgacgcagtcaccgttgcctagggccacgttctgatcagatctgacgcctccagcgcccgacccc

SEQ ID NO: 211816 - DNA, 122 bp, Homo sapiens
gggcggggcgcgcggccgttagcgcgcggccgttagcggtcggtttctactaacggtaggcgtcgccgcgattcccgaaggtcatagtccgcgtgacccacccccgtttgcgcgctcgcagt

SEQ ID NO: 211817 - DNA, 122 bp, Homo sapiens
taaatctcgggctttgcccccaaaccccaggccttttgcggacggaacaggtgagcactgcgcactgctcgcgccccggttcttgcgtcccctgctctccctgcgctctgagcggcctggcc

SEQ ID NO: 211818 - DNA, 122 bp, Homo sapiens
tgtctcaggatgaggtaatatgggggcagccctgggggaaagtccccagacagcagccgacgccaatccacatttcccgcagcgacaagcaagaaaaagagaaaggaattcctgtctggcca

SEQ ID NO: 211819 - DNA, 122 bp, Homo sapiens
cggggcaggcccggggaagcgggagccgtcccgttaggggggcctggacccctcggggagcgcacggtgccccggacccgggccttaaggagagtcccgggcggggagggagactcacctga

SEQ ID NO: 211820 - DNA, 122 bp, Homo sapiens
aggtagatgtgtaacctcttcaccttattcatggctgaagtcacctcttggttacagtagcgtagcgtgcccgtgtgcatgtcctttgcgcctgtgaccaccaccccaacaaaccatccagt

SEQ ID NO: 211821 - DNA, 122 bp, Homo sapiens
tttttgtattttttttgtagagacagagtttcactatattgcctaggctggtcgcgaactcgtgagctcaagcgatccgcctgccttggcctccaaaagttctgggattacaggtatgagcc

SEQ ID NO: 211822 - DNA, 122 bp, Homo sapiens
ggcacagaagtggtttaggcatcaagtatttctggaatgcaaagcacacgttggggagagcgtgtgtgtgctttagagcacagctttgcctaatccatccacgtgtgtgtgctgctggcaca

SEQ ID NO: 211823 - DNA, 122 bp, Homo sapiens
tccctcttctggctccgcgggttactcgccccgcccccacccttcagtcccttagcaacgcgtcctcggtccgtagaaaccggttgccgagctctgcctacctctgaaaggcctagagagca

SEQ ID NO: 211824 - DNA, 122 bp, Homo sapiens
tcagaggcatcaggggctggctgaggtcacagcactgacgtggcagagcatggacttaatcgatcccacctcgaccacggtgccaagtggaagtagggtcaggacagtgtgggggggcttgg

SEQ ID NO: 211825 - DNA, 122 bp, Homo sapiens
gacttgcttcgcggcgtttgcgtcctcgcaggcgcctcgcagggcttcctgccctcacggcgggggagtagctttggcgaaaatcagcacgagttctgcagtttttccaagcgcttttaggg

SEQ ID NO: 211826 - DNA, 122 bp, Homo sapiens
gctcacacgtggatacacctgcacgctcacaaggcacataggtgcccgcacacatggacccggccagctgacctaaagcaccatgctttaccgcatgcctgctaaggagagcctcttgccgg

SEQ ID NO: 211827 - DNA, 122 bp, Homo sapiens
tcttagacgaccgtaaactctgcgggtggggcacgaaacaaaaataaacacagggacaggcgggcaagagagcgcgggaggaggaggaggagaaaaaggaggaggaggaggaggaggaggcg

SEQ ID NO: 211828 - DNA, 122 bp, Homo sapiens
acaacaaataaccggagtcagatctctggctcaggaaattcctgggctcacatgtttgctcggaagaggttcccacagcccggccgttattttttatctatccccgcaggatgtcctcctcc

SEQ ID NO: 211829 - DNA, 122 bp, Homo sapiens
attagaataagccctccagagactatctgtgccactaaggtcacattaaaatgcttcttccgtctaaaactgaaaccgatcccacttaggagctaattgcagtcatagtttttctctttgag

SEQ ID NO: 211830 - DNA, 122 bp, Homo sapiens
ccgctcctcctccctgtaacatgccatagtgcgcctgcgaccacacggccggggcgctagcgttcgccttcagccaccatggggaatgggatgaacaaggtaacgtcttccctcgttcgcgc

SEQ ID NO: 211831 - DNA, 122 bp, Homo sapiens
tcacccctaccttaacagggagaagctgcctgtggacagctcccagctgcacagggaaatcgctgaagatttctaatagggaagtgtcacactttgccaactctggagaagacagaataatt

SEQ ID NO: 211832 - DNA, 122 bp, Homo sapiens
gctcaggaaaccctaggcgcagggctctgggaaggagggagggggtcagagacttgagcgcggcaaatgtgtccgccctggtcgctctgtacgcgccaggggctccaagccagaaggggacg

SEQ ID NO: 211833 - DNA, 122 bp, Homo sapiens
ttgagccatgagctcacttacacacgcccagtcgctagaagagtggcacacgcaaccccacgcggaacacgggaagatggaaagaaattgcaaacctgtggtgccagctccaaggatgcctt

SEQ ID NO: 211834 - DNA, 122 bp, Homo sapiens
cttgagctgcggatgtgacgcttctgacacgttgcaggcacacggcacgtgcttgttcctcgccatgtcccctcacacctgtgctgccatcctctgttggggtgggacaaactctgtggaat

SEQ ID NO: 211835 - DNA, 122 bp, Homo sapiens
acccacctaatgccattccagtcttgacagtgtgtgggtgtaatgtagcagtccctcaggcgtcatccctgactttatctgaagaaagcacagcttttattagcacagttggaagatttcat

SEQ ID NO: 211836 - DNA, 122 bp, Homo sapiens
ctaccagaagaaagaggaggactggatctgctgcgcctgccagaagaccaggtaagcggccgcccagccccgcggcaccagttgggcacagcgcgtggtctcggctcccagcacgcccctcc

SEQ ID NO: 211837 - DNA, 122 bp, Homo sapiens
gagcttcctattcctgctttattgtttctatgagtctatgttgctgtttccttttttctccgtctttctggtcttttctagttgaggagatagggatgggtgggcttctgctccttccctct

SEQ ID NO: 211838 - DNA, 122 bp, Homo sapiens
aggattagcaaggcctctaaaatgtaaaaacatcataaaacacagaaaacaaaataacatcgttaatagtgtcagtgtctatcgtcagtaattacatcagtatgatcaggaataaatatgtc

SEQ ID NO: 211839 - DNA, 122 bp, Homo sapiens
ccttgggaatgcatcggtcgtgagatcagcctgggctctgctgagagaggcccacagtatcgggcctctcagtgaatcttccaccacgattcgatgggacccagggtttttcaacaccgcaa

SEQ ID NO: 211840 - DNA, 122 bp, Homo sapiens
gaagtgctcggcagcagagatgatctccctccgagccatggccacatcctccttcctgcccgtcacaacaaagacaggctcctccccgcgaactggggtcttgatgtaagtattggtcttcg

SEQ ID NO: 211841 - DNA, 122 bp, Homo sapiens
gcccctcctcggtagttttcaccaccctgcctggagcagcacagccaatattggcagactcgcttccctgtgccaatatttctgtgctgctagagccagggaagctgggtgtgggcaacaaa

SEQ ID NO: 211842 - DNA, 122 bp, Homo sapiens
tgccatatattggggactcagcattggtctctgctgttggcagattgggtactcagtggtcgctgtagccaggttgaccttgttgcttgaactccatgttgtgagcatgcgtgtgtgtgtgt

SEQ ID NO: 211843 - DNA, 122 bp, Homo sapiens
gcgacgcgggagcagggactgacgcccctctagcaaagcatctgtggtacatcccagacccggggctctccaaggccccgcgcttccgagctccgcgcaaactctggcttctcttgtacgac

SEQ ID NO: 211844 - DNA, 122 bp, Homo sapiens
agccgagttcttgagcgtctcgcgggccttctgctcgctcaggccgaggctagtgaagagcgacagggagtctagagccgccattgcagagacaccggaaactaaaagaaacttaggcccca

SEQ ID NO: 211845 - DNA, 122 bp, Homo sapiens
ctgccctccctgccgcccctggaatgttcctggcctgcttctgagatggcctctgtgtcccggccagggcttgtgcctcccggtcctgacctctggggctcatgtgagggtgagtgacgcca

SEQ ID NO: 211846 - DNA, 122 bp, Homo sapiens
aatttacagggttgatttgggaagcagagcacagcagcccaaatttgcttgtaatgtcggcgactacaggtaaggcactaaattgtaaataatttaagctgagtttacatttttacactgtt

SEQ ID NO: 211847 - DNA, 122 bp, Homo sapiens
gagcggtgaaggttaaaaacaattttcctaggggatggcatcggggcgcggggtcacgaacgttttcctgtatacctattcgtagtgggtctgcagagtgttttgggtgagtgtgagggctg

SEQ ID NO: 211848 - DNA, 122 bp, Homo sapiens
agccatcctccggattggttgtcgtgagccctggctttaggatgtcaaggctgttccacacgacatgggaaggacaaacagaactgcctgtcccttgttcattttgatcttaaattaccatc

SEQ ID NO: 211849 - DNA, 122 bp, Homo sapiens
gacagggttttgggcgaaacacatgttagatgctctgttctcttcattcagctcccagaacgcttataaccacctctacaccctctaggcaggaaatcagaagctcatctctagggactctg

SEQ ID NO: 211850 - DNA, 122 bp, Homo sapiens
cgaattcccgacctcaagagatcagcccgccttggcctcccaacgtgctgggattacaagcgtgagccaccacgcccgaccctgcttgtactcttgaaggtcaacgtgtaatcccgccactc

SEQ ID NO: 211851 - DNA, 122 bp, Homo sapiens
cgccagggcctcagccctcgcggccggcggcgcgggagtgttgcggggcagggaccagagcgcgatcagagcggccacccccgatttaggtcgccagctttccagtcactgcgatggccact

SEQ ID NO: 211852 - DNA, 122 bp, Homo sapiens
tgcaaatgacaacccaccaatgtttactcagcctgagtaccgtgtgagtgtttgggagaacgtgcctgtgggtacccggctgctcacggtgaatgccactgaccctgacgagggattcaatg

SEQ ID NO: 211853 - DNA, 122 bp, Homo sapiens
ggtacttgtgagccctgccggcggctggaaaactgtggcgcttgcactagctgtaccaaccgccgcacgcaccagatctgcaaactgcgaaaatgtgaggtgctgaagaaaaaagtagggct

SEQ ID NO: 211854 - DNA, 122 bp, Homo sapiens
tctaggcaaaaggaacagctggtgcaaaggtcctgtggcaggggcatgctccaggaactacgaacagcccggtgtggctggagcacagtgggcctgagagagtacagtactagatgagaaat

SEQ ID NO: 211855 - DNA, 122 bp, Homo sapiens
gcccgcggggccggcttacctggggccacaggtgcgcagccgcggggcgcagtggggctgcgcgcgggcgctcgcggccggctggaggtgcccggcgatcggccccgctcgagcgggggaca

SEQ ID NO: 211856 - DNA, 122 bp, Homo sapiens
caatagctccaggcgtgtggacacggccacgagccggcggtcccccgcagcatcccagggcggatgaggcagatcccagaatgtggaacgcatcccagaagcgatagccagccttggagggt

SEQ ID NO: 211857 - DNA, 122 bp, Homo sapiens
gaggacagccagcactcctctcccgccgtggccctcctaggcctgaggaagctctggtcacgcaaacgcccccacgctgcatcctccagagaggccccagcgaccaccgccctcccgcaagc

SEQ ID NO: 211858 - DNA, 122 bp, Homo sapiens
gcgaggagatttctgctacaagtgccgcgttattatgagctacaaggtcagactatacatcgcaggtccccaaagcctatggaccttgggaaatgtggggcctcgagtcacgtcattgtacc

SEQ ID NO: 211859 - DNA, 122 bp, Homo sapiens
ccacttgctctcaagttttcctcatgaaatgtcccattaggggtgtcttgtcttgcctctcgtgtcttctattttcccttcctcctctaaaacaaaaaagaatttctccacagagaaggaat

SEQ ID NO: 211860 - DNA, 122 bp, Homo sapiens
ggagctatggagtccctgggccagggtccacgtggtccccaggtggccccacagcaactacggccacccagcagccaccttgatggccccaggaaggagggaagctcagggtcaagtggacg

SEQ ID NO: 211861 - DNA, 122 bp, Homo sapiens
ctgtttcagggtcatctgaaacagtcaactgtttcctctagcccattccctgcctccaggcgaggatttgcctgaacgtggaaagaggaaggatcctcccagtgctgtcaaccccagattcc

SEQ ID NO: 211862 - DNA, 122 bp, Homo sapiens
agcacaatgagcagcagattagtccttgtgtccttctgtgtcccagggtgctctattcaacgtcaaaaagaaaaatcaccaaaataccacttctcccagacaggggcttcatatccatttct

SEQ ID NO: 211863 - DNA, 122 bp, Homo sapiens
ccgccgcagatctggattcgctttgggaggatttctcccaaagtctcgcccgtggcaattcggagttgctggccttcctcaccagctccggggcgggatcgcagccagaggcgcagcgtgag

SEQ ID NO: 211864 - DNA, 122 bp, Homo sapiens
ccacgcatttgattgacagttcgtttgttggaggggcgtggtcacgctcggaaactccgccgtgacgttgcaaaagctggaatctccgcgagaagtcctgtcttacttccacttcccaccct

SEQ ID NO: 211865 - DNA, 122 bp, Homo sapiens
cataagaactgctagcaaaagagacctcactcttctcttgctttcgtgagaaaggaggggcgtggatgtaggattgctgtggaaagcgaacacaaaacaacccagaatgactgattaagtgc

SEQ ID NO: 211866 - DNA, 122 bp, Homo sapiens
ggttcgctgacgctcagtgttttggcccggacggtcacatgtttcctttgttgtgagctgcggcagagactggtggctggaggagacgccggcgctggagagtgcgctgcgccgcccgccgc

SEQ ID NO: 211867 - DNA, 122 bp, Homo sapiens
gtaataactaaacactgttgatgtatgtggtttgtggtggacaccctttaccattttcagcgctattcaattgtattttgtctatttttatgctctggcattttaagctggtaagagtaaaa

SEQ ID NO: 211868 - DNA, 122 bp, Homo sapiens
ccgagagaagcacatgggctggagagcacagccggcaggccattgatcagcggaaccacgcggagtttgggggtttggccgggacggtgggaggagagactggctgccaagtgcccgactcc

SEQ ID NO: 211869 - DNA, 122 bp, Homo sapiens
cctacatcagatcctgagtttcttgagggcatgaactgagtcatctttaattccctagttcggctctgtcatgggttagacagtgtttatagagaggataaatgacataggatagttgaaga

SEQ ID NO: 211870 - DNA, 122 bp, Homo sapiens
ccggcggaaatgaatgctgataccctagtagtccccagctcccaaacactgaaaggaaaacgtgaaaacactcaaggcctagggggaggacaggttggtaaaacatgaaaaggtaaataaaa

SEQ ID NO: 211871 - DNA, 122 bp, Homo sapiens
ctaaagaccgtcgggtgggggctgagggcgaggggcgggacaccggggccgcgggcggggcgcacccggaaccccgacagctgtgtcttggtggagctgtggactgcgcccgccgactccca

SEQ ID NO: 211872 - DNA, 122 bp, Homo sapiens
ggaaatagatcatctttttccatttagagcaagcttgtccagcctgtgacccacagggcgcgtgcagcccaggacagctttagacgtggcccaacacaaattcgtaaactttcttaaaacgt

SEQ ID NO: 211873 - DNA, 122 bp, Homo sapiens
ccggcagcgggcagcacgcgtgggcctctccccgcgggacgccggacgcgcagccagacgcgctccccaggccccctccgagagcgaggacgcgcccaggcccgctctgccggagccgccac

SEQ ID NO: 211874 - DNA, 122 bp, Homo sapiens
accaacagtggtaattcctctaaagcagtaaaaattgtgaaatttgctaagctctttctacgtacgggcattgttctgattgctttacatgtcttgttttacttaatttgtacaacctaagg

SEQ ID NO: 211875 - DNA, 122 bp, Homo sapiens
agacaaaataccgtaagcgcccttcctagagccaggcacagagacaacggcggcctctggcgccggcacaagggacagcgtggcccggatctcagagcctgggtcactcctcctcccctcca

SEQ ID NO: 211876 - DNA, 122 bp, Homo sapiens
tactttcttccatcatttattaggcccctcaggatcccatctgcaggctccagagtgagtcggaaggtgctcagccttttaggacagaaactgttgggacagaagaatactacttcaccctt

SEQ ID NO: 211877 - DNA, 122 bp, Homo sapiens
tttttttcgggtatccagcacaattctaggaattcgcctcccacccattttgagtagacgcgccactagcgcgttcccacgcacaaaccttttccctgcggccaacctgcgattctcaactc

SEQ ID NO: 211878 - DNA, 122 bp, Homo sapiens
ggcaaaagggagttaactccttgaattcccttggaattagagcaggttcttatgctaccccgagggcacagtttgtaagaacagaatacagcagcaaacagaaatccttcttattttggtgg

SEQ ID NO: 211879 - DNA, 122 bp, Homo sapiens
cccttaaccaagcaatatacatgttaatgtggagagcatgggctgagattgaagtagcagcgaaaacacattattcaaaggggaaggcaaggacgaaaagagaaatgaatgcagggagaggc

SEQ ID NO: 211880 - DNA, 122 bp, Homo sapiens
gggtgcagactggccctcccactccgaccgcaggtcccccaccggccacacagacggctacgctagaacccagccaaacaccggggttgccaggatggtcccacagctttcctttccgactc

SEQ ID NO: 211881 - DNA, 122 bp, Homo sapiens
aagctaagcaaaaatagtaaagggcccatttgtctctggagcagagacaatcatcaaatgcgtatcagtaaattaccattcatttctaccaatatgaccacctcaatgcctgagatcatgaa

SEQ ID NO: 211882 - DNA, 122 bp, Homo sapiens
atcggacaggaggattccttgtgttttgtcctgcctcttgtttctgtgccccggcgaggccggagagctggtgactttggggacagggggtgggaaggggatggacacccccagctgactgt

SEQ ID NO: 211883 - DNA, 122 bp, Homo sapiens
acagcaccaacccagaaggagaggcacacagagagtctggggccacgtggcaccctctctcggtggccacagagcactaccttgccgcctgggaggaaccggttgatcctgtcccgagcttc

SEQ ID NO: 211884 - DNA, 122 bp, Homo sapiens
ctccgcaggtcgccaaggtgggctggaatctgtggccaggcgcggagggcggggtctgcacgcgccccgaggtcaccgcggcctcccccggacccgccccgccgaccccccagggcccctcg

SEQ ID NO: 211885 - DNA, 122 bp, Homo sapiens
agagacggggtctccgtacgttggtcttgaactcctgggcacaagcaatcctgcagcctccgcttcccgagtagctgagactacaggcgtgcaccaccacatccaactcatttttccatcta

SEQ ID NO: 211886 - DNA, 122 bp, Homo sapiens
atgaggacgtggcaagaagatgacatgtatgagaaccaaaaaacagctgtcgccaaacaccgactctgtcgttgccttgatcttgaacttccagcctccagaactatgagaaataaaattct

SEQ ID NO: 211887 - DNA, 122 bp, Homo sapiens
tccttggtgtcaaataagaaagacagaaacattaataaaagttgagatttacggagcatccgctatgcatcagacactattctaagggtttaatgtgtctcttccaagcaacaattgtatga

SEQ ID NO: 211888 - DNA, 122 bp, Homo sapiens
atgagaatggtctttccactgttttgtgtgcaaaatctggtagaagtgggcggaccctcccgcccctagctgggtgttggagaacagctgtcagcattgactgaaggctgcgaggcgcgcgt

SEQ ID NO: 211889 - DNA, 122 bp, Homo sapiens
caccggcactgcggcgggcgggcgccgagtctgggcgcggggacgcggggcggcgcgaagcggggccctctgccgccccgcgctcccatgtacgccttttactcgttgctcatctacatctt

SEQ ID NO: 211890 - DNA, 122 bp, Homo sapiens
ccagcagatgtggtgtctatggagagcctgtgttctggttagtgagcaataccttctctccgtgttctcacgtggtagaaggggagaggcagccctctggggcctctttcatgagggcacta

SEQ ID NO: 211891 - DNA, 122 bp, Homo sapiens
caccccaggcagccacgaactggcttgctccgttcagatttctcttaaacagcagttttccgtttctgttctatggcctctgagggaatttcccaaattaaccttcactaagctttcctgag

SEQ ID NO: 211892 - DNA, 122 bp, Homo sapiens
ggtagggtctcgcgccagccctctctcccacccagccactgagactctcgcccgtctgcccgcccaagaagctctcaccaaactgaggaaaagctgctgaagctgggcagcatcgtgccgca

SEQ ID NO: 211893 - DNA, 122 bp, Homo sapiens
tatattaacacctacgagtgcctgtatgtttgtaaacatcagctaattatccggggtccacgggaagaccaggcctcagcacaggaaataaagaaaaaaggggcaggaattctatgccccgt

SEQ ID NO: 211894 - DNA, 122 bp, Homo sapiens
ttcacccccctccccgcttggattcaggatgtgttagggaggcttgcagaagacaggggccgggctgtttgaccaacctggtacagggtctagcacatagcaggggtggtaaataaatagct

SEQ ID NO: 211895 - DNA, 122 bp, Homo sapiens
tgaatgagaactgtgagctcaagattggtgactttggtatggctcgtggcctgtgcacctcgcccgctgaacatcagtacttcatgactgagtatgtggccacgcgctggtaccgtgcgccc

SEQ ID NO: 211896 - DNA, 122 bp, Homo sapiens
cccgcgggggtgatatttctgaacacccgccctgttctgcaggtaccaggcacctgacatcgacgtgcagctgagctcggagctgacagactcgctcaggaccctgaaggtgctcactgtgt

SEQ ID NO: 211897 - DNA, 122 bp, Homo sapiens
gggaagaggggtggatgccagggaggtggcgggagccccaggatccgagaagggcctggacggggtgggacgggccagggcagaggatgcggggacgtggggacaggcggtgactgtcctgg

SEQ ID NO: 211898 - DNA, 122 bp, Homo sapiens
gtgtgtataacacaaataagtaaagtggccatcttctgcctgctttgtgggtgtctgagacggtatttgcatgacaacagactgtatttaaagccctcttctgtgtacccactcttcagccc

SEQ ID NO: 211899 - DNA, 122 bp, Homo sapiens
gcggctcgctgcggggaagcgctgcgcgggggtctcgggggctggggctgaactcacctccggtgccggcgccctccgggggctccatgcggccggtgcggtctgggaggggcacgggcgac

SEQ ID NO: 211900 - DNA, 122 bp, Homo sapiens
gctctctctccgctgccggaattcgtcttgcctgacggaagctggggagcgggcaggcggcgggggcggggcctggaggagcctacaccgactctggaggaagactggagcctttgcggcgg

SEQ ID NO: 211901 - DNA, 122 bp, Homo sapiens
cagtttccgagccccgcccggaggggggcacgcggtgggcattccggtgttgcagtgaaacgaaacttatttgctaaacttggccgagccttagaagttgaatgcctgcctcagaaagttgc

SEQ ID NO: 211902 - DNA, 122 bp, Homo sapiens
tgtaaacccagctaatgtgatttatctgatccatttcaatgcaagagaatgaaatggctccggtataacaaccaatacagaaacagcagttacaaacttacagggctgctgctgcttaaata

SEQ ID NO: 211903 - DNA, 122 bp, Homo sapiens
gcggtgtctaacacgttttaggaaagtaccaggcttgtggagggcgacaggaaacctccccgggagatcggcctggggctcctcctgccctagagcctgacctctcactctccgtaccggca

SEQ ID NO: 211904 - DNA, 122 bp, Homo sapiens
caaagacataaatgatcacactcccacgttcctaaacaatcatatgcttctaaaaatctccgaaggtgctactctaggaaccttattccaaatagatagtgcgcaggacttggatgtgggaa

SEQ ID NO: 211905 - DNA, 122 bp, Homo sapiens
tgaacccgttaggcagttacaaaggcttcttgggaggtattcatgtcacttacacaaacgcgaagtgaacttcaaatgtaaactctcttggaaacagaaaatgacatattatgtaaaattga

SEQ ID NO: 211906 - DNA, 122 bp, Homo sapiens
gagcggggcggtctgcggggtgggggcggggcctggtgggggcggggcctgtgcggtctgcggcgcggagccgagtgggctgcggggatgcgggggaccagctgcgtgggcggcggcgccga

SEQ ID NO: 211907 - DNA, 122 bp, Homo sapiens
cccgcctcacgctggctcctgataggcagctagagctgtccgttttgacagaaacctttgcgcaggcgcagaaaggcacaggactcgctaagtgttcgctacgcggggctaccggatcggtc

SEQ ID NO: 211908 - DNA, 122 bp, Homo sapiens
cggaaagggaactccctgaccccttgggcttcccaagtgaggcaatgcctcgccctgcttcggctcgcacacggtgcgctcacccactggcctgcgcccactgtctggcactccctagtgag

SEQ ID NO: 211909 - DNA, 122 bp, Homo sapiens
tgcagcaggttggctctgcgctccacaatcgccagctgctccttcaggtcctcctggccccggagggcatcatccaggtggagctgcgtatcctagccagagaaaaacgaacattctatttg

SEQ ID NO: 211910 - DNA, 122 bp, Homo sapiens
gatctttacatcaccagcactggtctccccttccatagcttaacatagtagctgcctttccgggcttgctttatttccaccttgcctgttagtctgatgcaggactcttgggctcttggctg

SEQ ID NO: 211911 - DNA, 122 bp, Homo sapiens
gagtcccagctgtgtgtcagggctaggagggctcggggacgcgcggggcaagtgaccgtgcgtgtaaaggttgaggcgtatggagctgtggcggggcggaggtgtgcaaatccgtagttacc

SEQ ID NO: 211912 - DNA, 122 bp, Homo sapiens
gctctgacaaagtgcttatgactactagatcttgctcggttatgtgagattacaattcaccggtttccatcctgtatgaaacagaagttaaacagttgtaaaagcaaaattccaggtctggt

SEQ ID NO: 211913 - DNA, 122 bp, Homo sapiens
cgcgccgcgcccccgcgcgcttggcttgcggggggccgggcctgcgggcggccgccgcgccgcgcacccatggacggcccggccatcatcacccaggtgaccaaccccaaggaggacgaggg

SEQ ID NO: 211914 - DNA, 122 bp, Homo sapiens
ggggtctgctgtggacacgagacggggtcctgggacagggaaagcccaccggtggggaggcgcggcctcgcctgtctttgcctcaggctgcccggcctgggtcgcggggaggaggaagtgaa

SEQ ID NO: 211915 - DNA, 122 bp, Homo sapiens
tccctcccactctcccaggccaggggaccctcactggccacaatccttccatcaatctgtcgggacccaaagcaaactgcccccactctgaagagaaaatgaaaggacggtcagcccctgcc

SEQ ID NO: 211916 - DNA, 122 bp, Homo sapiens
gtgaggcccgccaggcgctgggcccagaggactccgcgacgctaggaaatgtgtggcagccggggaggggacgcaaggagcccgggccaggagagggaattccaactatggcgttttggaga

SEQ ID NO: 211917 - DNA, 122 bp, Homo sapiens
tcctggaaagaaatcgagaaaagaatggattgccccaattaggacccaatatgattatcccgagggaagaacaaatggctggcaaggtcagcactctctctgcttatcccatttctagcttc

SEQ ID NO: 211918 - DNA, 122 bp, Homo sapiens
gcctgagctggggcgtccggaccgctccatggggtatgcggtctccatggggtatgcggtcgagctgggcactgacacttccctactttggaactgtgctatgggcaagatgggagcaggcg

SEQ ID NO: 211919 - DNA, 122 bp, Homo sapiens
accactgctataggagaacacgaggaaatatattttataaactgtaaagcactactaagacgtgagcagcggctgctgcatatccaggtcaacctttatgggcctgaagacaacctctcctt

SEQ ID NO: 211920 - DNA, 122 bp, Homo sapiens
agactcagagagactgaaaaacctcagttctcacagcctggaggtgcccagggccaagtccgtcctgtttcagagtttccacccgggcagaaccggaggcaggaggccctggcctggcctgg

SEQ ID NO: 211921 - DNA, 122 bp, Homo sapiens
tcccggagaaggaagtggggtgcggcgggtcctgggccaggcagggctgttcctccgcgccgggtcctaaactctctgcaaggtctctgtgtcctccctcgttgggcagggcccgcgagatg

SEQ ID NO: 211922 - DNA, 122 bp, Homo sapiens
ctgctggccggctgaacctgacttctcttcattgtgggctcctattggtaggcaggctaccgtataccctcgacgtgctatctggagcccgttaccgagcgcactctactagaaagataatg

SEQ ID NO: 211923 - DNA, 122 bp, Homo sapiens
taaaatgtgaatctgctactcaggaggctgaggcgggagaagtgctggagaccaggagttcgagaccagactgaacaacgtagtgagaccacccccgcccccgacccccagccccaactaaa

SEQ ID NO: 211924 - DNA, 122 bp, Homo sapiens
aacgagggggtgcgtgtgaggtcatcgcgcgggcgggcgggcggggtctggcggtttgaacgagacgaagacggaaccggagccggttgcgggcagtggacgcggttctgccgagagccggt

SEQ ID NO: 211925 - DNA, 122 bp, Homo sapiens
gggcttccccgccctcggacgctcattggctgggcgagacgcttctgggcgggccgcgcacgcctgcatctaggtcttggccccgcccctcccactggaaccccgccccttgggactccggc

SEQ ID NO: 211926 - DNA, 122 bp, Homo sapiens
agaggtccgccggagcctcagcgcgcaggagcggaagtggggttcgaccaaggggtgtggcgagcccggtttcctaggagacggcccgcgggttgctctcggactgagagcgcgaggcttcg

SEQ ID NO: 211927 - DNA, 122 bp, Homo sapiens
gacccgcgtctactccaccacagctagatgagaccctgtcggagagactatggggcctgacggagatgtttccggagagggtccggtccgcggccggagccacttttgatctttccctcttt

SEQ ID NO: 211928 - DNA, 122 bp, Homo sapiens
gcattccgagtcacacaggggagccctgcattccgagtcacacaggggagcactgcattccgagtcacacgggggagcactgcattccgagtcacacgggggagcactgcattccgagtcac

SEQ ID NO: 211929 - DNA, 122 bp, Homo sapiens
gcagcagctccgccgggggtggtggggcgcgggagtctcgactcccctcatctgtggacccgccgcgctgcggagcatgcgccgtgcttcgtctgcgcatgctctgtgcggacccgcggccc

SEQ ID NO: 211930 - DNA, 122 bp, Homo sapiens
ccccacccccctttcctggctctggttacggccttgcgagttgaacaaacttgctgcaggcggattggcggctgggagctctcgggctggggcgttgtatttattaatttatattccgcggc

SEQ ID NO: 211931 - DNA, 122 bp, Homo sapiens
agtgaacacaatgtcatttttgtcactagagggcactggagggacattgcaaaggcaggccgcttctcttcctgatgtcctttgctatgttttgctttttcttgttttcagactgtacattc

SEQ ID NO: 211932 - DNA, 122 bp, Homo sapiens
actgatatgaaatgaacaccccacaacccttaaaatgctgtattagtttgctatggctgccgtaatgaaatgccagggactggatggctgaaacaacagaaattaatttttttatggtttta

SEQ ID NO: 211933 - DNA, 122 bp, Homo sapiens
gtcaggaaccccggggccagaggttggggggcaccgagttttgcccccttcaccctctgtcgggaaaagcctcacctcggccttagtgcccttccccttaaaagcccactcgcactccctcc

SEQ ID NO: 211934 - DNA, 122 bp, Homo sapiens
tgggggtggggggcagcggaccctcatccgtgggtcacaggcatcaaggctgggatggggcggcgtgagggcagggctacgacaatggcaccacctgtgcccggcaggcatcaccacggtgc

SEQ ID NO: 211935 - DNA, 122 bp, Homo sapiens
taggcagacaccgtgctgtgcgcggggatcacagttatctagttcctctcgcgaggactccgagggacaggcagggtgctgcggagcgcacaggaaaggacctgaccctgtcgcagggaagg

SEQ ID NO: 211936 - DNA, 122 bp, Homo sapiens
gccagcgcgttctcctggaaggacaggtccaatgcgctctcccgggtggctgggccagcgcgcaggccttcctctggaattcctcccagcccaccgaacaggaacagggcggcgggctcaca

SEQ ID NO: 211937 - DNA, 122 bp, Homo sapiens
gcaggcgctgtgttctcgcctccccgagctcctccatcctgcttcccactacgctctgcacggatgctccacgccagctggtggcttagatgttttctcgtttcaagacagggagacagacg

SEQ ID NO: 211938 - DNA, 122 bp, Homo sapiens
ccatcagcgagaagctccatttgatctcggcagaggcagggagatttcatgctagttcgccggggggagcggcagcgagagcagccctctccgcggtgaatgggaaagtgggtgggagtcca

SEQ ID NO: 211939 - DNA, 122 bp, Homo sapiens
cactggggaagggagtttctgggaggcccctccttgcaggtgaggcagcgggcgggcggccgggtcccaggcctgacgcgcatgcacccacaacggccacactcatgcctcctcctgcacaa

SEQ ID NO: 211940 - DNA, 122 bp, Homo sapiens
ggtccccacctgcctcccttgctccagcagctgctgcagtgaccaaatctaagccagctccggccagctttgcactggacaggtgcatctggatggtgcctaaactgagggaagacagaaac

SEQ ID NO: 211941 - DNA, 122 bp, Homo sapiens
ctgaggccgaacctaggcggaaaagggccccctccctattcactcagcatccacctcgcgcgggcaatacacggcccacaattcccaaacactggtccctgggccgcccagaatcaccagcc

SEQ ID NO: 211942 - DNA, 122 bp, Homo sapiens
tacttgtcagtccgagtatgcaacacaaattgtcctccaatgggtagaaagcaaggaaagcgtggtgagagcagctatttactgggcaaatcactatactgagtgcctgaggcagtttatac

SEQ ID NO: 211943 - DNA, 122 bp, Homo sapiens
aggcgcggggaacgcaggttgcctggtctggatttgggtctcacactcaaaaacgtgccgcgcacacacacacagacacacacacaccccctacctcgcacaccctgactccggggggagga

SEQ ID NO: 211944 - DNA, 122 bp, Homo sapiens
acatccttttccctggaaccaagtgcttggttgggagaccatgccctccccttccttcctcggaactcctccctgatcgccccgtggcttccccaggagagatgcgaaatcagcggtagcag

SEQ ID NO: 211945 - DNA, 122 bp, Homo sapiens
tgggagtgagtgttaatgggaatggggtttgctttggggtgataaaaatgctctggagttcgtgctgatagtgacgattttgaatatactaaaaactactgaattgttgactttagaatggt

SEQ ID NO: 211946 - DNA, 122 bp, Homo sapiens
aaatatttataaccaagctgataacaggattagtcgcaccgataaggaatgctctgacaacgtcccttctctcgaagcttatggaagatgacaagcttgagcacgcatggaagactcaaagg

SEQ ID NO: 211947 - DNA, 122 bp, Homo sapiens
gaaatatgcacaatggtccaaaagtttactgtcccggatctggcatgggtcctccccagccggatggaccccaaggggagccctcctggcaccttgggacatgcccgcctctcttggccctc

SEQ ID NO: 211948 - DNA, 122 bp, Homo sapiens
aaatggctatcactgtctataatctgtaagactcttgctagggaatgaggcttgtgtttgcgtattaagcaagacaaaggttgtttttgtatcataatgtatgagaaggaaatattctttta

SEQ ID NO: 211949 - DNA, 122 bp, Homo sapiens
gctgggctcactactgtgtctgtggggacttggcaggtcactggggagccgggtggtctacgacagcctgaatgactcagctctgtgccatgtggtctcatgtggaggatacctctaattca

SEQ ID NO: 211950 - DNA, 122 bp, Homo sapiens
ctttcatgggttatttcatttagccttcataatatctcttgtcattgcctcacactcagtcggtggcttttaatactattctattattttgatcaatttgtataatatattctctcctcagt

SEQ ID NO: 211951 - DNA, 122 bp, Homo sapiens
tctcacctgctgctgcttgaggtctgccctccacaaagacaggaactcgtgtgtgctcaccgatgtttcccacacccctgaacggcgcccagaacacgataggttttcaacaatatgtggtg

SEQ ID NO: 211952 - DNA, 122 bp, Homo sapiens
gcgcctggcgcgcggggcgatgctgatccggaaggggcagcggctgcagtgcagcgcgcgcgtccgctcctgggcccacgtccggcctgggctgccctgccggagtttctgagtggccgcga

SEQ ID NO: 211953 - DNA, 122 bp, Homo sapiens
actcggggtcggggacagagagagccccaggatcccggaccagcggggtgtctgcgtgcccgggattccgtgtctcgcgtctcccgagggggcttcggcgacggcttctctctttatatata

SEQ ID NO: 211954 - DNA, 122 bp, Homo sapiens
gagagcccctctccgctcccgtgtgggcccgcaggagaagcggtgatggagagccgagctcgccccttccaagcgctgccccgtgagcagtctccaccacctcccctgcaaacgtccagtgg

SEQ ID NO: 211955 - DNA, 122 bp, Homo sapiens
ccagttttctgattcacaatgaagggaaatacaattgtgcatggcttagtgatggggatacgttctgtgaaatgtgtcaataggtgatttctcatagagaacatcataaagcatacttgcac

SEQ ID NO: 211956 - DNA, 122 bp, Homo sapiens
ataccaaaggaagacagaacgggggaaaggagcctgagtaaaatattttccaaatgaaagcgtctgacgcactggagaacttccacccagtgctgaatgtaaaaaacaacaacaacaacaaa

SEQ ID NO: 211957 - DNA, 122 bp, Homo sapiens
agacctcctgcctggagctgtgggggcaccgacagagcctgggagggcgtctttgtcctccggggctgcaggggacctggtataggaagggatggggtctgggcagagtgagaggccctgcc

SEQ ID NO: 211958 - DNA, 122 bp, Homo sapiens
ccagacagtgagctccccggggcatgaggactgacttcgtgcctgtgggagtgcggggggcggtgggagaagccccccggagcttggccaccctccgcgagggtctccaccccgcaggtccg

SEQ ID NO: 211959 - DNA, 122 bp, Homo sapiens
aaaacccatctgatcccagaggacctatctgtctgatagtgctcaaacccataggaagatcgctttaaagggaaatttagaactttctagttcaaagatttggtgcctttacctgtagtgaa

SEQ ID NO: 211960 - DNA, 122 bp, Homo sapiens
ggggacagtggcgcattgttccccggacacgccgggcggcgcagcgccctcggggcttggcgcggccccgccgcgatttgcatgcgctccagtcacaaaggttcaaggtcaggagcgccggg

SEQ ID NO: 211961 - DNA, 122 bp, Homo sapiens
gaagggcggcgggggaggaggctgctggctgggagctggaattcccttcccgcctggcgccgcccgggagagcccgcgcgaggacgcccgccgcgctccgccggcccttttttggcgctgag

SEQ ID NO: 211962 - DNA, 122 bp, Homo sapiens
caagaccttggtgcttggtagcagtcagcctagggccctgcagccccagctcagacctcacgcagaccttcttccagccccacaattgccatctgccgccccacgcgcaacacgtcctgctc

SEQ ID NO: 211963 - DNA, 122 bp, Homo sapiens
aaaatatagagaataaaaattatggaatttgtgaaacaaccatctctaattaaacacgctcgctagcacacacacccaacaccgcacagagtacagcttttcaaacctagcccattcatgca

SEQ ID NO: 211964 - DNA, 122 bp, Homo sapiens
ctgcccttgcgccgttcaggagttcccagggctgtactagacaaggactcgccactctgtcgcccaccttcttctgccttctgaggtgaggtagatgagttgtgtggggcaaatgaagacat

SEQ ID NO: 211965 - DNA, 122 bp, Homo sapiens
gtatccgtcatcgctgttagactcggggatggtatccgtcatcgctgttagactcagggccgatatcgtcatcgctgtgagacttggggctggtatccatcatcgctgttggactcggggcc

SEQ ID NO: 211966 - DNA, 122 bp, Homo sapiens
tatctctgcccaaagcagctttttcgaggcttttcgagcaccattggtccctaaggttagcgcggagaatgcttgggttccccggagcacagcagggggaagtattagcgagagagacgagc

SEQ ID NO: 211967 - DNA, 122 bp, Homo sapiens
ctcctttcttggctggaaagtgttccatcgtcatatggaaatcttgtggtcgatttaacccgttccctattgatagacgctgtgtgggctccagccttttgcagtcgactctgcgatgcata

SEQ ID NO: 211968 - DNA, 122 bp, Homo sapiens
gaaatgcagttagagagtggtttgaatgagaataccaagaactagtagctagatgccaaacgcagccaagctttcccaagagttctgtcaatcaagaaaaatgacccaggcaagcctcaatc

SEQ ID NO: 211969 - DNA, 122 bp, Homo sapiens
tttagctttcccatcctcgaccttaaaaggctagctgctaaaacgagttcttcaagtttacggacatgtatgatgagcaagaatggcaggaaagaaggtgggagaaggaccgctggttttta

SEQ ID NO: 211970 - DNA, 122 bp, Homo sapiens
ttttcaccatatcgtgagggacatgaaaatgcgatttccctaaaccagagccttcacgcacggcccgtgtggccaggcttcatgaggatgagcacaaggacaggtggctgtcacctggccaa

SEQ ID NO: 211971 - DNA, 122 bp, Homo sapiens
caggcgcccacctgtggggctgcagacccgggcgcccacctgtggggctgcagacccgggcgcccacctgtgggactgcagacccggggcgtccacctgtaggactgcagacccgggcaccc

SEQ ID NO: 211972 - DNA, 122 bp, Homo sapiens
tttttttttgagacggagttttgcccttgttgcccaggctggagtgcaatggcgtgatctcggctcaccacaacctccgccgcccaggttcaagcaagtctcccgcgtcagcctcccgagta

SEQ ID NO: 211973 - DNA, 122 bp, Homo sapiens
ggacagggcgagcggccgggctgggccggggagacgggtggggctagtggcgcgcggaggcgtggcagggggcgtggcgttgcgggcctgcggatgtgggacggcgtgcgcctgcgcaccag

SEQ ID NO: 211974 - DNA, 122 bp, Homo sapiens
ctttgcacaactgtcctcagccaggaaacgacagatcaggaacccagggacagaaacacacgcggggcctcttcagaggtcggcggggggggtgggaaaggggcggggaggaagagcagcgc

SEQ ID NO: 211975 - DNA, 122 bp, Homo sapiens
gcgggcggcgcgggcaggggcgggcaggggcacggccaggcgggctggggtgggcaggggcgcgcgcgcgaggctggtccccgcccccggggccgccgcttagctcccgggtacgtgcgtgc

SEQ ID NO: 211976 - DNA, 122 bp, Homo sapiens
gtgtggaaaggcatccgtgaattaacaccaatggcggagagcaggcagtagggaagcggccgcggtgggcgctgttccgcaccccgtgtggtctggcttgcacggccagggcagcccaggcg

SEQ ID NO: 211977 - DNA, 122 bp, Homo sapiens
cggccccggcagccgcagcaggggcggcggcggcggatcgaggagctctccaggtcgtcccgggagaggctgctgcagtcccgggacaggatgttctccaagttcacctccatcctgcagca

SEQ ID NO: 211978 - DNA, 122 bp, Homo sapiens
accacagcacggcacagttccacttgcttttaaatcacattgagtttacaaattcagaaacggctcagtctggcaccagatgaggaatgagaataaaaaattaacttggccacattcttcct

SEQ ID NO: 211979 - DNA, 122 bp, Homo sapiens
gctccggaatttgggggggtggctagcgaggccagaccccggagctgggaaaatgacctccgcgtccaaggtcgagcaggtccttctccctcccagtcccgccggcgagcacctctgcccct

SEQ ID NO: 211980 - DNA, 122 bp, Homo sapiens
atatagacatatttctgggagctgtccatgagctcatggctctcctggcgatagcggcagcggctagggaagcagcctcctttctcccggcgccgccgctagaataagcccggcagctcgca

SEQ ID NO: 211981 - DNA, 122 bp, Homo sapiens
tattgctaaaattcccatccagtctcacctcagacaaggcttccctggagtggggggtggcggcatattctaatcccctcacctggacagacagaaagtccttcctcaagtctgacccccat

SEQ ID NO: 211982 - DNA, 122 bp, Homo sapiens
catgcatcacgccggggaggggctgcggcgggcgccgggcctccagcgaactgccgccaccgctgccctgccactgctgctgggctggagctgctatgcctggccccgcctagagccttttc

SEQ ID NO: 211983 - DNA, 122 bp, Homo sapiens
aagcgaagacaacctgctaggaccctgataggcgtacacctctcactcccactcacgcgccgacgacatgggcttgtctccgttactcatccaagtttgtcttgagactgggctgtgagccg

SEQ ID NO: 211984 - DNA, 122 bp, Homo sapiens
tggctgtgtccccacttaaatctcaacttgaattctatctcccggatttcccaagtgttgcgggagggacccagggggataattgaatcatgggggccagtctttcccatgccattctcatg

SEQ ID NO: 211985 - DNA, 122 bp, Homo sapiens
gcttcgtggatttcaacatcaaagggcgcgacgtgatcgtgttcctccacatccagaagacggggggcaccactttcggccggcacctggtgaagaacatccggctggagcagccttgtagc

SEQ ID NO: 211986 - DNA, 122 bp, Homo sapiens
aatcttgaattccttctaaaggaacttcaataaggtgtgagtaacttaacccttttgacacgcattaaccacagggatgacactgtgtgtaaaataaccttggtgttaacaactgcgcagca

SEQ ID NO: 211987 - DNA, 122 bp, Homo sapiens
ctgtggggtggtccctgcaggtcaggtccctgagagtgggtcccagtggggtgatccctgcgggtcgcgtccctgcgagttgggtgcctgccgggtggcccctgcgggtcgggtgcctgcgg

SEQ ID NO: 211988 - DNA, 122 bp, Homo sapiens
gcatgttaagtgccattactactgtacacggaccatcgcctctgtctcctccgtgtctcgcgcgactgagaaccgtgacatcagcgtagtgttttgacctttctaggttcaaaagaagttgt

SEQ ID NO: 211989 - DNA, 122 bp, Homo sapiens
gactaatccctggaacagctcggggaggattatcccagccactgtcagcagcggtgcagccggctcattcccagataggggaggccagagccaggggcctgccgcaagttggaagaggctgg

SEQ ID NO: 211990 - DNA, 122 bp, Homo sapiens
tggagacgggcacagccgggatggaggttcaacggcagaggcatgaccacggtggggaaccggaggcagggatatggccaagacgggcctgggaatcccgggaatccgagaccctcctggca

SEQ ID NO: 211991 - DNA, 122 bp, Homo sapiens
cgatgacccggatgtgggaggtaaatcgggaggtgaaggctgcgatgaccccgtagaccacgcccacaagcaccccgcccagggccaccacgaagaagctcaggaagccgaggaagatgtcc

SEQ ID NO: 211992 - DNA, 122 bp, Homo sapiens
cgcgccgctgggagggcggggtgggtggctggaggtaaggaggcgcacagcaggggtaagcgccgccgtcgcacactttgcacgccgcccagggctacaccactcaccgaaaattgggaggc

SEQ ID NO: 211993 - DNA, 122 bp, Homo sapiens
gagcaggccggagagaagggggcggagccacggcgagggcgggacaaaagctgccgggggcgggaccactcgttcccaggccggaagagtgaagtccagtggagttaagtgcaggggtctgg

SEQ ID NO: 211994 - DNA, 122 bp, Homo sapiens
gacccgcacaagggagggactgttctcagtaggaggctggactcagagcggcgcggcgcccggggctgtttcgtgagctggagccagcggctgcccgggcggcggtgcgcgcactctccagg

SEQ ID NO: 211995 - DNA, 122 bp, Homo sapiens
caaacctccccagcccaggtggctgcatccttctcctcccctccccccagttccctgggtcgccaagccggaggctttgaaaaccagcttgtgtttggtttgtgaaagcaccaatgtttgca

SEQ ID NO: 211996 - DNA, 122 bp, Homo sapiens
aaaggccaacgaagacagcccaagtcaccacccggaagtagtgcaggggtaacgaccagccgttcactctggagatgcggggcggcaagaccagctcttcattgttgcgtatggcttctggg

SEQ ID NO: 211997 - DNA, 122 bp, Homo sapiens
ctcagcaaaatgcttgcatccacaacatgcaagactgcagcagctgctgggctggggctgcgagaccagcgaaaagccctgacttgggggggtctcgggagtctctgcagtctccccaccca

SEQ ID NO: 211998 - DNA, 122 bp, Homo sapiens
ctagagaggatgttgcagaactccgccgaggccaaaaacagagagtgggcacgttgctgccggttatagaggaatgggaccacctcagggtggtctgctgtctgcatcttacaaagttcaag

SEQ ID NO: 211999 - DNA, 122 bp, Homo sapiens
gggcgcggggccgaggtggggagaagtgcccgggaggcgcgggcggcctgggtgagggggcgctgagcacactcatcccagggtatgcagaggagtgtcgttcccaggtccctttgaccagg

SEQ ID NO: 212000 - DNA, 122 bp, Homo sapiens
gcctcaatgggggaccgggggtggggaatagtcccagtcttggcccgttctctttccttccggagcagatgaccgtcccttctcggttcagtggcgcctccccagtgctgggggcggatcgc

SEQ ID NO: 212001 - DNA, 122 bp, Homo sapiens
cgaaagtgtggtcagctatatcggagcgcgatgggggcctgagaggcgcatctgcgcaggcgcccggctcctaagtctacccaggaactgaccctgctctctcctttccctgttagacatgg

SEQ ID NO: 212002 - DNA, 122 bp, Homo sapiens
tcccctcctcttcctcagtccttaccacttccctccacgaccccaggtggccccgttattcgtccaggtgcccagggaggaggacccgcctgcagcatgaacctgtggctcctggcctgcct

SEQ ID NO: 212003 - DNA, 122 bp, Homo sapiens
gctctccactattcccaggagaggctgctgccagctgtctgatttctaatttcaaaatcacgctttgtcctgcaaatgttgtatattgtttattttaggtcaaataaccccataaatacgta

SEQ ID NO: 212004 - DNA, 122 bp, Homo sapiens
ctggccgagcaggtcggaggtggcagtggctggtccaaggctcaggggcctccttgactccggcttgggaggaggtgccaaagaggcagctgtgaacaccaccaaagccccttcaaatggca

SEQ ID NO: 212005 - DNA, 122 bp, Homo sapiens
gtcccaggtcttgccactacagaggcgcgtatgaaccacggtttaacactacgtctacgccgaagttcgggttagtcagaggccacgcccaccgcaggcccgaaaacaccagcctgcactgg

SEQ ID NO: 212006 - DNA, 122 bp, Homo sapiens
ccacagggcacacagagacaattcatccaatcaatgtgtaagcttttaaatgccagtttacgataggagctctacaaatattaccagctgcagagtgaggacacttgcatttctctttaggt

SEQ ID NO: 212007 - DNA, 122 bp, Homo sapiens
agctgcatctccttcctaatcctctgggtgccttggaatagaagctcagaaggaagaaaacgacattttcaactttcaggaactagctctgtcgccctctgcacagctcgggagacagcact

SEQ ID NO: 212008 - DNA, 122 bp, Homo sapiens
ccccaccccccacaccaggtaattttcctacgacgcggtgggggtgcgtccctggcccagcgctgcgcggggcggggcgcggggcgcgggggcggggcctggcgggccggggcggggcctcg

SEQ ID NO: 212009 - DNA, 122 bp, Homo sapiens
attttcccctgccccttcctcccagagttgggggaagggtagcagcaaaccccagctgggcgacaacttccgccgccacgtgcttggttcgatactgttttcctggttttccagccatctcc

SEQ ID NO: 212010 - DNA, 122 bp, Homo sapiens
catggcaggccgcagtcaaaacctccaaacacgacaacgactccgaggcaccgcacctcccgctgagaaatgatgacttgactgaacattgaatagggctgggcagccacacggcaaaaaca

SEQ ID NO: 212011 - DNA, 122 bp, Homo sapiens
ccttggtggatgagaaggtgcacagctgggtggaggaaccgacgataactcggggcaggccgcccagagccccacgccataaccccaccagaccatgtttctggccaatctcggttagcgcc

SEQ ID NO: 212012 - DNA, 122 bp, Homo sapiens
tgaaaaaacagccatagtttggcacaccgtcccgggcattctgttgctagaggggctgtccgcttttctttgtggtgctctgcacaactcggtaagacccctcgtattgttatcttaccctt

SEQ ID NO: 212013 - DNA, 122 bp, Homo sapiens
tttgacattggttagagttctgtcttggcaacaccacctccctctttgcttgctagagaccgagggagcaattgtgtcacccatttgggctgaccaacggatgagtggcaggattccaactt

SEQ ID NO: 212014 - DNA, 122 bp, Homo sapiens
accccccaaaacgtttgtgcattggaaaaatggggaattggctgggcgctcattggctgccggagaagctaattgtttccttgaagtcacaggtttcggacggaggaaagaagagttggggt

SEQ ID NO: 212015 - DNA, 122 bp, Homo sapiens
tccactctccaatgtactttttcctctccaacctctccttcttggacctctgtttcaccacgagttgtgttccccaaatgctggtcaacctctggggcccaaagaagaccatcagcttcctg

SEQ ID NO: 212016 - DNA, 122 bp, Homo sapiens
aaaggggaggggaaacttaaaaaagagtttaaaaagacggagagactaccctcctattgccgttcaactaaacaaaaaggggcaagaaaaacaaaccaaggaacaaagaaaagagacgaaag

SEQ ID NO: 212017 - DNA, 122 bp, Homo sapiens
gccccgggcagtaggtctgtgcttcttccttggtcccattacacgggaagggcaaggtgacgccactcagccacgcaggcctcgcattggtgccttcccttccctagccaggacgcggctat

SEQ ID NO: 212018 - DNA, 122 bp, Homo sapiens
aagtgttttcaggccttccttttatatgggcgaggatgggaagcctcttacagctgttgacgagtgtcctgaaggggcaacgatggggatggcagtgtggccccacgaacaatggtcacaga

SEQ ID NO: 212019 - DNA, 122 bp, Homo sapiens
gagctcagggcccagtccagattggacgagaaagttccctaggccaagctggctaagcaccgcaggtaccattataacgccagccctgagggatgtgagccaactacttaagaattagagag

SEQ ID NO: 212020 - DNA, 122 bp, Homo sapiens
catggacggatggttgtacgccgtggggggtaacgacggtagctccagcctcaactccatcgagaagtacaacccgaggaccaacaagtgggtggccgcatcctgcatgttcacccggcgca

SEQ ID NO: 212021 - DNA, 122 bp, Homo sapiens
ccgcagtttctcttcttctcacaacctgcgacgggtccttcttccttgatactcacgaagcggacacagttctcattcccactaggtgtcgggtttctagagaagccaatcggtgccgccgc

SEQ ID NO: 212022 - DNA, 122 bp, Homo sapiens
ttggaggaaacgcctgcttgcctgctgcatcactgattgtttcctgaatatcaagaaagacgatgctgggaatagtccctccttgcccagatctctgaaaagccaggtaggaggtgagattc

SEQ ID NO: 212023 - DNA, 122 bp, Homo sapiens
gcatctcctattcaggacccaccacccggacacctgcctttcagagcccaccccacagcccgagggacctgagatgccccaacatttcagatccccaccctcaggaactgccccacgtgaag

SEQ ID NO: 212024 - DNA, 122 bp, Homo sapiens
gggggccggactgggcggagcaggcggcatttgcggccggcgccagggtggagagttgtgcgccggtccctgggcctgagctccggctccggctggggcgcctgcgatgtctcaagatggcg

SEQ ID NO: 212025 - DNA, 122 bp, Homo sapiens
ctgtgaggcttgtagagtcgcctctctcttcaggcgcagcagagggcggccgcaatagtacgctcgcgcggcggtggcgggtggtggtccttggaccacgcggtgggcggagccagcggcga

SEQ ID NO: 212026 - DNA, 122 bp, Homo sapiens
cagtgacttgatccttcctcatggcgttcacgtcacttaagacctgtaggtaagtccagtcgttaagtgataatattatattcctggttttgactcactgctcccaggaccacctaactcat

SEQ ID NO: 212027 - DNA, 122 bp, Homo sapiens
ctcctgcgctcctccgcgcccaggccgcgagtgctggacgagatggtggcggggctatggcgtgagtcgggcgacgctttgtccagccgcccgctgtcccggggccgctcagcagcgaaaag

SEQ ID NO: 212028 - DNA, 122 bp, Homo sapiens
tgtccccaccccaggtcagtccgggaaagcgaggatgaggatgaggaggaggaggagcggcggcagagtgcaagccgtggctgcaccctgcagtaccagcatgccaccctgcaggtcttcac

SEQ ID NO: 212029 - DNA, 122 bp, Homo sapiens
ccgacaactgccaggcccggagaggagaagccaatccccaagctgggggcgggcctacctcgctgtcagagctgtttgaaacttgaggacattccagggaatcttggagcgctgcgtgacca

SEQ ID NO: 212030 - DNA, 122 bp, Homo sapiens
acgtactggagggagatggtcagactgggccgggaatccacctcacagccaggcgccggccgcggctggaccggccgagcggcccgggcggaggagtcgagcgggcagagacggtgggcggc

SEQ ID NO: 212031 - DNA, 122 bp, Homo sapiens
acttgtataaatgtactttgaaatgtttggaaagttgtgtatggactggaaaaatgcatgcgagatgttcctttgctttgtatattgtgaaagggaggatttgtacatgctttgttgttgtt

SEQ ID NO: 212032 - DNA, 122 bp, Homo sapiens
aggccgtgtgcgccggatcccggtgcctccgcgccagctgagacctgcctttcccaggggcggctttgctccggcccctaggcccccgccctggtaccccacacgcccaccggccgcgggga

SEQ ID NO: 212033 - DNA, 122 bp, Homo sapiens
atgccagccacttctgcgaggtgaacagaccatcccaaaagatcctgagctggccgggcgcggtggctcacgcctgtaatcccagcactttgggaggccaagggggggcggatcacgaggtc

SEQ ID NO: 212034 - DNA, 122 bp, Homo sapiens
tcatagcggtgaccacagctccaaggacagctaggacaaccaggacagccaggccagcaacgatgcccatgatggggatggtgggctgggaagatggctctgggaaaggaggagaaggtgag

SEQ ID NO: 212035 - DNA, 122 bp, Homo sapiens
cctgcccagacaccccaaacaccgaaactgtcatccgaaggccccgcacctgccgcctgtcggatgctgaagaacgaatcccaggtggagaggacagcaccccaaaagggatgggggatgga

SEQ ID NO: 212036 - DNA, 122 bp, Homo sapiens
tcctcttcgctgcggttcatttctcccagggccccatgcacttgtcctcggaccctcgggcggaaactgggccagcgcttcccctggtggcagtcagtgaaagtcctcagattaccttcatc

SEQ ID NO: 212037 - DNA, 122 bp, Homo sapiens
gtaacttttatatgcattaggaaactgaaaaattcgtgtgactcgttttgttgcaatactcgctttattgcgggggtctggaacctaacctgcaatatctctgcgttatgcccttatagcgc

SEQ ID NO: 212038 - DNA, 122 bp, Homo sapiens
gtcaaatgtggtaacaaaggagccaccttccagggagcagtgtccggggcacggccgctccgtgcacacccagcggcccagggtgcaccggctgtgggtgggcgtgggggtagcggcatggt

SEQ ID NO: 212039 - DNA, 122 bp, Homo sapiens
tttccttccctgctctcccttttcttcctctagtttttagccagacgccaattctccaggcgctgcagcatgtccaagcgagctgtgacgaagcccacaagatgaagtgaggctcctgccac

SEQ ID NO: 212040 - DNA, 122 bp, Homo sapiens
aggtcacagagctggggcgtacccaagtaggtagacctggaaccccagtttgctgaaggccgggcccttcctccaggggcgctgctccgccctgtctgcttgagctgagtcaggactggccg

SEQ ID NO: 212041 - DNA, 122 bp, Homo sapiens
agggctgcctcatcctgaagaaggctgcgtttacccagggagccataaagagatgacctccgataacctgaatcaatatttccccattggggctcgggcccccgcagctgtcttcttgatca

SEQ ID NO: 212042 - DNA, 122 bp, Homo sapiens
aatataacagcaactattctggtgctgggaatacaacaaggttcctcatctctcacgttccggtgaggagagacagacaattaaaaaaacaacaaataggccaggcgcggtggctcatacct

SEQ ID NO: 212043 - DNA, 122 bp, Homo sapiens
aaatttatcttaaagttattggcaggtcagaagcctgatacggatctcattgggctaaaacgaaggagttggcagggctgtgtgttcctttctgtaggctctgggcaggatccatttcctgc

SEQ ID NO: 212044 - DNA, 122 bp, Homo sapiens
aacccccggcgctaaggacagtgggagtcgtagtctacattgtttagggaaggagattggcgtacccgcagccacttccgccggaaatgctccaatcccggaaggcgcactaaattagccct

SEQ ID NO: 212045 - DNA, 122 bp, Homo sapiens
agctgaagtcatagttctcgtcactgaggcaggggtccagcgcgaggtggtggttgtggtcgtcggtgcccggcgccaaatgcagcccgggttccccgcgcagcagggccaggggcacgtcg

SEQ ID NO: 212046 - DNA, 122 bp, Homo sapiens
acttccagaatggtgcttggggaatacttgtagtacgagttgcatgactaattctccccacgcagtatagaagacctactcctgagggtattatacatttaaaaagtagcatgaaaaagaga

SEQ ID NO: 212047 - DNA, 122 bp, Homo sapiens
aaggtcaggtggcccagttaggcgaaagataagggccaggttagcaagctgcggagagaccgcagcaccccacgggccctccagtcaccttggcatgggcggggcctgacagctgcgggccc

SEQ ID NO: 212048 - DNA, 122 bp, Homo sapiens
cttagggagcttttgtttcatgaactcttacctctcaggactaacttgaagctggaaaaccgaccaaaattcccttgcattggtatagctagaaaggctacagatatcacctcatctcagga

SEQ ID NO: 212049 - DNA, 122 bp, Homo sapiens
tcttgaagtcacagttgtcccctggtctgtctagcctgccctcctctgcccccctccctccgtcattcaaacaagtggctctctcaaggagtttctggaagctgctgtgagtcgggtagtgg

SEQ ID NO: 212050 - DNA, 122 bp, Homo sapiens
gcataacgaaggtaaagaaggcgtggctactgcccaaatccaagatggctaccaggaggccgtcagttctcggaagtgcggcacatcctcactcctgggaggctcaaaggctcaaacgccat

SEQ ID NO: 212051 - DNA, 122 bp, Homo sapiens
gcacctggaggggcggttctggcccagtgctcccggaaagggtggctttcggcaaagtctcggcctcgccttgaccctccaggaaaaatgttcctgagcggaaagatcgttcaagttgcctg

SEQ ID NO: 212052 - DNA, 122 bp, Homo sapiens
gtctcctgagtgatgtcgccggcgatcagatcagctcgtgtgagcaccgagtgtggcacacgactggcctcaggaccccttaagtacccggcgcaacaatgggcgcccccctcccttgccac

SEQ ID NO: 212053 - DNA, 122 bp, Homo sapiens
tctttgtctctgaagctatctctctgagaatgtctctgtccctttctgtctgcccctcttcgtgtttctctgtctcaagctgacgctgtctcgtggcctgtctcactgtgtcttcttctgtc

SEQ ID NO: 212054 - DNA, 122 bp, Homo sapiens
cctcctcgccctcagcattccagtagcctgcggacgggcgtggggccccggacactggaacgccacactctgcaaaacccagtggccaggggtgcaacttgcacgtgcactcggggtaaaag

SEQ ID NO: 212055 - DNA, 122 bp, Homo sapiens
ccccgcggcacaggagcgactcggcaggaaggggaaggggcagcagacagcagacagcatcgccccatgacacacgtggcaaccaaagcacagacgctgctgggtccatgctcagtggaggt

SEQ ID NO: 212056 - DNA, 122 bp, Homo sapiens
ggggcggacggagctgagggtgggcaggcgaggttgatggagcccttccaggaagcagggcgaggctcaagcacccagaaaaacctgtggctgccgaggtcccccgccagcagcgggcagcg

SEQ ID NO: 212057 - DNA, 122 bp, Homo sapiens
tattggctcagttgcgtcacatgttcatttgcaaacttatcatcatagctcagggaaatgcgatgctttccttggttgggcctgaatcacatgctctcccttggagccaagaacatgatcaa

SEQ ID NO: 212058 - DNA, 122 bp, Homo sapiens
gggagaagggcggaagggagagggggcggggaaggcagggcagcgacagtcgcacagtcccgcggacgctcccaggcccacgccctgactcgctcacacccacccacactcacacccacccg

SEQ ID NO: 212059 - DNA, 122 bp, Homo sapiens
tagccgaggctctccccgctgcaccctctgccttctgctcccagcagggcgctgcagcatcgtccggttttaacagggtgaggcggctcccacagacatgtgatgcagaaagtcctcgacac

SEQ ID NO: 212060 - DNA, 122 bp, Homo sapiens
tctagcagccctcctgctggcctggctgtccctctgccagcctgagtttccacctgtgtgcgagttggccagtctgctcacccttccacctaactgtccgcagtccttctgcttgcctgttt

SEQ ID NO: 212061 - DNA, 122 bp, Homo sapiens
gcggcgtcgctgcgccgccggcccggcgtcagcggcgtcaagtccctgcgcggtcacggtcgcttcgacgcacgcaggatccctccgctgggacaagtagtgccctgagactcccgaggctc

SEQ ID NO: 212062 - DNA, 122 bp, Homo sapiens
tcccagtgtccttggcccaaacctctgttctctcatagatcagggagccgatagcatgtccgggccttggtgacgacgggtcaggccatgaactgggcttgagatctctggcgaggaccagg

SEQ ID NO: 212063 - DNA, 122 bp, Homo sapiens
ctccctgaccccttgcgcttcccaggtgaggcaatgcctcgccctgtttcggcttgcgcacggtgcgcgcacacactgcctgcgcccactgtctggcgctccctagtgagatgaacccagta

SEQ ID NO: 212064 - DNA, 122 bp, Homo sapiens
cctcccctggctggggggcggtccgtgtgaagttcttggtgtccagtggtgagcatgagccgtccctgcgatgccaagcctctccttgctgacggcggggattgacgatccagcttatgtgc

SEQ ID NO: 212065 - DNA, 122 bp, Homo sapiens
gagaaagtaatctttgtgatttaaagaccccccaccccatcttgtactgaccagatcccccgaccatccaggggcctttgaactcattcagctttggcaggaaatggaccctccgcatcaga

SEQ ID NO: 212066 - DNA, 122 bp, Homo sapiens
ttttatcttaatatcagaaaagttagagttttatagagaaaaggtaaaaagtgatatttacggattattgctggagaggcttttggtccatctcttccagaagagaagatcaaaggagagag

SEQ ID NO: 212067 - DNA, 122 bp, Homo sapiens
cccatgattctcattggcagccacagttgagtccattttgtacccaggctggagtcactgcgaatggccgccacctctctttttgcatagccaacaccggcctcttaggatcacctgggtcc

SEQ ID NO: 212068 - DNA, 122 bp, Homo sapiens
agtcaggtgttcctagaggaaggtcacatactggttaaactgtcattttgcttcttagtgcgcatgcttgagcccacttgcccagcttcggagatcttatcaggaagttgctgatcaccagc

SEQ ID NO: 212069 - DNA, 122 bp, Homo sapiens
ctcaacctcatcttcaagtggtgagacagagaagccctccggcatcctggtccccacccccgagggccctgagtcatgtgtaagccctggtctctttcagcaactgtctcaagggccttccc

SEQ ID NO: 212070 - DNA, 122 bp, Homo sapiens
agacagacacacagatacaaatgaaggtgggctgggaactgttcggtccccttctgcctccgggctctcgcgggagcgggcctctccggggcactcgcgtttcccccccagcccccagaggg

SEQ ID NO: 212071 - DNA, 122 bp, Homo sapiens
gcgcgctcgactggggtgcgatgggcagcgggactccggctgacctgtgggctactgtagcgcgcacccgggcagcgtggtcgctggcagtgtttgcggggttgacagagtggcaagagggt

SEQ ID NO: 212072 - DNA, 122 bp, Homo sapiens
gggcagcatccaaatgcagagacttgggccagtgttcttaggataataggatcagagccccggaagtagagcttcaggaatagactgacgaagtggtgaccgggtacagtggctcacatctg

SEQ ID NO: 212073 - DNA, 122 bp, Homo sapiens
ccaaggccgtcagcctcatttggaggttgctgggagagttggagccctggatgcatttgccgtttagacttctattttctgggtccggctagtgggtgggggccaagctcggttcgcccttc

SEQ ID NO: 212074 - DNA, 122 bp, Homo sapiens
gaatctctttgctttccaaagtaacaacatacacagaaacccatatgggggccgtggcggcgtcgggctggacgcattacagcgctccccaccaccggatcgcttccagggcggctccggca

SEQ ID NO: 212075 - DNA, 122 bp, Homo sapiens
ccctttctgccactcaaagtcaaaaacttttcaatgggtctccattgcttgctgaaatatcgttatctgctgcccttcttcagagtctttcccaatatggcctctttctaattttatattct

SEQ ID NO: 212076 - DNA, 122 bp, Homo sapiens
caccttccacagcgcagacgcctcagtttggcctccctcggaggccatgcagcgaagaaacgtgacttcatggctagaggggcatttcccaggagccgcccatgccgccgcgtgaccttcac

SEQ ID NO: 212077 - DNA, 122 bp, Homo sapiens
agacagcttcctcctgggaggcgcctggcacccagctcgtcacgctcagccggcaggcagcgggcaggaacccctcacctgtgatcatttattgcagttcctgggccctcgggaatgccccg

SEQ ID NO: 212078 - DNA, 122 bp, Homo sapiens
aaggtcactaatcagctggtcttaaaatagggagatgatcctggatgatccacacgggcccgctgtcatcacaagagtttttaaaagcgcaatagaccatctgaggggtgcagtgggagagg

SEQ ID NO: 212079 - DNA, 122 bp, Homo sapiens
attgtggtcctgaccatctgtgccaagagcttggcggtcaaggcggaagccatgaagaagcgcaagttctcttaaaggggaaggaggcttgtagaaagcaaagtacagaagctgtactcatc

SEQ ID NO: 212080 - DNA, 122 bp, Homo sapiens
gggcaaacagaccagccagaagtggggagagggaaagcaagtggggcgtcctgttcgagacggacactgaggtcaccagcacaggcaggcgtcaatctgaccaaggagaccaggatctcagg

SEQ ID NO: 212081 - DNA, 122 bp, Homo sapiens
acccttcatcgttcctccggtcaatggtctgccggcctgtcggtgcctgttggtgcctgtcggtgtgctcctacgctggtgtgttcctctcgacctaccctcaacgtccagccgcttgtgtc

SEQ ID NO: 212082 - DNA, 122 bp, Homo sapiens
gacgtccaggtggagaaggaatcacttcctgtctctggatccgtctcgatctctgcctggcgagggcgcgccccggctgggcgtggacactgttctccggccgcgtcgggccgggcgggtgg

SEQ ID NO: 212083 - DNA, 122 bp, Homo sapiens
tccccccagacccttcccagtgcccaccaaccggcggcctaggccaggtagaactggcagcgcctcccctgctgcaacaccaggctctggtagaaacttcagaaaacatgcaccggcaaaac

SEQ ID NO: 212084 - DNA, 122 bp, Homo sapiens
taccctcactctgtttctccttgactctcccattcctgttttgttatctttctttattgccgtttctttctgcttttctgtttatcactcgctggctacttgcctttctctctctattctct

SEQ ID NO: 212085 - DNA, 122 bp, Homo sapiens
gaagttggggcttgaggcctaagggagtaacatgagcaacactcctggctccctgcctggcgcatgcccattacccctgggctcagggaggtgaggctgcccgagagccctctggaaatggc

SEQ ID NO: 212086 - DNA, 122 bp, Homo sapiens
agacagcgggcacggtagcgcttaagatataatacacaccactttatttgcagggtctcccgtctctcggttcaggccatcatggttttccaaatctctaggtagacttttctgtgaaaaga

SEQ ID NO: 212087 - DNA, 122 bp, Homo sapiens
ctgttgctccgagagggatcgctcacgagtagtggagccgagatcgaatctgtgttaattcggagctcagtctctgtcacgtccccctcagtctacctggataaatatgagaagtgcaggct

SEQ ID NO: 212088 - DNA, 122 bp, Homo sapiens
tgcaagttttaatggtaatcaacccgggtttggggttgctcctatagagtgaagtacctccggaggtggcaggaaatgcaggtatttaaagggaagggcataccagggcaatgtaatttctt

SEQ ID NO: 212089 - DNA, 122 bp, Homo sapiens
ctcagaggaaccggcgggaggccagtggggcccgacgtgtgcccagctcagacgttaccacgggctctagaacattctgcagattgggtgtcctggtgctggtctcgtaacttgacttttag

SEQ ID NO: 212090 - DNA, 122 bp, Homo sapiens
gatgggacctgggctcagcccagctaccagcagctcacatgtggggtgtggggacctcgccgtccccatgtcccaagcagccaacgctggcacgggtgagcatctgtgactctgggaatacc

SEQ ID NO: 212091 - DNA, 122 bp, Homo sapiens
tcagcccccactccagttgtgcgccaggtgtgccccagaagtgcccgcgcgctgtgtatacgctggcgccgcccccacgcgcccgccccggatccgcatcgggtcatagatttctgggtgac

SEQ ID NO: 212092 - DNA, 122 bp, Homo sapiens
tctttcaaagagtgatggttacggaaattagtggtgcagaaatccatactcatcattcatcgggggccttattaaccttcttacgatgtgataggagcggcttggcctcctgactccagggg

SEQ ID NO: 212093 - DNA, 122 bp, Homo sapiens
gtgcccccgggtctccggccacccggtgacggagggagggagaggctggcgagggggcggcgccttaggtcccagcgcgacccgcctctcagcccctcccgccggctacagccgcgcgggac

SEQ ID NO: 212094 - DNA, 122 bp, Homo sapiens
ccgtttcgcttccctttttgtgagcctgcggctgctgctctgcgcttgcctggatgctgccgcttgttgaagctgcgtttttctctcctatttgcaggtgtctttaaccacgcggtgccctc

SEQ ID NO: 212095 - DNA, 122 bp, Homo sapiens
tttgagcacatactgtgcttggagctattgtggatactggggacaaatgggtccttgccccgatgaagaagagttctaatctaaagattcattgtaagtactcagtaagtggtagctacttt

SEQ ID NO: 212096 - DNA, 122 bp, Homo sapiens
gggcagagggaccggaccggaagtgacgtgagcgggttccggttgtctggagcccagcggcgggtgtgagagtccgtaaggagcagcttccaggatcctgagatccggagcagccggggtcg

SEQ ID NO: 212097 - DNA, 122 bp, Homo sapiens
atgccactggctcatgtgggtcccaagaagccgcccacccaatgccaagtcggccaaaagcgccagtccggcgccctcaatgccaggataagaccctaaacaggaaaagactcggcagccac

SEQ ID NO: 212098 - DNA, 122 bp, Homo sapiens
cgctcacctccaagctggacgcccgcggagccctgatcccctaacgcccgcttccgaggccgagctctgcagccccctgcaaccatcagatccagattgccttcctgcacgagcgcgcaact

SEQ ID NO: 212099 - DNA, 122 bp, Homo sapiens
catttttattacaaataaataactaaaagttaacattttaaagcgtacaattcactggcacgcagcatattcgcaactatcatcactatctggctcagaacgttttcctcaccccaaaagga

SEQ ID NO: 212100 - DNA, 122 bp, Homo sapiens
ttaaggcacagatcactcatgctcttgtttgtggtttaagaacgcctttaagcagttttccgccctgggtgggccaggtgttccttgccctcattccggtaaacccacaaccttccaccgtg

SEQ ID NO: 212101 - DNA, 122 bp, Homo sapiens
gggccggaaagcactttccctatagattctggtgccctgcggctctcggatggggagatgcgcgcactccagacccccacaggcccccagagcacggtggagggtgggggcagagtcataag

SEQ ID NO: 212102 - DNA, 122 bp, Homo sapiens
agctctccgtgtcctgctgtggtaagtcatggtgtactacatcgagatgctctagctctccgtgtcccgctgtgttaagtcatggtgaactacatcaagatgctctagctctcagtgtccca

SEQ ID NO: 212103 - DNA, 122 bp, Homo sapiens
tggtgtcagtgcagcgcattgatcgcccgccgggcgggccgggctgcaagccgggcagcgcgtgcttaatgtgattgaaaggcagttaaaatggcggtgaccttttcaggaggaattagatt

SEQ ID NO: 212104 - DNA, 122 bp, Homo sapiens
cctggctagggtccctgtgaaggaatgggatcccgaggtgcttgccaggaccgtagcaggcggaagctgctggcagcgcgaacgggcggctcccgccggcgtgggtgggggaagggcggcag

SEQ ID NO: 212105 - DNA, 122 bp, Homo sapiens
cccctcggacccggtgctcaaaggacttgtcatacgggtaattggccaccaccgcccctccgtggagattggctgaaagaacaaagttgaaggagtgcatccaccggatcaccgcccgggtc

SEQ ID NO: 212106 - DNA, 122 bp, Homo sapiens
ttaagaggtagaagccaattagggatagcctggctcccacctgacaccgcagaagcaaaacggactggccccaccagtcagcagagagcccaccccagccctgtcgaagggcaggtgtgatg

SEQ ID NO: 212107 - DNA, 122 bp, Homo sapiens
ggggttgagcatggccttgcggagcagtgttatggtaggggcggggctgggatccggagccgttacaaaggaggaaggcggggccgcgcagagcagggtcagggtaggagggcgctcagggt

SEQ ID NO: 212108 - DNA, 122 bp, Homo sapiens
atcacccaggagtggggtggcgaggcggccgccgggcctgggcaggacaatggccacggccgccggggccccgggagcccccgcgctggggaaggggctgtcctagggccgggcgccggtgc

SEQ ID NO: 212109 - DNA, 122 bp, Homo sapiens
atgaatggctggccgactgaactatgtattcactgggccttattctgctctctctagaaccgcacagataaatccaatcctttgttccatgtaataaatctgatatttaaggttcgctatga

SEQ ID NO: 212110 - DNA, 122 bp, Homo sapiens
gaaacaggatattatgtatttctgaagaaaacccaggaaaacccgagagaactaagtgcccgcgggatgagtgtgcgggcagctcctccttaggtaggcaccggggctgcgcgcgcagcgga

SEQ ID NO: 212111 - DNA, 122 bp, Homo sapiens
tccccggtcattggtgcaggtgtgctgaggaccacgaaggcggtctgttagctttggagccgatgccgacttttgggaaggggctggacctccgcagagcagctgaggaagcatttgaagtt

SEQ ID NO: 212112 - DNA, 122 bp, Homo sapiens
accagatattgtttaatactctgtgggattaaatgagctcagatttgcaacaaaccacagcggcagccaaaagtgcagtgatgtgggagaaaggaaaggaggttattgttctaggcagaaga

SEQ ID NO: 212113 - DNA, 122 bp, Homo sapiens
cacaagaatgttgcattttcattattatggtaagtacactggtaacttcttttctaacctcgtatgcataatgtaaacatcaagactgacaatttggggctagcaactcaattggaaaatca

SEQ ID NO: 212114 - DNA, 122 bp, Homo sapiens
gaggcccggggccccagaccctggcggcggctgccgcagccgagacggcagggcgaggcccggaggcctgagcaccctctgcagccccactcctgggccttcttggtccacgacggccccag

SEQ ID NO: 212115 - DNA, 122 bp, Homo sapiens
ctgttgtctgaaagaaaagaaagtgcttccttttagagggttaccgtttaagaaaagcaacgtttaggtggatgctgatcttggcaataatacatttgcagagcatgcttatcatcagagtt

SEQ ID NO: 212116 - DNA, 122 bp, Homo sapiens
caaaggaaaacaccacaatgcaagtaacataaacacccattatcttttttgagtaaaacacgcaggtgttctgggtacttcttttcagcaaaataacaagcatggagaactcaaaattctaa

SEQ ID NO: 212117 - DNA, 122 bp, Homo sapiens
gcccccaggagggcccagccctgctcacacctccgtccgggacgttggcctgcagaactgcgggaggacactttccgttgttgaaaccgcccgtttgggggaccttgcaagggcagcttgag

SEQ ID NO: 212118 - DNA, 122 bp, Homo sapiens
agacagatgccaattacagggggctggggaaagagacaatggcccagatctgattgacaacggctgctgaacaaggggcctctgtggcatgcttaatgaaaaggcaactgtggttttatttc

SEQ ID NO: 212119 - DNA, 122 bp, Homo sapiens
cttgttactatagtggtgagtatctctgcctgtcatgcgtgagagagggggtcgattccccgacggggaggtcacgggaaattgtgtgaggattttgtcaaccttcagaagtctcagaaatg

SEQ ID NO: 212120 - DNA, 122 bp, Homo sapiens
aggtggcccgccggtttctgagccttctgccctgcggggacacggtctgcaccctgcccgcggccacggaccatgaccatgaccctccacaccaaagcatctgggatggccctactgcatca

SEQ ID NO: 212121 - DNA, 122 bp, Homo sapiens
tggttgtggaagtttctgagtgttccacctcaagcctggtctcctggtctagctgaggagcgtgcagtgcgcggcccatggagaatatgcaggcagaggctgatcccagcttctgtgggttc

SEQ ID NO: 212122 - DNA, 122 bp, Homo sapiens
agttagcatggctgcctgagggagcgccccacagccaccactcagagaccagagctggcacgtggagggtgggcctgtttcttcagcctttgggtaacagcaaggatcagtgaaggttgatt

SEQ ID NO: 212123 - DNA, 122 bp, Homo sapiens
agctcgagagaactgggacagcatttcgcaccctaagctccaaggcaggactgctaggggcgacaggactaagtaggaaatcccttgagcttagacctgagggagcgcgcagtagccgggca

SEQ ID NO: 212124 - DNA, 122 bp, Homo sapiens
acaaaataactacagcgtctggtaagtttcggtagttgcaagaggcagttttgcaccgagcgggttgtgggtttttggtgtgtgtgtgtgtccttttaaatatgcaaaaccagattagaaaa

SEQ ID NO: 212125 - DNA, 122 bp, Homo sapiens
taaatgcctgaggttttatattttacagctagcttctaatttaattagaaaatccatggccgggtgcagtggctcacacctgtaatcccagcactttaggaagccgaggtgggtgagttttg

SEQ ID NO: 212126 - DNA, 122 bp, Homo sapiens
gccgggactggcgctgcgctagcgccacccgggctgagctgcagccttttgtggggggggcgggaatccctccgctcccagtgacgccttggactcgcggacccccatccgccccaaacgac

SEQ ID NO: 212127 - DNA, 122 bp, Homo sapiens
cgcccaccaggcccctagcactgcccagtctggcccggcacagctgctgcagaaggcgcacgacgagctcgtgtggtacatgcgggtcaaggaccagaagaagatgatcatctggtttccag

SEQ ID NO: 212128 - DNA, 122 bp, Homo sapiens
ttctcatcacacaaggaccaccagctcgtgacactgggaggagagaacgtcctcaaggtccggaaactcaaggacgtgctgattcgggagctttcaaaaactatttttggaaaacccagatc

SEQ ID NO: 212129 - DNA, 122 bp, Homo sapiens
gtataaatagtttatgtcatatccaactattaaacatgattttaatctcacttgtgatgtcggcagcataacttgcaggagggcagctttgatgtagctggtggaactgagatcacattgaa

SEQ ID NO: 212130 - DNA, 122 bp, Homo sapiens
cctagggacctgcagcgccgttcggggcagcagcacttccggcggggtcgtggcctggagcgcttccgggtctgcaaccccgccgtctgcccggccgcagcgccacctgccggccgcatccg

SEQ ID NO: 212131 - DNA, 122 bp, Homo sapiens
cagccgcatcttctggcggaccgtgcgaggtgagcagagcgtggggactgcaggtggtgacgggcaggcggccggtgatgagaacttctcccactcacattcgagtttcccgaccatgagat

SEQ ID NO: 212132 - DNA, 122 bp, Homo sapiens
attgtatgttccatctactgagataggggaaaactgccttagggctggaggtggaacatgcgggcaacaatactgctctgtaaggcactgagatgtttatatgtatgcatatctaaagtaca

SEQ ID NO: 212133 - DNA, 122 bp, Homo sapiens
tcgtcgcaggtgttcaggtactccctgcagaagctggcatacacggtgtcgcggaccgggcggcaggtgttgggggagcgcaggcagcgagcccccaactgaggccccagctcccagccctg

SEQ ID NO: 212134 - DNA, 122 bp, Homo sapiens
aagtgaggggcgggaccctcgcggctttctatccaatcctgttccccggcgaatgcggggcgggaccctagcggccttcagtccaattcccgcacctttgaggcccaagggggagcgagccg

SEQ ID NO: 212135 - DNA, 122 bp, Homo sapiens
gggcctccgcgtccgccctgcgccctcggaaggcgccgcccggcggccgcggcccttcgccgcagccagagtgctttgtccgagctcaaaaaagccgtctccatggaagcggcccttccgct

SEQ ID NO: 212136 - DNA, 122 bp, Homo sapiens
tgcggaaaccaccaccaccttcatgacacagtgcggctgtcattcacaccattctgatcccgcatgtgagctagtagccccatacaaacttccccgagaggacaggcaaaaaaaaaaaaaaa

SEQ ID NO: 212137 - DNA, 122 bp, Homo sapiens
gatgagcagacaaaattcggtcaggggccatggaaggagccgggagcgaccggaccagggcgaatctgctgtctgtgccggcggaaggccagtaagtgccgtgcagtcgtgaaaaaggaagt

SEQ ID NO: 212138 - DNA, 122 bp, Homo sapiens
cttgtgctttgtaagtgaagcccgttgggaaaacggggcatgctgtgagccaaagaggcccgtttaatacgccatctctctcccgtaaagtgctcactgtgctcgtgagcacacaattctgg

SEQ ID NO: 212139 - DNA, 122 bp, Homo sapiens
ttatttacaggcactttgcctgtgtcttcagggcatggcccttcctacagccatgtgccccgtgatcattatgacgagaggcagagacaaaatgcctcttacctcttacaccatgctgttca

SEQ ID NO: 212140 - DNA, 122 bp, Homo sapiens
ttctaaggagatggcactttaccagaggtctggagggagtttaggagttatctgggtaagcggtttctgtggcttagctcactcaacatttattccagccttctggcgtgtctctcagtatt

SEQ ID NO: 212141 - DNA, 122 bp, Homo sapiens
ctcttctgcaaggtgcgaatccagagcctccagctcgggagggacctgacgtgccggacgcgtccagctcagaactcgaggcgcggtagacactcagcaaaggcctccggcgtccctgcagc

SEQ ID NO: 212142 - DNA, 122 bp, Homo sapiens
gcagagaagcacctcacggctcctacccgcactcatcgcggacagtgcctgcagcgggagcggcgcgagcaccctccccagatgaaaacaccagcaccaggaggtgggccgtagcccaggct

SEQ ID NO: 212143 - DNA, 122 bp, Homo sapiens
tccccggtgcaatcagtcagccaggaggctccaaactgttagcgacaaaaacgcagctctcggtcactcccactaccctcccacccgcactccaggcatattttggaggcggcagcagcggt

SEQ ID NO: 212144 - DNA, 122 bp, Homo sapiens
cagtggctggctaacaatcaaaaataggttttggtaatgttgggtaacgttgctcaaatacggctatattatgcagagcacatggcaatcgttgaagagtaaaacacagataattccacttc

SEQ ID NO: 212145 - DNA, 122 bp, Homo sapiens
aagcaaagcactgcatgccacggtcctgcagatgggggatcggtgagtctgatttcaggacgtttcgaaacaatccactcccactccgccgccctgggcggggcgggggggcggtgatgggg

SEQ ID NO: 212146 - DNA, 122 bp, Homo sapiens
taggtcgtggcccaggcgccacaggagggtagcctaggcggcggggtgggggctactcaccgcggggaaggggggcccgcacagcgcctagtgcacctggccgagcgctcgctgccgggaaa

SEQ ID NO: 212147 - DNA, 122 bp, Homo sapiens
ttacagtgagcaatgaagccatttaagacgtaggaataaagacttttctttggccgggcacggtggctcatgcctgtaatcccagcactttgggaggccgaggcgggcggatcacctgaggt

SEQ ID NO: 212148 - DNA, 122 bp, Homo sapiens
ggtgggagcaacttattgtggaggccaaatggcattttttgtaggccctgagattttttacgaaaacactaactctgttcagaactctttcaaagggtgaagacaaacttaacaaccttata

SEQ ID NO: 212149 - DNA, 122 bp, Homo sapiens
tgagtcccagttcagtttcaaccaccaaaccactgtgtggggtccatctctctagaccttcgtgtatttgctgtttaaaagtaatgaagaaaggggagggaaggctgaacaataattaacat

SEQ ID NO: 212150 - DNA, 122 bp, Homo sapiens
ggatactgagtctgcagtgagccatattcatgccattgcactccagcctgggcaacagagcgacagcctgtctcaaaagaaaagaaagaaaagaaaagagaaactttgggttcagaaagacc

SEQ ID NO: 212151 - DNA, 122 bp, Homo sapiens
aaccccgactcccaggagctggacttccgccactagtgagtgtcccagcaggatgggagacgagggggtgccgggtgggggcctccacatgcggctgatgacagcacttctgctgagacgct

SEQ ID NO: 212152 - DNA, 122 bp, Homo sapiens
agctgggactacaggcgcgagttttatcaataaaggccctgaaggcccaggttgcttttccgtgagtacaagaacacaacacctgtgggaggtgtgggcccaggggagggatgccgagctca

SEQ ID NO: 212153 - DNA, 122 bp, Homo sapiens
tgggagggggctgggagaggcagagggagaaggaaagctcaaagtccagaattttagaaccggaggaggagaaggaaggaccctgtaggatccagcaccccatcccacccatttctctgcca

SEQ ID NO: 212154 - DNA, 122 bp, Homo sapiens
tatctaaacactcaggctatcaatttttgtttgaaaactgctcccaggggacattaataccgaaagcacttctggcatgttgagtagactccagtccccagagaaaggcttgcaaatgctgt

SEQ ID NO: 212155 - DNA, 122 bp, Homo sapiens
ggcgggagccgcggagctgggtgcggagcaggggcacgtcgagctgcaggagcccagcctcgcagtggtctcccgagggcaggtccagctcactgctgctgctgactcggcgggaggaggcg

SEQ ID NO: 212156 - DNA, 122 bp, Homo sapiens
gtcacgtaactgagcaatgggtgactatgttgtaattattacaccctcctgacatgcacacggtaggagaaaaatctaacctggggcagtagatagcagcagaaagagcaggagctttggag

SEQ ID NO: 212157 - DNA, 122 bp, Homo sapiens
cgcacggcagggaatcttcgccgccgaccccagcccaccgccaaacttccctgctgctctcggtcctcctgtacgtacttccgttgctctgacgctcccagaagccggggcgtcgggaagga

SEQ ID NO: 212158 - DNA, 122 bp, Homo sapiens
ctgggggctctggccggccctgctttctccgtgggttggcgtccttgctgctgctgccaacgggagtccccagctggaggaggccaaggccactggcttcctggggaccccagcctgccttg

SEQ ID NO: 212159 - DNA, 122 bp, Homo sapiens
aagatgaaaaaataatacaactacagacataggtaaatacgtgtataatgaaggtggcatcgcataatgaccgagaaaataaagtttttaatacatgggacaagtatacagccatttcgata

SEQ ID NO: 212160 - DNA, 122 bp, Homo sapiens
agtggcaccaaggctgctgtctgcggaatcccaaaggtgacagctttctctaccacgggccgccccagcccgccagctttgggcttgccgtgcatgggattacgtgctaaactttgtgggtg

SEQ ID NO: 212161 - DNA, 122 bp, Homo sapiens
gactccgcactctgaagttcaggacagggaagcacccacctctggaactcaagcagtggacgagggaggtcccgagcgccgtcgcagcgctgcgagtgtgggaccctggccttcgcccgctc

SEQ ID NO: 212162 - DNA, 122 bp, Homo sapiens
tgcctggcccttctctgcctctgcacagccggcatcctggcctgtgcctgtgcgcgcgtgcgcatgtgcctgtgtgcacgtgcacgggcctgggggtattgctgttcttccagcttcctcct

SEQ ID NO: 212163 - DNA, 122 bp, Homo sapiens
ctagtccacaaatttctctctgcattgctgtgcccacacagatgtttatgtgggtgcaaacgtgtattgacacaggcttacacacagcagcccccacacactctccatagcaaacacacccc

SEQ ID NO: 212164 - DNA, 122 bp, Homo sapiens
gggcaaatgaggatgcaggccgggccttagtggggtcaggcccatagtggtctgctgccccgtagcttctgaagtccccttccaggccagcatcctccttggccgtggccaccggctccaat

SEQ ID NO: 212165 - DNA, 122 bp, Homo sapiens
attctgtcctgcacttttgctgagttgagtttgggcttatgccagtttatccaagaggtgcggagaccaaatggtgaaaaatatgatccagacagtatcttatacttgtgccttggaattca

SEQ ID NO: 212166 - DNA, 122 bp, Homo sapiens
tggagaactttaccccgggtcttgcaacccactaaacttggcgtcccatgccacactgggcgtcccaggcctgcctgccctcgacggggcggtctctctgccggcccctggtaaaacagtta

SEQ ID NO: 212167 - DNA, 122 bp, Homo sapiens
cggggccggcagaggaggatctaggtagagtacagacgtcagccccgctctggcggggcccggacagaaccgggcatgctccgggcacctcccatcatgcggaccgtcccacaaacacacgt

SEQ ID NO: 212168 - DNA, 122 bp, Homo sapiens
gggcgcggcgccgggtgccttatgttcagtgcttgtctctgggatcgtacgggtctcctccggagcaggctgtgcaggtcacttgccttatgtgacgcccagtttctctgtttacacactaa

SEQ ID NO: 212169 - DNA, 122 bp, Homo sapiens
cccactccaagagtgtaatatttcacttaatacacttctgctgctttgcttcgctatctgcgtgtgtctcgtccagttctttgttcaggacaccaagaacctggaactacacggcaccatcc

SEQ ID NO: 212170 - DNA, 122 bp, Homo sapiens
aggacagggtagggtctgcaggagcctaggaccaggcggaggacgcggtctgcggcgctgcgctccagggccgacgacggagaggctgggaggcgctcaggacgggaatccacctcgcaggt

SEQ ID NO: 212171 - DNA, 122 bp, Homo sapiens
agatgaggcccagaaaaatttattatgcctacatgcccatgagatgtcccaggctggtgacgtctcatgggcattcaaggaatccattaagaatgaattctgaggctggacatggtgactca

SEQ ID NO: 212172 - DNA, 122 bp, Homo sapiens
cctgtgtcaggagggaggggccctgctgggtaagccaggccagcctcagggcacggcaggcgggtagcaccgggggtggggggcagcccttctggaagctttcaaacagtcccccaatattc

SEQ ID NO: 212173 - DNA, 122 bp, Homo sapiens
gtcccgttgtttaaaattctatgtgcaaatagaatctccagaggccgggcaggaggaggacggcctgggagtgtccaggctgcttctccgcctggaaaggtgtctccatgcccctgtggcag

SEQ ID NO: 212174 - DNA, 122 bp, Homo sapiens
caaaggtgtccgaggccgacaatgtggagtctgggaggatgcggggtccgggttgcagcgcgtggagccttgttctgctgttctgttttcctctatgcttgaaatttttcttagttaaaaag

SEQ ID NO: 212175 - DNA, 122 bp, Homo sapiens
gcccacgcgcgcgcatgcgtcctgaccaggggaaccttttcttggggacccggaggcgagcgctggaaggcgggatagtggcgacccacacgcagcagcttccggcggcgcgtagtcttgat

SEQ ID NO: 212176 - DNA, 122 bp, Homo sapiens
tggggtatttccgccggcttccggcgggggccgccggctgggtgagctgcagcccagtcccgtgttgccacgctgggaactggcgttctgtttacatatcttagagaacgatcagaaggacg

SEQ ID NO: 212177 - DNA, 122 bp, Homo sapiens
gaaatgagagcaaagtcaggcattcccacctcaggaacactcagggctggggctggacttcgaatgtctgagtcttatcaaaggcagggaagccccaagcagaagggcaggaggggccacag

SEQ ID NO: 212178 - DNA, 122 bp, Homo sapiens
gtacggggggcggtgcctccggggctcacctggctgcagccacgcaccccctctcagtggcgtcggaactgcaaagcacctgtgagcttgcggaagtcagttcagactccagcccgctccag

SEQ ID NO: 212179 - DNA, 122 bp, Homo sapiens
tccctttaaggaacaaggctgactacccaaattcctctttggtgtggatgccagatacagcgacgtagagacatcaagagaaagaactggaggcacacgtgggggagccctcacctctagtt

SEQ ID NO: 212180 - DNA, 122 bp, Homo sapiens
ggccgcgtgcggacttggtggtcgctggggtccgcgacggggtgggggctcccggggaaccgcacgcggccgggccgggcggacgacggagtgcggaggggggcggctggcgggagggtgcg

SEQ ID NO: 212181 - DNA, 122 bp, Homo sapiens
gctggcctcgcctcctcagggaggggttatcggcccctaaggccgccccacagccacacacgctggaaacaccagctcgacccaaacaaacgtgtgcaaaataaataaacgggataggaaga

SEQ ID NO: 212182 - DNA, 122 bp, Homo sapiens
cgccctgcccggtgacgacctgtcctctagggccaaggagttcgccttctaccccagcttcgccagctcctaccaggcgatgcccggctacctggacgtgtcggtggtgcccgggatcagcg

SEQ ID NO: 212183 - DNA, 122 bp, Homo sapiens
tgcgccccgggccggggtcactcaccggcctcgctctggttgtagtagccgcgcaggttccgcaggctctctcggtcagtctgtgcctgggccttgtagatctgtgtgttccggtcccaata

SEQ ID NO: 212184 - DNA, 122 bp, Homo sapiens
ctgaattcattccattacaccatattgctgtgcgtgtgtgtgcacgtgtgtgcttgcgcccgcatgtatgttgaatgggagtgtgggcaggtcagctagaacatcagctgcaattcaccagg

SEQ ID NO: 212185 - DNA, 122 bp, Homo sapiens
cgaggcctgccgggaaacggagtctcgcgggcctcagaccgccgcccggaaggcgaggggcgcactacaactcccagcaggcaccgcgccaatcccgagatgggatttccacggtgtcccgt

SEQ ID NO: 212186 - DNA, 122 bp, Homo sapiens
tgcacttctcagctgtctccagagcgactttatagttatcgacaaacgctttgtacacaccgagctggctggcctgcagggaggagtcagggaacagagggagaggagggtgggaggggaga

SEQ ID NO: 212187 - DNA, 122 bp, Homo sapiens
tctttttctaagcccaggacctgaaaggcattgcctggcaaaaccttgcaagccagtgtgcgtcacaataccctttgaatgatgtaaaggaatcaggccctgccactctgcagttgatccag

SEQ ID NO: 212188 - DNA, 122 bp, Homo sapiens
ggagggagcggggaacacggagtgggcaggagggcatgagcgcttgtgccatgggctttgcggcccttccgcaacattccaatgagacaccaggcctggcgaagtcaacatccgcccccttc

SEQ ID NO: 212189 - DNA, 122 bp, Homo sapiens
gagagcaagaaggagatctctatctttttccaccatgtgagtacatagcaagaaggcaaccgtcagcaagccaggaagagagacctcatcagaacccaaccatgccagcgccttggtcttgg

SEQ ID NO: 212190 - DNA, 122 bp, Homo sapiens
tggcacctggaggagtgaggtggcatcaggtgatgtgtggtcaggatgatagggcagattcgtcctgtaagaggacccctctgagtgctgtgggatgtagttgtctgagggtcagaactcgt

SEQ ID NO: 212191 - DNA, 122 bp, Homo sapiens
aaagggctgggaaggcccccggcagcccccatgtgcgtgagttagggcacccagctcttccggaaggtaactcaggctgtgagaacccagggaacaagtcagcatcggggtgaaccagaagc

SEQ ID NO: 212192 - DNA, 122 bp, Homo sapiens
cgtcgccccccatttttacacaataatttcccatgttttcccaattttctacggtaagcacgtattccttcatgttcaagggagaaaaagttttcttggaagaacgcattgagaacccctcg

SEQ ID NO: 212193 - DNA, 122 bp, Homo sapiens
aatctgcgctcagggggcgtcctggaattacacttgggagagaataagaaaggaggaggccgatgtgcccatggacattattaaccttccggcaaatccccacagccgccaaactgcgtctc

SEQ ID NO: 212194 - DNA, 122 bp, Homo sapiens
tgtgtctcctctcagatctattcctgtgcgtttacatgcacatatatcttgtccaaactacgtatgtagtttgagtgtgtgttctttaaaatagatggcctcgtatgtctgtgatttgcttt

SEQ ID NO: 212195 - DNA, 122 bp, Homo sapiens
gggtccacctcggacccctgggaccccgccgctgtcaacttgcgctgtaacagttttcttcgcaagtttcaaatcaaaacttccccggggtggagtttgagggagggaagtggagggggagg

SEQ ID NO: 212196 - DNA, 122 bp, Homo sapiens
attagcgccgcttcgtggcggaaagcgacctctgcgcactcacatttagagaggcagggtcgagattgcgccaaacagaaatacgccccttagaatcttctcacgagttcttagctgccgga

SEQ ID NO: 212197 - DNA, 122 bp, Homo sapiens
tcacccctatattacccacagcacttaaaagtggagttttcatatagatgttcaaataaacgtcgaccaattgaatgccagaagagaataactcatgagggaaaaggcaagacatggaagga

SEQ ID NO: 212198 - DNA, 122 bp, Homo sapiens
cctcagcatttcgccacctagcgcggaatgctgctgcaggaagaggtggcgcggcctgaccgacctggcctgaatgtgagctctgagggggaaggacctcagcacccactcgcagactccct

SEQ ID NO: 212199 - DNA, 122 bp, Homo sapiens
gaataaggtcaactagcaaatacagagagcctactattcccccaacccaagctcttaaaacgcacctatccctttttttctatggagttgatctcagactgaattctggcctctctccccta

SEQ ID NO: 212200 - DNA, 122 bp, Homo sapiens
aaactctatacccattaaaaataactctaggccatgtggagaggcgtgtgctgcgcgcgccggacagcgggacagagggacagagggacagcgggacagagggacagagggacagagggaca

SEQ ID NO: 212201 - DNA, 122 bp, Homo sapiens
atctagttataagtatgttcccaaatattgcacgggacatgctaatacggaaaaattactcgctagtctgaaattcaaatttaattgagcgacctgtgtgtctgcgtgtgtgtacacatgca

SEQ ID NO: 212202 - DNA, 122 bp, Homo sapiens
gtttatggtaaaaattcataggcagcagagatgagtggaaccaatcccagtcctgagctgcgccccagaaactccagggctctctgcacccatcctgcaatggtgaatactgaagaaatgag

SEQ ID NO: 212203 - DNA, 122 bp, Homo sapiens
gcctttgtacggcggggccagaacacaaagctcattgtgatgtttgtgcttctattcagacgccacgtggtacggactccacgccaacctgcagactggattcttttcttccccctcagtaa

SEQ ID NO: 212204 - DNA, 122 bp, Homo sapiens
caacagcaggaacatgccccagtaaagggaaacgaaagctgggaaccctagaccacagggcgcaccgggcttagagacacgggctggctatgacacttcccattaccaactcctagtgcccc

SEQ ID NO: 212205 - DNA, 122 bp, Homo sapiens
ccagtgccaagcacatacgcacactcttctcccagagctgctgttccccattgacccggacgcccctgccaaacccaactcaggctaagccaccatacaggagaccaggctggtctcagatg

SEQ ID NO: 212206 - DNA, 122 bp, Homo sapiens
gagacttttctattttccaaaagctcggtctgaggcccctcagtcttgcttcctaacccgcgcttgagtttctccccgcttggatgctctcaggggcagtgtgaagagagacagttcctggc

SEQ ID NO: 212207 - DNA, 122 bp, Homo sapiens
ggcggggagcgcgcgttcctggaagagcccggctggggagcgggtcacattcttggccagcgctagggctgaggcggacgcacggcaacaaacagcgcggggggcggggccggcgcggggcg

SEQ ID NO: 212208 - DNA, 122 bp, Homo sapiens
ttttgagactttgctgattctcctttctctcttgagggtttcttgttttcccttcctccccgggttgtgctagtagctgctctcaactactcacactccctggggagattcctacacttcct

SEQ ID NO: 212209 - DNA, 122 bp, Homo sapiens
atgactttcggggaaagttggctcctgagggtttcagtttccacctagccgcgtgctctccgggttctgcgtgctcctcccagggcgcccgctgtgccccagttctggacctgggtcctacc

SEQ ID NO: 212210 - DNA, 122 bp, Homo sapiens
tctgtaggttcaggctaaggttttccgtcagaaggccgcgcaagtgcacttgcgtgtcaccgttaccgtagcgactgggcttctggactgtatatcctagctgccttgtcaacatcttcgag

SEQ ID NO: 212211 - DNA, 122 bp, Homo sapiens
tgcctccgccttggcgcagacgtgcccatctctgggacggccccgagcgcacgcagccggcgggcgaccctcctcccagagacctgcacgctgcccccggctcccagcgtaccgccaccctc

SEQ ID NO: 212212 - DNA, 122 bp, Homo sapiens
ctgggcacatggcggcacctacttggaaaagatgaccatcagcttcctccggctccgccgcggctccgcgtcctcatcaaagccacccaggtccttgcctaggaagacctcctggtggaagc

SEQ ID NO: 212213 - DNA, 122 bp, Homo sapiens
agagctcctccagggaaggaacttagattctttgaagaacttccctgctcttacccaaaccgattcagttgttaattctgtccaccttgctccattttcagtgcaggagaaaaagcatttgt

SEQ ID NO: 212214 - DNA, 122 bp, Homo sapiens
caggggcgggcagggggcgtggggaagtctgcagccgagagtccaggtaggagtctcctgcgtggtcccgggagaggaaggggcctggcccggggcggggtgtggaggtgggaggacggcgg

SEQ ID NO: 212215 - DNA, 122 bp, Homo sapiens
cgagcgggaaccagggctgcctgcggcgcttgcaggccagctggagttccgggtgggcgtcggcttggcgggccccgcactcggagcagccagccagccctgctggcccagggcaatgaggg

SEQ ID NO: 212216 - DNA, 122 bp, Homo sapiens
cctgggtgggaaagacgccgcggctgaggctgcagcgccaggcgcctcctgcgttctccgcgctttcttgggttactcctttcagtgacgccagccaagccgtgaggtccgtatcatcactc

SEQ ID NO: 212217 - DNA, 122 bp, Homo sapiens
ctaacagggattagatgtgctgtacacattttagtccatcttcctgccccatgatgcaggcgctgagtgcctttgatgttaagcttcactgtgcctcactttgcctctgaaaggtcttgagt

SEQ ID NO: 212218 - DNA, 122 bp, Homo sapiens
ctaaaaacctcactccagcagcgagcccaggtgaggaggggctgcaggaggagcagggcccgagtcccctgggtggcacaagggattccagccacaagggctgcacctagagtcaggctcca

SEQ ID NO: 212219 - DNA, 122 bp, Homo sapiens
gacccagaagagaggagtttgctctgaatttgtaaataagtcttccccattcctcatactcgagcctctcctctctggttgcctcctgccaccagcatccatggctcatttgacaccttttt

SEQ ID NO: 212220 - DNA, 122 bp, Homo sapiens
ctagatgatgaagtaatttgctggctacagacccaacactctgcagactcgactgcggtccgcctccgctgcgccgcaggctgtgcagcgcgacccccgcggcgcttggtgggcggtgcatc

SEQ ID NO: 212221 - DNA, 122 bp, Homo sapiens
ccagcttgagaacaaagccaaactaaggggcgggcggagccaagacggaggaggcgagtccggagcaaacataccggatctcaggagccccgtgactgctgctcttggctgactcgtcacaa

SEQ ID NO: 212222 - DNA, 122 bp, Homo sapiens
actggaagccctgttagcttggttaattccctctccctgagtacatggagttgtgtaaaccgtgcaaggtatgcagtaactgaagaaagtgaatgatatatattgagtttaacttctaagtt

SEQ ID NO: 212223 - DNA, 122 bp, Homo sapiens
tagggcggcggcggcggcggcggcggcggcggcagcggcggcagcggctgcaggcctggccgattgtgaggagacagcggtacctcctgggccgcgcacccgacccttccaggggtcccggc

SEQ ID NO: 212224 - DNA, 122 bp, Homo sapiens
cccggtttcgccagaggttggtccttcttcctccctttcttcttcccttcctttgggcgccggcggcgagagcagggattgtcagcaactcgggctgcagaagcagcagcaacggcggcggc

SEQ ID NO: 212225 - DNA, 122 bp, Homo sapiens
gtacactgtattttttgtggaagatcattttccatcttaaaatatatactggttgagttacgtttacattgctccataggacaatcccatgagtacattataagtcctcgatggctgttgta

SEQ ID NO: 212226 - DNA, 122 bp, Homo sapiens
cgccacctcatgaggattatgaagacgaagtgtttgtgagggatccgcaccccaaggccacgtccagccccacatttgaacctcttcccccacccccacctcctccaccgagtcaggaaacc

SEQ ID NO: 212227 - DNA, 122 bp, Homo sapiens
gctctgcccacgcggcgctcgccggaaccccaggataacaaagctggaatgacttcaccccggctccgacacggctctgctctccgtgtgtgattgatgacatcagtctcagcacctctcct

SEQ ID NO: 212228 - DNA, 122 bp, Homo sapiens
aagtgtgagagagacttgcgagaggctctagggctgctgctcggctctccgtggggagggcgggaggaggggccgaagcaaagaaaactcgccgccccggcagcttgcaagcgtgccgcgag

SEQ ID NO: 212229 - DNA, 122 bp, Homo sapiens
actgggatcaggaggccttcctcgctatgtcacacttctcaaccaggcagatctatttaccgtattttttttttaataggaaaaaattgaaataattcttttcacagatttctcactttcca

SEQ ID NO: 212230 - DNA, 122 bp, Homo sapiens
atcaccgttgcgcaccaccttctcctttcacactggtaaacagagggcgcaggattacgccgccccgcactcctaagcagctgtcccgcattttgtgccatccctagaattagtcctagtgg

SEQ ID NO: 212231 - DNA, 122 bp, Homo sapiens
ctgatgggttctggtggtaatgagcgctcaggcccgttgggcgccacgaggatttacgagcggaactttttggaccctgccttatatttgaccagttgaccctctgggcctggggttccggg

SEQ ID NO: 212232 - DNA, 122 bp, Homo sapiens
cgctcggccagccgcagctactcccggagccggagtcggagccggagccggagacggagccggacccgcacgagcagcagctctagctcccgcagccctagtccgggctcccgcagccggag

SEQ ID NO: 212233 - DNA, 122 bp, Homo sapiens
tcaaaatttaattaaatctctgacctaacatccccctggtttcattgattagggaagtcacgggtggaccacgtcattctcaggaggtttatgcaattgtgaattctgaggagtctctctct

SEQ ID NO: 212234 - DNA, 122 bp, Homo sapiens
gaatgccgcgcggctgcacacttccgtcgcccaggccccgccccgttccccgccccgccgcgccatgcccagccgagtagctttacggttctcccaccgcagcgcccgtggcctccgggcgg

SEQ ID NO: 212235 - DNA, 122 bp, Homo sapiens
atgggaaacgaaacatacccagaagctcgtattcctgacaggtttctttagatgggacagcggtgcactgtctgagcacggggaagggtctgagcagaagaaaagagctgccaaagatgcat

SEQ ID NO: 212236 - DNA, 122 bp, Homo sapiens
gtttagtaaacattatttatttgttcctttatctctaaacgtctagaggctgggaatgcccgactctctgggagtggagcctagcaagtcctagcctcgttttccagccctcactcgaggtg

SEQ ID NO: 212237 - DNA, 122 bp, Homo sapiens
ccaaccttgtagggtaacagagagggttataccataggaaggacccaaagcttggtccagcgcctgcaacagcctctggcaaacagtggaagctccagttttggacacttgatggtcagtgt

SEQ ID NO: 212238 - DNA, 122 bp, Homo sapiens
ttttctcctctatagtccccggtagccattttctcccttattttgtccctgagaaaggggcgggattgtttgatgtgacgtaggaaggtgaaggatagaaagaaagaggaagaggaaatcct

SEQ ID NO: 212239 - DNA, 122 bp, Homo sapiens
gtcgatcggggtgcggagggggccgacccgggggatctccaagcgccctccccgccctgacgctgtggggctcctaccgcgccgccacagctgctcctacctggggaggtgcgcccgggccc

SEQ ID NO: 212240 - DNA, 122 bp, Homo sapiens
cacatagggccgcgcgggcgcacgccgggcccgccgcagcgccacggacacacactcgcacgctcgcacgctcacacccgcgcacacacccgcgcccccgcccgccgctcccgggccgctgc

SEQ ID NO: 212241 - DNA, 122 bp, Homo sapiens
gctaagtaaatcaagccaaatactaaatagttccacttatatgaggtacatagtcaaattcgcatatacagaaagtagaacagtggttttccaggggctaggggtaagaaacaatgggaatg

SEQ ID NO: 212242 - DNA, 122 bp, Homo sapiens
ttgtcggcgcgggccctagcgtggcggcgctgcagtctgggcagtgggttggttcctcctcggtcctctgtcgagtggcgacagggcctagccacctggcgggggtgaccttcggacgtgcg

SEQ ID NO: 212243 - DNA, 122 bp, Homo sapiens
cctgtgaggaaatagaggaccagcatgcggcaaatgcctgggttaggtaggagcagacggcgagattagcgcagggatgtaagaaacaagtggctctcagaccaaagaagactccgcggcag

SEQ ID NO: 212244 - DNA, 122 bp, Homo sapiens
ttctttcttatcagatgacacctaccaggtaggaggtaaattttggtagcagatgcctaccgtgcagactggttcagtaatggtactcagcatcacaagatttggggattcagataaggctg

SEQ ID NO: 212245 - DNA, 122 bp, Homo sapiens
attgcccagaaacctgtgcgccgcccggcggcggcactcttaggggcgtctccctgcggacggaagctctctgggcgggacttccggtatcttcctcgcggtggacatcttgtcggctctta

SEQ ID NO: 212246 - DNA, 122 bp, Homo sapiens
ttggggcgtgcttgcaccgtccgaatgggcctggggtccggcggcggagagtgacctgggcggggcaggaggtggcagcgggggtcctcccggctcaccagagagacgagcggccgtgctcc

SEQ ID NO: 212247 - DNA, 122 bp, Homo sapiens
tacagggcatttccccccgacccagccccaaaaatcctggttgacaagatgccatcacctcggtctgaaaagccaaagtatggattatgtggaagactcagaggagaagagcagccctataa

SEQ ID NO: 212248 - DNA, 122 bp, Homo sapiens
cgacggggggcgcggtggggacatcagcacccagccctcggcagatccccagtgcggggccggttcaaatgcagccctgaccacacgggccttcctgagcgtggccaggagccaccagggtc

SEQ ID NO: 212249 - DNA, 122 bp, Homo sapiens
ctccaagtgcgcatgcgtgcagtctgcgcgggaaagagtgccgcctcagctgagggcaagcgaggagatggctgtgaggcaggcggcgacggcgggcactcccgggcccaggagagaggaag

SEQ ID NO: 212250 - DNA, 122 bp, Homo sapiens
gcaggagaggggagaccccggcgcggcgggaccatgctcccctcggggaacctccctccccgtttctcaaggaccgagtcctccccgcggccctgcacagcagcccagctgcgcccctggcc

SEQ ID NO: 212251 - DNA, 122 bp, Homo sapiens
cgcccccaaccctgggccgggcaggtgcaattcctcaggcggcctacagagggcgatgtgcgccgccactgggccgcgcccctccggcgcgcgcttcctgtgaggtcaggtgggaggaaacc

SEQ ID NO: 212252 - DNA, 122 bp, Homo sapiens
ccccggggcccgctccccccagtcgccctcccgggatgtggccccgctgcagtagcactacggtgctgggctgtttgtctggcagcttctactgagcagctaatagtataacaacccggctt

SEQ ID NO: 212253 - DNA, 122 bp, Homo sapiens
cgctcccctggccacaccctccgcctggacgcagcagccaccgccgcgtccctctctccacgaggctgccggcttaggacccccagctccgacgtaagtccctctcgtgcgccacctccatc

SEQ ID NO: 212254 - DNA, 122 bp, Homo sapiens
cggcacgggctccagcggcgccccaccggccgcccgcctcgccttgcctctcacctcctgcgtgtctgcgtagtagctgttccagtcgctggtttcatgcccttccatcttcacagttccta

SEQ ID NO: 212255 - DNA, 122 bp, Homo sapiens
gggcgcgcgccccggttggcgcgcggggtgacggttggggttggcccggtgacgttggagcgacgcagggcgggggacggcgagccgcgaggcagccacgcgggagaggccgccaggcggcc

SEQ ID NO: 212256 - DNA, 122 bp, Homo sapiens
cttcattctcagtgtttgttttctgggtctttgaaggagaggtgttgcagggaaaaaggtcgtgcatcaggaagtgtcatttaaaaaggacctgagttgggctgagttatcagcaaatacac

SEQ ID NO: 212257 - DNA, 122 bp, Homo sapiens
cagcagcaaaggccaatatatttccatttcttatttcagtttgccaccaaaacaaagctgcgcgcggctgagggcaggaaggcgctgagaccgagaagaagggacgtcccggagaaagtgcg

SEQ ID NO: 212258 - DNA, 122 bp, Homo sapiens
ggcacgctcctcttggggcgggctgggcgcccctcgctggggtgggacggggaggcggggcgcgagcgcgaaagtgtgagccgcccagtgagttgcggaaacctggagggtacttggagttt

SEQ ID NO: 212259 - DNA, 122 bp, Homo sapiens
agggggaactggaagcacacagtgctggccttcacccagtttacggtggcacctcgggaccgcttctgagtctgcttgtcgctgaaggtcggcatgaggaaggcagcgttccctcccagatt

SEQ ID NO: 212260 - DNA, 122 bp, Homo sapiens
agataggagaggtgaggccaggccccagtgttgattgagtgactcttgtctggtcaagggcgtgccaatcctgctgtcgactcgtttccatagggtccccagggcttccatagcgtccccag

SEQ ID NO: 212261 - DNA, 122 bp, Homo sapiens
aggcacccagctccttctccctcagacctgggagtccctgccttgggagcccgctctgggcggggagcacttaccagcagcaccaggttcccccagaccccgaggcccccgccagccccagc

SEQ ID NO: 212262 - DNA, 122 bp, Homo sapiens
tacaattaagacaaactgaccatgtgcattttccccacattcctgtggggaatcccagctcgtttgaacacacgccacgaactcctggtatccgtaagtatcccagctcgtttgaacacacg

SEQ ID NO: 212263 - DNA, 122 bp, Homo sapiens
gcttccctctgtgtacaataaaacaccctcaatgcacccacagtgccattgtctgtcgtacgtgtcatgcgttactctactcacagaagtgtcaatcaaatttaattatacatgattgtcac

SEQ ID NO: 212264 - DNA, 122 bp, Homo sapiens
gcacgggcggcggagacaagggtgcaccgccaggtggggaggggcccccgtcctgatgggcgtggccgctggctcctggtgagttggcattgggcttaaaagacatggtctgtgcccccgcc

SEQ ID NO: 212265 - DNA, 122 bp, Homo sapiens
cttgaactctggtctatctccagtgccgctgaagagtatctctgtgagcgtgaacatttacgagtttgtggctggtgtgtctgcaactttgaactacgagaatgaggagaaagttcctttgg

SEQ ID NO: 212266 - DNA, 122 bp, Homo sapiens
ctgcgggccagggtgggacaggggaggagacgcggactgggagccagcgtgatccccctgcgcttccctgcccccaggaaagattaaatatgacgttaggactgatgaggggaactatcctc

SEQ ID NO: 212267 - DNA, 122 bp, Homo sapiens
agggagacaagctgtggatcctgattataaatgcagcttctgctacccccgtgacaggctcggagggagagaagggggtaagggaggtgggaggttgggaggaaagcagggagaatggagga

SEQ ID NO: 212268 - DNA, 122 bp, Homo sapiens
ggcaggagccagatgtcatttgtgtctgtatctcagctctttgtatgatgttaggcccatcgtacttgctgagtaaatgtttgctatgtgccttgactcttacctgattactcaccatgcat

SEQ ID NO: 212269 - DNA, 122 bp, Homo sapiens
ctgggatcctggtggtctctgcagaacccctgggcctgggccctgctgaagtaaacaacacggaaatgctgtggttgggatgttttgttccagttgccaagacttgtgggctgagagctccc

SEQ ID NO: 212270 - DNA, 122 bp, Homo sapiens
gttggtggagaagggagtccccgtcttcaagcctcggggactgggagctctggcttttagcgcgggtccttgtgtaggcgagctcatatactacgatggggcaggggcgcgacggtctggcg

SEQ ID NO: 212271 - DNA, 122 bp, Homo sapiens
tccacttccccttagattatgtagtcaaacagttcaatccaggtcagtactttttcacaacgtatgttttcaatctgatcaaagctataggtagacgaaagttattgcaatttcatggggtt

SEQ ID NO: 212272 - DNA, 122 bp, Homo sapiens
ggctcatcttcccggctgtcaccctgtgcaacatcaacccactgcgccgctcgcgcctaacgcccaacgacctgcactgggctgggtctgcgctgctgggcctggatcccgcagagcacgcc

SEQ ID NO: 212273 - DNA, 122 bp, Homo sapiens
ccagcacccccctctattgctttccactcaatccctttgtatttcagtttccccgtcctccgcctccgcgccccactgccttgggctgggcgactctctagcaggaggcgcacggtaaagtg

SEQ ID NO: 212274 - DNA, 122 bp, Homo sapiens
cttatcatcccttattgcagtttctgtttacatgtttgtctaccctcctaggctgattaccgttggggggagaatccaacttacttatcttgtatcttatctagcagtgcctgccacatagt

SEQ ID NO: 212275 - DNA, 122 bp, Homo sapiens
ttttttttttttttctgaattgcagtctcaccgtgttgcctgggctggcacgcagtggcacgagcatggctcgctgcagcttcaaccacccaagctcaaatgatcctcccacctcagccttc

SEQ ID NO: 212276 - DNA, 122 bp, Homo sapiens
tagaggaagtttcaggcatggctggactcggactcagtgctaccactgggatgcagtcttcgtctctcagcttgcttgcttttcttactcctggaggggagctccaggagttccaggcctga

SEQ ID NO: 212277 - DNA, 122 bp, Homo sapiens
tatcaggcccttctaagtgcatggccctgtgtgactgcacagacggcacgtccagaatgccggccctgcccatgcccctttccagctggtgatggccccactcccctctcctgtcctcagct

SEQ ID NO: 212278 - DNA, 122 bp, Homo sapiens
aggcggacgcaccctgatcatctgtcctgtgacgggctcagccattggatcgcgaatctgcgttcgcgcatgcgtggtcctagagctacggtgacacttcgcgtgcggtgtaggcgcatctt

SEQ ID NO: 212279 - DNA, 122 bp, Homo sapiens
taagggagctcagtaagtcacttctgggcgactgttgttttatttccggtctatgggacccggctgcgatttgctgctgcggacagcagctaccatcactgctgccgccatcatgtcagaca

SEQ ID NO: 212280 - DNA, 122 bp, Homo sapiens
ttccaggctccgactattactggcctcgaaggtacaggctcaggcggctcagggccccggcgcagatctgtcggcccgcgggatccccggagtctgagtggggagcactatccgcaccccgt

SEQ ID NO: 212281 - DNA, 122 bp, Homo sapiens
agcatgcccctgcgggcagggggagctgggctgaactggccctcccgggggctcagcttgcgccctagagcccaccagatgtgcccccgccggggcccccgggttgcgtgaggacacctcct

SEQ ID NO: 212282 - DNA, 122 bp, Homo sapiens
acgcccagcttggggtgccgttcgttgaaaaggctccgggatcctgcggagactcagccccgccccactgcccttcggcatgaaggtctgcacaaggtcagggaggatcttgcattcctccc

SEQ ID NO: 212283 - DNA, 122 bp, Homo sapiens
agcagtgaagacgagacccggagctcgggctgaagggagagacaaaggccccgccaatcccggaagccgccctgtctgctccagctgcatgcctgattggacagttcccagcccagcgtccc

SEQ ID NO: 212284 - DNA, 122 bp, Homo sapiens
ccgccccgcccccaaggggctgccccgccccgccccgccccgccgcctcctaccggggaccggagcttccccagttggggtcctaggggacttattccacgcttcagcggaccagcctcccc

SEQ ID NO: 212285 - DNA, 122 bp, Homo sapiens
tccttttgcaaatcaaaatatgaccccctaaaatccagaagttatcttcctatatcccatcgcatcttttaccaccccctcttccgacacaccccccaaaactcttagcaatctgaaagatc

SEQ ID NO: 212286 - DNA, 122 bp, Homo sapiens
cagcggcggttgattagtcaggcctcagaaagatggcgtcctcggagcaggcagagcagccgagccaggtaaggggagtgggactgccccgctgtgcggcggagaccccggctggagggggc

SEQ ID NO: 212287 - DNA, 122 bp, Homo sapiens
cacacacggcattgtctccagcactaagggaggggtgggcagagcgaatcttcggcaagacggttctttccacactcctgtgtgtcttgcgctgaaccaggtgccatggagtttacaaaatt

SEQ ID NO: 212288 - DNA, 122 bp, Homo sapiens
gccacagcgctctgatggccatatatggtaaaaaccactgtcagagccctgtcaggcctgcgggccggctgctgtggacatatcagtgaactgcagcagcaggagaagctggccaaggaaac

SEQ ID NO: 212289 - DNA, 122 bp, Homo sapiens
gagtaactcatcctgttgggtttgcatgaaccctaatttcccccttatatacagcagttccggcccccctcaacatatgggtggaaagctctgaggcctcatacatagctaacacttctaag

SEQ ID NO: 212290 - DNA, 122 bp, Homo sapiens
tatcagatttcgttgaacccacttgacttccccaccccgctcacagcaaatgggtccatgcgtggctccagccgctgtgggccgttctatatacgtactgtacccagcatctaaaatagagc

SEQ ID NO: 212291 - DNA, 122 bp, Homo sapiens
gaacctaggatgcctgggagagcatgggtgacatccttctgaaggtaccgtagcaggccacggcccagggcagacccgtggtagtgtccaggatcaccaggtgtgaggctagatgaggagtg

SEQ ID NO: 212292 - DNA, 122 bp, Homo sapiens
tcctggactgatcgtttaaggccgggcacaaggggtaagggatcaggcttcactatcgaccgacctgggctgaatgataccggttgactgtgtgacaaaagcaaatcaagaacctctctgcg

SEQ ID NO: 212293 - DNA, 122 bp, Homo sapiens
cgccgcgcgcgcctggatgggagctctgcgtgcagggccagggtgaccgcagcggggtctcgggggacctggcggccacggttcgggtctccgcccccgcgcgccacctggcggccccgcgc

SEQ ID NO: 212294 - DNA, 122 bp, Homo sapiens
tccatccctgggaaaacagcacaggatcttccctgcaggaggccgggggtctcctgcaaccgacaggcaaccgatcagcacatcaaagtaaaagctgccctgggctctactccaggaagctc

SEQ ID NO: 212295 - DNA, 122 bp, Homo sapiens
ccggaggcccccagatccccactcattcaactgttggccaagagcatttgcactgccaggcgctgctctgggccttgagcaaagagggaagtgacacacattcaccctctgtggctcccagg

SEQ ID NO: 212296 - DNA, 122 bp, Homo sapiens
tgtgatgatcgctatggagccgcgcctcaggtggcattactataaacctaagaggagaggcgcccgttcgaataagggcaaattatttagtattttgtaagttccaaagttccaacattctt

SEQ ID NO: 212297 - DNA, 122 bp, Homo sapiens
gtcccgccttgtctctggtcaggtgacgtgcagctgccatcctgtaagtaggaatggaggcgagggaggagcaaccgaccgtgatcttgttcgagtcaggcccaggagggcacttaatcacc

SEQ ID NO: 212298 - DNA, 122 bp, Homo sapiens
aaaggagagaagtggtgtttctgggggccacaagatcggggcactcttccggtagcagctcgctctctggccaccgtcttccccagccaaccaggcctcccggaggcggccggccagaaagc

SEQ ID NO: 212299 - DNA, 122 bp, Homo sapiens
ccattctgcccatgctccctgggagcttggttgtgggaatcatagtacttggctccccagcgggcgcacctgtggagacccagctgcgctgcctgcttgcttctggcctgcgctcccgtggc

SEQ ID NO: 212300 - DNA, 122 bp, Homo sapiens
cggttcccgattgctatagcgacgacccggctccgagccgcgcccaggccctgacccgggcgtcgtgacgtcagcacgccttccctgggcgctcagcctcgctggccatgcgtcaccccggc

SEQ ID NO: 212301 - DNA, 122 bp, Homo sapiens
gcgggcgctgagcgcgttgggcagactggttgcctctgggcatcgcaaactgcccccgggcgcatctggcttatctggagacctgggagcttgaggctcattggaagaggacgatcgttaac

SEQ ID NO: 212302 - DNA, 122 bp, Homo sapiens
actctccaaggggtcagatgtgctaggagggagaattcaggaatgacccgccatcccggtcgcatgcagcttattgaccggtctctgtgttccttctgggaatcaggtgacagatgcctaag

SEQ ID NO: 212303 - DNA, 122 bp, Homo sapiens
aaaaagtctggtagcttttaggagtgtaaacaggcagacggacccctgagttcagtgcagcgagcgaagcaagtgcacacggacagacggaatccatgtgttcagtgcagcgagcgaagcgt

SEQ ID NO: 212304 - DNA, 122 bp, Homo sapiens
aatgcagtgcaggcaggtggcagaggactcctgagaagggactcaggatgtaaagcacttcgcctcaacaaaaaagggcagaagcaggaggtggcagctgtgtccaagtcacagcagggttg

SEQ ID NO: 212305 - DNA, 122 bp, Homo sapiens
ggagctctgttctcgctcctgagcagctgctaggtttcccaagcgactgtctcaaccgcccggccgcctcccccgggcagccagagcttcacatctacctccagccgggacccgcccccgag

SEQ ID NO: 212306 - DNA, 122 bp, Homo sapiens
aggttgcgttgtgtccctgtccctgcccttttgccttaatgtcctacgcacagttatctacggctacaacatgtgttttctcagggtggattttttggaggggaggtgaaggggagaaaaac

SEQ ID NO: 212307 - DNA, 122 bp, Homo sapiens
aggccgggcgcggggcgctggtcccatgctcagggagcctttgggtcgcggccagggccccgcagattggcggcggcgggcaggacgccggaccgggacactctgcgtgcgctgcaccggcc

SEQ ID NO: 212308 - DNA, 122 bp, Homo sapiens
cgccccttgcttcggggtttcactccaccgcccagacagctttgtgaggcggacaaaactcggagccaagcggagaagccttgatgtcgccgccggccttcggcgggggtatcggccaggtt

SEQ ID NO: 212309 - DNA, 122 bp, Homo sapiens
atgtcagattttcaaatgagcagggtcccccgcagccagtacagactccactgcaggggccgtcataggcccagaccacgccatttgagagggggagtcggccttggcctcagctctgttgg

SEQ ID NO: 212310 - DNA, 122 bp, Homo sapiens
cagtttggcaattagattcttccgaactgggcttccagtgatcagatcttttacttacagcgcgactgcttgtaaagtgtaaaaccccttaatcgatgaaatggggtaggagttggcgttgg

SEQ ID NO: 212311 - DNA, 122 bp, Homo sapiens
tgaggacctccaagaataggtcaagattctctgggctctgggagcctcatagcaagatggcggaggcgggggagggggagttgtatgaaatgatctggaagctttcttccaggtcaaaaatg

SEQ ID NO: 212312 - DNA, 122 bp, Homo sapiens
gggtaatgagcgcttcctgaggactctcagaaggcgggggtggctgggtgttttggctcacgcctgtaatcccagcactttgggaggcagaggcaggagaatcacttgcgcccaggagttca

SEQ ID NO: 212313 - DNA, 122 bp, Homo sapiens
cccgtgtcgcggccgtgactgtggtcgctgtcactcgagctgtgcacggcgagggatggacggtgccttcgccgctccgcgactgctgcgctgctccctgcagacttggccttaataaactc

SEQ ID NO: 212314 - DNA, 122 bp, Homo sapiens
caaggtgtaggcgaggttagagctggagctgggaacagcctctctacaggctcctcgctccggagcgagcggaagacttccttggccgaactccgcgggcaacccggattgcactgtcccct

SEQ ID NO: 212315 - DNA, 122 bp, Homo sapiens
ggtccggcggcgcgatctaggctcaagagtcgggatcatgtgctgtttgttccgcggaggcgcagagaggtgccaggcccgggcggccgccggctggctggacaggaggacgggtccgcatg

SEQ ID NO: 212316 - DNA, 122 bp, Homo sapiens
ccgccgccgccgcccgccccgcctacggccccgccccgcgccttaggccccgccccttcccgcccttgctgatttaagtccccgaagttctagactggagcccgggagcgcgctccccacgc

SEQ ID NO: 212317 - DNA, 122 bp, Homo sapiens
ttttgtaatttaagctccacccatggcacactcactcaaggaagatataaatgacaaggtcggctcagctctcagacaaggttttccaagcaagatgaagcccaacatcatctttgtacttt

SEQ ID NO: 212318 - DNA, 122 bp, Homo sapiens
tgctctctggcaggcaggctaggaagctctaggagccccagggtaggtttctgctggagtcgtagggcctattttgggggaagttgtgcacagaaaccaccagagggagtcacaggcatctg

SEQ ID NO: 212319 - DNA, 122 bp, Homo sapiens
ctgccttggatctgggctggaaaaacacagcagatcacggagcttcagcagctggaatgtcgctttacaccaacagaaatctgaatgggtgagtgaggattcacagggccagacagagcatg

SEQ ID NO: 212320 - DNA, 122 bp, Homo sapiens
tcccgactgatggcgacggacctaacaacagacaagctctgaggacgcagtgccaggcctcgttctaagctgtctgcacatgtgaacccatttgatcctcaaaaccatcccatgacacagct

SEQ ID NO: 212321 - DNA, 122 bp, Homo sapiens
agtctgagattgggcagtgcacacggtgaggggcttgtgctgctccaactcctggcagaacgtggaaggggaaaccagcacaggcaaggagagcacatggcaagagaggaagcaagagggtc

SEQ ID NO: 212322 - DNA, 122 bp, Homo sapiens
ggagcgggggccctactgcgtggacgagaacacggagcgcagaaaccactacctggacctcgccgggattgagaactacacgtccagattcggccctggtaggtcctggaggccaccctggg

SEQ ID NO: 212323 - DNA, 122 bp, Homo sapiens
tatgtctggaaactaaaaatgcctcctcgcctctgattttagccgtggttgttggagtaccggttccagcaggagctgtgatttccattgagctctcaaaccaaataaaatgcaaatctccg

SEQ ID NO: 212324 - DNA, 122 bp, Homo sapiens
tagtcgagtaaagttccaccaccaggtccacaaagagactgcagggaggcgtggccaggccggaaattctgacaaaaagttttggccctctggtcctaaaagcaactacttcctgatcgctc

SEQ ID NO: 212325 - DNA, 122 bp, Homo sapiens
ctcggagattgccctcgtcgctgaaggtagtggtaaggaccccctcggtgaccacgcagccgcagtcggagcacaccagctggctctgcgaatagtgcgagtcttccaccagctccgtggag

SEQ ID NO: 212326 - DNA, 122 bp, Homo sapiens
agtgtcttgccatcatccaagagttggtagtccttgtacagccgctgctcgtcgggcggccgcttgaggattccctccacgacgcgcttcagctcgaacaccgtgctggactccttggcgtc

SEQ ID NO: 212327 - DNA, 122 bp, Homo sapiens
cctcagcccgagcagaaataaaaaagagcggaaagctcctcacctcgtcggttcatgggccggacccggacggcaacttttaccttggtatccgacatgttggctgcgctcgcccggccgct

SEQ ID NO: 212328 - DNA, 122 bp, Homo sapiens
acagtactcgaggatcaacaaagcatgtgaaatcagcactttacgtgctccttgagagggcgctgcttcaggcaagatgagagtccctcctttcccacaactccccatgacaatttacagcc

SEQ ID NO: 212329 - DNA, 122 bp, Homo sapiens
gtttgaggccgtcctcctccttgtctcccgcaggtgtgcgggagtctgtgtctcccacggcgcagcccgaggagcctcccctgctgccggagcccccagacaaccggtccagcgccccgtaa

SEQ ID NO: 212330 - DNA, 122 bp, Homo sapiens
gcaagccccgcctctgccgggtcccgctcttttgccagtcctaggtgtaagccctgatcccgcccagtgcatccccgaggccccaagcaactctcctccaactgtctttagggataaccctg

SEQ ID NO: 212331 - DNA, 122 bp, Homo sapiens
acggaggagcaggggactccgaaacgcaggtttaatctagatagagggaaactcacgcggcgactaacagccttcactccaagagatctgcttccgggtttgcaagaaactgcccgcgcagt

SEQ ID NO: 212332 - DNA, 122 bp, Homo sapiens
ggggaagaggcggacagggaccacctccagcctgcagtgtttgggaccacagtgtgagcccggaatgcagattacagaatggagacagaaagccactgctgtcagtgtccttgggagtcacc

SEQ ID NO: 212333 - DNA, 122 bp, Homo sapiens
ggatggatttcgcctccctagaccaggagggattggaccctgactacaggtccaggtgctcgtcagtgccctgccagggggtctacgcgtcctggtaccgggtccagcggggtggcgtgctg

SEQ ID NO: 212334 - DNA, 122 bp, Homo sapiens
gccttgttcatcatgctgaggagcatttgcccttgacccaaggcatggggagtaataaagcgttaagctgggagcccagcattacaggaagagcaatatgacagcggtggagggtatcttgg

SEQ ID NO: 212335 - DNA, 122 bp, Homo sapiens
aaactagaaccaaactattcttgacctgaagagcctagaaaggtgctggatcgggctggacgtggtggctcacgcctgtaatcccagcactttgggaggctgaggcgggtggatcacaagtc

SEQ ID NO: 212336 - DNA, 122 bp, Homo sapiens
ctcagaggaagtcagctcagccagccctgtggataatgtggatggagtggtggctcccatcggtggggctgagggcgtgagagaaggatcaagggtggatgcccaacaaatggatgcagagg

SEQ ID NO: 212337 - DNA, 122 bp, Homo sapiens
taacgcgcaggcgcacttcctgaagctgaaggtcagcatagacaaagggcctcagaatcgcgcaggcgcaattgtgccctggttcgccaagatgtcgttcccaaagtataagccgtcgagcc

SEQ ID NO: 212338 - DNA, 122 bp, Homo sapiens
tttgcatgtgggggaaggaataaactactgattcatacaataacatggatgaatctcactcgaaggcattatggtgagaggacatacttaagattccacttacattaaattccggaacaggc

SEQ ID NO: 212339 - DNA, 122 bp, Homo sapiens
aacttcaagacggaaatatgccaccaacactggcgtcagtaatccattttagaaagcctgcgcggagaccaccattagcaccgctgaggatatttaatgaaagccgttggctgcaaacagag

SEQ ID NO: 212340 - DNA, 122 bp, Homo sapiens
ccagcaacagccagaggtggcagagagctgtcagtcatccctgggtgcctcctgcgcaagcgcagttgtcctcctgcgccgacctcgaatgcggtcctcctgctgcagaccacgcccaccaa

SEQ ID NO: 212341 - DNA, 122 bp, Homo sapiens
ctcgatctcctgacctcgtgatacgcccgcctcggcctcccaaagtgttgggattacaggcgtgagccaccgcgcccagccccccatctttaattggcaggtaaaatgggaaaatgggaaat

SEQ ID NO: 212342 - DNA, 122 bp, Homo sapiens
ggtcgccgcacagtctgctccggggccgtcaggagctgtatcaagggctgggccccagctcgctcctgtctggctggccccgagtcgggacaccccgagtgcaaccttcttatctgctctac

SEQ ID NO: 212343 - DNA, 122 bp, Homo sapiens
ggaggttcttcaatatcaaggcaagttaatacccaaaccaggacaggtcattctgtcccgcggaaactgcacacaccccaaatacccgtacacttggttccatatgaaaagattttgttcat

SEQ ID NO: 212344 - DNA, 122 bp, Homo sapiens
ggagtggctgcctctgattcatcctcatacagcagccggggtggggcactttctgaaacacgagatgaacatgccactcccctgctttaatcccttttatagctccccattgcccttgggat

SEQ ID NO: 212345 - DNA, 122 bp, Homo sapiens
gctgcagaaatcgtggccaggctgcttttgttaactgcatgtttgacaaatgaatattctcgaacacccgttctgaacaatggcctgcgcttcttggtgggcagttggggccgctgccattt

SEQ ID NO: 212346 - DNA, 122 bp, Homo sapiens
tgtggtgcagcacctgccgcaggatgctcacctcccgctcgatctcctcccggctcacaccgcgccggctcgcccggctctgccgcttcttgatgaacttggctgcatactcaagccccgtg

SEQ ID NO: 212347 - DNA, 122 bp, Homo sapiens
catgcgctcgtcagggcccgcctctaccactgtccaaccaatgggcgtgcagtgggtgggcgggcaggttcttgtggctactaaaaggcgatgggtgggaacatcgtggcttctcccatcaa

SEQ ID NO: 212348 - DNA, 122 bp, Homo sapiens
gttttcagcagctgctctgggcagctccacacgatcctttcagcgaagttggcgagtgtccgacccagacagaaaaaagcaaagccagactccaagcgctatcagccaggcgtgattctaag

SEQ ID NO: 212349 - DNA, 122 bp, Homo sapiens
gtcgctcatatttggctcagaataaatctcttcaaatgttttacggagtttgactcttttcgtcgacagagcaaaccgtacttcctgaaaagattaagagttagacagctagactttattca

SEQ ID NO: 212350 - DNA, 122 bp, Homo sapiens
tgcggctggttcaagcggtggcgggagcctgtcaggtaggctggagccagctgtcctggccgtcctaggggttggagatggctgcgccccaggggcgaggcgccgccttttccccgcgcctg

SEQ ID NO: 212351 - DNA, 122 bp, Homo sapiens
ttcttggaggtgcaggaaggttctccaaggagtaggaccagaaagggatgagagcgcgagcgcggttaatgtcgaggctgctaagtgatgctcgttaatttcgcagcagggtgtgactggcc

SEQ ID NO: 212352 - DNA, 122 bp, Homo sapiens
acaacctccgtccacagcgcacgaggacgttcagaaaactccgccccctagcgacgctagcggtgtcacgctaggccactaaagccactcccacttggcctttacgctgtgtcacggagcct

SEQ ID NO: 212353 - DNA, 122 bp, Homo sapiens
ggcgagtgggcggggctcgggctccagccactcagactaccaggggcgggggcaggaggccgaccccagccacccttaaagctgccgccccctctgagccccagtcctgctgggccgtccgc

SEQ ID NO: 212354 - DNA, 122 bp, Homo sapiens
ctctgaagagctggcacttggggaatagccagaggttaattctgactagattctaggatccgaggaaggagcaggtagtgactagaaatcaagtttggtcagcggccaggggctgaaccacg

SEQ ID NO: 212355 - DNA, 122 bp, Homo sapiens
gagaggtgctctgggggacgagttatggctctgagctgcccgtgcaaggcagggaggctgcgttttcatgcgttcacacctcagtccctgggtaaggacctcccaggatgtacctccagcac

SEQ ID NO: 212356 - DNA, 122 bp, Homo sapiens
ggctggggtcagggcctgcacctctgacaggctccgccagtgactctgagccaggcggcccggctggggctctgacagttcactgctcaccaggtgcagggagtgagcctccggtccctcta

SEQ ID NO: 212357 - DNA, 122 bp, Homo sapiens
agccccccgcggggcgcgctcagccggctcctggagcagggagggagctcctgccggccgcgcccccaccgccgggctgggcctcgaggaccctgccgtcaccctcccgagcgcccccaaac

SEQ ID NO: 212358 - DNA, 122 bp, Homo sapiens
ccctaggcggagggtccccagaaagtttatctgcacttctcctgggatcagacagacagacggcttcgggatggagagggggtgaggcgacgctgagcgttcccccagtctccttcgtgact

SEQ ID NO: 212359 - DNA, 122 bp, Homo sapiens
ctattccatactaccggcccagcccctcttcctcctccagctgcttgagcagcgactactcgacccggagccacagccgcagccccagccccggccacagccacgggagctacagcagtcgc

SEQ ID NO: 212360 - DNA, 122 bp, Homo sapiens
gccaaatgaatattctgaatttaattctttttcaagcatgtggctgccataaagatgtgccgtccgcaatagagacgtatagttttggaaatacaaaggcagtgtggcattctgttgaacga

SEQ ID NO: 212361 - DNA, 122 bp, Homo sapiens
ggaactccgctggtgggagtaggtgtcttctgtgcattttttttccaaaaccactttggccgttagatggctgtgggccggcactccatccatccatccatccatccatccacccacccacc

SEQ ID NO: 212362 - DNA, 122 bp, Homo sapiens
tgcagaaactcctgggcccacagcactgcatggtttcaactttcattgcagggaaggacacgtttctatgccttacagagacttgaagcctgaaagcctggccaagtttgggaagaagagga

SEQ ID NO: 212363 - DNA, 122 bp, Homo sapiens
ccttactttcctctggcggcggaggtgggagccctcgcctcttggatttccctgaactcccgcgttacaagttccctccaagcgataaactccctgtggcgctgaagtaatttgttttaaag

SEQ ID NO: 212364 - DNA, 122 bp, Homo sapiens
gcgaggcctccgggtcctgttaagcccgagcaggtgagcgactgggggtggttcggcgtccgccgagacagagcctggccccgggggtcaccctggggtgctgcctggtacctcccaggtac

SEQ ID NO: 212365 - DNA, 122 bp, Homo sapiens
ctgcggggctatagctctcagcggccggagcctgcgcttggcaggggacggcctggaggacggcctagtgtggctggtgggttcgcggagccctgccctggagctctgcctgaggctagaac

SEQ ID NO: 212366 - DNA, 122 bp, Homo sapiens
gggcaccccccagcgctgcgtcggcagtacctgaggcttcgggggcagctgctgggccagcgctacgggcccctctccgagccaggcagtgctcgtgcctatagcaacagcatcgtccgcag

SEQ ID NO: 212367 - DNA, 122 bp, Homo sapiens
tccaggcgttaggacagtgtgccagggtcaaaggcagcctgggaccgggtcctggggtcccgcgccttccggagctggcggctgcgctcccggttgggccactctagctgcgggaggtcgct

SEQ ID NO: 212368 - DNA, 122 bp, Homo sapiens
acgcgtgctgcacccttgtcctgggttccctgtgtggtgtgcgcacacactcacctgccccgagaggtcgcattcctgatcaaaaaccatgtactcgtcctccttgctgtacattcccaggc

SEQ ID NO: 212369 - DNA, 122 bp, Homo sapiens
gcactccagcctgggcaacaagagcgaaactccgtcaaaaaaaaaaaaaaaaaaaaaaagcgagttgctcgcttttggttgctcctcgactccattaggtcggacggtttgtccctaggcac

SEQ ID NO: 212370 - DNA, 122 bp, Homo sapiens
tgcacagtgattcacttgggacattatctcaggttcctcatgccagtggcaattgtagaacgtgacaaattgtctgacaattgtggtgcttccctataattagagatggtgcttctcctact

SEQ ID NO: 212371 - DNA, 122 bp, Homo sapiens
ccaggggacgcaggaatcctttctgctttttaaggacagactttgctttaccacagcagtcgctcttggggccacacggaaagccaccactgagtttactataaagtgacagaggctggtgt

SEQ ID NO: 212372 - DNA, 122 bp, Homo sapiens
gccgcgaggagggccagagtgcaccgcgggggggtttgcaccgcgctggggttggcaccgcgcgctaggacccacgaagcggcgcgctagtcccaggtgagcacgaaatgagcggaaggact

SEQ ID NO: 212373 - DNA, 122 bp, Homo sapiens
ggcttccagagaaagagaaaactccagctctggagggaaagggacttagccagggccactcggcccatcagtggcagaaatggacttgaacccagagaaaaagaaacaagtgccccaaatac

SEQ ID NO: 212374 - DNA, 122 bp, Homo sapiens
catttggccaatgaggttcacaggacgcaagagactacaagctggtgagtgacaggcatacgttcaagccttgcactgtcacggtatggggtcagatcttcagagaagttttgacaaaggat

SEQ ID NO: 212375 - DNA, 122 bp, Homo sapiens
ggcggccgagtagagggggcgagagttctcaccccacagccttcgaccggagtccgcctccgcccaagcccctgcggttctgacctgagccttcagcccgcagcgcgcctcccttgagccca

SEQ ID NO: 212376 - DNA, 122 bp, Homo sapiens
gttagatccacgtaacttactggaaatctccatttaatttcactgaattttgtaaactttcgatcataaataccctgatctgctatccctcacccccagccctctcacagacaccctcacat

SEQ ID NO: 212377 - DNA, 122 bp, Homo sapiens
accgcatggggaaggggccaacccctggggtggggagagggcttggcctcaggagagctgcgctcacaggagaggtgcacggtcccattgaggcagaggctgcaattgaagcactggaaaag

SEQ ID NO: 212378 - DNA, 122 bp, Homo sapiens
cgcagccctctccttccctgcagatctgcggggcgggctggggcgggatctcagagctcacggaaaggaggcagaatccggtttacaggcttgctccgcccctcccccacccccctccaata

SEQ ID NO: 212379 - DNA, 122 bp, Homo sapiens
taagtataccacccaccacaagtcacatcagtttacctaagaaaagccccatagcgaaaacgataggcattagcaaggcatcaggtgaaaatgaaaaaggagacagactattgtgaccttac

SEQ ID NO: 212380 - DNA, 122 bp, Homo sapiens
tccatgtttctgctgttgctgctggctgctgctatttttgttattattattttctatgtccgttgttgtaagaagaaaacatcagctgcagagggtccaggtgagaaaagcgggcagtttct

SEQ ID NO: 212381 - DNA, 122 bp, Homo sapiens
gagagatgtgtgtgtttgagttccaatcactgcagcccgtattggcgcggcgctttgtctcgctttgggtcaccaccacaggagcaacgatttcggggacggcacacgcctgtgtgaccgct

SEQ ID NO: 212382 - DNA, 122 bp, Homo sapiens
cttctaaaatagtagtattgtgtttaaaatgtaagatttattgaagaatctaggctttaccgatgccactggccaaccagagtcccctgttaccagccatggtcaaccccaccgtattcttc

SEQ ID NO: 212383 - DNA, 122 bp, Homo sapiens
caatgtttctgagtcttggagcctgcaggggtccacgtgtttaccctgaacaggaacatgcgggtgttttccggaatctggcgaggccgcgcggcagttttgcatttacattccttgttttg

SEQ ID NO: 212384 - DNA, 122 bp, Homo sapiens
gtaggagaggacaatgatagaggcagggtgagtagctaaagtgctattatagtaatctaacgtagagatgaaagtcactgagtctaggttggctgcagtaaaaatcataagaagtagctgaa

SEQ ID NO: 212385 - DNA, 122 bp, Homo sapiens
ccatcaccccaaatgaccttagtgcatctcaaataaaccatgctttcagagtatgcaaaacgcactgcaagttaaaccgattgcaaaagaaaaagcccacaggtactccgtgcgctcaaagc

SEQ ID NO: 212386 - DNA, 122 bp, Homo sapiens
gggagctccgcggtggcgaatgcccgttatgtatttctgatgccgccgtctgcgtttgcacgctgaagggccagctaccaccttagacccagggtaattacatgacacgctatctcctctcc

SEQ ID NO: 212387 - DNA, 122 bp, Homo sapiens
agaactatccgaacaagggacatctttttcacagacttgccttacacagtttcttgaagacgagtacccagacatgcccactgaaggcataaaaaatcttgttgactttctcactggtgagg

SEQ ID NO: 212388 - DNA, 122 bp, Homo sapiens
cgtgtgatgaaatttaaaatgtccattttatgacccagcaatttcacgtctagaaaaatacggaaatgccgggtgcgatggctcacgcctgtaatcccagcgctttgggaggcagaggcggg

SEQ ID NO: 212389 - DNA, 122 bp, Homo sapiens
cccatattccctgaaagcaagaaacgaataatcattgcagaatctagacctccggaaactcgatttccactagatggcgcatccgatgcagatattggagtaaactcggcattgacctaccg

SEQ ID NO: 212390 - DNA, 122 bp, Homo sapiens
gtatatagaagctaaatgagaggaattttgagaaaggaagtggaacataattaaataaaacggaaatgaggacaggtgaaaggaagagacccaatcttaattagaacggtaaagttttgaat

SEQ ID NO: 212391 - DNA, 122 bp, Homo sapiens
aaggcctttttctccattttgacattgcccactgcagctaagattttaaggagcaaaaaacgtgggctctggtgtcatgcagtgctcagtgtaaatgccagctttgatccttcctggctttg

SEQ ID NO: 212392 - DNA, 122 bp, Homo sapiens
ctgcctttcctgcttctacagagagaggccagtcaccacctttctatttcagtcacactacgtacggttctatgggaactgtcattttcctttactgcggtttccaaggccctaaaataacc

SEQ ID NO: 212393 - DNA, 122 bp, Homo sapiens
cagagcagcgtagccggcaggcccgggcccctggccacacttccagccgcaggtggatctcgccctgcacctcctcatcggggtcgacctccgtcaggtgggcccacccgctgaaacctgtg

SEQ ID NO: 212394 - DNA, 122 bp, Homo sapiens
tctcaaggtctgagtctatttagactcttagaaacacaacctccgttcctcaaacataaccggcgagtggtgggtggggagtgcagggagagagcataaaacatctcataaaaaggctgtgc

SEQ ID NO: 212395 - DNA, 122 bp, Homo sapiens
ctttaaaaaagtaaagtcctagccaggtgtggtggtacaccacctgcatttgcagctactcggcaggccagggcaggaggattgcttgagcctaggagtttgagaccagcctggctgggtaa

SEQ ID NO: 212396 - DNA, 122 bp, Homo sapiens
agagcgcgtgtcttttccgcctccctgactctctgcaaacagtgatggggctggtgtacccggccccacctcggaccccagcagccacagccccctccctagagcccttcttccagtcggct

SEQ ID NO: 212397 - DNA, 122 bp, Homo sapiens
gagacacggaatacggcaccagccgtccctttatgatgcaatatgtctgcgcccaggggacgcttgctgggagcagccattttcaaccctactgccgtagagcaggcggagtccctcttttc

SEQ ID NO: 212398 - DNA, 122 bp, Homo sapiens
acttgggttctggtggcgcaggcgcaggagcagccagctgtggcagcgcattagttttggcgcaagcgagcctatgctgcagggtcacttttggctggtcagagaaggaataatgatatcac

SEQ ID NO: 212399 - DNA, 122 bp, Homo sapiens
cacctgtttcagatggccaggcctccgccacttcccgccacacacagtctgcggccccgacggcccactcccacaagaaagcgccagggtttttccaaggccaatgtgatatttatggcagt

SEQ ID NO: 212400 - DNA, 122 bp, Homo sapiens
tcctctgcctcactttgatctgcatttaatgagttacaaatcctgtgaattttacctcagcgctgttttttccacctagcccattttctcccctttgtattaacacagtttaaaacctcaat

SEQ ID NO: 212401 - DNA, 122 bp, Homo sapiens
gagggtggcttcacgtgtttataaggaagctgatattgtgaatcccaacctccaccacaacgctcacccttacagacacactattgcaggtctccgagggcctttgggaggccctgcttcct

SEQ ID NO: 212402 - DNA, 122 bp, Homo sapiens
ccacaaaaaggatcaatcctaggagcgaaagggttttggccacggagcaacttgctcttacgcagaagcataaatcatcacgacaaggttgctccggccaccgggtgccgcgggcagaggga

SEQ ID NO: 212403 - DNA, 122 bp, Homo sapiens
tgctgtcacattcggggacgacggaccccgacggtgccaaagtctgggacaggacagttgcgggacggttggggagcgtcagttctcgcagccatggaaacgggttagccgcgcctgcgcag

SEQ ID NO: 212404 - DNA, 122 bp, Homo sapiens
aacccgcgctcccgaactcaggcaggcggccgctatgcttccgtacggtaaacagcctcccgcctcttcccaggtgaggaaacttgagctggccgggagtctgcttacagctgcttccaaat

SEQ ID NO: 212405 - DNA, 122 bp, Homo sapiens
cgtgctgtttacttgcttttccctccccaccaaaaggtgagccttgagaagacacaccctcgtggagagctttgaacttttatccggaaaggtgccgggcacgtagtcagcgcccgcgatca

SEQ ID NO: 212406 - DNA, 122 bp, Homo sapiens
gggagagaaggagggagggagagagggagagaaagtggcagagtcagaattagaatctgacgcatttagcttccaaatccaccggattattcttgactgcctcctctgggctcctggttccc

SEQ ID NO: 212407 - DNA, 122 bp, Homo sapiens
tttcttaatattcctgtgctgttttcacatgcaaaaaatactttccccctcctacctcatcggtagggcaatggacaaaatggcttttcttatagtaaatagcatgttccatgtaagacgag

SEQ ID NO: 212408 - DNA, 122 bp, Homo sapiens
cggcgacgacttcggttcctgcttctgaggtggcggcggcgggggcggcggcagcggcggcggctacaacccgggccaccgccccgccggccccgccccgagccccgccccgccgggccgcc

SEQ ID NO: 212409 - DNA, 122 bp, Homo sapiens
ggacagagacccggtgtggggaggccgctgcccctgcacgctgggccacgggggtttgggcggggaggagcttgtactgggtgggcggggaggagcccggacggcgggagcggctgcggcgc

SEQ ID NO: 212410 - DNA, 122 bp, Homo sapiens
attatttaatagaatccactcattaagaccatactaggacctcagctggagagtttaaaacgtgatctcaacggacactactcctccacaaggcaagtatgctaacccatcctataggtgag

SEQ ID NO: 212411 - DNA, 122 bp, Homo sapiens
cttaccgcagctccagagccctgcgggaggactcagagtcagggacacagcagcgtccggcgagatgaaggcgctcggggctgtcctgcttgccctcttgctgtgcgggcggccaggtgcgg

SEQ ID NO: 212412 - DNA, 122 bp, Homo sapiens
tacacgagatcagaccccgctctctcttgaacccggggcccagatgggtgggggtgggagcggcaggggcctagccctggaagcccagctccttgtagttggaggccatgtccttccggaac

SEQ ID NO: 212413 - DNA, 122 bp, Homo sapiens
cagaaaacaagtgttagtaaatacagtcgctgctgctctgctcagatcagctttgattcccggctcctatttttcatacatgtagcgtttcctccctaactgccttagggtgcctttttgaa

SEQ ID NO: 212414 - DNA, 122 bp, Homo sapiens
aacctcagccgagctgaacaacctcaggcagagagattctggtttactccccagtggctacggagacgccttggaggccttggagtctgctcaccttgagggatggaggccaaaaggggccc

SEQ ID NO: 212415 - DNA, 122 bp, Homo sapiens
cggaagaggctgtgacagagactcgaaaccagggccccgtgggagaacacggggcggcaccggtgccccccgcccggcagggaacctgaccccacggggtccaggccaggcgggggatccgc

SEQ ID NO: 212416 - DNA, 122 bp, Homo sapiens
agtctctgccacaggcctgggcctgacctggaggttctgcggacaccaactaacaggccccgtcctcccacccctcctcactcggcaaattcatactcatgccaggcatggcccggcgccca

SEQ ID NO: 212417 - DNA, 122 bp, Homo sapiens
tgcaggcaagagctggaggcctgaaggcaggtggggcccagggagccggcccggcacactcggatacacagctttaggtgtgccagatcgggacgatgttttaataaaagtaaagcagacat

SEQ ID NO: 212418 - DNA, 122 bp, Homo sapiens
agccagcacggtcagagcgatcacctgcagggccaggcggagaagctgggctgcagcccccgccctgccaggccctgcccctccagcacagggacgctctgggctcgtttgccacgaagcct

SEQ ID NO: 212419 - DNA, 122 bp, Homo sapiens
tcttgagagaaagtttatttgtattagtaaagctttgggactagcaagctgattggtgaacgatagcagtggacacaatgagccctacattggcggcaagatattccacaagctatagacaa

SEQ ID NO: 212420 - DNA, 122 bp, Homo sapiens
tgtgggcaacggccacatggcagggcccctgctgcctccaccgccgccagcccagccgtccgccactctccccagtggtgcccctgccaccaatgggccccccacaaccgactcggcccacg

SEQ ID NO: 212421 - DNA, 122 bp, Homo sapiens
agctcgccggcgatccggtgagcgcgccccggacccaccccgcccccacagccccgacttcgacgcacgcgcagctccgtctcagctcgctagccgacccgcccctcccacttctcccctgt

SEQ ID NO: 212422 - DNA, 122 bp, Homo sapiens
tagtttggctctctgccaagaggagagtgcaaagtcatttagaaagaacaatcaggaaatcggtaggataacacatccaccctcaaaccagaattgtgggtatccttttttcctccccagtc

SEQ ID NO: 212423 - DNA, 122 bp, Homo sapiens
tccacgcatgcggagccgcaggaggccgactacctgagcggctccgaggacccactggagcgcagcttcctctactgcaaccaggcccgtggcagccctgccagggtcaacagcaactcgaa

SEQ ID NO: 212424 - DNA, 122 bp, Homo sapiens
ctttctgcgtctgggagcttgtgggggcgggcagggggtgagggagaaatcatggagtcacgtggcagccacagacttactactactactttgttagctccaatagtgtatcctctcaggcc

SEQ ID NO: 212425 - DNA, 122 bp, Homo sapiens
ccagaatggctccgaggcggggccgggccgcggggggcggacggaagggccggggcggcgcggggaggaccctcccgaagcccagccggggccctgagctcagaagcctgggaaacggaggc

SEQ ID NO: 212426 - DNA, 122 bp, Homo sapiens
cactgcgctttggggaggaagagagactaaaggggagaccgagaaccccgggtcaggaagcggagagctaaaacgacaaccgtgggtcagcggaggccggcaacttcatttcatgacctctg

SEQ ID NO: 212427 - DNA, 122 bp, Homo sapiens
tgtgttacagagaaatagcatttaagaaagctcattacttctgctcccctatgtgttaggcgaatagaatataattatctttgtgagctcttgtaaagcaaagaaattttccatgtctacat

SEQ ID NO: 212428 - DNA, 122 bp, Homo sapiens
agaagcatgagcgccatagggcacaaggccagagtgacctggcgaaggcgccggggctggcggggctggcggggctggcggggcggcgggggagcccggagtccctgggggcaggcggtcgt

SEQ ID NO: 212429 - DNA, 122 bp, Homo sapiens
atggttgagatgggcatgtcaatctttataaagcacttttacatacataatctcattgaacgactagagggtccacctagtgacttttgcttctttctctctctgttctaaactctgatggt

SEQ ID NO: 212430 - DNA, 122 bp, Homo sapiens
tcagggccgtactggggcttccttcatggggagcttccttcgtggtacccagggccgtcccgaggcttccttcgtggtacccagggccgtcccgggacttcttcgtggtactcaagactgtc

SEQ ID NO: 212431 - DNA, 122 bp, Homo sapiens
gctgggccaagggagggaaaactcttcagcccaccgcagggccttgtgcgcggtgattggcgcgtcaacgaaagcgatggacgtctagaccaatcgtcagcaaaagaccctttggagcccgc

SEQ ID NO: 212432 - DNA, 122 bp, Homo sapiens
gggggacccggccccggggggtgcgggccccatggagctgatgtttgcagagtgggaggacggagagcgcttctcattcgaggattcggaccgttttgaggaggattcactctgttccttca

SEQ ID NO: 212433 - DNA, 122 bp, Homo sapiens
actcacggcactggacgaggagacactgtgggagatgatggagagccaccgccacaggatcgtacgctgcatctgccccagccgcctcaccccctacctgcgccaggccaaggtgctgtgcc

SEQ ID NO: 212434 - DNA, 122 bp, Homo sapiens
tcctggtgagggccctctgcttggtttgcagatggctgccttcttcctgtgctctcacatcggggagagagagagcatctctctcgtgacttttcttctcattcccattcatgagggcctaa

SEQ ID NO: 212435 - DNA, 122 bp, Homo sapiens
caagaaatgccccttcactggtaatgtgtccattcgagggcggatcctctctggtaagtgcgggagttactggtgtctggggcctgaaatactgaaagaagggtcttggggcccagactcct

SEQ ID NO: 212436 - DNA, 122 bp, Homo sapiens
tctcgctgctataagaagccagagaagggcgggacggtctgctggatttcgcaagagaagcggaaaagaacttgtttcctggaagagttcaagctgagaatcccagcagctggaaggaccgg

SEQ ID NO: 212437 - DNA, 122 bp, Homo sapiens
acctcctgatccgcccgcctcggcctcccaaagtgctgggattacaggcgtgagccaccgcgcccagttgtgcatttctggtttctaagaatcaaaccacttggctgtttttaggagttact

SEQ ID NO: 212438 - DNA, 122 bp, Homo sapiens
ctggctgctcggccgcggctgcaactgcccgtgaccccggctgccagagagaatgctccccgctcactccaggggctgcattttgtagcttgtggcttggccgcgagcccacttggtcatgt

SEQ ID NO: 212439 - DNA, 122 bp, Homo sapiens
aacctataccctacactgggaaagaaacagaccttaaaattgtccagcttgatggcatcgcggggaagggactaagtccagataatgtcctctgaggctgaggcctcgggggcaggacacac

SEQ ID NO: 212440 - DNA, 122 bp, Homo sapiens
cgcggcgcgtccggcgctgggggactgttgggtcagaaagtgttcagggagcagctgctgcgccctccctcggcccgccgctcggagacgccccgccccgccccaccccgcccccgcgccca

SEQ ID NO: 212441 - DNA, 122 bp, Homo sapiens
tcaataaataatcgctggtggttgttgcttctgcactgccaaaccctccgctagggggcgcgagaggaggtttacccagagagaagggagtgggtagacactacaactccagaaacaacagc

SEQ ID NO: 212442 - DNA, 122 bp, Homo sapiens
tatctgggggggcggatagctgggtccccaagaagtatctggaggggatagctgggatcccgaggagtatctgggaggaatagctggagcccaaggagtatctggagggaatagcaggaacc

SEQ ID NO: 212443 - DNA, 122 bp, Homo sapiens
gcctcccggaagcggaccccaggagaaccaggcagttggttaatccaggaacagctcctgcgcggggcgtggactgagcagtcactgagtattacgcaaattgcgcgagcgcacgggaaaag

SEQ ID NO: 212444 - DNA, 122 bp, Homo sapiens
aatgagtcagggctgaggaccaggacagaggttgggtggggcgtctcagcattcctccaacgggcaggtctcagcgctcctccccctgctccgctcctctgcagggcccaggcgcccttggc

SEQ ID NO: 212445 - DNA, 122 bp, Homo sapiens
tggctctgctttgtgactctggaaaaatagctgcaattttggctgtggttgaaaggggtacgcccacagatgggttgaaatggcacttcacactctggagatgcactggcacagccttaggc

SEQ ID NO: 212446 - DNA, 122 bp, Homo sapiens
tagtaggaccagagcacgacgaggacaataacgagcactggcacccaggacagtacccggcggcagcaccgcagccccccagacagagccatcttccagcctcgccgcatctttggctcgaa

SEQ ID NO: 212447 - DNA, 122 bp, Homo sapiens
tgatccttacaagaaatatcctggtgcgaaaaacgaccaaaaccacatagccagcctccacgctgttcagagaaagctggcttagcaatgttgtatggtttttggatgcgctgcgttactca

SEQ ID NO: 212448 - DNA, 122 bp, Homo sapiens
agatcctttgagaaatctcgtctcgaccaagagctgaagctgatcgaagagtatgggctccggaataaacgtgaggtctggagggtcaaatttaccctggccaagatccgcaaggccgcccg

SEQ ID NO: 212449 - DNA, 122 bp, Homo sapiens
agggaaggtaaaccctccccgcccccactgaaatagggccaggagctgcagaccctctcacggcatttatcgcttcaagttaaagaatgtggtgagggctctactgcactttatgttgcagg

SEQ ID NO: 212450 - DNA, 122 bp, Homo sapiens
tattcatctgctgacgctggctttagggaaatttgaggggagactcgctgggcaaagacccgaggcctctggaggtttggctccccacacgcaggtcccgtccgcctcgctgattatctttt

SEQ ID NO: 212451 - DNA, 122 bp, Homo sapiens
actgcctctgccgaaaatatacgtctacgggagagccaggaatctctctccaagggtgaccgggttgggggttttgttgttcttcagcccagaagagaaagagaaaatggtgtcattttttc

SEQ ID NO: 212452 - DNA, 122 bp, Homo sapiens
tgatggggatgcaggcgtggtcctcctccaggtccttcaggcagatctccaggtgcagctcgccggcgcccgcgatgatatgctctcccgactcctcgatgatgcactgaaagggatgcggg

SEQ ID NO: 212453 - DNA, 122 bp, Homo sapiens
gggcgaaggtctgcggacacgtgtgaacacagcctgtgaaccgagccacatctgtattcacgtgacccccggggccccagcactgacccaggaaaactcggcatttggatctgagctgattc

SEQ ID NO: 212454 - DNA, 122 bp, Homo sapiens
tgagaaggctgactttgggggtgaggtggagatagggagacagcctctcccctcctctggcggtgctgtgctgcactggcactgaagtagttgttgctaaaagttctgacatgggagtgaca

SEQ ID NO: 212455 - DNA, 122 bp, Homo sapiens
ggtgaaaacccatgcatgacttctgactccccgacacttgattaatagcctcctgctggtcgggagcactgccgataacatcaacagttgataaacacatattttatatattgtattatgta

SEQ ID NO: 212456 - DNA, 122 bp, Homo sapiens
ccagtgacaatgggacaggcaatggggtggggggcaccctaagccggatacttggagaagcgtctgactgcctgagcatggccctcctgttaccacctctgctgcaactggctcagagcaac

SEQ ID NO: 212457 - DNA, 122 bp, Homo sapiens
aagtgaaactgcagacctttgcggtgagcgctaccgctcataaaggcagcacagacccaacgaattagcagcagcaagatttattgcaacgagctaaaaaacgaaacttccgcagaatagaa

SEQ ID NO: 212458 - DNA, 122 bp, Homo sapiens
tatcccagcttgtcagaggtaagtgcctgttttgatggaaggagagtggggaatgcattacgggggaaatgtagcaaaaggcaagcagctctgagttctgcatcctactttcaatgatatct

SEQ ID NO: 212459 - DNA, 122 bp, Homo sapiens
ggtgctgagcccctggtgcactgaagattgggcacttcctggcaccctggtgtgctgcaccgagctgtgatgagcacatccgggtcctgctggatgcatgcgccgggaaggacgtgccctga

SEQ ID NO: 212460 - DNA, 122 bp, Homo sapiens
cccagccagacttggagactggattgtcattccaggtaaaatacgtgccttttttggtgccgcccagagctatccgtggtccttaatataaggcaagggtccttgcttccctgcagcaggcc

SEQ ID NO: 212461 - DNA, 122 bp, Homo sapiens
attttcagtagagacagggtttcatacaacctcattttacacctttaagtctatgagccccgagtccatgagccccgagtccatgagccccgagtctatgagccccgagtccatgagccccg

SEQ ID NO: 212462 - DNA, 122 bp, Homo sapiens
atctcgcagtggagcgagtacccttctctttccagctattggtctgtccagcagcctctccgccgtcctctctggctggtcgttctcctgccgagtccgcctggtcccgggacttttatagg

SEQ ID NO: 212463 - DNA, 122 bp, Homo sapiens
ttgaaaagcccaattatcttctgtcacttatatcactctagttggaaacagctttaacatcgggagtgaccacatattacctatcctgctcagagtcaccactgcatttactttctagtaga

SEQ ID NO: 212464 - DNA, 122 bp, Homo sapiens
actgccatcacaaatgccattaaactgtggtccctgctcccaaaaagttcacagtctagtcgtggaaagacacattaacaagctcttaaggcactaagttagaaaccaaacagacagtaaga

SEQ ID NO: 212465 - DNA, 122 bp, Homo sapiens
aattcccagccaatgttttgctccttggaggcacacgtcttgccgtcccgagtcagcgaacgagcacacctgtgacccaccgcacgggcgacgaaaaccggagaccgggaaaatggcttccc

SEQ ID NO: 212466 - DNA, 122 bp, Homo sapiens
cggcgggaggactggggaacttgtgtgctttgtttttgttgatgggaatggggaggagaccggctgagactgccagacacagagacagaaaaggggtgtggagaaagaaagaggaggtaaga

SEQ ID NO: 212467 - DNA, 122 bp, Homo sapiens
ggactttccacattgacgctcccggcggctccggcagccagactgggcatgttccgccgccgggtcaggcattgctgtgccaagagaggagctttagcaactctcagtctctctgctcctct

SEQ ID NO: 212468 - DNA, 122 bp, Homo sapiens
cagctagagtgcagtcccatgggggaccacgctgctgtgtgctccacccgccttccctcccgaaaccctgcgtctcggccagagtccaagcacacccgtgctgagaggcgaggcgggagtta

SEQ ID NO: 212469 - DNA, 122 bp, Homo sapiens
tgtctaaaccattacttgtgcacctgcatactgtaaagggaaactctgaaatctttgctgcgtttcactgtgaggctcagaccacaaaacatgaggaatgtaaccagagtccagctgcagtg

SEQ ID NO: 212470 - DNA, 122 bp, Homo sapiens
acgttcccgagccgccacggcctgctgctgccggcctcccctgtccgcatgcacagcagccgcttgcaccagatcaaacaagaagagggcatggacttgatcaaccgagagacggtccacga

SEQ ID NO: 212471 - DNA, 122 bp, Homo sapiens
ctggctggagcgaggcgggaggcggacggcccgtatgcaaatatcctgcggggccggggccgcctccagagcccgggataaaaggcggggcggggcgcggggcagcgaagccgctgcctccc

SEQ ID NO: 212472 - DNA, 122 bp, Homo sapiens
ccgtccgtcgctcggctgcaggtggggcccggccgccccagatgagccccgctccgcgcccgccctgcttgcacccagccggcaagtccaccgctcgctcgcgacgccaaggaaagcagcag

SEQ ID NO: 212473 - DNA, 122 bp, Homo sapiens
ctgagaaatggctgtgtcaaccctgttgtttcaaaacaatgttcccactgtgttgacagtcgacaaactgtttgaacaagtcaagctgtcagtacaagctccaattctttagaaattagaat

SEQ ID NO: 212474 - DNA, 122 bp, Homo sapiens
tactaatctatccaagcacttttcactttcagcatgagctacatttgttttgttttccttcgcttcctttctgcctcacaaagccctatcttttccttttagacagaggatatggtttggaa

SEQ ID NO: 212475 - DNA, 122 bp, Homo sapiens
ctccactccttggcacaactgacctctccactcttcgacaaactggcaagcgcttgccgccgttcgccaaaccttggtacgacagtcaatccagaaatgagcttctggaacaaatcctaaat

SEQ ID NO: 212476 - DNA, 122 bp, Homo sapiens
taaaagcaaaataacatttaagaggagaaaactttgacagaagacagtagttttgaactgcgcgcttgatgttaagtcatgataggatcgcccccttgccgtggcaattaagagaatcaatc

SEQ ID NO: 212477 - DNA, 122 bp, Homo sapiens
ctacacgtcccgcgtgttccgtgggggacccccgcccagggtggggaccgcttctcatggcgcagacagaggggctggagcaggcaggtccaatcaaaagctttcccaagatctggggcacg

SEQ ID NO: 212478 - DNA, 122 bp, Homo sapiens
taggagagggccaggtgggtgccgaataatctggagtctgtgctggggaggcgtggtgcgcggcacttactggagagcctcatggtgacgtgtagggggttggctagacaagtcgagttcat

SEQ ID NO: 212479 - DNA, 122 bp, Homo sapiens
cacctctccatttgatggcattcatgatgtacagattcaaatatgttgttgacattcccccgggccttccaagcaggaatgtttgctttggaggtattggatagacgtggtaaaatcaaggg

SEQ ID NO: 212480 - DNA, 122 bp, Homo sapiens
gggaggaggtggagcggctggtgaaggaggtccccgaggagtattccgagcgcttttccccgcaggcccgctcactttgctcacaggtacggcagctcacagaagcctggccagccagggct

SEQ ID NO: 212481 - DNA, 122 bp, Homo sapiens
tgacctcgtgatccgcctgccgcggcctcccaaagtgctgggattacaggcatgaaccaccgtgcctggcagagcttgtagttttctgatttatgtgtgtgtgtgttttttaacttggaaaa

SEQ ID NO: 212482 - DNA, 122 bp, Homo sapiens
acagattcttgctgttactggccgagatcccgcccgctgccctctggattccgaggcctccgaggcccccccattggaaactgcgcccaccgggctgggtagccaaaacctcagtattcgtt

SEQ ID NO: 212483 - DNA, 122 bp, Homo sapiens
ccccatacactagttttctagttactcctgtaggtggcggagcgggcaggaaggcgctttcgcaattgaaccgtctgcatgcccgagggttgggtggtttcggcctcctcttctgttccccc

SEQ ID NO: 212484 - DNA, 122 bp, Homo sapiens
agctgaaactctgtaaaaacagtaagctttgtggtatattaacttaccctcatcccatctcgtgctcccagcttggttctgttcattgctgctgaaatacagataggattggccagaactgg

SEQ ID NO: 212485 - DNA, 122 bp, Homo sapiens
cctatcaaaatacccatgaaacacaaacctccctataattagtcatcagaaataataaatcgtcaccatgccagcctttatattctctgagagaactgacctgaaatattcactgtccctcc

SEQ ID NO: 212486 - DNA, 122 bp, Homo sapiens
tgggggtgggttagaaaaaggggctgtaaatttgggggcgagttccaaccaatgaggagacggggaagaaccgaggcatcttggggtgcagtgttatccagtgccttcctaatcccagggtt

SEQ ID NO: 212487 - DNA, 122 bp, Homo sapiens
gctgagcaaaaagaaagcaaggggcacacatgggagagagaactacctctcagtatgaaccgtgcagaactttgatcataactttaaataaaaccagatttcaccaggtgtgacaagctctg

SEQ ID NO: 212488 - DNA, 122 bp, Homo sapiens
tagcgccttgcatctgctacagcagcttcacctgctcaatcagggccacaactatcttggcgacagcagcagcaatgccaccagccagatggtccttggcaaaggagatcgcctgttgtgtc

SEQ ID NO: 212489 - DNA, 122 bp, Homo sapiens
gggcggaccagagggcggctccacctatccgagagctcgggaggcgggccagaagggacccgtcactcccgggttagagtgagaccactccgccctcgccgcccgcctcccccactcgcccc

SEQ ID NO: 212490 - DNA, 122 bp, Homo sapiens
gctgctgcagctggaaggggatcgtggccctgagcggctgcagcccagcccggggggagccggcgggggctgggggagagcagccccgccggagccccccggcccctccgcgccccggcccc

SEQ ID NO: 212491 - DNA, 122 bp, Homo sapiens
tccagatccttgtccgggtgcttctgcttgaggtccttgaggatctggatgacctcgcggcggctggcgtccagctcgcgcgcctcggcggggcccgggcccaggccgcccagctcacctgg

SEQ ID NO: 212492 - DNA, 122 bp, Homo sapiens
gggtcttcaggctcaggttgaagatgctgttgggccctttgcctgtacagggatggcgcccgacccaggaaaagcctaacgttgtctgtcatttggatgcgtctcttggcagtgactggggg

SEQ ID NO: 212493 - DNA, 122 bp, Homo sapiens
ttcaaatcctgtataatcacacacaaaacaggggtcttaaatgggctagtgctggggctgcggggcggggcaggatttgagcctgaggagagtggtaggaaataagcttacgttgaaatggt

SEQ ID NO: 212494 - DNA, 122 bp, Homo sapiens
tactgagaggaggaaaagcctcccgtgcttggaggactggcgttgctcctggagtcgggacggcccagtgctaagcaccaagctcaccttgtcccaggagagggcagaccagtggaaatgca

SEQ ID NO: 212495 - DNA, 122 bp, Homo sapiens
ctcctccatatctgaggtcccagcccgcaacaccagttcccgggccgcagccgccatggtcgcagcggcggccattccccgcagcctcacttccggcaactgtcagtcccggcgagtccgtt

SEQ ID NO: 212496 - DNA, 122 bp, Homo sapiens
gaataacacccagtgcctgtctttgaggtgctgtagttcggtaggagtaagaaatgcaaacgaccgcagagcaggttgaattcctccaaggtccaacatgggtgcagagagtctttgtgtgc

SEQ ID NO: 212497 - DNA, 122 bp, Homo sapiens
gcgggctgacctgcgtggcggccgagatgcgggctatctgggcccgcaggtagttggcctcgttgcccgggaagggtgggtagctgacgactggcgtgtccaggtagcctgtgaagaacttc

SEQ ID NO: 212498 - DNA, 122 bp, Homo sapiens
tcaccgcatccgtgtaggtgtcctcggccggcttccagtcgcccccggggtagcggctctcgttctgatagacttcatcagtgaactccgtgtgacctgcatctgcctcagtcagcaagctg

SEQ ID NO: 212499 - DNA, 122 bp, Homo sapiens
aaccgacctctgctgtcctgaagagcgcacactggccaggtttccagtctgcgccaggcacggtgctcagagccttctgtgcatcgtctgggtcaaccctccccacagccctgagggtcatc

SEQ ID NO: 212500 - DNA, 122 bp, Homo sapiens
ggctgcccatccatcctcacagcatggcgactggagggtcttgccctgaggtcccgtgtgcggagcagggcttggcattcactcctaggcactgctgactcagtctgtcctggtggtgctgg

SEQ ID NO: 212501 - DNA, 122 bp, Homo sapiens
agtgggcttccggctccacgtaacgatgcgattgggctgtacctctgtctgtctcctgcgcgatgtcccgccccgggaggtgtcacggaactcagctgatataagcccgggatcccgccggg

SEQ ID NO: 212502 - DNA, 122 bp, Homo sapiens
ggctggagagcgggtctgggcggcgccttggcgggaggagggactgccggacccacgcggcggcccgccccctgcctagccgcaaggctgtccccgcagccgccaattctgacccggagcgg

SEQ ID NO: 212503 - DNA, 122 bp, Homo sapiens
gacagaggcggctggtggcgggatgcaggcggctggtggcgggatgcaggggtggcggcccggatctcttcccggctccaggcactgctgtgctggtggcggcagcggctcctcgtgctttc

SEQ ID NO: 212504 - DNA, 122 bp, Homo sapiens
agcggctaggaaaaaaactgagtcgttgattagtttctgcagcccctggagccgagaggccgcctcctccagccgctcgaccgactccgcgcgctccagaagctcttccacggccgctcgct

SEQ ID NO: 212505 - DNA, 122 bp, Homo sapiens
gtgaggggcttagcaccgggcaagcagttgcggagggtacgccgggtcccccagcactgccggcccgccccactgcgcttgaattctcactgggcctcagccgcctccccgcggggcagagc

SEQ ID NO: 212506 - DNA, 122 bp, Homo sapiens
gagaggctacctttcctgacagcttcatggagttttcattttttgtgtgtcccctccccacgccgtacacacacatattcccattacacttctgttgatcagttagatcagttagtggctgc

SEQ ID NO: 212507 - DNA, 122 bp, Homo sapiens
gagggacacgccacgcgcgggtctttgctaaaccaatcctttggctgagagcgggaagtccgtcctaacgcgctggccggacatcagcagcagcaacgtgtgcatgagctcagctcggaaac

SEQ ID NO: 212508 - DNA, 122 bp, Homo sapiens
gccgggggtggggccgggccaatctgggcccgcaggtggcagcgggtggggcctggggaccgcagccagggctctcgaagcgtctaccctgcttcacgtgcctaagtctggggtcttttctc

SEQ ID NO: 212509 - DNA, 122 bp, Homo sapiens
ggcccgtggagtctgaggccgagaggagtggctgggaccggccgccgtggtgtgggtaagcgggagtgggatgtaacgcgcctgcgcagggttctcgccccgccaccgttaccgtggttacc

SEQ ID NO: 212510 - DNA, 122 bp, Homo sapiens
cttgtgtggttgcttttctccaaggacaatctgtattctagaaggtaaaatgtgtccatccgtgtgtgatgctggctacagccactccaaaacctccctgaagactctccctctggggagaa

SEQ ID NO: 212511 - DNA, 122 bp, Homo sapiens
gcccgggcgcaaaatgtggcgcgcttaccgagttcacaccctctcgtttccaggcttcctcgtcaacatttattggtgccaacgatgtgccctgcgctgggcactggctagacagtggtgat

SEQ ID NO: 212512 - DNA, 122 bp, Homo sapiens
ccctattactacagatataacccattcccaatccaatccatgttatataccttaaagtcacgattctttgatacagaagctcctttccttgcattctcttctcacaataaaaaaagaattag

SEQ ID NO: 212513 - DNA, 122 bp, Homo sapiens
acagtgcacaaactaggtgctttatacagttggtgcatttcagtgttgagagactaagcccggaatgggaaactatccctaacatttactttcctgttgtgggaaaaccagagagaacccct

SEQ ID NO: 212514 - DNA, 122 bp, Homo sapiens
gagcctccggatctttccagacttctttgcaatactgcctcatgcactgaatccatttctcgcatagcctggcgcttggcaggcaggctggcgttccctggctctgccttccccatctccct

SEQ ID NO: 212515 - DNA, 122 bp, Homo sapiens
gagcttgggatcggtcttcactgttccgcgtcctctacctgggaaccaccgacccccgcccggcgactttgtcacagactctgttgccctgtgatctgcaggtcctgggagacgcacagcca

SEQ ID NO: 212516 - DNA, 122 bp, Homo sapiens
gctgtttgttcagatgaggacactaaggcccagacaggtggggtaatgtggccccaggcacgcagctagtgggaggtgtggctggccagcccaaactcactgccagccagctcccccgaagc

SEQ ID NO: 212517 - DNA, 122 bp, Homo sapiens
ataattgcaaatgtcattttcaatgattcattcaaaaaaaagaaaagaaaaaaaatgagacggggaaagacagaaatagagaaacacaaaatgatattgtttggccatgtccccactgaaat

SEQ ID NO: 212518 - DNA, 122 bp, Homo sapiens
tgcaggcagctggccaagaaatgatcctgggcttcaggtcaggagtcaggccctcgagtccgcttcctgcctgcttctctctacacgtgactcaccgcggacatcgaccaagtcatcgcgct

SEQ ID NO: 212519 - DNA, 122 bp, Homo sapiens
gaggaaggaggctgccagcttcctgggtgcacaaggccgtggccagcttccgggctcagtcgtggacaaaggcctcctgggacagagaagtggcctctaagcaaaggcggtggtgtgacgct

SEQ ID NO: 212520 - DNA, 122 bp, Homo sapiens
gcgcctccctcctcccagcgctgccgggaactggcagcctttcggctcccgcagccgcagcggacgccctcccagatccaactttgccgcttccccgagctcgcgctgtagccgcggggggc

SEQ ID NO: 212521 - DNA, 122 bp, Homo sapiens
gtttcaagcagcttttgtagcctggctttgtctcagagcatgcctttgtggttttgataacggttgagtctatagctggtggtctcagccacatcgcagaggcaaaggccagggctcacaag

SEQ ID NO: 212522 - DNA, 122 bp, Homo sapiens
gatccggcagggtgtccactgtgctcctgatccagtgaggtgcccactgccactctggatcgggctaaaggcttgccattggtcctgcacggctaagtgcccgggttcgtcctaatcgagct

SEQ ID NO: 212523 - DNA, 122 bp, Homo sapiens
ctcacctcaaagagaagccctttgactgcagtcagtgtggaaatgcattccggaccctctcggccctgaaaatccacatgcgagttcacactggcgagaggccttacaagtgtgatcagtgc

SEQ ID NO: 212524 - DNA, 122 bp, Homo sapiens
gaagccctgttgccagcgttctcacactgcagtgggtgaaggcagtgagctcaaagcccacgtgtgatattttaggtgttcgtgttcagagcaagacagcatcaatttctaaagccgttatt

SEQ ID NO: 212525 - DNA, 122 bp, Homo sapiens
ctctgtctcccaggctggagtgtagtggcccgatctcggctcactgcaagctccgcctcccgggttcccgccattctcctgcctgagcctcccgagtaactgggactacaggctcccgccaa

SEQ ID NO: 212526 - DNA, 122 bp, Homo sapiens
aaaaagttctggcaggaaacttagagggatgttgtttctctagaacatctcttggatacacgtaagagcttatcatagggtggaagactgatggttctacctcttgggtgatgcaagattaa

SEQ ID NO: 212527 - DNA, 122 bp, Homo sapiens
aggattctacatataagtgagaccatatggtatttgtctttctgtgtctgccttacttcacgtaacattatctcctccagcttcatccatattgtcacagatggcaaggttttattctttct

SEQ ID NO: 212528 - DNA, 122 bp, Homo sapiens
gagcatgagacggatgaggaaccagcaccagcgaaggggagggccccagagagcacgagacggatgaggaaccagcaccagtaaaggccctggagagcatgggctgcacagcaggaggaaac

SEQ ID NO: 212529 - DNA, 122 bp, Homo sapiens
gggctcgaagtttgcctatgggtcttatcaaaggaccgccatcccctccctgactaggggcgctgtctttttgaagggaggctccctgtgtatgccagtaccattgtcattggatttcctct

SEQ ID NO: 212530 - DNA, 122 bp, Homo sapiens
caacctctctgttcctcatcacagctgttcagtctcgcttgaagacagattacggaaggacgaggccaaatccagattttgtggtgtgaaaatttaccctggtgtgttatcactaccagggg

SEQ ID NO: 212531 - DNA, 122 bp, Homo sapiens
ctgctcactcaagaaatggagggagagaatggaagaaaactgctgaccaggacgtcgcaacgccaagagagccattagcagcaccttcagccctctgtggcgagtgcgcaagacacgccccc

SEQ ID NO: 212532 - DNA, 122 bp, Homo sapiens
caaacattttgaaaatcggaaatcaggcctttgcttggcccagttttaaagtacttctcccgtttctcaggattctttaaacataccagaaatgaaaaccacagagatgtaattatttagaa

SEQ ID NO: 212533 - DNA, 122 bp, Homo sapiens
tgagccccaggccccattctaggatctgggtccttcctgtcctcaagcagtgcacattcccggaaccgtgttttgtttctttaactggctttgctgtgcagcatctttgtgcttttgcccag

SEQ ID NO: 212534 - DNA, 122 bp, Homo sapiens
ctacacacggccaagctcgcagcttgaatttttcatgggaccacactcaacacaggcacccggtttccatcgaggatttcatttctcccccctctctttccatcatcctcgtgctgctcctt

SEQ ID NO: 212535 - DNA, 122 bp, Homo sapiens
gctggggaaaaggcaactgctttgaatgggacgtgagatggaaaaaaaaaaaaaaaaaagcgaaacagaagatctgagtggcttaaattggacttcaatctttttactactagaacatgcta

SEQ ID NO: 212536 - DNA, 122 bp, Homo sapiens
ataacgcctgccctatctttgcctctccgagggcagcagtgcagcccgtggggcggagcccgggcccaaattggagcctccgcgttgcgctttcaggataaacacagctgttttgaccacac

SEQ ID NO: 212537 - DNA, 122 bp, Homo sapiens
cgagtccccttcccattgcatggatgaaaaaggggctggtctgtacctgagtcttcgcaccgcagggtctggtttccggtgagtgacatccagaagacttggaaatatcaagtgccagtcgc

SEQ ID NO: 212538 - DNA, 122 bp, Homo sapiens
gggtggggccccaagtgtcaagaaggtggagactccagtttgtgaggaacacgatggacccgtctccattcctgaaggctggaggacaccgcctgacccaaacacagctatgtctgcctcac

SEQ ID NO: 212539 - DNA, 122 bp, Homo sapiens
agagggtaatcccgggagcagcccggaggtgagtgccgtgaaggcgtcggtgtgctggagcgtgaggaggagctaggagcagcccagacgcagcgggtgggctggggtggcctccagcagtg

SEQ ID NO: 212540 - DNA, 122 bp, Homo sapiens
ttctcctatcttggcacaaatttactgagcaatctagggcaagggtaagaaattggtttccgtgtatatatagtaagttggtgggaacagatgttctctaagatgcctctgagttccaatag

SEQ ID NO: 212541 - DNA, 122 bp, Homo sapiens
gtagagatccaacagcgctagcggttgaaacggtttttaaaatagagaaagcgagaggaccgacggcggctccagtgactgctgagtttccagacaagggagctttgtgcaatgaggggcgc

SEQ ID NO: 212542 - DNA, 122 bp, Homo sapiens
tcttaaacagcccctcagtcgactgtgattaagcatacactccagcctcagcaagcttggcgtctgcccctgccgctgggagaccctcctccaggcacctgccctgggccccgccccgcccg

SEQ ID NO: 212543 - DNA, 122 bp, Homo sapiens
cgccattctctttttgagttcgcggccggctagggcgaaactacagttcccaggaggactcgcgcgaagcggcttggaagtgggcagcctggaagtcactcgggccaccggagctggcggcg

SEQ ID NO: 212544 - DNA, 122 bp, Homo sapiens
gggctggccgcgggggcggggccagggtctcacacccatctagaggatgtctgtctgcgacgtggggtcggacgggcgcctactccgcgggtatcaccagcttgcttacgatggcaaggatt

SEQ ID NO: 212545 - DNA, 122 bp, Homo sapiens
gttcaccaactccctaagcaacaccctcctcctgagtggggaggggtagccgagcctttgcgacctgagtcacccgcttcctgctcctggtctgggcgactccatgcacaggctgacacagc

SEQ ID NO: 212546 - DNA, 122 bp, Homo sapiens
tgactccttggttgttggtaggtggggcccaggctaaccccaccctgggcctatgtggtccgtggttttgagggtgggcagcagtgccaatccctgctctgagtaggcctgtgtctttctga

SEQ ID NO: 212547 - DNA, 122 bp, Homo sapiens
cccactcaccgtccgcagtcctaccaagcctcacgtggggctcacacccacaatcctccgcgtgacgctccgccgtaatggcaagcgaactaggccaaactacttgcacgttccctcgagaa

SEQ ID NO: 212548 - DNA, 122 bp, Homo sapiens
ctgtagctgccacggcggggacggggcttggtccccaaagtcacgcagctaccaagtggccgagcttgtggctgctccaagacccgagttcttcctgagtgccagggtagcatggcatggca

SEQ ID NO: 212549 - DNA, 122 bp, Homo sapiens
gtgcctatggcttagccctgctttacaaggagcagtacctctgctgctgctgtgcatggtcgctttaataaaagttgctgtctaacaccaccactcacgcttgaattctttcctgggtgaag

SEQ ID NO: 212550 - DNA, 122 bp, Homo sapiens
cacattggtgaccatgtaaggcacttgctggtcataaaatccatccatgctgctgctcttcgcaaatctcagctcagtattttatattttgagcatttagctggagatttcctcaggatctg

SEQ ID NO: 212551 - DNA, 122 bp, Homo sapiens
gtaatggtggaatacttgaagtgtgaggtgaagaatagctagagatgctgctgacctggccgcaataagcttagaaatatatgttgggaacaataccaatggatagcaatatcccttgaaac

SEQ ID NO: 212552 - DNA, 122 bp, Homo sapiens
aatttatctcaaggaacttccaaacctaagaccaccatcccaatcacctgaagctatctgcggaggctacaccctttcccccgggccagcttccacatctgcccagtggggcatttcccctt

SEQ ID NO: 212553 - DNA, 122 bp, Homo sapiens
ccgagccgggctctgcagaatcggactgggctccctgtggggagaccacattctgtctgacgccagcagaagaagtgcctgtccccaagatttcaggggacacctcagacccgagtcatgca

SEQ ID NO: 212554 - DNA, 122 bp, Homo sapiens
ttacttttatgtgtcttttataaactatttatcataccttctagaataacagcacctggccgggtgcagtggctcaggcctgtaatcgcagcactttgggaggctgaggtgggcggatcacc

SEQ ID NO: 212555 - DNA, 122 bp, Homo sapiens
tgatagtgagctctcaggagatctcatggtttaaaaatctgtgatagttcctcctttgatcgctctctctcctgctgcaagcaagacgtgccttgcttcgcctttgccttcctctatgattg

SEQ ID NO: 212556 - DNA, 122 bp, Homo sapiens
ccggaacgggactcgtgggtcgccgccgcctctgtctcttccaaaggggcctcctcacttcggagatgcagtgacaagttaatatgggcgtccaagcctctgtttcccaggaggaaatttgc

SEQ ID NO: 212557 - DNA, 122 bp, Homo sapiens
ggtcctcggggccccgcgctgctgtctctgtctcggcttctctcggcccctgggtctcttcgtctctgccgttctcaggctcagctccgtctcgctcggtccctcgcttccccgccgggctc

SEQ ID NO: 212558 - DNA, 122 bp, Homo sapiens
tgaactcctgagtgcaaatgatcctcccacctagacctcccaaagtgctggaagtacaggcgtgagtcacctcacctgactccataatattttaaaagaatggtgagaattaaacactatac

SEQ ID NO: 212559 - DNA, 122 bp, Homo sapiens
aaatcaacctcagcaaccggatagtttgttggaggcgggaaggtacgccgtgggttccgccgcagccagcgctggggctaggcacacgcccgttgccatggagacggggcggggcaggcctc

SEQ ID NO: 212560 - DNA, 122 bp, Homo sapiens
caccttccccttggtgatggtcaccaagtggtctaacttgttggctttgacaatcttcaccgcataatcagagctactggaacactcgatgccgatgaccttgcgggcccggccttggcggc

SEQ ID NO: 212561 - DNA, 122 bp, Homo sapiens
ttcacatgacacctccagcacttctaaagggccaaccccagaatcgctcactccccagcacgtctgggctgtgcgcggcaccccaggtaaatgcagcggcctctgcattagcccgcgctgct

SEQ ID NO: 212562 - DNA, 122 bp, Homo sapiens
gcctcacccaggccccactactcattccaggacacagggtcaatccagcctgtggattggcgaccaccgggacatctcactgaaaccctgtagcctggcctaggcccgcctgcccaaaccgg

SEQ ID NO: 212563 - DNA, 122 bp, Homo sapiens
cccacgttcagtcggtcggtcggggtctgtgcccacagagacatgaggctgagctggttccgggtcctgacagtactgtccatctgcctgagcgccgtggccacggccacgggggccgaggg

SEQ ID NO: 212564 - DNA, 122 bp, Homo sapiens
cttccactcggaatgctccaagcagggcactcccggggctttgtttctatcactaggacgcgtccccacgcccaggctgtccctgagtccctgccacaggcgcagatgttggcgggcgccct

SEQ ID NO: 212565 - DNA, 122 bp, Homo sapiens
cggtggcggggctggtagcccggcagccgcaggtggggccacgagcgctggctgagggaccgagccggagagccccggagcccccgtaacccgcgcggggagcgcccaggatgccgcgcggg

SEQ ID NO: 212566 - DNA, 122 bp, Homo sapiens
aaagctttccttggagtactttcacaatcacctgagaccctcactcagaaagcatgaaaacggaagaggctttcctgctgttccctgtgggtgtgtcatgagattccctctggaagttggca

SEQ ID NO: 212567 - DNA, 122 bp, Homo sapiens
tatccacccctgctctcctgttggctagacaagactgctactgcaagtgtccagcagtgtcgcaggagccaccaattagaggcttaaggctaccaggctttgggaacaccagcctggacaaa

SEQ ID NO: 212568 - DNA, 122 bp, Homo sapiens
taaaatagtctctaccaaaaatgttaaaaaaaaaaaaagtcaactgggtgtggtggtgcacgcctgcagtcccggctacacaaagaaagctgaggcaagaggatcattggagttggaggctg

SEQ ID NO: 212569 - DNA, 122 bp, Homo sapiens
tggggcggagccggagctgggggcggagccaagacgcggcaggggcggagccagcagctgcggcacagcggggcctgtgcggcccaagtcgtccctgtggcctccggccccgcctcttaggg

SEQ ID NO: 212570 - DNA, 122 bp, Homo sapiens
agcccgcggacggcggtgtgtcagtgtgcaccgggaggcctgggcctcagtccctgggctcgtgcctacgcaacagcaggaccgcccgcggcctcccaggaccagtgaccgtcacccgcagt

SEQ ID NO: 212571 - DNA, 122 bp, Homo sapiens
gtgcagcgggtcccttagtcccgtcgtgcgacccggagcagggcgcgcgggagccctcgtcgcccttggggatcccctcgggggactggcagcgaatgccccctttgcagaatcggggatgg

SEQ ID NO: 212572 - DNA, 122 bp, Homo sapiens
gctttgcatacattaactcatgtagtccccatattatacccattttacagatggggaaaccgaagcacaaagcggttacttggcttgcctaaggccataggaggactgtgttggagctgggg

SEQ ID NO: 212573 - DNA, 122 bp, Homo sapiens
gctgctactgctcggggtgcccccgcgaagcctggcgctgccgcccatccgctattcccacgccggcatctgccccaacgacatgaatcccaacctctgggtggacgcacagagcacctgca

SEQ ID NO: 212574 - DNA, 122 bp, Homo sapiens
gcaaatcttcaagagactagaaagtccaaagttaagtctgttttcaggagctgggcatgtcgccagaggcccagctggggctagcagaggtgcagacgagaccagaaatgctgctgcccatg

SEQ ID NO: 212575 - DNA, 122 bp, Homo sapiens
agttctcggccaggcttcctgcgatatcagtctgtttcttttttctttttctttttgagacggagtcttgttctgtcgcccacgctggagtgcaatggcgcgatctcggctcactgctcccg

SEQ ID NO: 212576 - DNA, 122 bp, Homo sapiens
ctcctccccgtcatggccaaggtcgtggtcctcagcccgggcaccctccaggagggtacgcggggcccctcccaagaggctgttgggggtctgccttcccaggtccttccctgagggcccat

SEQ ID NO: 212577 - DNA, 122 bp, Homo sapiens
aaaatgatgccacttacgataattctgcgaagctaccgcttatgccagctacctgtggagcgcaacatcggcttcctgaggcagtctcagcctgctccattttatttcacttagatggtatc

SEQ ID NO: 212578 - DNA, 122 bp, Homo sapiens
gtgtccatccactggaaggttctgcttggaatcaactgagtcacaaacaaaatccagaaacgcgttctggggtcgtgcttttatccgttggaggtcaacacgtgtggaaaatcagcctggga

SEQ ID NO: 212579 - DNA, 122 bp, Homo sapiens
gccagggtgggggggggcatattttaattgctatgtatacccatttcaaatatatacttgcggattgaagaattgaatattaggtggatccatggactttgtaggttcattgtgagctagga

SEQ ID NO: 212580 - DNA, 122 bp, Homo sapiens
gagggccggcgctcggggccgcgtttcattggctttccggccggaagctgcggcgcgacccggctgcgcatgcgcctctcacacgtgctgtcagaacgccgcctcctccgcttgcggccggt

SEQ ID NO: 212581 - DNA, 122 bp, Homo sapiens
acttgcgctggcgtgctagccgcgaccgccaatcagagcctcaaggctcccaagcaagctcgctctccccagaccggcgagagtcaccagccaccagttctggtttgggggtggggagcttc

SEQ ID NO: 212582 - DNA, 122 bp, Homo sapiens
tgcccacactggcctagtatcagtttcttgagtgcaccaagaggcttcctgatttagggccgtatccatgcatgctcttgtctctgtctagaccactatttgcccccatctttttttttttt

SEQ ID NO: 212583 - DNA, 122 bp, Homo sapiens
ggcatcattctgctctggagtagtgcttctgtgaatcccaggaactgtacaaaggctttccgttttaaaaaatatatcttctgttatacttcagttatttcattccactgatcattttcttg

SEQ ID NO: 212584 - DNA, 122 bp, Homo sapiens
cttcttggccacagtgcccgcgggcaccagggggaccacagagggcagcacaataggctccggctccggttccttctccatagggatgcccttgaggctcacactgtgtgacatgaggtaca

SEQ ID NO: 212585 - DNA, 122 bp, Homo sapiens
ccgccagactcgagagcggcccagggctacgctccctgcgccccagtaccggagctagcgcgcacgtctcctccgctgcccccacccctgcgcacccctaccaggcaggctcgctgcctttc

SEQ ID NO: 212586 - DNA, 122 bp, Homo sapiens
cccggaaccgggaagaggcggaagcacaccatgaccccgcagagcaggcggcgacggcggcgacggcggcggtacaacaacagctgcaacaccagggaaaaggctcgctggacctgggtcaa

SEQ ID NO: 212587 - DNA, 122 bp, Homo sapiens
gccatgttcctcaataaccatttccgggtgaagagtgagtttccggtgtccccttttctacgtcctccttttgccggcgaaagactggcaaggggggcgcaggcgcaaagaggtcgctacgc

SEQ ID NO: 212588 - DNA, 122 bp, Homo sapiens
gagaatataaccgcgcccttatggtgtttatttgtgtgggtcgccatctttgatgcgtatcgattccgtacagtggaggagtccgcctcctggagtgttgactagagtaaggcaaggatttt

SEQ ID NO: 212589 - DNA, 122 bp, Homo sapiens
gatggccttgtccatgttgtcctttctggcttccctgatggtgtcatgtttcagcgcatgcgccccagcctttcccatgtgccaaaccagaagctccactgcccgtaggctgtccctgtagc

SEQ ID NO: 212590 - DNA, 122 bp, Homo sapiens
tctgacctttttctggtccatgggcaccactaaagatatgtagccgccctactggctccacgttacacctcaaggattcactggattgctctgtctcctcctcttcttcaacatcccagtca

SEQ ID NO: 212591 - DNA, 122 bp, Homo sapiens
tccacaggcaccaggaacagaatgttcaggcctgagggcaggctggggcaggcagaagcccgaagctgggggtcagactcacaccagctgaacccagcactgtggtcgggtctaggcctcac

SEQ ID NO: 212592 - DNA, 122 bp, Homo sapiens
gtggtacacacctgtagtctcagctacgtgggaggcggcagcaggagaatctcttgaacccgtgagaaggagattgcagtgagctaaaatcacaccattgcactgcagcctgggcgactcca

SEQ ID NO: 212593 - DNA, 122 bp, Homo sapiens
gccaagagccaagtgtgggagctcaccatggtggcagccacctccccaccaagcaggcagcgttcaccagaggggagtatcaggttcctgtactcagctgtgggttgtcactgtctaataat

SEQ ID NO: 212594 - DNA, 122 bp, Homo sapiens
atccaccatgttccagggtcgaccagggagcacagagccctgaacatcccttcaacagcgcgccacacgctcctggcacaaactccagaccacggcacagcacccagatggctgcagccacg

SEQ ID NO: 212595 - DNA, 122 bp, Homo sapiens
tggacttcctcctcagccagagtactcttaaaatttaacctgaaagactggttcaggtctcgacaggaagtgggggtcagacagacctcattatacctctctggcattaacatcaacacaga

SEQ ID NO: 212596 - DNA, 122 bp, Homo sapiens
gcgccatcatgctgagccggctcggggcgctgctgcaggaagccgtgggggcggtgaggccggcagggccgggccgggccgccgggagtcgcgggcctaggccgggctgggcgggcgcggag

SEQ ID NO: 212597 - DNA, 122 bp, Homo sapiens
gggaagtatgttttggagtgaattattttggttgccttcacactcatctctatctcaaaacgtatttattcctcttattatctttcctctctctcttccagtaaaattcaagctgcatttgt

SEQ ID NO: 212598 - DNA, 122 bp, Homo sapiens
gagcgtttgggagtggccccacccaaaggttgggcgacggagggggatggggaaatccgccgcctagaattgactggtttggactaaatgttgcaagcggggaaccttgagctacctacgcc

SEQ ID NO: 212599 - DNA, 122 bp, Homo sapiens
ccccggggaagggagagggcgtgttaccacggcaatgcctggagggccgaggggcgcactcgctgaggggcttcgaaggggccgggggagggagggggcgcccgcagggaggggctgacaca

SEQ ID NO: 212600 - DNA, 122 bp, Homo sapiens
ggcagggttcgccaccccgtgcccaacctccgtggaacgcggacagccacttcggactcacgtctcaatgtttctttattgtgctaacactgctgcctcagagctcagacctcacacacaga

SEQ ID NO: 212601 - DNA, 122 bp, Homo sapiens
tggccaggccgactccagctgttccggatgcggggcgggggcccggcgggagccaggccgcggctggggctttgctctcaggaactcgcagggaggccaggcttccagttaggctggggcta

SEQ ID NO: 212602 - DNA, 122 bp, Homo sapiens
tcctgcgcctggatgcggacgcagctcagagagtggtgtacctggagggctgcggcccgccgctccggcggtggctgcgcgcgaacctggctgcctcgggcggctacgcaatcgcggtggtg

SEQ ID NO: 212603 - DNA, 122 bp, Homo sapiens
aggcactgtttcagacatggtgactaacacagcacaccaaataaagtggtataaacctgacgaagcaggatgcgaaaaaaaggccccaacgcagcctatttatagggtgggactgcgccgtg

SEQ ID NO: 212604 - DNA, 122 bp, Homo sapiens
ctagggagtctctgtaaaccgagtctgtgatgctccaaaaagcttaggctgggctgggagcgaaggagttgggggagagggagcatttctctactgtcggggcccctcctccccctagcaag

SEQ ID NO: 212605 - DNA, 122 bp, Homo sapiens
gcgtccgccgggagcaggtcagggaagggacgcgaggcggcgctgtcaccgcattctgagcgccgcagctccctgggccccttgtatcatttcagtgaaggtcactccagtctttcatggag

SEQ ID NO: 212606 - DNA, 122 bp, Homo sapiens
ccggctccacatcccacagacgccctttctgataaaggagccgggcgggcaccgcgactgcgcccactggaggccctgaagtagcaaggctcctggagcgcgtcctgcgctggagtcctgga

SEQ ID NO: 212607 - DNA, 122 bp, Homo sapiens
agagacacctagtggaagaacacctaagtacaatatttagcttaagaccaaagattaaatcgtccaactccctaatttgacattctttcaatttcaatagcgcatttttttaaaccactaga

SEQ ID NO: 212608 - DNA, 122 bp, Homo sapiens
ccttagcacgtttataatgtgacagtggtacggggtgccacgcagtgtttccaggagcgccgggggggagcgccaaaatgctaaacccattcttagccaattgtgcgccgctcacgagtcag

SEQ ID NO: 212609 - DNA, 122 bp, Homo sapiens
gtgggtcttggggcgcgacagttaatgggaggtcctgagccctggccttatggaatttcacgcaggtatttgcctaatacttacaaaaacagaaacagacttttaaaaagcggttgtaggag

SEQ ID NO: 212610 - DNA, 122 bp, Homo sapiens
gggcgggacagagaccccgccttcagggctcgacattaatcctgcctgaaggtgggagcccgaagagcctctcccagccctgggctccagatcactttgtcccttcctaaagaaatctaagg

SEQ ID NO: 212611 - DNA, 122 bp, Homo sapiens
aatagcctgggtcgcaggggccggcgggagttggagttctgaatgcgccaagcccgcggtcgctgtcaaacctctcgccgctacggactacaactcccagagggctctgcgacggccagcac

SEQ ID NO: 212612 - DNA, 122 bp, Homo sapiens
cctaacccttcgcaggaaagcccaaccttgcaggtgtataaataggcactctcgaagcttcgtgctgtagcctggccctccctctttccaaaatggacaagtccctcttgctggaactcccc

SEQ ID NO: 212613 - DNA, 122 bp, Homo sapiens
aattatagccctcattcatgtaaaaaaaaatggtaacttattcagggttagtctcataaacgtagaagtcaacccaataggctagactttcaagtctagcttttaatgtttagaataggaat

SEQ ID NO: 212614 - DNA, 122 bp, Homo sapiens
ccaagcctggtccagcctatagtttccccagagctctttgtggcctcctcagtggccacccggctcagacgtggtgttgactgccccacaagcttgacattgtggtctttacccacccactc

SEQ ID NO: 212615 - DNA, 122 bp, Homo sapiens
agttggttggttggatttccccctgcattgtccctaagagccggactccaacagtcagtccgaggaaatgcgggagggagggaggaatcttaaaaacagcattagtgggcattaggaggcag

SEQ ID NO: 212616 - DNA, 122 bp, Homo sapiens
gtatcccagttaagttacacaggtgagtgacaagcccgggtcggctcctgagttctcatccggagctgcgctctcccgtctctttactgggagcgttctcctgccggggcttggacatttcc

SEQ ID NO: 212617 - DNA, 122 bp, Homo sapiens
ctcccaggcgggaatagggcccgagtcctgggagagaccgagagagaccacgcaaagggtcggccaccgctcccgatcagtatctcagacgcaggtcctcttccaggcctagccaactcact

SEQ ID NO: 212618 - DNA, 122 bp, Homo sapiens
tgccaatcacgctccaccaagccaatcagagtggcgtcagccggccctggcccgaaacaccgccccattggctaagcagcccacaggctccgcctgattagcggacacctgggcaatgggag

SEQ ID NO: 212619 - DNA, 122 bp, Homo sapiens
ctcaggtgatccacccgccttggcctcccaaagtgctaggattacaggtgtgagccactgcgcctggcccctagatagcactcttatccacagctgacagaatgtcttgctggaatcacaaa

SEQ ID NO: 212620 - DNA, 122 bp, Homo sapiens
atgcacagcctcggcaggtcacgccggatcagagctacagaataggtgtcagaagctggccgggccgcagcggccacgtgtctccagcactgtgaacctaggacgagggagcccacatattc

SEQ ID NO: 212621 - DNA, 122 bp, Homo sapiens
aggaagaatggtaagtaaggcccggaaagtgcaggcagagaatgttatgcacctgcatgtcgtgaacccaatggcaacgaaacacttacttgtctgcggggcaaatatagccgcgttggctc

SEQ ID NO: 212622 - DNA, 122 bp, Homo sapiens
atctcattacacttgggacacagtaggtgtccatgggaaagggacccatctgccgggccacgcgctgagttcacgggtaacatcagcctgaacgtaaaggaatgagggcggcaaatctgcca

SEQ ID NO: 212623 - DNA, 122 bp, Homo sapiens
tgcaatcgcagttgtgtgtgtggagcactgaccctctgattgcacggtgctgcacacttacgcgagccgtctcatttcgccatcagaaccgcagccctacgtggcaggtcagctatcactcc

SEQ ID NO: 212624 - DNA, 122 bp, Homo sapiens
tttctacatacttgtctgcattcagtgtcttcccaagaaacgtcagttaattccccgattcgaaaaaggaactttctcgtaacagttgtacaaccaggctaaagagcacaccctcgtcttcc

SEQ ID NO: 212625 - DNA, 122 bp, Homo sapiens
gggaaggtaggagaaagaggcggagctccttgttaacgacatccccaacctctgctaacgcgcaggcgcacttcctgaagctgaaggtcagcatagacaaagggcctcagaatcgcgcaggc

SEQ ID NO: 212626 - DNA, 122 bp, Homo sapiens
tgttacatctgggcccccgacacgaatgtgcaagagccggacctctgcacctgtcagaggcggctcgcattacgaacctgctccacagtcctgtggattcctaactccgctcaagcggaaac

SEQ ID NO: 212627 - DNA, 122 bp, Homo sapiens
ctgggccgtcttactgagagccatctgatacacggtccgctttttctccatgctgggcaccggcgccggctgctgctcgtactctgtgggcaaagaacacggatgacgcccagggagccccc

SEQ ID NO: 212628 - DNA, 122 bp, Homo sapiens
ccacatacctcatacacaccacataccttgcacatatcacaccacacatgacacacatatcgcacgcctcacacgcacactacacacacacccaatatgcaccacacacttcacacacacac

SEQ ID NO: 212629 - DNA, 122 bp, Homo sapiens
tgcagctcggagcggggaaagccgaattccgggggctgaagaggccgcgcaggggacgagcgcctgcgatgcggagcgtggacttcttgggccgtacccctgcggctcaagctgccccggat

SEQ ID NO: 212630 - DNA, 122 bp, Homo sapiens
gcccttccttctcccggcggccgctggagctgcccgcttcgtggagccggtggcaggccccggggctgggagctcgcgcccaggcttttactcagattccagcacctgatggagcagggggt

SEQ ID NO: 212631 - DNA, 122 bp, Homo sapiens
ttcctccagccctgaaacttcttcaaaggggttccgagaggacctcaggggcagggtccccgcccggggcaccttagggtctgacactcccagattcttcaggataggcattttgacaggtg

SEQ ID NO: 212632 - DNA, 122 bp, Homo sapiens
gggcgggcggacggcggctcccgcaccgcacgcggcgctggctcggcagcctcggccgggcggccgctctggccccgtgtccagtgccaggcaggcttcagggcaccgtcctcggccctggg

SEQ ID NO: 212633 - DNA, 122 bp, Homo sapiens
ggcactgccgctttaagcacgcttgtccattgttcggaatcgagccaatgagcgagcgcccgctccctgcgctcagccaatagcggccgggcatgggaagccgagcgccgcccactaatcta

SEQ ID NO: 212634 - DNA, 122 bp, Homo sapiens
acgttcccgttcaaacgagttgctctgcaaatgcaagagctgacacagcacctgaaggtccgctccgtatctgaaaagtagctttcccccacggagaatgcaagcgtgcgttcggtatgggg

SEQ ID NO: 212635 - DNA, 122 bp, Homo sapiens
cccagaacgtcttcttactttttattactctgtcccccatcctgggtccagacctgtgaccgtgaacaaccggctgcccaggggtgaatggggtgagtggggtgagtccacagaacagtggg

SEQ ID NO: 212636 - DNA, 122 bp, Homo sapiens
acgcccagctaatttttttgtattttcaaacagacccactgccccacctccaggtgtaaccgaaatgcaggttcagttgcttgcagcttgcagagtccaattaaaatgagcaaggtctggta

SEQ ID NO: 212637 - DNA, 122 bp, Homo sapiens
ccgcatgcggtgcccgtggcccgccccacaccaccgccgcctgcagacctctcccttggccggctccctgggccgccatctgcgtgtacttcagggcctgggtatccagcgagccctcccca

SEQ ID NO: 212638 - DNA, 122 bp, Homo sapiens
ccggtgcccgcgggaagggccgcctcactcacctcgggcgccagtaggtgcaggctgggtcggccggcggccccgcgctgcctgtctcttatagaagcgggcgtcggagcagctgggcagcg

SEQ ID NO: 212639 - DNA, 122 bp, Homo sapiens
tcagggagccccactggctgccggatccggattggggtggggtgggctgcaaccggattccgagggggaggggagacgagctgcctcggagagctcagcgatctttcctgcctttcttgaaa

SEQ ID NO: 212640 - DNA, 122 bp, Homo sapiens
gattccaacagttcttgccaacacactcatcctaaacaattacattaagatccataaggccgtgtttacagttctgaggagcaaatgtattgttaatgggccataaactatcctctgactca

SEQ ID NO: 212641 - DNA, 122 bp, Homo sapiens
ttgtccactgtgcagtctttgttgtcccggcaagagtatgtaaggtctttgcggatggtgcgtttgaagaagcccttgcaaccctcacagctgtaaaccccgtagtgtttgcctacagggaa

SEQ ID NO: 212642 - DNA, 122 bp, Homo sapiens
agggtctctccccgtccgctctccacacatgctcgttactcttgctctacttctgcccagcgtgacattgaactcaagagccctcggaggagacattcattggtacacgtggagaaggactc

SEQ ID NO: 212643 - DNA, 122 bp, Homo sapiens
tgcccctaggccaacctccacagtcatgtgggccatgatggccctctggtggccctctaacgtctccagggcaatgtgggcaatctcagcctccgtcttccccaggaacatctgacaggcgg

SEQ ID NO: 212644 - DNA, 122 bp, Homo sapiens
atgggtgccttaccccactcaccttccactgccatgcgttcccggagctcctgctgcagtcgactctgccggtcttccagctccagctcccgggcactgaggaggcagggcaggagggagac

SEQ ID NO: 212645 - DNA, 122 bp, Homo sapiens
acactctaaagctgggcccttaaaacaggcaaaaatacatgggtggtgtttacaagttgacgaaagacatactgtggtaacaaagctgacagagtcttgaatgagagccagtggggcctata

SEQ ID NO: 212646 - DNA, 122 bp, Homo sapiens
atcccggtaggcgcgttctctggcgccatcatatggcagaatgcgggactacaccaaatgcggaaaggcaccttccccttccctgagtatctgcaaactcagggctgggcttggtttttaag

SEQ ID NO: 212647 - DNA, 122 bp, Homo sapiens
accctggctctaagagggatgcattagactaaacgggatcgcaacttgcggtggttcgcccgcctgcagctcttatacagcagcccgtgccgtgcgccctgcttgctgcagcccgccctgtg

SEQ ID NO: 212648 - DNA, 122 bp, Homo sapiens
ctggactggccatggcttccaccagtgctcgaggcttcagctcaacttcccaccctccgacgttgaatggcagggaattgacaaagttaaattatgctttagaacccagaatttatccagca

SEQ ID NO: 212649 - DNA, 122 bp, Homo sapiens
agtgccggcttggtgccagggctgggagatccgggggtgaatcgtgagcccggcccacagcgagcttgcagtctagagatcaaggcagtcttgtccacaacctgctgtcacataaagcaaat

SEQ ID NO: 212650 - DNA, 122 bp, Homo sapiens
ttaacagagacatttgatttgctggctggcttctgcctgcagacttccctggcactggctcgctgccacgcaaattaagtaaaaatcaatatcctccggtctgtaaaacatcgtgttagcaa

SEQ ID NO: 212651 - DNA, 122 bp, Homo sapiens
gaggaggaggagcccgggtggcgggaagcgagcccaggttcccgcggccttgcgagggcacgcagggcaaacagtgctttatctttcgcagcggcgatgagctggtgacttttgggggtcat

SEQ ID NO: 212652 - DNA, 122 bp, Homo sapiens
tgcctgtaatcccggcactgtgggaggcctcggagggaggaatgcttgagtccaggagttcgagaccagcccaggcgacacagggagacacaccgccccccccaagcccgccactctgtctc

SEQ ID NO: 212653 - DNA, 122 bp, Homo sapiens
cgctcgggccggctgggtccatgtggcgcccggtgagctgcggcggcggctgaagggcaccgcgaggagggcgcgtcactcgcaggcgctccccgccccccgcccgcgtccgagcgtgacga

SEQ ID NO: 212654 - DNA, 122 bp, Homo sapiens
atgcaggcgcaggacaggcagctggcagggcagctgctgcggctgcgggcccagctgcaccgactgaagatggaccaagcctgtcacctgcaccaggagctgctggatgaggccgagctgga

SEQ ID NO: 212655 - DNA, 122 bp, Homo sapiens
gggcagacctacctctctcctactcgctggttcgtcagccgctctgttcaatcgtaggagcgctcctggtcggttcccgcagtgccttgcggctgtaatggctgcccccagctggcgcgggg

SEQ ID NO: 212656 - DNA, 122 bp, Homo sapiens
aaattaatattttgtctgaaacgtattggaatttatctaaaacctgaatatctgcagagtcgcatggtggcgctgcaggataagacggtgaaatttttgtaaccgcagatgctctggttttc

SEQ ID NO: 212657 - DNA, 122 bp, Homo sapiens
gccgccccccgggagcgtgccctcccgccggaccctgggactccagagaagcgccgagggcgcgagtacactaagatatacgaccttccctggggaccgggaagggcacaaccacctcttgc

SEQ ID NO: 212658 - DNA, 122 bp, Homo sapiens
cctccccagccagtctcctggaccaagagctggctttgcaaggtaaggatccactgtcagcgttggatttcggagtggaggttgagatggagaatgacttcaacctagctcaatttgggggc

SEQ ID NO: 212659 - DNA, 122 bp, Homo sapiens
cctcctgtgcctgcttcctattggctggtagtagttcccgcctaggtgattgggccaacgcgcttcctcacgagggcttggttggtccggaggaggaggaggaccagggaggtacttccgcc

SEQ ID NO: 212660 - DNA, 122 bp, Homo sapiens
gcatggatccggagccgccagacgcgccgaccccagaacaaagtcgtccagggcgcgtagcggtggcagccgcacctccgacatcctgccggttaatgtggctggaccagccaggagggggc

SEQ ID NO: 212661 - DNA, 122 bp, Homo sapiens
ttgggggacggccagctgtctggatcactgtccaggggctgtgtccagctcggatacctccgaggtgagtccacatcactaggagccacagtctgttggtgagatgcggtggatggcgatgg

SEQ ID NO: 212662 - DNA, 122 bp, Homo sapiens
ggccctgtttggacccatcttccagctatctcaccagatggtgagcccagaggaagaccccgtggctctgggccagtgtgcgtcagccaggtccccagcccccagtgtgctgaagctcaggc

SEQ ID NO: 212663 - DNA, 122 bp, Homo sapiens
aggaggggaagggaagaggtaggcgtccatgacggcctccacacgtccaaagtctccccgcgagcagccagctcgcaacttgtttacttgtcagcatgttttgctgtttccaaatggaaata

SEQ ID NO: 212664 - DNA, 122 bp, Homo sapiens
cgcctccttctgtcgcgcgcgctcgtgcgcctccctctgcccgggctcgctcgccgaggacgcccagagcctgagacccccggcgggctcgcgacgcactcactcccacgcgcgccgagcag

SEQ ID NO: 212665 - DNA, 122 bp, Homo sapiens
tcgaaccttcacctactctttgtctgtacaagctcttgttgtctgggtgagcggcggaggcgctgctgtggattggtcacagggagaaacctctgatctgttcctattggcccgtccgtcaa

SEQ ID NO: 212666 - DNA, 122 bp, Homo sapiens
accaccgcgcccagaggccgggccagccgggcgtgcatcccaggggcgctccgtcccccgcggcctgggactccccagtaaggacagtacaaaatctctttattgctcattttctgtaaaaa

SEQ ID NO: 212667 - DNA, 122 bp, Homo sapiens
agatacacgatgttggcaaagatttgaataagtggtattctcacaaataaccaatagaatcgagcactggagactcaagttgttggaaaacaatttgacattatgcattgagagccatgaaa

SEQ ID NO: 212668 - DNA, 122 bp, Homo sapiens
aacttgctggtcagccttgggggccttcacatactcaaaaaacacatttcaatttgtaggcgtttataatttggaattcacagtacttgcttctaggttgtctgcattagcaagctagcagc

SEQ ID NO: 212669 - DNA, 122 bp, Homo sapiens
tcactgcccttttcagtaccagagtgatgaaagctggcatgcaagggaacattactagctcgaaaagcaaaacaaaacaaaacaaacccagatcgcatgggggcaggatgtatttcagtttt

SEQ ID NO: 212670 - DNA, 122 bp, Homo sapiens
ccctggccctctctggcagcggcaacggcggtcgtagagccaactggagcctcccccgggcgaggaaagtgaagtggaaacaatgtgaaattcaccagctctgaaatcaacaagctgccggc

SEQ ID NO: 212671 - DNA, 122 bp, Homo sapiens
aaatttgcttccaggacaaagcaggattttagcaagcaaatactctcagagacctatttacgaaaattattacttcctaggtaaaataacgttcaaccagacagccattgtcgccattcgac

SEQ ID NO: 212672 - DNA, 122 bp, Homo sapiens
ggcgccgtcggggaggagggtgggctgcaggacgagctcgggagggctccgaaatgcgctcgggccaaaacaaaaacaaaaagttcagcgcggcagtgggagcagattgggcgagacggttc

SEQ ID NO: 212673 - DNA, 122 bp, Homo sapiens
gggtggggcaccaagcggggagcggggccacgaggcaggggacagtgaagcaccatgcagcgcccaccagccggcagcgcccaccagcctgcgctgcgctgcacatggtacccgcggcccca

SEQ ID NO: 212674 - DNA, 122 bp, Homo sapiens
tccagccctgatctatccaggacactgccagccagactaatcctcctaaagctctactatcgtaatattttcaacactgtctctaaatttttgagcctggcatttgaggtcctccactccta

SEQ ID NO: 212675 - DNA, 122 bp, Homo sapiens
aactggtttccccaaccttgccctagactctggcaattctgcatccttctgagtcctgagcgctcctagctgggctcctgccctgagggcccaagactgagaaattcatgagggaaaggaag

SEQ ID NO: 212676 - DNA, 122 bp, Homo sapiens
tgtttgagttgggaggctgtcctggaacagaaaatcatttccaaacagtcttttctgttccgtggcttaagtggaaagtagaagtgatcatcttaaaatattgtggcatttgttgtacctag

SEQ ID NO: 212677 - DNA, 122 bp, Homo sapiens
cccgcgcgccacagtgacagcttccagatgcctgtctttagtctcccttctcaagggaagcggtgggcgaccgaggtgcggcctggagggcccccatgtgggaagggaagacttgcggaagg

SEQ ID NO: 212678 - DNA, 122 bp, Homo sapiens
accaatgtgttcagaattagattggatgacagtcttaagaatacacagtttatggcctaacgatttgtgtgtcctgaaagatggtggccataattaggagcagtttgtgttttacttccacc

SEQ ID NO: 212679 - DNA, 122 bp, Homo sapiens
acccgcaagacagagcagggtgaagttcatggtcacttatgtccactctgtgcaacagctcgcaggggctccccagggagggcgcaggtcggggaccaggcacgggagcacctagaatgttc

SEQ ID NO: 212680 - DNA, 122 bp, Homo sapiens
tccagtccctattcaatattagagctggagtaataaaggacccagtcatcaggctgggcacggcggttcatctctgtaattcccactttgggaggtcaaggcaggcagattgcctgaggcct

SEQ ID NO: 212681 - DNA, 122 bp, Homo sapiens
agttctacctccgagccaagcccagtggtggtcaaaaactacgaataccaggaagcaccgcggcgcggcggcccagagctccgcgcgcaggcctccccggcgcgccgaggccgccgccgctg

SEQ ID NO: 212682 - DNA, 122 bp, Homo sapiens
gcccttcgtcctatgcttttctctgttccctctgctcccttacccgccgccttctggttccgcccggcgagttttgcttgcttgcgttccagtttccatggcagcttttcgcggtggcccta

SEQ ID NO: 212683 - DNA, 122 bp, Homo sapiens
attttcttaccaacagaggccaaaggaggcagcagtggactacactgtgggttgtctttgcgaggaagtggcattgggcagagatgcagttcagcaaacttatcattgcagcaatttcggag

SEQ ID NO: 212684 - DNA, 122 bp, Homo sapiens
aggggggccaagagcgaccggggtcggcaggtaaggaagaccgcggcgagcggcagggggcgccagcgcccgcgttcgggcgcttcacgtcagccgcagaatgtcctgcagggggcgcccgg

SEQ ID NO: 212685 - DNA, 122 bp, Homo sapiens
cggcggacgaagactggacgccggaagtcccgcccacgccgctacgggaacgcccctctgcgccttccgtctatggcttggggtcggcttccgtcccttgtagcactgccttctgggtaatg

SEQ ID NO: 212686 - DNA, 122 bp, Homo sapiens
gccggggcgcggcccccctgcgagcgaactcacccgcgacgcgaggacagcagcagcaggcggcgagcaagaaggcgcagaccagcctgggaagccccatgcttcccggccggagggcgaga

SEQ ID NO: 212687 - DNA, 122 bp, Homo sapiens
ttgaacctgtgcgctggccagcatgggtctgcttctgcaccggcattatcttcaaaacctcgtcctcgagagaggcccccaggaaaaagtcaatgatttcagattccttaatggggcaggga

SEQ ID NO: 212688 - DNA, 122 bp, Homo sapiens
ggcgggcgagttcccgttcctctcctcggagcacagggtcagggggaagtgggggcagcgcgactctcccctgcatggccccctgaccctgggcaaacgtggggagagatggcgcctgagcc

SEQ ID NO: 212689 - DNA, 122 bp, Homo sapiens
agtgacccttccccgagagtgcatggagggccgctggagcatccctctcgctgtccacagcgcccgcttccctgacaaaggccccgtgtcaatccatccgagacacaacacagagaagttgc

SEQ ID NO: 212690 - DNA, 122 bp, Homo sapiens
tggcattagaggctgggaggccaggaagcggggccttaatcatctccaggttaagcatagcgagctccaaaaagccctcagagtcctgcccttctgaagactctaaggcccgccctcaagga

SEQ ID NO: 212691 - DNA, 122 bp, Homo sapiens
cagtctgtgtgtgtgagaagacaacaccaaattcctttccttagcaaaagccacagccagcgtttttagtgctgacattttattttcttgtcttccagctggttacatttttcaaaaacagt

SEQ ID NO: 212692 - DNA, 122 bp, Homo sapiens
aaagcgcctgcgcggagagcctgcaatcagggaccaggcttgggaggcgacgaagaggaacgctgggcgcaggaggcccactgcatacgcaggcgcactcggcgatcccggcttttccgcgc

SEQ ID NO: 212693 - DNA, 122 bp, Homo sapiens
tggaataataacctctgtactttattttctactctgaaaatgacttattttatttgctctcggtctatgtttatatctccccccctaccctgcctgtctcctcaccccccaccaacttctga

SEQ ID NO: 212694 - DNA, 122 bp, Homo sapiens
tggctttgagaataggaattcaacattcaactctggagacagagttccttgtgatgggagcgcccatcactgtcactgaaagaagaggaagaaagtgagggatctgtggaaggccgggaagg

SEQ ID NO: 212695 - DNA, 122 bp, Homo sapiens
tatttacaagaaacgctaacgtatcaagttgaggaaggaacttgttctcttctgtttttacgaagtgagaaggttagaaggtcagccatagccttgtgtctggttttctggggtgcccctgg

SEQ ID NO: 212696 - DNA, 122 bp, Homo sapiens
atcacagggctcccaggtaagctgctcccttgcctgcctagggctgcctcagacacagtccgatttagagccaagggcatctggggcttggtttacaggcgggttgtttggatttgggtgta

SEQ ID NO: 212697 - DNA, 122 bp, Homo sapiens
ccgtggtggggagaaagcgcaggtacctcctagatactctctctcccaccccacctccggcggccaacggccaagcaaacctccagccaagatttggggtatgtgggcagggctccggcgaa

SEQ ID NO: 212698 - DNA, 122 bp, Homo sapiens
ggcggaaggatcacttgagcccaggaggtcgaggcttcaaggctgcagtgatcttgactgcgccactgcactccagcctgggcgacagaccaagacaatgtctcaaagaaaacaaacaaaca

SEQ ID NO: 212699 - DNA, 122 bp, Homo sapiens
tccgccagcgacctcagagctcccgggcacagcccggggcacagccccgcgcacctgccccgcccacgcccgccccgcgcacctgccgggtccgcacctgccatttgcccgactggccgcgc

SEQ ID NO: 212700 - DNA, 122 bp, Homo sapiens
cctggaagactgggcaaatattgtttgggtgtcaggtgtggcagtgccaagagagccaggcgaaggtcgccagggctgcggcatttagtgaggctgactaagccccagaaacacagcatcat

SEQ ID NO: 212701 - DNA, 122 bp, Homo sapiens
cagagtctgctctgtcagtcttaaaatctctattttgccatactttcaggtcagttgtgtcgaaaccataaaagggaggggcatagaatgaggcttttctgaccccctgttccatcatggac

SEQ ID NO: 212702 - DNA, 122 bp, Homo sapiens
ccccaccaaaggcaatgcagaccgtgtgtccccagccagctgccctttagaggggctaggcgggaaagccaaccagcggaggcatccaaacactctcgggctctccagaggagcaggagggt

SEQ ID NO: 212703 - DNA, 122 bp, Homo sapiens
aaaagcagtaggcagcacgtacccggttttacaaaaccctgcgggtcacctgtttactaccgtcagcctagaccggtttttccacctccttctgctgacattggaggacgggtatcattctt

SEQ ID NO: 212704 - DNA, 122 bp, Homo sapiens
ggatgtgagttcaatagatgaacaccccaccttggtgacacagaggctggacagtcacaccgacccttggcccgggcgaggccacgtgtcccacaaaacataaggcttgggttagtgtcggg

SEQ ID NO: 212705 - DNA, 122 bp, Homo sapiens
acgaacatcatgccgtgtccaggatagatgggccccgaacagaaataacacttttcgatacgcatgttgaacccgcgtgtaaccccaccaaacaaacgccaagcttgagaggaagtgatgca

SEQ ID NO: 212706 - DNA, 122 bp, Homo sapiens
ggccgggaagtagaatgctatcattggcagagctgagtcgtgctcacccaagctgaggggcggccccaccggaacaagggaggctagtcctgggatgctcatgtagagcagcactctcgtac

SEQ ID NO: 212707 - DNA, 122 bp, Homo sapiens
ctgacagtgccaggcccggggccacatgcttcacatacatgagatcatgtcagatagccccgtagctgcaagcaaagggtagaggccggcagatctctgagcctctgttctcacgtgtaaaa

SEQ ID NO: 212708 - DNA, 122 bp, Homo sapiens
agaatgggaagatggaaaaaatgaacatttcccattgggaaagagcagggagggaatatacgcatccagcacaagtggcaatgtaggcaagacaggtaccctcactggactcttactatagc

SEQ ID NO: 212709 - DNA, 122 bp, Homo sapiens
tgactcaccagcatttcatgctgggatggaggcaggtttagagcttgaatctgagtccagcgcccacgctttctctcctgcaaggatgaaaggctacaggggttgagaaaaccctcccttct

SEQ ID NO: 212710 - DNA, 122 bp, Homo sapiens
aatgattgtcttgaaaagtgggagaatcaatttattaaggaaatatgaaggattaccacacgccaacaagggcccacttgaaattagtgtccagcaacactgagacctctcagcatttttct

SEQ ID NO: 212711 - DNA, 122 bp, Homo sapiens
ccgtaagtcagcgttccgggtaaaggttttagtggaattgagaaccgaatgcgttaatgacgggttgcttgctgcccttgagggtaaccagttattgcaaacactctgcctctgtcacctcg

SEQ ID NO: 212712 - DNA, 122 bp, Homo sapiens
aggtcagcaaagctgcccttagacgagagctttcgcaccgctggcgcctcctgttgcgcgcgctcgatggagaagtggtcccgacgcgcgcgtcgactcttccagccttgagaggctagcgg

SEQ ID NO: 212713 - DNA, 122 bp, Homo sapiens
ttggagcgctcctcccgacggccgctttcggaggcgccgtctgagcgcggggtcccgcgccgcaagttctcctggggcgaccggaggctgctcccccgaccccctggtgtccccggagtggc

SEQ ID NO: 212714 - DNA, 122 bp, Homo sapiens
ctgggggagatgcgcttcactctgggcaccttcctgcgtctggcagccctgcgcacctaccgcggccgactggcctacctccctgtaggaagagtgggttccaagacacctgcctcccccgt

SEQ ID NO: 212715 - DNA, 122 bp, Homo sapiens
cttctgcgcctgcgccctagcgccggctgcagcctcctcacttcgagagcctgctgtttccgcggatgctttaccttgccaagagttgggtttaagtgcataggtttccacctttacatttt

SEQ ID NO: 212716 - DNA, 122 bp, Homo sapiens
ccacctcctaggttcaagtgattctcctgactcagcctcctcagtaggtgggaccaaaggcgcccaccaccacccctggctaatttttgtatttttagtagagacagggtttcaccatgttg

SEQ ID NO: 212717 - DNA, 122 bp, Homo sapiens
ggctgagaaggggtcacatgggggctgaggtggctgctactcaccagtggtgccatcggccgtgagggggccataccgcttcttgttcgcaattccaaacagagtgaatctgtacttgtggt

SEQ ID NO: 212718 - DNA, 122 bp, Homo sapiens
ggccgcctcagcgaaaaaaatgtccgcctgaagagacccacaagttctattcggggggaccgacagcccgccccgggaggaaggggcggccaggcccgaaagccgcctccccctcccagacc

SEQ ID NO: 212719 - DNA, 122 bp, Homo sapiens
tgctcttgtagaaaagggctgtgctactggtgtgcagcctcaggtgcatcataggtttctcgtcaccagcctactctaggtccatgtcattagctttctttgggttctctccacaattacca

SEQ ID NO: 212720 - DNA, 122 bp, Homo sapiens
catgagccaccatgcccagccaagggttgtctttctagagacctctacagtacaagtctacgtcactttgaagtaaggcccaggccaaaactcttggcaagattgggctggaagataggtgt

SEQ ID NO: 212721 - DNA, 122 bp, Homo sapiens
gaccccagccgtgcctcaatgagcagagttcttactggagccgcagaagcgtattaacctcgcgaccccatgacttgcacagaagcgggttctttctccacactccctgcctccgtgggcga

SEQ ID NO: 212722 - DNA, 122 bp, Homo sapiens
cgccactacactccagtgtacactacactacattgcattttttgagacatagctagactacgtctcaaaaaaaaaaaaaaaaaagtggtggctttgggctgggacatgggagggctatgcat

SEQ ID NO: 212723 - DNA, 122 bp, Homo sapiens
aatggcttgaagttgctagaacagaatctttcaaagactcatttagaagtccttgaaattcgccgccttcatgtaatattctagaaaaatgggacctagccgcgtgagggataagagctatt

SEQ ID NO: 212724 - DNA, 122 bp, Homo sapiens
acctcaggtgatccacccaccttggcctcccaaagtgctaggattacaggcgtgagccaccgtgcccggtcaagcttattcttaatatttacttgctagttaggtgagggcatttttttctt

SEQ ID NO: 212725 - DNA, 122 bp, Homo sapiens
tgtctgttttcctgactgccccaatacactctcagtgtaatcaggaagacaaaacagtctcgccacattttctgcttctttctgtggaacggaatctgatgtctcccagctgcattcatgtc

SEQ ID NO: 212726 - DNA, 122 bp, Homo sapiens
accactgtaattcacattctgtgtctcatattcattcctctgaagccacttcgccagactcgttctcccatttatcctttaaacaggggaatgtagatcctttagattttatcacccagttt

SEQ ID NO: 212727 - DNA, 122 bp, Homo sapiens
tgccccggccttcctggctttcacagccctgctcggattcttgtctccttcgcagtctggcgaggtcccctcactgttgacagtgaccagtcagctcttggcccttctggcatggcttcgaa

SEQ ID NO: 212728 - DNA, 122 bp, Homo sapiens
agctgtgtgatgctggtcaagtcttgtaagccctgggcatcgtttctttctactgtcaaccgaaggggctgggctgcttggtctctaagaacatcctgtaaagtagctgataagaaagaaat

SEQ ID NO: 212729 - DNA, 122 bp, Homo sapiens
acggtaaataaatcatacaaagttcaagaaactttggtgagtaatttaccccccaaaacacgtggctaccatttaaaatatattccatcttggccgggcacaggggctcaggcttgtaatcc

SEQ ID NO: 212730 - DNA, 122 bp, Homo sapiens
tttttgtcttttattcactgctgtatccccatgcctacacagtacctggcacacagtagacgctcaacagagagttgtgaaatgaatctttgcccttggaaacaaaggcgtcctcttgatgg

SEQ ID NO: 212731 - DNA, 122 bp, Homo sapiens
ttgccaacccccaccatgcccagaactgaacaggaagtggtaacttggttgccatggcagcgagaggggcaggaatgggtgaggttcctcaaggagcattggtatctgtgaggtgggaaagg

SEQ ID NO: 212732 - DNA, 122 bp, Homo sapiens
cctccaacctactaattccgaccttcacgccacctccgttagggagtagggggcggacaccgggcaccaggtcccaggcaagtggctgccatgtggcttagtggccagagaaccgggcagcc

SEQ ID NO: 212733 - DNA, 122 bp, Homo sapiens
ttcagaaagaatgatcaactacatggaggtaacttgctctgggtttcctgagatctcgggcggacccgtccgtgttttgccagattcagtgcaaatgtagatttcagctgaaccggtcagga

SEQ ID NO: 212734 - DNA, 122 bp, Homo sapiens
ggacgggaggagggagattctgctgctaagagcctcctccccctccaaagatgtgcgctgcgcttgggacaaacttccaggtcaagaaagtacggggggacaatggcaacagccgctgaatt

SEQ ID NO: 212735 - DNA, 122 bp, Homo sapiens
agaggatagaatgtcctttccatacaaggcctaaccttggttatatgaaaacaaccaagccgttttaacttttcttcagtttatttccatgaggcactcaagaacattttgaaatttaagag

SEQ ID NO: 212736 - DNA, 122 bp, Homo sapiens
ttccctctcttttgcctggtgtggttcagttgcaggtcatcttcctgttgccctgagcttcggtgctcttgctttcccctgctactccctgaactgcagcaattgctccagcacctgagtct

SEQ ID NO: 212737 - DNA, 122 bp, Homo sapiens
gctgggccagagctcgaatgccgctcccagctgcagacaccccagcccaggaaaactgctcgcggctgagtcgctgagcctctcaaaccgcctgcttcccccaaacagagccacggcccagc

SEQ ID NO: 212738 - DNA, 122 bp, Homo sapiens
cgctcagcccataggctgcctttttattcaccgagcgactgcgggcgcttgcgtgaggcgcggccagagccactgacatacccgccgaccaataacagatgccgcagtagcacgttcgctgc

SEQ ID NO: 212739 - DNA, 122 bp, Homo sapiens
ggtcagtccaaccattctctgcaagctaagccctgctgtctgcagggactctaggattgccgacatgagcgcaccaacactgaaatgatgagtcaggttgattatggtcagaagatcttctt

SEQ ID NO: 212740 - DNA, 122 bp, Homo sapiens
cacagtgggggctgagggaggtgggggtattgtttggaggctggcggatttgggtcagcacgcatattcgtcccaggctgctagatactgaggtgaggacccctagtggagacgaagggacc

SEQ ID NO: 212741 - DNA, 122 bp, Homo sapiens
aacactgtttttgttttttttttaaggtacaaatatagtttgtgcatttggaagaagatgcggctcgggacccattctttttgttataggcttgtgctataaacatccatcttactcttagt

SEQ ID NO: 212742 - DNA, 122 bp, Homo sapiens
aggaagcaacatggctgctccctggagctgtttccgcatggggccgccatcttgagagcccggtcgtcttcgtactagcggaggattcgcccagtgctgagcccgagaatgggctgtaccac

SEQ ID NO: 212743 - DNA, 122 bp, Homo sapiens
gtctcgacctcccgggctcagttgatgcatctcagcgtcccaagtagctgggactacaggcgcatgccaccacacccaactaacttttgtagagacagggttttgccatgttgcccaggctg

SEQ ID NO: 212744 - DNA, 122 bp, Homo sapiens
ctctaagaagcaaaagtgagtacggactggcacattatcagagaaagaatcattctagctcggtgggtcttaaccaggagtgaatttgactccagggaacagttggcaatgtctggagacgt

SEQ ID NO: 212745 - DNA, 122 bp, Homo sapiens
tgggggtggcacagggcagggcccccccatctcagggctgcttcctgtggggagggtccccgagaagcggagcgtgggctggtttttagggggtaacccacgaaggttccgccagcccccgg

SEQ ID NO: 212746 - DNA, 122 bp, Homo sapiens
aaagatactataatttcagtaacaccttttaatgaattagtattgtattaaccacaacagcgtacatttaaaagatagatagaagtacaaatatacaaaatataatatttagcagttaacag

SEQ ID NO: 212747 - DNA, 122 bp, Homo sapiens
ggccataagcttctatgccagctcgttcaagggggtcccaggaggggccaggagactggccggcgtctcatcttcctacgtccgcatgggcaactctgattccacccgtggtgtggtaggaa

SEQ ID NO: 212748 - DNA, 122 bp, Homo sapiens
atgacattttttaccacccaggtggacatgccctcatgtatatggagacaccttgaaatccggacccagcagagaaaagcttaggaggaggttagaattccctccctgggctgccaagcaga

SEQ ID NO: 212749 - DNA, 122 bp, Homo sapiens
ctactgtccactgaagaatctgccagagagaactgactgcaggcgggaggaatccctacacgcattttggtgaccacaggtcaccgaagtgatttgtgttgagagtgcagtaggaaaaaact

SEQ ID NO: 212750 - DNA, 122 bp, Homo sapiens
cccgtggccgcgcaggtggcgggaaaggtgggccggccggcggaaggccttggggcacagcgggcaggcgtggggccggagccccgagtggctcagccggtgccgggagaggtagtagggga

SEQ ID NO: 212751 - DNA, 122 bp, Homo sapiens
cattgaggatgtgcttatcttgtcgtcctccgtcgggtagaagctcttctccggggtcttcgtggatctgttcaaaagagatcatgaaacatttggtgctatagcccaacttttggtgggaa

SEQ ID NO: 212752 - DNA, 122 bp, Homo sapiens
agaagaagggcggtttgttctcgagaagtgcgagctatgcgtgacatgcaaacaggaggtcgagggtcagcatgcatagcccagtctatcatctccgtgaagtggagcgcaatgaaatacca

SEQ ID NO: 212753 - DNA, 122 bp, Homo sapiens
acctcagtttctctgtccaaaggcaattccaagactcgagcaaattcttttattatgctacgattttggttattttgaatacagcttttcaaagagcccttgggatttgagagcccttggtt

SEQ ID NO: 212754 - DNA, 122 bp, Homo sapiens
aatgaatgtgtgggtctgaagaaagtgatattttctaatgaagttataagtgtcgcagtccggaaaagtagaacccaaacaaacacaaaaaggagcgtgcaaggcccacgccgcgctgcaca

SEQ ID NO: 212755 - DNA, 122 bp, Homo sapiens
aaactatctatttcccttatttattggctcaaaagacaaatatcatcttaaatatttcatcgtgttccacaagaaaatgaaagaggaagtaaccaatagtagaacagttatgcctaaagaat

SEQ ID NO: 212756 - DNA, 122 bp, Homo sapiens
ggatctggctggcggaagagaaggcgggactgatgggggggcggaggtctagagagcaggcgtgagagaagtgtcttgatttctcaggaggaaattgagaggcggggactgagggaagcaac

SEQ ID NO: 212757 - DNA, 122 bp, Homo sapiens
gcgtcatgaaggatggcggctcgtaaatcgaagcctttgaaacaggggctcaccgtccggcggcatcaacaccttgttgttctgtgtgcaccaccccacggggtgcaaatccgcgatgacta

SEQ ID NO: 212758 - DNA, 122 bp, Homo sapiens
gagaaagaacatggccaaaacccagaacgcaattacaaaagacctctgaacagccaaaaacgaagtcagtattcatatcctcatgttaacatacattgcttgttcaaattttcaagaagcag

SEQ ID NO: 212759 - DNA, 122 bp, Homo sapiens
catccagatgaggttggtggcccaaatccaaatgtcccattcctctgccccatcatgagacgacggggcagggacccactgtgacccgcgtccgcgattagaatcggggactgcccgagacc

SEQ ID NO: 212760 - DNA, 122 bp, Homo sapiens
atgatcctgttttggttgcttatccaatcctgagctgaaccttcgtttgagtgctaggcacgtgcagggaatggagaaggagtaggcgagggaaccgtactgtgaaaaggcagcgccgcgca

SEQ ID NO: 212761 - DNA, 122 bp, Homo sapiens
ttaacaagtgaaaaacctttatgatgcttccttgaaagacacaaagctgaaacttgagcacgagaaaaaataaaccttgcttttcaaaaggaaaatgcaacatcataaactgaaaaggtatg

SEQ ID NO: 212762 - DNA, 122 bp, Homo sapiens
catcatcaatatttataaatgcaggacaaccaacatttaagtggctttctttctccagttcgtagccactgctatgctggcaacagctgtgtatatttgtgagggaatcaacatgctaaatc

SEQ ID NO: 212763 - DNA, 122 bp, Homo sapiens
agtatcaatgcaactaaataatgaagacatttttctgttggttatgctaacaccatgctgcgttctcccaagttgtgtgttttaagtgtatttttaactcccagatctggcattggccaaaa

SEQ ID NO: 212764 - DNA, 122 bp, Homo sapiens
aagcctgcccgcggagtcgggagtggaggccagggccccccaccaccacgcagagagagtcgcacagagacccgctggggccctcgtccagggagcagtcgtcgtggaatccctccagagga

SEQ ID NO: 212765 - DNA, 122 bp, Homo sapiens
cagcaaaggggcacagtggaggagggtgccttcctagtgggcctgcccagaattgggctccgagtgacggggtcatcacttttggattctgactgaaggacacatcagaaacaggacattat

SEQ ID NO: 212766 - DNA, 122 bp, Homo sapiens
catttctctttcatgagtgtctctgaaaacatcattcatgatttctttaaccagaaacaccgctcctatacctgggaataaccctcattgtaatttttatgtagaggtctacatacaaataa

SEQ ID NO: 212767 - DNA, 122 bp, Homo sapiens
ttcctgcctcagcctcgtacagtgctgggattgcaggtgcacgccactatgccaggccatcgctgggttttctgcattgtccttggcctgcccccagtcaggccactctgaacacagtagac

SEQ ID NO: 212768 - DNA, 122 bp, Homo sapiens
acacacacacacacacacacacaccactcacaccttctcacataggatgtctagccctctcggcagaggatcaactttgtccagaggtggagcagagtccttggacagaggaagaaaatgaa

SEQ ID NO: 212769 - DNA, 122 bp, Homo sapiens
cggtaaagcgggcgtatcagcggttcccagccagcccgggtgtgcagggtcggaggagctcgcgggctgagcgcggcccctggcgcccggttggcgtgcgggactcgggcgcgctctggtcc

SEQ ID NO: 212770 - DNA, 122 bp, Homo sapiens
gtgcctggcacctggtaaccactcagtgaatacctactgaagggccagggtagtgcctcacgcccgtaatcccagcactttgggaggccaaggggaggattgcttgagcccaggaggtcgag

SEQ ID NO: 212771 - DNA, 122 bp, Homo sapiens
tcaaagctgcagtgagctatgattataccactgcacaccagcctgggcgacagggtgagacgaaagaaagaaaagaaaaggaaaaagaggaaacaggaaaaagagaagaaaaaggaaggaag

SEQ ID NO: 212772 - DNA, 122 bp, Homo sapiens
agagtcccgctctgctcaccaactaccccagcttttccagagactgtgaacagagcaagacgctggccaactagagatggtttgttttccatctcaatttttccagcaatggtggaacattc

SEQ ID NO: 212773 - DNA, 122 bp, Homo sapiens
tcccattattcctggctggcggtccatctccttgcccgtctctcggggagtgattcggtccgggacaccaggactctgcttggaggcctgctgttgcctaaaaaccccaagcgcgggcctct

SEQ ID NO: 212774 - DNA, 122 bp, Homo sapiens
cttgaaattctcaaagattttatctcccaacctatattttgtgtgagacatcccatgaggcgacgtggtgcgcgcacctgcagagaagacaccccaatctgcacgcccacagcgcctcgccc

SEQ ID NO: 212775 - DNA, 122 bp, Homo sapiens
tggtgctttagccacaaagttgattgaaaagtcagaggcagtgagccacaggaagcgccacgtgacccagactgcgaggaggacacaggaaaccaaccctcactgtgtcctgctagggggtt

SEQ ID NO: 212776 - DNA, 122 bp, Homo sapiens
gggtggggagagctgctctgaggctttgggaaagtcagcccagaaacgggtgtgactgtacgaagaagcctcggcctggcctgtccctcgcgctctcagagtgactgggctggaatggggca

SEQ ID NO: 212777 - DNA, 122 bp, Homo sapiens
tgaaagagtccatttatggtgttactggaaatatttcactagggctggaacattggcctgcggctggcacacaggatgaaggtggaataagtcagggagaccacttaggaagctgctatgat

SEQ ID NO: 212778 - DNA, 122 bp, Homo sapiens
taattctgttcctctacaatagagtccgttccaagctttctgtcttcctgtgtccttccacggctctggctctctctgcattatttcctatttatggaatacaaatcttttacccttgtatt

SEQ ID NO: 212779 - DNA, 122 bp, Homo sapiens
gaactcaccccgagggtcctaactccccacctccgctgcccatcctctccagccctatggcgtctacaaatccagacctgcggaagccccaactcacccagcgcctcgccccgaggaatccg

SEQ ID NO: 212780 - DNA, 122 bp, Homo sapiens
tcttgccatgaaaatatagctctccatctcagcctctccactccccattccaaagggagacgtgtctgtgcttggggagaagccaagcaaagcaaaagatttcaacagcgaaaggaggaaac

SEQ ID NO: 212781 - DNA, 122 bp, Homo sapiens
ggtctgactcacattttaacaaagtcaccgtggctgctgtgtggagaacgcaacgcagggcgaaggcggagcagggagatgagcgccaaggtgcctgcagagatgctggtggggagcgatgg

SEQ ID NO: 212782 - DNA, 122 bp, Homo sapiens
tcgcaggaggtagaggtgtttcctaaagctgtggcggcgaggaggtgtcccccgcgggggcggccggggcggccgctgccgctgctgctgctgctggggctggaggctcagcctcccaaaag

SEQ ID NO: 212783 - DNA, 122 bp, Homo sapiens
tcaggggctgctgagccctgtcctggttgcctggaagggagcattgagcaacgtgactaacgctggcctgggtgtcagacgacagcgcagcactttaaccaggatccgggtgtgaaacatga

SEQ ID NO: 212784 - DNA, 122 bp, Homo sapiens
tgcctctagggaggtccatgtgaaggaatgggtgtgtatggacatgtgggtctgcaggtgcgtgtgtttatgtgaacctgcaccttgtgtgtgcacgtggatgtgcctgcatcaccgtgaat

SEQ ID NO: 212785 - DNA, 122 bp, Homo sapiens
tggctccagatgccccccaggtgagcccagcagagtggactgccaggagcagctctgggccgaagagggagacagtgtccgcggcctcccaggaggtggcgccagaggattaagtcgccagc

SEQ ID NO: 212786 - DNA, 122 bp, Homo sapiens
agcccagtggctgccaagccaccaaagcaaacaggacaccccccatgcatacacgcacagcggccaccccgcctcacacacaccctgagctgggcagagccggtctggtttcccaggctgcc

SEQ ID NO: 212787 - DNA, 122 bp, Homo sapiens
cggtcgccggcgcggagggggcgtgctcccaggcttagaaacagtgagggagagcaaattcgcgcacctgatgtctgcttaagctacctgctagactgagactttctgcgaagccggcgtgt

SEQ ID NO: 212788 - DNA, 122 bp, Homo sapiens
gaagctcactgttagaactgtggctttagaaatacaccacgacagctatgattcagaaatcgggaagctcaccagtgtagcagctgcttaaaatcaatgaccacagcaactggttttagttt

SEQ ID NO: 212789 - DNA, 122 bp, Homo sapiens
ggcgcccctcactgatggctttagaacgtgggtgggggaaggtgtgtgaggacgggaagacgccgcactcacctgagttggcgtcctcagagtggccgctgccatcagactctgcgggtaga

SEQ ID NO: 212790 - DNA, 122 bp, Homo sapiens
gttgccttcactatgaagcattttctttttgagatgttcatatttgggcagcatataacacggtgaacatttctatatgtgaaaattggatgatgaattaaaaaaacacagatcatcttagg

SEQ ID NO: 212791 - DNA, 122 bp, Homo sapiens
aggtggaagaagacacaagtggctggccttggcgagcctgccagtggaagaggacactgacggatgctggcacactggcagggcatccaccggtggcacgaggtggagtttggtgggggcag

SEQ ID NO: 212792 - DNA, 122 bp, Homo sapiens
aagctctccctgatgaggtaaatagctgagttaaatagtggagtgagggctcctgagaatcgctgatgtgacaccatggtggttgttaatgacaggtttcctgctgcgcttgctgccctgaa

SEQ ID NO: 212793 - DNA, 122 bp, Homo sapiens
ggcgaaactgagtggcccgctttcctattctgcagagccgcaggaaccgccactgcgtctcgcccctgccctggttcaaaggggtcccctgggtgccctgaggtgtttgttcttcccaaacc

SEQ ID NO: 212794 - DNA, 122 bp, Homo sapiens
tttttgctataagacacattacacatcttgtggttaggaaagcttgacagtacttcagcccgatgcttggggaccattttaaacattgaaatcaacaagaaaaagcacaaaaatgtgaaaaa

SEQ ID NO: 212795 - DNA, 122 bp, Homo sapiens
tcagagctcagagagggcttcctggaggcggtgcctcagaccagggtggtgctgtgggcccggtgggaggggcggtctcacctacccctccccagcactgcctccctgagagctgccctgag

SEQ ID NO: 212796 - DNA, 122 bp, Homo sapiens
gcgttgccccatggctgcgggccccgcttcttcgggtccccgcccctcgtccgtcacgaccgcatgccttaaccccttgaagggactgacacagaaactcagtcctccccccaccctcggtg

SEQ ID NO: 212797 - DNA, 122 bp, Homo sapiens
ttactacccgggccagcagctgcggagggtgtgccgggtcccccagcagtgccggcccaccggctctgtgctggatttcttgccgtgccttagctgcctcccctcgggcagggctggggacc

SEQ ID NO: 212798 - DNA, 122 bp, Homo sapiens
gggacagcctaggggcctggatctattgcctacttagagagaggccaactcagacacagccgtgtatgctcccagcagcaacggaggttcaggcaagatgcccgaaggagggaagggtgaca

SEQ ID NO: 212799 - DNA, 122 bp, Homo sapiens
gcagagccgctgcgcccctctccaccgcctgcacaggttcccgagtcccacgaccccctccgcgctcaacacgccacccgcggccacattcggcctctaccttctgccgcaacacacacacc

SEQ ID NO: 212800 - DNA, 122 bp, Homo sapiens
ccgatgcgaccccggactcggagcaggaaatcctgggtgctcctgaagctccgcctgccccgggttccagcgagagcacctcgtcacactcggggcgctgtcccccagtccttttccttctg

SEQ ID NO: 212801 - DNA, 122 bp, Homo sapiens
gagggatcggccagtgtgactcagccatctgttgtgcttggactccttaggacactcacgcgcacgcagacgcacgatcacacacgctactttcctgtttgtaggcttctgattatctcaca

SEQ ID NO: 212802 - DNA, 122 bp, Homo sapiens
gaagcgttcattttaaggtgctacaggcttaagtgtgtactcctttggattttaggcttccgttttctaaacgagaggtgccggtggctagtgggtctgggtttattgtgtcggaagatgga

SEQ ID NO: 212803 - DNA, 122 bp, Homo sapiens
gctgcagagacgagtggccgcttcgttgtgctccctgccttcgggagagacggagtcccacgctgagaggacctctcctgtgtgctggggtcatttggagcaagaggtgtgggcggtcgcgc

SEQ ID NO: 212804 - DNA, 122 bp, Homo sapiens
aactcctggactcaagcgatcctccctcctcggcatccctggactataggcgtgagccaccgcttacgggcgaagacttgcttgtccgtgtccttgccatctaagtgggtaagctatctttc

SEQ ID NO: 212805 - DNA, 122 bp, Homo sapiens
tgggcattgtggtgaaacctggagcttgctctgcctgaatgcctgtcctggagatgccctcgactcagtgctccgagcagagaagacagttcttgcctctgtgatgtcagaggaaggggatt

SEQ ID NO: 212806 - DNA, 122 bp, Homo sapiens
tgaccttaacaaaggagccagctacaaccaaggcaggttcagcgtgtggcacacgtgtgccgcgtgcttgctgtggaaagggtgagcaccttctgaccttgcccttccctcacaaagcagaa

SEQ ID NO: 212807 - DNA, 122 bp, Homo sapiens
gggtggcggaggcgggtcccgcgggcgcaccacccggacgtttggggtgagcggcggggacgtgctgcccgccccccggcccccgaacggggtccccgccgccccccacactccccggccgg

SEQ ID NO: 212808 - DNA, 122 bp, Homo sapiens
gcccgtcccaggggtcgtgaggacctggctctccccttaacaccaggccaccgccgccgccgccgccattttgccttccactcagtgtcgccgccgccgcactccgctgcaggtttcccgga

SEQ ID NO: 212809 - DNA, 122 bp, Homo sapiens
ggcgagctctctcattggctgcggtggtggactcaatcaatctcgcctgcgttgtagtgtcgcgggattggctgtcgctggttccagcctttttctactcccctcccccagggggcagtttc

SEQ ID NO: 212810 - DNA, 122 bp, Homo sapiens
agcatgcactcttattctccccaaacaggggtgaattgataccaggttggcctctgggctcgcaagccaatgggtccatgtgcaagatccaaagtgttaaatgagcctccctccatttgctt

SEQ ID NO: 212811 - DNA, 122 bp, Homo sapiens
cgcatgccgtcctcgcagcacttgcgcagctccttggggtacttgccgactgcgggagcacgtgttcccccaggccacaccctcagccgggggccggcagcaggagggacgcgggacggacc

SEQ ID NO: 212812 - DNA, 122 bp, Homo sapiens
tgtggagaggggatgcagtgagcagaactggtccagatcacagctaggtatgtctggcttcgatcaaataccgtttcaaaccaaagcacatttatgaaatccttctgattatacataaaaaa

SEQ ID NO: 212813 - DNA, 122 bp, Homo sapiens
gaggcggcccgagtccctgctctgccccggtcccgcagcccttgctgtcgctgaacctcgcggacttcatctgtgcaatgggcaccaaggcttcagcctcgcaagatgccgagaggcaagag

SEQ ID NO: 212814 - DNA, 122 bp, Homo sapiens
gagcgggccggggcaggagcgtcgggtgggtcggaggtgcctggaccagtccatgctggacgctgcctgcgaccggatctgctgtgtcagcgccgccctcggtgagtcagggcaaggctggg

SEQ ID NO: 212815 - DNA, 122 bp, Homo sapiens
tgtgcatgccagggaaggccaagctggctcaaagagcaaccagccacctctgcaagggtgcgcctggaccagttggactagccaccaacctcacccacagaaggaagcagggatgaccaggt

SEQ ID NO: 212816 - DNA, 122 bp, Homo sapiens
ccagcccagccaccgcgctcacccagcagtgaagggagaatctccctccactcacttcaccgcgggagagattagagcgacactattattttgagacagggtctcactctcttgcccaggca

SEQ ID NO: 212817 - DNA, 122 bp, Homo sapiens
gggcgggggctggggtcgcgtggccagtacctgggagaaccgccattcaggagaaccccccgccaggctcttggttccgcccacgcagtcccgccccctcccccagccacgcccctcgcccc

SEQ ID NO: 212818 - DNA, 122 bp, Homo sapiens
ataggaaacagcttcctttagcataagactcgctgttttctccagaaccatgggttgctccgtgacgtcatggtttctcatcaggatacagttccagcgtcgcacaaacccgaaggaggagt

SEQ ID NO: 212819 - DNA, 122 bp, Homo sapiens
caccggccctgccgccatccccccaccgccgcacgggaagcggaagtgggtgcgggaccgcggcgcgcccagcccggccagctcccgcgcccagcccggcccttgaattcatctttttatgg

SEQ ID NO: 212820 - DNA, 122 bp, Homo sapiens
attactgacaccttgagaacatccaccaagttgaggatggtgaaagatacctaagtcactcgaggaaagcaggttggtacaaagtagaaaaattacaccaggttggagaacaagaccagcag

SEQ ID NO: 212821 - DNA, 122 bp, Homo sapiens
attctcaatactgttcctcctgagaaacaaattttctgggctgttttggtttaggtgtggcgtggccctggggacgcatggctgaggcaggaacaggtgagccgtcccccagcgtggagggc

SEQ ID NO: 212822 - DNA, 122 bp, Homo sapiens
aaagtttggcttcatttcttggtagttaagagtatgggtaataaggagttatatgtctgccgtgttgctcatttaaaaaaagtatttattgaataaggctgttttttatcacaggcataaaa

SEQ ID NO: 212823 - DNA, 122 bp, Homo sapiens
ggcttcagggtctctaggtaagataatatattgctttcattaaaaagcaatctgcatggacgatatccaccaccactggaaactctgcagttgtcacctttatcaggggaacaagagcaagc

SEQ ID NO: 212824 - DNA, 122 bp, Homo sapiens
tcctctttcaggatcgttaagcgctcaattcgtttctcgtatttctgcccctttatcacgcgatctacataaatgttaggaacgtggatgtcttctggggggaaagcccccacctccacgat

SEQ ID NO: 212825 - DNA, 122 bp, Homo sapiens
gccgccggcgggtacctggaggcgcagggggaagccacgggaccccaccccccgcacatgcgagctcagcagattgtgggtaagcagtttcatgtcgccgcacaaactctcgccaggccgga

SEQ ID NO: 212826 - DNA, 122 bp, Homo sapiens
catcttcctggtcccggctgccatgatgggtgcctttctctccctgctctgaactttcatcgtcttcctcatgggagccggggtcctcttccttctccttttcctcctcagaatcatccttc

SEQ ID NO: 212827 - DNA, 122 bp, Homo sapiens
gggagtcctggtccaatggggcccgggggcggggacttcctcccatctctgtccagcatgcgtgtactcctcgcagttccatctacctcgcgggtgcctctggtgtctccagaggtctccga

SEQ ID NO: 212828 - DNA, 122 bp, Homo sapiens
ttataacctaccttccaatgaggtacctaaaacatggtgaatcagatttttccccatatacggatatgagtgaatgcccaatctatgatagaatttcctggagaatttctatgggtttctca

SEQ ID NO: 212829 - DNA, 122 bp, Homo sapiens
gcattatgtgccaccagagacgggggcagaggtcaagagccctcgagggctgggagagttcggaggatagaagtcatcagagcacaatgaagccagaccctgcagccgccttccccttcggg

SEQ ID NO: 212830 - DNA, 122 bp, Homo sapiens
gaaggatgatgaggaacgcctgagagggggatgggataaaataagaggatttatgcaaaacgagcagctcagtacctagaaggcaggagcccctcacgcatcaccaccctggcctcatctcc

SEQ ID NO: 212831 - DNA, 122 bp, Homo sapiens
gtgccgcgctgaggaggcccagggaggaccgcgcggaggagaaccatgctgaggagcccccggggagaacagaaccgcggcgagaggcccccggagagaaccgcgccgaagaacccccgggg

SEQ ID NO: 212832 - DNA, 122 bp, Homo sapiens
cgcggagtaagccgatccgtaacgtggactgcggtttggtctgtaccgcgtttgggatctcggacttgcgtcccctttccgagcatgcgcagtcgtcacactgccaaaacaaaactcctact

SEQ ID NO: 212833 - DNA, 122 bp, Homo sapiens
gcggctccggaaaggcgagggatcggctccaggcctcacccccggtaaataccacttgaacgccagtggtctgcacaggaagcctggccacactgcctcctgtgcatgctccttccaggact

SEQ ID NO: 212834 - DNA, 122 bp, Homo sapiens
ctttcttggaacccggtgtcattgctgaatcaggggccactatgctcagagtaaggaacccggggttgcccttgtgttaaacaagagctaattgaataacagcctaggaccccctccatgct

SEQ ID NO: 212835 - DNA, 122 bp, Homo sapiens
ccggacccgagcctcttccaggctcagacacgggaagggaaccacgcctggagccagacccgagcctcttccaggctcagacacaggaacattctcggagccggacctgagcaaccgccagt

SEQ ID NO: 212836 - DNA, 122 bp, Homo sapiens
tccaccgtccgccgccccagcgccaaccaatcatggcgtcctctttcctcgcctgcccggcgaacatgacgtcacgctgtcgttcgcctataaagaagagaccgcgtcagtctcggcagcga

SEQ ID NO: 212837 - DNA, 122 bp, Homo sapiens
tgcgcctgaggctgttggctgcggtcttgaaacgggctctgggagcttcctctgcgcggtcggccctggctgaggcgtcccgggctgcgcgcggggctcggcgctgcgcagtgtccggtgtc

SEQ ID NO: 212838 - DNA, 122 bp, Homo sapiens
atttcgaagctgaagaggttaggcgacgctgacttgctttcaggagaggcactcggtaatcgagaagaaccggctttcggccagccaggagtggccagaggcctagaaggggagaggaaggc

SEQ ID NO: 212839 - DNA, 122 bp, Homo sapiens
cagtctctggggactttctgttatgtggttgtttttactagaatttgaaaagggcatcaccgtccctgatctgatgcttgttacagtcgccgttcaggtcttcgtgtctacacaaccacgcc

SEQ ID NO: 212840 - DNA, 122 bp, Homo sapiens
cagagttgaaagccagggccagagagagcccccagaacattccacaggggctgggcgggccggcccagggcctgcctatggcctgaaagagaaaacctgccacggagcccgggcttctctga

SEQ ID NO: 212841 - DNA, 122 bp, Homo sapiens
gtcctctccccgacttggcctcaggttttggggggcctctatagtcaagtctgtcctggtcgtcttccccactcctgcccataccatcccggctttcccctgcctgcctgtctctagtttct

SEQ ID NO: 212842 - DNA, 122 bp, Homo sapiens
cgaccgggcccccgtccttcctcctcaggcggtcctgtggaaggtgcggtgctgatggaacgtggtgactgggaggtggcataaaagcagccactgtgctggttttgtgggacctctcctcc

SEQ ID NO: 212843 - DNA, 122 bp, Homo sapiens
caggctaccatggtctacaagactctcttcgctctttgcatcttaactgcaggtaattggcgccatcctcccggaagggcaggtcgcggggtgggccccagtagctagcgcgtggtcggggc

SEQ ID NO: 212844 - DNA, 122 bp, Homo sapiens
taccagaggaacttccatccctctgcagggagacttgcctgaaggctggaaggccattgccgaggaatcagctgcagcctctgcagagtggctgttgggggtgtggtgtgctttgttttctc

SEQ ID NO: 212845 - DNA, 122 bp, Homo sapiens
cttcctgtaaaaggattgactatctatgctttttgccatgtgacttgcaatactgccatacggagaattaatacataatcttcccattgactatgggcttagccataggacttgctttgccc

SEQ ID NO: 212846 - DNA, 122 bp, Homo sapiens
acccagagtatgtttaccttaactcgcttatggtattttaacacgtctgatgtttgggagcgcccttcctcacaggctggggtagacataacaggagattcagggccttcggtctcgtgtgc

SEQ ID NO: 212847 - DNA, 122 bp, Homo sapiens
cggcctcgccctgcctcattcttggccttgtggaacggatcataaaaacaggaaccgctgcgtggtgttactgtgcggtcgctgctggctgggatgggccctcctaagaaggaatccgttag

SEQ ID NO: 212848 - DNA, 122 bp, Homo sapiens
agtaaacatacggtccgcaagggtttgcttttttgacctgggcgaagtgtgttgccaacacgcacttggaccagactcgagacagcggccactcggccaggtcccccggggtccaaaccgat

SEQ ID NO: 212849 - DNA, 122 bp, Homo sapiens
ccggtgccactactcctcactctgtgttcacctcactgtagaaggtcataaatgcttcctcggtgctgcctccgccgcctgaagtcccgctctctcctgaagccgccatttccccggcccag

SEQ ID NO: 212850 - DNA, 122 bp, Homo sapiens
gcaaagcgcagtggcccagcaccatgcattgtctggcttacggcattgactttggaaaagcgaacttactttccactggccccccacggagatggggcttgggcggctttagatgagttctg

SEQ ID NO: 212851 - DNA, 122 bp, Homo sapiens
ctcaggcctcccacctccactgcacatatcctgtgggagggggaacggtggccacactttcgccagggcttgtgatccctcagagccctcaccaagcaaggatcaccccagttccgaattaa

SEQ ID NO: 212852 - DNA, 122 bp, Homo sapiens
cagaaactcccccactggccagaggttgcaaacatccggattggctctgggcacagtggccgccttaagtcctcctgaacaccccttctgcaagtaccccagggcggtctcctgacccagag

SEQ ID NO: 212853 - DNA, 122 bp, Homo sapiens
tgcgcgtctttctggggcgtggtgcgcaggcgcggcctgggcagtggctccgtggctagtcgtggggatccgagcggcctcctccacccggcgtcctcctttgccttcgcccagcctgcggg

SEQ ID NO: 212854 - DNA, 122 bp, Homo sapiens
gcatccatagacctgtcaattagccctctccctgtattctgattcatttccagcagcagacgtgccaaagactggcaggaactcagggaaatatatcctgagcacaggtggtatgttgaata

SEQ ID NO: 212855 - DNA, 122 bp, Homo sapiens
gttgggaatgaaataattcaaatgtccttatttaaagaaagccaaacaagacaaacttcccgccctatccttagggcagggatgacaagttaagttgacatcaagattaacagatgagcatt

SEQ ID NO: 212856 - DNA, 122 bp, Homo sapiens
ttacataaatcttcactccaagtcttgggtgtcagcctagtggggtggataggcacaatacgtctacatcacctgggttcaggtcccagctctgctcattattaggtgtacagtcctagaca

SEQ ID NO: 212857 - DNA, 122 bp, Homo sapiens
gagttgtaggagggacagactgaaagctgtctgaggcggcgataggcattcctggcgccgcgcgcggcgcattgtgggagatgtagttcagctcctcagggcaagccggtacgcagaaggga

SEQ ID NO: 212858 - DNA, 122 bp, Homo sapiens
tctccctgggaagtgcacccccatccatagcatggcatggccccgtgccgcccctgagagcgctgttagccactcattgtccccatccttgaaagcagccaagtgcaacttctcagaattca

SEQ ID NO: 212859 - DNA, 122 bp, Homo sapiens
gatcataaatgtacacctaggcctttaccaacttgttttaaataagattttaatataaaacggcacccaggagaaatagcttacagaagctgagttatttatttgtgtcaagcagatttcaa

SEQ ID NO: 212860 - DNA, 122 bp, Homo sapiens
ttctgaacttctcggctctcggcagcggctgtatttcctctggcctggttgggcttttcccgcctctggttgcttttctgcctttctagtttttgggttaccagatagaaggcttggcctca

SEQ ID NO: 212861 - DNA, 122 bp, Homo sapiens
ggcattcagtgcacacaccatgttgtgcaatcactacctcgatctacttccagactatttcgtcaccccgtaaagacgctccgttcccatcagcggtcactcccccttcctctccccaggcc

SEQ ID NO: 212862 - DNA, 122 bp, Homo sapiens
aacctggcgcgcgggtaggtgagcgcgttagcccgagtggatctaggcgcgctcgtaggccggcgccgcagcaaggggcgcgggctccgccggcaccatggagcccgaagcggcggccggag

SEQ ID NO: 212863 - DNA, 122 bp, Homo sapiens
attagctacatgattacaaattatggcttaggagccatgcagctggtggccacaagattccgaacctcctcagttgttcccagggttaacaccactctcctaaaacctaagattggtgctca

SEQ ID NO: 212864 - DNA, 122 bp, Homo sapiens
agttgtttttgtctttgtagtgaaattcaggttgcttttccttggcattcattccctctacggtcattcttccaggattgtctgtgttttccgctattgaaggagaggcaaacaagtatgta

SEQ ID NO: 212865 - DNA, 122 bp, Homo sapiens
agatattttgcttcctcaccacacaagctcaccacacaatgcagggttcttagcctgcatcgacttgatcataactcaggaaaagacagatattggtcaatatttccttccaaaagtggaga

SEQ ID NO: 212866 - DNA, 122 bp, Homo sapiens
ggggatcctttattcctggtgggtgcccataagagtttgcaaactatacccaaaagggcacgggaacccctaaactttccaggctgtcttggcacacggctcactagaactgttaacgccgt

SEQ ID NO: 212867 - DNA, 122 bp, Homo sapiens
cgcaggtagagagtaattacgctgtggagagaaggacctcaacacacaatcctcaacacacgcccagtctttgtcctaatccaagtacaatctgcaacagtgcctctcagagcggcacacta

SEQ ID NO: 212868 - DNA, 122 bp, Homo sapiens
cagtttgaggagccaccgctgggggcacagacaccaagggccacacagccacctgacttgcggcccgtggagacattcctgacaggagagcccaaagttttgggggtaagaacagcctctct

SEQ ID NO: 212869 - DNA, 122 bp, Homo sapiens
tgaggtgcgcggcgcgcttccctacgtcactcggagcgccggcggaaacgagacgagcctcgccccgcacgtccggaagccacgcctccagcttccggccacacctttcggcgggtgacatc

SEQ ID NO: 212870 - DNA, 122 bp, Homo sapiens
aaaagaggagtaaagacccctcagctgcagcccggcagcgcattcctacccagggtccgccgccagagctttcccgcgcggtcggatagttacactactgtccgggacttcctagccgtgcc

SEQ ID NO: 212871 - DNA, 122 bp, Homo sapiens
ctgcctcattcctccgccccccccttacacgtttgcacgcgcttttcacgtcctcccccccgccgccagcacgcaccgtgcacgccctgcccccacgctcagagctccgtggcacgcccccc

SEQ ID NO: 212872 - DNA, 122 bp, Homo sapiens
ccgggagctgggttataaaatgccgggttaagcggcaactcagactcaggatcccgctcacgacatggcctcgggcgctcagctcccgccgcagccgtcgagctcagaggtcagcgccgtcc

SEQ ID NO: 212873 - DNA, 122 bp, Homo sapiens
gccttctttctcgtgctccttctcgctctcgccatccctcggcatactctccctctcctccgagtcagagtacccctgaggggtaatgctctgcaagtaagcccggttcatcagcagctcgg

SEQ ID NO: 212874 - DNA, 122 bp, Homo sapiens
gaagcctccgggtgggcggggcatcggcctaaggccaagggcggagccaatgagaagcagcgccgcgttcccgctgccccccgcccccgtggggcgcgcgccggagccacgggcagccgtta

SEQ ID NO: 212875 - DNA, 122 bp, Homo sapiens
tgttaggcttctccatcgaatcttctttctccccatttccacggagaaaagcccttagttcgtccagaaatgagtgatgaggcagctcagcctctctgagaaagacctgggttcaaatgcca

SEQ ID NO: 212876 - DNA, 122 bp, Homo sapiens
tgagtcaagaagcagatgaaaaaattatcaaccttctgtctgattcataatgactatcaccggtagtcatttattttgtatgatttgtctataaatcatacaaaataaaactgacaatggtt

SEQ ID NO: 212877 - DNA, 122 bp, Homo sapiens
ctccagcctctcactctcactctcctccgctcaaactcagctcacttgagagtctcctcccgccagctgtggaaagaactttgcgtctctccagcaatgcatctccttgcgattctgttttg

SEQ ID NO: 212878 - DNA, 122 bp, Homo sapiens
ctcctctcctcctcaagggctttgttcagtgaggccttccccagccatcctgtctacaaccgtacctcccttggtggcactccccaccccctgccctgcttcactgatatccatagaactcg

SEQ ID NO: 212879 - DNA, 122 bp, Homo sapiens
tatacccaccatctcccaaatggcagagcaaaataaaagcaaaaccttaccaatatgccacgagttttgaggcagcatcattatgggtctatctcttcctgagtcctgatgtaactcctggg

SEQ ID NO: 212880 - DNA, 122 bp, Homo sapiens
gctgggattacaggtacatgccatcacgcccggctaaatttttgtattcttagcagaaaccgggtttcaccaccttagccaggctggtctccatctcctgacttcaggtgatccgcctgcct

SEQ ID NO: 212881 - DNA, 122 bp, Homo sapiens
gaaccaagactaaagtccacctttcttgcatcatgctcattcccaggctattcacagggtcgtttcattaaatgctatgaataaatggtatatttgaatggccaagatattttccaaccatc

SEQ ID NO: 212882 - DNA, 122 bp, Homo sapiens
caggcctcgggaagatgttctttgtcaaatgaagcaaagcagtggccacccctgatctcccgctgcctggcccacccacatgtgctctgtgtcgccactccactgctctttctggatatttt

SEQ ID NO: 212883 - DNA, 122 bp, Homo sapiens
tgcttccaaatgcatagagcctcccttactgtttctgtgtgtctctgtcctccagatgtacggggaccctctatgcaccgaacccaatacgttcattccccgtatgatcgtcctggttggaa

SEQ ID NO: 212884 - DNA, 122 bp, Homo sapiens
ccgtgtcctggagacgcggcaaccgtggtgaccgcagtcaacacagtaagccccagcattcgcattgtaattgagctcattcaagctgagcgctctccagtagggactttcccctgtaggga

SEQ ID NO: 212885 - DNA, 122 bp, Homo sapiens
tgaccacatccacacacccagggtgacacagggtgtgtgacgaggcccacagatacatgccgatttgcaggggcacctgcactgggtctggggagccatcatcctccacaggagacagcgac

SEQ ID NO: 212886 - DNA, 122 bp, Homo sapiens
gggcacttcccatgtgccaggcactctctgaagtgtttgttcactcactgaatcctcacccgcagctaagcagagggtgcaaggctgtgtctgtattgtatagtgagatgtcacccagtagc

SEQ ID NO: 212887 - DNA, 122 bp, Homo sapiens
cttcccacccacctgaaaatgttccccagttgccaaatcagaagggcaggggcagcgacgcggaagatgactcagggcccactttgaacctcctgggtacttgagcaagctcaagggtgttc

SEQ ID NO: 212888 - DNA, 122 bp, Homo sapiens
tgagccaagtccagcctggacaacagagaccccatctcaaaaaaacaaacaggccagttgcgtggctcacgcctgtaaacccagcactttgggaggccgaggcgggcagatcatgaggtgca

SEQ ID NO: 212889 - DNA, 122 bp, Homo sapiens
tcaggccaggctgagggaggccaagcaggttccatctcaggacccatcaccaggtgtgcccgtcatggaactttcaatcaaaaaggcaggagaggcccaaagtacacctggtgctttgggag

SEQ ID NO: 212890 - DNA, 122 bp, Homo sapiens
cttgcggatgcggcaagtggcggtgacgtgcggccgcgggaatgacgttggccgcggccccgcctcctgctttcgcggcacttgactggcttcccactatcagctgacggccgtgtgctcat

SEQ ID NO: 212891 - DNA, 122 bp, Homo sapiens
cggcccagagccaatctcctggcattggctcctcctccctagagaaaggcagagcaggcccggtccggtggctcacacccggaatccagcacattgggagttcaaaaacagcctaggcaata

SEQ ID NO: 212892 - DNA, 122 bp, Homo sapiens
ctggagccttatattccgcggcccaagggtaggagggataggacccgaccccgcccccttcgacatccagattctgcccctctaggacccggcacgaggctcccggaaagaggaggagtgaa

SEQ ID NO: 212893 - DNA, 122 bp, Homo sapiens
tttggtttcatcaagaacctctccccaaataaatgttcccaagcgattgtttcatgatatcgtccagttaatttgtagcagagctagtgtgtgattttaactagctctgtaaccctggggca

SEQ ID NO: 212894 - DNA, 122 bp, Homo sapiens
cctcgaggcctcaccgccagccagctcccgggccccacaagctcagatgaaacctggccacggagccaccaatcagggtctgtgccaggctccacggctgggcaggtggtcagatcagggag

SEQ ID NO: 212895 - DNA, 122 bp, Homo sapiens
ataaagcagatggggaaagacttcacacagaaatctactctgatttagcactgggacctacgttttaaaaaaagtattcttgtagaatacagataacataaaatctaacatcttaaccatgt

SEQ ID NO: 212896 - DNA, 122 bp, Homo sapiens
gagaaaacagaactccctgtgttcgtgaaaatctatactttcccagggaagaatggggggcgggggcgagccacgcaggaaacaattttcaacagaactcaagcaggtgaacggaatggctg

SEQ ID NO: 212897 - DNA, 122 bp, Homo sapiens
ggcaaaattcggttataaagggctcgaggcggccgggcggggaggctagtcagggaggctcgaggctgaactgcaggcttcacgttaaagttacaagtgagttggacccagaaggcagaatt

SEQ ID NO: 212898 - DNA, 122 bp, Homo sapiens
tcttctgacagaagatggggaagatgaggaagacagtggctttcccagatgccttaagaacgctgaccctgcactgtgctcggctgaatgaggctggaagcagccaagcccgggcagggatc

SEQ ID NO: 212899 - DNA, 122 bp, Homo sapiens
cctcttgccccagctttccccttccctgctggtttaatgccgtctctggtcatggggctccgtgcctggtcctgtgtggcgtgaaggcttcccaaacctgcccgccggagagagacatcccc

SEQ ID NO: 212900 - DNA, 122 bp, Homo sapiens
gttacccctcggtttttaacctttcggggtaatgggaaggaagagcaaggaggaaggggtcgccccggggcaaaatcctgctggggccaggatgtgcaaccacccacccacccgctcatcac

SEQ ID NO: 212901 - DNA, 122 bp, Homo sapiens
gcttgcgcagctcaccaatggcagcggtgctgggtggaggggtgcccacatccaagatggcgtccccaggagctgggagcgggtgaccggcggcggggaagcggcctgggttggccctcaga

SEQ ID NO: 212902 - DNA, 122 bp, Homo sapiens
gggccgatgggcggatgccagagccagagcaaaggcctcgttagcccctcggggagggcacggcagggccgggcgactcaggagggctgcggggtgacgtctgattgagcctggaaggacag

SEQ ID NO: 212903 - DNA, 122 bp, Homo sapiens
gacccaagcccggaggacatagccagggcggacaacatcttcacggccactgaacggaaccgcatcgactacgtcagctccgccgtccgtatcgaccacgccccggaccttccgcggccaga

SEQ ID NO: 212904 - DNA, 122 bp, Homo sapiens
agtggctcacgcctcctgcatacgggatgaggtgagcagcgccgctgctgagagggggcgcgcgcgggtgtgagcgtgtgtccgtgtgcgagtgtgtgtgcgccgggcgggcgggcactgca

SEQ ID NO: 212905 - DNA, 122 bp, Homo sapiens
gcctggaggctggtgtgctatacagttcctgcatcagtgccatctctgtcccgagagtaccgctgctgggcagatatatagccaggctcctacccagctccctggcacacacctcctttttt

SEQ ID NO: 212906 - DNA, 122 bp, Homo sapiens
tatctttttcatttcatgcttgcagtcttcaaggtctctctgggtctgatactgaagagtcgggatgcctctatctctctgtggccatctatgtggacacagcacatgccaaaatgaagagt

SEQ ID NO: 212907 - DNA, 122 bp, Homo sapiens
gcactcagttcccaggcctgcctgcatggagctgtgggagagcccagaacactgagaacccgacaggcagactgagcatctttgacacaagcatctcatcagagggggcaccagggacagcc

SEQ ID NO: 212908 - DNA, 122 bp, Homo sapiens
tcagctctgggattggggtcctgagtgatggagcagacggaagccccctcgggagtccagcggcccgggtcgttactctaggactaaagtcctcacggatgaaaaggcttaatttttcactc

SEQ ID NO: 212909 - DNA, 122 bp, Homo sapiens
tgcctatgtggaggacgccatattggaggcatggaatgcggcctgccgtaaagacagaggcgggttgttaagtatactctctactttacggcgtacccgagaacgcccccgcaggggcggtg

SEQ ID NO: 212910 - DNA, 122 bp, Homo sapiens
tgcgagtggtgaggaggaaccccggaccgcaccatttcacatgaagtggcaggcgacatgcgagtgctgaagaggaaccccggacgccaccatttcacatggaagagggaggcgacatgcga

SEQ ID NO: 212911 - DNA, 122 bp, Homo sapiens
tcatagatgaagactgaggggggcaatattcacaactgtgtgatgaggaagagaaattttcgtttctattagttttgtattggtctatgcagactgagaatttttttgtttatgaatctgca

SEQ ID NO: 212912 - DNA, 122 bp, Homo sapiens
tttagaatgtccaggggcacctgggttctctacgacttccctggttgtgctgtcccacggcgtctccaggttggtgacactcaagcactacaggaatacgtgatggtgtcctctgagaggca

SEQ ID NO: 212913 - DNA, 122 bp, Homo sapiens
gggagaatgcgccgacacctcaaggtgagagagtagaaacagtctccgccgtgggagccgcgcgctgctcaggtggctctttcccgctcaggtgagctcctcccgcgcctcccattggccga

SEQ ID NO: 212914 - DNA, 122 bp, Homo sapiens
ccggggcgggggtgaagagggaccccacccagctggcccaaggcaatgcctccttacacccgcctagaataggatcctaagcctagaatacactgcgggtgcagcctgcccgctgcatgaag

SEQ ID NO: 212915 - DNA, 122 bp, Homo sapiens
cacacacacacaacatgtacagaagggctcttatctgaaataatcaataaatatcaaggacgtgaagatgtcatgcaaggagcaaagggggaaagtaaacataaggaaaatgtacaaaacct

SEQ ID NO: 212916 - DNA, 122 bp, Homo sapiens
tctgggctctctccagtcttcggtggctgcgggcgtgaaagcagctgcaggtgcgaaagacgtctacctgtgggacgaggtgctggagctgcccagccctacctgaatgacaggatctaaac

SEQ ID NO: 212917 - DNA, 122 bp, Homo sapiens
gaagtgccagactcctacttcccaccggatgcggggctcggcaggctcggcaggctcctccgcaggccacacagccggcggcacaggcctcctgcggggaaccccaccccaccggccagccc

SEQ ID NO: 212918 - DNA, 122 bp, Homo sapiens
ggccccccgaattgcaggaacaaacgcttcttgctggggggaagacggagactcttataccgcgggagactaacctgtgagcaacagaagcaccacgctacaaagagcatgacgagttcttc

SEQ ID NO: 212919 - DNA, 122 bp, Homo sapiens
acctgcaaggcaaagcccatgcagctctctctttgtccctcgcgtccagctcagggcactcgagttcagggtggccttatacaggggcaaggccaggggtcatctccacaggctggttcaag

SEQ ID NO: 212920 - DNA, 122 bp, Homo sapiens
ctgggacactcccccggaacgattgttcaagtcctggagtacgtttcggaacgctgctcccggaacaccgctcctggagcgattgtttcaatgttgcttgctcggaatggccctcctgagca

SEQ ID NO: 212921 - DNA, 122 bp, Homo sapiens
tgttttccattgatggcagggtaacgcatagccttacccccacaaccgcaaccacgagtccgtctctcaaaacagtgtgctgcgacggctcctgcatttgcagcttccctgtgtgttgccca

SEQ ID NO: 212922 - DNA, 122 bp, Homo sapiens
ataatctttttctttttgagatggagtttcgctcttgttgcctaggctgaagtgcaatagcgatctcggctcaccacaacctcggcctccccagttcaagtgattgcctcagcctcctgagt

SEQ ID NO: 212923 - DNA, 122 bp, Homo sapiens
cagatactccgtggaaagactgcggggtccaggttgcagagcgggtgccttccacaggcacgcaagcctctatctgcacacccagcaatctcctggggccaggacacacttgctcacacggg

SEQ ID NO: 212924 - DNA, 122 bp, Homo sapiens
cgagcgctggcggaagagaggctcagcgcagggggcgcagagccggcgctggccaatatgcgccgcatgtgatacctttgagggcgcggcgggggagggtagcgtcaaatttcaaaaaaaaa

SEQ ID NO: 212925 - DNA, 122 bp, Homo sapiens
ctgaaatgaataaaaccaaactgtcaggagctgcctcgggattgcttactccagacttcgcggggttgtgtttccctcagccgaggtctctcctattcggctcagaataaacttattctaca

SEQ ID NO: 212926 - DNA, 122 bp, Homo sapiens
atgagtgagattattgaaagcatttagcacagtatttggcacacagagttcaataagtgacggttatttgctcacaagggaacctttacatactatccctgccctcaagattttataatcta

SEQ ID NO: 212927 - DNA, 122 bp, Homo sapiens
cccgcgctgatttaggagccgggattgcggtggcagcagccggcagccaggctggcccggcgcggcgcggcggccactggggtgggcggcggcgaaggcggcggcgagggcgggcgcccccc

SEQ ID NO: 212928 - DNA, 122 bp, Homo sapiens
tgtttaccgggaaaggtgttgagtgagtgtgagtgtgtgtgtatgtgtgtgtgtgttttgcgggagagtggtctggaaaggaccacagccagacaagtgtggagatctgcaaagggtacatg

SEQ ID NO: 212929 - DNA, 122 bp, Homo sapiens
accaccctcttcccccagtgctgaatagtcatgaggtccccaggtacttgttatttctggcgagctagtgagctgagtacacaagtccatggctgggggatagatatattccagaaaactct

SEQ ID NO: 212930 - DNA, 122 bp, Homo sapiens
tgaagcacttggtctttggctgccctatcaccaccctaaggcacgtagaaagagggctctcgctttgcccagtctgttcaccaagatccttttcaaattggtgaggagggaggtttgtggaa

SEQ ID NO: 212931 - DNA, 122 bp, Homo sapiens
ctgcccctttaaggaggcgttgcaacaaaccatattggacagacgatgggggcgacccatcgggacccgacgggcctctgactccagcaatacagcgaatcagcggctttcgggaatacatt

SEQ ID NO: 212932 - DNA, 122 bp, Homo sapiens
aagcgctctgcctactgccgggaggtgacacccgcgaggccgaccgtcccccgaagcccccgcaagtccagactgggggacctcggagatccacgagattgccagagaaggaaattgaggcc

SEQ ID NO: 212933 - DNA, 122 bp, Homo sapiens
acgtgagaatgcagattagaaaggcggtaacaccacgtctgaggggaacagaaagggtcgcggcacgctggaaagcagtttggtgatgtcacatcaagtcagcagatgtcttacgtcccagc

SEQ ID NO: 212934 - DNA, 122 bp, Homo sapiens
taagccaggcaaggccccacaatacccaggctgtgtccaagaaggacaccgacgggaactcggagaggccagtgtctttggtggggaaaggctgctccctggtggtccacaggggcagtgcg

SEQ ID NO: 212935 - DNA, 122 bp, Homo sapiens
gctgcgagatattcagggcagaagttacgataactcggggcggaaatagcttctgcccagcgactgggaagaggggatgtgacgctatagcggaagtgaaggcgggttccgctaggggcaaa

SEQ ID NO: 212936 - DNA, 122 bp, Homo sapiens
tcgtccgcggcggagcgtttgctcctgggacaggcggtgggaccggggcgtcgccggagacgcccccagcgaagttgggctctccaggtgtgggggtcccggggggtagcgacgtcgcggac

SEQ ID NO: 212937 - DNA, 122 bp, Homo sapiens
acttagccaaagtcttaatataggagatgaatgtgaattaacattcaaaagacagaacagcgaactgatcaagtttgaaggaaccttagcagtgatcaaattcctatccttgcagatgttgc

SEQ ID NO: 212938 - DNA, 122 bp, Homo sapiens
agcaaaagaggaaacgtgggtggtgtttcagtagcaattgtttttactgccattgcagcacggaggcatcccctcgccactgagatcgattctgcctggaagtggaagacaaagtgcttgag

SEQ ID NO: 212939 - DNA, 122 bp, Homo sapiens
gattgtttctgttctcccgcgttcccagagctttcggcgcattgctcaacacacggtgtgcgtacttgttgattttaatgtatgtgtgtttgcatatgtgcacagcagctgggcggaggacg

SEQ ID NO: 212940 - DNA, 122 bp, Homo sapiens
gacgcacttccggggccgccttcgtttttgtcgcgcgaggttttggtttgtgaggatcggcgagtggcgcccaccatctctgcttgctgaaaagctgcagaggccgccaggagcccacggtg

SEQ ID NO: 212941 - DNA, 122 bp, Homo sapiens
accccaccacgcctagcaaggcgccgaatggccggtttggtgatgccttggatgttatcccgcagcacttttcggtgacgcttggcacctcccttacccaaacctttaccgcctttgccgcg

SEQ ID NO: 212942 - DNA, 122 bp, Homo sapiens
tgtaactggacccagtggacaggggttgtgggaggcaggagatgaggtctaccgggcgggcgagggcctagaccatgcagggcttgcaggtcttgggaagagtttggattttattctaaggg

SEQ ID NO: 212943 - DNA, 122 bp, Homo sapiens
aaagcaagcaagaaagaaagaaagaagaaggaaagaaaaaaagaaagataatggctgaggcgtgaacactttacgagaaggaaacccacatggtgaatataaaaagcaacttggttttatta

SEQ ID NO: 212944 - DNA, 122 bp, Homo sapiens
aaatactcacagttaaatgccaacaatgaccacctgtttcctcaggttggtttaggagaccgtgaaaccctctactcacctccaattcccaattaatcacactcatggccgcttgctgtttc

SEQ ID NO: 212945 - DNA, 122 bp, Homo sapiens
cgtgggtgttgatgatctccgaggctgcctgtttagagcgtcccttccctgagatggaggcgtagcttcaccgtgtagtgtttaagctttaaaacgtgaaatgcagtgaggccgacagtgag

SEQ ID NO: 212946 - DNA, 122 bp, Homo sapiens
aagggctcaggaagttgagaaaagggatagagaacaactcagaattcagctgccctggcacggtccactcacaggactcccttggggaataaaaagaaatatctgagagacttcagtatgtt

SEQ ID NO: 212947 - DNA, 122 bp, Homo sapiens
aggcttaagtccggagaactgtcacctttccatctttgccattgggtctacgggtgtcgccggcatgcgggttacacttttaagcatatggatgaaatagagtgcatctaacacttgactgg

SEQ ID NO: 212948 - DNA, 122 bp, Homo sapiens
ttggcagccaggagggcaaaatgcactgggagacaattccttgctgactgtccaggcagtcgccaggggagcaaagggctcagcaagctggggagagaatgaggaagaaggtggagggagga

SEQ ID NO: 212949 - DNA, 122 bp, Homo sapiens
ccgtaagcggagggtgctgacccccaacgacctgaagcacttggtggtggatgaggaccacgagctcatctactgctacgtgcccaaggtggcctgcaccaactggaagcggctcatgatgg

SEQ ID NO: 212950 - DNA, 122 bp, Homo sapiens
gagtaaatttaaataccctgtgatgatgatgtgtcggctagatccacacagaccttttctcgttggcccgaggcagcagttctccaagtgtgctttgagaaggcctccgttgcctggaatgc

SEQ ID NO: 212951 - DNA, 122 bp, Homo sapiens
acacagacagctagtgtgaatccccgcccacagaggggcggcacgttggttgccgtacaacgtggtggttccctgcatctctgcccacgtcggagaggtgcgtcggcttccgtacaacacgg

SEQ ID NO: 212952 - DNA, 122 bp, Homo sapiens
gactcattcccgcatctcaggcagttatgggaatctgagctgtctgtacaaacagggggccgactgagagggacattatcgtggggatttgcatctttagtgatgagaaagcctatgatgca

SEQ ID NO: 212953 - DNA, 122 bp, Homo sapiens
taggccccccacacatccccttggctcagccctgccggggcccgaacccgcgccgcccgccgtgtttacattccacccgcgccagccacgcggctttttgccgctccagcgccgctcggccc

SEQ ID NO: 212954 - DNA, 122 bp, Homo sapiens
gctcgggcatggcaggccctgccccatggggaggcatctgaggccccacgagaatctgtgcgcggtggaccgcggcgcgtgcaggcccacagtgctgagggacccagcgcaccctccgcagc

SEQ ID NO: 212955 - DNA, 122 bp, Homo sapiens
gccaacgatggataggaggtggattgtgatgtattcggaacatgggaccttgaggagttccgtaaccaaaaggagaaagtaacaacagccagtggagacaaaaagaactgcttctctttctt

SEQ ID NO: 212956 - DNA, 122 bp, Homo sapiens
tccacggtgccagatgcaaagcttcagcctctgattgttggctggggacccaaaccttcacgtcctcaaaggtcagcacagcaatcaatgggctctagtcttccctcccaggcacttagttt

SEQ ID NO: 212957 - DNA, 122 bp, Homo sapiens
tagagctggatgtccacgtgggtgggtgggaagccctagagaggggcggctattcgccagcggccacatttagttggggctcaagcagttcctgtcagagaattctaaatttgaacttggtc

SEQ ID NO: 212958 - DNA, 122 bp, Homo sapiens
tgtgaggagcccctctgcccggccgcccagtctgggaagtgaggagagcctcttcccggccgtcatcccgtctaagaagtgaggagcgtctctgccctgctgcccatcgtctgagatgtggg

SEQ ID NO: 212959 - DNA, 122 bp, Homo sapiens
ccgtcatcatcaactgggttttgttaatgcttgagaaatgactctctctgtcaacctgggcgtgccataacggtatcatagacaagtcctttaaaaagtttgggtgtattctgttccaaact

SEQ ID NO: 212960 - DNA, 122 bp, Homo sapiens
ctggagaaaaaacttgtctaatgcattccagagccaaagagaaatgccttttggattacccgcagtttaggcctttctccacggctccccctctgctggggaagatcttggagagcaaggag

SEQ ID NO: 212961 - DNA, 122 bp, Homo sapiens
acatctccaggattttgcatctatcaggaagggatattgtgacctctgacaagttacagtcggcggtaggtatccatggagaattggttccaggaacctcctggataccaaaatccacagat

SEQ ID NO: 212962 - DNA, 122 bp, Homo sapiens
gctgtgggaagccgacctcacacctaacaaaatcgcagctccagaggaggggcctggaaacgatgttagtagtaatgggtgttgcttgcctttggattgctttagaaagatattataaggaa

SEQ ID NO: 212963 - DNA, 122 bp, Homo sapiens
ccttctttggaaatagggtcattgccaatgtaatagttaattaagaccaggtcatcctggcgcagggtgggcactcagtgcaatatgactgttatcctcatcagaagagaggagacaaaggg

SEQ ID NO: 212964 - DNA, 122 bp, Homo sapiens
gagctctttgctctcgaaagggatgcaagctaaggaaatagcgaaccaactaggccccagcgaccagaccatcgcctgtgaaaagggtatcaggaacccatgtgacgggatgggtgcggaga

SEQ ID NO: 212965 - DNA, 122 bp, Homo sapiens
agccagggcagctgcagcccgagcgaacagccacggagcatcctccgcccgcccgggccgcgccaccgcccatgctgcagccagtcccaggcagcgaccccgcggccgcagcccgccgctca

SEQ ID NO: 212966 - DNA, 122 bp, Homo sapiens
gtgtcaatgactgatgttccaagcagagccataagattgttggatgtcaaagctcagaaccggtcaaggctcagaatgctccttaaacctggagcaatagaagcacagtatcgaagttccca

SEQ ID NO: 212967 - DNA, 122 bp, Homo sapiens
tgcatatctacttctaggtactgatgatgccaaggactctttcataaagacaagcacattcgccaaagccccaaggcataattagccttgctctaaaactttcctaagtggccagaatctac

SEQ ID NO: 212968 - DNA, 122 bp, Homo sapiens
ggccctcacttctggcccttacagagatccaggcatccaacacccccatccctgcccaagcgtctgaggtgttagtggtggggggagaagcccaccatcccagactctggtaaatgtctttg

SEQ ID NO: 212969 - DNA, 122 bp, Homo sapiens
agttagcaacaagacactcctcactgtgcacgacatggtcgcgagcacggccatcaagtacgccaacaacatcgcgcccggctccaacagctgccacctgctcacctacatcgagtaccacc

SEQ ID NO: 212970 - DNA, 122 bp, Homo sapiens
ggcctgatggattgtgtctgcttccatatcactgtgcagccaatggtcctgcccacctgccgcttcccacacattcacccagggtctcacgcatggccacgtcctcattcctctcagaagtc

SEQ ID NO: 212971 - DNA, 122 bp, Homo sapiens
agcccacgccaggctccaggaccagcagagcgggtctgcgcggacagaggcactgggctgcgcccgtagcgcaccccaccaagaggaaggcgtgcctagtggggaggcggggctccaggggc

SEQ ID NO: 212972 - DNA, 122 bp, Homo sapiens
cttcactcctgagcccagtgagaccacgagcccactgggaggaacgaataactccagacgcgctgccttaagagctgtaacactcatcgcgaaggtctgccgcttcgctcctgagccagtga

SEQ ID NO: 212973 - DNA, 122 bp, Homo sapiens
gttccctctgaaagtgctgataatgatagcaggtatcttgggattgctttgagtattaaacgagttaatcgtacttagtacaatttctggacttagtttctagcacgtgggaagtgctcatg

SEQ ID NO: 212974 - DNA, 122 bp, Homo sapiens
cttatgtgtcttcaagctctttgcctcatccagccataagaagttgtaccccagggtaaccgaggctagggattatctacaggcccagaaatataagaagaacaaacagatcagcacattgc

SEQ ID NO: 212975 - DNA, 122 bp, Homo sapiens
gtggggctgggcgtggggcacgtggcacagagggatgcgcgtggtagggctcagggcagacggaacgtggaacagggagtggctcagggcatggggatggggcggggcgtgggacggggcgt

SEQ ID NO: 212976 - DNA, 122 bp, Homo sapiens
tgggggtgtggggggagaatggggtccggccagccagcggacgcggtccaggccagccgccggcacccacagcgaggcacaggtaagatgccaaggctgagttgtcatggaaacagaacaca

SEQ ID NO: 212977 - DNA, 122 bp, Homo sapiens
aggctgctcctctaagggcagcagcaaggagggtggggctggactgaaggtggaggggagcgtgtttgctgtgcttggtcatgagctgctgggaagttgtgactttcactttccctttcgaa

SEQ ID NO: 212978 - DNA, 122 bp, Homo sapiens
ctaggatgcctgtaacaccctgggaacaaatccgaacgttccttctaaaccaacgcaggccgactcgaggctctggctgtcaggggaacctcagcagaactgaagaagctttgctttgtttc

SEQ ID NO: 212979 - DNA, 122 bp, Homo sapiens
accagcctagaaaaacccagccgcgtcccaaacccgctcaccccagcaggcccttagagacgcttggagatccccagacacgccccgcggaaagggaaggaaatgccagcccgagttgccga

SEQ ID NO: 212980 - DNA, 122 bp, Homo sapiens
cgaagccccgctccccgcctgcgcgtctgtctcgtccgcatctccgcggtgagtcggcggcgccctcgcccctgagcccagggccagcttctctcgccgccgcggctgctgcgcgcgtcccc

SEQ ID NO: 212981 - DNA, 122 bp, Homo sapiens
caggatccgaggcctggggcatctgaatgaggaccctccacccacatttccacttgggagcgagctccagtcggggaaagggcctgcagcccgcctcgtccccaccctgggaccccgcgccc

SEQ ID NO: 212982 - DNA, 122 bp, Homo sapiens
tactcctgctggcgtcaccgcaaacatcctctgaccgctacagccagtgtgtggcgcaggcgtcatgtccccggccctgccacgcctggagccctggaagctggctgcagggcgctggcttc

SEQ ID NO: 212983 - DNA, 122 bp, Homo sapiens
gagggagtccctgtcagccccagcctgtatcctttgggaaggctgtcctaccccaggagccgaaatttttggcctctaactcctttctctcccagggacccagggtgctgtgacttcttcca

SEQ ID NO: 212984 - DNA, 122 bp, Homo sapiens
gccataaatcgtatcagtgaatggtacccctaacgggagctgaatggcaggctgtacagacggcacgggggtgctgtggcagtgaaaccaaagcaagaagtactgttgataaagttgagcaa

SEQ ID NO: 212985 - DNA, 122 bp, Homo sapiens
agccgccaaccatctcagaatgcgttcattgcctgagcctggatgccagcatacctgcggcgcggcactcggggcttgcgaggagactggcaagcacagacgccacgtcctatatctcccgc

SEQ ID NO: 212986 - DNA, 122 bp, Homo sapiens
ccgggcgctgagggtgtgagttggcttggaagtggcttttggggctcctgtatttttacccgcctctttccctcaccagtgtgctgcctagaaaatactccttcctcggaacgcggtgtttt

SEQ ID NO: 212987 - DNA, 122 bp, Homo sapiens
ctgtctctttacttccatcctttcccagtaaaagttccttttcattttattcaaagtgaccggatattttgcgcgtagtcactggggctcgtgctattggagaagcgttctggactgttaag

SEQ ID NO: 212988 - DNA, 122 bp, Homo sapiens
accccggtgccgggcacataggtgcagcctgagagtaagcagacctgggttggaaggtcccgcgattcaccaccgacaggatgggcggccttggcaacccccgacccctcgcaggcctgttc

SEQ ID NO: 212989 - DNA, 122 bp, Homo sapiens
gttgatggtttgaagacttaagcaaaaggaagagctgtgaggccaaggcaggttgagtgacgcagagatagagtatccctgccctgacaagaggttgggaaggtgctggtcttccactgtta

SEQ ID NO: 212990 - DNA, 122 bp, Homo sapiens
tttgaatttatggttgcctataaccagctggctctcggtttgtgtcttaaccaagaaatacgggaaacaaattgtaagccaggcagcctgcctcgcataatggtagcaaagacttcaccgtt

SEQ ID NO: 212991 - DNA, 122 bp, Homo sapiens
ttcacacatgggactatttttgccaaatgctgcacccctgggccgcaaagcagagagtcacgtttgtaccatctgtcctgtctcttcatcgggcagaacatcgaccatgtagaaactcacct

SEQ ID NO: 212992 - DNA, 122 bp, Homo sapiens
ctcaatggacactggaggacacacacgggagagaagccttacacgtgctttgagtgtgggcgaaactttagcctcaagtccgctcttagtgtacatcagaggatacactctggggagaagcc

SEQ ID NO: 212993 - DNA, 122 bp, Homo sapiens
gggcgcaaacaggtcgtgagggcgcaaacaggtcgtgagggtgcaaacaggtcgtgagggcgcaaacaggtcgtgagggtgcaaacaggtcgtgagggtgcagctttggggagagaggggcc

SEQ ID NO: 212994 - DNA, 122 bp, Homo sapiens
gcagagactgcctcggctgagggcgcgtgggtcgggggctccggaggagctgagggaagtcggctgacttgccctgaaggctgagactcgcccacccgccaatctacccctacacctcctgc

SEQ ID NO: 212995 - DNA, 122 bp, Homo sapiens
caccccaggctccggtcagtcaggcgtggcttgccccttgggagctcaggccaaggaagtcgggcagcccggatgtaagcaactgggagtctatggtagaaagcagtagaagttacaggtga

SEQ ID NO: 212996 - DNA, 122 bp, Homo sapiens
ccaccaccgggcgcccacggcgcagggcagagcaggtgctccgatccccgtttcacctgccgggcgcacacactcccgggcccatacccacgcccacgcgcccagcaagttcctggggtttt

SEQ ID NO: 212997 - DNA, 122 bp, Homo sapiens
cccaagcctcgttcaggatcctatccagggtctcccgttagcctcctctcatctataacacgcaccgcacccttttgcctttttaaaaacattgcccttttctgagcatccggagaggtgat

SEQ ID NO: 212998 - DNA, 122 bp, Homo sapiens
ggcagcaccccttcgtgcccatcctgtcggaccagatgctggatttcgtcatggcccccacgtccttcctgatgggctgccatctcgaccacttcgaagaagtcagcaaggttaggtagcga

SEQ ID NO: 212999 - DNA, 122 bp, Homo sapiens
tgcaccttgcttcttccacttgaggcaagcttgtccaatccgcagaccgtgggcctcaggcggtacaggactgctttgaatgcgtctcaacacaaatttgtaaactttcttaaaacattatg

SEQ ID NO: 213000 - DNA, 122 bp, Homo sapiens
aactgcactctttccaaattttcggatttctcattatctagcatttgaataaattccttccgaattaaagcttaaactatattcatgagttaaatggcattatgttagatgtatatagactt

SEQ ID NO: 213001 - DNA, 122 bp, Homo sapiens
caacaggcgtggacacctgcggcacttccagagcccggcagcctggacaggaagttacctcgctgttcccccccagggccacgccaaagctgtgctgaagaaaacctgcctgcagggaagtg

SEQ ID NO: 213002 - DNA, 122 bp, Homo sapiens
tggtcctgagactgataacattagtgtcacctgggagcttgtcaggaatgcaaattcctgcgccccacctgagcccactgaatcagaaactctgaatatggggcccagaaacatgtaatagg

SEQ ID NO: 213003 - DNA, 122 bp, Homo sapiens
ccggcaatggcggctaagggcggggccacagcccgccggccccgcccccggcagcagctgcgccgtctggctccacgcaggccccgcctccagacccgcctctaccgctcgcgctggccgcc

SEQ ID NO: 213004 - DNA, 122 bp, Homo sapiens
ctcatctcatgacctctgcagcaagaagtcgagaacttcaaaaaggtcaatatgatcagccgggagcagtttgacacactgacccctgagccccctgtggatcccaaccaggaagttcctcc

SEQ ID NO: 213005 - DNA, 122 bp, Homo sapiens
tctaacaatagtcctgtgagtaaagtaaaaccacagagttactctatgaggcgtttccaacgatgtgcaggctacaggaaaagccccatcgggatagacctcaaccactatttacaaggttt

SEQ ID NO: 213006 - DNA, 122 bp, Homo sapiens
atgctgtgctcggaagccggggacgagcgagtgagcgagcagggccgagctgtcagggcgcgcgcgcgccgtcttcccggccgcgcccgccctccctctcgccggcgccgcgcgcgtcccta

SEQ ID NO: 213007 - DNA, 122 bp, Homo sapiens
ggtgggcgtgggcgtgcgcggcacgcaggtgtcccagcagtggggccagagtgccgagcgcgccgcagccagcgggcagatcccatcgtgtccacagctccagctcccttaggggcagagtt

SEQ ID NO: 213008 - DNA, 122 bp, Homo sapiens
gctcggggcgggtccagccggcactgcccgacccctccgggagcgggcagatcggctggccgtgaatggagtggagactggccgcaggtcaggagagctcaccacttgaaggtgaagtcgcc

SEQ ID NO: 213009 - DNA, 122 bp, Homo sapiens
aactcatgaagtcaagaagtgttcaacacagcgcctcggaagccaggttgctggatgacacggcccatgacgtctcagcaggcctgggccaccttctctcaagcagaacacacagaatcgta

SEQ ID NO: 213010 - DNA, 122 bp, Homo sapiens
gatctgaaatggactgagatagcccccaagtggacagagtggggtgaagaataacccacacgatctacaaacgggactgtggaactgtgacaaaacgtcgtagaatcaaggaaggcgagccg

SEQ ID NO: 213011 - DNA, 122 bp, Homo sapiens
ccctgcgaacttgaacgtcaggagtctggatggacagagacacacaaaacatgggcagggcgagcaggagagaaggggaggagggaaggggaagctcacaccaatggacacacatcaggggc

SEQ ID NO: 213012 - DNA, 122 bp, Homo sapiens
ctccggcgcagcccaggcagttcctggaggaggcagcatctgaggttggtcgtggttctacgcacttagttgctgccctcttcatcctgagcctccagggtggagcttgaggaatgggagtc

SEQ ID NO: 213013 - DNA, 122 bp, Homo sapiens
cggacgggacagattggatcgcacctgtcacagccacgctctggaatagcgagggcccagcgtccccaggcccagggtgaggagaatccctgccacactgtgtctggaattggtgggttctt

SEQ ID NO: 213014 - DNA, 122 bp, Homo sapiens
tcgaaagggggaagacagtctgggcgggcaggacgtgcggagggagaggcagcggtggcgcgaggctcaactcgaagcgctattggtgggactgatagtcttgtgcgccaagaagctggcag

SEQ ID NO: 213015 - DNA, 122 bp, Homo sapiens
tgcaaatttgttgtagagttccaacatgtactctggtgggtccaccttggctgaatcctgcgtggggatgtcagagaggtttagtgtcttaagaaactcatccttcatgctctggagcagtg

SEQ ID NO: 213016 - DNA, 122 bp, Homo sapiens
ccagattcccgggctgtttgctggtgagaaatctttgctgcagcgaggaccggagtcccccgcgcgcagcccagtggcagaagagggctaggctgagagggaagccaggactgtaggagagg

SEQ ID NO: 213017 - DNA, 122 bp, Homo sapiens
tcccctggtccacccattcgcctgtccaccatccattaagcacaggaccactcatccatccgtgggctggtgtgggcagccaccacccgctctgcccatgcacgcattcatcctgcgctgct

SEQ ID NO: 213018 - DNA, 122 bp, Homo sapiens
acagccagatcccagagatgagccctccattctaactccgagaatcgagagggctcaatccgtaaacaaacataaactggggctctgaccctggcggtgccctgaggttaaggtttttcagg

SEQ ID NO: 213019 - DNA, 122 bp, Homo sapiens
ttagcggacacaatattgtgcagcccacagatatcgaggaaaatcgaactatgctcttcacggtaaaatatcacccagctcgtgcacagccccagtctgccatacgctttcaagagaaaatc

SEQ ID NO: 213020 - DNA, 122 bp, Homo sapiens
caagggtcaggagcgacgttcagcaggagcaatgactggcctatattcgggactcgggggcgggtcggcgccagagacgagaagagaggaggggaggcctcctccgccgccgccatcttgga

SEQ ID NO: 213021 - DNA, 122 bp, Homo sapiens
ccccgcgcgtctgtctgcgtttctgagcctgctctgacagtgatgtaacaaggccaggctcgcgccgcgtcccctctttcccagactcagtgctccctcctcctcccgcgccccgcgctctg

SEQ ID NO: 213022 - DNA, 122 bp, Homo sapiens
ctgttatggtctgcatggtaagcaatttccaattattccacttcagccttgctaggtcttcgtgtgcaagggttttgaagtatggctcctgtaagcagtatagacttgagttttgtgtgagc

SEQ ID NO: 213023 - DNA, 122 bp, Homo sapiens
agcgctgacgcccaggcccatggcagcggctccgctcggcacccaggtccagtcccgctgcgcctacccggaccgacccgacgccagtagcaccgactcgctctctcggcgctcgattcctg

SEQ ID NO: 213024 - DNA, 122 bp, Homo sapiens
caaacgttgcttgttggcctgactttccaggactaagaccctctgggaatcaatggggctcggtgacatggcgtaacctgctactggggtgtggtctcagacacaaaatcacactggatgtt

SEQ ID NO: 213025 - DNA, 122 bp, Homo sapiens
aaaaagcctggtctcgcccgcaactcaaaccacacgtcttaggatgccggaccggcgtcacgccccacgtcccgctgttgactttatccaaacagccgccgccgcctcagcccattctgtgg

SEQ ID NO: 213026 - DNA, 122 bp, Homo sapiens
tcacagacatatttctctccatactattttccaaaccagattctggcagaatagttagctcgttcactaactgagctgctagcttcccaaagagaatgtgttactaactaaatattcttctg

SEQ ID NO: 213027 - DNA, 122 bp, Homo sapiens
gatactaactatggggcttgttgtcacttaccttcaggtttactctcgcagttaaaacctcggcttcctccataacaagtacaaaccaacgcattgcctaggtaggtccgctcccactgttg

SEQ ID NO: 213028 - DNA, 122 bp, Homo sapiens
tctgggaaacagtcgagcaggctgtttctggcaggctcgtgctagcttcccacaggaccacgggtctctttctgctgtccctgtcaggctgaccccaacccacccagtgtcaggaatgtcag

SEQ ID NO: 213029 - DNA, 122 bp, Homo sapiens
ggtggggcggaggggcgggccgccgtgcctcagtttccccgcctgcaccgcgctagatgccggcaccccatagggctccgcgctgggccgcgacccagaccccccatcgcagacccctgccc

SEQ ID NO: 213030 - DNA, 122 bp, Homo sapiens
atgtggcctgggattggctgtggagtgtgactcagcgcgcactggctgtggggtcccccgcgattggtgatcatactacatctcacctttaggagggaggaaaagtgcagggctaaagctgt

SEQ ID NO: 213031 - DNA, 122 bp, Homo sapiens
caaatgtaatcccagcactttgggaggctgagacaggaggatcacttgagcccaggagttcgagaccagcctgagcaacaaagcaagacactacctgtctctacaaaaaaattttaaaaatt

SEQ ID NO: 213032 - DNA, 122 bp, Homo sapiens
gtggacaggtaggacaggcggcagccaggatccaggctgtgcacggggaacattgaagaacgctgccacggccccgaagaagaagtggagccacggggagaggaacggggaatttagaggaa

SEQ ID NO: 213033 - DNA, 122 bp, Homo sapiens
ttatggagcctgcggctgaggcaggctccgcagaccccgagccagagtgggatttaacggcggccggtgcgctgtgcttggtcaaccccggtaaccgtcacgctgctagtgatatgaaaaaa

SEQ ID NO: 213034 - DNA, 122 bp, Homo sapiens
tccactgaagattatgttttccacattgacgcttttcttgtgccctcaataagtaatgcccgcatccacccccaacatcaccactcagggtctgaacaaagactactcaggtgaaacacctc

SEQ ID NO: 213035 - DNA, 122 bp, Homo sapiens
aggtagattgggtggtttcaacaggaacgcatccactgtctgagaggtgacggaggcacacgttggtgtggggagcgggaggggagagggaggggggcgggtggggggcgggagggggccag

SEQ ID NO: 213036 - DNA, 122 bp, Homo sapiens
tcccttttcaggaaacccagaaggcaaactctaaggcttaaagaatccagtaatttaagtcgtccttattttaaagaaataaggacggttctcccttcaagtgggcgcagctgctacctggt

SEQ ID NO: 213037 - DNA, 122 bp, Homo sapiens
ggccccggcagccgagcctgtccgtgatctaagccggggacgtcctcggctcatggcccacgtggccaacgctgctctggtgacacagtcccaccgcctccagtggcttctccttggtgtcc

SEQ ID NO: 213038 - DNA, 122 bp, Homo sapiens
actgtcaacacaggcacactgccaaccaggggagaggttacagggtcaaagcgggaaagacggctggatgctttggggttcagctcggacatctgttaatctctctggctacatggaagaag

SEQ ID NO: 213039 - DNA, 122 bp, Homo sapiens
cccttgttcttgcccctgctggctctgcgattccatgtcggtgaggcctgtccacgctgacggatgttgcctcccgtttctgcctgagaggggtaaatgatcagtggtggatagggagttcc

SEQ ID NO: 213040 - DNA, 122 bp, Homo sapiens
gcccccacccccaggtcctgtccctgggcgcggatgtgctgccggagtacaagctgcaggcgccgcgcatccaccgctggaccatcctgcactacagccccttcaaggccgtgtgggactgg

SEQ ID NO: 213041 - DNA, 122 bp, Homo sapiens
aatataaataatgaagacactgacttttgttgtgcttgtgaagctaatagatcatctccacgagacaggcagcaatgatgaattgcaatacgttattactgaagggaaaaggttcaagccaa

SEQ ID NO: 213042 - DNA, 122 bp, Homo sapiens
gccgctgcccagagacccctgtgctccttgcagcggccggtagaggcaaaagagccacagcgggcacaggagcccgtggtcggcacagccttggccattcccaacagagctgaggacgaggg

SEQ ID NO: 213043 - DNA, 122 bp, Homo sapiens
ctggtcatcgcattggaaggctacccctggctctcccaccgccccagtaaggtaagtaaccgatgtggggtaaaatgtctgtaagtgaaacaggctccgcctaccgcactgccgggccaggc

SEQ ID NO: 213044 - DNA, 122 bp, Homo sapiens
aagacactggtgtctggggacagggagggatgggggtccctgatgaatatctggagacctcgacagcctgccctaggccctgggtgggtcaggacaaaggcctctcatcaccgcagaaagcg

SEQ ID NO: 213045 - DNA, 122 bp, Homo sapiens
gtgcgccaccctgggctcagccgaaggaaggagcactcgacacaaacaaaaccgacgctccgggtctccgtagtcgttaagcaaagaggaagaggaagcgcttcttcattaggccacaggac

SEQ ID NO: 213046 - DNA, 122 bp, Homo sapiens
caggaggcaagctggactccctcactcagctgcaggagcaaggacagtgaggctcaaccccgcctgagccatgccagccaacttcacagagggcagcttcgattccagtgggaccgggcaga

SEQ ID NO: 213047 - DNA, 122 bp, Homo sapiens
agaagaccatgaccagttctaacactagggctttgtacaagcactcttctaaacaaaatccggtgtctggattttgggaggtcactactgcgttgcgcggcacctccagggtcgtacctaag

SEQ ID NO: 213048 - DNA, 122 bp, Homo sapiens
ggaacacacagcgggtgtctctcgccagagcccatcagcgcccgctgtgcatttgggaggcgcccgtccccaccggcgggctttccaagatgccacgcgggggattgccgaggtaggggtgg

SEQ ID NO: 213049 - DNA, 122 bp, Homo sapiens
acgacacgatgggtttgggggatcatgtgtccaaagggattttgttccagagatgctatgcgcggcatgatgtttccctgttaccactttgggaacacaatctcttggcaactaaacctgta

SEQ ID NO: 213050 - DNA, 122 bp, Homo sapiens
tgacacagaagggaaaaaacagagagaaacattgaaagtggctggaaacagatttccgcacgtcctcgttccacacgctcacgccgatggagccagtggccccccgtccggacacgccgagg

SEQ ID NO: 213051 - DNA, 122 bp, Homo sapiens
gacttcaaaacccagaggtacattaactttccaggcaagttcctcccagcctgtgtgccacgagcgattccgaatgtggtgtgccctctcccacagtgcgaagctcgcgggcgctcaggctg

SEQ ID NO: 213052 - DNA, 122 bp, Homo sapiens
aagatccctgaatccttctacaagactttgttctgagatgtagaccacaggaagcctggccgaatctggaaagccaccatacaataacaagataatttgcaaagaaaatatttaaagtaaca

SEQ ID NO: 213053 - DNA, 122 bp, Homo sapiens
gggaaggggcctggcctccctagttcagggttgtgcttagtgcctgcaaccggccgggcccgcgggggcagccaggagagaaaggcgcgcccagcgcccccaggcccggatccgccctcagc

SEQ ID NO: 213054 - DNA, 122 bp, Homo sapiens
gagcccccttttgggaactcactaccctgaggcttagacaggtcgggaatgatcgcctcccggttaaggaggaggaaacaggcacagtgatgtgtggtgacttgcccaaggtcacacgcagt

SEQ ID NO: 213055 - DNA, 122 bp, Homo sapiens
atctgtatctttgcagcaggcgcaattcagtttggattcacccaaaacaaaaatggtctccgtcggagtcaacgccctttcctgtgcggaccaatcagaatctcaaacacagggcacggggc

SEQ ID NO: 213056 - DNA, 122 bp, Homo sapiens
acggcgcctctcttccagcccaagcagctattttggaacagcgactgcacgcggcgctgccgctgtttccgtcgcaacgtgattcagtgcgacccgcgccaatgcaagtcagacgaggagtg

SEQ ID NO: 213057 - DNA, 122 bp, Homo sapiens
ttatccttactcttccacttttttgttgtacttccttcctgtatttgccttcgcccttttcgagccttttgatttttcaccattgatttctgattctctctttcctttaactttgtcctttc

SEQ ID NO: 213058 - DNA, 122 bp, Homo sapiens
gccgtcgtctcggtagtggtagttggggatagccaggacgccgcgggcccgcaggctgtccggaaggcagaaattggtgtaggtgaagtgggccaggcccgtgctcatgaggtagatgaggc

SEQ ID NO: 213059 - DNA, 122 bp, Homo sapiens
tttatcattggagctgccttggccaaaatggcaactgctcgaaagagagcccaaaccattcgtttcagctactttgcacttataggtatgagagatgggaagctttgcctcatgtggcgcat

SEQ ID NO: 213060 - DNA, 122 bp, Homo sapiens
cggaatggaagaagaggggcgtttgggggcggtaaggcctaaaggacactggaggggcctcgggatttggggcaggatcacaggcctagtccacttaaaggtggctccgtgccaggccttcc

SEQ ID NO: 213061 - DNA, 122 bp, Homo sapiens
gacaatgaggcactgaaaatgttcgcttttcaaacaattctagaggaaatttagctctcgcgacttctctgtaaaagctgcctgtaagtgttttgctgaaaggctagaacagctttgtttct

SEQ ID NO: 213062 - DNA, 122 bp, Homo sapiens
atgaaggcagaaagctgcacagctgcttttagttcaggcgaagctggaattccgcggagccgcacctggcggcaggcacgccggccttcggaggggccgctcggtgcggctgcaggaccctg

SEQ ID NO: 213063 - DNA, 122 bp, Homo sapiens
gtaggcgggaaagccgggaccagcgccccctcccaccctcaccgatttgggtcgtagcctcgtggacccagcccctgagaaggctgctggttaagcctgcggatatgatgggtcacagactc

SEQ ID NO: 213064 - DNA, 122 bp, Homo sapiens
ccctgatctcagtgaaagggaagcccagaggcctagatgcaggcatggggcaggcaggagcggacctcacaagctgcatgcaccaactggcatgcatatgttgcacctggggcagtgacaaa

SEQ ID NO: 213065 - DNA, 122 bp, Homo sapiens
ccgctgcctcctgccctgtctgctccccagctcaggacactgtggtcacagcaataggagcggcggtgcctgggccgctccgaacctaggtcacctgctggaggagggagaggtcgcctgct

SEQ ID NO: 213066 - DNA, 122 bp, Homo sapiens
taaacaaagtcacccttaaagaaatgctgtaactcatacatgcaacttaaaagcagtcaccggagatcgaggagccaagatggccgaataggaacagctccggtctacagctcccagcgtga

SEQ ID NO: 213067 - DNA, 122 bp, Homo sapiens
caatccaccactgggggggtaagggagataggaaaaatggaaagagaaaatcagcgcatgcgtactctgattttggaagaatctaaagagaaaatcagagcatgcgtactctgaacttggag

SEQ ID NO: 213068 - DNA, 122 bp, Homo sapiens
ttccccaaatctcgcagccagccaattactggcgattaattacccatctccggaggtaggcgaggactccgcgtagccaaggtcagccagttcaaacgatccagctgcccggccgcccacat

SEQ ID NO: 213069 - DNA, 122 bp, Homo sapiens
ttcatagttaagtttaattgcacattacacactgtcctgtaattatgtcgcttggggaaccgccaaattcccccttgaaatgttagaagtcccttagtttattttaaagtcttggcgtcgcc

SEQ ID NO: 213070 - DNA, 122 bp, Homo sapiens
tgccgtccttcttctgcgccgtagtcacccacctcttggagccctaattgggatcaggagcggactttgttggctctggcatgtcgagggcgcactacaggtcgaggtgaactaacagcagc

SEQ ID NO: 213071 - DNA, 122 bp, Homo sapiens
cttcaggggttgtttataccaaaacagccttgtattgggatggctagggaagaaatctttcgagcctgtttgtcctctatataatatgcaaggttggtaaaacattctttgtttcacaatag

SEQ ID NO: 213072 - DNA, 122 bp, Homo sapiens
caaggggaaaatctctcggctcggtctctcccccgcgcagggagctatgggctccttcagcgagtggttgctatgcagccttgtttattcaaggagagctttgctgagagctggagcacgcc

SEQ ID NO: 213073 - DNA, 122 bp, Homo sapiens
gctcgggaccggccccagacctgcagggccggttctcagggcggggtagaaatgttaccccgctgaacgccctggggtatggggcacgggctctagggggaggccggcggccggttcagggg

SEQ ID NO: 213074 - DNA, 122 bp, Homo sapiens
tccaagctgctctctgcattcaccatgtgtccctcccatttgagaatcacattactgacacgaataagatttgagcacaaataataagaaagaagagctgtctccaagtgcacttgataact

SEQ ID NO: 213075 - DNA, 122 bp, Homo sapiens
gcggggctttacactggatcctcccagctgcccaaagggtcagtatttatccccagtttacggagcaggaaactgaggttccgagaaacgatcgtgttacacaaggtcagaaggggagcggg

SEQ ID NO: 213076 - DNA, 122 bp, Homo sapiens
tacgtcgtgccaggcattttaatgcattgttctagttcattttccagcagtcgcattcctcgccttggccctacatgtagcgctcattacaaacacggccagaatctcttattaacaaacag

SEQ ID NO: 213077 - DNA, 122 bp, Homo sapiens
tgcctcccgccaggctcggcctccgtaggcccccggcccggcccaccgctccggctgaggcgggactgccccacggacgccgccacgtcatccccacgcccgccccgctacagccctgggac

SEQ ID NO: 213078 - DNA, 122 bp, Homo sapiens
agaaggagaaacagaggggagggggagcgaggagctggcggcagagggaacagcagattgcgccgagccaatggcaacggcaggacgaggtggcaccaaattcccttcggccaatgacgagc

SEQ ID NO: 213079 - DNA, 122 bp, Homo sapiens
gtccccgcgcatccggccccgacgggttgctgaggatgcggcggaacaggctgtggtggccggcggcgcgcagcgagctctccacgccaaaggtgttggcatcggagatgagaatcacctcg

SEQ ID NO: 213080 - DNA, 122 bp, Homo sapiens
ctcaaggacagaattgagctaatttttattgactacttggattcctgggcaaagagaccacggacccatctggagcctttattgacttttcccctgaggtccatggctctttgcaagccagt

SEQ ID NO: 213081 - DNA, 122 bp, Homo sapiens
ctgcagctcagcatctggcccgggctgcgcgtcgggctctggcgggggcgtgtcaggaggcgtgtccggggcgtgtcggaggcggggccaaggcgggggtaagcctcgcccctcggccgtgc

SEQ ID NO: 213082 - DNA, 122 bp, Homo sapiens
tcatgcaagagtgagggtgaggggcctgtggggctcaggtggggctgtcagagctgcatccgtccacttattggtggagaggcaggttggggagcatgtaccaggcctgtccccaccacgtg

SEQ ID NO: 213083 - DNA, 122 bp, Homo sapiens
gcggcacgggctgcactctgggtttgagtcgggtgtggcgaaggcggctcggcagcacagcggggcctgggggcagggtcctcctccaggggggcacgcagaggcctggctgctctctgctc

SEQ ID NO: 213084 - DNA, 122 bp, Homo sapiens
ccgcgagtccctgtgccgccacaatgccaagtgccagctgtccctcgaggtgttcgccaacgacaaggagatctgcatgatcaaggtagagatccaggacatcaacgacaacgcgccctcct

SEQ ID NO: 213085 - DNA, 122 bp, Homo sapiens
cagcatccagcacgctctgcagggcctctgctgcccgctggctgtttctttttagctgctcgatttcttcatccttctcaatgaccttgcggtctagctcggatttcacctggctcagctct

SEQ ID NO: 213086 - DNA, 122 bp, Homo sapiens
gctgtctaccctaaacagctccagatttagggctcctccatctgattgctcttccccagccgcctggtgctttcaagtgggcccgacacgctcccgggacttggccacggtccctgcatctc

SEQ ID NO: 213087 - DNA, 122 bp, Homo sapiens
ccgccctggcctcgccctgcgctccagcgcctggccaggcggggctttttggagggggagcgctgacagctggactgggaagttgggaaactttgtgctgagggctgattggctggctgggg

SEQ ID NO: 213088 - DNA, 122 bp, Homo sapiens
caccatgatgggcagccagtaatagttgaggtgggggctcttaaagtctttacccagccccgggatgcgaccggagaaaaaaaagaaggacaggacccctgtggaataattctgggggttag

SEQ ID NO: 213089 - DNA, 122 bp, Homo sapiens
tctatgctcccattggtctgctttaatgtgaagggcgggtcctagctgattcgctagccccgccttgcgttcctattggctgctcctgctctgcggttccgatcccgcccagcaccgtcccc

SEQ ID NO: 213090 - DNA, 122 bp, Homo sapiens
gggctaggagatgcgtgggtccggagatgcgcagatcaggagatgggcgaatcggagatgcgcgggtccggaaatgtgcagagcggagatgtgtggatcaggagatgttggggggtcaggag

SEQ ID NO: 213091 - DNA, 122 bp, Homo sapiens
cccccgcgtgcgcggcctgtgtaaacagtgcgtcatctcctgttgcacactttgggcctgcgggtcacgaccagggattatcaaattgacagagctcagctggcctctcactccacgtccgg

SEQ ID NO: 213092 - DNA, 122 bp, Homo sapiens
atatttatattaaaaacaatgttttaacatactactcttggacactgtataaaacggttgcgtgtctggaatgccgtcgttttgccccgcggccccatcgtacatgcgcatccccgcagccg

SEQ ID NO: 213093 - DNA, 122 bp, Homo sapiens
ggaggagaggagatgtgtaatgcgactgtctataatttgaaaccggacctcactatttagcgtctcagaaaacgcggggttcattgccctggtcccccccgccttcccccgccccccgaacc

SEQ ID NO: 213094 - DNA, 122 bp, Homo sapiens
ggtctttgggaatgcaatgtgcaaattattcacagggctgtatcacatcggttattttggcggaatcttcttcatcatcctcctgacaatcgatagatacctggctattgtccatgctgtgt

SEQ ID NO: 213095 - DNA, 122 bp, Homo sapiens
ggggcgggggcaactgagagggccaaggcagctgcacgcacagatgatccacctggtccacgtgaaatgcctgaaacaagcaaactgataaatagaagcagcgcaagccctgtcacgtggag

SEQ ID NO: 213096 - DNA, 122 bp, Homo sapiens
gcatccagggcactggtggcatcatccaggataagtacacacggtttccggatcaatgctcgggccaacgccactgcctgtcgctgaccccctgacagctggctcccagcctcgtctacctc

SEQ ID NO: 213097 - DNA, 122 bp, Homo sapiens
ggccgaacctggtccattgttcatcagatatcagtaaatgagaagtttccagctgacattcgagagaactcttaagcttcctgcagtatacagtttatttcgagagaaactcaaggctgagt

SEQ ID NO: 213098 - DNA, 122 bp, Homo sapiens
tacttttttctggagactggctggatcttcgggaccactcactctgcagcattcccttctcgtcatctcgttcacctgccgtttatcctttctttgtctttgatctgagtagttcgcctgcg

SEQ ID NO: 213099 - DNA, 122 bp, Homo sapiens
gcctcccttactgtttctgtgtgtctctgtcctccagatgtacggggaccctctatgcaccgaacccaatacgttcattccccgtatgatcgtcctggttggaaccctcggttctgcatcat

SEQ ID NO: 213100 - DNA, 122 bp, Homo sapiens
gggaggcggaggttgcagtgagcccagatcgcatcactgcactgcagcctggctaccgagcgagactccatctcaaaaaaaaaaagaaaaaaagaagagaggtttgtttggctcatgattct

SEQ ID NO: 213101 - DNA, 122 bp, Homo sapiens
attgagggctttgcatacctgtggtcaggagcccgtgccagctatggggtcagaaggggccgtgtatgcttcgagatgaaggtgagtaggagcaagagaaggggaagggacagagaagtcca

SEQ ID NO: 213102 - DNA, 122 bp, Homo sapiens
tcgccccagcccttcactaaccctgtgagccgtaggcagagccttgtgtgtcaatgctttcgtcggagacgtagcctcgggttgctgtgttattgtgggcattgctgctgcacgtggtaata

SEQ ID NO: 213103 - DNA, 122 bp, Homo sapiens
gcggggcggcctaggggtggggcggggcggcctaggggtggggccgcctaggggtggggccggcggccctcgggatgggtcctgccagggcgcagagatggcggtggaaaggcggggcgaag

SEQ ID NO: 213104 - DNA, 122 bp, Homo sapiens
gcccaccaatgacagccctgtcttgctatcctggggggcatggcatgggtgggcggggtgcgatggggtggagggaaggaaatccaagcacctgtggatgcttactgccttactctgtcctc

SEQ ID NO: 213105 - DNA, 122 bp, Homo sapiens
aagaaagcatgcaaattaacttcttgtcactaataaaatggtgtgatttaacccaaaatccgtgactgtaaagtacccacaaagagaaagaaaatgggtctcaggaaacaaaattgttttat

SEQ ID NO: 213106 - DNA, 122 bp, Homo sapiens
actgtcagtgcaaagcagttcctaacaacagggaacccagctgggataggaagagggcagcgggctcatgcattaacataataatccaactgtgttcccataggcccttagggcagacagca

SEQ ID NO: 213107 - DNA, 122 bp, Homo sapiens
gactttgcagtcttgcttattgaggcgttttccaaaacagggaccgagggctctaacacccgtgcggagggtggccggcgggggcgggagtttggcagaatgcggctggagaaggtggggcg

SEQ ID NO: 213108 - DNA, 122 bp, Homo sapiens
attgacttccctttgtgagtttctgatcccctctttgctagtctctctcgttatgtgtttcgttgtgtctgtgtttctccaccagcctccctctatctgcatgcgggtctctgactccgctg

SEQ ID NO: 213109 - DNA, 122 bp, Homo sapiens
gaagaggacacctgttttaaatggatccacaggaaatacctatgttgccttttcataatccgaacctgcaactggttggctgaaatgaaaatgttgcccacagactgatgcaacttcagtgt

SEQ ID NO: 213110 - DNA, 122 bp, Homo sapiens
agggcagcgccggttccttgcggtcaagatgctgcaaaacgtgactccccacaataagtacgtttccgcgagccgcgtgtgggaaggggatgttgcagggcggcggcacaggggtgtggggc

SEQ ID NO: 213111 - DNA, 122 bp, Homo sapiens
agcgtctttatccgtgttccttgactctgggcaacttaaaagccctaatacttttactttcgccacacaaagaggttcttcttagtggagggagagcagatgtagggcatcctaccgagaat

SEQ ID NO: 213112 - DNA, 122 bp, Homo sapiens
accgaaaatgtcagtgtccccagcacctagatcccccagttaaatccttttccatttcaccgcgctgccccccgccccctggacggttatgtggccgcgtggggttggctctgcccagggcc

SEQ ID NO: 213113 - DNA, 122 bp, Homo sapiens
cagcaagcgtggtgatgaacaaggcctcccctccaggctgacgctcaaataatgctgacgcgccacggagtaggagtggtgtcgtggggcgggggacaagctcgctcagctttctttttctc

SEQ ID NO: 213114 - DNA, 122 bp, Homo sapiens
cccgcggccaccgcgggaggagaggcgcgccgttcctccaggcggcacgcaaagggcaaccgtagatcagcatgttgatgtgtttaaagcaaactattaaatgttttataaaggaaaggccg

SEQ ID NO: 213115 - DNA, 122 bp, Homo sapiens
agtagatgggggagccagaagggagatggaatggaaggttgctttcccctggagccaggccgcccagcagcggggcttaccttataccgccctggccaaagtccgtgtccttccgcgggttg

SEQ ID NO: 213116 - DNA, 122 bp, Homo sapiens
ggatggtcttccacttcaccttaaaagcggctgttctctgattatcattaagcatggccacgcccgcacttaacttctgacagtggggaaagcagctgtgtgtgatagcttggaaggtttac

SEQ ID NO: 213117 - DNA, 122 bp, Homo sapiens
gaagtagtttagaaagccaggttcgcgcaggcgcaggaggtctgtcgttgccgagaactgcgacgtccacgtgcacacagtgctggctgcggcctgaagagctggctgcttcccgcacgtgc

SEQ ID NO: 213118 - DNA, 122 bp, Homo sapiens
tgtctgcagggctggaccaaagagaagagtcttccgcgggtgctagaaaagcgaagcacgcgttaccatggagactgcggaatggaaaagcgttcggtttcttgtttcctagccgcgaatgg

SEQ ID NO: 213119 - DNA, 122 bp, Homo sapiens
catgctggtggcccaaattgagaaagtggtgtcccttcctgattttgccaccagccctaccgaatagttgtaaaccagtatcaggaattgggatcgctagagtgtttcacgtattagaagat

SEQ ID NO: 213120 - DNA, 122 bp, Homo sapiens
gtagaatgtgaagaaggcagcgcattgcgcgtttcccagctgggctgtgcctctgatttgcgggtgtcgcctgtggacccacaggcctccagcctggcgctccctagaactcgtcctcagag

SEQ ID NO: 213121 - DNA, 122 bp, Homo sapiens
tcatctttatcatgcccttccacagaggcattcaataatgtacccattgtgcaagcaatccgaaatccttttcagcgagcaatagtatttagtagtgataaaacactaatttgtctaccaag

SEQ ID NO: 213122 - DNA, 122 bp, Homo sapiens
ctccaatcataaaccctggcaaaagcgcgagactccctttgggggtctctgactccactacgagcgagtacaatgaccaaatccacacagccggaaacgcatggacgggccagctgacaggt

SEQ ID NO: 213123 - DNA, 122 bp, Homo sapiens
ccgggtcacacatcactggatgttgtagctggtattttccactatcttgagagttccatgcgtgatgtgattttgttttaataccacaatgcgtgtgttggaggatccggccctaaagcttt

SEQ ID NO: 213124 - DNA, 122 bp, Homo sapiens
ggtctcctctcggagcaaacccacagccacccaagtcacgctgtttccgtgggtgtgtgccgtgggtgtcttatgtgtgcatggggctaagtctggaatttactcattaaaacttatgaaac

SEQ ID NO: 213125 - DNA, 122 bp, Homo sapiens
aaatgctcaaaatcaagaattacaaaaaaatcccttaataacaagcaaattcctaacacacgttaaatatatcatttctctcttactagacatagcatgacacagtttaacagtatcagaaa

SEQ ID NO: 213126 - DNA, 122 bp, Homo sapiens
caggttatatgtgtgagtatggaaaaatccaaaacccgctttggcattttgtgtcatgaacgtataattacatcttcaaaacaacaaatgaaataaaagaaggctggatcgcacataccaca

SEQ ID NO: 213127 - DNA, 122 bp, Homo sapiens
aactttttcctctcccctactcgttgatctcagtatataagcttgatcaactagcccaaccgtaaaaagaaaatccaatttgaatcctatatgccatgctactgatttttcttgcctttaac

SEQ ID NO: 213128 - DNA, 122 bp, Homo sapiens
cgagctcactgagactacctgggaattgagaagatgcacaggaaaagtactttataccctcggatgtctactctctatcaaacattgcaagagttttgtaaggacagggtggcctggctcca

SEQ ID NO: 213129 - DNA, 122 bp, Homo sapiens
catttgggggcagacatgtttgtagcacgagatccaggctcagtcccgaggcagccggaacgtgacgcaaggttgaggcggggctcctcccccgcaccctggcgtcgagcgtctcgtgacag

SEQ ID NO: 213130 - DNA, 122 bp, Homo sapiens
tctcaccatatctgagctctttctgtccattacctgtatagactactctagcacctaaatcggctctaataactcttcagcttctcaaagcagccaatggctcctggaaggcagacacctct

SEQ ID NO: 213131 - DNA, 122 bp, Homo sapiens
gccgatgggctgagggggcggcaggggcggcaggggcggcagggcctaacgtggacgggccgagggggcggcagggcgtaacgcgggtgggcggagggggtggcagggcccatctgtccagg

SEQ ID NO: 213132 - DNA, 122 bp, Homo sapiens
tgtaccaaaataaagccagtgctaatgaaataccagcctctgatatctggctcagggttccgctgttttcagatttttttaggtggtctacactttagtcacattttggcccctctttagtt

SEQ ID NO: 213133 - DNA, 122 bp, Homo sapiens
ccccccccactgggttccggaaaggctcagggttgctcccgcgtttcggttcagtgacgtcgtaaattggaatgaggcatccagtttagcaacagcagagatgacgactctgcgattctgag

SEQ ID NO: 213134 - DNA, 122 bp, Homo sapiens
ctggcaggaggcagctgcagaggggaagggagctcggaagatgcaaacgctttcttcttgcgcccaagccttccctggctattaggcatgcccagttttgtggagttctctgtgtcttcagc

SEQ ID NO: 213135 - DNA, 122 bp, Homo sapiens
ctcgatctcctgacctcgtgatccacctgccttggcctcccaaagtgctgggattacaggcgtgagccactgagcccagcctgaaacttgattttttccaggaagcttttattgattctcca

SEQ ID NO: 213136 - DNA, 122 bp, Homo sapiens
cgggagagagaggggaggggtcggcgcgcgaccgggtcatgcaggtgcagactggccggtcgcttcccgccctccagccacccgcagctccccggcaggcgaagggcggccgcgcgggtgtg

SEQ ID NO: 213137 - DNA, 122 bp, Homo sapiens
actccccacgcccaccacagctttcaaagttaggaacacaggcagggtggaggtgaagtccgaacagaaagaggagacttaagggagggcgagccctgactttgtttcgtttttccgaggcg

SEQ ID NO: 213138 - DNA, 122 bp, Homo sapiens
attttgtattttcagtggagacggggtttctccatgttggtcaggctggtctcaaactcccgacctcaggtgaaaaagtgctgggacctcaggtgaaaaagtgagtcactgcacctggccca

SEQ ID NO: 213139 - DNA, 122 bp, Homo sapiens
ggggcctccagttggagctgacactggatgtaccttggtgaattgagggtcacaccaggtcggggtgggtaccccagaaaccatggtctgccgtttgccatctccatgacaccatctgtcac

SEQ ID NO: 213140 - DNA, 122 bp, Homo sapiens
agccgtcaggaagtcacgtggggtgcgggggggcgggcggcgaggactgggcgggcctcgcgaggtactcccgggagcctgcgggcaccgcagtcccagtcgcccatgagctggcgaaggtc

SEQ ID NO: 213141 - DNA, 122 bp, Homo sapiens
gccggcactggtcagagttgcccgctccccactgtggtggctgagatgtctccttttgagcgtgcgccccaccgagactctgctcagccttgtggaagaaacggggtcccgcctggcgagga

SEQ ID NO: 213142 - DNA, 122 bp, Homo sapiens
acaaggcattggctcacatcccattgtttggaagtcctgtcttctgtcccaggtgagctccggcagacaggagtggggagggacaggtagcatagccttgtgctcaatagtgatctgtgcaa

SEQ ID NO: 213143 - DNA, 122 bp, Homo sapiens
gtttgtctcacgtgttgcagggcgtaaaagcggcttgcattcaattagcagcgaagctcgcgggcgctggcgggacaggcgcgtgagggtgagttcgcgtgaatgtgtgtatgcgtgtgcga

SEQ ID NO: 213144 - DNA, 122 bp, Homo sapiens
ccggttggagaagtggaacttcagtggtaagcccagacctttgggacccctcaccctgcccggtcctcctgctgtggggtgtgagtccagccagtgctgggaagccggtgtggctaggacaa

SEQ ID NO: 213145 - DNA, 122 bp, Homo sapiens
ggtggcgggatccgcccaggcccgtcctggggggcggaggctgtggagagacgcggtgaccgcgcgtccagactcgctcttgccgccgcctgtcctccccgcggtctaactcgaagccccgt

SEQ ID NO: 213146 - DNA, 122 bp, Homo sapiens
gctggtcctcgtagggcgcggtgggcactgtcagcaccgggatggggctcccctctatggcgcctcctggccggtcctgctgcggctcccggagccggagggaatctgcagcctgccggggg

SEQ ID NO: 213147 - DNA, 122 bp, Homo sapiens
tccccgcaatcatcccctgcccgctcctcaggcccggctggccgagacggaactgatgtacgtcacacaccctgggctgcaaactgtcctcgggacgacagcgaaaacacacttcagcgggc

SEQ ID NO: 213148 - DNA, 122 bp, Homo sapiens
gatgtgccttggtctctggacttaccagcacagtgagcctggcaccacctggagggccaccggaaggagccccatccccaggggttctgagtcagtaggcgtggaatgggggccgagaacct

SEQ ID NO: 213149 - DNA, 122 bp, Homo sapiens
tggattccacgaggccggtgcaagccaggagccagccccactccctcgcccagctccctccggcctggccctctgcagaagcctgatgcccacccagctgtctcaccatgggaccccaggcg

SEQ ID NO: 213150 - DNA, 122 bp, Homo sapiens
aggacaatgaacaggcgggctgctgccagaatttaccgaagatggccgctgtgctgggctcggagtgagctgacggtgtctcagcgagaaaagtcgggagcggcagcagactgcttttttgg

SEQ ID NO: 213151 - DNA, 122 bp, Homo sapiens
gttcatatccttctctttgtcttggtaacctctacactcagttgcccactgtctgtgctccgctatcaagctcatcaagcatgtaagtgtggacgcaaggcacgcacgccatttccttcttt

SEQ ID NO: 213152 - DNA, 122 bp, Homo sapiens
aataccttttacgtcagcccgtcttacgcagcttcgcgtcatcagtgcaaggcgcggaggcgggacttcctgtccctggtataacagcttccgggagaagccggaagagaccggaccctgaa

SEQ ID NO: 213153 - DNA, 122 bp, Homo sapiens
ggccccgccggcctgagtcctggacaggtgattggcaggtgaatgagctggagtgtgcagcgtgcctggctgggggccagggaagatctgccgggacctcaggggctgcaggctgccaactg

SEQ ID NO: 213154 - DNA, 122 bp, Homo sapiens
gtgtaggggatatgctcacaccacattagcagcaaccaataaaaatgctggaaacaagaacgccgtgaatccatatgccatgccttaggaattgggggagcaaagacttgtggggtgaggca

SEQ ID NO: 213155 - DNA, 122 bp, Homo sapiens
gggttcgggttcagtccctgaacccaagcatcctctgcacccagatcctgcggatctgcacgcggtacacgcccgagcaggacaccatgaccttctcggacgggctgaccctgaaccggacc

SEQ ID NO: 213156 - DNA, 122 bp, Homo sapiens
accttgtaaacatgaaccttcttgctattgccctgaagtgagcaaccttatttaaggaaacgaaaaacttctcccagtgccggagggtggactgggaagcaggtctagacattcattctttg

SEQ ID NO: 213157 - DNA, 122 bp, Homo sapiens
gggggagggcaagcggggggcgccgctaccctttcatcccacctcccaaaggcactcccgcgcgcactcacacgccgactcacatccataaccgcgacagcgacgcgacccccggggggtat

SEQ ID NO: 213158 - DNA, 122 bp, Homo sapiens
ctcgaagcagccaagatgttctttagtgggtgaatggataaataaattgtggtacatccacgcaatggaatattatgcagtgctaaaaagaaatgagctattacaccatgaaaagacctgga

SEQ ID NO: 213159 - DNA, 122 bp, Homo sapiens
gcgagcgggcgcgcagggggaggggagggggcggcagcggcagctccgctgattgggcggcgctctcacaagcccgacttcacccgccctgaaccccgaagagtgagagaagggaacgcgcg

SEQ ID NO: 213160 - DNA, 122 bp, Homo sapiens
gccctgttcctgaacaggaagcggaagcaggaaggaactgagaacaccagcatctgctgccgccctgaatcagcgttagcatgtggaggcaacctcagcccccagtttttgaagaaggtgat

SEQ ID NO: 213161 - DNA, 122 bp, Homo sapiens
tcaaacaaatatcacaaccctgtttacaaaatacttacaattgtaggtctctgtccctgtcggtaccaagaacagagagtcttaattgtctgcaccaacttcagtataaaccacaaacccca

SEQ ID NO: 213162 - DNA, 122 bp, Homo sapiens
cagctgtgattttcaaggagacaggtcctggttttttttacctgccaaccacatttcctccggggagtttttcggcaagtgctgtaaaagagaccttttaatcttgtttcaaaaacctggag

SEQ ID NO: 213163 - DNA, 122 bp, Homo sapiens
agatagtgaatcttggaggaagaaccatcaactcagcactggctggggagggcctgtgggcgaggaaaggaaggcttcctgaagaagctttgtatgctgctgagaaagtgacagcagggtta

SEQ ID NO: 213164 - DNA, 122 bp, Homo sapiens
gtagacctaataagcgcgagggcgaaaaccaggtcagcgaccagaagccaggcaaggttgcgattttcggagcacagcgaaggggagagtttctaagttctgaatgtacctctatttagggt

SEQ ID NO: 213165 - DNA, 122 bp, Homo sapiens
cacacacacaaacacacacatgcacactcacacatacacacacaagctcaagcgcgtgcacgcacagtactttggcaagtagagtgttagctccccaagcatgagcttcaggccagactcag

SEQ ID NO: 213166 - DNA, 122 bp, Homo sapiens
gcccatccgtttcccctttaagaccagagcggaagactacagtgagaaggccctttgtgtcggcgggaaagaaatatgcctgcccctttaagaaggcggagacgccccagtggcggcgtctt

SEQ ID NO: 213167 - DNA, 122 bp, Homo sapiens
tgagcgagactccaggggcctcagacttctgggccgagtgtgtcactttcctggaggctccggcgaaagagggagacactggatgtagtaaacatgggttggaggaggaaagaagtgtggac

SEQ ID NO: 213168 - DNA, 122 bp, Homo sapiens
tgggaagggtcagagaaaagaatccaagctatccagccatgcccgggattctgcctttcccgcccacagcaagctaggcccagtggtccccgggaccccaggtcccaccacctctctgactt

SEQ ID NO: 213169 - DNA, 122 bp, Homo sapiens
atgcgtcccggcagttcccggcgggaggctgacgagacgcaacgcgtctgcgcacatccccgcgttgttctcactgcgcatgtgcagttgcaaccgggatactagaacctacgcttggtgcg

SEQ ID NO: 213170 - DNA, 122 bp, Homo sapiens
gcgcggcgccccgcccccgggaacccaccaacgcacgtgcaaatcacaaaatgcgaagcgcggaaatggcccaaggaaggggtgacagacccctttaaaccgcgactgcccctggggcgggg

SEQ ID NO: 213171 - DNA, 122 bp, Homo sapiens
ggtgggcagaaatgtgcccagtggaaggctgaccccatttaagtgccaactactccaaaccgacatgctcacggtctctggcctgttcagtccctgcaaaacagctagcacccacagtgggg

SEQ ID NO: 213172 - DNA, 122 bp, Homo sapiens
cgagcccacgcggtccacagctttaggcatcacttccaggtcatcagctgcgcgagaagccgccgtacaacacggccaatcaggaaaggaagtctccgactcagcccaatcgttgacgccca

SEQ ID NO: 213173 - DNA, 122 bp, Homo sapiens
tgtggtaagcggctggtagcctgtgttaagcagcagggaagataaggttgtgttcaggtgcgcttaattcagcgggaattaagttatgtttggtgaagatctaaggagaggaaaaatccaga

SEQ ID NO: 213174 - DNA, 122 bp, Homo sapiens
aggaggcgctatgcagcgacggcggcagagaaagcgtgggagcgacgctcttgctctggacgccgacgtgcccacgtcgaggccgcgcccagacccggaggcggggccgtcacgtggggcag

SEQ ID NO: 213175 - DNA, 122 bp, Homo sapiens
atcttcacccaactcaagagacccgtcctctcccgagatcttcaaggcacgcggaagacccgtcctctcgcgagatcttccatgcgatggctcctgcctctgctcatatccaaactcctcct

SEQ ID NO: 213176 - DNA, 122 bp, Homo sapiens
gcaggaacaaggcgatcacaagggcctttatacgcgaaagacagacaggagggtcagagacgtgagagaggcttggccgctgtgggctgggaggatgggggaggggccacgtgccagggaac

SEQ ID NO: 213177 - DNA, 122 bp, Homo sapiens
cgcacgcacacgggcgagaagcccttccgctgcgccgactgcggccgcggcttcgcgcagcgctccaacctggccaagcaccggcgcggccacacgggcgaacgccccttcccgtgccctga

SEQ ID NO: 213178 - DNA, 122 bp, Homo sapiens
cgttgcggacgctccgccctcgccgtccgcgaattggtggacgcggccgccactctgggtcgaccctgttattcattgggcaacgcgtcttttgaaaccgaactgaagggggaaggggcgag

SEQ ID NO: 213179 - DNA, 122 bp, Homo sapiens
gacctgtctatagagtaagccccagggggcaagcacaggtctctcttgtcctccatcattcgccttgtgcctcactccctgtgaggcaggtaggaaggagcccatgagtgtgtgttaacaaa

SEQ ID NO: 213180 - DNA, 122 bp, Homo sapiens
taggtgccgctccggcctgcaccgtcactgccaacagaaggagagaaatgaaagtgctgccgtccacacggaagcccgacccacaacaaagctagtgacagttcatttccttcctgcttacg

SEQ ID NO: 213181 - DNA, 122 bp, Homo sapiens
gcacaggacgtggggagactccacgcttgacctcttgcccaccgccttccggtctgctcgcgccaacatggcttctgcgctgagcacctgcatgtggcacggggcccagggtggtgaccggc

SEQ ID NO: 213182 - DNA, 122 bp, Homo sapiens
ggcaatggtgcccaaggtggtgatgggcgtggccagggaagcactagtgctgtggccccccgccccggcaaggctggtggagacggtgcctgtcactgtgcctagggtcgtgacacctgaag

SEQ ID NO: 213183 - DNA, 122 bp, Homo sapiens
aactcactgcaaggggcagggcagagcctctgagcttaagttagttttgtttccctgtcccggatacaagagttggtaagctcgctgcagtgggtggagagaggcctctagacttcagtttc

SEQ ID NO: 213184 - DNA, 122 bp, Homo sapiens
ttgcggggttgctcccagttccattgcttttgtaacaggtggccagaaagcctggggtcccgtgataagagtttcagttctttccaggatggatggaaagaaggaaggaaggatggatggat

SEQ ID NO: 213185 - DNA, 122 bp, Homo sapiens
gtcaaacacagaaattgtagtttcttcccgggtgggcgcggacaggcccttacttgggggcggtttagaggtgggacccggctagccggcggttcaggtggccggacctgctggaagggcgg

SEQ ID NO: 213186 - DNA, 122 bp, Homo sapiens
tgctactttatgattattgcctacaatcatagttctagctataaaattctcagagaacttcggtagtgagcttttaagtttgcatattgcataaagcatgaggtttatgtaaatattcaaat

SEQ ID NO: 213187 - DNA, 122 bp, Homo sapiens
gacgtcgctcctccgcacggatgtccgcggcccgggccggggtgggaaggggctcccccacgctcccgcccaggtttggtcgccatctttcggagcgtcctttcccgcgagtgctgcagtcc

SEQ ID NO: 213188 - DNA, 122 bp, Homo sapiens
gcgcggtggccgcgccactggccaggtccctggagccggcaccactcccacttcccgccccgggccctcaaagcatagacccagctctgcgccctgggcctctctttgtccgaccacactcc

SEQ ID NO: 213189 - DNA, 122 bp, Homo sapiens
agaaaatgttgcaggtcagttcactatgccggattgtctcacacattggaggagtgcttgcgtcattgtcaggaacttccccaaccatggaaaacaagaagatgtgcctatttccaaaatat

SEQ ID NO: 213190 - DNA, 122 bp, Homo sapiens
gactaggggaccgagttgggggtcagagaccgagtccgagccggcggctggagctggggacgtagacctaggccgagccggagcgaagagaaatcccgccgaacgcgagacaccgccgccgc

SEQ ID NO: 213191 - DNA, 122 bp, Homo sapiens
actatgggggcgtggcttggagtgaggcactctgggactgggcctgtgggtgtctgggggcgtggcttagactggggcaccctgagtgggcctgtgttagtttgggggcgtggcttagagtg

SEQ ID NO: 213192 - DNA, 122 bp, Homo sapiens
aagggttaaatatggattctggagtcacatcaccttagtttaagaaggtatatgactggccgggctcggtggctcacacctgtaatctcagcactttgggaggccgaggtgggcagatcaca

SEQ ID NO: 213193 - DNA, 122 bp, Homo sapiens
ggagtacagctaactccaggggaaccacatggaacgttgtctgcatcaacatccttatcgcgaccaactgcccaaggactgccatgtacagcacagcctctcgatatgtcccagagcagact

SEQ ID NO: 213194 - DNA, 122 bp, Homo sapiens
gacaaaacaagaataaagaatgtaagtgggtgtctgaacttgaccaacattttgatgatgcgatttttccagtttcgcacactaagaggcttctgtgattttggatttgttttatatatggc

SEQ ID NO: 213195 - DNA, 122 bp, Homo sapiens
agacggagccgctgtcaactctccaactcagctcagctgatcggttgccgccgccgccgccgccagattctggaggcgaagaacgcaaagctgagaacatggacgttaatatcgccccactc

SEQ ID NO: 213196 - DNA, 122 bp, Homo sapiens
cgtcaggtcccactgccgggtctggcccagcctggatgggttgggtgcctctaagcagtccgcgtccccttcggtcgccggagagggaactttcaaacttagttaggaagccagactgtccg

SEQ ID NO: 213197 - DNA, 122 bp, Homo sapiens
aaacacggagtaactggcgaggcaaatatattgtgaaatttgttttagtacttttactcacgagtggctcttgggagctcagagttgaagctttttcaatggtatttactctggtgctccaa

SEQ ID NO: 213198 - DNA, 122 bp, Homo sapiens
cacgtgggggttcgctgtttctcccattacaataaagggaggtctgtcttcacgtagtggcgaccacactggacaggcgcttctgggtcctcatgtccttggtagaccccacgggtctgagg

SEQ ID NO: 213199 - DNA, 122 bp, Homo sapiens
gactgggcaacttcattataccaaatcaatacattgaaatacgaaagagactattgtgcgcgtatgtaaattaaaagaaaaagaagtgtgggttattcaattttgtagggttcaaaatggtt

SEQ ID NO: 213200 - DNA, 122 bp, Homo sapiens
aacacggcgaaaccccgtctccaccaacaaatacaaaaaccagtcaggtgtggaggcgcacgcctgcaatcccaggcactccgcagactgaggcaggagaatcaggctgggaggttgcagtg

SEQ ID NO: 213201 - DNA, 122 bp, Homo sapiens
agacgcgggtcgctttgagtgcggggcagagaagccaatggacgtgcggcattgagagggcgggtcttccggtagtgaaggcctggtgaacggctgcgcgacagaggacacttccttttgcg

SEQ ID NO: 213202 - DNA, 122 bp, Homo sapiens
ggccaaggccgaggggtctgaggatggactgggggtggcttacgctccatcttgctctctcgatgctgccaggcgtagaagttgagcagctcttttcggctgcgcttccgtctctccctctc

SEQ ID NO: 213203 - DNA, 122 bp, Homo sapiens
atgtgctccacaacctacacctccattcactcattcagccagggcagcggagcaccccgtcgctgccaggcactgccgcgggcacttacgtgagggacaaaacaaaggccccacctcgtgga

SEQ ID NO: 213204 - DNA, 122 bp, Homo sapiens
aggccagaaagctggagacggggatggagagctaaaccgcaaagagcaggcgccctgccccgctgagggccccgcgcctccagctcctccttcccgagcttcccggggtcggcgtccagccg

SEQ ID NO: 213205 - DNA, 122 bp, Homo sapiens
gcaattacacttgcagttttatcctgcaaggatgaaaagtgtatgtttgttgtacgagagcggaagggtgccgaagttcatgtgaagttctgcaaaccaaagcctgatgaggatttccgccg

SEQ ID NO: 213206 - DNA, 122 bp, Homo sapiens
gtggttggggcggagagcattatctgcggctccgattttgcagattctggctgaggcgttcgtgatgtcagcagcagccgagacgggcgtgttaaaggccggttgctagggctgggggaact

SEQ ID NO: 213207 - DNA, 122 bp, Homo sapiens
aaaggaaaccagccaggtagactgtcagactcaaaacacactgatccacagacagacagacgtggagacagacagaggctgagacagtcttctgatcacggaagagagtcggaagatgacag

SEQ ID NO: 213208 - DNA, 122 bp, Homo sapiens
ggagctgcagattgcacgtgtggagcaggctacgcaggccatccccatggagcgctggtgcgggggttcccggagcggcagctgcgcccacccccaccaccaggttgtgcccttccgctgcc

SEQ ID NO: 213209 - DNA, 122 bp, Homo sapiens
tagctgagccccccaagtctggggtgaaagagaagcgtaagaaggcagcatcgttccagacggtgtcccagctgcacaaggtaaggccccatctgggagacagaccctccctcttggcagcc

SEQ ID NO: 213210 - DNA, 122 bp, Homo sapiens
tttgcctcaggcaatgccacacctctgctttctgtcactatagattaatttgcattttctcgaattttatataaatgggatcatacagtatgtattcttttgtgtttggctttcactcagcg

SEQ ID NO: 213211 - DNA, 122 bp, Homo sapiens
aacttgaaaactagcctcagttgaaccctttagggtttatacaaatgctactccaaaagtcgggccccattccattaacacgtgctatggttagtaagtatggattatagggtatgttaaca

SEQ ID NO: 213212 - DNA, 122 bp, Homo sapiens
acgtcatcgggcagtcccaagccactctgtgcccggcgcctgtccctgcgcggaactccacgtgtgcacaaaatgctctggggaggggaggatcggatgggttaaacacagtccgcggttct

SEQ ID NO: 213213 - DNA, 122 bp, Homo sapiens
cgcggacgaactttgccaagagaagttcacgtacaacgatctggcaggggaggaatcccgcgcccagccccagctcctgagatgcgatccgaaggcacctgctgcagacgcacgaggggggc

SEQ ID NO: 213214 - DNA, 122 bp, Homo sapiens
agctggtggaaagaaagcaattaatatacgaaaaatttcaaaagtgcttcagagagctgacgagagcccaagtcagttttataaaaaactttgtgaagcattccggccttacaccctatttg

SEQ ID NO: 213215 - DNA, 122 bp, Homo sapiens
agacagaaagttactctattcaaccgccacagggtttgcgaagggccggtgggttctgcgcgtccctgcgccgctggtgctgtcggcgctgcccccggccacgtcctgcctgcgggcgggtc

SEQ ID NO: 213216 - DNA, 122 bp, Homo sapiens
gcgaaactttcaaagggggggaaaaagaggaaacagcagattaaagaagttccaacacatcgggtttttaaataacaatgacatttcaaaccattttttaggggataaagaaaaaagaggtt

SEQ ID NO: 213217 - DNA, 122 bp, Homo sapiens
gtggaaagaagacaggccgtccagcccgtgcccgcctgcggcgggggcacccagcaagcccgcccaccgcccgctgcctcacctgcttcgccacagactcttgttcccagccccttggggcc

SEQ ID NO: 213218 - DNA, 122 bp, Homo sapiens
gatcctgtctctaaatacaagaagaaaaaaagacttactataaagctacaatagttacaacgatgcagtttggaaacaatgatagacataagtcaataggacttatgtcccgaagagtccaa

SEQ ID NO: 213219 - DNA, 122 bp, Homo sapiens
gctctctgagccccctggggtgcagggggcaggcaggtgacagggtgcctggctgattcccggggaggctgtgggccctcaggcagccgctgttctgtgtcggcgctaggcttggcctggga

SEQ ID NO: 213220 - DNA, 122 bp, Homo sapiens
cgtcaggtggccccgccgaggaggcgaaggaaggccacccctcccccatcatcttttgcccgcccctcgccagcaggagccagcccagtccgccttctagcctcctgcagaccagagaggac

SEQ ID NO: 213221 - DNA, 122 bp, Homo sapiens
cagctccacgcacccctcatggaaccttagcgaggcccagggcaggggatgctgccaggccgctgccaggctctgacgcggttgcggatgcctcgcccggtctctccggaggtggaggagtg

SEQ ID NO: 213222 - DNA, 122 bp, Homo sapiens
ggctcttttccgcagatgactctgtcctggtgtccagcagggcacagcccctagcacctccgaggccccgcaagtgtgctggcagcggcgacgccggctccgccacgcggagggaggaggcc

SEQ ID NO: 213223 - DNA, 122 bp, Homo sapiens
agatttctcgacgtttggggacttacagctcgtctgggagcgactggattcccaggcctccgcacgctgaggttccggggaagagcactgtcttcaccacttctcgacctgcgccccaaccc

SEQ ID NO: 213224 - DNA, 122 bp, Homo sapiens
agctgtgcacacacatggcctgcacacgcgccaggcgcctatatccttgtacggtgcacccgcagcacttgttcaggcacaaccctgacctcatgggaccatgcacacatccttttgtgtca

SEQ ID NO: 213225 - DNA, 122 bp, Homo sapiens
tgggggaccctttactgtgcccctcaggtgtcacccacgaatgttcccatgttcctggggcgtcacgcaggtcccagccacatccaaatgtccccccttaagaactggggtttccttcatgt

SEQ ID NO: 213226 - DNA, 122 bp, Homo sapiens
gtatcatgatttcaatgtcgtatgtgtccatgcaggacagagctaaaattggagacgtgtcgcagaaaaagtgacgaactacatttgagtcgcagaaatgcagtctgctcatccaaaccaca

SEQ ID NO: 213227 - DNA, 122 bp, Homo sapiens
cgaactggccgggctgcccacagaggccccgccgggggatgactcggcatgaggcactgccgggaccacgcaactggtcggcagcccctggagccaagggcaccacccctgccggacccagc

SEQ ID NO: 213228 - DNA, 122 bp, Homo sapiens
gctgatgtggaaaaaggaaggctttctgggaggggtggcatgacctggatgcagagccgccgggggagccccagagccttctgaattcagagaaccacacacagctgagagagaccggtgcg

SEQ ID NO: 213229 - DNA, 122 bp, Homo sapiens
gatcagtgcacatggatgcttcctttcacaagcagcttggatacttagtgccaaccatctcgggcttgaagaatgtgctacaaaatgaattcagtaaagcctctttcctgtttgactgttta

SEQ ID NO: 213230 - DNA, 122 bp, Homo sapiens
acaatttggtcattggacacggattgcaggctttgagaagcgctcagaggcccagggcggcgggctcagccattcggcttggggcaccaggctccccagagacaatgctcagtattcattca

SEQ ID NO: 213231 - DNA, 122 bp, Homo sapiens
tgccacacacggccatgcagtactcttctgtgtcaaagttgttccggttgccgccacatccgccgtaaaagaatggggcacacttcccttcagtcacatcaaagtaccagcgggagatcatt

SEQ ID NO: 213232 - DNA, 122 bp, Homo sapiens
cggcagccgacgactgcgcagacgcagggcggcggccgcgcctctccaacgccccgcacccgcccccctcagaagcacgtgcgccttacgtaatttcctgttattcttcggtttgcctcctc

SEQ ID NO: 213233 - DNA, 122 bp, Homo sapiens
acttctccactgtggcttaaaaggcagggagtgaaccccaaactttctccttcctctagccgcagtctgcaatgcttgtgggggctgagctctttgtgaccctatagtggaggaaaaacaca

SEQ ID NO: 213234 - DNA, 122 bp, Homo sapiens
ttttgtttgagtcagtaattgtgcctctataggaattttatggagtttagcccaagaaaacgttctatccaagccaaatgtgggtatggtagaatactattgaagatattaacctacattct

SEQ ID NO: 213235 - DNA, 122 bp, Homo sapiens
tctcaggctgcggtgcagacgaagaaatcatcgctatgcatgctggccttgggatgggggcgcaaagcccctggacgcgccccgcctagtgggcgggaacgactacagcccccagcatgacc

SEQ ID NO: 213236 - DNA, 122 bp, Homo sapiens
acacggacttacttggtgccggctggctccagccaggagctggcgggctgcctccgcatgcgaggacgcagcctcaaggctggcttcaatactatctgcaaatcaagacaacagaaggcaat

SEQ ID NO: 213237 - DNA, 122 bp, Homo sapiens
ttagctgaatgacaaccatcttgccagcaggtagctgaagctggcagaggagcccagtggcgccttttcagtggttcttgggatgctccgcagccaattaagccgactgagttcctttcctc

SEQ ID NO: 213238 - DNA, 122 bp, Homo sapiens
cgcgcgctggcagctgagcgcctggagacaacagcggggacccaatgtcaacagctaaagcgctaggagctcggcggaggcaggagccgtcgcgactgccccatctccaagccgagttccag

SEQ ID NO: 213239 - DNA, 122 bp, Homo sapiens
taaatgcattaatgcaggctccaatcactcggccatgcttgacctatttttggctcaggccgaccattgttctatttctgtgcctgtgggccatgctgttgttgattcatatgcaaatggat

SEQ ID NO: 213240 - DNA, 122 bp, Homo sapiens
cctaaccaccaaccacccttctacaacaaagaaatacctgtgaatgagcattaacaatcacgttctccagcctccctctagcctgtccttctccctgagtatcctttacccctgcttccctc

SEQ ID NO: 213241 - DNA, 122 bp, Homo sapiens
aacccctcgtgcccaccagactgccctgtcagtcaccaggcatcacctgaggctcaacagcgtgggacccagtgtcgagtccctcccagctgccttccctgggcctccagggccctgtccag

SEQ ID NO: 213242 - DNA, 122 bp, Homo sapiens
acgcggcgggcctggaaattgtttccttacgcctctttccagcagccattgtagtgtatgcgctgcccctgcagcccaacttgcagctgccgccgccgccgccgccgccgccgccgacgtcg

SEQ ID NO: 213243 - DNA, 122 bp, Homo sapiens
ccccagcaagacgccaggcatcctagccacccgacgctcaggccgtgcgtgtcctcagagcgtgttttaaagcaggagggatttggggtggaagattgctcctgcagaaatcagagatgagg

SEQ ID NO: 213244 - DNA, 122 bp, Homo sapiens
gcaggaaggtggttggcggtggtcagaaagccatctgtaactcaggtgattttcctgtaccggtcacctagctgaatctgaatgagagttttttgtaaagttgtggtagaagataaattagc

SEQ ID NO: 213245 - DNA, 122 bp, Homo sapiens
gtcaggaagaacaataataaggttacacccaagcgtgggtttctaaggcgcggaattttccgtacagaccgatttaaggctgcaaggaaggagtcctgggagcatggctttccctgagccaa

SEQ ID NO: 213246 - DNA, 122 bp, Homo sapiens
ctccaccataaggtggtgaatgttgatgagctcagcccgggcagggagggctcggagctgcggctgggacagcacccggtggaagcgatgatagagctggatcagctgggtcagcgctccct

SEQ ID NO: 213247 - DNA, 122 bp, Homo sapiens
atggggcagacgggacagcagtgtgagcacactgatgctcgacatcgcacactgcagccacgacgagacagcaccacacacccatcaggatggggcagacgggacagcactgtgagcacgct

SEQ ID NO: 213248 - DNA, 122 bp, Homo sapiens
gcgcgcgaccccaggccctgggcgccccgccgcatgctcgcggctggaagccccagtttgcgtggcccttcgggttattccgctcaagagccgccgcgtcgccccatctcggcgcgaatctg

SEQ ID NO: 213249 - DNA, 122 bp, Homo sapiens
cctggttgtgggtggatggatgaagaaggcctttacttggagcctaagccctggcgcgcgcgcaccacggcgcgaactgctccatcaagcatccactggcctccagccgcgtttccggttgt

SEQ ID NO: 213250 - DNA, 122 bp, Homo sapiens
tctcggagtttccgaccactgaggctcaggatgccggagctgcccgcctcttccagggcccggtccaggctcctcacggtgtgctgaggctgcaggctccccgggttccacggcggcccgtt

SEQ ID NO: 213251 - DNA, 122 bp, Homo sapiens
tacccctacatttggaggtgccaccttccttgcaagggccttgcatttaggccaggagctcggatactggcacttctggacaatggtagccaagaatttaggatatgcacttggggagccac

SEQ ID NO: 213252 - DNA, 122 bp, Homo sapiens
atccgtaagtggagaggcccctcctcaggaaatgcgcccgtggaatgctctaccctcttccgcagccagtcgcccctggccttcccaacctcgcggctgcccgaaggacctgttgtgccggg

SEQ ID NO: 213253 - DNA, 122 bp, Homo sapiens
ttcctggccctggaactggtccgctacgagcggtgctggctgcccccaggagctggcacccgggagcactgcccctcatctccaccgtaggtcagcccaggactcgagcagagcccgcgtgt

SEQ ID NO: 213254 - DNA, 122 bp, Homo sapiens
actcatttccaatattcaatattattcaatatacagcggtagtaccgcgtgtgccaggcacggcaacatgccctgaaccacggcgatacgtcctatagcagagaagagcgggtcacaagaca

SEQ ID NO: 213255 - DNA, 122 bp, Homo sapiens
cagcgggggcggaataagcgagctggggaggcggccgcggggctgcctgttgcccagcaacgatgccagccgcggcctgtgctcccccaaaagcccgaaagcaccgcggcaggcagccagga

SEQ ID NO: 213256 - DNA, 122 bp, Homo sapiens
agcaaagccctcacctgggccactttccacattagaccaggagagctggaggctgcagggcggggctctttgcgctgctgtccccagacccctgtccccacacccctgtccccacacccctg

SEQ ID NO: 213257 - DNA, 122 bp, Homo sapiens
tgaaaaaaaaatgtgaccaacagattaaggcaccaggaaatatggctgacttgagaaactcgctcatactattgtgattttgcttttggtttttcatctgaaatcaaactggcgcctaaacc

SEQ ID NO: 213258 - DNA, 122 bp, Homo sapiens
ctctcctccctcacattttccgctgcaacaaagccaaacacagcaccgtgggggctttcacgcttctgtgccctaggacacgctgttcctgcagcgctgcctccctcgccccgcggctcccc

SEQ ID NO: 213259 - DNA, 122 bp, Homo sapiens
gattcacatataaaaggcaatttcatttactataataccagatgcaatgaaagcatttgacgaagttccatatccattccgggttaaaaaaaataaaaattttagcacacctacaaacagaa

SEQ ID NO: 213260 - DNA, 122 bp, Homo sapiens
accagtcccctccagggtccggcggggcccgcgcggtgggaggagtcgggcactggccggcgactaacgggtccgactgctgaccaagctaggagagacccggaccacggagacagagaccc

SEQ ID NO: 213261 - DNA, 122 bp, Homo sapiens
ttaattgcctgtatgtgaggaccaaacaacctttgggaactaaacagttttcagagatggcgtggcactgcatccttggttcttgctttgattggtgccctgctatagcccaaagcacgtag

SEQ ID NO: 213262 - DNA, 122 bp, Homo sapiens
ttagatattacaccaatttccactatagttaacattctatctaaatataaagtgggaccacggtcttagatgaatgtggctgttgagagcggcaataatccagaatggctactctgatctac

SEQ ID NO: 213263 - DNA, 122 bp, Homo sapiens
tcaaagcagtttgcaaaaacagtcaggcaaaaccttgaggcgtacgtacgttatcacccacggatatcgcgaaagacacagcttagcccagagcctatgctaagaaccctcatccaccatct

SEQ ID NO: 213264 - DNA, 122 bp, Homo sapiens
gtgcccagcagggccaggccgctgaggcccgtgtaggtgcggaggctgggccaggggaagcgctcgaggaagagcagcggcatggcggcagcggcgacctctggcccccaggcttccctgcg

SEQ ID NO: 213265 - DNA, 122 bp, Homo sapiens
tgctgctaatcttgggggctgggcctccctccacagttctgatgtccaaggtcatcctcccgtcgctgaagctgcaggaaaagggatttaggggagggacgccctgggagagtcattcctcc

SEQ ID NO: 213266 - DNA, 122 bp, Homo sapiens
tgtctcagaaccagggttcccccccgagcagggacctggtccagccgagccttctcatgccggcagaagagaggctgcaccagggcgatgttcataggcctgagaagactgcagctctggac

SEQ ID NO: 213267 - DNA, 122 bp, Homo sapiens
agaactggggactcattgcattcgaagagagaattttacggtccctgagaggtcagtgagcggaccctctgacatggaggtatgaggcacttaaggtttgtcctcacagaggccaagatatc

SEQ ID NO: 213268 - DNA, 122 bp, Homo sapiens
acgaggccaggcgagcacgaggctggccacacttctttctcaagctcgtgcgcccgtgagcgcaggtcccctgggccgatgcactgcagttccacccaggggagaggttcagaccacgtctc

SEQ ID NO: 213269 - DNA, 122 bp, Homo sapiens
aaagagatttggaaaccactgaacatttctgctgggatccttccaaacccttttgggaaccggcaatagcacttgtcaggggaaattagttctgcactttcacagagtgagaaattcctcag

SEQ ID NO: 213270 - DNA, 122 bp, Homo sapiens
aaagtggttaatgtatgttcaacctgtaaggatcagagatacagccctaagcaaaagggacgaggctcaaaattctgtgtgtaagtgggctctctggtcaactcacggaaacaatcctagta

SEQ ID NO: 213271 - DNA, 122 bp, Homo sapiens
aaagcagaagcacacacttacactttagctctgaatcctggctaaagcaacatacagaggcggtaactcctagaactctgattttcactctgttgccagagaggctcttcctgggcagctgt

SEQ ID NO: 213272 - DNA, 122 bp, Homo sapiens
ttggtgaggtcctctggccccgccccgccagggaggatttccaggccggcccgaccagctcgccctgcatacacttcttggctgtgtgcgctcagcaggacgtgggaggctccggcttcaag

SEQ ID NO: 213273 - DNA, 122 bp, Homo sapiens
cgttcacaagtgtgtgtattcagacgagagccatcagcaggacacgggagaaagaccacgcgaaacagaaagccactgcccctggcctggaggacacgggccagggcgtctcctcagaggag

SEQ ID NO: 213274 - DNA, 122 bp, Homo sapiens
aggagccatgtcagagtttggaaattcatctgtttgaggaagaaaataagtggttatagacgttaaggaatcattttctaggatttccactagatggcaaggacaattcctgggtgtgatct

SEQ ID NO: 213275 - DNA, 122 bp, Homo sapiens
tattgcagagccatgaaaacgaggctctcagacccctgtgcaatcagagccaagacacatcgagtgaaaagcaggacgcagagcagtgtccgcgggagcagttgcagggaggcattacatgc

SEQ ID NO: 213276 - DNA, 122 bp, Homo sapiens
cctccgggtggaacttccccctcaccgccagacttaagctgaggatcgttggatctctggcggggtgcagaactgagcccaggccacagtaccctattcacgctctgtgcttgtgccaaggt

SEQ ID NO: 213277 - DNA, 122 bp, Homo sapiens
gggctccttccggggctccggcctgttttccagagagagtggcagtagccccatggggcccggagctgctgtggcctccactggcatccgtgtttccaaaagtgcctttggcccaggctcca

SEQ ID NO: 213278 - DNA, 122 bp, Homo sapiens
aggcccaagctggcctctgcctgccctgcttggggagttgaaagaggcctttccttgaaacgcgcagccgtgtggcagggcccgggaagacgtgggtaatgtattcacagacatgactccca

SEQ ID NO: 213279 - DNA, 122 bp, Homo sapiens
aatcattttcgaaggtcaactaaggaaggggtttagagaaataaaaaggcactttccaaccgttccaaggctctcacgctggaggaactctgcggggttgtgcctgagcagctcctgagcgc

SEQ ID NO: 213280 - DNA, 122 bp, Homo sapiens
cctattttcttttcttggtagcgaagaaacacgaaggcgctcagggaaaccgaacggcagcgagtctgaagagagagagggaaataggctctgaacacagtgtctgtaattccatcgaggtg

SEQ ID NO: 213281 - DNA, 122 bp, Homo sapiens
agatcccaggctgtcccaaccctgggtctccggtggcctgagtcttcctggagttgaacgcggtgctactagaaagccaagaccttaactgccttgagtcacttcctatattctctatcatt

SEQ ID NO: 213282 - DNA, 122 bp, Homo sapiens
cacccatacctctactttccccatcaccatcgacccccccacagcatccagttgcattgtcgccctgtcccctggatccccattctgctctggcaaacctggcagccgatccaggcttctgg

SEQ ID NO: 213283 - DNA, 122 bp, Homo sapiens
gcatcctggccgggcacctgtgccacttacctgctggtgtagcctgtgacggggttccagcgctggttctcatagatgtgaacacacttcacgtctgactgcgtgtagatgttactggtgct

SEQ ID NO: 213284 - DNA, 122 bp, Homo sapiens
ctctggaaacatatcacgtcatgggagaactggctctggacctgcctgagactctcagagcgaaggtcaaggctggaggcccccagccaaaggtagatgaaggagaagtcaggtgcctaatt

SEQ ID NO: 213285 - DNA, 122 bp, Homo sapiens
tggacaagatggagcagcgggatgcccagagaggcatctggagagcagatgagggttgtgcgtagggcctgggtcttggtcgtgggcctaggaactgatctagttgatcttgtttcctcctc

SEQ ID NO: 213286 - DNA, 122 bp, Homo sapiens
gggtttccttggaggcaggctgactccacgggtgggggcagaacagcactggtccctccccgtcactccctggggagagggagtctgaggagtccgggaagcccagcctgcctgtggccctt

SEQ ID NO: 213287 - DNA, 122 bp, Homo sapiens
caccctgacccccaactcaggtggcagccggagcctgggcggaggaatagaaccttctgtcgttcagctgagctttatcaccagtttcctgttgctccatagcagcttcactggcgatgggg

SEQ ID NO: 213288 - DNA, 122 bp, Homo sapiens
tgggggcccagggggtgtcagctcggggccttgcctcttgcagctactctgtggtcaggccgggtcctccaccatcaggaagatcccatcctgagctctgtctcctgcccctcctgctgtgg

SEQ ID NO: 213289 - DNA, 122 bp, Homo sapiens
ggtgggaggtttgcttgaacccaggagttccacaccagcctaggcaagatggcaagaccacgtctctccaaaacaatttttgtaaaattagccaggtgtgctggcgtgggcctgcagtctca

SEQ ID NO: 213290 - DNA, 122 bp, Homo sapiens
ccgttggcctcttggcctcgaagggcagcgcgcgccccgcctgcagtcccccgggccgcgcggctggaaaggcctctctgaagggggcgttccgctctgcccactgcgactccggccattgt

SEQ ID NO: 213291 - DNA, 122 bp, Homo sapiens
ctctatcagcagttgagatatgtgtttaattttctcatgtggtagctgtggagaaaggcacgagaaccctagtactcctactgtttggcttgagacacggcactgtgtcataaccagtttgt

SEQ ID NO: 213292 - DNA, 122 bp, Homo sapiens
ccaatgggacccttatgtgcaaggtcctcttccatctggctccagccttcctttctcactcggtctcctaacactgactcccccatttagacgagtctgttctccgttctccagcactgtcc

SEQ ID NO: 213293 - DNA, 122 bp, Homo sapiens
gcgatgccgcagcggctgagccgccatcttcccgcagccggcgccttcctttcgaatacacgccaggccccgccccaagcacagctcctgcgtcctcattggacatcatgggcaatccaagc

SEQ ID NO: 213294 - DNA, 122 bp, Homo sapiens
gcgggcctgggaaccaccgcgggtgtgcgggccttgccattctcaagattcctgcggaaacgctgtgcgctggctgcgctccaggagcaggagcaggaggaggtcgccctctagagtctgga

SEQ ID NO: 213295 - DNA, 122 bp, Homo sapiens
ctaataacagaggacgagagagggtgatttgagtagagaagacgcaagattcactagggtcgtgaagatgctgcgggccttgcccaccacggcatctacctcggggtgcacgccaggctctg

SEQ ID NO: 213296 - DNA, 122 bp, Homo sapiens
gttgcttgttcttggggagaatttttgaaacaggaaaagagagaccattaaaacatctagcggaaccccaggactttccctggaagtctgtgtgtcgagtgtacagtaggagttaggaagta

SEQ ID NO: 213297 - DNA, 122 bp, Homo sapiens
gaatccgttttggcggtcgcctaattccgcgagggctttttcacggcttcaagccaagagcgctgaagggaggaaaggtatactgatgccgtagggctgagggagggattccaggctcctgg

SEQ ID NO: 213298 - DNA, 122 bp, Homo sapiens
cgaatggaagatggattctcatccagtgtgcggaggttccatgcctttgcttccctttcccggagttcgatccggcgataccctcccgaggctgcagccatcgccccggccccgagcttctg

SEQ ID NO: 213299 - DNA, 122 bp, Homo sapiens
acagcctgagatatgtcctcatgggatgggaaagacctgaccgtcccccagcccgacacccgtgaagggtctgtgctgaggagaattagtaaaagaggaaggcctctgtctcataccgaacg

SEQ ID NO: 213300 - DNA, 122 bp, Homo sapiens
ttgattatgtggtaactctattctcaactttttgaggaacgatcaaactctcttctatagcgattgcaccattttccatccccaccagcaataccagcaatatatgacagttcaattttctc

SEQ ID NO: 213301 - DNA, 122 bp, Homo sapiens
actggtctcagcttggcatctctcttgtagttgaagtcaaatagaggctagggctacattcgtctaaaggttcagttgagttggaatgtggcatggctggcagttgatgatgactgtttcct

SEQ ID NO: 213302 - DNA, 122 bp, Homo sapiens
ccatcgaacgcccttcgtatcactccgctcctcattgcgaattggactgcgcattggctgcgacccaaggctgaacacaagaagcttggagaggagctcgggcgtttgaggagaaggaaata

SEQ ID NO: 213303 - DNA, 122 bp, Homo sapiens
agtttcaacacagggcatttcaaatcctctttccaagaccatgatgggtgctccaaagtacgtagtctttcaaaacacactgaactggtttggatgagttgaaaactccaggttactgtgaa

SEQ ID NO: 213304 - DNA, 122 bp, Homo sapiens
tcccagaccggggcagagccagcatcctgtttgccttggttctttctccccggggtgcaccggcgtttgtacgcatttgtgtgtgcgtttgtgcagggggaggggtggccagcgcccacgga

SEQ ID NO: 213305 - DNA, 122 bp, Homo sapiens
tggagggtgacagtccacagcaatgtgagtggacttcatgctggactgcaaactagaaagcgattagaatggcgaattatgtcaagtgtactttactacaataaaaaacaacaaaaaaagtg

SEQ ID NO: 213306 - DNA, 122 bp, Homo sapiens
tccaacctgcgggccatgcgccctcacccgggcatcgatccggtctcaacctgcgggccacgcactctcacccggggattgagcaggtcccaaccccagggcctcacgccctcaccccagca

SEQ ID NO: 213307 - DNA, 122 bp, Homo sapiens
gggggtgcgaggagccgttgcgtgcgtggcggttggtgcggtataggagactcctctgaccggactcgcctgctggccgcgcggcgggcgaggcccaggcaaaaacaaagtcttcccgctca

SEQ ID NO: 213308 - DNA, 122 bp, Homo sapiens
gtccgtcatcccaggtatgcctctataaggtgtgggacagctcctggttccacagaggatcgagcatgggggcaggtggtggaccgaactggagaggaaggactctcgcgatggggcagcaa

SEQ ID NO: 213309 - DNA, 122 bp, Homo sapiens
gtcactcgagaaggtgcttggcatcacagcccagaacagcagtggcctaacctgtgaccccggcacaggccatgtggcctacctggcagggtaagcagataagggcctcgacgtctaatcat

SEQ ID NO: 213310 - DNA, 122 bp, Homo sapiens
gctgcctgcatttaaagtgagcaacgtgacgggactggacgctgcacgccagcaagtcatcgccacagcgaaggtcacggcacacccagccccaggagcttccccaaaatgcctgcaaccct

SEQ ID NO: 213311 - DNA, 122 bp, Homo sapiens
tttaataactattttcttcctggggaaaatgtgctgcttcagaagttcagaaatgggcttcgctcttcagctggtaatgagaagttaataaaagtgggattttgtgcaacgctggccctctg

SEQ ID NO: 213312 - DNA, 122 bp, Homo sapiens
gcagcgctcagcccttagaaaccagagccagctgacaacacgcgaaacacacaggcacagcgaaaacgccgagccgacgctcattccctctgccccctccctctgctctctgtaacaaggag

SEQ ID NO: 213313 - DNA, 122 bp, Homo sapiens
actcatccccgagacctaccaggccaacaattgccagggcgtgtgcggctggcctcagtccgaccgcaacccgcgctacggcaaccacgtggtgctgctgctgaagatgcaggtccgtgggg

SEQ ID NO: 213314 - DNA, 122 bp, Homo sapiens
gccaggcagaggcaggcggccaccagcagcgtgtagcgcggctcccgcagcagcaggcgccgctcttgccaggcgcgctgcagccattgcttgcagagtccctctgcctgggccgcggaacc

SEQ ID NO: 213315 - DNA, 122 bp, Homo sapiens
ccgccgccagaaaagaagaaggaggcccagggggcagggaggccaggctctggccaaggccgggttttctggcttttatctgggtcactggccacctccccagtaccaacggctggtttcaa

SEQ ID NO: 213316 - DNA, 122 bp, Homo sapiens
ctcagaccgcacttgagaattcacactggagaaaaaccgtacaaatgtaaccagtgttttcgtgagttccgcactcagtcaatcttcacaaggcacaagagagttcatacgggggagggtca

SEQ ID NO: 213317 - DNA, 122 bp, Homo sapiens
gcaccccccacccaccctgggaagcggggttcttggagcgtggaacgggcgccgccagtgcgcgcggcggggaccgggggtgagggagagtgagctgcccgtccggggagataagcaaggcg

SEQ ID NO: 213318 - DNA, 122 bp, Homo sapiens
agctctcagatttaaaaaacaaaaccaagatatgcagtcttagaattgcccctgctcttccgacagtactcaatccagagcaaagccacacgtcattaattccttaccagaattcactaacc

SEQ ID NO: 213319 - DNA, 122 bp, Homo sapiens
cattatcacgagggaagctaggttgtgtataaggtaaacccacaggaggcaaagcagagacgtgaaacctagtgacatacgtcctgggtagagctggccagaggctcctagaagcctcagtt

SEQ ID NO: 213320 - DNA, 122 bp, Homo sapiens
ctggagtgaacgggcggccacccggctcccgcagcccagactcacctgcggaaacggccacgcggcccagcagggcctccttgtactttcgcaggctctcgtcgtccttgtccagctcctgg

SEQ ID NO: 213321 - DNA, 122 bp, Homo sapiens
gcggctagggtcctgcaggggtctgcgcggtgcgggggaggtcgccgagtcagtcagtgccgaaaggaccgcgaactccaggggccaacaatcaccgggtacggaactcaacgtttccgcca

SEQ ID NO: 213322 - DNA, 122 bp, Homo sapiens
gcagctaacgaaagttaaattccagggaaacagaaaggcccagtggtgtgacgctgacatcgaaaagcctgcaaacagtcgaggagtcagcgcacacacaaagaaaatccagatggaaggaa

SEQ ID NO: 213323 - DNA, 122 bp, Homo sapiens
tttctgcagcttgaaacaaatgagtcacccttctgagatgaactcagactgcaagacacacgttctagaagtatttgcagaaccacaaatacacatgactccggtgacctgtgccaagcttc

SEQ ID NO: 213324 - DNA, 122 bp, Homo sapiens
atatttggagtaatgagcacaaggacttcatagcaaggccaagaacagcgtaaagctgcccgcgcatgaaaagcagccgcgttgaccgggcgcggtgtcacgcctgtaatcccagcactttg

SEQ ID NO: 213325 - DNA, 122 bp, Homo sapiens
accatgcagggactgactgcagctgttggcagagagaccatgtcagctggccctgccctccgggtttttagggacctaggttcagctctcagttgcagctgaggctccagagagcttgtaag

SEQ ID NO: 213326 - DNA, 122 bp, Homo sapiens
tgcgcatgctcgggggaggcggattccgggtccggagttggaggctttgggcggccgcggcgtagcgcgcggtgccggggccggcggggaggcgcgcgcttagggcgcggcgccggcgacgc

SEQ ID NO: 213327 - DNA, 122 bp, Homo sapiens
gtgtcctcgccggttcaccacctcgggcgccatgtactcgatcgtcccgcagaaggagtacgctctcttgtcgtggtcaatggcctccttactcaggccgaaatctacatgcaaacacagca

SEQ ID NO: 213328 - DNA, 122 bp, Homo sapiens
tcacactgattctaaaagcatttgcttagggaagtcagtgtgggcctaccagtgcctggccgcacccagctaacattgcagccctctccacatttcctctccatcttctctgctttatcttt

SEQ ID NO: 213329 - DNA, 122 bp, Homo sapiens
cttcgagggggcggaggctttcgtggctggcccagtatccctgcgggaggccggagggggcgagcgggcagctggggttagacacgccgggccagccccgcagcagttctccttccggctgc

SEQ ID NO: 213330 - DNA, 122 bp, Homo sapiens
tctccgggctcgcccggcacgctcgctctaccttgggctgctgtctgcacatgctcgtaacgacacccccagcaggggcccagcggcacgggcgaaccacaaagcccggcagcccgcgaggc

SEQ ID NO: 213331 - DNA, 122 bp, Homo sapiens
ctctcccacccactttgagatgttaacatcccatgtggtgggtgagcctggtgtattcatcggcctcggatctggagacggcgctgggtcaaacagaaccgccctggccagccccagcagtc

SEQ ID NO: 213332 - DNA, 122 bp, Homo sapiens
caccgaagccacctctgtccatccaatgttcatgtctgtccgaggctgcgcaggaggttacgtcaagatgtggccaataaagtccaaaaagcgctttgaatactgttctgggttcacggtgg

SEQ ID NO: 213333 - DNA, 122 bp, Homo sapiens
caaagggtatttaaactccaacaaattctgtaactgggcccttgagcacctatgctcagccggccccaacactggagtgtactttcattttcaataaatcgttcattccttccttgctttgt

SEQ ID NO: 213334 - DNA, 122 bp, Homo sapiens
acgtcctctccgggcagaagaagccggccacgtcgcagattataagggcggagctgacgtcgcagccagggcagggcgatactcgagctagctctcgagatcagcgagaggttacttccggg

SEQ ID NO: 213335 - DNA, 122 bp, Homo sapiens
cgtcccctgtgcctagtacaccgtagtttgacacaaaataagcactttgtaaatttagtccgaaggaatggaaatctcatcctacaatccattcagttattaatagagcaactgaggcccag

SEQ ID NO: 213336 - DNA, 122 bp, Homo sapiens
gaagctacagaccttcgtggtgagtgttacagctctcaaatcggcgcgtctggagttgttcgttcctcccggtgggttcgtggtctcactggcttcaggagtgaagctgcagaccttcgcag

SEQ ID NO: 213337 - DNA, 122 bp, Homo sapiens
cacggcgctgggaggctcaggccggaggtgggggtgttgggggatgcggatgggccgccccgcgcccgaacatcctggaagcccgtcacccgaggcgtggacccgtgccggcgctctgcagc

SEQ ID NO: 213338 - DNA, 122 bp, Homo sapiens
ttgcatggcacttgttattactctttaagtctgtctgtcctacctcactgtaaaccttaccgggcagagaccatgtttgttgcttaccattacccccacttagctgaatgtctggcacataa

SEQ ID NO: 213339 - DNA, 122 bp, Homo sapiens
gacctagagagggacttcccttgtcctgtctgtcgaaagacatcccgctaccgcagtctccgacctaatcggcaactaggcagtatggtggaaattgccaagcagctccaggccgtcaagcg

SEQ ID NO: 213340 - DNA, 122 bp, Homo sapiens
gttacacagcaatagataatgatagactctctctttaaaaaaatcagttctggcagggtgcgatggctcacgcctgtagttccagcactatgggaggccaaggcgggtggatcacctgaggt

SEQ ID NO: 213341 - DNA, 122 bp, Homo sapiens
tgacacaaccccgccacccagtgacgcaacccccagtgacacaaccctgccacccggtgacgcaacccccagtgacacaacccccagtgacgcaaccccgccacccaatgaagataccacca

SEQ ID NO: 213342 - DNA, 122 bp, Homo sapiens
accagccactctcacaaccttgggctcaggctgagccactccacctctaaggaggctcttcgcagtggggtctctaacctcagggcttcttaatggacctcccaattcatgcatgcacaccc

SEQ ID NO: 213343 - DNA, 122 bp, Homo sapiens
aggtttgagggacgtcgtagtccccagggttccagctggcggtgggagtgggccacaggccgggtgatgagccgggacgggagcccggaagaaggggaaggagaaaggcggaaattgcaggt

SEQ ID NO: 213344 - DNA, 122 bp, Homo sapiens
ccttggattgcaacttctctactttggggtggaaacggcttctccgttttgaaacgctagcggggaaaaaatgggggagaaagttgagtttaaacttttaaaagttgagtcacggctggttg

SEQ ID NO: 213345 - DNA, 122 bp, Homo sapiens
tgttccctgggaattgctgggcttttgaaggcgaccaaggccaggtggtgatccaactgccgggccgagtgcagctgagcgacatcactctgcagcatccaccgcccagcgtggagcacacc

SEQ ID NO: 213346 - DNA, 122 bp, Homo sapiens
cagccaggagacccccgccagggccaccctgcacacatacaaggaggaccggggaccgcgcggcatgccttccagacgctactagagctcacactcaggagccaaggggccggtttgctccc

SEQ ID NO: 213347 - DNA, 122 bp, Homo sapiens
tcgtcacatgcagtcctgaaaagccttttctctatacttcacacagcccagaccagcccacgtggattcctcgcccggctgcttccgcttccattttgtcccctcctatttctcattcggcg

SEQ ID NO: 213348 - DNA, 122 bp, Homo sapiens
gctcacctgagacccagcagagcagaacagacagggtgagcagcataagggctttcatggcgagggtcctgagaatggtggcaaccacagcagctgatagagtagattttcaaggatccagc

SEQ ID NO: 213349 - DNA, 122 bp, Homo sapiens
gatgatggacactcccagaaacatgtagaccatggccacaaagtacaccactgcccgtgccgccttgtcacccagcgacgggtcgtcgggctcccacacgggcagcagcacccccggctggc

SEQ ID NO: 213350 - DNA, 122 bp, Homo sapiens
ccgccgccccctcattcatccccactgggctccctttccctcaaatgctctggggctctccgcgctttcctgagtccgggctccgaggacccttaggtagtcccggtctcttttaaagctcc

SEQ ID NO: 213351 - DNA, 122 bp, Homo sapiens
agcaagactgaggaatgagggctagttacacacggaggaagaacaggagaatgtgagtgccggtctctgccagagtgccagtatatgcactcttttgctcatggaaaaatttatttcaaagt

SEQ ID NO: 213352 - DNA, 122 bp, Homo sapiens
gctaaccgatctcagtcgccttcttctcgaagttttccgtagggagctaagtgaatacaccgaaggtcttacctctgaacccctcacagcctagggacaggagcggccggcttacctggtgg

SEQ ID NO: 213353 - DNA, 122 bp, Homo sapiens
taagtaacacagaaactgttacgctcttgcatgcagggtccctagatacgaagttcgaatcgatggaaacgtagctcaaaaggcgacgccaacaccccggagaaaacactgagctactccaa

SEQ ID NO: 213354 - DNA, 122 bp, Homo sapiens
ggcccagtgcgggggcagcgatccccgagcgctgagctggctgcgctgaggcctggcgtgcggagaaacaaatatattggatatttgctggtctaggggaggggtgaggcaagaatggaggg

SEQ ID NO: 213355 - DNA, 122 bp, Homo sapiens
atgagtgcttccagcaattagtgcacgcaatggcggggggaagggcgggaatggcgggggcgataggggtaaaaatgcagattcctggactccacacccagtgactctgttcagtagttctg

SEQ ID NO: 213356 - DNA, 122 bp, Homo sapiens
ggtgaaagtgactaggtacatggagaggaacagcccaaagagaatgaactgaatctctgacgttgctgaaaatcccaggaggagaaattcttgggcatgtgtttgatttcctgtttccatgg

SEQ ID NO: 213357 - DNA, 122 bp, Homo sapiens
tgaaatacatcaatacttaattattatgcaaaggccatagtttacatgaggcttggagctcggtgttataagttctatgggtttggactaatactaccctgtatccactgttacagcacccc

SEQ ID NO: 213358 - DNA, 122 bp, Homo sapiens
gaatggcttagtaataatgagataataacttaatgaaaaacccctgcgagccctgcggggcggggagggagacctggtgtgtggtgctggacgcttcctgagcacctccctgcacagcctgc

SEQ ID NO: 213359 - DNA, 122 bp, Homo sapiens
gggattacaggcgtaagccacggcgcccagccttaatttttcatattttagtagagatggcgtttcaccatgttgctcaggctggtcacaaacttctgagctcaggcaatccaccctcctca

SEQ ID NO: 213360 - DNA, 122 bp, Homo sapiens
tcctcgctgcagacgccgttccgcctgaggacagtactcgggcatggggagtcaggtgcccgccacaggaacgcaagagaccgcgccggaccagcgaaaaagctccatgctctcctggtttt

SEQ ID NO: 213361 - DNA, 122 bp, Homo sapiens
cttcttggaagccgagacgcgggccaccctcggtcctcatgctcccggctgctccctaggcgaaagcccgccttgggggttcctgaactcccagccttgagacctaccatcagcccgacccc

SEQ ID NO: 213362 - DNA, 122 bp, Homo sapiens
cccaggctgccaagggcgtgtcgacattttcttttcctgccaggttatcgtgaggctgaccgctgctggtgcgctgaggagacagctacatgtcctagctgtccacagagctggcccgtgtg

SEQ ID NO: 213363 - DNA, 122 bp, Homo sapiens
ctttattttttttttttttattttaccagtgacaaggaccgtggacataatttgtaccttcggtgcagcctctcttttcattgagctgcagcagcattgagtgctaaatgagtcccttgtca

SEQ ID NO: 213364 - DNA, 122 bp, Homo sapiens
tccacaccgttgccatgtgcgaatggcgccccctcgtgttgtggatggtgtaggttgcaccgctgtgtgcacacgtgtgcatacatgcatgcacacgcttggaatttcagctgctctgtccc

SEQ ID NO: 213365 - DNA, 122 bp, Homo sapiens
actgtccccactcagcccgtctcaagtttcaaaagggcagctccagagctgagtggccagcgagcccggctggggcaggagcaggagctagtcatggtacctggggcaggaaagggggcgtt

SEQ ID NO: 213366 - DNA, 122 bp, Homo sapiens
gggtcctgcctgacacccacccactcaccgaagcctctgcccctgggcctgcggtgggcccggtaagggaagtgactctgccccatgcctggggcacctgaggggtgcacctggcccggcgg

SEQ ID NO: 213367 - DNA, 122 bp, Homo sapiens
ccgaggcctgggactcagcgtgtggcatgtgcacgcgggcagcgggcggatgaacggaggcgctgaagtgaatggagttgggggtggactggaaacatccccaaacagcaccggctgcggcc

SEQ ID NO: 213368 - DNA, 122 bp, Homo sapiens
ctccaaaggctgagcaagctgagctacaaggcagatttcatgtctgctgccaggctcgaccgctttacagacaatcctctctcgtctggtaaacgcgtaaaacctacacaatcacaactttc

SEQ ID NO: 213369 - DNA, 122 bp, Homo sapiens
gctctgcaggaaatctcttttgggctgagaccatcctgtttgcccgtcctgtcctgggcgcggccaggcccctctcctgggaggaagcttcggctgaaggccacgtcttggccccctactgc

SEQ ID NO: 213370 - DNA, 122 bp, Homo sapiens
aaaaaaatcaccactccctccatttcttcatagtccttcaggtcatttatttcttcatagcgcttatcactactgtcatcatgtcatagactgtgtgtttatctgctgattgaatcccctat

SEQ ID NO: 213371 - DNA, 122 bp, Homo sapiens
tggttgatgtgaatggtgacagctcctgtgaggggcttgtttcttctgaacgtgtgcccacgtgtgtatgcacgtgtgtgagtgtgcatgtgcccacgtgtgtatgcacgtgtgtgagtgtg

SEQ ID NO: 213372 - DNA, 122 bp, Homo sapiens
cgggtgagcagggaactgcgcctcagcccctcccacgggccgcccactgattccaggatccgaaaacgcttccagctgctccgtcaccccaggaaggcagcgccggcctctgggcggttctg

SEQ ID NO: 213373 - DNA, 122 bp, Homo sapiens
ttttttctgtcgtctttctccagcattgcagctattctaaacaagccaaattggaataaacgctccatgacactactcaccaccttgtgttttcataggggcggctgcctaacagtttacac

SEQ ID NO: 213374 - DNA, 122 bp, Homo sapiens
caagtgatctgcctgcctcagcctcccaaggagtgctgggattacaggcgtgagtcactgcgccaggcctgccctgcctgtcttatcagtcaccaaggcctgtcacttctgcctcccctccc

SEQ ID NO: 213375 - DNA, 122 bp, Homo sapiens
cctaacaaaatgtgtagatgactttttattcattgattcaaaagacatacattcagcccccgctatttactggatattaagctctggggctacatggaaggaccacgcagacactcttcatg

SEQ ID NO: 213376 - DNA, 122 bp, Homo sapiens
agtttgcatcccggttccagacaattccagggctttggaatcatgcctcagactttctggcgctctcgcctccacaacctaaaaacagagacgctaggagagaggctgaaagacgcgcaagt

SEQ ID NO: 213377 - DNA, 122 bp, Homo sapiens
cttgattctggtgtttcccccttggcatgagatgcaggaaatttttattccaattcctttcggatctttatttcatgaggcacgttattattagtaagtattgttaatatcagtctacttcc

SEQ ID NO: 213378 - DNA, 122 bp, Homo sapiens
accgggctaggtgttgcctggctctaggtggtcccttaccactcctcctccatacagatccgggacatcctggccaccacgcccccacctgtgcagccgcccatactcaccatcacctgccc

SEQ ID NO: 213379 - DNA, 122 bp, Homo sapiens
cttggagcctggttgtgagatggagttccccggggaacattcagctgatggccttctgcccggcaggaatgagacaaagggggccagggaccctgggagccctgttcacacgctccagagag

SEQ ID NO: 213380 - DNA, 122 bp, Homo sapiens
ggagctgcctttgaatagcaaagtttagttgtttttgttcttcaaccctgtctatttgcacgtgagctaactggggacccagttttgcgtaggcatattgtggttaagctgctgcctggaag

SEQ ID NO: 213381 - DNA, 122 bp, Homo sapiens
cacccgcctcggcctcccaaaatgctgggattacaggtgtgagccaccacacccagccagcgaaatggctatttctagtgggagagccaatatccaaagattcgtttgtattcattacagtt

SEQ ID NO: 213382 - DNA, 122 bp, Homo sapiens
ggagccccgagaactgcaggcccgcccccccttcctcctcctccttcccctcctcccccacgtgtcctccctgagcccagcagcctgatcccagcaccccccgccacctccctcctcccgct

SEQ ID NO: 213383 - DNA, 122 bp, Homo sapiens
gtgctgggacagcccgtggggcccaggcaggaacgggggccaccataggagcaatgtccccgctgagcaacaaacacgggggtgggggcagagcgcagacaggcaggggttccacccagggt

SEQ ID NO: 213384 - DNA, 122 bp, Homo sapiens
gagtcccacagtttcctactcagacggcatcagcgcgtaaccgtgttgagtcaagcgtctcgtttgttcaagtctggacctcacacagcgtggtttttagggagtacacagctttttcagac

SEQ ID NO: 213385 - DNA, 122 bp, Homo sapiens
gcccgcagttctgctctctcacagtgacttgttctccctgcaggccatccagatcctcatcggcctgacgcacattttctctgcaattaaccctgtgctgtattactatccttttgtgacct

SEQ ID NO: 213386 - DNA, 122 bp, Homo sapiens
cgtgcccgcccgaatttgttcccaggcctctgctcctcaacaaacctatgaattctctcccggctggcagcggcccttcgcccagcgcttcgcccagcgcctgcggcctcccgggaatcgcc

SEQ ID NO: 213387 - DNA, 122 bp, Homo sapiens
ctgtgttaaaacacaagagaacccttaacgttaaaacctcaagcttccggagcatgtcggcgggagggacttaacagcggaacccaacattccccggtgaagttttccagccggagtcaggg

SEQ ID NO: 213388 - DNA, 122 bp, Homo sapiens
tctcctgcgctggtccgggctgccccaggaccacaggcgcaggatcgcaggcgcgcagcccgcccggcctcaggagcagggcctgtctggccgtgcggccccacttaatcttaatagcaaat

SEQ ID NO: 213389 - DNA, 122 bp, Homo sapiens
gccagccaagggggcagcgggcggaggatgaaccccggagcaagggaaagcgacagcgcgcgccttcaccctaccgccaacaagtcgaagtctcccaaaggaacctgatcggcggggctgcc

SEQ ID NO: 213390 - DNA, 122 bp, Homo sapiens
atctctccgagcagcggccaccagaccccctcaccatgctccccggggagcactgcaccccgcgaaccccactggacgctggttctctaaaggcaataaggggcggccatgccggtgtggta

SEQ ID NO: 213391 - DNA, 122 bp, Homo sapiens
tgctcactacccgggtgacgggatccataccccgaacatcggcatcatgaaatagacccacgaaacggacctgcacgtgtgctcccatacctaaaataaaagtgctgggggtggtggcccac

SEQ ID NO: 213392 - DNA, 122 bp, Homo sapiens
ctgaccttaccagtgcttcagtgtcaaggtcgcccacctcagtttgtaatgtcatcagggcgagctggcaggtttctcagagcttaagttcccctactctcccataccctgcagctgaggtc

SEQ ID NO: 213393 - DNA, 122 bp, Homo sapiens
ggtttctctccacacagcctagcctgctgggaggcacaaccaggcaaatgtcacagggcccggcccctggactctggagccctgccctgacagctgggccaggagtgcggtcacagccccag

SEQ ID NO: 213394 - DNA, 122 bp, Homo sapiens
acacaagctcgaacccggacccctccccgctcccgcgggtagctactgcttgtcccccgccgagacgcctcctcccattggccgcctgaaacgcacacgcccattggcagctgctctgttct

SEQ ID NO: 213395 - DNA, 122 bp, Homo sapiens
gccacgcccctagatgctgctgggcggcctgcaggagtaccaacattgcagacagaacagcgacctatcccgccgtaagccaaagttgcctgttggtaaattgcgtcttttttctttttctt

SEQ ID NO: 213396 - DNA, 122 bp, Homo sapiens
aattcccaagggagagacaagcagagactggctgaggccaggccgacccccttttctccccgcagcgctgacgggaggcggacgtaggtgcagggcatcccgccagccgcacccgaggcact

SEQ ID NO: 213397 - DNA, 122 bp, Homo sapiens
ggggcggcgcggtcacgtgggatggcgggcagctcaggggatccgggcgacggggtctggcgggcagggttgttccagccgcctttataaagccggcctccccgacccctcctcctctctgc

SEQ ID NO: 213398 - DNA, 122 bp, Homo sapiens
gtttggcccgggcagtgggaggagagccaggggaagatcatcttccttctggctccccatcgtgggagagttaacacttgacactcgttctccaagcccaggtgtgctgcgattcttcaggt

SEQ ID NO: 213399 - DNA, 122 bp, Homo sapiens
actggactcagtgcctcctactgcaccttagacaggctggaagggagctcagagctctggcgcacccagagggataaagtggcttgtgcaaggccactctaggagagagagagtggggagag

SEQ ID NO: 213400 - DNA, 122 bp, Homo sapiens
taaataaatataaaataaaaataaaaaactggctgcttaatgcatagggggctttctttccgggtcatgaatatgtttcagaactagaggtagtagctgacattgtgactgtatcagatggt

SEQ ID NO: 213401 - DNA, 122 bp, Homo sapiens
ccttagagaagattcttccaaccttctgccattctgggaactcggcaatggaagagcctgcgtgtgcatgtatgtgtacacatgtgtgcatgtgcgcatgtgtggtggggaggggaaggggt

SEQ ID NO: 213402 - DNA, 122 bp, Homo sapiens
aaataactctttggcaatgcacttaaaaagagccataaaaatggctcatcaaagctgtcccgctcagtgagaagaatagtatcaagtgtcctctcaagaaggagctattatgaacacagaaa

SEQ ID NO: 213403 - DNA, 122 bp, Homo sapiens
cgaccgcgcgggaccgttaaatttgaaacttggcggctaggggtgtgggcttgaggtggccggtttgttagggagtcgtgtacgtgccttggtcgcttctgtagctccgagggcaggttgcg

SEQ ID NO: 213404 - DNA, 122 bp, Homo sapiens
agcgcagtctcgggtttccatgacgacgacgtcggatggggaacccgggcggggtcgggtcggagcgcatgcgcgttgcgcgccggacgcggaacgtctgccggtgtccccgcgctgctggt

SEQ ID NO: 213405 - DNA, 122 bp, Homo sapiens
cctgggttttgttactccggggcccccggagcttcggcacagctacctgggtctggcaggcgcagaggtgccgtatgcaaatggttcactattaggcgagaaagaaatacttcaaatggccc

SEQ ID NO: 213406 - DNA, 122 bp, Homo sapiens
gttggtgttccaggccatgctgcaggggtgcctggccgggctggcagcgggcggttcggacgctcggaggccggcggggcttttgagacccgggcaggggggcggggcggccacgtggggca

SEQ ID NO: 213407 - DNA, 122 bp, Homo sapiens
cacagggatggaatgagaggtaaacattttgtgtcatttattatataggcacccaatctccgtgttcctggtgaagttcttaagaagctaggaaagtgtctgtttctccaggacaggtcagc

SEQ ID NO: 213408 - DNA, 122 bp, Homo sapiens
tgcaggtccccaacccacgtgctcccggcctcctccgcagggcgccgccttccggctaggcgcaacacggactacatttcccagggtgaacagcggcggggcctagactcggccgcggcctg

SEQ ID NO: 213409 - DNA, 122 bp, Homo sapiens
tctctggggcatggctccattagggccgtgtgcagttgcctgcagggaaacactgatgggcgcccttccagatacgtcgattcccgggttatgagctacatttcccagaagccctcaaggca

SEQ ID NO: 213410 - DNA, 122 bp, Homo sapiens
cagccggggatccccctcgttgcagtgtcactttcgctgggctctggggcagaacaactacgcatttccagacttggcgagatcgggacctagtgtcaaaagaagggtagtgaaccgcccac

SEQ ID NO: 213411 - DNA, 122 bp, Homo sapiens
gtaatttttttttttgaaatttactaaatattagttttaccaactttctaaaaatgaacacgttcattcaacaaatattagttgagtatctattatatgccagtctccattgtaagcgctag

SEQ ID NO: 213412 - DNA, 122 bp, Homo sapiens
tgtgcagcctaggggcagctcacctgaaccagaagtcccagccagcctcttccggggtctcgacatggtcacgctgcaggggactttagtgcggacgattctggaatcaacggagatacaag

SEQ ID NO: 213413 - DNA, 122 bp, Homo sapiens
gctccgttgcccgcgctgttttaccttcccaacgcttgaggcggacgctggggggtcctgcgcctttccctcctgccgctggggactgcaggctaaggccatgtcccgaaagcaggcggcga

SEQ ID NO: 213414 - DNA, 122 bp, Homo sapiens
ggagagagacacagcccagtggccatggtggcctccagatcactacctgctaaagccggccgtgtggagacgtgggctgggccgctccttccctctgtggctccctcctgtgttcattgatc

SEQ ID NO: 213415 - DNA, 122 bp, Homo sapiens
gtcagctggattacagaaagtaggaagaaaagagcctgtgcctctgtaggaaagtaacaacgacttaacttctggaaatgacttcgcagcttagagcccagcagtgcctattttggattaaa

SEQ ID NO: 213416 - DNA, 122 bp, Homo sapiens
gcactatggcactccagcctgggggtcggagtaagaccctgtctccaaaaaacaaacaaacgaaaagggatgagggcaaaattaagacattttaacatatgtggaataagagtataagagta

SEQ ID NO: 213417 - DNA, 122 bp, Homo sapiens
aaatgttaaatttttaatttccagccaagtatgtaagaagcttagaagtcatcactctgtcgtaacaagtaaaaagctgaacaaactgaaaaagcaaaactcttcttagatccatcagagaa

SEQ ID NO: 213418 - DNA, 122 bp, Homo sapiens
ggcaggagaaacgacagcggggcttttgccactcaatttccagttcaattccagaacccccgcagctctgagtccctagcaaaggtcagctgccttgccccaacagccggccccactgaggg

SEQ ID NO: 213419 - DNA, 122 bp, Homo sapiens
gttgctaggtgacgacgccaaacagccgcggcgtcctgcctaccgggagctgacggacgacgactgccaacaccttagccccagctggcccaggaaactgctgcggtggcaggtggcggcgg

SEQ ID NO: 213420 - DNA, 122 bp, Homo sapiens
cactggctcagctggtaggcaccaggccttataaagtggcagtgactcggcagtgaaccccgagtccagcctcgtgacctttgctgacccaagtgtcctggggcttgtccctagctggctac

SEQ ID NO: 213421 - DNA, 122 bp, Homo sapiens
tcgaggtcgtgtcctcgagagctatagggagcctgccgaggccacctgacggcggtgtcgcgtctacactgccggttggactctcaggcacccgctactcagcgccctgcttcccggcgccg

SEQ ID NO: 213422 - DNA, 122 bp, Homo sapiens
gtgtcactgaagcccaagagggcaggggaagtggctgcctttgtgtgcagagccagggcccggggagcaggtgtgcagtgtttccattgcacatcaaggaaactgaggcacaggggaagggg

SEQ ID NO: 213423 - DNA, 122 bp, Homo sapiens
agtgagggagctgctggcgggtgggtctggcaactctttgggaggccgacgcgggcggaccggcgggtgctgggaaccgagcctcggcttgcggccggcagtttccgtgggtctgtgaagag

SEQ ID NO: 213424 - DNA, 122 bp, Homo sapiens
cagccacaaccacaacacctccactccccaccgcgccagaaggtggccagcacggggatgcgctgcggcaaacctaggagggacccaaaagcagaaaatcctagaaaagagttcctgcggat

SEQ ID NO: 213425 - DNA, 122 bp, Homo sapiens
tttgccaccatggggatgtaccaagtgagaccgagtagggggaacgagtggtgattgacgcgccaggttactggccactgctcacctaggcgctagcaaacttctgccaagatcggaactga

SEQ ID NO: 213426 - DNA, 122 bp, Homo sapiens
agccgtcggcgcagcgcagcaccccgtgtccctgacgccggtcccggacccagtcgccgtcgtacttgtcaccgttcctgggggacacacgcacggagtccactctcaacagggggagccgg

SEQ ID NO: 213427 - DNA, 122 bp, Homo sapiens
ttctttgactaggcaagggaactccctgaccccttgcacttcccgagtgaggcaatgcctcgccctgcttcggctcgcacacggtgctctgcatacactgtcctgcgcccactgtctggcac

SEQ ID NO: 213428 - DNA, 122 bp, Homo sapiens
tcttttttttgttttttgagatggagtttcactcttcttgccctggatggagtgcaattgcgctatctcggctcactgcaacctccgcctcccattctcctgcctcagcctcctgagtagct

SEQ ID NO: 213429 - DNA, 122 bp, Homo sapiens
ggcaagcatctcacccgcaccgatccctggcattcccctgtgcccaccccatcaggccttcggggaggcaaagaagtgcccacttctggggggaagtgcctccagctcccagcttcagaacc

SEQ ID NO: 213430 - DNA, 122 bp, Homo sapiens
agttaacctgctacctccaagtgtcccgtatttatatgtattttctaagggaggggaatccgctctcagattgccaattccgaatctcaagatgtcctttgtactcagaatgaaaacacgtt

SEQ ID NO: 213431 - DNA, 122 bp, Homo sapiens
agcctcctccgcccggctgggggctccctcgggctgggtcatccacggggaaggaaggaacgggctcaccgtcagactagccactttgtccagaggtggactaagcctccctcattggactg

SEQ ID NO: 213432 - DNA, 122 bp, Homo sapiens
agcgtggcttcttcactaggagtccagccaaagtcaactgatttggtctccagtggaggtcggaactcggttcaccagcgacgtgaggacccggcccagaggaggcggactttctcttcctg

SEQ ID NO: 213433 - DNA, 122 bp, Homo sapiens
tgtgacgtcagcgttctggaaggcggggtctttgtgatgggcggggttgtctgtaggccccgccccctccgtcctttttttcccttcccaggacttagactccaccaagtttttattgcctc

SEQ ID NO: 213434 - DNA, 122 bp, Homo sapiens
gctgggctaggcggccgctctccccgcccccccgcggcaccccgggtggtgagcgccgcgcgagcccggagcccagacggaccccagccccacaagcccaggaacaggagcggcggcccggg

SEQ ID NO: 213435 - DNA, 122 bp, Homo sapiens
ctggcggagagcctcagaaccacctgtttcctctgctgcaccatgcttgagtgtggaagccgtgcccctgttctccacagcgtgtatggccattcggcacatgtgtagatttgctgaatgag

SEQ ID NO: 213436 - DNA, 122 bp, Homo sapiens
ccagatgtcagaacggtccccggaacactgcggttcccgcctggtccacggggtggcgcgcgggtcacacagctgggctccttgggctagagaggaaacgccaagccaggagacgccgactc

SEQ ID NO: 213437 - DNA, 122 bp, Homo sapiens
tccgcccccagcccaaccctcgggcccacctcagcccgacccgggttccgcctacgtccccgcccccgactccgccctcagctccgacctcgactccgcccccaggcccacctcagcgcgcc

SEQ ID NO: 213438 - DNA, 122 bp, Homo sapiens
agaggagtagaatccctgggtgtcctgaaaaccagctttgcagaggatagcaggagacctcgtcagagatcagcaaataaaaatcacaaaggaagaagagcaatacaatgagtaagtctgag

SEQ ID NO: 213439 - DNA, 122 bp, Homo sapiens
cagagttggccagtgggagccccttcaggctggcttctgtgtccttgtgagatgctccatcgttttttttcttgcataaaaagatgttccaggctcattttgtccctatcctgccctaaccc

SEQ ID NO: 213440 - DNA, 122 bp, Homo sapiens
ggcctggcagaaggctggcagtgaatggaagcagtcctgacacccgagctgtgtgcggcgcgctaattacactgatgtggggtctgggccgcgcagtcctttgctcagaggaaggatgcgat

SEQ ID NO: 213441 - DNA, 122 bp, Homo sapiens
cctggccaacagggaggaacttgggaggggcagccgcaggcggttggggtccccactagccgggcctaggagagcgggtaacggtttccgaccatttggcttcagacacactcactgtgaaa

SEQ ID NO: 213442 - DNA, 122 bp, Homo sapiens
gcccgtcctaggcagggactacacacccagcaggactctcacttttgtttcccctggagacggcacagtgtcagggtttgtgggtgtcaataagtgtttgctgaaacacactgagctgaaaa

SEQ ID NO: 213443 - DNA, 122 bp, Homo sapiens
cgcagattttacacagacacgtgatcgtgggagcacagcgccaagagttccccggggtctcgtaaggcgccaaaaaggagggtcccagtacttcagtttcattcattcattatggacccgtc

SEQ ID NO: 213444 - DNA, 122 bp, Homo sapiens
aggaggtacaagaagcagaaacagccaaggcctggtgtcctcaaataggtggcagaatgacgtggaccctgaataagacgatgaggcaggagagaagagtggcctggtgactcgggaacagt

SEQ ID NO: 213445 - DNA, 122 bp, Homo sapiens
ccctcctccgggccttcgtgacagccaggtcgtgcgcgggtcatcctgggattggtagttcgctttctctcatttagccagtttctttctctaccggggactccgtgtcccggcatccaccg

SEQ ID NO: 213446 - DNA, 122 bp, Homo sapiens
cgatgttcgctgacccaacaaggacagcaggtggagtaggcacagatggaaaactgctgccggtgccctaagcagaaggcaggtggaaaaatcagcactaggacgtcgaagcgatggtacca

SEQ ID NO: 213447 - DNA, 122 bp, Homo sapiens
tggccaggctggtctcgaactcctgaccttaggtgatctgcccaccttggcctcccagagcgctaggattaaaggcgtgagccaccatgcgcggccttcctattacattctgagcacagggg

SEQ ID NO: 213448 - DNA, 122 bp, Homo sapiens
ctcgacacggaaaccccacccgggtctgcagccctcagacctcgacacggaaaccccacccgggtctgcagccttcagacctcgacacggaaaccccacccggttctgcagccctcagacct

SEQ ID NO: 213449 - DNA, 122 bp, Homo sapiens
cttccgcgatgattcatgctggttgtttacagcagagacagaggcagtgcgctgcctgcacgtcttggaattagctgagctgtgagggtgcagcgaggccagcaccggggttcccgggtatg

SEQ ID NO: 213450 - DNA, 122 bp, Homo sapiens
tccaggcctgtgattcttatgtgggtctctcaggtgcgttagcctgagcttagatccttccgggcctgactgtttcccaatctctctttaattggatggagctgtgtctcagtggctgtgca

SEQ ID NO: 213451 - DNA, 122 bp, Homo sapiens
ggcggggcgagctccgaaggggcggggcctaggaggcccagacaccgcccaaagccgccccgacccccaccccgaagggtccccgccgccgtcttagggctcagaggtgtggagctgggatg

SEQ ID NO: 213452 - DNA, 122 bp, Homo sapiens
cccgataaggccgctgagagtggaaaatgactgagtccacctgactaccgaatagcacagcgtgggggcctaccttggcctgctgagaacactgccctgagcctgcggtgggcagaagcatc

SEQ ID NO: 213453 - DNA, 122 bp, Homo sapiens
gcgcgagtgtgcgtgtgtctgcgtgtgtccctgcttgtgtctgtgccagtgtgtatgcgacgggggccgcgccgagctctgtgcgtctgcgtgtgcgggggcgtccgtccttcggtgcctcc

SEQ ID NO: 213454 - DNA, 122 bp, Homo sapiens
cagaggccatgctggtcctgctgctatggcttcctcaaggccactctctctgcttggccacgggggaagggctgggtcacacactcacacacccacacatgcacatggctggacacaggcac

SEQ ID NO: 213455 - DNA, 122 bp, Homo sapiens
gacaaagcacaaactcggctctggtggaccggatacggaaaagcggtgccttggggagggcgggagcaaattcgctttccccacagcgcgtgcgccgccgcaagcatggctggtgatgattg

SEQ ID NO: 213456 - DNA, 122 bp, Homo sapiens
gtgagccaccgcacccggccggttatttttattttcttccgttttttaggaacctagagacgcgtgcccatttgataagggcttcgtcttccggtttgaccccccaccttcggccttcactg

SEQ ID NO: 213457 - DNA, 122 bp, Homo sapiens
cagtcctgagcctgagcagtgtgagtctcagagcatcctgcacagtgaccagcatgcggacggcagcgggagcctcgtggaagaagcggcacagattttgaagagacacagactttgaaaga

SEQ ID NO: 213458 - DNA, 122 bp, Homo sapiens
tgctgccgccctgggttcgggccggcggaaggccctgggcgtgcgctgcggagccgcctgcgaggactccactagggcgctttccaggctggactgccccgggctgcgctggagctgccagt

SEQ ID NO: 213459 - DNA, 122 bp, Homo sapiens
gttgtcgtggttccatcatcaacatcagtagcatcgtaggaaaggtcaggttgagttggacgaggtcagccagccaagtggtatagagaggagaacccctccttgagactcctgactcattc

SEQ ID NO: 213460 - DNA, 122 bp, Homo sapiens
tggtgttgtccacacgatagcgagtgagatctggtagtttaaaagtgtgttgcatccacccgtttctcacacctgctttcaccatgtgatgtgactgctccccttttgccttctgccatgat

SEQ ID NO: 213461 - DNA, 122 bp, Homo sapiens
gcaagaccccacaggtgatacccagcagaagcgaaggtgggagaatgaacctacccccagcgcctgtgcccagcccctcgcctggcccttagtgtgtactcaacacatacttgttgagcgaa

SEQ ID NO: 213462 - DNA, 122 bp, Homo sapiens
aatgggaacgcagaccaccttccaccccaggcccttgctcagctccatctgcccacctgccggagctgggctgacacagccattctaatcaaccctgctgaggtcctcagaatgttctagat

SEQ ID NO: 213463 - DNA, 122 bp, Homo sapiens
gagtaagtacattacaaatttcacccctactccccatctctataaaatgttatcctcatgcgacggaacaggaaaactgagaccaagggaattagccgcctcactgacagtcacatgctgag

SEQ ID NO: 213464 - DNA, 122 bp, Homo sapiens
gtgcttttcatttgaaccagacaaagcagtgtttcaaatgagaactattacctgatttgacgatgccttcttcagctccattctccagccactgagattcactgtccaacaagcggtttttt

SEQ ID NO: 213465 - DNA, 122 bp, Homo sapiens
ctgtgcgggcctccagccctgcctcctgtggggcccctgtcaggttcagctgtcctggctcgggacccagaccctggtccctccctgggacccctgcccaagcgagcatcctggtcccttta

SEQ ID NO: 213466 - DNA, 122 bp, Homo sapiens
gtcttggcgtctgttatccaggagatgcccgtccttctatccagggaccccggaaacaggcgactttgtcaagcccagtcccctccgtagctggatttcacctccagggcagccagctggac

SEQ ID NO: 213467 - DNA, 122 bp, Homo sapiens
acacttggccctgtccaccctcactttcaggcaggacccatctcccagaaacataagtgccgtcagtcccaactcctgcacacttccggctctcccagtcctccccttctttctcgactttg

SEQ ID NO: 213468 - DNA, 122 bp, Homo sapiens
cttctgatgcgccgtttcctaagcccgtcggaaaagcgcagtattcacgtgggagtggcccgattttccaggtgccatctgtcacccctttccttgaccaggaaagggaactccctgacccc

SEQ ID NO: 213469 - DNA, 122 bp, Homo sapiens
gcggccgccaccgtccaggaacagaaagccgaggggttactaaggcaaccaggagcccgacggcccgagtgcgcctgcgcggccgccacccggtggctgacgaagcagggccttgcgtgcgc

SEQ ID NO: 213470 - DNA, 122 bp, Homo sapiens
cggcgcagccgcatttctctcgcgggtagtgggtcgaatgtggggtctttgcgggaaaatcgctctcggaatttctctaaccttcagactcgaattagaaaagtaagggagctccagtagta

SEQ ID NO: 213471 - DNA, 122 bp, Homo sapiens
acctcgtgatctgcccgcctcagcctcccaaagtgctgggattacaagcatgagcccccacgccctgccagtcctagtaacttctaagagagtggtgaggtaactgcagggctgccttaggg

SEQ ID NO: 213472 - DNA, 122 bp, Homo sapiens
gctatctggtgtgatattgtaataggctgaatgcaaaagcagatacaagattccagctttcgtctgtcatcagacattgaagagatttggagaaatgtaaagcagcagtactcttctcacta

SEQ ID NO: 213473 - DNA, 122 bp, Homo sapiens
taggtgttggttacagcagcaccccacttcttagtatcaaactctgccttaggccaggtgcggtggctcacgcctgtaatctcagcactttgggaggccgaggagggtggatcatctgaggt

SEQ ID NO: 213474 - DNA, 122 bp, Homo sapiens
cagccaaccggctgccaggcttgccggagggtgccttcagggaggtgcccctgctgcagtcgctgtggctggcacacaatgagatccgcacggtggccgccggagccctggcctctctgagc

SEQ ID NO: 213475 - DNA, 122 bp, Homo sapiens
cagaaagcaattagtgactaaagcaacagtaagcagtaggtgcactgaagtacatactgccgcaggtcaccaatgggtgacacacacagggctgccaggaggaattctctggactgaagaaa

SEQ ID NO: 213476 - DNA, 122 bp, Homo sapiens
tggcgcatgtgcaaaggaagtccctcctaccactaccgagccgagatgaccaatgggagacggccatctgcgcctgcgcaaaaaagtcgccaatgttcatttccggtctttttcgccccgcc

SEQ ID NO: 213477 - DNA, 122 bp, Homo sapiens
gaaggtcgttgaacctggccacctggttcttcatgacggccgaggcattgcgcagctcagcggagtagttctcgtcattgcctgccatcacagtcaccaccgtaccatccggcacgtccccc

SEQ ID NO: 213478 - DNA, 122 bp, Homo sapiens
caccagggccagcctctagagcagactacagctggggtgcagggatgtgggttccacagacggaagggtaaacaatatagtctttttcagttcctgcatgcattgtgtttatttatgtcaga

SEQ ID NO: 213479 - DNA, 122 bp, Homo sapiens
actcaggttttctggccccgcctctttcgggcccagctgatctccaccgcccgttaggcccgaaacccaggcgcctggagccctgcgccctctgcttccggcccccggcacgcccagggcgc

SEQ ID NO: 213480 - DNA, 122 bp, Homo sapiens
catccggccgccaatcgctatctgcggaggaggtgagaacggtagcggaatcctggccaccgtctaaaacccggggcttagaattgaaattcgtctttatatttttggttgtgctgaaggga

SEQ ID NO: 213481 - DNA, 122 bp, Homo sapiens
ctcctgctttcaagaatctcacaatttggggagacaagattaacacaggaaacaagagttcgataatgtgtggcactgattaacaggacaagggggctcagagccaaagagagtcgcaaaac

SEQ ID NO: 213482 - DNA, 122 bp, Homo sapiens
aaaacgagacacaggtcgggctcacgcacctgtgaacccagcactttgtggaggccgaggcgaaagcatcgcttgaagccaggagttcgagaccagcctgggcaacataggggagcctttat

SEQ ID NO: 213483 - DNA, 122 bp, Homo sapiens
tgagaatgaatttagaaccaactggatactgcacccctcagtattggggcgtcacagcaccgcggcacccctgcactgcgtacccatcttccccggcacccctgcagccccagcatcccaac

SEQ ID NO: 213484 - DNA, 122 bp, Homo sapiens
ggcgggttgcaggttccgagccctgccccgcgggaaggcagctaaggcccggtgagaaatcgagcccagcgccggtgggctggcactgctgagggacccagtacaccctctgcagccgctgg

SEQ ID NO: 213485 - DNA, 122 bp, Homo sapiens
cgcggggtcgatccgcgcccagcccgggccttatccgcggggcgctccctccaccgcccccgcctggccctgagactgctcacccaagatccgctggctgcctcattgtactatgccggcgc

SEQ ID NO: 213486 - DNA, 122 bp, Homo sapiens
catggctacagatttccaacaggggacacacaaatgccccgaaggccaggcagagctttgcgccgacatgtcctctagaccttgagcccgtggctcacacaccttgcaatctctagtgccca

SEQ ID NO: 213487 - DNA, 122 bp, Homo sapiens
atgtaaacttcataaaacaggatttggggaggtaaatggagtagagtcctccagaggagtcgagaaagctagcttggccctcaattgtggttgaggtgattctttcatttagggcctatttt

SEQ ID NO: 213488 - DNA, 122 bp, Homo sapiens
gtcgcacattacgcaataatgtacagaaattgctccaggcctcccacgtgacaatgcctccgcctgccacgcacccagccaatcagagcacttggcacctgcgacggcgctctccccccacc

SEQ ID NO: 213489 - DNA, 122 bp, Homo sapiens
accaagaacccaccaattccggacacacttcctttacaggcacaccttgctcaaagaaaacgggatatactaaaacatcccgaaatgagatgaccacctcacccgccatgatggcacaaaat

SEQ ID NO: 213490 - DNA, 122 bp, Homo sapiens
gcccccgacttctttctccctcccaggcgcgctacccacaaccacctgcgccaaagcgcgcgaaaatctgcagctgcgggacgtgttgtcatccaccgtctgcctccgcttttctcctcaaa

SEQ ID NO: 213491 - DNA, 122 bp, Homo sapiens
gaatctgccaaaaaataataatagtcagtggagagcattagggatctcattctccatcaccggttggtgacagcccccgtttccccaatgcttggccctctctgaaccacagaaacctttgg

SEQ ID NO: 213492 - DNA, 122 bp, Homo sapiens
ccataatccttcctaccctgtagcaagagcccagcctcagactatgtttccttctgcctccgagtgcaatgccttcccccgagtctccaaggtaccaaaccggtcaggggcagctgagacag

SEQ ID NO: 213493 - DNA, 122 bp, Homo sapiens
cgcgcgttccctgcagagaacacgctgggaaggctttgttgggacaacagcttctgcagccgccggcgccctcctggccgggctgcccccacgtcttttccctctgtgtgctgggtgcgcac

SEQ ID NO: 213494 - DNA, 122 bp, Homo sapiens
cgggtggggtgtcccttgatgccatcagcacaagacaaagccctgaacaggcccaagaaacgctgtctgaggttcccaccctggggagggagaggtcggggcttcagcaacgctgagacccc

SEQ ID NO: 213495 - DNA, 122 bp, Homo sapiens
acctgagtctggcggtaggggcgctggtttctcatccttgaacctagttgcactgtcagtcggcccctcatgcctgagcagatgggaaggttcgtcccctgccctgcagcaagagggcccca

SEQ ID NO: 213496 - DNA, 122 bp, Homo sapiens
agatcaggaaagaatagaaggtagcatttgaatttaaccctgtggtcagatgataatgggcggtatgcaaggtggttcactcatgtggccaggggagaatccagagagacactctgggattt

SEQ ID NO: 213497 - DNA, 122 bp, Homo sapiens
tcactgagaaggtccctggggacagccccgccgcggggggaggggggggggggagcgcgccggtccccgcgctcgaaactcgcccgtacctctgcttcatctgcacttagttttgttttact

SEQ ID NO: 213498 - DNA, 122 bp, Homo sapiens
ggaggtggaggtaggggagaacggcgaggggctggcccgaggtacctacatctccggcgccgggaatttgtcagcctcaaacccttttgcccagctgggtccgggtgaaacgacgaagccgc

SEQ ID NO: 213499 - DNA, 122 bp, Homo sapiens
ttcgtatctgtctttcccctctgcttctgcccacaaagtttcatgatccacagcactgttcgtaacactcctccctggaacaccatcttccttctctacatagctagataaaattcacacca

SEQ ID NO: 213500 - DNA, 122 bp, Homo sapiens
actttgctgggtgccaggccctgtcccaaacacttggcatttggtaactcatttaatccccgcaagacctcccaatgtgataggtactgacattatccctatttaattgagagaaagtaggg

SEQ ID NO: 213501 - DNA, 122 bp, Homo sapiens
atggagaggcgaggtgggcggagcagagggcgtggcttcggggcagagtgggccgggtaccgcgcttggtcttagcgcatgcgcactcccggcagctacgcgacctgtgaccatggtggctg

SEQ ID NO: 213502 - DNA, 122 bp, Homo sapiens
gccgctggcgagcgggtagtagacatgcttctggaagggctgcggggggcacaaagagagcgcggcgggaggcggggatggggggcgggcaggctggggagctgggggtccggggaagcccc

SEQ ID NO: 213503 - DNA, 122 bp, Homo sapiens
caaggggctggctttgaggtcttaagtgaggggtgtcccctgccttgccccgtattttgacgttttgctccagtgggaagggattctgtaaacatccagtctgtatttgggccccccggatg

SEQ ID NO: 213504 - DNA, 122 bp, Homo sapiens
gtcgggaaggaggaagcgtgacagctggagcgggtatcgagaagggtctgcgctgggacgcgggggtgcagcgggagggctgggcccgaacccggtgggtaacgtttcccagaccttcccct

SEQ ID NO: 213505 - DNA, 122 bp, Homo sapiens
aatgcaatagttcagtcataaaataaaggcctcaacctagcagtagcagtggcagtagatcgattgcagggcaattaggagatggaattggcaagacttagtgactaattggatgtttctag

SEQ ID NO: 213506 - DNA, 122 bp, Homo sapiens
tctcccaggctcagtcccgcaggcgccaaatctgcgcaggagagcactagcaaccgatgacgtattgaggcccacacctctgggattggctgtcctgcttcgacagccttgaaagtgggtaa

SEQ ID NO: 213507 - DNA, 122 bp, Homo sapiens
ccgcgtaaccagcgcaaggcgctgaacatctccgagccctttgcggtatctgtgccgctccgcgtgtccgcagtcatcagcaccaacagcacgccgtgcagaacacccccgaaggagctgca

SEQ ID NO: 213508 - DNA, 122 bp, Homo sapiens
cagatgagagtgttctagatacaaggagagagagagggatcaaaggtgacaagttcctagcgtgggtacctagatggctgctgaggccatcatccaaaacagaaggagatacacattggcta

SEQ ID NO: 213509 - DNA, 122 bp, Homo sapiens
agcacgcctcaagttttaagatcacgtgattggcccaaacctcagagcctggaattttaccggcggactccagagggacggaacgccaccgccatttcctgtccctcgattgtggcgtgaac

SEQ ID NO: 213510 - DNA, 122 bp, Homo sapiens
acataacaagaccacatatcaacaacagcaaaaaattagctgggcattgtggtatgcatccgtagtcccagctactcaggaggctgagacatgagggacatgaggatcacttgagcccccag

SEQ ID NO: 213511 - DNA, 122 bp, Homo sapiens
taggattttgacctctatgggagaagacagagacatgctgtagtctactgatatgtacaccgatacacctgtatgaatcgagcttgtggccttctgtaccatgggcaagtcattttgtttgt

SEQ ID NO: 213512 - DNA, 122 bp, Homo sapiens
ggaggcctctacctttctcttggtctgaagtttgtctttcttgggcgggacatccttgcccggcttgggggctgtctccatctcgcccacccgaacggcgatccacgtgcaaaactcctctc

SEQ ID NO: 213513 - DNA, 122 bp, Homo sapiens
tatactgctcacgccaacatttttaacaaggtcagctaattttttaggccttcaagtttccgtgctgttctaactgtatacagagaattaccacatggtcttctggtaatgagaaatttaaa

SEQ ID NO: 213514 - DNA, 122 bp, Homo sapiens
aaaaattaacactgtttctatttttctttattgtccctgcaacagccaaagaatttagaacgagtctacgtggacacgcaagtttcagcgagcggggatttcctgcgaggccgagcgcgagg

SEQ ID NO: 213515 - DNA, 122 bp, Homo sapiens
atgaagactggccagcgacccggacccgcccgcaggaaggccccacggccctaactccgccggtgtctgaccccgagctgtcccagcccatggcctagaggaagcccagggttcacatccca

SEQ ID NO: 213516 - DNA, 122 bp, Homo sapiens
tcagaggcaggtggaacttcttaatgcgcctgcgcaaaactcgccattttactacacgtgcggtcaacaagagttcattgcaaaaaaattgttacctcctggctgcttgtctaatacatagt

SEQ ID NO: 213517 - DNA, 122 bp, Homo sapiens
gatctgaaagtaacacggccattacatagatgaaggcagcagaccttggaaatgtaaccccgatggactgactctgggctggcattctcccacccctgcggctactccagactcagaggaat

SEQ ID NO: 213518 - DNA, 122 bp, Homo sapiens
tgagacggagtctcacgctgttacccaggctggagggcaatggcgcgatcttggctcacacgcaacttggcctcccagattcaagagattctgtcttagcttaccaagttgctgggattaca

SEQ ID NO: 213519 - DNA, 122 bp, Homo sapiens
gcccgggaccagcctggaggcagctctggagtgcagctgtccccggaggcctccccagcccgccccgcctgagcagggccctttcccacggaccacagccagggggcagcccaggcccccga

SEQ ID NO: 213520 - DNA, 122 bp, Homo sapiens
gaactccaggtcgcgccaatcagatcagagaaagaactatgggctccgcccctccagccgcggtcatcacagaatggcctggcacggtgaccacggagtgccctggcaccggtgcccgcggc

SEQ ID NO: 213521 - DNA, 122 bp, Homo sapiens
cagaagcaagcagcaggtgccagtgccagctccactgctcagtgcttctggatcctttcacggttctgtaatgtactcagtccccaaaggtatatctcctgccttctaatcacttacaacaa

SEQ ID NO: 213522 - DNA, 122 bp, Homo sapiens
tgccaggtacagtgggacacgttcctagggcgacagaactggtggtcctgtacctgcaggcgagggtgtcagatgagtggcctggggaggagttctggaaaccattcccacgacaggcttgc

SEQ ID NO: 213523 - DNA, 122 bp, Homo sapiens
ctctgacccatgccaagggctccatgcaatgtcagctactttgcctgtgctgtcctcccacggggcagcaggttggctcatgccagggagtcactggccaccagaaggctgctgcttataca

SEQ ID NO: 213524 - DNA, 122 bp, Homo sapiens
tcacgctagtaacagtcagtgctgtggggggcagataaaagggagcctaggaacgctggacggaaatgctgatttgctccagataacagactggaattccaggccatgaggctgggcctagt

SEQ ID NO: 213525 - DNA, 122 bp, Homo sapiens
gcagataatatggtgagctgtggtgtaggaagcactgctagggtcttgctggtcctgccccgccttgtgttaatccagttcctcctgagctacacagctgacaagtggtgaagctgggattt

SEQ ID NO: 213526 - DNA, 122 bp, Homo sapiens
aaaaactgccaagggctgtgggaggtgtgttcttgcgtcatttccgagagacttccgcgccgcagtttccctgcttccccagctccagaacttccggccagcgcagccattttggcttcctg

SEQ ID NO: 213527 - DNA, 122 bp, Homo sapiens
tttgatgaccacgttctgaccctgactgagctggacctgtctctcaaggacatgctgctgcgggacaggaggctggcccccccgggccccgtgcaacggccgcacagcatggtcggcaggag

SEQ ID NO: 213528 - DNA, 122 bp, Homo sapiens
aggcgaggagcggcgcggaccgtgggggaggtggcgggggcgaggccggcaagaggcggccgcgggccgggctgcgtcgggaaacggcggccagacttccccgggaaggggcgagcgagagc

SEQ ID NO: 213529 - DNA, 122 bp, Homo sapiens
gccacagctcgctctcctccaggcccacgcgcagttcgcgctctgtggggtcgcccttctcgctgcccgcctgcagctcattctccacggcgctcagcaggtggtccactcggtactgcagg

SEQ ID NO: 213530 - DNA, 122 bp, Homo sapiens
cggggcaggggcggggagtcgcctgccaatctttcagccacacccaacatggaggcttctcgtcttcccactggccggggaaggcgagcttccacgcaacctctcggcgggccccggctata

SEQ ID NO: 213531 - DNA, 122 bp, Homo sapiens
tttataaataatccactgaaaatcaaatgacaaaaaaatacattatcagcatgtgtatgtcgttcggatgacacaatatcccaatatccttgaatcattaatttactttggtaagataagaa

SEQ ID NO: 213532 - DNA, 122 bp, Homo sapiens
cccagtgtcctgggtgcacatatgagtggggcagccgggcctagccagagcagtgacaaacgcatgcacacatgggttcacccacatacacgtgcatgcttacatgcacaaacactgcacac

SEQ ID NO: 213533 - DNA, 122 bp, Homo sapiens
acgacttcctgcccctcccggcgccgggaacaatggcccgcgccccctcccgctcccggccgctcccttgggatcgcgaggggtaccagacccgtctccagacctgggtcccgcgccccccg

SEQ ID NO: 213534 - DNA, 122 bp, Homo sapiens
actgaagccctattgttcatccattgccacggtctttttcagtccccacactacgttctgcgttgccagagataatgaatttgcacccaaacctctcatagtcccctcctgacagacggaac

SEQ ID NO: 213535 - DNA, 122 bp, Homo sapiens
gcgggtcgctcacggccaactcttaggcgcagaacccgggcgagcgccggtcggggggcccgctgcatcactagccttgcaggagcctagtagaaatatttagcacccgactcccaccctca

SEQ ID NO: 213536 - DNA, 122 bp, Homo sapiens
ctagtccttcagtctaaggcttgtttagcacaagacaagggatagcacgagttacacgcccggctgcctggcacctgcccagcacccacccgccaccagtggggactgaccgcgggctgggc

SEQ ID NO: 213537 - DNA, 122 bp, Homo sapiens
ttccctggcgctgggccgcagacactctgtggttgacagcctggtcctgttcatcttgcccggctcccacttcacagctcacactggtatagtgtggccccctcctcttctagtatttccat

SEQ ID NO: 213538 - DNA, 122 bp, Homo sapiens
cacgcctcacagtgccacacgtctgcgtccccacagccatagtggccacttcatgccacgcgtatgtgacttggtgaaatccccgtccctctgctctgtgcagtacagcagccgcaagcaca

SEQ ID NO: 213539 - DNA, 122 bp, Homo sapiens
tctaatacttataagaatgtattcagactgcattatacacacccccacccgcaactgcaccggcagactccccaaaagtggggagggaaatgtggactaaatagaatcaaacagtatttttc

SEQ ID NO: 213540 - DNA, 122 bp, Homo sapiens
cgagatcgcttatcagcccatcagcactggtcacggccacttttatggtctgtgttctctcgtgtgtctgtattcgtgcgacgttccttcattcaggcaatatttgctgagcatccaggagg

SEQ ID NO: 213541 - DNA, 122 bp, Homo sapiens
aagaaagctctgctgttgagatcgtccaaagctgggggctgggagggggggcacgaacttcgtggggcaccatccctccgaagagagcaagatcagagacacccgcccagctctcctgcacc

SEQ ID NO: 213542 - DNA, 122 bp, Homo sapiens
agagaagaagatggactgaaagctgccagttggggactttttgtgatcacggcgttgcagcgttttaaaggaggtgatggggcttgcgctggcttgtcttcccacccaagtgaagagttgat

SEQ ID NO: 213543 - DNA, 122 bp, Homo sapiens
agctctagagtagttcacactttgctggggaagacagtcaccccatacccgccaagttaccgcaaggcaagagccctggaggaaatagctgagagccacggcatgggatggagaaaaacaaa

SEQ ID NO: 213544 - DNA, 122 bp, Homo sapiens
ctttccaaacccaaccaacaaatgtacttcttacgtttcttgattgatatttcctgtcttcgtaaaatgtgtaaaactgagctgtgccccaactaccgtgggcacatgtcatcaggacttcc

SEQ ID NO: 213545 - DNA, 122 bp, Homo sapiens
cccagagcccggattcgtgaagcagttgagtgctgcagcggcagtcgtcgcccctgccgccgctgccaccgaaggaagcatcccagacaccgggaaggtaaaggggctcagctaggaagaca

SEQ ID NO: 213546 - DNA, 122 bp, Homo sapiens
taaaaggaaagcggaagagagaaccacaaagagggcctgggggaaagccgtggagtgaggcgataagggcttgtgtccaggggattcccggtcactggaatccctatcaggcctgcatttcc

SEQ ID NO: 213547 - DNA, 122 bp, Homo sapiens
actttgcagtacattgtagccacggtgagtggcctcggccccgccctccgctcagggccccgagagcgtcagccttcactagcccggcccccaccattcaagaccccgcccagaccccgccc

SEQ ID NO: 213548 - DNA, 122 bp, Homo sapiens
gtctctcctcttcttgttttcccagggccccagaccggaaatggattctgtttgaagattcggatgcattcgcacagcctcttttatttgtttttccttagggccgagctttgattgttttc

SEQ ID NO: 213549 - DNA, 122 bp, Homo sapiens
gacatgtatctctcccacctgttgaacccatagtcttcttgtgtgtcccaggtccacatgcgggcccttccctccctctctccacatcttgcccctgagttcttgagctgcctgaaatgtgt

SEQ ID NO: 213550 - DNA, 122 bp, Homo sapiens
tgatggaagctttgaagtctcctttccagatttcctgaatgagaacagggaagcaaatgacgatctgaagctcatccgggaagaaaaaggtgtcggctttttttgattagttacatttttag

SEQ ID NO: 213551 - DNA, 122 bp, Homo sapiens
actgtaccactccaagatctgttcttttgtgagccagcattgtatgtgtgtgtgtctgtgcgcccacacatgtgtgcacacgtgcatgcatgctttgttttgttttaatgtccatattatta

SEQ ID NO: 213552 - DNA, 122 bp, Homo sapiens
aagtaataggtcctcgaaaaacttccagaaaaacttgcctattaccattaggaaaacacacgatatcttacattatcctataaaatagaaggtacttcctttaaaacagacagaaaaacctg

SEQ ID NO: 213553 - DNA, 122 bp, Homo sapiens
tgaaaagaaaaatctgtgcgatgcctccccacatgtcacgggactctgacttgcctttgtcgtcagagtttgcagaactttgggggacctgagaggggagtgccccctggacgggccacggc

SEQ ID NO: 213554 - DNA, 122 bp, Homo sapiens
gttcgtcgccctctctgggcttgttccccacatgtaaaaggtaggtcatgatggccgtgacgtgccatactttccgtctcctgtctgctctggaggacttgtgctgtggaagctgtttctcc

SEQ ID NO: 213555 - DNA, 122 bp, Homo sapiens
ggcctggttgctaacaggctacggaccagtactggtccatggccaggggattggggaccccggtatagaacattagtttttgttgttgttgtttaatctagtttctgagtaagacaacacag

SEQ ID NO: 213556 - DNA, 122 bp, Homo sapiens
cacccgccttcagattcagcccggcgtgcctgggcttctgaagtcccagagcactcagcccggcccatccacggatggctgggacagagatttacacatacaagtcggatattctggggagc

SEQ ID NO: 213557 - DNA, 122 bp, Homo sapiens
tgtaggatttctgtgccagcggtgaaggtgttctcaccttatagagcaaggtagaaactacgcagacaggcgctgttctttgggatgaaagcagggcctttggggctctttcttagtgtccc

SEQ ID NO: 213558 - DNA, 122 bp, Homo sapiens
gcatccaatcacctctgtttactcttcagttgccgcacagcttgcaccaaacattgcaatcgtcaacaggttggataccattagtaaatgagtactgttagtatcttcagaacaaattctca

SEQ ID NO: 213559 - DNA, 122 bp, Homo sapiens
tgacagaagtagaaaaaaacctggttatttcttgaagtggctatcaactgaaatagggttcgaggacactttctagaacaatgggaacgttttatatcttcatctgggaacatgattcttgg

SEQ ID NO: 213560 - DNA, 122 bp, Homo sapiens
cctaggcaccaagaggttgcctgtggttgtcctctaaagagggcaggattagtccaagttcgtaagtgtttagatggtctgtaactgatcttcatgcatgaatacacaaagcagtttctagg

SEQ ID NO: 213561 - DNA, 122 bp, Homo sapiens
gggcccagggcaggtagcgccgcacggccgcccgcaccagcgttccccgcaacaaccactcgcagcgctccagatgctccatgccggatctcgtcagccaccgtcctcctctccgtgccctc

SEQ ID NO: 213562 - DNA, 122 bp, Homo sapiens
ggagtaattttgagaagaggtgaacaccccagctgctatagtaagagtctttctgaggaccgtgtagttaaggtggcactttccccaagttttcatcactgtattccctagaagggaaacct

SEQ ID NO: 213563 - DNA, 122 bp, Homo sapiens
agaccacacagggagacagtgcacagagctgccgcagccatctgccgcgacttcatatgccgccccggaaactgacagacactgcttcagcaaggcccagcccgtcagatgagtcaatcaat

SEQ ID NO: 213564 - DNA, 122 bp, Homo sapiens
tgtcttctcttgggtaaacaactctggctcccttaactggatctccagtgacagtgacatcgttttaaatcctttcactttttttttttttggaggcagagtcttgctctagtggtgatatc

SEQ ID NO: 213565 - DNA, 122 bp, Homo sapiens
acttgtagatatttccttcctgaatacgtcttcatttaaaaaaggtcagatcgggctgggcgcgctggctcacgctgtaatcctagcactttgggaggccgagacgggtggatcacgaggtc

SEQ ID NO: 213566 - DNA, 122 bp, Homo sapiens
ccttccctaggggtagacagagatgtaccaaaccttccggctggaaagcccagtggccggcgccgaggctcgtggcgtcacgccccccccgccagggctgtacctccgtctccctggtcctg

SEQ ID NO: 213567 - DNA, 122 bp, Homo sapiens
acaggggaggctttgacaagctaataaatatgtcattcgttctctgccactggcagcagccggccccacctgcaacgtggtgggattctgcccggcctggtgggcagtgagtgatggcagaa

SEQ ID NO: 213568 - DNA, 122 bp, Homo sapiens
aagttaaggcatttttaatcacaagaagagatagaaggtcagcaaaagatacaggtcatacggaccttgcagataaaacaggttgcagtaaagacgttggctaaatcccactaaaaccaaga

SEQ ID NO: 213569 - DNA, 122 bp, Homo sapiens
gcttcggcaccccctggtcggtgcagaccgcgtcgccgccaccccagccccagcagccgccgccgacccagccgcagcagcagccgccgccaccccagcagccgccccagccgcagccgcag

SEQ ID NO: 213570 - DNA, 122 bp, Homo sapiens
gagccggggacttctactttccagattcaaaacgtacgccatccctggggtgtggaattacggtgccatccctggggtgtagaattacggtgccatccctggggtgtggaattacggtgcca

SEQ ID NO: 213571 - DNA, 122 bp, Homo sapiens
caattattaagactggcttgtgccaggctctgctgagaatcccaggacacggtggggacacggtggacgcaggctgtccgtcaagggggctagtaagccactaaacaaagggtagccttcag

SEQ ID NO: 213572 - DNA, 122 bp, Homo sapiens
agacatctgcagttcctgatagctgccatgatggcaactgctgagccatttgaaggtaaacgctgtgtttcactatgattctgaggctccccatggggactgctgctgctgcagattcctta

SEQ ID NO: 213573 - DNA, 122 bp, Homo sapiens
gccgattcgtgggtcggtgggtcgtgggccgtgggtcggcggggccagacaactcagcggcgcgcggcgggggcggggctccgaactttgtctctaagtttccggttctgtgctcagcggct

SEQ ID NO: 213574 - DNA, 122 bp, Homo sapiens
cctgtgcggcgcccctttcccgctccgccgcgcactgttgtcatggaggaaccaagatggcggctctggcctacaacctgggcaagcgggagatcaaccactacttcagcgtgaggagcgcc

SEQ ID NO: 213575 - DNA, 122 bp, Homo sapiens
cgacatctgtggccctggcaccaagaaggttcatgtcatcttcaactacaagggcaagaacgtgctgatcaacaaggacatccgttgcaaggtgtgcctgggggtggtggcaaatggctgtc

SEQ ID NO: 213576 - DNA, 122 bp, Homo sapiens
cagcggcagcagcggcggcgttggctgcggcggcggcggcggcggcagcaggagccggagcgacggcggcggcatccccgagactctccgcactatccttacccgtgacagccactgacgtc

SEQ ID NO: 213577 - DNA, 122 bp, Homo sapiens
ccttccccaggagactagactcacactcccgagggctggagcctcccctcaatatcctgtcgagttttcctaagactctagagggaagtctctgctccaggggccccaaagccccgtcctgt

SEQ ID NO: 213578 - DNA, 122 bp, Homo sapiens
tccggaggtttccgcatctctatggtctgggcgtcgagcggcggagcctgtggtctctggcgcaaaggaaagtgaactcccagcgaggaggggaaggagcatcggcttgtctcttcgcgatc

SEQ ID NO: 213579 - DNA, 122 bp, Homo sapiens
atccttgcagcacggctgccactgggtgccacagctcatgctgtggctgcatagccgctccgggagcctgggggctgaagacccactcacctcatcttgctcactatgccaaatgtcaggtt

SEQ ID NO: 213580 - DNA, 122 bp, Homo sapiens
cgaggcatccatccatgtccagggtctggtcattagttaatatcagtggactgcctaaaccgaaactggcagaaggtggccaggggaggggtctggacccagtggagagagtcaggagcctg

SEQ ID NO: 213581 - DNA, 122 bp, Homo sapiens
ctcccgcggcaccgcccgcccgcgcagaccccgagcgcggccgcggacgaagatggcgaccgccatgtacttggagcactatctggacagtaagcgcgccccacgggccccgcgcccgccgc

SEQ ID NO: 213582 - DNA, 122 bp, Homo sapiens
aacaggagcgggcgcagcgtccagcggatggtttacattcttggcatatcttctcccaaccgcaggccggggcccgggcctcctgctcctcctcctccatcgccgcctcctatcctgtcagc

SEQ ID NO: 213583 - DNA, 122 bp, Homo sapiens
ccactcgagccccgaaggagatgctgcccagggcctgggccgtcctcccgggggcattttcgcagcccgccccccgcagcccccagccgcccagagaaagccagagaaagccagcgaacgcg

SEQ ID NO: 213584 - DNA, 122 bp, Homo sapiens
agatatggaagttaggattataaactgcgttgcgtcatgtccgtgggaccggaacacatccgtgtggtgcagatgcgaacagggcaaggcggcctgtagagcagtaaccggcgtccgcggtt

SEQ ID NO: 213585 - DNA, 122 bp, Homo sapiens
gaacagaatgaatgatgtggaaatctgttagcagtggtgtcttctagattctcaaggatccgggtattttaggaacaaaacaagccagcaggtgcagaggtcacaagcctcctgagagggcc

SEQ ID NO: 213586 - DNA, 122 bp, Homo sapiens
tacatagtaggcgggtcatgcagggcagcgggaggaggggcgtgggagggccaaggccgccgagtccccgctgttcagccagcaggagcgccccgcagccctcccgggacacggtggacacg

SEQ ID NO: 213587 - DNA, 122 bp, Homo sapiens
ttaaaaagtaaaattgggattcctggaagagacgcctccgtgttagaggccgtcagagcacgggctttgaacaaaacttccggaacgtatgtgagtggctgtgatgctgcaggaccgtcgga

SEQ ID NO: 213588 - DNA, 122 bp, Homo sapiens
ttgaacgaaggcagactttccccttctatgaaaggataattttcttctcatatttgacaccgattagctctagcagagaattctatttaaagcaatcccttgaaattagaccatgtatgcca

SEQ ID NO: 213589 - DNA, 122 bp, Homo sapiens
cgcagtgccctgcaccggccctccgtttcccccgcgctgccaggccccggctgtgcccagcgctctccagacccgccgctgcctggccgttccctgggctccgcgcacgttgcagcccgggg

SEQ ID NO: 213590 - DNA, 122 bp, Homo sapiens
gagggccgggcggggtctacgggggccgggaagccggcgcgggggtggctgggcgcggggcggggtcccggcggggtctgcggaggccggggtgggcaccgaggtggccgcgaggggagggg

SEQ ID NO: 213591 - DNA, 122 bp, Homo sapiens
acacgccctccgtggctgacctccaagccgggcgggtgcgctgtgcgacgcggaaagcgccgtagagcacgcagaacacgattggctgagctcccggaagtgacgtacctcaaccgcccgac

SEQ ID NO: 213592 - DNA, 122 bp, Homo sapiens
ggctgatggcagaatgtgaattcacttgcaagcggacatgttcgtttccatgccccaaagcgggaagaagaagggcacaaggagacttcgatggttctttcagctcagactcgagctgtgac

SEQ ID NO: 213593 - DNA, 122 bp, Homo sapiens
ccaggacggcctcagcgcggaagccctgtccagggcccgaacgtgggtgcgggctgggggcgcagcggcagaaacgcggccttagacgcgcgcggggggccggtgtcccccccgcccccacg

SEQ ID NO: 213594 - DNA, 122 bp, Homo sapiens
tgcccaagacagctgtcctggcagccgagaggcccaagaaagcttggggcgtccttattccgaaaaagagtactaagcggaccccaaaagcttttgctggtggaggctgctggagaaggttg

SEQ ID NO: 213595 - DNA, 122 bp, Homo sapiens
ctccgcgggagctggagcactctgctgggtcctggggacgcggcgcagcgtggttccaagcgctccgcagtcgccgggcaaccacaatggggctgccttgccgtgagaccctcccccgcgac

SEQ ID NO: 213596 - DNA, 122 bp, Homo sapiens
agagttctggagatgacggtggtgatggctgcccggcaacgtgaatgtgcttaatgctgccgaaccgtgcactggaagtggttcagatgagaagttttgtgttatgtgtatttgaccacaaa

SEQ ID NO: 213597 - DNA, 122 bp, Homo sapiens
tcccggtccctgcccagccagtttgcagggcctcctgggcagggcgcaagcaaggagccacgccaggagacgccaccggctttttcacctgcccctctgggcctgtggaacctgcctcgggt

SEQ ID NO: 213598 - DNA, 122 bp, Homo sapiens
actcaccatttttccccttttcctttgtcttgttcctcagttttttcttggcaacagtcacgttgatcttgcaaccttcaaaggtggtaatctccttgagggccctctgaacatcttccagc

SEQ ID NO: 213599 - DNA, 122 bp, Homo sapiens
acaccccagttcctagtggtcagggaggaaggttaaactctcacctacaggtggcgctggcgcaacaaaggccttcagttcaacttcattgtcgggtaaagttataattaggttatctccag

SEQ ID NO: 213600 - DNA, 122 bp, Homo sapiens
atggggccggaagaggcggggccgttgccaggagacgagacggaatgggcggggcgcgggcgggggccgttgccgggagacgagacggaatgggcggggcgcgggcggggccgttgccggga

SEQ ID NO: 213601 - DNA, 122 bp, Homo sapiens
gacggagcaaagtccaggtggaggcccctgaaaagacagaatcatcacatcgtcattgcccgaaggaggaggcagaagtgctgacagctctcaaagccgccagagcaggggcggccagggct

SEQ ID NO: 213602 - DNA, 122 bp, Homo sapiens
ccagtgggactgacgcggctccagaggcttggctagaggatgaaaggtgagcccctcacccgcccaacatccatgcccctctgtggacccacttgaaaaggtacagggacaaactgcagtgt

SEQ ID NO: 213603 - DNA, 122 bp, Homo sapiens
tggcaatattccatgcacattgtctcacatcaatgctgagagggtaacacttcctgacttcggggggatgggacgatggacgcttcacaattgaaaacctctcagattctgctctgtgtgcc

SEQ ID NO: 213604 - DNA, 122 bp, Homo sapiens
ctcagtggggctggcggcaactctaggtctaacatccctcggaagttcgtgcagcggcctcgctgaaaatggctttacagcccggcagaaccctccgactccgcagcaggacctgcggagcc

SEQ ID NO: 213605 - DNA, 122 bp, Homo sapiens
ctgcccgcaggggacactcggtggagacctggcccgcagtcaggaggagctcgcccagcccggcccggcacatgccccgccttcccggcctccacagccagttcacctcgggcagcccaccc

SEQ ID NO: 213606 - DNA, 122 bp, Homo sapiens
gtagccaatcagaaaaagaacctggcactcctaatttgcgtattcctttcccagcgatgacgtagaacaacgtttgatccaatcagaagtgagcaaatcctgagccttcatttgaatacaaa

SEQ ID NO: 213607 - DNA, 122 bp, Homo sapiens
taaaactcaaaaaaagcagtatgcaagacggtcccggggtaaaattctactgcctttccacggacaagttaaactggctgtaatgtttatgcactaagttaaaataaaatttaaataaaaga

SEQ ID NO: 213608 - DNA, 122 bp, Homo sapiens
ccagaatagggccttgaaccagtccagcagcttgttgaacaaagcgatcatggtcgctgccgccggccccgcccggtgccaggtccccgccgcccctcgctgccctcgcgctgcggcccgga

SEQ ID NO: 213609 - DNA, 122 bp, Homo sapiens
ctgcctcccttatgttcattatccaaatcatcacataggcaacagccaaaggaaaaagcacgtcaagtagagagaatcacatatgcaatgtttctatgttgaaagacaacatggtgggttct

SEQ ID NO: 213610 - DNA, 122 bp, Homo sapiens
tacttctgcggagaaggatcgacgagctttccggagaaagatccgcgagctttccggagccggagccggggcgagcagccaaaaggcccgcggagtcccgctgggccgccccggagcagctg

SEQ ID NO: 213611 - DNA, 122 bp, Homo sapiens
gccttggggctcgtgggcaggaaggcggcgggccagcactaagtcagcatctccagaactcgggccaggccgggacgccgcggctgctgcgggccggggaggcatacttcactcttttcaaa

SEQ ID NO: 213612 - DNA, 122 bp, Homo sapiens
ccgggggccccgggagcagagagacctcagagcagcctcctcctgcctcctgtggacggccggccccagctggtgatcccagccagtcccagctttcagttgctgcccccaccgacagtcct

SEQ ID NO: 213613 - DNA, 122 bp, Homo sapiens
gccacaaaggagtcagggctgtgcattcaatcatggtcgcactggctggcccctgaaggccgtgcgggtcagcagctggcctggcctgccaaagacaagcttgtgcttcctacttctgggat

SEQ ID NO: 213614 - DNA, 122 bp, Homo sapiens
gagcgagctgctgcacgcagccccggctcctgcctgcgcctctccctccacacctcccggcgagcagaggctcaggcctcgaccagccccagagaagggccccacagcgcagcggcgggctg

SEQ ID NO: 213615 - DNA, 122 bp, Homo sapiens
tcattgttgccttcttaagttctgggacaagacctacagaaaccagcccaggaactattgcgccccatccttctccgctgctctgggggccggcgtctaccattcccggccgcgagcccagg

SEQ ID NO: 213616 - DNA, 122 bp, Homo sapiens
ccactcccagcccaggggactcagtaaacaagcagaaaattcttgtccctgggagctgtgcggggatcgtgcgtttggtgaggaattttcctctgtgcaagctggaggggaaacacagagat

SEQ ID NO: 213617 - DNA, 122 bp, Homo sapiens
ttattctctcgctccattcttgttttggggggagccagcgagacagctcctttcggggcgcgctggcaaggtgggagggggtgggggcctgccgattggattctttcgcgtgtgtgtagaag

SEQ ID NO: 213618 - DNA, 122 bp, Homo sapiens
gcggctgctctaatccctgcagcctgtgttttgccctccagacggcagagggcgcgtgttcgccgccgggaaagcggaagcgcgtgtgcgcgcacggccgagggggcgggacatgccggcag

SEQ ID NO: 213619 - DNA, 122 bp, Homo sapiens
cacacaaatgagaacaaaaccctgtgctgagaacactgcattcttccactcgaagcattgcgtggacctgtagcggcagcaccacctgggggtttgttagaaaagaatcttaggctccagaa

SEQ ID NO: 213620 - DNA, 122 bp, Homo sapiens
gacaagctcagaaaaattagtccacaagtatggaaggggaagataggaagtggcttcggtcgaggccagaaagccccagttgcaggaggtggctgccagcaggctgtaacaggagagctgac

SEQ ID NO: 213621 - DNA, 122 bp, Homo sapiens
ccaggagggcctgacgtgggtctgttgttgagtggggattttccatgctgcccgtgagcccggagcccaccgttcccgctgcccatgagcccggagcccgccattcccgctgcccgtgagcc

SEQ ID NO: 213622 - DNA, 122 bp, Homo sapiens
ggcgactgcggcgactgtggagcggggatgtgctgctggccgctgcactcgctcctctgccgccgccgcacgaggagcgccggccgcgtcacagcccgccctcgcgctcgccactgattggc

SEQ ID NO: 213623 - DNA, 122 bp, Homo sapiens
tgaacccaggaccccacagatcctccccgctcctgtctcccggtgacaagggtcctggaacggggcgtctctgactccctgctccaggacgggtttagtacaggcactcacaaccccctggg

SEQ ID NO: 213624 - DNA, 122 bp, Homo sapiens
cccataaaaaaataaattaaaatgctctattagaaaatattcactttgccagacgttcctcgccgggagtcgtcggggtttcctgcttcaacagtgcttggacggaacccggcgttcgtccc

SEQ ID NO: 213625 - DNA, 122 bp, Homo sapiens
ctcagtgagggtgaactgagcatctactccagattcctgcagtcaagaacacctagctcccggtgaggtgcaggagcaggacttcagttttctcatcctgtccctgctgcctgttgctgagg

SEQ ID NO: 213626 - DNA, 122 bp, Homo sapiens
tctaccaggggggccgctcagggctccccaggggccctcgtggcgaggagcctcctgcggcggcccctgtgtccctgcctctacctgcgcacctgcatgtgttcaacccccgggagaacacc

SEQ ID NO: 213627 - DNA, 122 bp, Homo sapiens
gtggaggcgtgtgcctgtgtgagcctgcatgcatacatgtgtggtgcacacatgcacactcggctcttcatgtgtatgactgggttagtaatacagatacgtgatctatacgtgtgtgtgtg

SEQ ID NO: 213628 - DNA, 122 bp, Homo sapiens
accggcgggctgcatggtactgtgttctaggcccaccccgcagcgcgatggccctagggacgttggactttggtccagacctttcctttcttagcctcactttccgcattgggaaaaaaaaa

SEQ ID NO: 213629 - DNA, 122 bp, Homo sapiens
cagatctgctggagccaacagcaagcagggtggtttctgagaaaggcctcacctcgctttcgaaggttgaggttggagagggtggggtgtatcaggattgaatctactcatgggaaaatagc

SEQ ID NO: 213630 - DNA, 122 bp, Homo sapiens
gaagctttgtccaaaatgcacgcagataatcacggaagtgtggatgttgattctgaagaccgccagagaagcaaacctgagtcagatggaagaactgctaaagttttgaggtcattacaatt

SEQ ID NO: 213631 - DNA, 122 bp, Homo sapiens
cagaaaaagcatgatctgatcaactgcgattgacaaagcatggactcataaccctgcttccgaaagcattgatcgtgggtacgatgtctacatttgtgtgagatcagacccggccttctaga

SEQ ID NO: 213632 - DNA, 122 bp, Homo sapiens
ttcacttgaactaatggaaatggtgttccccatcgcccaaaatacagcaatcactgtcagcggcaagcacccgcttaccatggctgtttctgtccatttgacattcttgttaggtattattg

SEQ ID NO: 213633 - DNA, 122 bp, Homo sapiens
gataaatcactcatacaaatgcctgttttaggctctgcaactaggaaacctgctctaaaacgactcctagctgctctctctgaatccacggttgatggctacaatctgtcctccacatcaca

SEQ ID NO: 213634 - DNA, 122 bp, Homo sapiens
gatcaccaaaaaaattgagtacagatatagaagaaaagaggagcagaggttgagccttctcgcttgccaccattaaaatgttaatgttgaggagaagccccaaaaaaggttggagaagcagc

SEQ ID NO: 213635 - DNA, 122 bp, Homo sapiens
gaatgggcaggtctgggatgggagatcccgggagagccgtgggatgggggtcagggggagcgcctgactcagccccggagtccggaagggcttcctggaggaagggacatctgagcaggggc

SEQ ID NO: 213636 - DNA, 122 bp, Homo sapiens
cccatcgtctgagatgtggggagcgcctctgccccgccgccccgtctgggatgtgaggagcgcctctgccctgccgcgaccccgtctgggatgtgaggagcgtctcttcccggccgccccgt

SEQ ID NO: 213637 - DNA, 122 bp, Homo sapiens
tttggctatcagagtgagatcaatgcattcatttgtaattggaacaagcaccggtcagatcgtgaaagaggacttagatcctaaatcgtgtgtgtagtatatatgtgtaaaatgatttacgt

SEQ ID NO: 213638 - DNA, 122 bp, Homo sapiens
cccgctcgcctataaggagctgtccgccacccgggtgctgattccagctctcgcgcccgacgaggtggatttggctgtccaccgagctccggcgcctgtcgttctaattgggtttggatttg

SEQ ID NO: 213639 - DNA, 122 bp, Homo sapiens
ctgcgctgctcccgctgtggctcagagaggacgggcccagggtcctctcccggaaactgacgcaaagggcagtgccagggaggcgggaggatggcgggaggggcctcgatgacccagtccca

SEQ ID NO: 213640 - DNA, 122 bp, Homo sapiens
aaagaaggcaacctgcctgtggataattagaaccccatgatatccatgttataagggaagcgacctcaaagaaaggagataatatacatagtcctagtctttgtttcatttttcttttcagt

SEQ ID NO: 213641 - DNA, 122 bp, Homo sapiens
ctcccaacaaaaggaacagccccttatcatggaccttggacaagccatttagtgtctctccgcccagttttctcatctgcaaagtgggaatgataacatttcctcttttatggagttgttgg

SEQ ID NO: 213642 - DNA, 122 bp, Homo sapiens
tctgtctgcctggagttggatctttttggtatagatccaaacgtagaagtataaggtctacgtttatgtacttgtcagatatttaatgacctccaacgatagacatgcccccccaacacctc

SEQ ID NO: 213643 - DNA, 122 bp, Homo sapiens
tcaggcccgtcacctgtgattcaggcgggccctccagctatgctttcccatgacctaatacggagaagaggagaaggcaggacgtcaccgtccccaggccctcccaggcagccaccacccca

SEQ ID NO: 213644 - DNA, 122 bp, Homo sapiens
gaggaggaatccatcccagggcgaccaagcttgcagagacgaactccgcaccgaccttcacgtgtctccgcgacggaaccggaaccacagctagctgcctctgggaccgcccccgtgagtgc

SEQ ID NO: 213645 - DNA, 122 bp, Homo sapiens
ccaaacaccggggttgccaggatggtcccacagctttcctttccgactcccggaagtggccgtgatctcacgagatcccggaggcgagcgcgaccggaagtccggtcactctcgcgaggccc

SEQ ID NO: 213646 - DNA, 122 bp, Homo sapiens
acccccaccccctcgccgtgtgcctcccacattttcacacacattttcaggagcccagggcgcagcctcacaccgaacgccgcctctgccgtcccctcacttgccccgtgcccccaccgcag

SEQ ID NO: 213647 - DNA, 122 bp, Homo sapiens
atgtttgatgtagcaaaaacagaccaaatccaccacccaaaccctcctgataatccagaccgatctccccagggagaacaaaatgggccaaccatggcagggaggaactgggttctgctaac

SEQ ID NO: 213648 - DNA, 122 bp, Homo sapiens
aatacagacaaacacacatcttgaaacttctgccttgaaaagttttggcggctggggtcccgcgtgtctgtgattcacagagaggaggaagatgccttctgcgaggctggtgccctggtgag

SEQ ID NO: 213649 - DNA, 122 bp, Homo sapiens
aggtggggcttcccgctgtcaaccttcaggtctcagtttatgatcgaaacacccggactccgcccccgtggagaaatgggagcgccctctcctctcacccactaaatacagctggagggctt

SEQ ID NO: 213650 - DNA, 122 bp, Homo sapiens
ccagctgcacccagcgcagagccacccaggcacacagtaggcgcccaataaagacctgtccggcatctggatacctcagtctgtacagtgaaggtgagggtggcctgcacgctctcaaaccg

SEQ ID NO: 213651 - DNA, 122 bp, Homo sapiens
cagctgcacttggggccgcttctctcccttctgttgcaggctttctttcagagagctaggcgaggctgggctggtgtgctgcaacacccacagatgctcggcgcctttagctggtctaggag

SEQ ID NO: 213652 - DNA, 122 bp, Homo sapiens
gaaggggatgggggagcccggacacccagagctccccgagttgggggtgcccgtctggagcgcccccgtcagcccctggcggtgggaggtgagagcgagtggtttaagtgcctgattaccac

SEQ ID NO: 213653 - DNA, 122 bp, Homo sapiens
cagcactgcataggctgagaaggtcagatcaattctagcccatctggccatccactgagccgccatccctcaacacctccctgctccccgatccaactaaggagggcagctgagcctttgca

SEQ ID NO: 213654 - DNA, 122 bp, Homo sapiens
aggcttgcgggtagagcctgtctttgcccagaaggccgtctccaagctgggggcttgctccgcccggagggctctgcggggaccctggcacagcggcctgcagggaggcaccctctgccctg

SEQ ID NO: 213655 - DNA, 122 bp, Homo sapiens
tgcgatctgttccgccccgcgcctcccgccgccgcgtttgaacccgaggaacggcgcgggcgggtctcagccgtgtttggaccaatcagcgtctccgctcctatgatagacatgggcgtctc

SEQ ID NO: 213656 - DNA, 122 bp, Homo sapiens
aaccagccagtcagaaacacaggtgacaacctggacctgtcagcggcctgaagtagaggccgttttttttgttttgttttgttttgtttgtttttttgagacggagtttcgctctgtcgccc

SEQ ID NO: 213657 - DNA, 122 bp, Homo sapiens
cgccctcattggccgcaggtgccaccgcccgccccgggaccgcccgccccgcggattggccgctggctccacctcggtccgccatgttcggacaccgccccccgcccccgccggacggtccc

SEQ ID NO: 213658 - DNA, 122 bp, Homo sapiens
tcagtcagaacaaaagcctggtcttctgccactacctccttgagatttcccagactcccacgtttgggggcttctcctcttgttctttctatccagttgcacgtagttcatactcactcttt

SEQ ID NO: 213659 - DNA, 122 bp, Homo sapiens
aagggttgtgtccagagcggaggagcctcattagcaactgaacagaacccactcagaagacgcactcacccacacgtgcgcgtacacacacacacacgcgcgcactgtactgcaaataaata

SEQ ID NO: 213660 - DNA, 122 bp, Homo sapiens
gcccgccgcccagcccaccggcccggccgcccgcgcctcactgcccggcccggaccgcggcgcccaccccggcccccgccgcaaccgccgcagcagccgccacccctgcttcctccttcttc

SEQ ID NO: 213661 - DNA, 122 bp, Homo sapiens
aagacccaacggagccccagccccacgtgatactaccctgggggcaaagaagcactgtcgcgcccctctttgtgtgacaagaacttcctggaaactgtgacactgaagggccctggggaggg

SEQ ID NO: 213662 - DNA, 122 bp, Homo sapiens
gcatggcctgcttcttctcctccacctccagcttcagccgcatcacagacgtgctcacctcggaccccagctccaggggccccggccccgcctccggcacccacccctgcagacacagccga

SEQ ID NO: 213663 - DNA, 122 bp, Homo sapiens
ggcacagttctaggtggtttacagatattaactcatcgaattttcccaacagccccatgacggtgctattattccctccattttacaggtgggaaatgaagcactgaaaggttaagtcagtt

SEQ ID NO: 213664 - DNA, 122 bp, Homo sapiens
caggtcagtgggtgcagcacaccatgtgcgagctgaagcagggcgaggtactgcctcactcgggaagcgcaaggggtcagggagttccccttcctaggcaaagaaaggggtgacagacagca

SEQ ID NO: 213665 - DNA, 122 bp, Homo sapiens
caagtggggccttccttctgcacttttattctgcagttgggctcccgctccagggggctccgtgtttctaagaaccacagcccagcatcattaaagaaggcattattttgtgtttagtagag

SEQ ID NO: 213666 - DNA, 122 bp, Homo sapiens
ggctgtttccaggtctttgttattcacaagggcattgctatgaatggctgtgtgtgggtccgtgtgttcactttgcagctccctcagtttttaaggaccacaaatccaaggctagggaggtg

SEQ ID NO: 213667 - DNA, 122 bp, Homo sapiens
ctgaagctcctctcgcctccgggaggacgtccaaggtcgtttcttaaagcatccctattgcgcagaaggaacagtggggttcacttttctcgctaatgtgcatataatcgttgcaactaatt

SEQ ID NO: 213668 - DNA, 122 bp, Homo sapiens
gttgtggggctgcatttgcttctgttattattatttgagtaaaagaacgtgtgtatgggtcgcctttatatgcctgcctgtgaaattggttgaacaaacactgtgtattaagtcagaatata

SEQ ID NO: 213669 - DNA, 122 bp, Homo sapiens
attattcataacattgtatgctgaccaagacgtcagaagaccacctgtgcccttttctctcgtggaagataaaacctggactcagggagcaaccacaggctctccactttgaaactttagtt

SEQ ID NO: 213670 - DNA, 122 bp, Homo sapiens
tcttgcaatctttcccttatttcctttgcagacaagtgcagctacgactgctgctgggaccgcgatactgtgatgagactttgcatatttaaaaggatgtcgagagaggaggaggaatgata

SEQ ID NO: 213671 - DNA, 122 bp, Homo sapiens
atatccgtgtttaaaacataaaatgcaatgtttatagtgtctacatgtcccagccatgggcggatggggtggcaaatggtcctggccaagttttcagggtcttccctatcattcttctgcgg

SEQ ID NO: 213672 - DNA, 122 bp, Homo sapiens
ggactgccccgcacagggccggggcagcctggacaaagccggtgtggtgacaggccaaaccgacgcaaaaggttagtccaccctgctggtctctccaaggcatcagggtccgtgggaggagg

SEQ ID NO: 213673 - DNA, 122 bp, Homo sapiens
ccagaaatgaaaaactaaggctggaaggtttagcgatggagcaggaccaacttaccagctcgcggtgctccctagaagctggattcttcgcaggtgcgagcacaccccagatgccagcgtgg

SEQ ID NO: 213674 - DNA, 122 bp, Homo sapiens
atttatatctttcactttcataaacgtatatctgatccaatcaattaatcagaagaaagtcgcaaactcaatcaggattaactgggtggaacttcagaatctaatcagacatcattttctga

SEQ ID NO: 213675 - DNA, 122 bp, Homo sapiens
tctcaagcaacccacttctcccactccctaagcgtgtaacaaaaatatggtgcctagcctcggatctacaaaggcctttcacgcaaaacctgctcagatactcactgcccgttcccgtcgcc

SEQ ID NO: 213676 - DNA, 122 bp, Homo sapiens
agaaattattatcgatgcaatttagataaggtaagataaaaaataaaagcctatatggaacgcagccaacgattcatctgtttgcattaataggttccagcaatggttctacaggcacggaa

SEQ ID NO: 213677 - DNA, 122 bp, Homo sapiens
gtgacgtagcagatgaaagccgggcccgcgctgcactgaggtacttctctgagtgacaagcgggacaagtacgccgtgggcggggccggcgggtcgtgatgttagttcgcgctgtgtggagg

SEQ ID NO: 213678 - DNA, 122 bp, Homo sapiens
tacattgttcccatgtccctctctccccctcaaccctaaccaacctctctgtacgccccacgctccccagggcacgacagtccatcctggcagaagcttcctgacccagagctgctcttctg

SEQ ID NO: 213679 - DNA, 122 bp, Homo sapiens
ggaggcggcagagcgtggggtgaggggcggctgagtggcggcagagggcgaggcgggaggcggcagagggtgaaggcatcttcctgatgctgagccttctctgtggcttcttagcctgcatt

SEQ ID NO: 213680 - DNA, 122 bp, Homo sapiens
tgtccgcgacaccgtgtcggggggcagcaggaggtggctgggggatacgctgctcagacccgggctggcgctgcccatgccgctgctgtttgggctggcggctgtgtctacggaaatgaaag

SEQ ID NO: 213681 - DNA, 122 bp, Homo sapiens
tgcgcagccctcccacgaggcccatggcgccccagggccctagggattgaccgggacccccgactggcagagtccacctgcttgatacacttatttgagaagggaggcctgggactatctta

SEQ ID NO: 213682 - DNA, 122 bp, Homo sapiens
atgggaggaacgcaatgcgtcccgcgcggcgatctgggatagctgcgcaggcgcagcttccggctctgtgtctcgggaattatttgacgccaccggttcagccccgtagaaagctctgatta

SEQ ID NO: 213683 - DNA, 122 bp, Homo sapiens
gaagccggacaacaggcccacaagccgccccgcagacgcgcacgggaacaaacacgaacacgttgtgagccaggccagagaattatctttgtgcacgtggagaagaccttcatctggggctg

SEQ ID NO: 213684 - DNA, 122 bp, Homo sapiens
cctctcgtctttggggggggtccatctcatgcatgtctgttaccatggactccatcatcacggctcccatcacctccatctggcctctgtcatcctgggcacagcatctcatctctggccat

SEQ ID NO: 213685 - DNA, 122 bp, Homo sapiens
accaccaccacacctggctaatgtttctttttttggtagacacagagtctcactattttgcgctgattggtctccaactcctggcctcaagcgatcctcctgcctaggcttcccaaattgct

SEQ ID NO: 213686 - DNA, 122 bp, Homo sapiens
cgcggagatggcagaaaatacccagagctggtgctggacaaagcgctggaccgggaggagcggcctgagctcagcttaacactcactgcactggacggtggggctccgcccaggtccgggac

SEQ ID NO: 213687 - DNA, 122 bp, Homo sapiens
ctacaaacagttcctggacaactggatctctccataggctgcttgagtgtcctgaaaacacggaagcaggcttccccaggctccaagccccaaaatgaatgaaaaagagacccgcaaaggaa

SEQ ID NO: 213688 - DNA, 122 bp, Homo sapiens
tgttccactgtgagtgaccaagtgtgtttctacaaagaggctttgcttccaaagtgcagccgttttccctcagtgtgagtgagtgtgtgtgtgtgtgtgtgtgtgttacaaacctagttttg

SEQ ID NO: 213689 - DNA, 122 bp, Homo sapiens
cccgggggccgcccagtcgccccgtcgccccccgactctggtttcttcccggcccagaaacgcgaggttggctcagccacccccgaggcagggggaaaatcctcccctgccgccccgcccga

SEQ ID NO: 213690 - DNA, 122 bp, Homo sapiens
ccagctccaccacatccagggcagtacctcgcagctctcagtagatcggatcttgtctcccggcttagcgccggggaactcaccgcgcactaagagcggaacgtgaacttcagtctcccctc

SEQ ID NO: 213691 - DNA, 122 bp, Homo sapiens
taacaatctcatgaggcgggtgctgttactattcccgtaatgtagacgaggaaaccgaggcgtgtgctggagcaggatcacggccgtgctcagagacgggctctggatgccatgctctgact

SEQ ID NO: 213692 - DNA, 122 bp, Homo sapiens
ttaagagctgtaacactcaccgcgaaggtctgcagcttcactcctgagccagcgagaccacgaacccaccggaagaaagaaactccgaacacatccgaacatcaaaaggaacaaactccaga

SEQ ID NO: 213693 - DNA, 122 bp, Homo sapiens
ccctccccgcccagccgaccctccccggcaggagcgcgggccgtgcagggtctcgggggtcgaaccgtcctggaggtcacacggccccagagttgcctgtcccaggggtcgcccagtccgga

SEQ ID NO: 213694 - DNA, 122 bp, Homo sapiens
cactctgcagtgggcagacgtcatgatccttcatggagagccattgccggggcacgatcccgggctgctggagggagggaggcgagctctgctctgccattttcagctctgagacttgagga

SEQ ID NO: 213695 - DNA, 122 bp, Homo sapiens
tatacattcatatcgtatgaatgtatagagactagaggtcattctgcagaatgctgtgatcgcatgagtcagacatactggcttggtcggggcaaagggacacatactgcaaataactttga

SEQ ID NO: 213696 - DNA, 122 bp, Homo sapiens
gcgtgggtgggccttacccaatcagtcgaaggctttttgccacagcgtgggtgggccttacgcaatcagttgaaggctttttgccacagcgtgggtgggccttacccagtcaaaggcctttg

SEQ ID NO: 213697 - DNA, 122 bp, Homo sapiens
ggccgcgggggtcgggacaggggtccggggcggctgcgcgggaggcgggagatgccggggcggtgccagcccgcacctctggaagacgttccacaggaagctctggtcgggcagcgccgcgc

SEQ ID NO: 213698 - DNA, 122 bp, Homo sapiens
aaactccccgaattttgatactttcccagccgggcgctgattcgtcacggcgaagagggccgaggaggcccgacctaacacagaataggcctgggtttagcggctgtgaggagccggagccg

SEQ ID NO: 213699 - DNA, 122 bp, Homo sapiens
cttaaatactaaagacaatgaaaaatgccttagtttttttgaattttacttctcactaatcgctgcctcagagattgtgtctgtgatagaaataaaaacttgtctttgggaagatgagtgtg

SEQ ID NO: 213700 - DNA, 122 bp, Homo sapiens
cagaactatgctctttggagggtggaaaggaggtggacccagggcctgccctcaggagtgcggctcaggggcagtggtggggctactcttcaccagggagggacaaccaaggatgaaagggc

SEQ ID NO: 213701 - DNA, 122 bp, Homo sapiens
cctgtgctcacagtagcctcggggcgggggcattgcttctggccttcataatagatgcatcgttttgctgcctttacagttttcaggggtaaggcttgtcagtgtttcagtggtcttagagg

SEQ ID NO: 213702 - DNA, 122 bp, Homo sapiens
ggggggaagttacctggcaggattaggaaccccatcctcctgaacctttatgggctctgtcgaggctgaagcagccaggggctaaagccgtccttagcccctggaagggcactgtgaaagtg

SEQ ID NO: 213703 - DNA, 122 bp, Homo sapiens
tcttcactcttaactgtgcatagcagaggcagcaagaaagaagattctagcacctgagctcggagtccagaatctctaagctgtagctcttctaatgtagagtaccattttgctatgggtat

SEQ ID NO: 213704 - DNA, 122 bp, Homo sapiens
atcgcgcggagcagaggtggcctggatgggtaacttccagcacaggccctcaaagaaggacgggcacatttccggtaacagcctcatttccccccgttccccgggggaaggggggcggctag

SEQ ID NO: 213705 - DNA, 122 bp, Homo sapiens
catttgtcactcttttatctgttcttggcacagcaaccagaaggaattttaaaagatgcacgtaagatgatctcattccctttcttatctggtcagtggcttcctttttcatttggaatata

SEQ ID NO: 213706 - DNA, 122 bp, Homo sapiens
atgtcctggcaattgacaacaacaagattagatagtgaatccccccgtaccattacccaccgcgtatgacttatatgtaaaacatagggaaggattatgtggaacaattgaagtcaacctct

SEQ ID NO: 213707 - DNA, 122 bp, Homo sapiens
ccctcagggggagagtcagatcccgaatcccggggcagcagggatcccggggcaggataccgcaggaacggcccgccaagggactccggagctggaggtgggtgccgggcctcacctggagc

SEQ ID NO: 213708 - DNA, 122 bp, Homo sapiens
gacaatatgaagttgcaaagggataggtcaatatgcagagaagggtagctaaaatggtgacgtcaacagaataccgaggaaccccgactgaccatgttaaagaggggcagcaaagatctcag

SEQ ID NO: 213709 - DNA, 122 bp, Homo sapiens
gcgacccctcccgtttccctgctttggccaatggaggagctacgaatggcacgacctgctcgagcttggcagtctccagttgggctgtgcatggaagcttgggaagactttgttggaagggg

SEQ ID NO: 213710 - DNA, 122 bp, Homo sapiens
gcattcttagccccacttctccgcgctcaaaggccggctgagaaaacgcgagtgactacccgagggcgctgttactccacaatttttctgcaaaagctaaggtcggcaaacatggatattcg

SEQ ID NO: 213711 - DNA, 122 bp, Homo sapiens
cctgacccgagggtcgtgcagtttccttaaccctgactttaagtcagccctctttaaccccgactcccaagctgggctgtcctttgaaagaaaaacgaaaccgcccagttctgagcgtcgga

SEQ ID NO: 213712 - DNA, 122 bp, Homo sapiens
accatgagccaagaatcactgacagccatctcagaggtgcgctatcatcttagaggagcacgtgtgggaggtttttaaggacaaatcctatttgcattccattggagtacacttactcgcat

SEQ ID NO: 213713 - DNA, 122 bp, Homo sapiens
tccactttcaagcttcaggagacgtttgagttcagaagtctggagacagcatctctcttgcggtaaactgaaaaagggaaagaaattccaccggtcacagttctaggaagcaagagatcccc

SEQ ID NO: 213714 - DNA, 122 bp, Homo sapiens
aggaagtggaacctgcggtgaggccccagaggtgacccgccttgtcccgggcaggatgggcgccatcctgcagcccagccctacatccgctctccctctggagtctttacagttatttccca

SEQ ID NO: 213715 - DNA, 122 bp, Homo sapiens
caacgggtggccttaagtgtctttggtctcctccaatggagcagcggcggggcgggaccgcgactcgggtttaatgagactccattgggctgtaatcagtgtcatgtcggattcatgtcaac

SEQ ID NO: 213716 - DNA, 122 bp, Homo sapiens
tgactaagaaaagtaatttttggtcgagccggggggctcctgccttaatcccagcactttcgggggccaaggcgcgcggatcacttgaggtcaggagttggagaccagcccggccaacatga

SEQ ID NO: 213717 - DNA, 122 bp, Homo sapiens
gcaggccctgagcgtgttgtttaagccttttgtttgttttagtctgtctttccagcatgtcgaagtctttctggtctctgattctgccatcctgtggactttctatagctcccgcttcaaat

SEQ ID NO: 213718 - DNA, 122 bp, Homo sapiens
gaaaatttcaaggcttgggaagggtagtggagacctctcaagtctcctgcttctggagtccgggttgggagagagagtccagttgacagccagagtcccaagacacagggccccgtatcacc

SEQ ID NO: 213719 - DNA, 122 bp, Homo sapiens
cctatatctgtcttaccttgtagggatatgttcccttttatgtcaatgcaactgctggcacgactgtttatggagcttttgatccgatacaagagattgcagatatatgtgagaaatataac

SEQ ID NO: 213720 - DNA, 122 bp, Homo sapiens
caccgggtcctgcagattattacgtagtgggtcctggtgtggattcgtgtgcctgggttccgtgcccattcgttgagctggggtacggggatcatcagctacacccagaccacacggaccca

SEQ ID NO: 213721 - DNA, 122 bp, Homo sapiens
cactaatgtattgacaaaaacaaacaaacaaaagttgaaatgcaggaaacctcctgggcccgatagaaatctcaatgaggtcctatctgcttgggtttgttaaaaaaatgcaactaacaata

SEQ ID NO: 213722 - DNA, 122 bp, Homo sapiens
gaggggtcgggtgcgggatggtctgcagagaggcaggcggcggtgcggagccgggaaccacgcgctcaccctccaagtcggacgggcccggcgggggtgggcgagacactgggaacagcggc

SEQ ID NO: 213723 - DNA, 122 bp, Homo sapiens
gggaagtgagttcagtctcccatggtggagcctattcgaaccctgagggattgaacctggcgggagataccagtgcctagtattcagcaccgaggtctggacagcgacacacgcaggactgc

SEQ ID NO: 213724 - DNA, 122 bp, Homo sapiens
ccctccacagcccctgggggagtgacagcctcaccttgtcctggtcttgcccctcggcatcgtcctcctcgccctgcgcctccgtcttggcgtcctcacactcgtccttcggggtagtgaca

SEQ ID NO: 213725 - DNA, 122 bp, Homo sapiens
cggtccagagcctggtgctgtccaccacgcactgttggtgagggtgctgccccagcccgccgacttttccagcatcatgtagatgagctttttaaaggatcttttttaacatgtaagatcac

SEQ ID NO: 213726 - DNA, 122 bp, Homo sapiens
ccccgcacctctctaatttgcttccagaattatctttaaatccacattgttgccctatcacgactcccccctgaaacacctgtgatggcctctcattgttgaaagcataaaatctgatcttc

SEQ ID NO: 213727 - DNA, 122 bp, Homo sapiens
gtagtagtgagccgagtcaatgggagcgagcctggacggcgcagacgccgtaagagatgccgccatcgggcgaaataagtggaacccgggggagaaagggaaggatcctgatgggggaggga

SEQ ID NO: 213728 - DNA, 122 bp, Homo sapiens
aggctgggaatccagaattgagaaatgaactccaccaagatggaaggataagaggagatccgttccaaactcccactggccccgcggtgggaaatcaacactgtcccacgtcctaatcccac

SEQ ID NO: 213729 - DNA, 122 bp, Homo sapiens
gagcagcttctcttaacaatgtgctcgatgaagcagtattcagacattttagtagatctccgccctcaaacacgtccttttaacatcccgagtaaagagacgggaaggaagcgtgagaaact

SEQ ID NO: 213730 - DNA, 122 bp, Homo sapiens
ccacgtgctccatctgcaggtaggaggcggctgtaaggtagttgacgatgtccctaacagcgaattccaaggcgcccgtgtagcaggagaggagcaagtcggccacgatgcgtgcactgtgc

SEQ ID NO: 213731 - DNA, 122 bp, Homo sapiens
ccagggcaccgaaggaagccggtggccagcctgtcagcggcagtgggactttggccaggccggcctggggcccaaactcatcatcaagaccacggcagaggccgccaccctgtgagatggac

SEQ ID NO: 213732 - DNA, 122 bp, Homo sapiens
agggcaagttcaaacgcagggcgtcgagcccacacgcctagagacgcggccaggcacccccgccctcctcgccgcgcagtcgcgcacagtgagcaacagtccagcaccaacccggcttaact

SEQ ID NO: 213733 - DNA, 122 bp, Homo sapiens
gagtacactggtgacatgttgctgtattcttgggcgagtacatgttgctgtattcttgggcgagtacactagtgacatgttgctgtattcttgagcgagtacactcgtgacatgttgctgta

SEQ ID NO: 213734 - DNA, 122 bp, Homo sapiens
tacctggatgaacatgggcccacagtggacgctttcctggcccagccttgaccttagcatcggacacttcattatgtagcgatcactccgctccaaccccatcacccctttctgaaatattc

SEQ ID NO: 213735 - DNA, 122 bp, Homo sapiens
aaacttaatttttttttttttagacaatctcattctgttgtccaggctggagtgcaatggcgcaatcatagctcacagaagctttaaccttcctggctcgagcaatcttcacacttcaagcc

SEQ ID NO: 213736 - DNA, 122 bp, Homo sapiens
ttgttttctttcttgatgtgtaaggaatgtgtttttttcttcttatggtaactgtaagaccggactgagcataaagagagaagacatttgaagtacatgttgcaagcagagccagagggatt

SEQ ID NO: 213737 - DNA, 122 bp, Homo sapiens
cctcctaggaatgatgtgaggactcaacaagagaatgcacgtgttgttctgaatgtagtacggtgcacatagcaagcactcagtactccttaggttttattattgccgttattaatacaaag

SEQ ID NO: 213738 - DNA, 122 bp, Homo sapiens
aagaaggaggaggcctctagggtggtcgggggactgggggccccgccggcagaggtccctcggcctcctgactgactgactgcggccgcctccggccaggacgctgggagctgcctgcggga

SEQ ID NO: 213739 - DNA, 122 bp, Homo sapiens
ctcaagactgcagacagtaaatcaattttatttgtgttcacagaacatactaggcgatctcgacagtcgctccgtgacagcccaccaacccccaaccctctacctcgcagccaccctaaagg

SEQ ID NO: 213740 - DNA, 122 bp, Homo sapiens
cctcccaggcttaggccattctcctgcctcagtctcccaagtagctgggactacagctgccgcccaccacgccgggctaatttttttggttgttatttttagtagagacggagtttcaccgt

SEQ ID NO: 213741 - DNA, 122 bp, Homo sapiens
tccagtctcatcccatccggcccacgcggggcatctggtggaagtctttgccggaggattcgaaagcagcgtcaacgcgcttcccctgccgttgcctggcaaaggccagctgtgggagggta

SEQ ID NO: 213742 - DNA, 122 bp, Homo sapiens
cggcctggtctcacaagctgagcctttccggccagctctgagccctgcagatgatgcaaccgagcttcactgcttgcatcaggcaggggtcccggcggcagtgagggctggaaggaggtgga

SEQ ID NO: 213743 - DNA, 122 bp, Homo sapiens
ttttctaccaagaaagattctcatctgttaacataacatctgttttatatatttcacagacgcctcaattgcaaacaatggacaacccactgagttttgtttctgtgaatatatttatcaga

SEQ ID NO: 213744 - DNA, 122 bp, Homo sapiens
ccgaagaagggggttaagcaaggaggtcttcataccgtggtgcctgcaaagcggactgcacgcaaatccacgggtggtaaagcacccgggaagcaactggctacaaaagccttttgcaagag

SEQ ID NO: 213745 - DNA, 122 bp, Homo sapiens
ttcgcccgccacgggaaggatccgtgagtgtgatcatgcaggcagtgtgttcacccaccgcgggaaggacccgtgagtgtgatcacgcagggagtgtgttcgcccgccgtgggaaggatccc

SEQ ID NO: 213746 - DNA, 122 bp, Homo sapiens
aagcacccgctcttttgcttgctgggagatgtagtccctgggttggccactttagttcatcgttgctaccgccggcgtccagaagactacagttcccagcaggcccagggaaagacaggata

SEQ ID NO: 213747 - DNA, 122 bp, Homo sapiens
ggacacgcggtctacatcccccatcccgggctccccggggtctctcggtgtggggggagccggcccccctgtgccagaggaatgcggcctgaggctctgtcggaaacaatgatctcagttcc

SEQ ID NO: 213748 - DNA, 122 bp, Homo sapiens
gggtcccagggccttcatgcgtggtctcggggaagaagcttcctctggcctggcgcaggccgttccatctgcctcccaggtctgcgtccctaaccccttccccagcttggtgttttaccccg

SEQ ID NO: 213749 - DNA, 122 bp, Homo sapiens
tttaaaattaagagtttcccaatgctgtgcgtttatttgggattctgaaagcacagaacccgcaagcgaccaagacttttcttctatcccagagcagatagctccgcacttacccaacctgg

SEQ ID NO: 213750 - DNA, 122 bp, Homo sapiens
cacagcaggaggcatttgcttgctctctgtgcccctgtgagagctgtttagaccaaaggccggaggctggcaagtgggagatgtcctcactgggacaagacacaggtgctgaattacatcac

SEQ ID NO: 213751 - DNA, 122 bp, Homo sapiens
cctcaggattactctgtggaaggtatgagtgattctctgttgaacttcctgcaacatctgcgtgagtttgggcttgttttccagaggaaggtatgagcgcctagataagtggcttccaggga

SEQ ID NO: 213752 - DNA, 122 bp, Homo sapiens
tgcatcaggggcttcgaagacagtaggagcctgtgctgtggccctttgcattcgcacggccgacttagaggcactgcccatgctccatctcccttcctaccatggacgaatttaagagacca

SEQ ID NO: 213753 - DNA, 122 bp, Homo sapiens
agcccggcggccgcgttttcctggggaagcggcgggcggggtggagcagccagctgggtccggggagcgccgccgccgcctcgatggggtgagtgcgcggcacggagttgggaggctcccgg

SEQ ID NO: 213754 - DNA, 122 bp, Homo sapiens
aaggctgcaaggtgtgactgttgtaaatctcaaggaactcttaaagagcgagttcagtggcgtggggaaatgaaacatttctgtgatcaacattgcttactgcgtttctactgtcaacaaaa

SEQ ID NO: 213755 - DNA, 122 bp, Homo sapiens
gctgatgggggaggcggctccgcagccgcctagaggccccagccgccgagcgcttcgtcccggccctaagtctcggagactggccaagatcaccgcttgcaccgcgctgttgggcgaggccc

SEQ ID NO: 213756 - DNA, 122 bp, Homo sapiens
taaagacattaaaatcacttttgtaaactttttaaataagggaaattgattaaaacaacgcgaagttgtaaaatgccatatactgcatacattttgtgggaaaaaatgtgcatttatctgct

SEQ ID NO: 213757 - DNA, 122 bp, Homo sapiens
ctcagaaatcgagaagctttcttcctctgggacctgtgcgccacatcctatctcctgtgacgctgcaggagcttccctggttttaagaggtgacatggtggagagaaagcacaggactgggg

SEQ ID NO: 213758 - DNA, 122 bp, Homo sapiens
acacttctcatggcctcggccctagtgggagcaactcgctgaagccgagggcagaactggcggaagtgacattatcaacgcgcgccaggggttcagtgaggtcgggcaggttcgctgtggcg

SEQ ID NO: 213759 - DNA, 122 bp, Homo sapiens
tccttcctccatctccccgttgtcttcattagtttcctaggagccaagaacacacaaatccgttctttagttacttgtgctacaacctcccttctgactcacttccctccctaatctatcat

SEQ ID NO: 213760 - DNA, 122 bp, Homo sapiens
gagaaccctgccttgtaacagggcagcggacagcaggtaaattgccttccccgggagtagcgtgccgcccggcaggggcctgggtgtgccaaggcccggctctggggatttcaggacccagg

SEQ ID NO: 213761 - DNA, 122 bp, Homo sapiens
tccctctttctaaatcttcatctgacattaaataaagcaaatcccaaacagattaactgtcgcacggttctgctccgtctcctcagtctgtttccaggtctggcggggggccgggctgcggt

SEQ ID NO: 213762 - DNA, 122 bp, Homo sapiens
ataggtttcctccgtggtgccaacaactcttgtggatttgaaagaggcaacctttttcctcgcgtttctaaaggcctatgaaaagggcacgtcgggaagtgcacataagacgttgaacatcg

SEQ ID NO: 213763 - DNA, 122 bp, Homo sapiens
acggacgcaaagctagcagccagaaggccaccgaagtcgccgaggagggcacaaaggatgcgacccagcacgaagtagccgacgtggagctgcagctgcaccacaaaaacggacactagggc

SEQ ID NO: 213764 - DNA, 122 bp, Homo sapiens
tacaatccacccgtttacagtgggtaattcagtggtttgtcacgtaccatacaatccacccgtttacagtgggtaattcagtggtttttcacgcaccatacaatccacccatttacagtggg

SEQ ID NO: 213765 - DNA, 122 bp, Homo sapiens
tcactcgcctattaatctatgaaatcaccagtgatgttccagatactctaaagagtacaacggtgaataaaacagctgtgactcccagcctcaagtaactcaatctagtcacagagagagac

SEQ ID NO: 213766 - DNA, 122 bp, Homo sapiens
tctttacatcactgccttggtgaactcctatgcatccctcaaaacctggtccaaatacctcgtgtttggcttgggatataaatgatttgtgtataaactttctttcctctgctagacttttt

SEQ ID NO: 213767 - DNA, 122 bp, Homo sapiens
caccgtgtatatctgtcctttactgtctgttccttctccagctgctgctgcctggctggccgactgcgggagaagagcctctggtactcccgggaggccctcggtaaaagcgtgagcaccac

SEQ ID NO: 213768 - DNA, 122 bp, Homo sapiens
gagctgctgcgctcactcagcaactccacggcgcgcaacgtgacctggaagctgggcagccgactgtacggacccagctcagtgagcttcgctgatgacttcgtgcgcagcagcaagcagca

SEQ ID NO: 213769 - DNA, 122 bp, Homo sapiens
cttttattctgaagcgtgggccacaacctatgaggtaatctttggagcttcattctgaggcggaatcccattggccagttggggaagcccctcccaggattcctggcgctccgccttccctg

SEQ ID NO: 213770 - DNA, 122 bp, Homo sapiens
agtccggctaatggacatcagttgggacttaaggccaacaaataatccaacctgagaccccgcgcctgtttctccctctctcgctccgcctgctccctctctcttccttccccttattcctc

SEQ ID NO: 213771 - DNA, 122 bp, Homo sapiens
gtgggggtggtaggaaatgcaggttgaagggaattctctggggctttggggaatttagtgcgtgggtgagccaagaaaatactaattaataatagtaagttgttagtgttggttaagttgtt

SEQ ID NO: 213772 - DNA, 122 bp, Homo sapiens
gcggctccgtcggggaattagctcccgagccgaataaaagcagccaaagactcgcacacccggtagaaggggggcggccccaagaaagcccgggctggggcggccccgcacccccccgtctt

SEQ ID NO: 213773 - DNA, 122 bp, Homo sapiens
acatagccagatagacgtggggctcccaatgagacccgacaatccccttggacaggaggacgtcatcactccatttttgaacctcttaattctatttgttcactattgttttcttttttggc

SEQ ID NO: 213774 - DNA, 122 bp, Homo sapiens
cgctcgcgcaggagaccccgggtgacggggcccggcgccgctaactggagcgaaccccagcgtccgccgacatggcctggaccaagtaccagctgttcctggccgggctcatgcttgttacc

SEQ ID NO: 213775 - DNA, 122 bp, Homo sapiens
tgcactcaagagcaaggctcccatctatcttcaccactgaaccagatacgattagtttagcgtctggcacagagcaaatgcttaataaatacctgctgagtggtcctgggtatttgattagc

SEQ ID NO: 213776 - DNA, 122 bp, Homo sapiens
cagccgcccctcggcatcttcaggatccggctcagatgggttcccaggcctgccagggggcgtcgacctggaggggtctccgcagggcggcgtcccaggttccaaggcgtctggaggcggtg

SEQ ID NO: 213777 - DNA, 122 bp, Homo sapiens
aaaaaaaaaaaaaggccagcaccgaacctccctccacagacaccacctcctccagagccccgggcctccaagctcccagtccgatctgatccttccgctgtcgccaaaatgagagcacagtg

SEQ ID NO: 213778 - DNA, 122 bp, Homo sapiens
gctcagagcagtctgagctccttgaaggcccagagagtaatgagtatgggacttcagtcacgctccccactcccctaacccatgcttgggggccactgttgaaagtcattttgtttctgact

SEQ ID NO: 213779 - DNA, 122 bp, Homo sapiens
ctctcccacagtttcctcccatccttctgtcttttattgtatctttggttcactcatattcgttgactaaggccaaagaatacagatttgccacagagcagggtgtaggggaggaatcaggc

SEQ ID NO: 213780 - DNA, 122 bp, Homo sapiens
gggcgtgggtgtgtgtggggtcagcccagggctaagcgtgtgaacagaaggacctccagtcgcagagcgccaacccctgcccctggtaccattgctgtcagcaaggaggaggctgccaggga

SEQ ID NO: 213781 - DNA, 122 bp, Homo sapiens
gtgcacacacaggacacgcagacgctccaacgcgcacgaataccccgacccacatgggcgcggacacacgtccccacagccgcccgggcagctgcaaacaccggagcatactcacatactcc

SEQ ID NO: 213782 - DNA, 122 bp, Homo sapiens
caacacgtcctgctagggcgaggagggagacagtgatacagcactgggcaagtgctgaagcgacaattacttctagggcggggtaaaagccccagagtatttttgctggaaggaggtattta

SEQ ID NO: 213783 - DNA, 122 bp, Homo sapiens
ggccaagaggggagagagaccccgccccccttaagaagagaagccgcggcccctgcaggacgggggtaagaacaagagactgagggagccagactcctgggtcccccaagagggtaggagct

SEQ ID NO: 213784 - DNA, 122 bp, Homo sapiens
ccagaccctcagtcccgacgcccactagcctgccaagtttcttccaccacactacgccggcggccctcggtagagccaccgcccttctgcagagtaacggcccgcgccctcgggacaatccc

SEQ ID NO: 213785 - DNA, 122 bp, Homo sapiens
gccgccagcgccggtggggctcaggaggctcctctgcaggctcgtctgcgccgtagtcctcgtattccgctgtccgctcgggctccaccggcacgatgaagggctcgcgctcaggcaggtag

SEQ ID NO: 213786 - DNA, 122 bp, Homo sapiens
tttacacctctctggccctttagttttctgctgggaaacccagaacgccagtccagacaccgaggagccgaggaaacaggacagcaggcagggggctgcggagagcagcacagtcacggaca

SEQ ID NO: 213787 - DNA, 122 bp, Homo sapiens
ttggagttcgcccaaggagcttccgccctgggatgcggctgagacccgacaggtgggtcccgtccccgccccagatgtgcgcctggcccctcggaggcgcggctccgcctacgcccagaccc

SEQ ID NO: 213788 - DNA, 122 bp, Homo sapiens
ctctctccttcggctttctccaggagccagcgcgaggcagtagatcggctgcttgagacgcgcgcgcagctcctgcggaccactccctccgccctgcgccagcagctgcgccggctggcagc

SEQ ID NO: 213789 - DNA, 122 bp, Homo sapiens
ttctgagcagggggcggcactctggcctctgattggtccaaggaaggctggggggcaggacgggaggcgaaaaccctggaatattcccgacctggcagcctcatcgagctcggtgattggct

SEQ ID NO: 213790 - DNA, 122 bp, Homo sapiens
cccaagtagaaccaggggcccaaggccccctcgtcagctgggctcccacctccaagctgacgccctcaaccactctgctggggtgagcaaacccaggccccacagctggctagcgggatatc

SEQ ID NO: 213791 - DNA, 122 bp, Homo sapiens
cccagtagccaatatttcttgtccctagtctctctctgcttgttctgtcacgccaattctcggtaaaccctactgggctggaaatttgaagtaaggggcagcacttacctataagacaccac

SEQ ID NO: 213792 - DNA, 122 bp, Homo sapiens
gtcaatgacgggagtgaatgaagtgaagtagaaaggaggtcattggagatgaacagcttacgatgttgagtgctcagactcttggatagtcttccacacacagactggattaactcaagatg

SEQ ID NO: 213793 - DNA, 122 bp, Homo sapiens
cgccgagctgccttgcggtttaggcccagaggttcacgcgagcgagcgcgctgtggtgagcgcgataaccggcgagccgcgaggcgattcggagaatttctgaaggctctgtaataaaaggt

SEQ ID NO: 213794 - DNA, 122 bp, Homo sapiens
ccaggaactccccgccccacgtcgcagctgcacctggagctggtgcttccggtttttgcccgtctagtaggggagctgctgaatttcatacggcttccgtcttcatcactccaatttaataa

SEQ ID NO: 213795 - DNA, 122 bp, Homo sapiens
ttgaggactggggactccgggaaacatctaaaaggcttaaaaactttgtctaacttcagccgggcatggtggctcacacctgtaatcccagcactttgggaggctaaggcaggtggatcaaa

SEQ ID NO: 213796 - DNA, 122 bp, Homo sapiens
ctccagggctcaccgccaagggctccagttctaggtctcagtttccccaacagcacaaggcgcggctgggctccagcgctgtgggatttttccagccccgcacagaggctgtcagatcccgg

SEQ ID NO: 213797 - DNA, 122 bp, Homo sapiens
gcaatgcaccgaggggccaggaggcaggcagaagagggctgggaaccccatcaatcctcacgtgtctaggaccccagtctcacctgaggacaagaacagaaaaagccaccaaggagtaagca

SEQ ID NO: 213798 - DNA, 122 bp, Homo sapiens
ataccaagagaagtgacttaccgacttaatgtctgtggaagggcttcaagttgaacccagcgtttcctccaagcttactcccttggactttttggagcagagagatgaggattctttgccac

SEQ ID NO: 213799 - DNA, 122 bp, Homo sapiens
gataaaaatccaggcggtgaaacgagcagcaacagccccagggacccgggagctggaggccgcagccgcgcgagaaccgccgggttgccggggcgacgcttccggctggcgcgcgcagcccc

SEQ ID NO: 213800 - DNA, 122 bp, Homo sapiens
gagaggagggttgggtaacctgagatcagcgagggtgggaccttagagctagccgagacccgggcccatagctccctgggggttttaaagatgacggcgaacttaaatttggggcgcctgtc

SEQ ID NO: 213801 - DNA, 122 bp, Homo sapiens
ctccagatcggggattgtttggggggtctcccgcctccacactacaggtgaatagagaagcgggggggcctcaaaaagcgcggcgtgaggaggtcaggcttcgagtcccagggcccctgcgt

SEQ ID NO: 213802 - DNA, 122 bp, Homo sapiens
ttattttagctgctgctcacggattgctgttattcagtcaaaaatacaagccaggagacgcgaacgccccaagcaggtgactgggatgttgttctctgattcagctgaaatgacacaaggct

SEQ ID NO: 213803 - DNA, 122 bp, Homo sapiens
cgcggggttcagaatttgtggcgggaccgccagctctaggaggagctttgttctctctggcggcgctgctgccgccgccgccgccaccccggctgacggcgcaggagtcccggagccagaga

SEQ ID NO: 213804 - DNA, 122 bp, Homo sapiens
tcccgcggcacgcgcgccaagtggcaggcgctcctgggccggggggcgcctgtgcggctgcgctgcgaccacggaaagcccgtgggggacctgttcactgcagccatgaacatgatcctccc

SEQ ID NO: 213805 - DNA, 122 bp, Homo sapiens
gggccccgcggcgcagggcgtggggctcaggtggacacctggcgggcctcctggcgggggcgccctggccgcccgggcccctccgggctccttccgggttggcagcggcggcgcagggggcg

SEQ ID NO: 213806 - DNA, 122 bp, Homo sapiens
gtggcctcccctccctctggctttagcttcctttggggttggcgcaggtgggccaggcagcgcaccgcagatctccccgttcccacgaaggctggctcgctgtctctctccgagcgggaggg

SEQ ID NO: 213807 - DNA, 122 bp, Homo sapiens
gggggacacaagggcagagagaagcccacaacagtcttattatgggggccgcacaaacgccggccgtgccggggtttatattaacccaatcaattaaggatggacggaaagacccggcccag

SEQ ID NO: 213808 - DNA, 122 bp, Homo sapiens
attgagaggccccggccgctcctggcgtagtccatcacatggcaatagtcctatttaagccgcgccgccggcgcctttcagcaccactagcgctggccagcaccccgcgctctttgggcggt

SEQ ID NO: 213809 - DNA, 122 bp, Homo sapiens
tttcttttggagtctctgctttcacttctagtttccttttgaagccttatactgctttgtcgttggctgaaatggtaaggcagcagctgacctgtctctagctttccccattaccttgctga

SEQ ID NO: 213810 - DNA, 122 bp, Homo sapiens
gcccaccattaacaactaacccttctatgatataaagtagcacaaaaataaattttgtcccgtttccatacacgcatttcacactactcattcaaaattctcaattacccacttattacaag

SEQ ID NO: 213811 - DNA, 122 bp, Homo sapiens
aatccgaggagggctggtcactactttctgggtctggttttgcgttgagaatgcccctcacgcgcttgctggaagggaattctggctgcgccccctcccctagatgccgccgctcgcccgcc

SEQ ID NO: 213812 - DNA, 122 bp, Homo sapiens
agccccctttccccgcgctctctgtcctcgaacccgtcgtcccgtgactcttcgccgagccgagacccgtcccccgtgtgtggcagcctgcggccccccatcgttatccacagctctggcaa

SEQ ID NO: 213813 - DNA, 122 bp, Homo sapiens
cgcagggcaaggcaagctggcgggtggcttttgtcccatgcagcggttcctggagagaggcggagctgggtgccgagcgtctcagggtgggcggggcgacacggtcccctttttactgtccc

SEQ ID NO: 213814 - DNA, 122 bp, Homo sapiens
acctgctctcaggccctttcccaatctcttttcggcatctgctcagccttatccttgtcacgtcccagtcccctccccccggccccagcccaggaaacaaaccacactccttccagacataa

SEQ ID NO: 213815 - DNA, 122 bp, Homo sapiens
gcctgccccccagctccttgggccccgtttccttcgcatcccgcacacccaccctcctcgcgagggcagcgtccctagcacacgccctagcaccactctcctctgacgtccgcctccggatg

SEQ ID NO: 213816 - DNA, 122 bp, Homo sapiens
tgtgtgtgtgtgtgtggtggggcgggggtggggggcgagggtgcaaggggagaggttgtacgccgcttttccgaacccagctctaaatggtttctcctaagcgagacaaggattttccatag

SEQ ID NO: 213817 - DNA, 122 bp, Homo sapiens
ctgggcctttgggagttcggtgcagctaatgccttccagaggcccagcccctgcgcctggcgctgccctcctggtgcccacgctggctggctccctgccgtgcatcccggccacgctcactt

SEQ ID NO: 213818 - DNA, 122 bp, Homo sapiens
ctgcgaaaagaaaaccttgggtggcagtgatttgaacaccggcagtgctggggcaggacccgagccagcggtggggagagatatagtcagagaacccagcaatacagatccgtccttgggca

SEQ ID NO: 213819 - DNA, 122 bp, Homo sapiens
tccagcatgaggatttgccgggacagagttcagcctgtactgagccgaacagaaaatccccggcacgctgtctcctccagcctccagaccacggtgggtggggaggcaacattttacctctt

SEQ ID NO: 213820 - DNA, 122 bp, Homo sapiens
tttccccgacagtgtgacaagagggcctggcagggctggtctggaagttcttccctgtctcgggggtgtccgccacacgggccgagcccggccctgcagcccccaccacacctgtggccgag

SEQ ID NO: 213821 - DNA, 122 bp, Homo sapiens
ttgaaccacgacgccaatgactcgggagacaaggcctgggtgacggataaatttagcgcacgagtcgagtagctagcgcgggccggcaggcgtgggaccgcgagccgcgcgggggcctcggg

SEQ ID NO: 213822 - DNA, 122 bp, Homo sapiens
ggagtctctctgggcctccgcccacaaattacaactcaactactgccacaactcaactcccgccgtccccatctccagacgcacccgccgggcatctgtctcccatatttctttcgagatcc

SEQ ID NO: 213823 - DNA, 122 bp, Homo sapiens
ttagaagaaatagtttaatagttctaaatgtggggtttcagagagccctatgtcaagagccgctgtacactaggttgctaggagactggacagccaaagaaacaatgccctttcctgtgacc

SEQ ID NO: 213824 - DNA, 122 bp, Homo sapiens
gcagaacgaagaggaataccatttctgctctggctctgacacagccagcatttggccaggcgcctactgtatgcgtcagtcaggtgctgcccttagcactttccccatgttaactcgttcca

SEQ ID NO: 213825 - DNA, 122 bp, Homo sapiens
tggagtaaccacatgttctgaagcaccccttcacacacatatccacagaacacatctcaacgcatacacatccgcatgtgcacagacatattcaaacctaagcctgtgtcagggtgatcatc

SEQ ID NO: 213826 - DNA, 122 bp, Homo sapiens
taatcatggcagaaggcaaaggaaaagcaaagtcatatcttacttggcagcaggcaagagcgcgtaggcaggggaactcccctttgtaaaaccatcagatctcatgagacttattcactatc

SEQ ID NO: 213827 - DNA, 122 bp, Homo sapiens
acgccgggctcgcccgctctctcggcgcctgcccggccgtttgaagccgagaggcagcggcggcgcggttctaaccccaacagctgcccgcccaggcgccctgcgggacccgggtagggagc

SEQ ID NO: 213828 - DNA, 122 bp, Homo sapiens
taggtgcaccggccccagtcagattaacatccaaaaagactgaggctcgaacagagagtccggttaccttttaagcattttgtggggttgggggagatctgtgcagggggaagcatattaca

SEQ ID NO: 213829 - DNA, 122 bp, Homo sapiens
ccgggtgaaaagggaaacgccttactaaacgatgttcccgtgatcagaatcacgggctaacgtccctccgcttccgcagtcttcaggcctcaggcactgccagtgacattagctgctgtgcg

SEQ ID NO: 213830 - DNA, 122 bp, Homo sapiens
acttgaggcacaagctcgacgaattgcgtaggggtctgtaattattcacaaacgacaccacgacttctagcacactgctcaatttatggaatgagagacagggagaagatgccagagtactg

SEQ ID NO: 213831 - DNA, 122 bp, Homo sapiens
cagcaactgcagcatgctgtccgagcgcaaggacgtgctcacggcgcaccccgcggcccccgggcccgtgtcgagagtttattctagggacaggaatcaaaaatgtaagtctcagtccttta

SEQ ID NO: 213832 - DNA, 122 bp, Homo sapiens
gctttcaagagctttccctgctatgatacggaccgcgtggactcgcccttggtgacctgacgttaattctgactctgtggagatctgtcagacgtgaaatcggccctgtgatgagctaaggt

SEQ ID NO: 213833 - DNA, 122 bp, Homo sapiens
caaccccagatgtgagccctctggccaacctacctaacccacctgcccccagtggcattccggtctttccagtctgtccaacacacggcagccacagaacactgtctgcacgccaggactag

SEQ ID NO: 213834 - DNA, 122 bp, Homo sapiens
gctgggtggctgggtggggaggcttgcaaccatagcttccacaatgatggcaatatttttcgtcaacagcagttcacctagtgagtgttgagactctgggtctgagtgaagctgagggtaga

SEQ ID NO: 213835 - DNA, 122 bp, Homo sapiens
aatattcagaaagttatttttggccttgctatgtcaaaaagtcaactgtacaaagatctacgtgttaaacctaaaattatgattttaaaagtctattaaaaacaagaatgtcatgcattttt

SEQ ID NO: 213836 - DNA, 122 bp, Homo sapiens
ttgctgcagtggcatttattaagtagcccctccgcccacctcccccgtggcagtgacaaccgtgccctgtgctaatcctcaggcagcagggctccattctgagcgtctgtgctaccttcaac

SEQ ID NO: 213837 - DNA, 122 bp, Homo sapiens
gccaccatgttcagctggctgaagcggggcggggcacggggccagcagcccgaggccatccgcacggtgacctcggccctcaaggagctgtaccgcacgaagctgctgccgctggaggagca

SEQ ID NO: 213838 - DNA, 122 bp, Homo sapiens
ttacgatacaagctctgcttgtagaatataaacctgacaacaagtaaatgaacagcgtttcgttatctctttaaaacctggctgacaatactgcacactgtgtacccttaatataaagaacc

SEQ ID NO: 213839 - DNA, 122 bp, Homo sapiens
gccccaaaattgaaggccatgtcgcgaaagcaggagaccaagtaggttactcctgcgacgcgcagcgcgctccccttctcagtccggccgggaaaccgccagtcagatcaccgagttccgcc

SEQ ID NO: 213840 - DNA, 122 bp, Homo sapiens
ggccggcaccccgctgcactggaagccgtcccctttgatcttctttaccaggaaggagcgcggcatggcgcggccggcgcggggctcggtgcggggaggcggccggccgggcgcgatcggct

SEQ ID NO: 213841 - DNA, 122 bp, Homo sapiens
ccagcataaaccaggattggaggcggtgcgtgtcccaggagagagggccagcgcggtgcgcgcctcgccaggcatgctgggaggagtagtctcctagccacttccggccgttggtcacaggt

SEQ ID NO: 213842 - DNA, 122 bp, Homo sapiens
ggggcggggcctatggaggggcgggaccgcggcgccctataagtactgcggagcgaggcgcgcgcccggccagagagcgagcgcgcaacggcggcgacggcggcgaccccaccgcgcatcct

SEQ ID NO: 213843 - DNA, 122 bp, Homo sapiens
ggcgtcaatcatcgataagaagcctctacagcacccctgccccctaatttatacagaaaccggacccactaatcctctgggattggccgactgtgagctgcagataaggctatcagccacca

SEQ ID NO: 213844 - DNA, 122 bp, Homo sapiens
ctcagcgctggcagcccaggaagagacaagcacgtgtctccccgcgtcacctcgccaccccgattcctctcgggggtaccctgctgggaggctgtggccaggtcagaatctgggtgccggcc

SEQ ID NO: 213845 - DNA, 122 bp, Homo sapiens
tactgaagactgatttgaaatatagagcaagtatccagaaatgatcaaagttctttttcacgattgtactttgctaagctcctgtgtctctggagctcagagtgttgccacagcttggtata

SEQ ID NO: 213846 - DNA, 122 bp, Homo sapiens
gcccatggcctatgccaacacgctgctgcagctaggaatgatgtgaggtgacgggcggggcggcctgcatcccagggcccctccaatcccaccggacccaggccctgggctaggggcagagc

SEQ ID NO: 213847 - DNA, 122 bp, Homo sapiens
ccactatttgcacagacagcacagctgggaaaacagattcacccgacacagtatcttccccgcgtctttctcctcctcagggaatcagttcatcagtcaatcaagtcatttgggactggagg

SEQ ID NO: 213848 - DNA, 122 bp, Homo sapiens
acctcttgccttggagggcctggcatgcttcacacacagcactcaccagcctgtttcacacgctcctacgcagtaagggtgtgagggcagcagcacctcttctcctcctcaccccagggccc

SEQ ID NO: 213849 - DNA, 122 bp, Homo sapiens
gttacagttcttaaaggcggcgtaaccggaatttgttccttctgatgttcagatgtgttccgaatttcttccttctggtgggtttgtggtctcactggctcaggagtgaagctgcagacctt

SEQ ID NO: 213850 - DNA, 122 bp, Homo sapiens
acaaatttgtttctcaaaggcccctccgctggctcctccggcctcacgagtcccgttccccgtgtgcttctgtccttgcccagcagacaccagccccgcgcaggccaaactggctccgttcc

SEQ ID NO: 213851 - DNA, 122 bp, Homo sapiens
tagactcagagacctggagaacagcagaagcaagactttttaatgatgatcttgcaagatcgagtgtctggtgggcagacatacccagcacagttacaacaagcaatttatgccctagtatg

SEQ ID NO: 213852 - DNA, 122 bp, Homo sapiens
cagctcctttcagctgtggccagtttaatgaagtttgtacgcagctattagtgctccccacgtgggtttaggcagggaagacctagaggcattttatttcaaaataggtttgtattgagaat

SEQ ID NO: 213853 - DNA, 122 bp, Homo sapiens
cctgggcacatggtgagccgcggaactggcaggcaccaaacatttattgaatgaataaaccgtatcccagcagacaccatggtggcagcagatgacctaaccaaggtcccaggaaaggcggg

SEQ ID NO: 213854 - DNA, 122 bp, Homo sapiens
aaagggatttatgataaagtcactggatgaaattaaatagtttaccttaaatgtcacctacgcaggtcacctctctaatgaccacagccccaggagcagatgaatttaacacgggtgttgaa

SEQ ID NO: 213855 - DNA, 122 bp, Homo sapiens
cccatcctgaagcttgtcctcaccctccactcccctctacacgttaccgtgtcccttctccggtggctctctgtgccttagccaggacaatctttcagctcctatacgtcatcatcgcctac

SEQ ID NO: 213856 - DNA, 122 bp, Homo sapiens
gatcctagaggatctgtctagccaggtgcttccgccgatcctcgcgttgctaaggtgtcacgtgtacacaaggtgtgtgcgccccagagatgcacacgcgtgggtgcgcccaggcttcccga

SEQ ID NO: 213857 - DNA, 122 bp, Homo sapiens
tagaaactactgctcgtctcggtcgttgttagcagcgaccagggcgggtacaatcttggtcgctaggacacggctaacttccgctttcttccccctctcctaggctcaaactagtcaaatct

SEQ ID NO: 213858 - DNA, 122 bp, Homo sapiens
attcagctaatgagtattgtaacttagatgtaaacttggatggttagatcccagagcccacgtattgaacaggtagccagtataacatgctttactgcttctcttattgtaatgcagttgct

SEQ ID NO: 213859 - DNA, 122 bp, Homo sapiens
atctttacctaactcagctttggtttcatggagacatattgctggtcagccaatcagatgcgggtattgagagaaaaacacagaagtaatttctgccctctggattctgtcagatttgtgaa

SEQ ID NO: 213860 - DNA, 122 bp, Homo sapiens
gacacctccttacagcattcaaaattgttaacctgttcctcctccactggaaaatctccccgcccttggcatctttcctgatggtcctcctaccttgctagctactattcctctaactttca

SEQ ID NO: 213861 - DNA, 122 bp, Homo sapiens
gttggctgacatggggttgaggatggagtcctgcaggccatggtggtgttgcagtgggtccgctccacctccgcctggcaccggcactggcactgcgctggggcccggagggtggcccaggc

SEQ ID NO: 213862 - DNA, 122 bp, Homo sapiens
tctgcatgccttcttctttttgttattaccataattttgagggcaattttccaactcttgcggtctatagttcatttcagggctccatcttcagccctcttcttttgaatgcctctcactta

SEQ ID NO: 213863 - DNA, 122 bp, Homo sapiens
tttcatcagcactccacctaagccagctgctctagccacggctgctaatgaccagctaagcgtgtccattgcttctggagcctgagaatttggtttttttgttttttttttaacaggggacc

SEQ ID NO: 213864 - DNA, 122 bp, Homo sapiens
cgtccggactctacaggtaggagccgtgctccgagcaggaggagcgcgcagggggcgcagcgggctcttgccgaggcgtctggagctccagacaagcaggctgggcgggcagggggcgggag

SEQ ID NO: 213865 - DNA, 122 bp, Homo sapiens
ggggagccgaggagctcctgctgggctctgccagggaagaagccgcagtaggagcccctacgtaggccctgcaagaggcctggcgttcaggaaagggcccgctgaccatccagtgcagggaa

SEQ ID NO: 213866 - DNA, 122 bp, Homo sapiens
acagatacaggtgaactggcctatgcggtcgaggcacgtggcctggtttcggcagggccccgacagacactcgttgacatcggtctcacagcgaggtccagtgtagccacgaccgcactggc

SEQ ID NO: 213867 - DNA, 122 bp, Homo sapiens
ggagagctgggcagtgttggccgctggcggagcgctggggcagcatgaagtgcctggtcacgggcggcaacgtgaagggtgagtgcaggtcggcctggcagcggcggtgcagcagccgcgga

SEQ ID NO: 213868 - DNA, 122 bp, Homo sapiens
gggtcttaactgaaccatatgcagtattacatattattgaacagtcatgagtttccaattcgctataatgttttcctctgtgctcacaagttgtttggtgaagtcaagcaagctagcaaaag

SEQ ID NO: 213869 - DNA, 122 bp, Homo sapiens
tgcctgtttcaatctcacttcttccccagggccccaggtggcatctgtctttggccttctcgaggctcctccgagcctctgggctggatagtttctcagactcaccttggttttgatttgat

SEQ ID NO: 213870 - DNA, 122 bp, Homo sapiens
atcttccactaatcacatatttgtttctttttgttttcagggcaattccttgaagagctacgtaagttctcttctctctgttataagcagagaataaaaagccaggaaagggagacagaagc

SEQ ID NO: 213871 - DNA, 122 bp, Homo sapiens
gcttctccttgtactggcgctgcacctcggccagccgcatccggaagtccagctccagggcgtccatgtcctccagggaggacttcatggcatacatctgggggaagaaccgggagaggagg

SEQ ID NO: 213872 - DNA, 122 bp, Homo sapiens
gtatcatgaggagaggaaacaagctgaaaaactcgtaaagctacggaacggcccgggcagcgcttcgggagatggaggaagcccagcgcccggcctggcccggcgggagggcagcagagccg

SEQ ID NO: 213873 - DNA, 122 bp, Homo sapiens
tcaccttaaagaagcctttgcagccctcacaggtgcgcacgccgtagtgttggcaggccgcgttgtccccacacacagcgcacagcccctcgttggagggggagccccgcgacggcggtgag

SEQ ID NO: 213874 - DNA, 122 bp, Homo sapiens
ttgtgggatgccagagcgagggaatgactggtcaaaatgacccatacatccttccgatcccgagatgtcattcatcaaaaagtagcgcccgctcgtcattaaggtacgaatgacgctgttcg

SEQ ID NO: 213875 - DNA, 122 bp, Homo sapiens
atcgcgctccttcctcgctgctagtggaagcgatgctgcacggcacagctagcgcttccccggctctccttcaagctgaaggttaccgacccgcgcagccagccccagcactgtgagctgcg

SEQ ID NO: 213876 - DNA, 122 bp, Homo sapiens
tgactatctatctatgacatccatctgtctatgactcagacctgggctgaactatatactcgccacatagattctgcaattaatattctgctgtatttgttttatgtatatgtctacctacg

SEQ ID NO: 213877 - DNA, 122 bp, Homo sapiens
aattccagtaattggctatgcagccgctttttccgagccctgtgccaagcgcagtaaaatcgcagtccggctggggttattttcatcatgcaaattcccatttctgtaaacagggttaaagc

SEQ ID NO: 213878 - DNA, 122 bp, Homo sapiens
tgccgagcccgcttagaaagcacggccgcgcgctgtcggacgcaggcccacaggcccagccgacccaggcagcaattttcctagccccgccgccgttgccaaggcgaccgccgccgaatgtt

SEQ ID NO: 213879 - DNA, 122 bp, Homo sapiens
cagcctcgaacccattgtctggctggagaggcacctcacggcgcgtgtgcccgggaggtgcggcgtgggcgtgaagagaaggtggcgcgggctgggaggaggaggtggcgagccgcttaggc

SEQ ID NO: 213880 - DNA, 122 bp, Homo sapiens
gacggcacggccagaacagcgggtcccgcacgttcccgctcatggaaatccagcgcccagcgccacatctctgactgcagggccaggacggtgggtcccgcacgttcccgctcatgtggaaa

SEQ ID NO: 213881 - DNA, 122 bp, Homo sapiens
ggtgcgggatataatctcctggtgtgccgttttttaagccctttggaaaagtgcagtactcgggtgggagtgacccgattttccaggtgccgtctgtcacccctttctttgactaggaaagg

SEQ ID NO: 213882 - DNA, 122 bp, Homo sapiens
ctcccaggtcccagggtatttactttgcctcagcccagtggaggagactatccaggcccacgccagaatctctggctcctctcactatctccagactctgttgaagtaccagactggcctcc

SEQ ID NO: 213883 - DNA, 122 bp, Homo sapiens
gctccgcggaacgtgaggcagcaggagactcacgggggtctttgcgtccccacccctccgcggaccctggatctccagggacccagcccctccagcagcaaggccttctcctgcagccactc

SEQ ID NO: 213884 - DNA, 122 bp, Homo sapiens
gttccaagacggtgggcctcccgtgggctcctctcctgggcaagggcccagaccccgcgacgcgcctgtctctttaaattccagctgcgcggctgggaaacagcgccactcgccgcccaggc

SEQ ID NO: 213885 - DNA, 122 bp, Homo sapiens
cgggcccccctcgcacttatcctgcaccgccccagttaactcctcgcaggcggcggtcagcgggctggtactgtcttggtgcgtgtcttagtcctacactgggagacctaggccttaggtcg

SEQ ID NO: 213886 - DNA, 122 bp, Homo sapiens
tccatcgccaccaccaaccgcagcaaggcgagttgcgccgcagtgctcaacaggaaagtacggaaacctaaagaaaccctaacctctcttcggcattacatatatactgaggttttgcgcat

SEQ ID NO: 213887 - DNA, 122 bp, Homo sapiens
cgttaaacattgtttcccaagtccatgtgatcccaggtaaaagattcggtatcggccgggcgcggtggctcacacctgtaatcccagcactttgggaggccgaggcgggtggatcacaaggt

SEQ ID NO: 213888 - DNA, 122 bp, Homo sapiens
tcccctcctgccgcaagttcagctcagaccaggacgattccttccgtccgggctcctgcccgaccgagggagggctgccaggtacctggctccccagtgacccctgcccactcctgacctct

SEQ ID NO: 213889 - DNA, 122 bp, Homo sapiens
tgacccacgcagggggatccggggaattctgggaaatgtagtcccgccaatcagtggagtcgcgggcacttccgctccagggaagagggggcgattgtcacggcacattccacggtagtttc

SEQ ID NO: 213890 - DNA, 122 bp, Homo sapiens
agtgatgtggaactcccgtcccccccccggagaaggggtggtggcctcagagccagagggcggcccaccgggaggccacagagggcacggcgagctcaactcacagcatcagctcagcacgc

SEQ ID NO: 213891 - DNA, 122 bp, Homo sapiens
gccgctgccttcactcacccctccccacaccagtctggagtgataggctgcgtctgcacgcggctggctctgcctaggtgcccaggagtgactggcacaagtgtgtgctctatgtgcttaat

SEQ ID NO: 213892 - DNA, 122 bp, Homo sapiens
gaatcgagccattcttagccctgcagacgctggctgcctccctctgacttggcctcacggcggggcaggcattagcagtccaggcagcttctctctgactccctgcaaggaggggtgcggcg

SEQ ID NO: 213893 - DNA, 122 bp, Homo sapiens
ttttttctcttgtggtctatgccatatcactaagattttcttcctgttctagagactcatcgtttggaattttacatatacctctgtgacatattttggattaaacttgcatatggcgtgag

SEQ ID NO: 213894 - DNA, 122 bp, Homo sapiens
agtgagaggcgaagaaggagaaggaaaagaagaaaaagaaagaagaagaggaggagggggcggaggggagaagaagaggccccgaaggatcacaactggagcagaatagtgcccacccagac

SEQ ID NO: 213895 - DNA, 122 bp, Homo sapiens
aaggaggcccgtgtggctgagctgagcgaggaggagagtgggaggtgagagaggccagcacggttttggagaaacttgtaggaacatctcttggtaacataggagcttttgacagcgtgaac

SEQ ID NO: 213896 - DNA, 122 bp, Homo sapiens
cacgctccactccccgcgccatcgccgaccctccccacgctccactccccgcgccatcgccgaccctccccacgctccagtgaggccgctggttactgtaaaagcctgttaactgggacact

SEQ ID NO: 213897 - DNA, 122 bp, Homo sapiens
cagccccctcggcctccgcctccgtgctggccgccgccgccgcctctcccgccgccgccgcgcacaaagcccccccaccccgactctcggggcgccgccgccgccaaatcctcagcccctca

SEQ ID NO: 213898 - DNA, 122 bp, Homo sapiens
gcagccgcagtggactgcgccgggctcgggctgcggaaaaggggcgggtcttcccccgaccgagagggccagtagctcctcggctcattcctatcccgcaccaggccttctcgttttttttt

SEQ ID NO: 213899 - DNA, 122 bp, Homo sapiens
gtgggctgacactcccatcagtcacacaagaccagcacattgttagcccagaactttctccgaagcagaagagaaaggcaaatatctctttaaggtactttgcttctccgagctggagcttt

SEQ ID NO: 213900 - DNA, 122 bp, Homo sapiens
ctggcagtggagcgggcccggcgacggcgagaagaagaggagcggcgcatgcaagaagagcgccgggcagcctgtgctgagaagctcaagcgactcgatgaaaagtttggggcacctgacaa

SEQ ID NO: 213901 - DNA, 122 bp, Homo sapiens
gacactcttcctctaaacgggaggtcccgggagtgacgtgataaaccacagtgagaggcacggaactgtgaaaaccggagtcacggcctgagccccaccactgagcctctgcgtccatgaac

SEQ ID NO: 213902 - DNA, 122 bp, Homo sapiens
cgaactcccgacctcaggtgatccacccacctcagcctcccaaagtgctgggattacaggcgtgagccaccacacctggccctgaagcagtctttctaaacagatgctggcagctggctctg

SEQ ID NO: 213903 - DNA, 122 bp, Homo sapiens
ttggagtatcatatttgagaggtcagaaaagtccacagttaaagatcggtttataatttacgaagaaaatagaaagttttgtttctctgagttgaaatttgccaagcacggcgggaaatatt

SEQ ID NO: 213904 - DNA, 122 bp, Homo sapiens
gggcctggggctcgggctggcgctgggcgcggggggcggtggcggcagcggtagtggcagcggcggtggctccagccccgcgttcccgggcaccttctgcctgcctagccccgcgccctccc

SEQ ID NO: 213905 - DNA, 122 bp, Homo sapiens
ggagagatagctgccagctcttaaagaccctctccggccactggagagtttgggcttcatcggggggcagtggggagctagggaagtgccttaagcctgggagggacgtgccctttaactca

SEQ ID NO: 213906 - DNA, 122 bp, Homo sapiens
ccgcataccgcctcctacctgaacagaggcgggagcccgaataggacggggcggggctagcgaaggctgcgcaagcgcggccggcgggggcgtggtcttcgcctgctgcttcgcttgccggc

SEQ ID NO: 213907 - DNA, 122 bp, Homo sapiens
tcccttggtgggggtgccggaaaaaatgtgctgcctgggcgatcgaggttggggcaaaagcgttgcaaaggaaaaggtgggaggactctactttcacatttcccaaaagagttttaccataa

SEQ ID NO: 213908 - DNA, 122 bp, Homo sapiens
aaagcctaattaatgtatcacaaagaagaaattggggcccctcttgccgggctccccctccgcctcccagttgctgcatctccagagatccattgaatgtagtttgaaaataataggtttat

SEQ ID NO: 213909 - DNA, 122 bp, Homo sapiens
taccaagccacacgtttaggggtctggccggtccagggggcaggtaggagatggtgcgctcgcggtaagggctgtggccgggcctgtcttaggaactctgggccctgactcggcccgcgggt

SEQ ID NO: 213910 - DNA, 122 bp, Homo sapiens
tccacacaggactgccagaggcacacacctgctctgtctacccgagggcaccagagggcacgagaaggctggctccctggcgctgacacgtcaggcaactgaggcacaaggctggcatttct

SEQ ID NO: 213911 - DNA, 122 bp, Homo sapiens
gttgtccaaaggcctgataagtcacaaagaacgtttttagagcgcctccaggaggcttatcggatttacaccccttttgacccggcagctcccgaaaatagccgtgctcttaatttagcatt

SEQ ID NO: 213912 - DNA, 122 bp, Homo sapiens
gcctcagaggactgagccagaccctggaacagggatggggcagagaggtggggtggcagacgcctgccagttctgtgtcacttttctcgtttgctcaggctcctgggacggcaccacagact

SEQ ID NO: 213913 - DNA, 122 bp, Homo sapiens
cccagaagctgttcgttcatttcacgcgaccagaaaaaattcctgatggtgctatgaccccggtgcccggttggcacttcctggttttctgtttctgctattctgttacctgcttggttagc

SEQ ID NO: 213914 - DNA, 122 bp, Homo sapiens
cttaacagtagaccatcttatcaagaaaccttatttctggaagacaggctccttgatatacggtaagagagtagttcttaaatgttcatgcacacacacacacacacacacacacacacaca

SEQ ID NO: 213915 - DNA, 122 bp, Homo sapiens
atctatatgtggatgaagacctccgccccgcgcgcccctcccgcaagtcccactgaggcccgacccattctgtccggctcccagcccccgcgggtccccccaccccggggctgaccgggtga

SEQ ID NO: 213916 - DNA, 122 bp, Homo sapiens
gtcgcctctgcgtttctcccgccagcaggagaccgagtctgagcgcagccgccgaccctgcgccttccctgtgcactcaaagaccgccagctctgggggagcccggggacccacgccgctct

SEQ ID NO: 213917 - DNA, 122 bp, Homo sapiens
tttggtaattgcacccaatttctaggcccctaaatagtagcctgcagtgcccacataggccggaaataggagaaatgctgaccaaaaagcatcacagaaaagctaatgtggcgcagacaggc

SEQ ID NO: 213918 - DNA, 122 bp, Homo sapiens
gtcattactaatgaagcctcttaaacctcacatcatggttagcatctgcactctcataaacgtcttaagtcccttgaatcaggcaaaatctctataaatatttaagttttttctaaaaaaag

SEQ ID NO: 213919 - DNA, 122 bp, Homo sapiens
ccagtagtaattagagcttttatcgggcttgctcttcagccctttatattgccgatttagcgttaaggcattaagtccacacaccaaattagcgcgactcccaaatagccacaaccacttat

SEQ ID NO: 213920 - DNA, 122 bp, Homo sapiens
cttgggttagcctcggacgcatgcaaatagcttaaaatgctgaaatattcaaataaattccgcagaagcatggctgcagcacagtggctgaggcgactctgatatgtaggatctgcaaagct

SEQ ID NO: 213921 - DNA, 122 bp, Homo sapiens
taaccaggcacaccgtcttccccactgggtggaagttacacaaagactagctacagaagccgtggtcaggaaatatctgttgaattcatgaataccccttctgtaatgttgtcaagctaaat

SEQ ID NO: 213922 - DNA, 122 bp, Homo sapiens
ccctctgcccagcttcgcccaatggcaaactcttgcaaaactgcagtgaaatgtcatgaacgggatattaacattgttaagcttaagatagaggatgttggccaggcgcggtggctcacgcc

SEQ ID NO: 213923 - DNA, 122 bp, Homo sapiens
tctcaacttccgtttacccttcagctattggggcaagcaccacttctcagaggccttcagcgaccaccctgatcaagcccaatttctctctcacagaccctgagagcccgatgtctctcttc

SEQ ID NO: 213924 - DNA, 122 bp, Homo sapiens
agaaacttggttcaggccatcaagcacaacccaactttctccattaggcattttagaagacgctgttgcctgtgtcttcagagtttacctgaattaagggaatgtatcatagagacacatga

SEQ ID NO: 213925 - DNA, 122 bp, Homo sapiens
ctcgaactcctgacctcgtgattcgcccacctcggcctcccaaagtcctggaactacaggcgtgagccaccgcgcccacccggccagtatgatagtttttaggaggaaccctcaggagagtg

SEQ ID NO: 213926 - DNA, 122 bp, Homo sapiens
atgctcagggcccccttctggttgccggtgcctcacctctggccaggtggcatcggcttccgggtaaatctgagctgcccaaagcgagcctccggaggctgctccatctcctggaacgttta

SEQ ID NO: 213927 - DNA, 122 bp, Homo sapiens
taaataaataaataaaattcaagcttagtagaataaaaaattcagcttcccagttgtcctcgcatttcaggtgacaaatcatgcacagctggtggctttgtatcacacagtgcagatttaga

SEQ ID NO: 213928 - DNA, 122 bp, Homo sapiens
ttatgatgaaatatggggatggggtaaaacaaaaaaaaacttagagtgacatagattgggcgcagatcccaactctaaaacattctagctagttattgggccttaattcccacctcatatct

SEQ ID NO: 213929 - DNA, 122 bp, Homo sapiens
gcatcaggaaaaatcagacatgctgcttggccgagcaggagcccgcaggtccgtgggccgcgggtactcactccagccagggatttctggatgttctctctggctctcgcaatgtcacggag

SEQ ID NO: 213930 - DNA, 122 bp, Homo sapiens
ctgcttcccggcaacattagcgcgtccctccccgcggaggctccgggctcccggccccagcgctgagccccgcagggaggtggctccccccaccgccccgcgctcccccccagctcagccac

SEQ ID NO: 213931 - DNA, 122 bp, Homo sapiens
gcccagcactttcacctacctttcctaaacagctgcaataatattcccaggtccctgatccgatcactgagaagtggagaagttgcttgtgtttggaggtgctttcaatctctcaggccaat

SEQ ID NO: 213932 - DNA, 122 bp, Homo sapiens
cgccaagtgctctcagaatataaaataatttccagccatcttccttactccccctaagagcggctccaagcaagcaagagtcccttccacctcgctgcacttcgaggtctgccccctttatt

SEQ ID NO: 213933 - DNA, 122 bp, Homo sapiens
aaatcctgttagataattgtgcttcctggaggcccagggggactcttaagtaaggagcttcgaggaggaaagggggttgtggggagacttggcctgcttgcctcctggaatcttctttccca

SEQ ID NO: 213934 - DNA, 122 bp, Homo sapiens
taaaaattagctaagataatgttagacacatgcattcgcagtttctattcagaatgcaagcgtaactacaaaccatgcctgtgtttctggataaaataaaacatagccaagctaaatttagg

SEQ ID NO: 213935 - DNA, 122 bp, Homo sapiens
cccgcgccaccttcctttggtttctgccggcctcgggcttctgcggcccgatgtggcaggcgccgcgagagaggcagcagccggctggagcagcggcccctcaggtctcggagcccggtgcg

SEQ ID NO: 213936 - DNA, 122 bp, Homo sapiens
aggaagcccctttggctctctcctccctttgtccgactcgcgctcccgccctcccggatccgcgccctcaccttgaagccctccaccgcctcctcgagcggcagcacgctgtggccgcggtg

SEQ ID NO: 213937 - DNA, 122 bp, Homo sapiens
gaatggggtcgaggagggccggacaccggtgtgagttatggggctggagctcccttccagcgccacccctcattgccgggtgctctgggacaagtccatctacttcattccttcaacactga

SEQ ID NO: 213938 - DNA, 122 bp, Homo sapiens
gccccggcccagagcgctccacactcggagctagccagctgggacagagcaacagcgcagcgcgggcagccacagcctgcaccggccccgcggggacctgctgtgtgtgggtgtgaaggtgg

SEQ ID NO: 213939 - DNA, 122 bp, Homo sapiens
gtgttcggccccgcccgtcacgtctagctggggctcgcccggcgccttcctggacgcagacgtatgagtcccaactccacccagtccggcctggcctctgtccccgggtgaccgcggaatgg

SEQ ID NO: 213940 - DNA, 122 bp, Homo sapiens
ggccgtacccgcgcaatctcagcaccattcccgaccgagtcctccgccgcgggctgagcgcgagtccccggggccaggctgcccagggaggagcagggacttcctacaatccgcgcccttcc

SEQ ID NO: 213941 - DNA, 122 bp, Homo sapiens
tagggctcgggacctgcagcccgccatgcctgagcctctcccctcttccgtgggctcctgcgcggcctaagcctccctgaggagcaccgccccctgctccacggcgccgggtcccatccaca

SEQ ID NO: 213942 - DNA, 122 bp, Homo sapiens
ttttacaagggaactaggttccttttgaactttgctatcacagtattggataattgactgcgcaagtctctcctcaaattcccaactcatgcatgactttttattacgttgtagcaataaaa

SEQ ID NO: 213943 - DNA, 122 bp, Homo sapiens
ggaagagctacgaggagtgcatcatagagagcagggcgaagctgtggtgtagcacaactgcggactacgacagagaccacgagtggggcttctgcagacactgtgagtaggacggctccgcg

SEQ ID NO: 213944 - DNA, 122 bp, Homo sapiens
agtgagtgagttggggctcttcgccctcccagaactggctgttgatggaagaaacccctgcgtaggaaggatggtaagaaaatccaaggagctgcctgttctattgggaaaataaaaggtct

SEQ ID NO: 213945 - DNA, 122 bp, Homo sapiens
cccctttgtgccagagcaggagctgctgcgttccttgcgcctctgccccccacaccctaccgcccgccttctgttggctgctgaccctgggggcagcccagctcaacgtcgtcgcaccaggt

SEQ ID NO: 213946 - DNA, 122 bp, Homo sapiens
ccaggagggccagggaggctctgtatatacgtagaggtcacccaggcgtgtgtgtgtgcgcgcccccacgcccctgcccacaggcctgcattgaaggcgcttccgctccccggagagccctg

SEQ ID NO: 213947 - DNA, 122 bp, Homo sapiens
ggcggggctgaccgagggggtggggccaggttctcacaccctccagtggatgattggctgcgacctggggtccgacggacgcctcctccgcgggtatgaacagtatgcctacgatggcaagg

SEQ ID NO: 213948 - DNA, 122 bp, Homo sapiens
aggccaggtcaatgttggcacttggagttgctggagtctcaggtgccctgtcccactcctcgcagtcagcatgagaaagaggagagaggcttgtccagcaggcacaaagaagggcaggaata

SEQ ID NO: 213949 - DNA, 122 bp, Homo sapiens
agaaagatatgaagagagaaaggacaaaaaaagagatttaaacacacataagtatactgacgagaagtgtacattcttagtgattttgcagtgctttggctgctgtgatttacaagatgcct

SEQ ID NO: 213950 - DNA, 122 bp, Homo sapiens
gaggacgacctgagcagagcgaagcatccggcaggttccggcaggttccagcaggagagacgagagcagacggagggagaaggtgcaggagggctcgtcacaaaggaaccaacgtgcttcct

SEQ ID NO: 213951 - DNA, 122 bp, Homo sapiens
cgaatgcaggggcagaaagggcagagggcaagcccagaaaggaggccaatgctggcattccgggcaatggtctcacctggaacagaacagctgacagggcaatgagcagacttacagcctaa

SEQ ID NO: 213952 - DNA, 122 bp, Homo sapiens
ttttgtatcttaattcacccttgaccctttgaggcaaaatatatttatagacaatgttctcggaggttccttcccctcctcacaaagagctaatgataaatgtcattaagtagaatttgttt

SEQ ID NO: 213953 - DNA, 122 bp, Homo sapiens
tccagttatattcaggaaactgaaacagagaaatgggcagctgcttttgtttggtgcttccgggtaaatgaacagagtagcttttcataagagccaagaatatttggtgttgtgtcatttga

SEQ ID NO: 213954 - DNA, 122 bp, Homo sapiens
ccctcctcgtcctctgccccccggggcctggcgggtgccgggaggtggctggggaggacccgtactcactgttgctgcactgccgcccgcctcgccagtcttggcccgtgtccgcccagcag

SEQ ID NO: 213955 - DNA, 122 bp, Homo sapiens
gaacactctcttccgacacagggttgttgtgaggatggtgaagtaataagcaggaaagagcgatggcactgcagggagcacttaccctcagaatcccaagaggccgtgtcctcctgggtcaa

SEQ ID NO: 213956 - DNA, 122 bp, Homo sapiens
aaggcctaccccagccaccaagtgagccagtgggcttgatcagcacaggaaaggtgaccccggcagtttcatttgactattgcatggctggcaacatttctattgattgtttccagggacct

SEQ ID NO: 213957 - DNA, 122 bp, Homo sapiens
gcggtctcgacggtggggaggacaaggcgcccattctccaagttactagggtggcgcaagcgcctctccctttaactgcccaggcagccccgcctgctatgcccggcagtcaaaccaggtcc

SEQ ID NO: 213958 - DNA, 122 bp, Homo sapiens
gtggttgaaatgtaactattgttttacaactttgcattaaccttccaagacctgaattcccgggcctgagtctcagagcgcggtttgcatctttgcaggctgtaggcgcatgatgtcacaag

SEQ ID NO: 213959 - DNA, 122 bp, Homo sapiens
agctgacttcgttccactgaatgggcaggtcggttttgctgccctcggggcagggctgctcgagggcatggaactgctggccagcgtggctgtctggcagcccgggcgcgtcaaagtcaccg

SEQ ID NO: 213960 - DNA, 122 bp, Homo sapiens
gcccggaatgtttcacatctggggaaaccgaggcgcagagcgggacggccctgggcctggcgggaagtcgcgcaaggaggccggcagggggcgcacccggcccaccctgtcccttccaggcc

SEQ ID NO: 213961 - DNA, 122 bp, Homo sapiens
gaaatacatccaaaaagttagcattggagtgttagaaactagaatagacctctccgccaccgagctgctgtgtcacgccctcagcctgctagggagtgacaagcccaagtcattcttgatcc

SEQ ID NO: 213962 - DNA, 122 bp, Homo sapiens
agcagagggctctgaggaggcgcaggatgcaggagatgaaaggggaaaatgaaggggagccgcaggttcaaactgccccttcccaggagtgagctacagcttggccacttctgtctcataag

SEQ ID NO: 213963 - DNA, 122 bp, Homo sapiens
gccctcctccctcccgctctctctggctgtctgtctgtctctcagactgtctctatttctcgctctctctgcctttctctgctctccaagctgggtgggaaaaggaaatgaggacagaaagc

SEQ ID NO: 213964 - DNA, 122 bp, Homo sapiens
ctttcgctccaacctcaccttttgggtggtctatgctctttaattctcttggttgtgaaacgagctcggataacaccttagacaacgtgaccagtgaccctgacctatttcacaaatgccac

SEQ ID NO: 213965 - DNA, 122 bp, Homo sapiens
gccgggggcggcaggggcgcgcgctccgggacacgcgcctggaactctccccaggaagcgcgccatacgcgctctggccccgggctctccagattcactcgggtcagcgtgtgcgtgcgggt

SEQ ID NO: 213966 - DNA, 122 bp, Homo sapiens
acccccaggacctaatccccctctacatagggttcagtgcatgttagcagacactgggctcgattcctgcctagtccctgccagataccccatgcccacctcgtgaagagaatgaggccaca

SEQ ID NO: 213967 - DNA, 122 bp, Homo sapiens
tcctggcgtagcgcctcccgtgtccggggtagatcttgtacccgctaaaactgcacagctcgaccctgcaacaaaaagtgaaagtccatcagggagggtgtctacagccatgccagggacga

SEQ ID NO: 213968 - DNA, 122 bp, Homo sapiens
ccctctaaatgagagtagcgacctgattagagatggaactgacgggctcccattgggatgcgcgcagattagcacggttattcaagcagcttcagcgagctgcggaggaagccaggcagccc

SEQ ID NO: 213969 - DNA, 122 bp, Homo sapiens
gagatccgagacgtccacttcgctgctccggctctctcccagcgagaccccactggtgtgcggtggagctgatggctctccaaagacaggcccccggacacctggggtggggagaccgagac

SEQ ID NO: 213970 - DNA, 122 bp, Homo sapiens
ctcagtctatggcttctcttcttattctcttgacagttttgtttgaagagcagaagttttcgattttaatgaaacttattaatgatttatttcatggattgtgcctttggtgttatatctaa

SEQ ID NO: 213971 - DNA, 122 bp, Homo sapiens
ggagcgccaggcctcagggtccgggcgggggctgctgcgtcacaccaggcagcctgggaacgcaactgttgggcaaccgtggtggcctctcgccacctcttacgcttgggcgatctgcgatt

SEQ ID NO: 213972 - DNA, 122 bp, Homo sapiens
cgaaccagcgggcctggcggtctgtgagtgggtggccagccgctaggggcggggcctcagcgttgacgggcaggcaggccgtcccacccctctcgcccagagcggccgcgccagcgctgggg

SEQ ID NO: 213973 - DNA, 122 bp, Homo sapiens
agggaatgtaaaagtgttttcgatgttggaagcagcagacatcgaaggtctcaatttcaccgttacattttatctttttaatatcctaaaatgtatgtgagtttaggttctctttagatact

SEQ ID NO: 213974 - DNA, 122 bp, Homo sapiens
gccggcccacgcggcgagttgatctggccaacggaccagcagtggaggcgctcggaatcccgcggcgctggagcccggataacgccgcggagtgattgacccgcccaccctggaggctcctc

SEQ ID NO: 213975 - DNA, 122 bp, Homo sapiens
atggcgactgacatcactatgctctcaggctgtaccccgcccctttctccagggctcttgcgccgggagctggccgtggtgctgacaggcccaggaatggccacctacccccagaccccagc

SEQ ID NO: 213976 - DNA, 122 bp, Homo sapiens
tggtagaaggcaggcgggatctggtttcacggcgaattcaaaaggggcaaagcaacgcggcgcctcctgaattcctggccctgcgaacgtcatgtcgttaacgtgttatttatggcaccctc

SEQ ID NO: 213977 - DNA, 122 bp, Homo sapiens
atcaatctccagggagaaatctgacaagtgacactgtgtggagtttcagttacagtgacacggcaatggaatacagtttgaaaggtacataaatagatttctctcctgcctagagtcagtta

SEQ ID NO: 213978 - DNA, 122 bp, Homo sapiens
acacagagtgatccgccctcttttccctggtgaatcacgcagcctaactcaccatgttcccggccacgccacagtgaatcacgcagcctaactcaccaggttactggcctaactcaccatgt

SEQ ID NO: 213979 - DNA, 122 bp, Homo sapiens
catgcccccggacaatcgcttcgcggaaaacaccccagctgcaccagctaacggtcactgcgccccgggaacctgacatcactctagttcaggtgctggggagtcctccaggcccggccccg

SEQ ID NO: 213980 - DNA, 122 bp, Homo sapiens
agagggatcaagcagttatttgatttgtgctcacttttgatatggccaataaaaccataccgactgagcttctgcgtggatcttccagaagtgacctggtcagagagcttcttgcgtctcag

SEQ ID NO: 213981 - DNA, 122 bp, Homo sapiens
aggtgcctggaggaaggaggacggcattggtcgctccagaccaggaaatgggtgacatcacggaagccccgacagataaagcattgctgagaccttagggattgaaagagtcaggaggcccc

SEQ ID NO: 213982 - DNA, 122 bp, Homo sapiens
cttggcatccgaagtttgctgaaagattcttcccttctcagtaggcactccttcactctccgctgttggcctccctctcctatcctgcctgcccttctttctgtcactctccttagaaagac

SEQ ID NO: 213983 - DNA, 122 bp, Homo sapiens
caatatgttttgttgtttcctgggtacttgtgcgtacaaaaactgagcatagtgatttcacgtgtgctcatgacaaaagactttaatttctagggaagttaagcagatgggctttggcattg

SEQ ID NO: 213984 - DNA, 122 bp, Homo sapiens
atcattgcttccctttcagccttacctttctacagctgtggataagatgccatgaatttgcgagtaaaagtgtttatctctccctggagcagactagacccctaggctctgtcctagagcac

SEQ ID NO: 213985 - DNA, 122 bp, Homo sapiens
cagaatgctgctagcacttgaatctgggatctcgccttattctcaagtagcaaggcatctcgacaagcatggtctaggtctggtggccagcttgccagtacctgagccggtcgggtcatctg

SEQ ID NO: 213986 - DNA, 122 bp, Homo sapiens
attactccctcccccaccttttagtttaggcaacctcttttgatacatttgtgttcagctcgcatacaagtgggatagttgcatccagtttattaagacttagtatgaatcatagagttgga

SEQ ID NO: 213987 - DNA, 122 bp, Homo sapiens
aaatttagttttcagaggttaaatctagaaggcgggcatatgctggaaagctcacctacacgaggctttctcacacggggattccccctttgggaatttcagtttcctcatctaaaaataat

SEQ ID NO: 213988 - DNA, 122 bp, Homo sapiens
ttgattatggtaattgttttgctcaggttgtacgggtatggccaattttgtttgaaagctcgctctttctctgcgctttcctgtcgagttcccttcaggttctggtttcctccgacggtggc

SEQ ID NO: 213989 - DNA, 122 bp, Homo sapiens
ggtactcagaggggttcaggcaggaaacagatgcttttgaatacttactgccccacttttcgtgctctttgaaggacgcaagaaaaaggagtcaatctttacatgcttcccaattacaaaaa

SEQ ID NO: 213990 - DNA, 122 bp, Homo sapiens
acattggggtgtccagaaacactggggtttcaggcgctctgtaaatgcgtccgaggtccgcggttctgcccgcaagcccagaccccggcctcacttccgccccgcgccccgcgccccggcct

SEQ ID NO: 213991 - DNA, 122 bp, Homo sapiens
ccctggtttggacttagacttgatttcaaaagtgtgtgtgtaaggcctagagtggagtcacggggaagtgagtgatttcagagccttagcaggcaacttcctgggaaggaagggcaacctag

SEQ ID NO: 213992 - DNA, 122 bp, Homo sapiens
gtatcacccaggctgatctcaaactgctgggctcaagggatcctccagcatcagcttcctcggtagctggaactactagtcttctcaattatttttgtttatttctacttaatcaattgtta

SEQ ID NO: 213993 - DNA, 122 bp, Homo sapiens
ccccaccccgacccaggctggacgatccagggccgcaggccagaacagaacccctgagatcggtgggatccccctgtttcttcaaggagcacctccacttgcttttcccagcaggaattcaa

SEQ ID NO: 213994 - DNA, 122 bp, Homo sapiens
cggggagggaccacggcaggcgactgggagcttgtggactgccagggtctggagcgggcccggccatcccgccgctgcgcatgcgccacccaggccgctggccggagaaacctagtggcggc

SEQ ID NO: 213995 - DNA, 122 bp, Homo sapiens
agtcccggctccgttcattcatgaaaatcaagtcccgggcctccaaggttagggaagtgtcggcaggcgcctaactccactcggagaatcgcggaagacaccctaaaggagcagttgggatt

SEQ ID NO: 213996 - DNA, 122 bp, Homo sapiens
cccccattcttgtgattcctgctccctaagcctggctccctgtggtgggggctggaatgccgcccggcccagggcagcggagaggcccagacagctgcgccgagccgcccgctctgctcccc

SEQ ID NO: 213997 - DNA, 122 bp, Homo sapiens
aatttaatagtgtttagatggtattgtttctttctgtataaactttaccattgtgaaaaacgacactgaaaacacatgggtatagagaaacgtggcagcggggtaggtagaatcatggagtt

SEQ ID NO: 213998 - DNA, 122 bp, Homo sapiens
ctttgtcgctgcttggtgtagtcagctgccttcatttctgcaactgaccaggtgtcagttcgtgtccattgtcaccgtggtttgcacccccggctccctggcgaccatcggagcacatcctc

SEQ ID NO: 213999 - DNA, 122 bp, Homo sapiens
gggaccgcaggcctgtgacaccatgcccagctaactgtattcatgtaatagttttctttgcgttaacccacttattaatcactctccctatttagaaagtaacagttttttaaaaggttaca

SEQ ID NO: 214000 - DNA, 122 bp, Homo sapiens
atgagaaagccgaggctcgggcgcttaggcgagcttgctccccatgaacagcctcccgctcgagtctacactacggacacctggtgcctcttgggtgtcgtgtcctccccgcacccctcctt

SEQ ID NO: 214001 - DNA, 122 bp, Homo sapiens
acaacactgctttctccttggcatctgggattcagctcttgcggtcgttgcttcttctcccggacttgtttttacgcccaccctgtgctcctccgcgtttccgcccctccccaggcttcaag

SEQ ID NO: 214002 - DNA, 122 bp, Homo sapiens
gggcacgtgtctgccgtgacccagcaaggccatgtgttgtattatatacatatgcacacacgtttaatccacgtgcacacgtgtgtgttatcctatgtggagggcacgtgtctgccgtgacc

SEQ ID NO: 214003 - DNA, 122 bp, Homo sapiens
actttatacaaatgctagggatatttgtatcccacactgacactcttacttacattgctacggtattattttggggtacttcacataaattaaaactagatatgaagcatcctatagctaac

SEQ ID NO: 214004 - DNA, 122 bp, Homo sapiens
tccctgctcttccgcctcgccggcagtagtaggcgcatgcgtggttgcgatcatggctggcggtaacttcgcgtttctgttacccatttttaaaacgcatcttcaggtgttccttccttctc

SEQ ID NO: 214005 - DNA, 122 bp, Homo sapiens
tgccctgcccctcccttcccaggtgaacggggcactaccctgtctgggggccagaagcagcgcctggccatcgcccgagcccttatcaagcagcccacggtgctgatactggatgaagctac

SEQ ID NO: 214006 - DNA, 122 bp, Homo sapiens
ggaaatctttggaagtcaggcgccgaacgagtctgtgagggccctaaacccagctggctccgggatggccgccgctgccgggaagtgggttctgacaaatgacaaacagcagagggagcctg

SEQ ID NO: 214007 - DNA, 122 bp, Homo sapiens
gtagcatcctcaaggacagggcccagtgtttggcagagattcaactaattgttacactctcgaattcattcgttagcaggtaatctttgagtgcccactaaattccagacattgatataaaa

SEQ ID NO: 214008 - DNA, 122 bp, Homo sapiens
tctctcccaagatccaactgccagcttgacatggatatatcattggtgcctcctatgcaacgtgtctccaacagagccactcatacactattcccttttctcctaaccagttcttcctctag

SEQ ID NO: 214009 - DNA, 122 bp, Homo sapiens
tgcaggagggtcgtggtctggctgtggcggaggagcataagaaggtaacgcgacctggcgcggcagacagggctcgaagacctcatcttgattaagaaggccacaaattcgcgtttgcctct

SEQ ID NO: 214010 - DNA, 122 bp, Homo sapiens
aggtgaagaccatggaacatatgagccccacaacctcagcctttcctagaaagaagcttccggctcctgctcagcctgggtggggatgaaggcatctgtgtgctaaccacatgccccggagc

SEQ ID NO: 214011 - DNA, 122 bp, Homo sapiens
tcaagatggggagattactctggattatccagctggatctagtgtaatcacaagaatcctcgtaaaagggagggctgtcattgtgctgtttacctctgttctcctggtagaagccaacactg

SEQ ID NO: 214012 - DNA, 122 bp, Homo sapiens
gggcgctgcctgctctgcgtttcctcgtctggggtggctctgcagcctcctgcgggcgggcgtctgctgctcctacaagggaagcttcttgctgccaggcccacacatccccagttgttggt

SEQ ID NO: 214013 - DNA, 122 bp, Homo sapiens
gaggcacccttgataagccagaacagcagcaggccagaaccccagacctgtcctgcattccggagggaacttgggcccaggtagacttaaccccttacttcggtatgttagtaggagcagtg

SEQ ID NO: 214014 - DNA, 122 bp, Homo sapiens
ttcccagctgcccaccccagcaatgcagagagatggggcagtggatgtgggcacagggtacgttaggcgggctctggggaaggatgagagggtctcgcggccggaggggggcggcagggctg

SEQ ID NO: 214015 - DNA, 122 bp, Homo sapiens
gttactttctcagaacagcttccctgaaagcctatttgcaattgcagtcaccttccctagcgcttccactcctccatcactgctttgttgttttccacagtgtgtgtcactcactagctgat

SEQ ID NO: 214016 - DNA, 122 bp, Homo sapiens
ggggcaaccctgctgcggctccatccagaacctcccgctgccaggcgccgggaccggggacgctggcccccggattcaaacctatcatggtgcatgataacacataacataacataacataa

SEQ ID NO: 214017 - DNA, 122 bp, Homo sapiens
aatatttataagttaaaacaatttatgttcagacagagggataaattggaagaaatcttgcggggattaactccaaggaaaaatgatattggagatgcaatggttttctgtcttaataatgc

SEQ ID NO: 214018 - DNA, 122 bp, Homo sapiens
gtccccacctgccgaaaggaagctcctgcagccccctacaacccccagggcagcctttctcgggaattttcaagattcctgggggaggggctggcatctgcgccttcactgagcctacaggc

SEQ ID NO: 214019 - DNA, 122 bp, Homo sapiens
gaggaggaggaggagaagcgggtgaggggcggcgcggggcccgatctctgagccccttcacggccccagccccgcgccgccttggctccccagtcgccccctgccccgactgccccccaccc

SEQ ID NO: 214020 - DNA, 122 bp, Homo sapiens
ggaacatctcgagattccattaccttccccaatcttttccagtttctcgtatttctgcatcgcggcggccgcggggacccctgcgggccctcggttttaagactctggccccggcgttgcag

SEQ ID NO: 214021 - DNA, 122 bp, Homo sapiens
aagtgatggacgactgtgcctttgcaagaatcgacgcccacactgcccaggaagtgccctcgcgggccggggtcccagcccggaccagccccgccccgccccgccccgccctcatccctggg

SEQ ID NO: 214022 - DNA, 122 bp, Homo sapiens
ctgtctctatgctaataacatagggagaaaccaaacacagtgagatatgctaaatggggtcgctgttgttcattcccttaggaggagaaatgccattagcattctccatgcagattttcagc

SEQ ID NO: 214023 - DNA, 122 bp, Homo sapiens
tggagctttggccagggtccagagcctccctcccttcagcttcctgctgcacagaaccctcgcccctggccaccccgtgctgcctccttgccctggcagacccagcactggctgctgctagt

SEQ ID NO: 214024 - DNA, 122 bp, Homo sapiens
gagcacggaccagtgtctccggagaatgctattctcctacatttccgaacaggttatcaacgcacagatcgatcactgcctctgtcccatcgctccctgaagtagctctgactccggttcct

SEQ ID NO: 214025 - DNA, 122 bp, Homo sapiens
acttctccagccccctccttccctctcttctgcctgatagagggaagaggaagaggaggacgaacagagatcctgaaattctgacttgctgctattccagaacccagcctcctgggtttccc

SEQ ID NO: 214026 - DNA, 122 bp, Homo sapiens
tcatccaatcagcagcgtaccaggtatgaagctctctaggtgccatcttgagtgagggcacgctctccttagaggggcggaacagtttttggcaccttatcgcgagcggcagcttatgcaag

SEQ ID NO: 214027 - DNA, 122 bp, Homo sapiens
ggacgcagaggcctggccgaggcaccctggacgcaggccctgtgcggtgaggccttccaacgtaaaacccacccaaggggctcattctgcaggggggcccacaagcgccaaagggcctgttt

SEQ ID NO: 214028 - DNA, 122 bp, Homo sapiens
ggctcctgggtgctggagttcgatctgaaccttcccgctcattctgcgtgaccttgggggcgtgcctggccctcccgtgcctcagtttccccagccgcacctgccggactgtgaggccccga

SEQ ID NO: 214029 - DNA, 122 bp, Homo sapiens
gttaaacccttttgacggagggaggcgatttgcccagcaagaaaacccgcatttcttgagcggctcctttgtgaaggtctctaccaattgttgctgcacgtgaactcctgctaacttctaga

SEQ ID NO: 214030 - DNA, 122 bp, Homo sapiens
cctcgccccaggagttccggggcattgaaccctgaaggtctgctccgagtcggtcgggtccgaagcgctcctctctgccctcggggaggccccgaagccccagacctggcagcccttcctgg

SEQ ID NO: 214031 - DNA, 122 bp, Homo sapiens
aggctgtgtaaggagtgaccggaagtagaaactgggtgctccagtggcgcaatcggttagcgcgcggtacttatatggcagtatgtgtgcgagtgatgccgaggttgtgagttcgagcctca

SEQ ID NO: 214032 - DNA, 122 bp, Homo sapiens
cgccatgagacgctcggggaaccagactgccgagcccccctctctgggccgacgccagcccggctgtggactggagaaaaccgcaaggccacctgcagaaagaaaagaaggccatcgcgcct

SEQ ID NO: 214033 - DNA, 122 bp, Homo sapiens
acaacaaaaacgcctcaggttggtcggcgatgcgaactgcccgcctctgttcggcgagggcgcccggattggttcacccgacccggatgctatggcaacaggtggtgtttgatagctttccg

SEQ ID NO: 214034 - DNA, 122 bp, Homo sapiens
tctaaagacgcagatcagaaagctggcgtctggcgagggcatgtacccacttgcataaggcggctgggggtggctgctgggcctggcacaaagccttcctggtgtcggtcgtcctgcaaggc

SEQ ID NO: 214035 - DNA, 122 bp, Homo sapiens
aggagagggtatgaggggctcacgaccgccgaggcggcggggctgcaggaggagtcgagtcgctctctctgttgtaaagtgctttttgcaagtgtgatgagcatcgcttctatgtcatgttt

SEQ ID NO: 214036 - DNA, 122 bp, Homo sapiens
gtggcaggaggagaaagggcaatttttttttcgtcttggcagccgagccttattgttgagcggcacccagtgtgccttcaggtttttagggttccttgtttgaaatcacaagatacagtgac

SEQ ID NO: 214037 - DNA, 122 bp, Homo sapiens
ctgtcctcccacatctacaggacgcaccaccagactccaccagtcactaagccacagcaccgccacctcctgctgcctcctccaagaagcctgccctggttgctctgtgctgagttagccat

SEQ ID NO: 214038 - DNA, 122 bp, Homo sapiens
cgccgggtcaaaaggggtgtaactccggtaggcctcctggaggcgttccaaaaacgcccccggtggctcatcaggtccctggacaacttcaaatgtcttagacaaatttatgggttttcgag

SEQ ID NO: 214039 - DNA, 122 bp, Homo sapiens
ttgctgaaacaccagttcagagaggagtgagcttgagaaagagtcaggtttagtgtcccacggaaagagaccagacctggaaaagacagagtcaaagctgggtgagcaggccttcgaagggc

SEQ ID NO: 214040 - DNA, 122 bp, Homo sapiens
atgcttgtaggagaggcagtagctgaagatcacgtagcatgccagcaccatggtaacccccgagatgctccccttcttcacattgatgtacttgttgtagtaccggtagtaacttcttcgaa

SEQ ID NO: 214041 - DNA, 122 bp, Homo sapiens
atctcggatctttttcaaatagcgcttgtggaaaaccgtagggtccgacgccggtgagtccgggttcacagtcaagacgtcagcaagatctggaagagttgcggtgggtaaaggcctgaccc

SEQ ID NO: 214042 - DNA, 122 bp, Homo sapiens
tgtaaacagagaggtgctttttcaatccaaggcatcgcacctttatttcaaaactacttacgctacataatcctgctcatcttctgcctgaaagtgatatgttctattatctaaaataaaaa

SEQ ID NO: 214043 - DNA, 122 bp, Homo sapiens
gcacatggccatcttgcattctgttttaccttttgcttcctaggaaaccctggaggacatcgacaagaacggggatgggtttgtggatcaggatgagtatattggtgagtactgacctagag

SEQ ID NO: 214044 - DNA, 122 bp, Homo sapiens
ctgaacacaagaagccctgagtcttttgaagccgggcaccaaagttaaagattcacttcccgcattccccatggccccctcttgcagcttagctcggctctgagcccccgaaacgcccttcg

SEQ ID NO: 214045 - DNA, 122 bp, Homo sapiens
cttaccctaacaagcaaggagagcaactagagatggcttttggtgccatctgctggttcccggtggcttcttcactttatcctgttgggaccaggaaacaaagtaagtcctacccagtctcc

SEQ ID NO: 214046 - DNA, 122 bp, Homo sapiens
actgggccagatccgaatctccgtagttcagtgcagtgggttctccatccctgctcaggacgcacaaacttactcttggcgattgttttctatgtggctccttgtctccgtgggagtatctg

SEQ ID NO: 214047 - DNA, 122 bp, Homo sapiens
ctgcccccacacacaggctcaccgtttaaggatccttcccttacggggaatgcagaaagccgcagcctctcgcagctgcctgactctgcagagactgggaaggtctgaaaagaagtccctgg

SEQ ID NO: 214048 - DNA, 122 bp, Homo sapiens
aattaaactcgtccaaccgctgaggatctaaagcggggcaactcgccaataatccggtcccgtagtgtcactccatttgtagtcctgccctgcgccgtacctccctattctgcagacgaacc

SEQ ID NO: 214049 - DNA, 122 bp, Homo sapiens
cgcgctcgtgcagctcacgcttctcttcgtacaccgcgacctcagccgcgaccgcccgctcgtactgctgctgcacctgctgcaacttgggccccttttcaggtgcgtgcagaagcccagag

SEQ ID NO: 214050 - DNA, 122 bp, Homo sapiens
tcaccaatacatttcctctcagcagtcagcatcatggtgctcttccccaatcattataaccgatttcagatggtgctagaaaattatattgactctgaacaccaaaagaaatcagtcatcct

SEQ ID NO: 214051 - DNA, 122 bp, Homo sapiens
agtgacagtggcagccctcaagcaggatgcagacctgtgggggctcaattcttagagaagcgccagctctaccttcaggcttgccctctgggatttgaggcaggggtggaactactctccgt

SEQ ID NO: 214052 - DNA, 122 bp, Homo sapiens
ctacttgggactgccagggccatgagtggtgaggagagagtcctgggatggattctccctcggagcctccggaagcatcagccctaccgataccttgattttgcacttccagcctccagcac

SEQ ID NO: 214053 - DNA, 122 bp, Homo sapiens
ggagctggcagcaggctttggctagcatgaccagagcgtcagcagtcacaccgtggcagccggagagcttgaggaaagtgagccgaggacagcactcacctaccagctgcggggagacagag

SEQ ID NO: 214054 - DNA, 122 bp, Homo sapiens
ggtgctcctggacgtctcggcgggccagctgcttatggtggacggacgccaccctgacgccgtggcctgggccaacctcaccaacgccatccgcgagactgggtaagggttggcttatcccc

SEQ ID NO: 214055 - DNA, 122 bp, Homo sapiens
gggtcctcccgccaggtgcactccgggtgttcatacctgcgtgggcaaaggctagacgcacggacgatcacacgcgtggacccgcgttctcagcgccaagtgagccctgggccgcgaagcct

SEQ ID NO: 214056 - DNA, 122 bp, Homo sapiens
ttccttgttatgcaagcgcttgctttcagtttcaagttgtacaatcctagggctcacaatcggtgacccaatacatgacagcctttcatagtctttaatgcagtctttacaggaaccttcca

SEQ ID NO: 214057 - DNA, 122 bp, Homo sapiens
ggtgccaccagctgacgtgtgactgtgacttcacgggtggtgccccggcctcatatgcttcgtggttctctgtctcactcctgctcacgggcgatgccctggcctcacgtgcctcgtggttc

SEQ ID NO: 214058 - DNA, 122 bp, Homo sapiens
ttcagtgtgcagaaggcaactctaaaccacttctattgccatcctgctgagcgaggcttccgggagggctgactagaactctccttgggctttcttcatcagtgtcgttctgattttattca

SEQ ID NO: 214059 - DNA, 122 bp, Homo sapiens
cgggcccacttggggaggggcccagggcccgggaggcggggccgagtccgggctgggctgcgctcaggaggcgggccctgggaggcggagcttagggaggggccggtgttgggagggaccca

SEQ ID NO: 214060 - DNA, 122 bp, Homo sapiens
ctccctgggtacctgccagggccttgcccttgaacagcagccgctgctggcgcactgggacgttcagcttctcggagaccagctgcttcagcgtggacaccagctcgtcctctggcacctgg

SEQ ID NO: 214061 - DNA, 122 bp, Homo sapiens
taataattattaaatatattaattagatttatatatataatatatataaacatatatatacggcaactgttgaaatggtcctagtgagaggcctactgagaggttagaggcctgaacaacta

SEQ ID NO: 214062 - DNA, 122 bp, Homo sapiens
agtccagtttggtcaaaatgatcatagttaggttgcccaccactgtgattaggtagatgacgaggaagactccaaaaaggggaatctgcagctcaggccgccttgtgagttccatcagaatg

SEQ ID NO: 214063 - DNA, 122 bp, Homo sapiens
tgagctaacttctcatgtttgtaggtgggcgatgggataagtttgcagaagacccatttacggggaccatgggcaaacagaagcagaccatgaactaagttaaaattcaaggcccccaggta

SEQ ID NO: 214064 - DNA, 122 bp, Homo sapiens
cgctcgccacccagtttctgtcacctacacaggaggagggcgcccgggaaatacctgctgcgtgaatgaataaatgaatgaaatgcttgggccctgggaaatgcttgggcccgcggccgcct

SEQ ID NO: 214065 - DNA, 122 bp, Homo sapiens
gaccaccttcctcaggctcccggtgccccgtcgccatgagggggttccaggaacccctgccgcccagaacttgcctccagggacacaggctgcctggctggggaccacccccagacacccgg

SEQ ID NO: 214066 - DNA, 122 bp, Homo sapiens
gcagaccgggccccgggtcgggggtgtgggcgaccgcgctgaggggcccgagatgaggcgcgccgccgctccgggtacagggcgcgcggacgcagcgagacggcctcccgcccctctccccg

SEQ ID NO: 214067 - DNA, 122 bp, Homo sapiens
gacccggtcccgaggccccatcctgaatgtcttcatcgggcatcctgggtcctttgcagccgcggcatgaacttcccgtgcccatcccccatcaaccccacacccattctctgcactcccac

SEQ ID NO: 214068 - DNA, 122 bp, Homo sapiens
tgtgtgtgtgtgtgtgtgtgtgtgtgtgtgtgtgtgacagagagaaccacgctttattggcggagccttatgtgccagcgaactgagaaggtccagggtaccttcacctgcactgccacagt

SEQ ID NO: 214069 - DNA, 122 bp, Homo sapiens
cggcctttccagcggctccaggcccgtgcagtcccgccggacgccggctacaccacgcgccgctgctggaacctctcccagccccgcgtggccgcccccggcccaggcaccccctccccgga

SEQ ID NO: 214070 - DNA, 122 bp, Homo sapiens
cccgcgcgcgtagccgccactgccgcttcccggccccgcccagccaaccctcttccggcgcggacgcccggccccgccccatctgggaactggcactgtatctgacgcgagccagcgcacgc

SEQ ID NO: 214071 - DNA, 122 bp, Homo sapiens
gaggactgctctgagatcaactgcatgatccgggtgaagaagcaggtagggtggagggcccgccatccccagcatccccggcaggtctcgcttgccctggccgcatccccatgctcccgaga

SEQ ID NO: 214072 - DNA, 122 bp, Homo sapiens
tgacctggaggacagtggcaggatgggccagggaggcccagggaggggcagggcatcgcccgaggtcaccagagccagcagcgccctcccagccgtgggattctgagcaaagccccgccccg

SEQ ID NO: 214073 - DNA, 122 bp, Homo sapiens
gacatgattccggttgtgcagacagccgatagcggattcttcgaggcgtctgtcctcttgcgaccgacacttccgctgagcaacggaagcggctttcaagatccgggcagaaactttactaa

SEQ ID NO: 214074 - DNA, 122 bp, Homo sapiens
cgaacttccaggctaaagagatcctcccacctgtgcctccggagtagctgtgactacaggcgtgcaccaccacatctggctaatttttaaattttttgtagagacagggtctccctatgttt

SEQ ID NO: 214075 - DNA, 122 bp, Homo sapiens
tctcgggaaggaggggcgggggcgctggaggtctgggttggagctgctggtggccgcggtcgcggtggcggccgcgcgggcagggcgggaaggagcgcggcgcccaggagaggactgcggag

SEQ ID NO: 214076 - DNA, 122 bp, Homo sapiens
ctgcggagttgcagccgccgcccccggcacctgcgccaggacactcgtggtctgcgcgttcgccttgcgcccgcaccctgcctggtccctgcccactgcactttgcctagggggatgcccac

SEQ ID NO: 214077 - DNA, 122 bp, Homo sapiens
cttgtgtcttcaccttgctgcattgtgaccagcacctacggctggacagccaatatggagcggatcatgaaagcccaggcacttcgggacaactccaccatgggctatatgatggccaaaaa

SEQ ID NO: 214078 - DNA, 122 bp, Homo sapiens
gaggacacggttaaagcattgctatcaactgtgaacccagagagccctccttagccaacacgctaactccgaagcctcccttacgcccccgaaccaccgaaggcggcgacacctgattcagc

SEQ ID NO: 214079 - DNA, 122 bp, Homo sapiens
gctgtgtgctgaaggtcactggctacaagccggtgaagtcgcggaatggaatccttggcccgaaaacccaaaaatgggaggggcagaggaggtggggacagagcgggaggaggtggaggcga

SEQ ID NO: 214080 - DNA, 122 bp, Homo sapiens
agatttgaaacactctcattgcggaatttgcaagtgggatttcaagcgctttgaggccaacggtagaaaaggaaatatcttcgtttcaaaactagacagaatcattcccacaaactgcgttg

SEQ ID NO: 214081 - DNA, 122 bp, Homo sapiens
ggtgaggccgggaggtaggcgggccttggcggacgtcacccacattcggctttggggagccgccccacccccaactaattgtttgccagaaaggaaccgtaggatagatgctttgtgagaca

SEQ ID NO: 214082 - DNA, 122 bp, Homo sapiens
ttctcgcccacgacggcgaggcccaatcagacccgcggagctggtggagttccgccctcgcggaggaggtggtgttccgccctcctagtcgcagcaagcgcggaactggggttgcggcgtct

SEQ ID NO: 214083 - DNA, 122 bp, Homo sapiens
ttttgggaggaagcccgcagaggcaaggcgccgcccccctcccatcacatcgaggctacacgctgctgacacgccttctggctgcggcgctgaccttggtcacctcgcacgtctccacccca

SEQ ID NO: 214084 - DNA, 122 bp, Homo sapiens
aggttgcagtgagccgagatcgcgccattgcactccagcctgggcgacaaagcgagactccgtctcaaaaaagaaaaagaaaaacctgtctagggggcgtgtgtgtaagtagtctttgatgc

SEQ ID NO: 214085 - DNA, 122 bp, Homo sapiens
agaaggtgccgttacatgcacgtgaccacagagaaggctgccttcaccccgtctgcaccccgggagtgcctgccacactgaggtccgcgcgcagtttctggttttctgatgctgactttttt

SEQ ID NO: 214086 - DNA, 122 bp, Homo sapiens
ggggagcagagagccctgcgtaggggacaggcgtgggctgggccttgggtcgtctgccggcgaaggtcactgcaggacgaacccgggccgctgccgcctcctgcacccgtgggctgggtccg

SEQ ID NO: 214087 - DNA, 122 bp, Homo sapiens
gtcctagctaactatgggggaccagccggcaaggccaagtaggccttgcaatctaggtggcgctatttctctactttttaggtcaagttcctgcaggaacttcctcgaggtcccaagtcctg

SEQ ID NO: 214088 - DNA, 122 bp, Homo sapiens
gtgtggagtaaacacagctgtgagcaagggcacccaccccagccccggcctcctcggccccgcagcactgagaggctgctcccgagtccccccagggaccccaagcagtgaatgacccaggg

SEQ ID NO: 214089 - DNA, 122 bp, Homo sapiens
gcacactagcttcctggggccctcaggggcctgtcctcccatctgtccatgtggggctggcggggtagagccgggcttctggacatgtgtggtgttgcaggccccttcagagccctatgaac

SEQ ID NO: 214090 - DNA, 122 bp, Homo sapiens
tcgcctcctgtgctttccccgccgcggcgatgccagggccttcgccagggctgcgccgggcgctactcggcctctgggctgctctgggcctggggctcttcggcctctcaggtaagagcccc

SEQ ID NO: 214091 - DNA, 122 bp, Homo sapiens
agtgacaccgtcgtgaggtgagggcccaccccagtgacctcatcttcacttgaccccctgcgaagacatatttccaaatgaggttacattctgaggtgccgggggttagggcttcaacatct

SEQ ID NO: 214092 - DNA, 122 bp, Homo sapiens
agcatgcaccgcctgtgagcggtctgggcagcgcttcccaggttgcccatcagatgagcccgtcccaggtgtcgaggaggagatctcctgagcggcagtctcggaaatccttccccgtggaa

SEQ ID NO: 214093 - DNA, 122 bp, Homo sapiens
cctcagccctcccgccagcgcgttgcgcacggcgtcgtgctcggccagcaggcgctgcagcgcgcggatgtactccacggctgagcgcagcgtctccaccttgctcagcttcttgctggcgc

SEQ ID NO: 214094 - DNA, 122 bp, Homo sapiens
gagagaaggaaaagctgaagccacccggagcatttccaggccggcagggctttgggaatgcgcacgagaatcgcgctgggcgctctgagagcagaaccggccgctcaggcccctaaggagac

SEQ ID NO: 214095 - DNA, 122 bp, Homo sapiens
gaagaaggcagaggattggagtgccaagagtctttggtggttacttcactgctaaaccaccgtttctgtaattgtataatgctttttaaagggtgacagtaaaaagcaaggggactgtgaac

SEQ ID NO: 214096 - DNA, 122 bp, Homo sapiens
cccctctttaccggattggaggctgcgcgggtgaaatcgagctttaaactcccctggcctcggaacaccatttgtagcctctgaaggaggaggacttataagattctgtactaaggcagccg

SEQ ID NO: 214097 - DNA, 122 bp, Homo sapiens
gatcttcataataattaaatgagcatttaattattggtatatggttatattaaataaatacgttattttcagaacatgagttggttgctttttataattattaagaaatagagtgcccatac

SEQ ID NO: 214098 - DNA, 122 bp, Homo sapiens
catctgaaactaaagtttcttttcttactatgtgtttcagctgtgtttaacaaaggtcgtcgggggagtgactatgccccagagtccaccatgagagtgctgaagagccaaaggtgatggac

SEQ ID NO: 214099 - DNA, 122 bp, Homo sapiens
caaataagtgaatttataaaacgtttgctactgattttttccagtcttttttcttttttacgttctattttgattctttcatattgtacaccattttatgtctccagcgtcttcattttaga

SEQ ID NO: 214100 - DNA, 122 bp, Homo sapiens
ctcctgcttgtgtcttcccctccttcttttgctttttcatatatcgagtcctccttactacgtgtctaactcagactatacatgggatcctcaaacatatgctttaggcaattacaattctt

SEQ ID NO: 214101 - DNA, 122 bp, Homo sapiens
cctccagaggaagatgctcacagccagtgatcatgtaacagacctccatgtcaaaaaggccgacaagatctcaaactccacttggaggctgatggatgtggatcccatccatggatcaagga

SEQ ID NO: 214102 - DNA, 122 bp, Homo sapiens
ctggaagtggaatctcaggacctgagtctggggcttcaagttcctccacagggtcagatgcgaactgttcccagggtcagatgtgaaccacggagtgggtgcttggaaaagcctcagggcgt

SEQ ID NO: 214103 - DNA, 122 bp, Homo sapiens
cccaggtggcacttgcccaggtgattctctcctggggtttacaggttccgtggcttcacccggaagtctgggtgtcctgtgcttggaactcttggggaggccgggagaaggcagccaagcac

SEQ ID NO: 214104 - DNA, 122 bp, Homo sapiens
cgcgcacacgaaatgcttgcttccacttcccctaccctggtggggcaggggctggaactccgcaggctatgggaaggtgctggggttagcggccccagcgggtgctcagtggtgttgaggcc

SEQ ID NO: 214105 - DNA, 122 bp, Homo sapiens
caaaaagggaacagaggaaccccttttacaagcaagcatttaaacagacccaaattcggccgcacacggtggctgacgcctgcaatcccagcacttcgggaggccgaggctggtggatcacc

SEQ ID NO: 214106 - DNA, 122 bp, Homo sapiens
tccagactctggaaagaacctctacgaacgaagaagacaacccaattttcaaatggaccccggggaacacccaggcggctggggctggctctaggtccccactgctctgccttgcgggggcc

SEQ ID NO: 214107 - DNA, 122 bp, Homo sapiens
taatggggaaatattaatttatgcaaaagcaatgagctcgccttggctggcgtcggaggtcgggagaaagctcccactgactaaggacgaccccgaagcgtcacggagagcaaggccgctcg

SEQ ID NO: 214108 - DNA, 122 bp, Homo sapiens
atcaacttgcattttaaaataaagtcagataatgctacaaattcgtaatcaattatttcacggtgaaattaatcagtttaagggtttggggattgactgactaaagccagcaaatgtgcatc

SEQ ID NO: 214109 - DNA, 122 bp, Homo sapiens
ctgaaccataagagaatgcatttctgtaaaagcaaggagtttagccaggcatatgtgtgtcgttccctaaataaaacaaagaggaaaaggcaaacttagaaacaggccaagtaatgagaaag

SEQ ID NO: 214110 - DNA, 122 bp, Homo sapiens
cacgctcgccccctgatggggaagcccgccacgctcgccccctgatggggaaggccgccacgctcgccccctgatggggaaggccgccacgctcgccccctgtactggaaaggccgccacgc

SEQ ID NO: 214111 - DNA, 122 bp, Homo sapiens
cccattcattaaataaaataataaaaacaaattttaacttcaagatagagttaagagagtcgaagagggaggagaaatagacatgcaaggagaccacacacagtcacataggggagataaag

SEQ ID NO: 214112 - DNA, 122 bp, Homo sapiens
ccccggtgccggccaagaggcccatcaagccttccagatcggaaatcaaccagcagaccccgcccaccccgacgccgcggccgccgctgccagtcaagagcccggcggtgctgcacctccag

SEQ ID NO: 214113 - DNA, 122 bp, Homo sapiens
ggagacggaggccatggcacgggcgagtgtagggcaggcgctgccggacgcggtgctagtcgcaggatgaagtgagggccttaccccaacgcggccttagcttcctcggaaggaccgagcag

SEQ ID NO: 214114 - DNA, 122 bp, Homo sapiens
cgactggccccgcctcttcctctcggtcccatattgaactcgagttggaagaggcgagtccggtctcaaaatggaggtaaaaccgccgcccagtcgcccccagcccgactccggccgtcgcc

SEQ ID NO: 214115 - DNA, 122 bp, Homo sapiens
ccaggctcgctgtactcgcgcacccaccatggcctcccgcagcgcgggcaccctactgaccgagttcaatgccgcctacgtgccccctggactcatgcccgggtaaggccgagggagcgcct

SEQ ID NO: 214116 - DNA, 122 bp, Homo sapiens
gatccacgaagagctgcgacgtttcaaagagtctcatttccaggaagtgttggagaatcccgatgattccaaattggctaagtcctccaaatgtaatcgaaacaaggtaaccatagcaagag

SEQ ID NO: 214117 - DNA, 122 bp, Homo sapiens
ggccggacagctgtgctgctccacgtgaaaagacatcattgcccttccgatggtataaagcgagggttccccagagagctcagacatgacctaagtattagcttagcctggggtgaagactg

SEQ ID NO: 214118 - DNA, 122 bp, Homo sapiens
tccccttgaagaggaaccactatatttaatcaaaattctaaggcaatggtggcctagccacgcttcataaaccattccaaaatcctctggataatctggtataactctggatatttatgagc

SEQ ID NO: 214119 - DNA, 122 bp, Homo sapiens
ggctcctttctaagtccttccataactactaccctactaaagcctctgaacccaagggaacggcagcctggctgtgccaagaaaggggctcccagcttctcacattctgaagccggatttcc

SEQ ID NO: 214120 - DNA, 122 bp, Homo sapiens
gggagctgttgctgagggtgaggatcacaaagaagaacacccagagtggcatccttcacccggggtggcacctgcagagtgacaggaggggaaggtcaggtacagccacagccattgggatg

SEQ ID NO: 214121 - DNA, 122 bp, Homo sapiens
atagtaaggcagtaggatgaggctccggcataaggcccacctcctacctgccgggcgggacgagcaacatgattggtggaatcgagtaattactgatcagtattgtccaatcacggagggca

SEQ ID NO: 214122 - DNA, 122 bp, Homo sapiens
ggccaactgccctggaggcatccacacaggggcccaggcagcacagaggagctgtgaacccgctccacaccggccaccctgcccggagcctggcactcacagcaggccggtgctaaggagtg

SEQ ID NO: 214123 - DNA, 122 bp, Homo sapiens
actgggggatttttctgtgcaagcgaaaattattgatgcaaccagaggacttgctgccagcgtcgaggggtgcattttactccctctgtaaagaggccagcagtaatgatagaaacacagtg

SEQ ID NO: 214124 - DNA, 122 bp, Homo sapiens
ctacatatagcacaaaaatttttaccagtgaggtggagaatggattaaaaggaatcagaccgaaggcggaaagatcaaagagcattctaaaaaagtagcctggggaacatggtgaaatcctg

SEQ ID NO: 214125 - DNA, 122 bp, Homo sapiens
caaagccgatgacaggctggccaccctcctgctggtaggtggtggctgagtagcccaccacgccgccggccgggcccgagagcacagcactggagccgctgaaggtgtccatgggcgccagg

SEQ ID NO: 214126 - DNA, 122 bp, Homo sapiens
cccggcctcgaagacaagggtcttgccccacgctcgcctccctcccagctttgccgggaacgccgtcccactcaggggttcaatgcagaaacaccctcctaagggaaaacgggacgccactc

SEQ ID NO: 214127 - DNA, 122 bp, Homo sapiens
ggaaatcgaacaaagacagtatttcaccctgggctggcaggcagctgttagaggtatttacggccttgccgcagtgcggcggccaggcagccgggtagggtatgcgggggcaccggaagctg

SEQ ID NO: 214128 - DNA, 122 bp, Homo sapiens
tgctgccgctctaactgcagtggcggctgctgtggctgtggctgctgctgctccccgggccgcaggcgcgtccgcgtcgtggccgctgctgggatcgctggtgccgccgccgccgccgccag

SEQ ID NO: 214129 - DNA, 122 bp, Homo sapiens
gataaggggtgtctaggggttgggtcagactccagttttggagtctgactcacagttgggcggagccaaggccccctgaggctgagccagaacctctgagagtgaacctggagactcagagg

SEQ ID NO: 214130 - DNA, 122 bp, Homo sapiens
gacatcggtcattgaggtatctattcaaaaacacggtttagtactctgccacacaccgaacgcaacgccacagcagccatagaagcgtgtgtggctgtttaacgtggtctttttggggaggg

SEQ ID NO: 214131 - DNA, 122 bp, Homo sapiens
aatcagtgattgtctggagttggagatcagaatctgctgttcacatcccggctgtgacgtcgtgtccggtgaggggcagagccaccgcctgcggctggcaagtgatgacctgaagaagggcc

SEQ ID NO: 214132 - DNA, 122 bp, Homo sapiens
ccttgcggtgacgcttgagttgctgtgtggggtgtgtgggcctggctggccctcagctcccgggcgagtgcccagcaggtgtgtttgccaggagggggcacctgtccatgcccacagaaacc

SEQ ID NO: 214133 - DNA, 122 bp, Homo sapiens
cagatcacaatgtgatttatccagaaatagtccattacttttcctaccaatggcagagaccgtcactctgtcctactaagaccatttaatgaaattgttctgtaaggaccttatattagagc

SEQ ID NO: 214134 - DNA, 122 bp, Homo sapiens
accccatccctgggcacagggcctggcatcagtagaggattcttgcgcgaattcggtgcacgccgaaacattctacagaacccatttccactttcagctgcgtgggcccggcaggaacgcgc

SEQ ID NO: 214135 - DNA, 122 bp, Homo sapiens
tggctgcacctgatgcaataagctcagaggttgcaaggggccctgaggaaaccagctacccgacaggcccagagaccttgtccccattttggaagctcctccctccccaatcccaggaatcc

SEQ ID NO: 214136 - DNA, 122 bp, Homo sapiens
ggccgcgcccaccggtggtggagcggagggcgcggccaaaggtgcccaacgccgcccacgcgctggactccgctctcaaccacgaggaccgtctgcacttgcaccgagcaagcagcgaaatg

SEQ ID NO: 214137 - DNA, 122 bp, Homo sapiens
atttcccagaatcccttgcagcaatggtccaggccagtgacctgggctgagccaatcaaacgctccagcaggaccttgtgccgtgagctccctctgctttgagtcttaaagaaacagttggc

SEQ ID NO: 214138 - DNA, 122 bp, Homo sapiens
tcgggactgtgcggctgcggcggctattgtgttcttggtggaccggttcctgtatgggctcgacgtctctggaaaacttctgcaggtcgccaaaggtctccacaagttgcagccagccacgc

SEQ ID NO: 214139 - DNA, 122 bp, Homo sapiens
cgatggcggccagtctcccgaagcgcgaggccccgcccagctctcggcctctcccgcggccggtccctgcaccaagctcgcgagctgactggctccaccccccgcgccctcgtattggtgcg

SEQ ID NO: 214140 - DNA, 122 bp, Homo sapiens
ccgattgctcctctcgcgataatcggggcgtcggatcccgcgagatctgggactgcctaccggccaaaattaaagtgaacgcttcagcaggggaaggtggccgcgcttctggccgctagagc

SEQ ID NO: 214141 - DNA, 122 bp, Homo sapiens
cctgggcaagcagcatctgggccccccacctgcccatcccaacacatcctgcagcagtgccgcacccgggcaccgtggagccacagaggtcaggaggcctgattccagcttatgcaagtgac

SEQ ID NO: 214142 - DNA, 122 bp, Homo sapiens
actgccctttcctgccccgcccccgccccccacacacacccggttaggcaccagtcgccccgcagccatggccgcagccggaaaagaatagagagctcgctgtgctgcaatccaagccgctc

SEQ ID NO: 214143 - DNA, 122 bp, Homo sapiens
gagcgccggcgactgcacaaccagctgcaggaactcaagggcaacatccgtgtattctgccgggtccgccctgtcctgccgggggagcccactccaccccctggcctcctcctgtttccctc

SEQ ID NO: 214144 - DNA, 122 bp, Homo sapiens
gccatctgccttcctgctctgatttctgaaccaagaaggctcaaccatgggactaggacccgctgatgtttgacaatcactgtgagatgcatcacaagtaacttgttaataaggtgctcatt

SEQ ID NO: 214145 - DNA, 122 bp, Homo sapiens
taagattttagaattgtctttatttaatacttttagggttagcctgaggcttctctaggtcggggagcctcaagaaagaatggaaaagaaataatgaagcagaagtggtctgtgttttttac

SEQ ID NO: 214146 - DNA, 122 bp, Homo sapiens
ttctaaacctccttccttctagagtagaggctcaggggttaagggatatgtgtcttcaaacgagaacacttcattcaacagacttttcccgaagaccacgtgctgtgcgcagcctgacatgt

SEQ ID NO: 214147 - DNA, 122 bp, Homo sapiens
gacatctgaacagagggacccgggtacagtgggaaaagcttgtgatttagagaaatgtgacgagtccctgatcctctgtgatcctaagtcaagtatttaaccattaacctctctaagggtca

SEQ ID NO: 214148 - DNA, 122 bp, Homo sapiens
ctcagagggaccggaacgttcgttggaaggatcctcgtttctcagggacgattttggacgcgaagcgtgccccgcacaaggatggttgccatgaaccggaagtaactggttgttttgctggc

SEQ ID NO: 214149 - DNA, 122 bp, Homo sapiens
tctctgggccttagcttcctcctgagtgtcatgggggtgatgccttctggcctctgggcacgggggttgggtgtgcaaagggtggcagcaaggaaggcaggggtcctaaggtgtgtcctcct

SEQ ID NO: 214150 - DNA, 122 bp, Homo sapiens
ccctcacagggaccacatcactgccctgagcgttgcatctttgtgcacagcatctccaggcgctggaggtgtcttcctctcgctgcctccatgcccagcatggggggatgggagagatgagg

SEQ ID NO: 214151 - DNA, 122 bp, Homo sapiens
cacacgtgcctccggggccgaaaacaggcgacaccatagcacttgggcactggtgtcacccgcttcaagaggaaactaggataattatgaccaaaggggaacttgttcattcgccggatatt

SEQ ID NO: 214152 - DNA, 122 bp, Homo sapiens
gcggccggccagggcaggcgttgggcgctgagcaggacgcgcaagtcgaggcagtaccagcgccgcccggtcccgccatgggggaagcagaggctgccgcggccgctcaggacagcgccgcc

SEQ ID NO: 214153 - DNA, 122 bp, Homo sapiens
cagaagggaagtaagaattggctataagccagacctctggtttcaaagagggccctgatgcggcagcccatagtggggttcaagtctttatgagaacacactcccccaccctggcccccaat

SEQ ID NO: 214154 - DNA, 122 bp, Homo sapiens
ctgagctcagcagaatatgaggcccgggtgagggcccgccgagattttcagaggctacagcgaagggacagtgatggggaccggcaggtaccgccataggagcctggcctggcccctggcct

SEQ ID NO: 214155 - DNA, 122 bp, Homo sapiens
ggggggggggggaagctgcgaggcgcatgcgcgttgcagggccgtccgctctgctgccgccgctgttgcagccaccgccgttgccgcctccctgccggcaagtgtgtgaagaagaagctgag

SEQ ID NO: 214156 - DNA, 122 bp, Homo sapiens
acacgtgaaatgacagtcatccgtctttgagtatatcgggcacaccctcccctacatccccgcccttttggcaatgttggtgggtgacaatatgttcctcacaagatgtgcagaatgtttat

SEQ ID NO: 214157 - DNA, 122 bp, Homo sapiens
agtcatcctaacaaggctgcttcacaccctccatgtctctgcctgggacacactgataatcgcatatcccacatcctcatgccagcattgcagctaccctatctgtgacacttacctatcca

SEQ ID NO: 214158 - DNA, 122 bp, Homo sapiens
agctttaaattatgcaccattctgtgcagtgtgatgaaatctcccgccatccctctgtcccgccctgcaggtgaatctgtgctgtctacactgctgcccgtgagccacttagtagccacctt

SEQ ID NO: 214159 - DNA, 122 bp, Homo sapiens
cgccgcgctctcctctctgcgtccgcgcccggcgcgccccgagggtggcgggagcggtgccggctactgcccccaagtctaggcctagactgggccccgcgccccccaggcacctgcgggcg

SEQ ID NO: 214160 - DNA, 122 bp, Homo sapiens
tagaaatgagggagaagacgactctgcctttctgcaatttagacgtcgcaaggatgaaaacgatgcggacaggctttccagcagtgagcctggggaaatctgcgtcacatgggcgacagaag

SEQ ID NO: 214161 - DNA, 122 bp, Homo sapiens
tatgcaaaggatgacaatcttatttttaactttttattatttgtactttcctttttgtttcgttgttttttgtttgcttgttttgagacagaatctcactcacccaggctggagggcagtag

SEQ ID NO: 214162 - DNA, 122 bp, Homo sapiens
caaaaccaagaggtcagacccagcagcagctaaggctaggcctgggaggcagcaagagaacgaccgggctcgcaggcaccccgggatgctcaggcaatgcctgctcctccctcgcccgcggt

SEQ ID NO: 214163 - DNA, 122 bp, Homo sapiens
ctccttggtctgttttcctcatctttgtaactgacataggatggaatacagggagcagctcgcaaagccaaatccctctccacttccagttctagtcggctgggccaggttcctcccctgcg

SEQ ID NO: 214164 - DNA, 122 bp, Homo sapiens
gtagaacattaataaaattttgaaaatgtttgagtttgagttgcttttgagatacctaagcgatgatgtcaaatgagcagctgaacatctggactggaattcaagagaaataggggaatgta

SEQ ID NO: 214165 - DNA, 122 bp, Homo sapiens
ccaggcctcctcgctgctggggggcaggctcctggggcagagtgccgcgagctgccatcacgcctacatcgtgctctgcattgagaacagcttcatgactgcctccaagtagccaccgcctg

SEQ ID NO: 214166 - DNA, 122 bp, Homo sapiens
tgagggtcccctggcccaaggccagcgtgtgtcttccgggggaggaatgacctctggagccgccatccccagcctcggcagcaggggctccagggtccgggagccaaaactcagcagctgct

SEQ ID NO: 214167 - DNA, 122 bp, Homo sapiens
tttagcacttgagctcaagctgcactcagatggttagacccccataaaaagcagagggtacgttttctgttatgaaaagtaaagactgagccaggcgctgtggctcacgcccataatcccag

SEQ ID NO: 214168 - DNA, 122 bp, Homo sapiens
atgctgagtctccttgtacccacatcacctttttatgaggtcagtgttaccaagaggacccgcacacaggggaggaagaggcaggagaccaaaggaactcagtgcttgcctccagtgatgag

SEQ ID NO: 214169 - DNA, 122 bp, Homo sapiens
cctgtgtttcaccaaagctgacttacgtactttccccatcttcccaggcatcttgtacgtcgttacatttatcatattggaaggtaataaatgatcttgttttcctcttttcctgggctcct

SEQ ID NO: 214170 - DNA, 122 bp, Homo sapiens
ggagatgggtctccttatgtctattttataaacgaggacataggctcagggaggttgttgcgtgccttagtgctcacagttgtgtatgacaaagccaagatttaagcctggggctttgactt

SEQ ID NO: 214171 - DNA, 122 bp, Homo sapiens
tgacaaccacccttcctaacacacacacatacatcttttatcgtcctgatctaccctagacggtctcatcactatactggctcctccttacccccgtaaatctcccaggtacacttcctgat

SEQ ID NO: 214172 - DNA, 122 bp, Homo sapiens
atacaaacttttctagaaaatactttctcaaacataagcatggacaccctggcatgtaaacgtttaaaaatgtattaaatggaataacagcagaatacaaaatatctgtgaagagacttaaa

SEQ ID NO: 214173 - DNA, 122 bp, Homo sapiens
ggacttctggaagggatttagacggggctgagtgctaggattaaagtggggatgggagtacggcaacagaaaaacctgggagctagcaatgcacccagcccttgactgtgccctggtggaca

SEQ ID NO: 214174 - DNA, 122 bp, Homo sapiens
gtagccagcgcaaaccaggtcagcaggaccgagtctcctcaggggttacctacagtccagcgggaaaatgcaaaaaaagttctgaatccacctgcccctgcaggtgaccatgcaaggcttga

SEQ ID NO: 214175 - DNA, 122 bp, Homo sapiens
gaacagacccttccaaaaccgcgcaggcccaagccccacgccccagtgccagcgtccttgcgtggctttggctccaaggacttctgctatcgatgtttggcgccctcctcacctttattcca

SEQ ID NO: 214176 - DNA, 122 bp, Homo sapiens
tttaagctaacagtttacactctagacgtaaagcctggtagggttcaagcgtccctaactcgccacaaaaacggacatttcggctttttcccctaagatccaggaaggcagctcaggtgtaa

SEQ ID NO: 214177 - DNA, 122 bp, Homo sapiens
gtggaacataagcttacaggaagattgaaggttccaaccatgacatagctgttggcattccggtcatgaacagaggccccaggcccccgagtaccagggggggatcccccaccatgagtggc

SEQ ID NO: 214178 - DNA, 122 bp, Homo sapiens
gccgtgtccctaggccaggtggtcatcaccaagaaccgcaacgggctgtactaccgctgtcgcgtcatcggtgccgcctcgcagacctgctacgaagtgaacttcgacgatggctcctacag

SEQ ID NO: 214179 - DNA, 122 bp, Homo sapiens
cggagccatgcagtacccgcaccccgggccggcggcgggcgccgtgggggtgccgctgtacgcgcccacgccgctgctgcaacccgcacacccgacgcccttttacatcgaggacatcctgg

SEQ ID NO: 214180 - DNA, 122 bp, Homo sapiens
gcctcctcacagcttctctgggtgctgctctgggccaccgtgttgggcttgctctgccagcgactggctgcacgtctgggcgtggtgacaggcaaggacttgggcgaggtctgccatctcta

SEQ ID NO: 214181 - DNA, 122 bp, Homo sapiens
tgggcgtagttaatgctcctttggaatctcatctactggtctatctggtctatctgtacccgtatattctacaggctgtctcactgagctttcactaggttatgctgcagtaacaaaagccc

SEQ ID NO: 214182 - DNA, 122 bp, Homo sapiens
ggatgccgtgggcggggcccaacggagcggacggaagcacggggcgcggggctggacccccggacaccccgtcccgcgcccccaccccctgtaggcgccgcgcagcacctacctgcgccctc

SEQ ID NO: 214183 - DNA, 122 bp, Homo sapiens
cgggtaggggtgggggcggggaggtgcgcgcgcagcgtgggaggaggccaactctcggggcgctccctagccctgggtgggtggagcgggggaagcggagtacgttggacccggctccgccc

SEQ ID NO: 214184 - DNA, 122 bp, Homo sapiens
agcaagttatttgatctttttgtgtctatttcctaatctatacaacaggcatagtaacgccgcctaacttgtagggttgttgtgaggctcaaataattgaatgcatgcaaaattcttagacc

SEQ ID NO: 214185 - DNA, 122 bp, Homo sapiens
tgaaacacaaggtctatcacagcctcaatcttagagcccagaaagactggacaagaaaagcgaagcgggtggggattgggggcagcgtctccgcaaagcgtaaggtgtgagcctacagccca

SEQ ID NO: 214186 - DNA, 122 bp, Homo sapiens
tcctgttcccccaaaatgacctcgataggcgtttgtgtgggatggggttcctgggtagggcggggctttccagtgcgatgtccctggtctattcttagcgggctgaaacctggagaagtggg

SEQ ID NO: 214187 - DNA, 122 bp, Homo sapiens
aatgttctttgtattagtgataccactctgcggctatttaacttcgaacccctagcggtccgtggacaggcttcagcaggtccaccacacacacctccacctcccactccccacgcaataac

SEQ ID NO: 214188 - DNA, 122 bp, Homo sapiens
cgggagggtgggatgcgggcccctgtgtacggaaggcggtggtctggtgtccgggagtagcggttaccagccagagaaagcctcccgggcgtgccgcgtggctctgagcccgtttagcggaa

SEQ ID NO: 214189 - DNA, 122 bp, Homo sapiens
tcggttttcccctccgtcagatgggaacgacgctgtctgctaacgcgaagcggacagatgcgaaagtgcttgaaaagttttcttgcagaatccaaccctctcactggagaatttgcagagat

SEQ ID NO: 214190 - DNA, 122 bp, Homo sapiens
ccagcctgggcaacatggcaaaaccccgtctctataaaaaatacaaaaaaattaggtggacgtgaaggcatgtccctgtagtcccagctatttggaaactgaggtgggaggatcgcttgagt

SEQ ID NO: 214191 - DNA, 122 bp, Homo sapiens
agagggagagaggaaagaggaaggaaggagagaaaattaatttgctaaataaatgcttttcgtgatgttatcaagcccagattcagtggagtctttgggaaggatcagccacatagtggtgg

SEQ ID NO: 214192 - DNA, 122 bp, Homo sapiens
cacccagctcccaggagggcacgcagaggactaccgagccacactccgccccacgctcgccgctatggttacttgccagccgacccacgcgagccgctatggttactagcccgccgcccctc

SEQ ID NO: 214193 - DNA, 122 bp, Homo sapiens
ctgtgtcgatcatgctgggcgctgtagaccggagctgttcctatttggccatcttctgtccggtttgttttaagtgattccaagcacatgtccagaggcttatcttccatgaaataacttcc

SEQ ID NO: 214194 - DNA, 122 bp, Homo sapiens
ggagggccgcccagcccctacctgcccgcccagctgctccgcccgacccatacctgcccgcgaggctgctccgtcacctcggagccattggcagccgtataggtctctgtgtagccggagcc

SEQ ID NO: 214195 - DNA, 122 bp, Homo sapiens
ttcaggtttaccatctgtttccctcattagactatgagctttacaaaggcaaaagtcatacgttttatttctaaccctcagttggtgccactgaacaaggtagatgttgatgactgaattaa

SEQ ID NO: 214196 - DNA, 122 bp, Homo sapiens
cggagctcagcccagcctggccccggcctgatgctgggccagaaacaccacacaagcttgcgcatcccctaaagaaaacgagggcacgggaaggcccagccaaagtgtcctgcggggctgct

SEQ ID NO: 214197 - DNA, 122 bp, Homo sapiens
aggggtgcttgcaaaagatttaaaaattaaatctgtagtcccctttcctggtaagaatagcgccagcttctttggcttgtagaccagagggaaaaccagcctggcttccatgaggggtgcta

SEQ ID NO: 214198 - DNA, 122 bp, Homo sapiens
gtagctcacacctcctgagggctttctgatcatgagcatcaatgtacatgtgaccgatcccgttagaggctgacgcgcacagaagcatctcacttaacacctcattgcgcagaggagagaat

SEQ ID NO: 214199 - DNA, 122 bp, Homo sapiens
atcatcaaattgttactcaagcaccttgaaatgtggaaatatcagaacacaatgagagctcgctaagcggctctcctcttggctgacctgtcagatgaatgtctttggctgatgggtttggc

SEQ ID NO: 214200 - DNA, 122 bp, Homo sapiens
ctttcttccttttgaccttacgcagggtgatggagccaatcaggagaggctcacccctgacgtcacccagtccccagggccagtgagggccctgcgttccgtggcgccccctggagggagga

SEQ ID NO: 214201 - DNA, 122 bp, Homo sapiens
acatgttgacgaggcgattgggaggtggggttggttagtgggcagtgacagaattcgggccgctctctagtcccttgtaaaagacctgaaaaaatcggacacccagggtctccagtccttac

SEQ ID NO: 214202 - DNA, 122 bp, Homo sapiens
ttttggtctgtgcaaccagatagacagatggcaggtccattctggaggtagaaacatggacgagggtgggcaatatcacctagggaaagcatttttgctctttgaacattcaacgtgggtgt

SEQ ID NO: 214203 - DNA, 122 bp, Homo sapiens
cgaaacagtgcttactgatttccatcgtgtaaacagtcctgccacgactgtttcaatgctcgcttaaaacagaaccatcagctccctcaagccagcgtggcatgaaccagtgccagcacacg

SEQ ID NO: 214204 - DNA, 122 bp, Homo sapiens
ctccaggtgcgccgttttttaagcctgttggaaaagtgcagtattccggttggagtgacccgattttccaggtgctgtctgtcacccctttctttgactgggaaagggaactccctgacccc

SEQ ID NO: 214205 - DNA, 122 bp, Homo sapiens
tgagtttccggctccaggttcgcgtgtcgccctgaggtttgaggccagacagctcgcagtcgggcagggagggcgggggagagacgagcggctctggccccttaattgtacttcgggctcgt

SEQ ID NO: 214206 - DNA, 122 bp, Homo sapiens
cacgcgaggcccattttgacggatccagttcgaggcctgacggcggccaatcggcgctggcgccttcaccctccccgccccgccgaacccgtcaagggccgccccttttcctgcccacgtgg

SEQ ID NO: 214207 - DNA, 122 bp, Homo sapiens
aatttaattctttatcattcaagtagagagacaggcattttccaaagcaaacccaaccctcgtgattatttctagccagggtgaagctaaggaaggtagcagtaggtggtaggatcagcacc

SEQ ID NO: 214208 - DNA, 122 bp, Homo sapiens
gggcggccgcggctggggctggggttgccagccgggctcggctaagtcccggggctgggacgagggacagaggggggggcggagagccgccgcctctgccccccgctcgccccgccctcctc

SEQ ID NO: 214209 - DNA, 122 bp, Homo sapiens
ggggccacagacttccagtaatgggtgggggccatgcggccctggaggaaaatctgggggcggagcttagggctgcccctaagaaagactaacagggaacccaccggctgtgtagaagggac

SEQ ID NO: 214210 - DNA, 122 bp, Homo sapiens
ctgcccccctcactcgcctgtagggggtgagggttctttggggaccgtagcctgcggcttcggtcttcagttcctgaggtcatgtagagggaatgggtgtccagaacggtccctgacagagt

SEQ ID NO: 214211 - DNA, 122 bp, Homo sapiens
ttctgctcttttatcactgcttcagctagtaggtcaactgtggtttgcatgcccccgtgacgagtggtctgcaggtctctggtgtcacctcccagtacggggtcctctggggctggtccagc

SEQ ID NO: 214212 - DNA, 122 bp, Homo sapiens
tcatctgtattaactcattcgatctcacatttaggatccctgtgagacagatacttagcacgcttgttttgcaggtacggaaactgaggcatggagcaggcagggtgtggcagaattgagct

SEQ ID NO: 214213 - DNA, 122 bp, Homo sapiens
cattgcattttgtgcctctcctcacgttgcttatctcatgctgttatagatactgattttcgtagtctttttcctccatacagtcctgagggcagaaagaagcttattttttgtgtgtaatg

SEQ ID NO: 214214 - DNA, 122 bp, Homo sapiens
gggcagccacaggcacttgacaatgtcttcacttaaccgcgtatcgctgcatcgctagggcgaagagagcaaggaggactgtgaagagcgaagcctgagctgccatgtggtgagtccggaga

SEQ ID NO: 214215 - DNA, 122 bp, Homo sapiens
acaaataacacagggagtacaccccgtgtgacattaaaagtgacatccccgaggatataacgtataatatcagagaatgtacatgcattgggacatcagtagtaatatctctttcggataat

SEQ ID NO: 214216 - DNA, 122 bp, Homo sapiens
atgtcctgcactgctgagcttttcacaagccccttggtggggtccttaccggcgtttgtgcgtttgaaagcaactgattgaaaatcaggcctccaagcttgtgcttgaaaggacgagagcac

SEQ ID NO: 214217 - DNA, 122 bp, Homo sapiens
gtgcatgcttttcagctggctgtaggatatcagccagaaacaaggtctttctgaccctctcgcattttcccctgaagcaagtcatggaaaacagaattcctttccccaaggtgggtctcaga

SEQ ID NO: 214218 - DNA, 122 bp, Homo sapiens
tgcccggctccaccccgtgccggtgctggtgccggagcaggggcgccaaggccttgaaggcgcgggggcagagcgcgcagcggtagggccgctcccccgtgtgcaagctgtagtgcgcgcgc

SEQ ID NO: 214219 - DNA, 122 bp, Homo sapiens
tgcttgtgtaggtccaccacagggagccttcgatgcggaccttctgggttttgatctcctcgatgtccttaaattcactctttatctcccccttgatgaacttcctcttcttctcatgtctc

SEQ ID NO: 214220 - DNA, 122 bp, Homo sapiens
tttaaaagaaaagttggtgcagtaattttctttgaaataaaatattgcatcattatctgacgttgtcattaattttcaggctatgcttagaatttccgtggcaaaggaaaaaaaaggatgca

SEQ ID NO: 214221 - DNA, 122 bp, Homo sapiens
ggtggccggcgcggcccccagcccgcggggtgggtgccccagtgtcggagccaacaggtacgggaggcgctgtctgccaaccatctgcccactctgagcaccagggcccgcgacagcccggg

SEQ ID NO: 214222 - DNA, 122 bp, Homo sapiens
ttgttcaaatagagaacacgcagaagatgcacttcaccggcctcctctggctgctgagcccgtactctctctttggctcaggctaggcctcttcttctccttggacttaacgtggcttaggt

SEQ ID NO: 214223 - DNA, 122 bp, Homo sapiens
tacatccataaatattcatctatcttcaattcttttctaaatcttttatgccaacacacacgcaccccctcacatatacatatttatttacaaagcagctacattgtggtattttaaaacaa

SEQ ID NO: 214224 - DNA, 122 bp, Homo sapiens
ggctggaccacacgtccggggaatacctggtctgatcggaggcagtgcagccccagacgacgagacatcagcttacacctgccgggacatcaaacaagcaaaagacaaatgtgggagaggat

SEQ ID NO: 214225 - DNA, 122 bp, Homo sapiens
agccgctgccgccggtgatctacaccatggagaacaagcccatcgtcacctgtgagtgcccggaggcggggagggcgcggcggtcgttgggcgggcccgggccctggcgttatgcacccggc

SEQ ID NO: 214226 - DNA, 122 bp, Homo sapiens
ggaagagctggaggagcggcggcagcaaggttatccgtgcgccaggagactgcagcaaaccgggccggggcgggcagggaggggggagagctggagagaaagagggagagacgcggggagag

SEQ ID NO: 214227 - DNA, 122 bp, Homo sapiens
ggcggtagaagtgcacgaagagtgtggggttctccccacgcaggtcgaagagccagctctcgagcataatggggcaggccatgctgagcggcatgacgaagacgaaggtgcgcagcgcgaac

SEQ ID NO: 214228 - DNA, 122 bp, Homo sapiens
agtagcttggacagggggcttggacggccagcgcattgaccagaagcggcccacactacacgcgcgcgaacacacacacacacacacgcacacgccgcgcgcggtcagctagagtttggcta

SEQ ID NO: 214229 - DNA, 122 bp, Homo sapiens
taccattaagtaactggtagttctcttataagccaagctaaactgttccaaagaaaaagacgctggaaacactgctagccctgagacccatgaataagtagtcttttcaattatttatttat

SEQ ID NO: 214230 - DNA, 122 bp, Homo sapiens
atggcaggggttggaagatgcctagtctagttgagcgcccagctcctgaaacagctgtaccgactacaagggttccagcacatgagttgctggaaactggggtgaccactgacagagattga

SEQ ID NO: 214231 - DNA, 122 bp, Homo sapiens
gcctgcgggggcggggccccgggccgggccaggactgatggagcgagcgagaacggactgcgcgtgcgtggctgcctggccggcgctgaggggctgagcgtacgcgggcggcggggtgggcc

SEQ ID NO: 214232 - DNA, 122 bp, Homo sapiens
aaagagacctatatcctaaccctagagatgacaaccacagcagagtattctgccaggcctcgtgttaaatgcttcccacacagcatctcatgtaattctcattacaatctgatgaagataga

SEQ ID NO: 214233 - DNA, 122 bp, Homo sapiens
atttagtacaacattcattcattcttctggattagtgactgccagccaggctgtcgggagcgccctactaaatctcctgtctcttctgcttttactgggggatctttaatttgctgtgtgcc

SEQ ID NO: 214234 - DNA, 122 bp, Homo sapiens
ccgaggggatgcagcagcagtcgggagggacggccgagcccagtagacagagaccaggagcggcggccgaggcgatcgggcttcgcagcgcccggacctgagccagacccacctggtccgtc

SEQ ID NO: 214235 - DNA, 122 bp, Homo sapiens
ataaatacttagcgtacggatgctggggtggcactttctcagaagagctgtccccctccgcgctcagctagaattgtctgaaaactcattcttggcgttccctgcaagctataagctttgta

SEQ ID NO: 214236 - DNA, 122 bp, Homo sapiens
ttgaggctgcctgaaggcttctgggcctcctttgtgatgcaggcatgggctccctggaggcggtgactcctgctcacagtcaggaggttccactgggggtgtggcatggggggaggggctga

SEQ ID NO: 214237 - DNA, 122 bp, Homo sapiens
ggcagatgcatcaagccagtagcaggtcaatcagcagaggtgtctgcttgcagggtgccccggattatggcaaggttattaatctcgaagtgctgcatccccccacccccaacattcggcag

SEQ ID NO: 214238 - DNA, 122 bp, Homo sapiens
tggattcagagccccaaggaaacaaaaacagcacgtcagaggaagaatgtcatacaaacccgctggagtcacaaggcaaaacagcccccatacctaaacgcccggcgtgacaatggcctttg

SEQ ID NO: 214239 - DNA, 122 bp, Homo sapiens
gtcgtggagatggggtcgggaagggccacgagatgcgctcaagtgtttgttgcctaagggcgaaagacaaaggtcctgcgaagatcctgggtctagctgagctggcagggcctttgccgccc

SEQ ID NO: 214240 - DNA, 122 bp, Homo sapiens
tgggtgagcgccaggtctccccaccccaaggatagcgcgcacagggcgatctgctgctcgcgaggtagagagtggcttacttggggagaaaacattgaatctgtaaattaccttgggcagta

SEQ ID NO: 214241 - DNA, 122 bp, Homo sapiens
ttagctgcctccccgccgggcagggctccggacctgcaggctgccatgcctgaacctccccgctccaccgccgtgggctcctgtgtggcccgagcctcccctgcaatcgccgccccctgctt

SEQ ID NO: 214242 - DNA, 122 bp, Homo sapiens
gatgtagaaataccaagtgtttattaaaacaatacagagtaatacaaatggtatgtttgtcgcaatataaaagtatctaaaaattaaagagttctttaatggtggagattgttttccttttt

SEQ ID NO: 214243 - DNA, 122 bp, Homo sapiens
tttgtgagtaatgacaagaacttctctcttcaataacctgctgctctccctttactcccgcgacatgcttataaaattggaaactgacaaacgggcccagggttgataaatgggccaaagga

SEQ ID NO: 214244 - DNA, 122 bp, Homo sapiens
cacggacactcgtgctcattcttgcccatgtgctcacacacggaccctcgtgctcactcacgtgctcacacggacacgtgctcactctcacatgctcacggacacccatgctcacactcata

SEQ ID NO: 214245 - DNA, 122 bp, Homo sapiens
ccgcccgccgtcgctgacagcatggctcgcgcctcggctcacattctccgccgctaactccgctggacacggccccccgctcccgcggcgcccccccacctcgatcactccttcgctctctc

SEQ ID NO: 214246 - DNA, 122 bp, Homo sapiens
tatggaggaacgtcagctggtttgcagtgacagttgtcacagactacacccaggggaaaacgtgtcacaccagtattctcacaccatgttcactctgaccacatggaaattgaattagtgtt

SEQ ID NO: 214247 - DNA, 122 bp, Homo sapiens
ccgacgcggatctcacgtctagacctctgtctttaaagcggatgtagagcgcgttctaaccgttccctaaccattgtgtcaccgcgaaaggccggggctgtgtggaaccgtcccgcacgtgt

SEQ ID NO: 214248 - DNA, 122 bp, Homo sapiens
tttccctttttttttttttttaaagccagagcctctgtcgcccaggctgcagtacagtggcgtaatctcagctcactgcaacctctgcctcccgggatcaagcgattctccttcctcagcct

SEQ ID NO: 214249 - DNA, 122 bp, Homo sapiens
aatagagtaagaactcacactccttccccagggagggcagtaaggcattcatgagggatccgcccccatgatccaaacacttcccattaggccccacctccaacactggggatcaaatttca

SEQ ID NO: 214250 - DNA, 122 bp, Homo sapiens
ttcctgtatgtccgccgctggcatgttatataaaagctggacctggccttgaaggtaaatcgtcacaagccccgagcaagaaaaactggggtcaaatcttaggtatctgattaaagtaagtg

SEQ ID NO: 214251 - DNA, 122 bp, Homo sapiens
cgaactcccaacctcaggtgatccgcctgcttcggcctcccaaagtgctgggattacaggcgtgagccacagtgcccagccgcgttctttattactagaaagaaagtgattttccaaatgta

SEQ ID NO: 214252 - DNA, 122 bp, Homo sapiens
ccattggttgggactaccttccccgatgcccatccgcccagaatcttccttctgggatgccgactttttcaacacgtgccaggagcccttcctcggcccggaatccccagagtgcccacagt

SEQ ID NO: 214253 - DNA, 122 bp, Homo sapiens
attccctggggccggcggggccggcagggccggtcggccgctagctcggagtgcaggggccgcggagcccacgcccacccggaacttgccctggcccgccagcaccgcaggcagccccagtt

SEQ ID NO: 214254 - DNA, 122 bp, Homo sapiens
acgatggctgggacctgcgcgacgctgctgtagcctgccgggaactgggctgtgggggggcgctggctgcccccggcggtgccagattcgggcctggtgcagggcccgtgtggatggacgat

SEQ ID NO: 214255 - DNA, 122 bp, Homo sapiens
cgatgagaggaggactcctcctgggcctggtgcttcgaggtccagacgagcagacactggcgcctgtgaccctgcagcggacgcccttcaaagtccgtgtggccgcatttggaagcctgggc

SEQ ID NO: 214256 - DNA, 122 bp, Homo sapiens
ggtggggcttggctggaccgaaaactgggatgaagcggggcctccaggggtgggcggggccgaggcggggcctgttctccactccgcctctcacccagcaggattttgttttccaggtttgg

SEQ ID NO: 214257 - DNA, 122 bp, Homo sapiens
cttccaaaattcactgactcacccctgtgtttcatcaatcattcaaggagccaccgcatccggttgatcactcctttcaagatgcaagaaatgtttatcctaagccaacccttcctgtctgc

SEQ ID NO: 214258 - DNA, 122 bp, Homo sapiens
ttaacaaatgtcctggcttagaagggggaaagggatccgccggtttagaaagcccgcccccgcccccagggggtgcctacgtggagctcctgaatctggctctggagaacccagaatgtgat

SEQ ID NO: 214259 - DNA, 122 bp, Homo sapiens
atgggaacggcgcagttatttccagcccccgggccgtgccagtggcgcggtgccaggatgcgagagtattgcaggacagcggcaatctgctgcgacctgggacataacaatgcgccccttct

SEQ ID NO: 214260 - DNA, 122 bp, Homo sapiens
ctcatttgtttacatcttgtctgtctgctgtcatgctgtaatgataatgctgagtacttgcgacagaaaccgcatagcctggaaagcctaaaacatttattacctaggccttgaccaattta

SEQ ID NO: 214261 - DNA, 122 bp, Homo sapiens
ggtcccttgagtgcgtgcggcatatttccctgcgcggaggagtgcgtgttctttctgatccgctctttcaagagcggattcggaagctgctgtgtgaacggttctcgacagcctcagaaatg

SEQ ID NO: 214262 - DNA, 122 bp, Homo sapiens
gtggctgggctgtttttttcagtagcccctagcattggctgggattcctgttcctgggtgcgcctccacctcccttctgatgtttcctggctatggtggggtgggaacctcagtttccccca

SEQ ID NO: 214263 - DNA, 122 bp, Homo sapiens
ccttggctatgggctttgcagtctccctttagcggatcaaaggtgtgtgggaaagaatgacggctggatccgcctccacaggtccttacacagacgcacacatcacagccagacccaaagca

SEQ ID NO: 214264 - DNA, 122 bp, Homo sapiens
acaggcctacgaagtcaggtgcgagaactgcttggagtcctggtgaggacggcccctcctcgccatccggccacatcccctctaatgcctggaaatgtccagcatttattttgaatatatcc

SEQ ID NO: 214265 - DNA, 122 bp, Homo sapiens
tgcgtacctagcactccgacagatgtacgcatgcgcacaacgctctgttctcgagatccccgacagaagcacacatgcgcacaccgctgtgtgccaaggtcgccaaaagacggaagcacgca

SEQ ID NO: 214266 - DNA, 122 bp, Homo sapiens
cctgggtggttatggctcagaagaagaaatgaactgtgaaggagagggcagcctggtctccgtggacaggaagaacatcgacacaagggcctggccccactctgggaaggtggccagaaacc

SEQ ID NO: 214267 - DNA, 122 bp, Homo sapiens
gcaggaaggaaacgacatgaaagcccctttctccccagtgtcccagttcaacaccgtgcacgctaccaaggagaaacggcgcacgggccccacccacgactgcagagcaggcaggggagggg

SEQ ID NO: 214268 - DNA, 122 bp, Homo sapiens
gggccccgagccgtcagctgtcgcctcagcctcgtcctgcggccgccgggcaccgcgcttcggcaatgcagcactgtggtggggcgcagccgcaaggcctcctttgaccaggacttctgctt

SEQ ID NO: 214269 - DNA, 122 bp, Homo sapiens
gccggagacgcggggtcagggcgcggacgaggggagcgcagggtcggaggggctcccggacgctgcccgcccagcgtcggctctcgttggcccctggctgcgcgcagcgggcccgactctca

SEQ ID NO: 214270 - DNA, 122 bp, Homo sapiens
tttttgattatttaatctgcttgaagtacagggcaccaaaataaaactgccttcttaatccggctgtggcttctgaattctgttgacttattaaccatgccgggtcacccctctttgggttg

SEQ ID NO: 214271 - DNA, 122 bp, Homo sapiens
tgccaaaaagccctcagcaatgcatcagaaagtgtactctgacctgctgccatcctgaaacgcctgtggttcttggaccggaatgtgccctttacctctcttggattctctgggcatcaagc

SEQ ID NO: 214272 - DNA, 122 bp, Homo sapiens
aaaagaaaaacggtgtcgctgcccttcgtctctgtctgtataagcggactcagcaccaggcggtattcgcgggggctgcggagctgcctggagacccccgcccagccacagaaggctctgga

SEQ ID NO: 214273 - DNA, 122 bp, Homo sapiens
agaaagggatcattagcacgcgaccctcgcctaggagtatataaaccgcagcacgactttcggatcacaaaggcagagaaaagaacacattgaaggcttttgctcacttttccaagttgttt

SEQ ID NO: 214274 - DNA, 122 bp, Homo sapiens
gagtcggcgaatacgcccggccgcctgcggcccggcttccggtcccgtctccgccggcagcgtcctctgctggacacctccgggaacgcctcacccggcctgggcgcctgcgcccctgtgtg

SEQ ID NO: 214275 - DNA, 122 bp, Homo sapiens
gctatttaagcttcctcccagttggtgtaaatattcaatagttttgctgcagaaatgttgcgtttgattatgagactaccccaactccccaagggtgttttgtggtgctggtttctgtataa

SEQ ID NO: 214276 - DNA, 122 bp, Homo sapiens
cctgctaccctgcccaggagctgtcaacacctggagtgcagtgcaggaagaatgcaggggcgcttgatggggaggtgagtgagtgcagatggggttcctggaactccttgggcccttggggt

SEQ ID NO: 214277 - DNA, 122 bp, Homo sapiens
ccccggagatgcaaagacgatggcagcagcgttaacaactaattacagtagcggcgaccgcgccaaggctttccttcaaccctgattccgcagatatccggaaaactcttaccctccctcga

SEQ ID NO: 214278 - DNA, 122 bp, Homo sapiens
caggatgtgaagaaatgaagattcccttggctgcaagtgaaacctagctcagactcccttcgagtaaaaggaagtgtactggctgacgtaacctggaagtcctaggtgccacttccggcatc

SEQ ID NO: 214279 - DNA, 122 bp, Homo sapiens
ccttccggggcagcgtgcgtcgcgacgcgggaaggggcctggaggcgggactaggagcctcggagtcaaggggcggagcgccctttgctaataagccaatcagaacgtgagacgctccggtg

SEQ ID NO: 214280 - DNA, 122 bp, Homo sapiens
ttttatacataaggtaacagaccaaaaaggttttagtaagtttacatagctggtagttgacgagtcaggagtggaacctaggctgtggaatccagatctttccacaggctgtctctaccggg

SEQ ID NO: 214281 - DNA, 122 bp, Homo sapiens
cgccgtggccccgattttccaggcgaggagcatcggagcccgtgaggctcagggcgggctcgaggccacacagccactgctcctacctggagtcagaccctggcaccaagtacctttccaag

SEQ ID NO: 214282 - DNA, 122 bp, Homo sapiens
tcccgaacaggcgcttgccctctcttttatggtaagtactctccagctcctggtgaggggcgcgcgggggccgggagccgagatccggctgcacggactttgtgcgggccagcactcgacac

SEQ ID NO: 214283 - DNA, 122 bp, Homo sapiens
gtcagcggcccagctccatgcagcaaggcgccgtcggggctcccggcactgctccctcctcggtggctgccgcttctgtgtgtccccggccaccctggcgcccagagcccccacctcgcccc

SEQ ID NO: 214284 - DNA, 122 bp, Homo sapiens
ggttctgctgggtgggtggcttcggcttctgtgcagcgctcaccctgctctcccctggaacgcctggaactagggtggtcaggctggggtggaggagctcccctggaatgttccagagcttc

SEQ ID NO: 214285 - DNA, 122 bp, Homo sapiens
agcaagggataggggaaggtcttaggaaagtcgccggggcccccgggggccggagagaggcgctcagacttgatgctgactgggggggtcggcggggaggcgccgcgggttgggggaccctc

SEQ ID NO: 214286 - DNA, 122 bp, Homo sapiens
atacggaacttttcattctacccaagatgccacttatggaccctcaagtttatcataccccgtgatgcccccatattagtgccctgggctaagacattgaaaataatactctcttcaagaga

SEQ ID NO: 214287 - DNA, 122 bp, Homo sapiens
aaaatattgctggacagtaaaacctacccatcagggccaatccagtcatatctgctcagtcgtgcagcacagtaggggcggggtagagaagtgggaggtgggcttttaggcagcaaaggaaa

SEQ ID NO: 214288 - DNA, 122 bp, Homo sapiens
ctgagacctcctacgctggggacattggtctgaggctggaagagggcaggtgggcatcatcggcaggctggatagttctctggatcacagaaaaaggtaggtacctcttaggagcgaatagc

SEQ ID NO: 214289 - DNA, 122 bp, Homo sapiens
tgttaaacgcatcggacctgacaccctcagacacccgggacaatacggggctgcagggaacgcaaggctgtgttgaacgcatcggacctgacaccctcagacacccgggacaatacggggct

SEQ ID NO: 214290 - DNA, 122 bp, Homo sapiens
aaaaaaaaaacaaaaaaacagattggttgttttagagcagttttaggtttataaaaataccgagcagatagtgcagagagttcccatgtacccctcccacgcccaggttctcacattattta

SEQ ID NO: 214291 - DNA, 122 bp, Homo sapiens
ggtcgggcgcgctggggctgggctgggcaggagcgcgagggggctgcggagtgtgggtcccggcggcttgacaggtttcctcgttctcgggaggcgggccgggggtgtgggaccctgtccgc

SEQ ID NO: 214292 - DNA, 122 bp, Homo sapiens
actcagccctgggggctccctctgcctgagggcttcgtcccctgctgcctggccgtgacccgcagcacaagcacagataagcctcagggaacaaaaggcagggctgccacggaagcccatcc

SEQ ID NO: 214293 - DNA, 122 bp, Homo sapiens
aattttctatcagaaatcagaagataaatgagcaggaaaaaagtctatcctcacacacagcggagaaaggtgctagcaattgcttgataagccctaagggtttattgtttcaccaacctttt

SEQ ID NO: 214294 - DNA, 122 bp, Homo sapiens
tgtccttttttacatgcatggttaacagctgtatctctcaaagcatccaaaaaatgatctcggtggatgaagatattccacaattcagacatggctttgcattggcctgactttaggtgttg

SEQ ID NO: 214295 - DNA, 122 bp, Homo sapiens
ggaagccacggagcctgggtgcctgggtcctgcctcactgactcataatgctaataaactcgtgtgtatgaggacagtgccagaccccgttgggggtacagaactgggaaagagagggcccc

SEQ ID NO: 214296 - DNA, 122 bp, Homo sapiens
acacgacattgtggtcgcccaccacatcgctcagggcctccctcaggcgtgccgggtcctcgggatgcagccagtctgtgtaatgcaggaccacagcctcggctgccaggtcacttacctgg

SEQ ID NO: 214297 - DNA, 122 bp, Homo sapiens
agtcatatggaaagctgaaaagaaagtatatttcagagagctctaatcatgtctttattgcggaggcagtagattgggaattacagctcatttgggtgtagcatccccagagaaggagcctt

SEQ ID NO: 214298 - DNA, 122 bp, Homo sapiens
gagtttcagcccgaacctcggctccccgagcccgcccgagactccgaacttgtcgcattgcgtttcttgtatcgggaaatacttattgttggaacctctggagggagaccacgtttttcgtg

SEQ ID NO: 214299 - DNA, 122 bp, Homo sapiens
ataagctgacctctttcatggaaggccctggcttacttatccttatcagttcaagagtcacgtttccaggaagctgtcccctgacctccccaatcctctgttctctgaattcccaaaaccct

SEQ ID NO: 214300 - DNA, 122 bp, Homo sapiens
gcagctgcagcagaaactgccagagtcacagatggggcccccgctggggggcgctcatgccgtcccgggtgctagcgcgctgcgtggtgggcgttggcaatgtccgcagttccgggggaccg

SEQ ID NO: 214301 - DNA, 122 bp, Homo sapiens
tgagtacgtgtcacgcacgcataacagtcctgggcacatagcacacactgtggggccagccgctgtcagaattctcctgttcctcagtgtgcgggtgggtcggcctaaagagtgctgctttc

SEQ ID NO: 214302 - DNA, 122 bp, Homo sapiens
gaactcatataacaacgatcctctaccttactatccatgaaggaggcaggtgactgatctcggaatcatgaccagaagcaactgtgccttcctctctttgttgcaatgtaaagataataata

SEQ ID NO: 214303 - DNA, 122 bp, Homo sapiens
ctgaggcactagggtgtcggttaggggtcacaggcggagaggtggggcgcctgggggtttcggtagggagccacccacagataactcagacagccagattctgggggtcgttcaggttgaaa

SEQ ID NO: 214304 - DNA, 122 bp, Homo sapiens
gtggattctgaattaggtaggggcgggcctaggagtccggaccggatcagggggcggggccggagaggcggggcttgagggtttcccctggatgcttctgggtttgaagggaccactcgtac

SEQ ID NO: 214305 - DNA, 122 bp, Homo sapiens
gagaggccaagaaagagacccagagcctgcaaaagagacatcaagtttattgaagacttacgtatgggatggtccagtggtagtgggctggacaggacagatgctaccacttgtaaaagcat

SEQ ID NO: 214306 - DNA, 122 bp, Homo sapiens
ccctgcagcggccagtgcagagctcagaggctcagaaactcgctctcagccccctggaggcggagcccgggagataaggttcgcgctccccacccgccccctttccttggccgaagaccaga

SEQ ID NO: 214307 - DNA, 122 bp, Homo sapiens
aagtcctcgaagacatacacggaaaagcacaaatgtatgactcagtcctgcgcgcagtcacggtcaacagcagaaggcgtatgtcacagtggtcccataaaatcataatggcacctagattc

SEQ ID NO: 214308 - DNA, 122 bp, Homo sapiens
ggttagaaacagagtggaagagcagggagagtgtgagattgactgctgaagatatgagaacgttagagttatttggccacgctgcagcgtcggcacagctgccaagcagcctgggaaagata

SEQ ID NO: 214309 - DNA, 122 bp, Homo sapiens
ttaagagctgtaacactcaccgccaaggtctgcagcttcattcctcagccagccagaccacgaacccaccagaaggaagaatctccaaacacatccgaatatcagaaggaagaaactctgga

SEQ ID NO: 214310 - DNA, 122 bp, Homo sapiens
ttggaaggacttgggagtttacatgcaggaggccagagaggaagagggaggagtcaaaaacgatcattggaagaggcttttcactggagataaagagtgagggaggggacgctggggaaaga

SEQ ID NO: 214311 - DNA, 122 bp, Homo sapiens
acaaacggaatgacagtgtctatttaatgaaatgcatgtcttcaaaatatatacagaactcgatgaacaaggctttttccactcctcagggagcatgcattaatgaatagataggattcaaa

SEQ ID NO: 214312 - DNA, 122 bp, Homo sapiens
tgacgacagcgagcgatgacctcagcgccgccaaggctgcgagggcgggggctggggtggcgggggcggggaaaagcgccggagcggggccgagcggagcggctccgggccccgcccccatc

SEQ ID NO: 214313 - DNA, 122 bp, Homo sapiens
gttacagcacgctgacataaagaacaacaggcggggcctgcggagatagccgatcacattcgctctcccctcccttgccaataataagtgcccagagtcctggcaccctggacaacgagtag

SEQ ID NO: 214314 - DNA, 122 bp, Homo sapiens
aaaaggcccctgacccagccacattggggaacttttccgtcttcaggtaggggaccaacccggtgtcccctctctgctgaaagctgttttcaacactcaataaaattcttatctgccttcct

SEQ ID NO: 214315 - DNA, 122 bp, Homo sapiens
gaggaggtgcgtggactgggggaattgggggtgtcctacgagccacgctggtatcagaggcgtgtgaaccagagcagttccatactgaataagagctgggcaaaatgaggtcgcgaggaggt

SEQ ID NO: 214316 - DNA, 122 bp, Homo sapiens
ggtgacccgcctgcctcggcctcccaaagtgctgggattacaggcgttagccactgtgcccggccagtgatttagttctgattaagtcctgcccccggccctccggacatgtttctcatccc

SEQ ID NO: 214317 - DNA, 122 bp, Homo sapiens
gacccctgaagatgcttccgtccgcggataggggacgtttcagacctggggtgggcacagcggtccccggtgagatggtcttttctcctggagtgggaaggcaactttcttttggagtgcca

SEQ ID NO: 214318 - DNA, 122 bp, Homo sapiens
aggtgtgtgtggagaaagcaaaactgggctcctctctctcaaagataaacccccaaagtgcgcgcttttcccgcctgccgcttatagatcggtaacaacagccagcgaagaacaaagcgctc

SEQ ID NO: 214319 - DNA, 122 bp, Homo sapiens
acctccctcatggagatgtgacccctgaaaatggctgctgccattaggtaatggccatggcgggggtcacaggtgtccatcatattcttagcatcaaacatctgctgggtaaggtaagctca

SEQ ID NO: 214320 - DNA, 122 bp, Homo sapiens
tgacctcgtaatccacccgcttcggcctcccaaagtgctgggattacaggcatgagccaccgcgcctggcccttatagctgttcttttatagcatctagcacagtgctgagctcagaagaaa

SEQ ID NO: 214321 - DNA, 122 bp, Homo sapiens
atttacaaaaaaagtatcacatactagtgcaaataattctgcatgacatctaaatagttccgcaaatccttcaggtcaattgatgtcactatgttcatgtacacatattccttagaatgacc

SEQ ID NO: 214322 - DNA, 122 bp, Homo sapiens
gggactggcgggaagcgtgggccggtcgagtcaggagcgagcgctctcctgattggctgccggtccccaccgacctgagtcgccccctttgattggccatccccacggccttccctccgcct

SEQ ID NO: 214323 - DNA, 122 bp, Homo sapiens
acccgggccgtgcccctacctccggggggatgctgtcctccagtggtggttggaattacccgggctgcgcccctacctccggggggatgctgtcctccgagtcggagctgtcctcatagacg

SEQ ID NO: 214324 - DNA, 122 bp, Homo sapiens
tgacggcgtcccggatcacatggagcccccgccccaccccagcccgccccccgccgccaacgccggtggcccttccagtcgcgttactacccagagattcatttgtaccagggacggaggga

SEQ ID NO: 214325 - DNA, 122 bp, Homo sapiens
tccccgcgcccggccggggatgggggtgtggtcccaagtgtacagtggcatcaagctcagcgcgagctcccgggaacgctccaacgccttcagcctgtttcccaggaacggtccccggcttc

SEQ ID NO: 214326 - DNA, 122 bp, Homo sapiens
tcctgcctccttctgcgctgagcttcttcccggggcaggagcacctctcaggttcatgggcggggtcaggcccaggacacctctctgtcccctcctctctcagtcctgcctccttgtccctc

SEQ ID NO: 214327 - DNA, 122 bp, Homo sapiens
acttaggggcgctgtgcgtgcgccctgggcgcctggtcggccccaccgatgtgaagcgcgcgggtggcaatcaagtcaccgtctccgtttactccccgcagtgtggtcgcgcaacttggagc

SEQ ID NO: 214328 - DNA, 122 bp, Homo sapiens
agagtgcacaccacagggttcagcagtggcatcaccaccgtgtagaacacagccaccaagcggtcctggtcggggttggccccggactccggacgcaagtagatgatggaggcgcagtcaaa

SEQ ID NO: 214329 - DNA, 122 bp, Homo sapiens
ctgatctacggcaggcagttcccacccagccaacaggcagaggcagctgcagcctgagtgcgcagagggtagctcctgccggggtgaggaccgtgggcgcggagcatgcttcccaagaacag

SEQ ID NO: 214330 - DNA, 122 bp, Homo sapiens
tgcacgtgccagccttcacgaaactctccccagggcccgtagctgcagcacacgcctcctcgccaagaggtgaagctgcacagctgcctactgccgaggccccagcgacctgaaacaagtcc

SEQ ID NO: 214331 - DNA, 122 bp, Homo sapiens
ctctgggcttcctagcccaggcggaggaaggcaggaaagaaagaggtggtttcggcacaacgcatgggggagcccaaagtaggctgtcagcaaatacagcctatcatgaatagtcctctcat

SEQ ID NO: 214332 - DNA, 122 bp, Homo sapiens
acgggcacgcattcgccacccaccgaacatgggcttgaggtgggcacgagcgctttttgccggaacgtgtaggggtcccccgggagacccagaaaccacagcgcctagctgccgggcgcgcg

SEQ ID NO: 214333 - DNA, 122 bp, Homo sapiens
cgaacctgttcactgttgggttgtgtgcactctaccggattgcgggacccagagcccttgcgttgaatccactggttccacacagcatctatttttttttttttaagatggaatctcactct

SEQ ID NO: 214334 - DNA, 122 bp, Homo sapiens
catccacctgccagctccaagtaggtcgagggagcagcggcacctgggatcccaccggaccgggaagagtcaaatccaggtttctccctgcttcaccaaaaggccccctgcctccaccgcaa

SEQ ID NO: 214335 - DNA, 122 bp, Homo sapiens
gaactagaaagactcacaggactcagaaaagctgttatacttatggtcatgatttattaccgcaaaaggttacagattaaaatcagcaaaggggcaggcacctgagcaaagtcttggaaaaa

SEQ ID NO: 214336 - DNA, 122 bp, Homo sapiens
gggttccacttctggctctgccacttcttaccgggtcaagctacttaataatttcttcttcggtaaaggtggtctgtccttcccaacccacctcacatgacttctgtgtgatttcttgtata

SEQ ID NO: 214337 - DNA, 122 bp, Homo sapiens
tattattatcagagggaagttgagtttcttaccaaccttgtgctgagcgggaaggacctccgtgtccagcgccccgtaggtccgacgcctgtgcgtggctgatcgcttcacgcccccatcct

SEQ ID NO: 214338 - DNA, 122 bp, Homo sapiens
gatcccttgcatcctccactggcccatgaatcttaggatatattaaggtatattccactgcggatagggttatttaaatcttaatgccaaagaaaaaaattgtaattgcctggtgggttctt

SEQ ID NO: 214339 - DNA, 122 bp, Homo sapiens
agcccgggccatgccgcacggctgctgaccgcacgcaggggccggccccgaggacacatgcggcggcctttgccgcctcgcccctgaccctctgccctgttctccatgttgcatttctcgtc

SEQ ID NO: 214340 - DNA, 122 bp, Homo sapiens
tggggattcaggtaaaggacctcagataccgagactgtcaaaggccgacaatgccgcctccgagaggaccgggtgaggcatctgcagctggagctcatcaggggctgagcaggaggctgttc

SEQ ID NO: 214341 - DNA, 122 bp, Homo sapiens
ggtcttgtgtgttcagaggctggttttacaggtgaagagaagaaacagccgcagaagttgcgattgtccaaggtcacttaataagtggcaagaattaggatgttaagtgttctcacccccag

SEQ ID NO: 214342 - DNA, 122 bp, Homo sapiens
gcccgagcccgaacgcaagcctgggagcgcggagcccggctagggtgagtggacccggtgcgggccagggcacccgagaggaaagcgagccttcaggggtacctttgaggggcaggcatcga

SEQ ID NO: 214343 - DNA, 122 bp, Homo sapiens
gaaagagtaagagacttgacttgggagctgacatgttcttttctcaaggttatcagtacccggcagcctttcaactacaaacaacattctagagttgacaaaatatttgtatatcccatctc

SEQ ID NO: 214344 - DNA, 122 bp, Homo sapiens
gggcctagagcggggcacggagctgtgaaacgttgcgtggcaaaggcgaccgcacgcgggcgggcgctcctaggctcttgcccagcggttattgtgatgggcttgaggctcgtggcgcctgg

SEQ ID NO: 214345 - DNA, 122 bp, Homo sapiens
cgtcggacctgaccatttccaatgtgaaattcccggggaaggtcgcgagccgctaggggccgttcgtgggcggggcggcgggccacaggggaagtagagttagcggtcggcttttctggtag

SEQ ID NO: 214346 - DNA, 122 bp, Homo sapiens
ctaactctgggagcttccgcctctccgaacgagcgtcgccaagagaaaccccctcagaagcgaaaagggccaggaaaagaggtcagccccggccaggcaaagacatcacctaagctccccag

SEQ ID NO: 214347 - DNA, 122 bp, Homo sapiens
tcattttttcccaattctcaggctgcaccctactctcctgttccatccaactttttgtttcgtccctacctgtcaacatcatccctgcccactaccctaccttaaggattgccctgcccagc

SEQ ID NO: 214348 - DNA, 122 bp, Homo sapiens
ccctgcatctctcatcttgttatatctggcctcaggattgacagcagctttggtcacagacgcaggggtccttggagggtttctagatcagactcttcatccatgaaccttactaactcaaa

SEQ ID NO: 214349 - DNA, 122 bp, Homo sapiens
tctgagccagcggggagaggcccgggcggaggaggctgcggactcctagaggttcagtgccggaagttgggcctggaaagggggcaccgccttcccggttctggtggcggggagtgagggga

SEQ ID NO: 214350 - DNA, 122 bp, Homo sapiens
ggagaccccagggcacagagaagccccaagcctggcatttctgagcaggattgctttgctcgatgccaccttctccctctcctctattctagtcatgtgccagggctttgtgacccgtgctt

SEQ ID NO: 214351 - DNA, 122 bp, Homo sapiens
tgcagtgaggtgtacagacgccttccaagaacgactcccaccccgccgccctccgtcccgcgcctgctgttgctggcatgaagatccacatcctctgcgtcacccccatgctgcagacaaag

SEQ ID NO: 214352 - DNA, 122 bp, Homo sapiens
ctggttcagtagggatgggtgctagaaggctacggaaccgccgaaggcccaggagaaacccggaacgtgttaaccgctccaactggagccggacgaaaaaacggccccgcctcccgcgaggg

SEQ ID NO: 214353 - DNA, 122 bp, Homo sapiens
atttctggtgaacgggtctgcaggagaatgttcaagtaagtgcatcgactcaccatctttcgtgcttccttcatcaaactgcagaagatgagttagggttagaaatgaagcagccagtatct

SEQ ID NO: 214354 - DNA, 122 bp, Homo sapiens
ccgacgtcgcattagcatgagcgacgtaagtggcccgggcaccactcgggggctgggactcgccgcgtcacagccccgagtggaagggaaaaaaaaagaggaggcggcggaggaggcaagag

SEQ ID NO: 214355 - DNA, 122 bp, Homo sapiens
tcccacccacaccaactcaagtgccaggcgcttgttggactacccagcaccccactcctccgtctgaccaatgttccctgggcgcccactctgggctcagcaaggcagtggcgtggtggtta

SEQ ID NO: 214356 - DNA, 122 bp, Homo sapiens
gcaaggagaaaaaaaatccctcattattaaaaaataaaaagttacaattataagtgacaccggaggagagtaaataaaatggagtgattaaaacattgctgctttaagggtgtttttaatta

SEQ ID NO: 214357 - DNA, 122 bp, Homo sapiens
aactgagccaagatcaagaattccaccttccagtgagtcagctgattctgcagagggaaacgcggttccaaccccacgtcatacataacttttgagttgcataagtcatctgtgtacaagag

SEQ ID NO: 214358 - DNA, 122 bp, Homo sapiens
gaaaaacgcttcaaaatttgggaggatctgggagcttcgggactctagaaacattcccctcgcttccgaccactcaggggaagggacgcgggtgttaagtcctcctctagcggggtgaggct

SEQ ID NO: 214359 - DNA, 122 bp, Homo sapiens
gaagaagaagaagaaaagacaaagcctaaagtttttaaaatcccggtgctttccgggaagcgttcgggagaaaagtgtgtggccgcactagtggagatccccgccgacaggacccgcctctc

SEQ ID NO: 214360 - DNA, 122 bp, Homo sapiens
aaactacctgaagtcagtaggagggggttggtaacctgatctgtaacctttctctgcctgcgtaatcacagctgtcctatctggaaaatccttactaagagccaggaatgacaggggcctca

SEQ ID NO: 214361 - DNA, 122 bp, Homo sapiens
gctatcagacctgaatgcagttgttcccatggctgggccaggctttgcagtgatgacttgcgaatcaaatctgtcaatcccctgagtgcaatcactgatgtctccatgtctctgagcaatgc

SEQ ID NO: 214362 - DNA, 122 bp, Homo sapiens
gatcaaatcttgataatgtcttgcatttgttatgtttctactttctttaaatctttaaatcgtcagccttggtctttcacgacattagtattttttaaatgtatagtcccatcggtttaaag

SEQ ID NO: 214363 - DNA, 122 bp, Homo sapiens
tccccaacagttccaaagcataaatctgtaccctagtgtcaccagtgcagccaggtgggccgtgctacttagcagttagtggcacagcctgggagctggacagagaactctggctctgcctt

SEQ ID NO: 214364 - DNA, 122 bp, Homo sapiens
ttcccggcgggacctcgaggagggtgggtgtgaggccgggtgggaggagagaagcatttgcggaggctctgccccctgaagctgcccccggctgcaccccaatcgtcaccggccgtttacgc

SEQ ID NO: 214365 - DNA, 122 bp, Homo sapiens
tgacctcatggccgctgagccccgcagggtcttggaggggctccagcccagcttgggaggcggggcggccctggggggcgggtggcgctctagccacgcgctctggggctcgtcaaaaagac

SEQ ID NO: 214366 - DNA, 122 bp, Homo sapiens
gtgccactgcactccagcttgggcaacagagtaagactgtctcaaaaaaggaaaatgttccgtatctgtactaaccagtacagtagctactaacgtggttattccatttgcacttgaaatac

SEQ ID NO: 214367 - DNA, 122 bp, Homo sapiens
cctcgccttgccctcaggcagccgaccggggacacacgggtcaaaattgcgtttgggcggcgcggcgatgcgcggtctcgggcagccgcgcaggggcgtcccgagccccgggagccgcaggc

SEQ ID NO: 214368 - DNA, 122 bp, Homo sapiens
aaactaggagaggagagctgatgtgctgagtggtccctagagaggattcttattcactagcgtccactgggaagtcctctctgagctctagtgcccttcttacctgctgtagtctggctttc

SEQ ID NO: 214369 - DNA, 122 bp, Homo sapiens
ccccgggctcgcgcgacgccagcgtctgcttccatcccgccgcctcctcccccggcgccccgcttcccccgcgcagctcctcattcagcctctgcctcgcgcagcggcgcagggatacggtc

SEQ ID NO: 214370 - DNA, 122 bp, Homo sapiens
ccttagaaacgccacttccctccgtgaaaacggctggacaaggttgaacctagacgcatgcgcccaaagcgcggggtgcgaggtgggtggacccatcgcttcccgctctcttctcccaaagc

SEQ ID NO: 214371 - DNA, 122 bp, Homo sapiens
atcctttctgccgttccaaaacttatttattctctctacaaaaataccaagtcagggctgcgtgagctccacggacctcccgggagtttggggtgaagtgcccttccctggctaggaagacg

SEQ ID NO: 214372 - DNA, 122 bp, Homo sapiens
ctgcctgaaaaccccattcttaatgagttttgaagtttcatttgaaaagtcataatgctacgtgttcaaatactactagtataccaacattccgacatacaatgcccctgagagtcagcttt

SEQ ID NO: 214373 - DNA, 122 bp, Homo sapiens
gccaggtgtggggacacatgcctgtagttccagctactcgggaggctgagtcaggaggatcgattgagtcctgaaagttgatcccttagtgagccataattgtgctactgcactccagtctt

SEQ ID NO: 214374 - DNA, 122 bp, Homo sapiens
ccctgttggtgtttagtggtggtggttgttgttgttgtttgtttttgctttcttggtgtgcgggactgatttgcagaaaccgccactgacttaaaagtttccagttattgctcgtggggagg

SEQ ID NO: 214375 - DNA, 122 bp, Homo sapiens
aaaattagtatcatttacagtatcttaagataaatttcctttgaatgggagcttcctttccggtactttgaggtctacaagacgtatctagaaaatttactactgtggaaaatgaagactga

SEQ ID NO: 214376 - DNA, 122 bp, Homo sapiens
tatccctgcgcacgcgcacgcgcggggttggggcggggcccaagcccctgagttctgcggcgcccgcggctacgcgtaccgtaaatgtcagaatagcagggaaaagagaattagaggcccgt

SEQ ID NO: 214377 - DNA, 122 bp, Homo sapiens
atatgttggttcagaaactctgggagtggagtccagagatcttgttttaatgaagtcttccgggtgattctgatacacacaagcactgtggaaccactgctgtattctaacacatattatca

SEQ ID NO: 214378 - DNA, 122 bp, Homo sapiens
ttctcatttaacctgccaaggactaattgtgtatgcttcggaagcgcaaaaacaggaaaacgcttttctgacatacaccccaagtttcttcagaccaaaaagaactgcctcaatgttgttag

SEQ ID NO: 214379 - DNA, 122 bp, Homo sapiens
gaaattgccacagccaaaggagtctagagacatgatgactaaatgttaggtggtgtcctgcgtggggtcctagaacagaaaaaggacattagaaaaacataaggaaataaaaaaaaagtatg

SEQ ID NO: 214380 - DNA, 122 bp, Homo sapiens
gaaggaagggggctcggacccagggaggatgaggggtccgccttctccttcccctcacctcgctgcagcccagagcccgcagacagccccgcggcccaaggtctctctccgcccgaggtctg

SEQ ID NO: 214381 - DNA, 122 bp, Homo sapiens
tttaaacaagcagatctctagtaattcagcgagaaatcactcattattgcaaggacagcacgaagccattcatgagggatccgcctccgggacctaaacacctcccactaggccccacctcc

SEQ ID NO: 214382 - DNA, 122 bp, Homo sapiens
gctctttcttcttagggcaatcgagccagacccttcttcggaacacaaagttttcccccacgtcactagtggctgtgattcaagacttggtgctttcaagacacactcagacccaggacgct

SEQ ID NO: 214383 - DNA, 122 bp, Homo sapiens
gctgatgggagggagtaagtagagtggccccacagtagccatttttatatataaatctttcgaggagactctgaacatgctacaaattaatgttgggtagagatagctttatctgaacccaa

SEQ ID NO: 214384 - DNA, 122 bp, Homo sapiens
gatgtgtttctggcctttgtcgacttcctctgtgggtgaggtggggactcccgcaggaggcggggtggccgcaccacctgctttcctcccgccagctgcaccacctcgtgagcgatgacgtc

SEQ ID NO: 214385 - DNA, 122 bp, Homo sapiens
aaggaacggtgccttgggtggggtaggctgtttgtcttctctaaattctggttgctattccgggcattcctactgtcaggagccaggtggggggatcagcctacctgtgccggtgacctggg

SEQ ID NO: 214386 - DNA, 122 bp, Homo sapiens
aacggaggctcagagaggggcggccacctggtccaggtcacacagctgggaaatagccgtcgcgccctggaacctctgctcaggctagtccctccaccgacctggaaggccgtgcggacagc

SEQ ID NO: 214387 - DNA, 122 bp, Homo sapiens
atatccacagcgttgtgcagctatggccataatgagttatacaacattttcatcaccccacgccccagtgcaaaaatcaatcagtacccattagaaaccactctccctccttcccaacatcc

SEQ ID NO: 214388 - DNA, 122 bp, Homo sapiens
tccctaggaaaggaaccaatcagcactggagctgaaggacctcatctgcctctgggcagacgtttttctgtgaagattctcactccaatgcctggcactgtttcttcttcaaattgcactag

SEQ ID NO: 214389 - DNA, 122 bp, Homo sapiens
cctttcaccctcacccccagtgaggcgtccctagcaaaccgcccaggaccccggctgccccgcaggcgttcccgccactgagcctccacacggcccatctaggagacagggctatgactcgc

SEQ ID NO: 214390 - DNA, 122 bp, Homo sapiens
atccccaagagcagcgggaaggacaatcatttgcttttctttgtctcggtgggcaatgcccgctttctgggcgtcagcgtccctgcctcttaggcacccagggatcctccacgtcacgatcc

SEQ ID NO: 214391 - DNA, 122 bp, Homo sapiens
cccttgccattggaagtgtggtctctgaaccagaagcatcaacagatgctccagacctaccgaatacaacatccctgctccagacctatagaatagcctgcattttgagaagactgcagatc

SEQ ID NO: 214392 - DNA, 122 bp, Homo sapiens
gggttttgcggcagtgcattgctttgggaaacagctaactttgtggtgttgccccgttcacgggagatcccgtccgtcctcgcgcttcaagcttcccgctgtacgtggactcactcctgcgc

SEQ ID NO: 214393 - DNA, 122 bp, Homo sapiens
ccatcttcaactccatcatgaagtgtgacgtggacatccgcaaagacctgtaggccaacacggtgctatctggtggcaacatgtacccaggcatcaccgacaggatgcagaaggagatcacc

SEQ ID NO: 214394 - DNA, 122 bp, Homo sapiens
gatgatgatgctagaatatttgtactagaactgatggcacactctccaatgtattccctacgatgtatgaaagatcatttaacagatccagtaataatcaaccatgtgttacactgcatatt

SEQ ID NO: 214395 - DNA, 122 bp, Homo sapiens
gaggaaatctcagtgtatatgactcactgttttgaacaaaaattaacatcggctagccagcgtttctctttgtatcacttttccagatcaccaagaggttatataatacttcaaagtagcca

SEQ ID NO: 214396 - DNA, 122 bp, Homo sapiens
aaagccacggctgacatgataaatgaaacagaataaatgtatacagcgagtgagcctcctcgggaacacaggaggggggttgggggggggaacggagcgcttctgctgacagcggctttccc

SEQ ID NO: 214397 - DNA, 122 bp, Homo sapiens
gcgtgcctgcacgttttggtgggtgtgtgcgcgcacaggagggggcgcggccaaaggcttcgtgtgtgtgcgtgcaggagggagtacggtcaaaggctttgtgtgtgtgcacgtgtgcatat

SEQ ID NO: 214398 - DNA, 122 bp, Homo sapiens
cctccctgaagacatcatcattcagaccttcgaaggctggctgctgataaaagcacaacacggaaccagaatggatgagcacggttttatctcaagaagcttcacccgacagtacaaactac

SEQ ID NO: 214399 - DNA, 122 bp, Homo sapiens
ccacacctccatgaagggcatctcctccaaggagccccggcagcagctggtggaggtcatcgggcagctggaggaaacccttcccgagcgcatgagggaggagctgtccgccctcaccagag

SEQ ID NO: 214400 - DNA, 122 bp, Homo sapiens
ggtatctttactggtgtgagcacagttccactgtatggatgatcgtgatgctggagtggtcgatggttggtacctccagtgccagctggggatttatggatgaacacaggtgagtagtcaag

SEQ ID NO: 214401 - DNA, 122 bp, Homo sapiens
tgagaggggatgtaatgggtgcactcacaggggaggtcagggaaggctgcctggaggaagcgggcttgatgtatatgaggaaagaaaataactattccctaaatgaaatgttgatattcttt

SEQ ID NO: 214402 - DNA, 122 bp, Homo sapiens
acgtccccaaaaaggaactcctcatcagccagctccgcctccaggtcctcaagcttctctcgctcccgcttagccaggtactctcggcgagatttcttccgcagctcagggacctgagttgg

SEQ ID NO: 214403 - DNA, 122 bp, Homo sapiens
agcggcggcatgggtacctctcaggaactacaattccagccaagcaccgcgacaagtgaacggaggagaagttatgagtaggggaaaagcatgttgggaatcgtagtccgctccaggccgaa

SEQ ID NO: 214404 - DNA, 122 bp, Homo sapiens
ttaggcagcggtggtggggaacgtcctctctcaggtgcctgggctccaacctccgagccccgggttgctcacgcttctccggtcctctacccgaaggctcgatcccgctggtacagcggcgg

SEQ ID NO: 214405 - DNA, 122 bp, Homo sapiens
aaacagcaagctgagcccccctggggcggcgccagaactccagagccctaagcgcctctgcgtacgtggcctctttgctgactttttggagaacagagggtatttattttaagagtcaaaaa

SEQ ID NO: 214406 - DNA, 122 bp, Homo sapiens
caacaggccgcccagagcagcagtcaaagtccctgcgtgagcgactgcacttcccaagcgcggagagtctgcccaatgagttccgccctctctagcgcgctttctgtgatccaccaatcagg

SEQ ID NO: 214407 - DNA, 122 bp, Homo sapiens
tctgtgaaccattccctgtggttgataatgttttaaccctcaaaacaaccctgtgaagtacgtggtgttatacctttccaaatgcaggaggaatacaagttcagagaagaaaaatacctttc

SEQ ID NO: 214408 - DNA, 122 bp, Homo sapiens
tggttttatctgtttcttttctctttccttcccttgcgttccactgtaccacccccctcccgcccgggtgtcattcctcactgctgagtgacagcctgaggccacacccctccactgggctg

SEQ ID NO: 214409 - DNA, 122 bp, Homo sapiens
gtcgaagagaccctggatctcgcgcttccagccttcctgcatggaatggaaggagtcccgcggcatttcccgtaggacctgtgcctccagcgcctccaactgctgcaggatggaggcgaagt

SEQ ID NO: 214410 - DNA, 122 bp, Homo sapiens
acagatgagcactttgtagctgatcatctttgcactgccatttgatgaacatgttggtaacggttgcctgccttatgtagcatgaacagttgattctgacaatcaagatcctctgcctgctg

SEQ ID NO: 214411 - DNA, 122 bp, Homo sapiens
ctcagggtcccggcaggtatgggcgggtgtcgggggtctcgggtgcgcagcagcctcccccgggccccggggcctccgtgtccttgccaaaggacgcacggggcctgggcacggcgggcagt

SEQ ID NO: 214412 - DNA, 122 bp, Homo sapiens
accgtcccatgccgccgctaatccgggacccacagccacgccgccgcagcggagtctgcgcgcccccagccctagaccgccaggccacgcccccgtcacgcgccgccagcggccatgtgcca

SEQ ID NO: 214413 - DNA, 122 bp, Homo sapiens
gctcccctccctaccctggcggacgtggcccggccgctccgaggggtttccctcggaccccgcgcctaaaccccggccagcgggagcgtctaaggctagccttgtaccccaccggcactcgg

SEQ ID NO: 214414 - DNA, 122 bp, Homo sapiens
agggctgcgcggggagcctgcatgtccgctcgcctcggcagaggcgcgctcaggatgctgcgccgggctgcagcctctctgaaacgtgaacatttcctgtttcctgcttgtttgggtcggtg

SEQ ID NO: 214415 - DNA, 122 bp, Homo sapiens
aataagtgcttgtgaactgagctttcttaacttctcgatggaccgttaggccagcctcaccgggacaaatcacagggcccctccccacccctgccgacaccttgttccagagtctcagggcg

SEQ ID NO: 214416 - DNA, 122 bp, Homo sapiens
acgcgcgactcaataacgtcgcacccgggccgctgtaacatggatccactacgggaccaacggactcctgcccctagaaacagggcaacaacgcacgacaccctggaagccgggtcatactt

SEQ ID NO: 214417 - DNA, 122 bp, Homo sapiens
actcgttcagacagtgctccctggtgtccagcaggctgcgcacggtcagggtcccataggcgctggggacagacacggcagagggcgctgagcagggcaggccgaacacccgcccgtctgcc

SEQ ID NO: 214418 - DNA, 122 bp, Homo sapiens
aggagacaggtttctccctggcggctttagggccttgtctggaatcccctctcccccccccgccaccccctaacacatgtaacagagtaaaaggcttggactggggactgtgaaacctttct

SEQ ID NO: 214419 - DNA, 122 bp, Homo sapiens
aataaagactgggttgataaaagagcacttggaaatcatgtggggccaataagatccgaacgcggccgaagctctcgtcctcgggttgctgcaggtgtggttcccggtgatggaggccgtgg

SEQ ID NO: 214420 - DNA, 122 bp, Homo sapiens
gtcttcctctagggggagctcaagttagctttagcacagtgtgaagccagtgcagcgtctcgcttccacttctccagggggcgctgcaaagattttggtcgccaaagatatcacggtgcgcg

SEQ ID NO: 214421 - DNA, 122 bp, Homo sapiens
tccccttctgcacgcctgaaagcctcgcgtgttaaaggaggaagtggctgcggagaccctcgagtctgcacgggcaagaggcacaaacagctgctacccggccccttcagttccaagctggc

SEQ ID NO: 214422 - DNA, 122 bp, Homo sapiens
aaccttcccccactcaattaccctgttccttctgttacactatcattggctctgtctatacggagctcaacatcctgactgataactggaaacaaagttgactaatcaagacatttcagtgc

SEQ ID NO: 214423 - DNA, 122 bp, Homo sapiens
cttcctgtctgtggactcggagcaaagacgtggggccccatcttttgtgttttcctcaagcggggaaagaatggactgtttgcatgcttcgtgccacacgcccgcggtgatcccagccaggg

SEQ ID NO: 214424 - DNA, 122 bp, Homo sapiens
tctcccttccctgtaaagctacatatgctcagcaagtgccgcgtgcctcccatccttggtcggtggtaaatgcaggaggtaattaacaggatcttcacaaacttggagccagcccactgagt

SEQ ID NO: 214425 - DNA, 122 bp, Homo sapiens
ctgccgaggcactgcacccgcctcacacacgtgcaatgcaacagcaatgcaccgcggggccgcccgcctctctcggcccccacacccgccaccggcccgggagcagctgtccagccctcctg

SEQ ID NO: 214426 - DNA, 122 bp, Homo sapiens
ctcaccgttgtccaggcgcgcgatctggggcagccggtaagtgctgaccaggaggtcgagcggcacggccaccgagctccacttcacatccttgaggctgcagcccagcgagggcgccgggt

SEQ ID NO: 214427 - DNA, 122 bp, Homo sapiens
ctggggcctcagcctccttggccgctcggactcgggccgagtcctcctgctgcatccccacgccccttcccggccagaagctgcgagactagggctggggtcccaggctagtcccctcctcg

SEQ ID NO: 214428 - DNA, 122 bp, Homo sapiens
cctccagccctgcagtccttcctctaagtccgtctgcccctcaccgattgaaagtggccccgagaatattggatggtattgagcaattatcattaactttgttgggtgtggtaacggtaatg

SEQ ID NO: 214429 - DNA, 122 bp, Homo sapiens
tggtctaaggaatcttatagttaaggtaaccctgttttccaaaccaaacaccagagtacccgatccaacacatttttgaccacatgtgagtctgttcttctgacatgatttggatcacacct

SEQ ID NO: 214430 - DNA, 122 bp, Homo sapiens
tcctggggtggcgtctgaatcttcggggaggtgttaggacacttggggcggagttagcctcgctcagggcgcggctaaggcgcccagatggcctgcgggcgccaccacgtccctggtcccag

SEQ ID NO: 214431 - DNA, 122 bp, Homo sapiens
ggcaaggagggtggtgttggcagggaagatggaaccgtcagggaagaccaggtgccccaacgaaggaagaggcaccaatactgaaagccaaggccaccccagtagacagaagggaggccaga

SEQ ID NO: 214432 - DNA, 122 bp, Homo sapiens
cggcgtttcctgccacccgcgctcctccccggcgaggggctgggtgcggggtagtgtcatcggcccgggctgacaccggccctggaaccgttccccgctggcagcctcttccatcccagcag

SEQ ID NO: 214433 - DNA, 122 bp, Homo sapiens
ccccgaatctctggcaaggacctgaaaagctttttcttactaaggtgtgaatgactgagacgacatattgtgacacctcttagagggcaaatgactccctttgagtcccatctatattggga

SEQ ID NO: 214434 - DNA, 122 bp, Homo sapiens
cgggaagttcaagatcaaggtgccagcaagtatattgtctggtgagggaccctatctctgcgtccaagatggtgtgttgtggcagccttctccagagggaacgaatgctggggtcctcgcat

SEQ ID NO: 214435 - DNA, 122 bp, Homo sapiens
gttggcaaagcagcagctctttgcagcaatgacaggcagggcagagtgtcgactgggaagcgagtcccaatcttgaataatggtgagcttgagtaatccttaatttacaatttaaaggatga

SEQ ID NO: 214436 - DNA, 122 bp, Homo sapiens
tggataaaagaaaacttattaaagaatagtccacattcaggagaatgcacatctcacaaacgtggaactctggattttcacgaactgcagacagttgagtcagcagcacttgcaggagcaaa

SEQ ID NO: 214437 - DNA, 122 bp, Homo sapiens
ctgaagcctataaaaggggtcacaccgatggtattgttcattcatttataagaaagatcacgtctttcttgctttattcaaaggagcggaagctggcttgcttccagctgggatatcctgat

SEQ ID NO: 214438 - DNA, 122 bp, Homo sapiens
caggctgcgcagctggttccgctccaggtgcaggtggcacaggttctctaggcccagcagcgcctgtggctccaggctgcccagctggccgccctgcaggttgaggaagcccaggctggaga

SEQ ID NO: 214439 - DNA, 122 bp, Homo sapiens
gaaggcgggtagtggtgcaaaaagcccatgaaaaaagaatcgaaacaggaagaaggaacccgcagtcagacaggaatgcgaatcctgtgggcaattcaaggaagtagtgaggtttggaggag

SEQ ID NO: 214440 - DNA, 122 bp, Homo sapiens
aaggagtggacttagcagctgagtcaaacggggaggagggagttggtgttctggtactcccgagctcctaagctcctaagctatgcagaattacagttctttggtaacagaaaaaacaaagt

SEQ ID NO: 214441 - DNA, 122 bp, Homo sapiens
actcactgtgcatgctgccaagtcacctgtctgatcgtgtcctacacaggctgacattcacgtttcattctgccacactcgggaacggtgatcggggaagcatggggatccgggagaagcac

SEQ ID NO: 214442 - DNA, 122 bp, Homo sapiens
cgcgtgtacgtactggagggagatggtcagactgggccgggaatccacctcacagccaggcgccggccgcggctggaccggccgagcggcccgggcggaggagtcgagcgggcagagacggt

SEQ ID NO: 214443 - DNA, 122 bp, Homo sapiens
cggccgttggggcctcttccttctcagggagccccagcatggagctttgggccttggtttcgggaaactgggactggccctggctgctaggctgctccctgctgctgctttttggagatgag

SEQ ID NO: 214444 - DNA, 122 bp, Homo sapiens
cgttccccagctcgccttcacacacagcccgtgccaccacaccgacggtaccatgaaggacgaggtagctctactggctgctgtcaccctcctgggagtcctgctgcaaggtgggctggttc

SEQ ID NO: 214445 - DNA, 122 bp, Homo sapiens
tggattgtccttctgagtaagcccagccagactgccttttggaagaagcctccacacacccggaaaactgcccaaacttgtcgatttgctctcgtgcccaaaaagcccaaagctggtcatct

SEQ ID NO: 214446 - DNA, 122 bp, Homo sapiens
ccctgtaaatagagtctgtagcaaaataagagctgcttcctccaacttatcacaagtcgccgttggtcctctctaaggagggctctcttctgagttcattgtacaatagttggaaacgtggt

SEQ ID NO: 214447 - DNA, 122 bp, Homo sapiens
tccaaacacagaaacgacctcactgaatttaagggaattccagcccaaaatcaccgcccccgcaaagtcttccaggctgcaggccacctcaccaagtgtctgtgcctcaatgagctcctgaa

SEQ ID NO: 214448 - DNA, 122 bp, Homo sapiens
ctgagtataggtttcccattttcaaagcctgtgatgattttcctttcagcaaagaatggccgagtggattctgaggaccggaggagccgccactgcccgtacctggacaccattaacaggtc

SEQ ID NO: 214449 - DNA, 122 bp, Homo sapiens
gaaatacactggccagttcttaaagcccttaggaaaccaggcatttcattctcaaagctgcgaagagccccagagaaattttactaaaagaagttacacagttaattttggctagaagctca

SEQ ID NO: 214450 - DNA, 122 bp, Homo sapiens
gaaaacactggttactagaaatatcaaacatttcctgtgattctctcctccaagataactcgggcagcttgagaacaagctgctcttagctaattaaaagatttctgctgatattaaccttt

SEQ ID NO: 214451 - DNA, 122 bp, Homo sapiens
ttccagcctcacattattttcttactcttcccaaactgtggttgtttggaaacgtgcccacgggaagcggtgataggcaggcatctcccggagactggaggaatccagcaccctggcttcta

SEQ ID NO: 214452 - DNA, 122 bp, Homo sapiens
cacatgtacacaaaggcaccacagatgcgccccacacaatgcgctgctttcataacaaggcgcaggggtcgtgaccctgcctccaccctgtgtaaagtcacagctgcaggatctcggggcag

SEQ ID NO: 214453 - DNA, 122 bp, Homo sapiens
cgtcatctgctgacccagatcatgactcctctcttctccctaattttagctctgggctcacggccgctcccgctgctcttagcatcattctcagtgatttctataaccagatagttcttccg

SEQ ID NO: 214454 - DNA, 122 bp, Homo sapiens
tcctgagtggatttgggtgttgccagtgatgtttgcgtcataagatggggtgagggctaacggagatgatgtgggaaaacaagtgctttgtatcctgccgcgcactggccgtggagctcttg

SEQ ID NO: 214455 - DNA, 122 bp, Homo sapiens
ccgccgcggagcgaggttgcctggagagagcgcctgggcgcagaagggttaacgggccaccgggggctcgcagagcaggtagagacctccccgggaccccggccccggccgcccctctcccg

SEQ ID NO: 214456 - DNA, 122 bp, Homo sapiens
atctcatgatccgcccacctcggccttccagagtgctgggattacaggtgtgagccactgcgcccggtcaagacatgttttgttaagtctctgtcacctgaaaaatgtgcatgtccttctgg

SEQ ID NO: 214457 - DNA, 122 bp, Homo sapiens
ggcttcgccactcgggtgctgcacgtgattgagggcgctctcctccgaggcctccacctgcgttttgatctggataagcatattgtccatctcccacagcttgctcctggtccgcaggtacg

SEQ ID NO: 214458 - DNA, 122 bp, Homo sapiens
caatacccatcttacagatgaagcttaaactgattagcaatttgccctccaatgacccgacgactaagtggcagagccccaattctcacccggggaatactgattccagagctacgctcctg

SEQ ID NO: 214459 - DNA, 122 bp, Homo sapiens
agcccatctgaaagaccttctttggcgtgccgctcagagctgctcagagagcgtggagctcggcccccagctcagcccagggctctgtgcactcatggaaaggggcatcgtgcctggaaacg

SEQ ID NO: 214460 - DNA, 122 bp, Homo sapiens
tactcccagtgcgtgaggtcagcccccacgccctgttgagacacacatgcctaagcgctccgcctgcaacacgctcttgcttaggtatgtgcgtggtgttgtgcctactgcaagctgtaacc

SEQ ID NO: 214461 - DNA, 122 bp, Homo sapiens
ttcacggagcagaacttcccagagtccaaagtcatacttccagctgggcagggtagctcacgtctgtaatatcagaactttgggaggctgatgcaggaggatcacttgagaccagcctgggc

SEQ ID NO: 214462 - DNA, 122 bp, Homo sapiens
gataggcggggattggaaccaatgaaagaggtctgctgtgtatgctgcagccaataatagcggccgaaggaagtgacgtttgcggaagtaaggcttccgtcggaaaagctcgataattaccc

SEQ ID NO: 214463 - DNA, 122 bp, Homo sapiens
cggcggccaggacgccggacgtgcggcagttgcaggcgagcaggcgaggaatcgccgtggcgtcttggtgttctccacgctggttcgcaggtgagtgtccctgtttagtccggacgacccta

SEQ ID NO: 214464 - DNA, 122 bp, Homo sapiens
gggagtgcgagctggcgcgaggacagggctaaggacccggaatgagtttccgcgcagttccgctgggccgtgccggcctgtaccgggccgtgccgagccagaactggcaggagtgggggcct

SEQ ID NO: 214465 - DNA, 122 bp, Homo sapiens
aagaagcctccctgtggacagggagcccctgcccgccacgcgcgaccgccagcccgcacccgctgcagggggcagtgagcaggccctgccctgccttaggaaccacagtgcagctgggcata

SEQ ID NO: 214466 - DNA, 122 bp, Homo sapiens
gtcatgggcagcgcccattctcatataacgttctaacaggacggagggctgaaggaagggcggccggcaagcctggcttcatgggttgtctctcagaagaaaataaactcgtgattggtgcg

SEQ ID NO: 214467 - DNA, 122 bp, Homo sapiens
ggggacacaccggctcccagtagggtttccgccaaggctccgcgaaacgccactagagggcgccgctagcgaatcccacagcgcgccccgctgcccccacttttgtcctccgggttcacacg

SEQ ID NO: 214468 - DNA, 122 bp, Homo sapiens
gacgcgtgtccctgaacctacctgcgcttcttgtcccaactctaaaatgggaatgataagcgccattcggcagcgccttgtgggtctataatctacttagcacagagagtgtcttctaagta

SEQ ID NO: 214469 - DNA, 122 bp, Homo sapiens
aggtctcactctgccactctgcctagagtgcggtggtatgatcatggttcagtgcagcctcgaactccagggctcaagcgattctcctgactcagcctcctgagtagctgggactacagggc

SEQ ID NO: 214470 - DNA, 122 bp, Homo sapiens
tcttttgcatttcggaagaggacgtcaacgggaaggaattccccctctgggtgcgggctccgagagggggcgacttgcaggaggctccccccgggggcggaggcgaaggtaattaagcggcg

SEQ ID NO: 214471 - DNA, 122 bp, Homo sapiens
acagaccaggcagcttacactacaggaatttatcgtctcccattctggaggctggaagtccgagatcaaggtacgggcagggctgccttctcctgaatcctcagcccgtggcttgcagatgg

SEQ ID NO: 214472 - DNA, 122 bp, Homo sapiens
tgggatctgtagtgagacatgccttgcgttggctctttcctcctgctgggcgccaaagcgcgtcttttcctcaatctccagtctgtctgtgctctcaaaaactttagtcgttataacaactg

SEQ ID NO: 214473 - DNA, 122 bp, Homo sapiens
gccccttgggacccgggcctggcgctcttccggcggcacaggagagacgtgctgcggtgccgtgtcacctcaggcagggaaaaaccaaggacaagccttgcccagtaggaccaggggaggct

SEQ ID NO: 214474 - DNA, 122 bp, Homo sapiens
tgaacagctcgcactgataggtgccgccccgtcttcccggctggtgcagcctcgccgtcccggggacacctcacactgggattcctagggcttgggctgcccagctgtgggcctgcggtgtc

SEQ ID NO: 214475 - DNA, 122 bp, Homo sapiens
ttccctagtagaatatcagagggagacagaactgagagccacgaaatgaggcctcaagcccggaataacaataattgtgttatgttgtctactccggactcactgcctcccattccaggatc

SEQ ID NO: 214476 - DNA, 122 bp, Homo sapiens
aattcctcaaatccacctctcagcctgtttttcagcgttcctgtgtttggctgccaggggcgaaagtagcggtcgagggaagacacctgtgaaggggcgtggctactcgcccgggttcctcc

SEQ ID NO: 214477 - DNA, 122 bp, Homo sapiens
ctcccctgccgctagcttcggaagagtggcctcactgaagtgcctctcatcattactgaacgaaagtggtccctcccctctgccctcattcgagtaaaagagacattcggaaatcgagtgcg

SEQ ID NO: 214478 - DNA, 122 bp, Homo sapiens
ctgagtgtggaaatacattctgttataggcagaggttggagcaagccgaggttgcaccaccgcactctagccagagcaacagagcaagactctatcaccaaaaaaaaataaataaaaataaa

SEQ ID NO: 214479 - DNA, 122 bp, Homo sapiens
ccggggcaacttatgttctttgcagcgagggaccttagcaaccaaggtgcgagaaacacgcgatcattggcaacttggcaagtggatgtggtaaacgaaccctgaacacactgcgacccaga

SEQ ID NO: 214480 - DNA, 122 bp, Homo sapiens
atggcctttgaagcctactctgaacacatagcacactctagctcgggggactgcagaatccgaggccacttctgacacaacctgaaccactctatctccaagcaccacccttgaggaaccag

SEQ ID NO: 214481 - DNA, 122 bp, Homo sapiens
ccacttggacaggcagcctgtgcctgaattttcctgagggcttcagagcctgtctcgcctcgcctcacatgcctggctcaccttagaacggtcaccttgacggctaaagggacacctgtgtg

SEQ ID NO: 214482 - DNA, 122 bp, Homo sapiens
taatgacactgtagtttcccctggagaagacgggcgcgttgtcattgacatcggacacatcgatgttcacggtcgtcgtgttgactctgggtggactgccattatcagaagcttgaaccgtg

SEQ ID NO: 214483 - DNA, 122 bp, Homo sapiens
gaaggggctgccctggactctggcgaagagcttcacggcgtcctgcccggtcagcgcgttcgtgcccaaggagaagatccctgaccctcacaagctgaagctctggctcaaggtcaacggcg

SEQ ID NO: 214484 - DNA, 122 bp, Homo sapiens
gcgccgcgtctcagaacccggtgcgggagacgctctccccgcccaaagagggaaggcgggcgggactccccaaccggcttgccccggtccccctgggccccatgaataaccaggcgcggacc

SEQ ID NO: 214485 - DNA, 122 bp, Homo sapiens
cggcggccagagaagagtcaagggcacgagcatcgggtaggtaggggctgcttatgtccgcgcggcagcttagcttaaggaccttccttccgaggtctctttaacagatttcctcttggctt

SEQ ID NO: 214486 - DNA, 122 bp, Homo sapiens
ctatgctgccaattccctggggcgtaaggtgtccgcgaggccgtgtcctcgagattgcggcgcccgaagcgcagcgctcgcctctggagctgaggctgagcgccgggacgtggtgggctggt

SEQ ID NO: 214487 - DNA, 122 bp, Homo sapiens
tttgggccagatgccaacagtggccaagtggcccggtaccacttccccagcctcttcttccgtgacttctcactgctgttccacatccggccagccacagagggcccaggggtgctgttcgc

SEQ ID NO: 214488 - DNA, 122 bp, Homo sapiens
aaaaaaaagccaggtgtggtggcgcgtgcctggagtcctagctatttgggacgctgaggccgaggcaggggaatcgcttgaacccgggaggcggaggttgcagtgaggccagattgcaccgc

SEQ ID NO: 214489 - DNA, 122 bp, Homo sapiens
agcagagtgagtctcttttctggctcctcccagtcccctacagggaccccatgctgacagcggagcacagactaggtgcccagctgaggtttgctaagtgaccaaagaggatgcctgttgca

SEQ ID NO: 214490 - DNA, 122 bp, Homo sapiens
acaaaaaacatattctagaagttgacaaaattaaaggtgtgctgtagtggtgatctggcacgttgtaattgagactgaggaggtgaatgacttacatggaggtcgatggagctgaagagggt

SEQ ID NO: 214491 - DNA, 122 bp, Homo sapiens
gctgtgcgattgaagagtttagcttgatagtgcaaggccggtggctgaaaaaaatgctaccgtttgccctattccttgtcaagactttctcagtactgactcttgaaataaattgacttctt

SEQ ID NO: 214492 - DNA, 122 bp, Homo sapiens
aggaggaaaacgcagcttgagatctactcgaagaactgaccctcagctctcacaggctgccgccgagctgcaagcatgccgccgctccactcgggtaaacttcggagtgagttacctgcact

SEQ ID NO: 214493 - DNA, 122 bp, Homo sapiens
aagagaggaaatgaaaggagtaggtcgtagaatacaatttttctcctttgttaagaatcacgatattgggtgtatgagaatgatcccttacaaatgaaattcttcttagaggaatcagttgt

SEQ ID NO: 214494 - DNA, 122 bp, Homo sapiens
cagcaccgcgtggacaagagcccgcgcgggttgttcatgagaaccaggtgtctctcgggtcggcggagggcatttctcttttgctttgctgtcctgggctctgacccgggtcccgcgtttct

SEQ ID NO: 214495 - DNA, 122 bp, Homo sapiens
ggcaccagacaaatttattaccataaagttcttggagtcagaagtctacaagggtcccaccggctagaacccaggcaccagacaaatttattaccataaagtttttggagtcagaagtctac

SEQ ID NO: 214496 - DNA, 122 bp, Homo sapiens
gccccgccccacttcgaagctccgcccaggccaagaagcgcgggggcgggagtgagggggcggtttccatggtgacggcaaacaaggcccacactggacagggcagctgctgggttgctact

SEQ ID NO: 214497 - DNA, 122 bp, Homo sapiens
tgcgtgtgtcatggtcctaagctgcccactgtcctctctcctggtgtgttcaggcctccccgaggtgcttctcacgactttcacacccggtttaatccacaccgctgcgtctgtcctccgtc

SEQ ID NO: 214498 - DNA, 122 bp, Homo sapiens
aatatatttcctaactacaagtcttttagagcagcaatgtccaatacagtagtacctagccgcatgtggttattttaattataattttagttgcttaacattaatataaaaagttcattctt

SEQ ID NO: 214499 - DNA, 122 bp, Homo sapiens
tccccacagcctgcgccagcccaccgctcagcacccgggaaggccgctcgccccgcgccgcgccctcacccgctgtcaagctctagctccagaagggactgggtcctctccgagttgcagtg

SEQ ID NO: 214500 - DNA, 122 bp, Homo sapiens
tccctatatcatgcattccatccatggctttgccccttgactttgggtttaatctatgtgcgttgctttggccaacaaaatgaggcagaagtgatggtgtcaagtccaaacctaagctaagt

SEQ ID NO: 214501 - DNA, 122 bp, Homo sapiens
aaagggtccatgccagcaacacaatcactcaaagtccagatgagggatcagtaaatacaacgtgcctgaaaggtggcccttgagcacattcctccggtagacattaacttattaaattgatt

SEQ ID NO: 214502 - DNA, 122 bp, Homo sapiens
ggtgctcacgcgcaccttagttgtttttcttacacttgagggacgaaaccttgtaccttacgctcagttttacttaaattacgccttcgcctgtaccgctctccaatgccaaggcattggag

SEQ ID NO: 214503 - DNA, 122 bp, Homo sapiens
catcccacctccgccccccaacagggttactaaggttaatgagcccagtgcttagggcagcgcctggctcagcacttgctgggcacctgtctacatctgccttctcaccaacaccaggagta

SEQ ID NO: 214504 - DNA, 122 bp, Homo sapiens
gaagtattcaatccatgctagctatgtttttttttttttaatctgcacaaaagagttaggcgtagtattttcaaaatgtcaagcaaaattaagaatgtgaaaaaaattataatatcccaaca

SEQ ID NO: 214505 - DNA, 122 bp, Homo sapiens
agccaaggagaacaggccttctctctctgcctttctctgtcgttgtgtctcatgcacacacgctggttgattcggcaggtgtttattgggcaccttctatttaccaggctcggttctaggtc

SEQ ID NO: 214506 - DNA, 122 bp, Homo sapiens
attaagctgtctctggcgaaccagggagcagctgggtaggccgcggggggcgcctgtcatcgacgtcatttccttcagcaagagcgccgcaggaaaccacttccacaccactgctcccctct

SEQ ID NO: 214507 - DNA, 122 bp, Homo sapiens
cgattctcacctgttgtatgtcctgtatctcagatgtggatgaatgtgtgggcctgcagccggtgtgcccccaggggaccacatgcatcaacaccggtggaagcttccagtgtgtcagccct

SEQ ID NO: 214508 - DNA, 122 bp, Homo sapiens
caagttgaggtagcttgtgacatcagtatttcgtatttaatccagaaagcactgcttcaacgcccagtgcgtgcaaggttccactctcgggccagcggtcctctcccaaagcccgttcttcc

SEQ ID NO: 214509 - DNA, 122 bp, Homo sapiens
gactagatcactgcatccgcctatacaatctttaccgataaagactcgaggcaccattctcgctcctgtgagctgttgcaagtaatcttgaatcttgttagtgtggttggaggctgtgatat

SEQ ID NO: 214510 - DNA, 122 bp, Homo sapiens
gtctgttaggggaattgactttcctctttctctcagcagacttgcctggggctgcttctgcggcttcgtgttcattacctgcctttgtttttatctgctctgatgaagcggtgatgttctcc

SEQ ID NO: 214511 - DNA, 122 bp, Homo sapiens
aagagacagaacctgtaattttaaaaactgtgtattttaatttacatctgcttaagtttgcgataatattggggaccctctcatgtaaccacgaacacctatcgattttgctaaaaatcaga

SEQ ID NO: 214512 - DNA, 122 bp, Homo sapiens
ctttcccggcagccgaagacgaccccggagcccctttattctctacgcgctcatcccacgcgcagaacagacacaggccctgccctcaccgagggttccagtcggctgtgcacaactgaaga

SEQ ID NO: 214513 - DNA, 122 bp, Homo sapiens
agagagtgggtgtcccatctacagggagcagccatgctcaacttgagcctgagatgagtgcggctcattgtggccaagatattttgatttatgggtgggtgcggtggctcacatgcctgtaa

SEQ ID NO: 214514 - DNA, 122 bp, Homo sapiens
cggggcccggcctcgcagcctccgccgccggggctaagtgcacgccgcgccatccgagagcggcagagcagagcaccaaagcggcaaccgcggctccgtaaccaagcccagctgcctctccc

SEQ ID NO: 214515 - DNA, 122 bp, Homo sapiens
cccaccttgtaaaacaaagccggggaaaatgcctgcccgtgcagctcggagcgcgcagcccgtctctgaataagaagtgagtacaatggcgtgtttgtaaaaaaaagcttcaagtccgtctt

SEQ ID NO: 214516 - DNA, 122 bp, Homo sapiens
ggcacccgagacagaactatagcagatgcaagagccaaaaacccacagccgcttgactcacggatatactatgatgtcaagctgcagtcaccggtggtcacaatgggcagcctaagtcatca

SEQ ID NO: 214517 - DNA, 122 bp, Homo sapiens
tttaggactcccaccgcggtccctcacgtggggactgtcagtgcgggtcttggagcatggcggtaatcagagtaactcggcctgtggtccggagccgccagagggcgagatggggagctgat

SEQ ID NO: 214518 - DNA, 122 bp, Homo sapiens
gccttctgcaacccagactttcttagaacgcgatgggagtcaagagcgctttctttaaggcgaagctgtagacaggttcccctcacctcccacctctgcccacattatctgcctctagcaaa

SEQ ID NO: 214519 - DNA, 122 bp, Homo sapiens
tcctgagcggccctgcggccccgcccccagagttggacgcccgctgtcgggcacccgctgcgggccccgggccttgcagtgcactctccaggcaccacaccgaccctaacgagcggttcctg

SEQ ID NO: 214520 - DNA, 122 bp, Homo sapiens
aacatgaagcaaagggaagtgacagccccaggagccaggtgaaattggaggcgaaactggcgggtgaaaacatgggactccctgtccagtgtggtctactatgccacgtgactcctcactag

SEQ ID NO: 214521 - DNA, 122 bp, Homo sapiens
agccaccctctccctttatattcctggcatctcttcaagctacctcaagctcacgaaaatcgcagaggatcagatgccatctgacagtttgcaaattatttgttggaaggtgtttctcaacc

SEQ ID NO: 214522 - DNA, 122 bp, Homo sapiens
cccgatagcgacgattcacagtgtggtaggccagctgctgcaggccgctgctgttttcaccgtcaagggctgtctcgtactgttcaacgaacaaattgattgactcaatcagccgggtttca

SEQ ID NO: 214523 - DNA, 122 bp, Homo sapiens
cggaccagtcgaatagcaggtacggaagaatcgcgaggcgcggaaggatcgcggggctggcggccgctgccattgtagaccaggagcgcccgggacacaaggcgcagtcgatgtggagacca

SEQ ID NO: 214524 - DNA, 122 bp, Homo sapiens
gcgtctctcgagctgctggcttctctccgccgacgacccgcaccttcccgcgccccggcccgaagtctatacattttttaaatgtgcatattctttgacacgggaattctacttctaggaat

SEQ ID NO: 214525 - DNA, 122 bp, Homo sapiens
tgaaatgggggacagtattggtcataacgcacagggctgtttcccaaggtgcgggcctggcgcgcgggtgggttagaagcggaattctcctgctggattctggcgcaaactgcgggctggag

SEQ ID NO: 214526 - DNA, 122 bp, Homo sapiens
atgaatggggatccagcttttagacgtggacgtctgcgctggatgaggcaagagcaaattcggtttaagaacttgcaacagcaggagataacaaagcagcttcgtcggcagaatgtacctca

SEQ ID NO: 214527 - DNA, 122 bp, Homo sapiens
ggcctcaggcctgggatcagggcccactcgagctgggactgcactagccaggaaggctgccgccttcctcctgcgggagctccaggcacagtctgtaccacccggatacagccgccccaaag

SEQ ID NO: 214528 - DNA, 122 bp, Homo sapiens
caggggaatgaataagaggtgccttgcatgctgtgcaaatgcatttagacttgatctgcacgtgataagaagccattatggccagcctactaatatctgtctcatgggagctgcatcaccat

SEQ ID NO: 214529 - DNA, 122 bp, Homo sapiens
tatagaggtgtgtgaggcatggaagtcagacacacagatatttacagataaagacagaaacggtaacaggtgtgcatggagagctctctgagatgaggagggaccattcgtgggtggggaat

SEQ ID NO: 214530 - DNA, 122 bp, Homo sapiens
gactgagacggtcagcacctacgtggtgcgtacctgccgcccgcgcggttagcatggagacgttttcagatcgagacaagtgtgtgctctgaatcactatcgaatttcagacgcatttctct

SEQ ID NO: 214531 - DNA, 122 bp, Homo sapiens
cagttccaagaaatctgccaccagctccaagcctcatgtcctgaagtgccacctcattcccgcggggtgagccagcagcctctgaaaagaggaagccattgaacagatcacactgtgcctcc

SEQ ID NO: 214532 - DNA, 122 bp, Homo sapiens
tgagccaaccagggctggcgggagggcgcttccttctggagctgggtcctgactagggaccgcctgggtgaggtgaggacctggtggccgcagttgtggcactgtgcgcaggcgctgaactg

SEQ ID NO: 214533 - DNA, 122 bp, Homo sapiens
agggcccttcatgactgggctcaaggaacacaaaaaggtcaacttgtttttgcagctgtccgttgtttttcaataactaacgtacaggagcagatttctccgaaactttgctggatgaatgc

SEQ ID NO: 214534 - DNA, 122 bp, Homo sapiens
caatgttgacattggactgtccagaggtttttgccaagagctgctccccgagcgggttgacggtggaggggtgaacggccacgagggacaccacgccttttccaggactaaggttctggtct

SEQ ID NO: 214535 - DNA, 122 bp, Homo sapiens
cttctcgccaggccttagctgcctccccgcggggcagggatctggacctgcagccctccacgcctgagcctccccccaccgccccgctatgggctcctgtgcggccggagcctccaggacga

SEQ ID NO: 214536 - DNA, 122 bp, Homo sapiens
ccatgaacatggagtggctgaaccacagggcggggttgaggggcttggggatgaggaggacgggcagcagccactggaggcaatacatgatctctgccgggcagggccttcaccaaggctgc

SEQ ID NO: 214537 - DNA, 122 bp, Homo sapiens
cgccccacgtgcctccaatcccggactcggactctggcttctggtgggtttttctggttgcgcagatagagttgtttatccttgagcagcggtaattctcaaactgcggtatgcgtgggggt

SEQ ID NO: 214538 - DNA, 122 bp, Homo sapiens
ggtgactttaattcagctagtttggcatttggaaacagcttttataactcactaattcctcgttctgtgatatccaccctgctatttcctgctctcttgagaattttatttcaacagtgtgt

SEQ ID NO: 214539 - DNA, 122 bp, Homo sapiens
tccagatcctttaatgatttttcctctcgaatccaaaccagccagggcgtgaactgagggcggtgagggggtacgggcatctccctgcatgcaacgcggtttttgtataaactacaaatccc

SEQ ID NO: 214540 - DNA, 122 bp, Homo sapiens
ctgtggcagtgtgcagctgcagctgggggagcagggcgggtcttctgggtctcagggaagcgagatctgaagtgaggggggtgaactggatgggacagggcgttaacccaggagaggggcca

SEQ ID NO: 214541 - DNA, 122 bp, Homo sapiens
gtctgctccccccgggccccaagcccgccacctccggggacccctgcgtccgagtccccgcgagctccccaagcacaggctcggggctggctgaacctctgggaaccccgacgtccgtgtcc

SEQ ID NO: 214542 - DNA, 122 bp, Homo sapiens
accggggctgcacacggtgcttgcgggccagtgcgagttccaggtgggcggctgtgggctcggcaggccccacactcagagcggccggctggccccgccagctggccccaccggccccgggc

SEQ ID NO: 214543 - DNA, 122 bp, Homo sapiens
taaaaatcgccaaaaattacttggagcaaagggcagtaggcggagcttcgccaaggctggcgcagtcggttttgacctgtagcagagaaccaattctggagaacagcctcacttctttgatt

SEQ ID NO: 214544 - DNA, 122 bp, Homo sapiens
cgcgcgcagaccactgggaagcctcctcgtgcattctgggaaatgtagtccaaagcctgtcgcgctcagacagcccgcgacatttgcgccgtcaaggccaaataggctgcagacgacgcttt

SEQ ID NO: 214545 - DNA, 122 bp, Homo sapiens
ccccgacctcgtgatccgcctgcctctgccttccaaagtgctgggattacagtcatgagccgcacctggccacacccggcctcagagcatattcttaaattatcctggtcttttctattcag

SEQ ID NO: 214546 - DNA, 122 bp, Homo sapiens
gaagggctcagattccgggggggtggcaacgcttctgctgggacaaagcctctagtccaccggggatgctgagcaaaagggtgaaaattaaaaagtggaagagctaacgtaattcaaggcaa

SEQ ID NO: 214547 - DNA, 122 bp, Homo sapiens
agggctggtgctgtagacaggctgtgaagttgaaccctcagtcctgcacgtccagctagccgacctagaggattttcctcacctgtttactaataatgccctgtgtttggtgaggggttggc

SEQ ID NO: 214548 - DNA, 122 bp, Homo sapiens
ataatgagttttcagtcagaccacatatatgactgtggtcccataagactccaatcgagccgaaacattcctatcatctggtgacatcacagccatgattacgtcacagcacaacgcgtcgc

SEQ ID NO: 214549 - DNA, 122 bp, Homo sapiens
tatgctgttttgcaaagaagtacgatgccaagtgagagggaagcagtcatcttcctgactcgtccatcctgaatgagaagggactttgagcagacaaggaaacggcgtgaacacggacgtat

SEQ ID NO: 214550 - DNA, 122 bp, Homo sapiens
caatggacgcagtgacgcaatgaagcatccagcaaagcttttgttgttgattgtttaggacgtcaccctgtttttgttgaagttgtctcacaactacttctctttctgctttctctctttca

SEQ ID NO: 214551 - DNA, 122 bp, Homo sapiens
aggggctgaggagggaagtcccagagcccctacggccaatgacgtcattggggtcacctgcgccctgccaagggtccaggggcccgcgttgggggtaggggtggggcggctggacagcaata

SEQ ID NO: 214552 - DNA, 122 bp, Homo sapiens
atcatcaacagtggtccccgggaggactccacactcactgggcgagccaggatcgtgagacgacaggctgtggccgtgtccccattaagccgtgtgaatcaggccatctggccgcagtgcac

SEQ ID NO: 214553 - DNA, 122 bp, Homo sapiens
tccagcttgactcaaaaggactctaaagagctggagagcggctgcggaaaggcggagtcacggtacaatcggtgttaactacttgtgcaaccaccgcctccttagtcctattagaggcgcag

SEQ ID NO: 214554 - DNA, 122 bp, Homo sapiens
tgtattattttttaaatcaaaattttaaatatttcttttgcctctgttgtttctgagagccgaagacatagcaagttgaagaagccttggctttttgacattctgggacacctttcaagaac

SEQ ID NO: 214555 - DNA, 122 bp, Homo sapiens
ttcccttgctccatgctgtgtgcaggtggctctggcaccaagaggtggcaccaaacctgccgccagccttggctttctcaccagtcgggctctgatgagttgatagactgtgtttggaattg

SEQ ID NO: 214556 - DNA, 122 bp, Homo sapiens
cagtactccaggctcaggcggaggccagccctttccagttctgggagctgctgctcaccacgaggcctggcattggctgggtacacggttcggcctccccgacaggtgtcgctctgctgctg

SEQ ID NO: 214557 - DNA, 122 bp, Homo sapiens
gagcaatgggaaagggcacccccaaacaggcacgatgggtggggcacccccaaacaggagcgatggaaagggcgcccccaaacaggagcgatggaaagggcacccccaaacaggagcggggg

SEQ ID NO: 214558 - DNA, 122 bp, Homo sapiens
ctggcatcctctccgggggtggcaaggggcagtggcttctctcagcactgggggctggcccggaagctgggcctccagtgtcctcactgtttctatggaaaggtgagttttggatcactgcc

SEQ ID NO: 214559 - DNA, 122 bp, Homo sapiens
ggtggtacccaggcgtctgccttgatcacccagtgccctgagccggcactcacacagcaccgtcagagacccccaaccatcctcagttcccgatgccaagggccccctggaccccagaacaa

SEQ ID NO: 214560 - DNA, 122 bp, Homo sapiens
cagcaggggagcctcaccttctctagcagggccttcacctcccactcctggcgctgcttccggcttctgtatggattactctccaggccatcgaagttgggctcaccggcccctgaagggag

SEQ ID NO: 214561 - DNA, 122 bp, Homo sapiens
atgaactttccgcgctagggacgagggtgcccccactacagtccctctcagtggtcccggcgccccgcttaccttgcctgcccacgatctcggccacgtgctcggaggtgggcacgggaaca

SEQ ID NO: 214562 - DNA, 122 bp, Homo sapiens
tacgcccacgcgacccctcccgtttccctgctttggccaatggaggagctacgaatggcacgacctgctcgagcttggcagtctccagttgggctgtgcatggaagcttgggaagactttgt

SEQ ID NO: 214563 - DNA, 122 bp, Homo sapiens
ggttcctcaggttctggaactgcaggaagtcggtccttttgcccccgaagcgcagaaaggcgggcgaaagtccccgggccagggtcaccaagcgcttggagctgcagaggaagagaataaga

SEQ ID NO: 214564 - DNA, 122 bp, Homo sapiens
tgggcgtgagccgtacgcgggggaggtggtgacgtttgtaatccagacgtcgtttcgttgcgactgggtcacctgtgatgccctaagccctgagaacttttcaggtgtgtgtcattatcctc

SEQ ID NO: 214565 - DNA, 122 bp, Homo sapiens
acgggcagagagtccgttgctgctggcctcttcctctgagtctttgtgcacaagatgggccgggcagtcacagtccctggagctgtccacgaagccacctgactcctggggtcagatggggg

SEQ ID NO: 214566 - DNA, 122 bp, Homo sapiens
ttttaagcagggaagggcagggtctgaattaacaggcccctgtggctgcgaagtggggaacggactgtgggtgagtgggccagacggacggccaatcgcacctttcgcttggatggaaggca

SEQ ID NO: 214567 - DNA, 122 bp, Homo sapiens
agaggggggaaagctcttcggttcaggggcccggcgatcccggcagtggcgacgccaagccggccctgcacgcccttttcgaccgtggagatactgcccctgtcagtgtctgctccgggcta

SEQ ID NO: 214568 - DNA, 122 bp, Homo sapiens
cttcctttggcttattagcatcatgatattaatggatttcttcatgttgagtcatccttgcgttcctggaaacaaactctacttggtcatggtgtgttattactttaatttaatacactgct

SEQ ID NO: 214569 - DNA, 122 bp, Homo sapiens
gtgtggaacgcaggcgcgctgcactacagtgacgaggtggagatcatccaaggcctcacgcgcatgcctggcggccgcgacgcactcaaaagcagcgtggacgcggtcaagtactttgggaa

SEQ ID NO: 214570 - DNA, 122 bp, Homo sapiens
ctaaacgcagggtgcgggagctgggcaggagaggtgacctccaactgtgttcctaaagttcgtctttcgcttggctcaggacaaagcggtgtaacgagtcaaggtctctgcctccactgtgc

SEQ ID NO: 214571 - DNA, 122 bp, Homo sapiens
agcacaccacataatcttgcaggggatatttgcattttaaaactgccagtaatagaagaacgtgatagcacacgtaggcataggttttgatcaaagatgggagatataggggactctgaaaa

SEQ ID NO: 214572 - DNA, 122 bp, Homo sapiens
ttcgcggtaggcgaagcccgttcagtctcttcgattacctcaaagctgggcagttgttagcgagaatgaccaatttcgctttgccttgtctgatcatcttcagagtctgcttgtaccccagg

SEQ ID NO: 214573 - DNA, 122 bp, Homo sapiens
aggcggcgggggcgcgcggggcgcggcggaggggagggcggtgcgcccagtctccgcgaccgaggggccaggtggccccaagtccttcctgaacctctctgggtcgcactctccccagcccc

SEQ ID NO: 214574 - DNA, 122 bp, Homo sapiens
agttcgaaccctctcagaccacccctccctgagtgaagctcctgatgcacaccacctaggcgagggtggaacaggtttcccgtttcatttttcagtaagttaattgactgccaggtctgggt

SEQ ID NO: 214575 - DNA, 122 bp, Homo sapiens
ctccccgcagctgccgcgaccctggcagctagactccacagagtcgggagtcagctgacccggaccctttaaagcgcagatgtcacccttaagcccgccccggtctggaggccccgccgcgc

SEQ ID NO: 214576 - DNA, 122 bp, Homo sapiens
gtctacaccgaaggctgccatctgccatctgcttagtacttgtcctctcagagtcatcctcgagcgggtccaggaccccctttctgcccacctgccctgtggcctcgggtccccctgcttct

SEQ ID NO: 214577 - DNA, 122 bp, Homo sapiens
ccacaccggacacttccccagcgtggggcggagctcgtggtgctggcctggagggacacacggtgctgacctggctgccgcctctggactgcgaagcctggacctgctgggacaggagcctt

SEQ ID NO: 214578 - DNA, 122 bp, Homo sapiens
actgtccccaccacagggtggggtgcgcccacctgccctgtccatgtggccttgggcctgcgggggagagggaatcaggacccacagggcgagccccctccgtagcccgcggcaccgactgg

SEQ ID NO: 214579 - DNA, 122 bp, Homo sapiens
ccactgggcctaggatagaaaggctcattccagatcattcaccagcaaacaatgtcaacacgataccagtagggctgagtcagtatgggctcagggcctgggcaggaggaagggagggaaag

SEQ ID NO: 214580 - DNA, 122 bp, Homo sapiens
ccatccccagataagcggggagttccctggcgcggtgccagtttctagccgctgagtgggcgtgtgcgcggctccaagtgcgcctgcgtactgctcactccccagctccgcgccctgctccg

SEQ ID NO: 214581 - DNA, 122 bp, Homo sapiens
catcactggacttgccagacaacaagtggcgcagataaactcagagtacgagatctggcccgtcaaaggtgctctcagaatcatcatctgcatttggcggtacctgtcccccctcaaaaccc

SEQ ID NO: 214582 - DNA, 122 bp, Homo sapiens
cctcgcctgcccacctcacagcgcggccccgggcaccatccctggccccggccccggccccggctagggctgcgggtcaaggcccacaccctgctgcctcccctgagttgacttgtctggga

SEQ ID NO: 214583 - DNA, 122 bp, Homo sapiens
acagaaacagacgctaacccaccaggcatcctttacaatttctcagtgctataaagcagccgtgccacatacctattcatatagtagcgtagcaacagaaatgaccgaggaggaggtcaggg

SEQ ID NO: 214584 - DNA, 122 bp, Homo sapiens
tccataaaaaaatggaaaatggaaaacctttttcttttttttttccaattagcacccgttcgcctgcacactttcacctaagggtttgacacccactagtgcacactgcctgatttaattat

SEQ ID NO: 214585 - DNA, 122 bp, Homo sapiens
taaaacaaacaaaacaaaagggaggggggtactgtcctaaagtcaaaaggactttagggacgtaaggaccaaatgcaatgtgtggatcatgaagtatcctaatttaaacaggccaactgtaa

SEQ ID NO: 214586 - DNA, 122 bp, Homo sapiens
aacaggggctgcaggaccctggtgaggccacacaggcatttgctgttggccaatgccggccgggtgggcacccaccactcacctcatacagctccggcttgttcccaggggctgcaagagaa

SEQ ID NO: 214587 - DNA, 122 bp, Homo sapiens
gcccgtgggggccagggtgagtctgcgcccctgggtctggggtgggcatccgccacgggtcgcagttggagattttgaagtggcactttaaatttgcccagagagctctggaagaggcaaaa

SEQ ID NO: 214588 - DNA, 122 bp, Homo sapiens
ctcactatttagtcctcagatgcgcccagcatcctgtacctgaagtctccgggcaggtcccgtgcatgaggccgaacatgtttccgcaggccttgctcaccgcagccatcttggccagcacc

SEQ ID NO: 214589 - DNA, 122 bp, Homo sapiens
cgctcgaaactcgcccgtacctctgcttcatctgcacttagttttgttttactcaattcccggaaaaaaaaatcagtaaatccgtgcacgggggaagggcaggggaggggaagaaaccggct

SEQ ID NO: 214590 - DNA, 122 bp, Homo sapiens
cacagccgtcccctccagccggccccttgaagtgtccctaattcgttagtagcaatgagacgtctggctctgagcaaccattgttattttggtcaggcttctgagtgggaggcctcgtatcc

SEQ ID NO: 214591 - DNA, 122 bp, Homo sapiens
cagcccctaggcactgtggtttagggctagtgccctcggcacccgctgccaggagccgggcgctgccaagggctgcggaggggccacgttctcccggggactggggcatctcctgcgtgctg

SEQ ID NO: 214592 - DNA, 122 bp, Homo sapiens
tcaacctgccttccagccgaacctcttaggccagagctgggaccaggccgggttgggcgtcgcgcttgtcaatcatctagaaccgggtgtgattgagcgagttgggatcccactgccgacag

SEQ ID NO: 214593 - DNA, 122 bp, Homo sapiens
ttcctctgaactatcattcatcctttgagtccttccccagtgaggccctacctctaccctcggactaggccaacccccacgcctcattttgtatgtgcttctatggctctcctgtcctcctc

SEQ ID NO: 214594 - DNA, 122 bp, Homo sapiens
tctgcccagtgtataacaagtccctttttttcagggaaggcgctggtgcttcagagtcaacggacagactttccatatgtttctgctgctatgccatgttttgttattattattattctctg

SEQ ID NO: 214595 - DNA, 122 bp, Homo sapiens
agacgcaaatgctaccgacggcgaagtccaaagctgcctgatgcagcctggagatgccagcgcctgcggaggtggaaggacacaagcccatggcgccctctgcagttcaggccgcccccgga

SEQ ID NO: 214596 - DNA, 122 bp, Homo sapiens
acgcgtccgcgcttcggaagctcatcatggctggagcaggtgcgcggggccgggccgggacggggcgggacacactgcctctctatcttttaagtggagaatttaatccgtttacatccaaa

SEQ ID NO: 214597 - DNA, 122 bp, Homo sapiens
tctggagtctgtcccctctgatgttcacatgtgttcagagtttcttccttctggtgggttcgtggtctcagtggctcaggagtgaagctgcagaccttcgcggtgagaccttcgcggtgagt

SEQ ID NO: 214598 - DNA, 122 bp, Homo sapiens
gttcagggccgcggcctcgtgctgctgccgcatgaggaggcaagtctgcgggacacacagcggggagaggagggaggaggagtgaagggagagccccagactctgccgacctcagctgccag

SEQ ID NO: 214599 - DNA, 122 bp, Homo sapiens
ttttgttttgttttgtttattgtggtaaaatacaaaatctaccgtcttacagtgaggtggcgttcagtaccttcaccacgccgtgcagccatcccatctgattccagaacattctcatcacc

SEQ ID NO: 214600 - DNA, 122 bp, Homo sapiens
gtggcctccccgaatgccaggcacacaggccttactaccagaagcttgagctgggagcctcggccgtcgcatctctaaggtgcagcgatacggccaacttccttccgcgaagccctcagggt

SEQ ID NO: 214601 - DNA, 122 bp, Homo sapiens
gccgatgacgtggcggtggtccccaggtggtggcactgggctggtgcttcggggagcaggcgtacctgcggagcagttggaacgtgctggacgggctgttggtgctcatctccgtcatcgac

SEQ ID NO: 214602 - DNA, 122 bp, Homo sapiens
tgggagccattgttcaagaacacatttcaacaattagacctgagcctgcggcccctgccccgtcctcaccctgccaagaggcggaggcctgggtcccgaccatcacagtgtttaaaggtcgg

SEQ ID NO: 214603 - DNA, 122 bp, Homo sapiens
ttgctctgttttttcttttcatttctctttctctttcttcctgacacagtttcactctgtcgcccaggctagagtgcagtggtgcgatctcactgcagcctccactttccagtttccagtga

SEQ ID NO: 214604 - DNA, 122 bp, Homo sapiens
agcttctggtgtctcccctcgctcaattaaaagccagctcctctcctttcggcttccccacggtgcctttcgggatttgtagtcagacgcgcttcagccggctctaaggagagcaaaggcaa

SEQ ID NO: 214605 - DNA, 122 bp, Homo sapiens
cggcccgcctgtgtggacggtaagcacccgtggccccaggacccctccgggtgctgagcgcggcgtcaccaaaggtgcctcttccctgacgcggccccttacctgaaggtccccctaggcct

SEQ ID NO: 214606 - DNA, 122 bp, Homo sapiens
agacagagggagatttgagagacagaagaggaggaggtgatctgattacagaggcggagacgggtaatgcccatgcgcccgagttcccccggcagccactggaagctggagaggtgaggagt

SEQ ID NO: 214607 - DNA, 122 bp, Homo sapiens
accttccttcctggaagacacgttcccatcttgagggaggatcccaagttggcacctccccgctttaggcttaggcgcattgtgcccgccttccggcccgcctggtccccgctttaggctta

SEQ ID NO: 214608 - DNA, 122 bp, Homo sapiens
gacacttcttgcttgtttgaagctcttccctgccgcctccttctgttgtacgtgacatcccgactgggaacacgcgaaacaacagctgatgctgtcagtgggacggccgcctctccgccgtg

SEQ ID NO: 214609 - DNA, 122 bp, Homo sapiens
acaaacttctcctgtctttatgacggaaggtagttttgcaacacggagcaagttgctcaccgaagttacgctcctactctctcacagaaactgggagatagggaaggatgctactccgttga

SEQ ID NO: 214610 - DNA, 122 bp, Homo sapiens
ggagcatcggaccaacgcccgtgggaacaaagacagggtctccgtggggtgcgctgtcaccgaaactggcggggctgctttctcaagtttgctgccgctcagttcctggcgagcgaagaggg

SEQ ID NO: 214611 - DNA, 122 bp, Homo sapiens
gggaacccggcccggccgtaccccgccggcctgccgacccgggtccgggggcccagttggcgcccggaccagctctccggtctgcgtcctgtagatgggaaaactgaggcctgagagggcgc

SEQ ID NO: 214612 - DNA, 122 bp, Homo sapiens
ttgcatcagcaaaggcaggggaggttagacctagactgccaaagagctggaaggaagagacgaatgggcacgggaatgacgccatcaatgtggatagcaaggcacagtcgggggactaatac

SEQ ID NO: 214613 - DNA, 122 bp, Homo sapiens
aaccttacagagtctcacctcttaccaatccccagcttcagctgactcccaagagtgagccggagagcaccatgacgctggccgccccaggaccatttactgctccagcctctgagtgtacc

SEQ ID NO: 214614 - DNA, 122 bp, Homo sapiens
tcgtccctctgaagaaatcttagaattatgttttctgccttagttggggtcctggttgttcgtgctgtattccccggaagcttaacgctttttattcagagaacctaagcgtctggagagca

SEQ ID NO: 214615 - DNA, 122 bp, Homo sapiens
ccccgcccccagggccaagcctcccatcaccgcgccgccccagaacacgctccgcgtcaccgccccgccccagaacccgccccacgtcaccgccccgctccagaatccaccactgcgtcccc

SEQ ID NO: 214616 - DNA, 122 bp, Homo sapiens
gcgctccgctgggactcgtagcgctcccccggtgcagggaggaccccgccgcagccgccgcgccctgccctcgtctgctctccggagtccgctcaggccgcccggctagccggctgtttgct

SEQ ID NO: 214617 - DNA, 122 bp, Homo sapiens
ccctttgggcctctcgggctgggagcccctcatctagttgccagggacgataagggaagtcgatggtcaggagagaaggggccaagtgtccagcttctgacttccctctctctggtccacag

SEQ ID NO: 214618 - DNA, 122 bp, Homo sapiens
aggttttctccagggaaaagaaatcggcccagcaagatgcacagagcaccgttacgaccacgcacaccgaaggtcgcacacgacccttttcctgtataacagtgccagcctgccgacgatca

SEQ ID NO: 214619 - DNA, 122 bp, Homo sapiens
ggaaatgattggattatggggccggttcccccactctgttctcatgatagtgaattctcacgagatctgttggttttataagggggctcttccccctctgcttccttcacagggtctctcca

SEQ ID NO: 214620 - DNA, 122 bp, Homo sapiens
aaaactttcatattttaacaattagggttatctactctgcaattcttataacgttaggaacgtcagctctcaagagtgcagggctgtgtctgcctggtttctggctctgtctccagcaacta

SEQ ID NO: 214621 - DNA, 122 bp, Homo sapiens
gtaagtaattagacacaatgtaaagccagtgactgagggacttaaacaaactgtcccctccgagagcccagttggagcttccgacactgaccttattctcctctcaattttaaccctcctca

SEQ ID NO: 214622 - DNA, 122 bp, Homo sapiens
cttcttcatcctggtctccatcaccactttctgcctggagacccatgaggcctttaatatcgaccgcaacgtgacagagatcctccgcgtagggaacatcaccagcgtgcacttccggcggg

SEQ ID NO: 214623 - DNA, 122 bp, Homo sapiens
ttgccttttccaatactacctatgacctgcccctcccctattctaagcctataaaaagctcgtgacccagccacgaggggaggaaaaaaccatccgactaagggggtgggcgaccacccccc

SEQ ID NO: 214624 - DNA, 122 bp, Homo sapiens
gcaagcggagtacggaaagcacgcagggctgccgctacctggcgcacgcgcactgagctgcggctgccgagcccgcgccccggtccctgccgctttacctcacccgctcttggatcactggg

SEQ ID NO: 214625 - DNA, 122 bp, Homo sapiens
ctgggctggggctcgcagcccaagccagagaggcccaaccaagcccagtgtttccttggccgcccaagccagtgtttccggttctcagggctggggcagctgcgctggctctgttcatggtc

SEQ ID NO: 214626 - DNA, 122 bp, Homo sapiens
gccctccgtgggagtccactggccacggtcagggcgagagcaaggccgaggcgatctggccgcctcacctcctcctgggcctgatcatctagaagggtctctggaggcttcttggaacaaca

SEQ ID NO: 214627 - DNA, 122 bp, Homo sapiens
agcgcctttctcaggagctggggcttaggtcacatttcaccatggttctgcctgggtgcccgctagccagccccgacctttgggctcggaggggacagactgaaccagtctctggccccccc

SEQ ID NO: 214628 - DNA, 122 bp, Homo sapiens
gttccttccttttggtgcttttggagaatttggttgtctttttttatttgcagtttcagccggctgctgtttcctagcccattgtgccacgtaaggcttctccactgcgcggagtaggtagt

SEQ ID NO: 214629 - DNA, 122 bp, Homo sapiens
gcaatgagaacagcacctcggacaaccaggtgggtgtcaggaagcttctctctcgagctacgtggtgctcttggcagaccttgactaggttctttttacagcgtctcatcttcacccaggaa

SEQ ID NO: 214630 - DNA, 122 bp, Homo sapiens
aggcagagaggtaggatctcagtgcccagaaatgcctttggtccttagtcctgtgagctgcgggagggaggaggagtggaggggtggctgatgagaagggttatgtggtcaggagtcaggta

SEQ ID NO: 214631 - DNA, 122 bp, Homo sapiens
cacctgtgctctcagaactgcttgctccggactgagaggattctaaatgctcacagatggcgctctctctctctcttcctctctctgtctctctctgtctctctctcacacacacacacaca

SEQ ID NO: 214632 - DNA, 122 bp, Homo sapiens
gggagctaaggccacactggactccaccatgggtgccagatcccggggtgacaagattcccgtccccttcgaatccctcgagaaaagtccagtccacttaacaccccagccccgcagaaacg

SEQ ID NO: 214633 - DNA, 122 bp, Homo sapiens
agacttcagaaaagaactacatgaactgacctctataccttctttatgctctttcacaatcgtttaatttttatcttgagaaatagttgagaaggtgaaaatgaatatgagaaaatactctt

SEQ ID NO: 214634 - DNA, 122 bp, Homo sapiens
ttcccgggacaggagagataagctcgtctgacctcagttgacctcgccgcaggcgccaggcgtcctcatttactgcgaggcattggggagtctacttttctctctgctccctgggatttttt

SEQ ID NO: 214635 - DNA, 122 bp, Homo sapiens
ggctgctgtggacgacgtccaagacatgttccctgataatcgcaaatgcagggtagcacacggtgtagtctacagtgtgcaggaaaaagtcagaaaaacgaaaacacagtatctacaggaca

SEQ ID NO: 214636 - DNA, 122 bp, Homo sapiens
gtgggagggtctgagcagtgggggcggggagctgggggtcggctttcgtccgcgtcccagcgctccggcggccgccggggctactgatcccgggcttggcccctgcggcagcgccccgagct

SEQ ID NO: 214637 - DNA, 122 bp, Homo sapiens
agacagccctcggagctctctggtttagaccgggggaaggagaaaggagctctggcagagcgagtcccttgtaaagcacacaatgggagcaaagggtgccgtcacagcagtcaccgccccaa

SEQ ID NO: 214638 - DNA, 122 bp, Homo sapiens
tacacactgggacgattttggcttttcaagctaactcagaaaatggagatacaggccgggcgcggtggcttacgcctgtaatcccagcactttgggaggccgaggcgggcggatcatgaggt

SEQ ID NO: 214639 - DNA, 122 bp, Homo sapiens
actcggccaggtagcgccactgacccgtctgcgggttgtagcagtcgacagtgaccagctcgtcacagtcctggtcgcagccgcccacgagcacgaggatctcggcgagaccggtggacggg

SEQ ID NO: 214640 - DNA, 122 bp, Homo sapiens
ggtgggaagtgctgggaatgggggacccggacactggtctaaccagccccgccactcccgcgggcaagtcagcccttgatcctttaaagcagggacaatcgacgtggtccgagagaggaaaa

SEQ ID NO: 214641 - DNA, 122 bp, Homo sapiens
tccacacgtgctagtgacacgtgcgcctccgtttcctcttctagcacataggcatcaccacgtttccctcacagcttcgcacgtgagatcacaatcgacaatgcagtgaagcgcccgcaatg

SEQ ID NO: 214642 - DNA, 122 bp, Homo sapiens
cacctcctaagcacacacctgctgcaggtgccgggagtcagtgcctgagacacctgaggacgcctcctccttgaaggctggagtcgactgactgcatcttgtactgattttgcggggatttc

SEQ ID NO: 214643 - DNA, 122 bp, Homo sapiens
ggacccctgggtgcacagcaacctgtgtccagaatctctgctggaagtcgaggtctccagcggccactggagccacagccagctctacccaaccaccccaggatccagcctggtgcaggaac

SEQ ID NO: 214644 - DNA, 122 bp, Homo sapiens
aggccgtggcctccagcctcacctgtgctcgcctgtgcctggcccaggtggtaccacgggcgcctgtctggcaaggaggctgagaagctgctgctgcagaaggggcatccgggcagcttcct

SEQ ID NO: 214645 - DNA, 122 bp, Homo sapiens
ttttcctcgaatcacctgggaggaactatctttaaataagtgtcgtcctgtaatgcactacggccgtctgtgggttaccacattaaggatagttgtcagtggcctccatgcctttcggtaag

SEQ ID NO: 214646 - DNA, 122 bp, Homo sapiens
ggggtaattggctgacatagcctccactgggccaatgacaggacataataacagccgaagcgtttactccacggggaacaaagttgtgagggcattgttaagcgctggagatggcaccgatc

SEQ ID NO: 214647 - DNA, 122 bp, Homo sapiens
tgcgatccctgtcccttccctttgtctccccgcgcagcgctctccgccgcggaaacttcgcgtgacacaaactcctggggtgacagcggaaaggggagcgtgtaccttgtgaattaagagat

SEQ ID NO: 214648 - DNA, 122 bp, Homo sapiens
cccccggccaggatggtgaggctgggtgaggagcgtgcgtgctccagccacttcttgatacgggcaaaggactggggtgggcagggaggagggaggtctaagaggctgggaaggcatccctg

SEQ ID NO: 214649 - DNA, 122 bp, Homo sapiens
ggtggaggaagaaacatccctttgataaaacaggtgagggggccgtgcccgttcgagagtcggcagagggtgaataagaaatgcgacggagggagagtcacgtttacccaaccccaggcgct

SEQ ID NO: 214650 - DNA, 122 bp, Homo sapiens
acgctgcagcgcgcgggtaccaggggccacagggcgcctcccggatcgcctgtagatctccggggctggcctcccacaagaaagggagacaaatgggaccaacactataatatcgccctccc

SEQ ID NO: 214651 - DNA, 122 bp, Homo sapiens
ccaacctcgttctgagcagagacctcacttcctctatagcagccccttagccctctggtgcgggactgccctaagcccgagcaggctgggctgtggggccgcacgtggggcgcctctgagga

SEQ ID NO: 214652 - DNA, 122 bp, Homo sapiens
atttatcttcatgtaaaaccttctcatcatccttttctactttttaaaaaaatgcattcacgtctgtccattatcattactgttaatattttcagcaatctgctcctcctctttgcaaaagg

SEQ ID NO: 214653 - DNA, 122 bp, Homo sapiens
tggccccaccctgtatgccgcagggccctgggtgagccccacgctgctccccggaaatcccgccaccctgccccaggtataatacctcgaattgctggcatttccgccgcaggatgctgacc

SEQ ID NO: 214654 - DNA, 122 bp, Homo sapiens
gaaactttggcaagcaaatgccaactttcttcaacattttctcagttctgaagaagtgagcgagaggtggcagtaatggtctttctctctctctctctgtctccccctccctccctctctct

SEQ ID NO: 214655 - DNA, 122 bp, Homo sapiens
ctcattatgtgcagaaaacaaatcaggtcttgtcactccctccacctgcaaatctgtcttcgtctatcacaaatggtagttcctcttgctttctaatgttccatagaagagaggggcgactc

SEQ ID NO: 214656 - DNA, 122 bp, Homo sapiens
tttcaagaggtctgagtgactgattccctagtggctgtcctggagcggtgacaggctgcccggtgccgtgtcctggagcggtgacaggctgcccggtgccgtgtcctggagcggtgacaggc

SEQ ID NO: 214657 - DNA, 122 bp, Homo sapiens
cgaccacacttcacatgcaggaaaattcatgtttacttactgatatggactaaattttgtcgcctgctcccgtgctcagaaattcatatcttgaagccctaacccacaatatgactgtattt

SEQ ID NO: 214658 - DNA, 122 bp, Homo sapiens
tccctgaagccaatgtagagataaagtgttgttttcactccttctagtcctgtgattctgcgtctaaggaggcaaaccacctattgaatcagtgctcaccacaggctccattgcagcattga

SEQ ID NO: 214659 - DNA, 122 bp, Homo sapiens
gtgattagtatgcccatatactgccatagtcagccactctcagtcagggatcctgaagtacgttaggggagcctttaaaaagttgttgcccttgggactgtgactctgacttgttaaccagg

SEQ ID NO: 214660 - DNA, 122 bp, Homo sapiens
catggtggagcgcgagtgcggcaccatcatcgagggcgtgaacacgccctacctgtacttcggcatgtggaagaccaccttcgcctggcacaccgaggacatggacctgtacagcatcaact

SEQ ID NO: 214661 - DNA, 122 bp, Homo sapiens
agcaaaggaaacatggaacaggcaggaagaggaagaaatatcaactacatagggtcttaacgaccagttatgaagacaagatgaagacaaggactataacagctttgtgccttttttcatgt

SEQ ID NO: 214662 - DNA, 122 bp, Homo sapiens
cgcccacacttggctccccaagagttaaacgctgagtaattttcctgaggagcaaacagtcggagcgggggctctgccaatggccacagtatttttatccgacttaaccgacaccgcggcgc

SEQ ID NO: 214663 - DNA, 122 bp, Homo sapiens
ggggtttgctgtatacatacagcacaaaaatgaagagtgaaatcccagttcaagtgcagccgagaacaggagagtgaatctccacacacgtactttataggtccgtgggttccttcaagaaa

SEQ ID NO: 214664 - DNA, 122 bp, Homo sapiens
ctcggtttgatggccactgtcctaggtttcgtgggaataaagcgcgcagagcccatgactcgggggcaggagaaagggagtcccgaaagcgcgaggcggaaccgcgggagcaggccggcctc

SEQ ID NO: 214665 - DNA, 122 bp, Homo sapiens
ttacaattctcacgtgcccacctcttctgtctagaagaagagggggcatgaggtggaaaacgggacatgtgggattgttgggcctagagggattgaatggtttcaatttctggttcatgaaa

SEQ ID NO: 214666 - DNA, 122 bp, Homo sapiens
tttctgtcaccatggaaaccggcaaaaaacgtgactctgctcagatttacgcagtttgctcgctgaaggcctagtccccacgtacctgctgggcctctgccgtgggacgaggtccctgcgga

SEQ ID NO: 214667 - DNA, 122 bp, Homo sapiens
ctgcgccgcgtccagctgcagcgtctcgccgatctgggccaccagccggtccacctcgcccgagctgcccagcgtcaccgactgctgcagcaggaggaagctgtcgtcctcctcttcctccc

SEQ ID NO: 214668 - DNA, 122 bp, Homo sapiens
ttctcctctgtaatggggtgttcactagtgtgacagttgtttttgtgactattgcttttacgtacatttttgaccagcacttggaacactacctcagggtaacttaaatgaaagtccatttt

SEQ ID NO: 214669 - DNA, 122 bp, Homo sapiens
actgtcctgggctctccggccggatcttgtcccacacacgcgacaaccgagctccggggacgatatcagagtgatcacaaagtggcgcccgaccaccggtgggactgcgccggacctggacc

SEQ ID NO: 214670 - DNA, 122 bp, Homo sapiens
tgttttgttttgagatagagttcgctctgttgcccaggctggaatgcagtggtgcgttcacggctcaatgcagcaacgacctccagggctcaggcgatcccccgacctcagcctccggagaa

SEQ ID NO: 214671 - DNA, 122 bp, Homo sapiens
ttaagtcaaccgtccacttaaaagtgcccctgaagatcaggatccagcaggaagttactgcgacctcatttcttccctgcgtggggacacagttggtgctgttactttagatcatcactttt

SEQ ID NO: 214672 - DNA, 122 bp, Homo sapiens
cggagaacctggagatcttgttggtggggccaaccagggtcacagtttctgtggtgttcccgtaccaagggtagctcaccccatctgagtcactgatggcttttactctcccttccctcaag

SEQ ID NO: 214673 - DNA, 122 bp, Homo sapiens
tttaaaaataaagtttttaggcaaatgcgataagaaaccgtcatttccagtcacagtaggcgatctttcgtaatttcataaaagcagttcgtttgcagtatggcttttgtgtagttaggggt

SEQ ID NO: 214674 - DNA, 122 bp, Homo sapiens
agcctgaaaccgaagcctcttgaaaggggggagacggggagaacctgatagctggaaactcgttttctccaaaggctttcgggacattttagcccggctccgggtccgcggagcgccagggc

SEQ ID NO: 214675 - DNA, 122 bp, Homo sapiens
tgcgcctccccagcctccctctccaaatcactgtgtgaacatcagggagtcaggtgcaggcgaacctagaaggagggtcaggtgcaggtgaacctagtagcccacacacgggcagtagggtc

SEQ ID NO: 214676 - DNA, 122 bp, Homo sapiens
agctctctgttgtctgaaaaatggcagttaatagaatttgttaataaacagaagaaataacgagaaatagtggcacatcatttgacagtaaggtggtttataatttctgtttatcaaatgat

SEQ ID NO: 214677 - DNA, 122 bp, Homo sapiens
atggagagcaggtgattaagggccaccttatctgattacagtcaagtgcctcacccagcacgcggtcaggctcctgactgggctggcctgtgtacaacacacatttctgtgacaagtgctga

SEQ ID NO: 214678 - DNA, 122 bp, Homo sapiens
actggagacgcggcctgggcccctgccatgcagtggctcggggcagctagatggacccagcggcccgggccttcggggcacggggtcccccacccgggaaactccagtggccggaggcttgg

SEQ ID NO: 214679 - DNA, 122 bp, Homo sapiens
ggcccagcactgccggccccagaactgtctgttcaggctgtgcagtaagcaccagagcctcgcctgtccacgaagggtgtaagcctgtgctccacaatgtgctcagctccagagaggcccaa

SEQ ID NO: 214680 - DNA, 122 bp, Homo sapiens
aagtggtaaagacctaattccacacagcccaggtgactacatggagaatgtgctcaaaggcgaagtttatgctctgagctggacagtgtagactattaggggaaaacagtgaatgggaagaa

SEQ ID NO: 214681 - DNA, 122 bp, Homo sapiens
ctggcggcgcgggcaggcaggcggggaggacaggctgggggcggcgaccgcgaggggccgcgcgcggagggcgcctggtgcagcatgggcggcccgcgggcttgggcgctgctctgcctcgg

SEQ ID NO: 214682 - DNA, 122 bp, Homo sapiens
catccctcttccgcacaaaacaggcctattctaacttttaaggcaatcgcgtcgtgtcaacgggccaagaataataaatagctttaaaggccaaaaatgttactctgaccctaatatctgca

SEQ ID NO: 214683 - DNA, 122 bp, Homo sapiens
tgcacccaacactgcagcttgtcctaccgcttgctaattttgtttcagacactaattaggcgtcgctctcagagaccagggtcactcaggcatttgatcaatgtgttacttgtgtcccatcc

SEQ ID NO: 214684 - DNA, 122 bp, Homo sapiens
gggccaacccctatggcttcattttacccaacgatctctttaagaccccactgccaaatgcggtcccattgggaggtcctgggggtgagggctgcagtgtatgaaagtgggggagacgcagt

SEQ ID NO: 214685 - DNA, 122 bp, Homo sapiens
gtgtgtgcgcgcgcgcgtatatgtctgtgtgtgtgcgtgcgtgtataatttctaaatggacgtcaccttacacatcacaaggttaaaaaatgacccctgggctgtgccaggccaagcacgaa

SEQ ID NO: 214686 - DNA, 122 bp, Homo sapiens
tgattcaatccttttccccattgatctatttctctggaccgagtagggatgtgcatttcacggagctacgttctcagaagggaacaactgagttgctctgggaaacctccctgtggacctca

SEQ ID NO: 214687 - DNA, 122 bp, Homo sapiens
gggctgtctgcggaccctgccgcgtgcaggggtcgcggccggctggagctgggagtgaggcggcggaggagccaggtgaggaggagccaggtgagcaggaccctgtgctgggcgcggagtca

SEQ ID NO: 214688 - DNA, 122 bp, Homo sapiens
gggggtacccagaaaggaggttcaagttccttctcctcccccgactgaagctggggggctcgtccaggaaacattgcggatgatagtggcctcaccttttaaaaccaaggcagctgggtttc

SEQ ID NO: 214689 - DNA, 122 bp, Homo sapiens
caggctgtttgttccgagtggagaacgggagggaggccccggcggggggaaagaagccctcggttctgggtcgcattgcccgagggggctctacgcaaagtgaaatactcacagttcccgaa

SEQ ID NO: 214690 - DNA, 122 bp, Homo sapiens
cagtcgtagccatcaaacagacactcttcagagtcacactgtgggtggcactgcccgtcccggaagagaagccagcaccgagagtgggaggggcagcccttccaggggtctgggactcccag

SEQ ID NO: 214691 - DNA, 122 bp, Homo sapiens
gaagtccactcagctggttggggagcttagggttttctttttggtttacaagcggaactgcgaattagaataatgcatttaagggatttttaagttctagctttgacatgtaaagagcttaa

SEQ ID NO: 214692 - DNA, 122 bp, Homo sapiens
tcgcccccacccgctgctctccttttttttcctgtctcctaccctggtcgatcccaccttcgggggccctggctcgatccctgagagtcgcccccttcagcaccctcttcagtgtcccggtt

SEQ ID NO: 214693 - DNA, 122 bp, Homo sapiens
aagggagccaacgagcgcgtgagcgtttgagaccagctggctgagggacgccgaaaatcccgcgcggaggaaggcgggagagcgctaccgctgctaccaaggcggcggcgcgggcgctcggc

SEQ ID NO: 214694 - DNA, 122 bp, Homo sapiens
ctgtcactaccatctacagcttggtggctgaaggaagtagggcagccactctctattagccgcaggcctactcaacacaagtccctgagggcctatgacatgccaggcacatgccaggagag

SEQ ID NO: 214695 - DNA, 122 bp, Homo sapiens
gcaagcaagctcctcgctccctgcccccatccgtccccctctcctccgggcgggccaccacgctgggacctcggcccacagcccggctcctcacgcggctcctgttttattaacctgactgt

SEQ ID NO: 214696 - DNA, 122 bp, Homo sapiens
ggcattccctggggaaatggattcccttcagaggcggaggcagaggcgcatcccctcactcggaaggccggggccgtgtcctggctcctgacgccctcctgcttcgtcttctctgccatact

SEQ ID NO: 214697 - DNA, 122 bp, Homo sapiens
tgctgtccacggaagataggtgctgaaaatgccttggtcctcagtgagttcagttccgtgcgccagggggcggggttggcgccagctgcggttagccccgccctggatgcaggagagggata

SEQ ID NO: 214698 - DNA, 122 bp, Homo sapiens
tgtgagaagacacagccaggcttggtatatgatgtggtgtgtgtgtatattcacaggcatcgtggagcatatacactttttttgtgtgtgttgaaatcttacagattacaaagtactttttt

SEQ ID NO: 214699 - DNA, 122 bp, Homo sapiens
gctttggtgaaagacatgattgagtgttgtctcttttagttggtggccagtagggccactcggtattgggagaaagtgaggcacctacaggctaaacctgtggccaaacagtttcagcagaa

SEQ ID NO: 214700 - DNA, 122 bp, Homo sapiens
tggggaatggctagtccttgagcttattggctgatagcacagtgggcggggtacatagcacgaccccccggagccccgcccatattaatttgcataacggccccggcgcgtgcaagggagaa

SEQ ID NO: 214701 - DNA, 122 bp, Homo sapiens
tgacgatcacaaatgcagttctaatgtagcacttaatggcatcaatatttacacctaccgcgttttcacaaaattacactatccacctggtacctaagtcttgtcatggacttacaggtttg

SEQ ID NO: 214702 - DNA, 122 bp, Homo sapiens
cgtgggattgcacagagggctgggtccgcaggctggctaaaaggacctagcccaggattgcgaggcagcgccctccctgcagctggacagactcgggcgcccggcccaaagcccggcagggg

SEQ ID NO: 214703 - DNA, 122 bp, Homo sapiens
acgggctgggagcggagaaggaccccggccgctcagccccgggcgccgcctccgcagccgcggccctgaagcagctgggggactcaccggccgaggacaagtccagcttcaagccctactcc

SEQ ID NO: 214704 - DNA, 122 bp, Homo sapiens
agtttcattgacacacagccatgctcatttagcttttgtttgtttttggagacagagtctcgctctgtcgcccaggctggagtgcagtggcgagatctcggctcactgcaacctctgcctcc

SEQ ID NO: 214705 - DNA, 122 bp, Homo sapiens
cgggggtgccccaagtcccagggcggtgaggatcgaggcaggtgcgtgaaaggcaggccccgttccccctccccacccccgccggctgtgtgtggcgggtaagaggagagtgggtagcacta

SEQ ID NO: 214706 - DNA, 122 bp, Homo sapiens
ctggggggaaaggcggggcgagcagacccaggctccctgcctgtgccccacgcgggaccgcggccctgcatctgccccccacccacgcgaggctgcagccccagggcctgggcaagaggttc

SEQ ID NO: 214707 - DNA, 122 bp, Homo sapiens
cagcgtagctgaacagtaaatgaagctgacgggtcagcaggtgttacagatcaggagactcgacgccgtgcccaagcccttccccgctgcatccttcactcatgattctaggaaggccaagt

SEQ ID NO: 214708 - DNA, 122 bp, Homo sapiens
ttgagtgagcagccatgagttggactgtacctgttgtgtgggccagccagagagtgagctcggcaggagcgaattttctgtgcctggggatggccctgtgtccccgtcaggcagcgtgcatg

SEQ ID NO: 214709 - DNA, 122 bp, Homo sapiens
gtttcacaagacaaggcacccagattttttcttcccacgtctagcttgcagagcagctctcgtagccatttcaaaaacctctctcactccatctttggtctttgctgaacactccatgtacc

SEQ ID NO: 214710 - DNA, 122 bp, Homo sapiens
acaaatgtggtaaaagaataccacacctgagtaccaaaaaactaataagctctagtgctacgctactatccttgagcaattcactttgcctttctggttctcaatggcaattccaacaaaat

SEQ ID NO: 214711 - DNA, 122 bp, Homo sapiens
ggtagcacagcgcttaacggtatctgcctgctccactccacggggccagaggcaccagcacgatgccgccccgactcggctctgcggtggcccctgtgggcctgcccttcctttagctccag

SEQ ID NO: 214712 - DNA, 122 bp, Homo sapiens
taagcatggaggtgccgtaaagcgaggtacgcctgcacatgagtgccgtaaagcaaggtacgcccgcatcacaggagtgccgtaaagcgaggtatgcctgcaccgcaggaggctatttactt

SEQ ID NO: 214713 - DNA, 122 bp, Homo sapiens
ttttttcctttctagagtctgaaaacagacataatgttggggacggtcaaacaaggctgccggctcccaaggggctagagtccactcctgataatagaaggcggctgaacactgacacttca

SEQ ID NO: 214714 - DNA, 122 bp, Homo sapiens
acacacaatcgaaagctgtagggagtgcctaagatggctaattgtgaggagcggcccacccgggagggtgcctactgagggatgctctcgggaggctgcctcagatggaggccttggggagg

SEQ ID NO: 214715 - DNA, 122 bp, Homo sapiens
ttgtgggaccagagggagaggcagtggcttaagctccacggtcagcgtcctgtcaccactcggaatccacctccactcttccctccaggtagatccagggagaagggagggcatgtcagttt

SEQ ID NO: 214716 - DNA, 122 bp, Homo sapiens
agggctcaggctccgcccccgggcctccatagccccgcccaccgcccacccatccagcaccgcccttgttgtcatggtgatctccggctctccagggtgtccaggagtctctctgctgccag

SEQ ID NO: 214717 - DNA, 122 bp, Homo sapiens
gccttctgcctttgctaaagcgaacggaagcgaatgaggaataaagctctctgctctccccgccccatcgcccacctgcacgaggtttagcttccaattcacctcgcgtctctctctgcccc

SEQ ID NO: 214718 - DNA, 122 bp, Homo sapiens
cacctagtcgcaggcccggcggcgccaccaacagcgaccgcggtagtccagctcgcgccgcgtcccggccccagcccggcccggcccagccccgccccgcgcccagccccgccccgccccgc

SEQ ID NO: 214719 - DNA, 122 bp, Homo sapiens
tcataaaatggccatatagagtggcatgtggccatgtcagtgattgtaaggttaatattccgtaatgaccgcaaaggaaccactgtgcagccatttatcttaaacacaggaaggaaaattgt

SEQ ID NO: 214720 - DNA, 122 bp, Homo sapiens
ggaggacccgtgattgacaggttcgcagtgatgcgccctggccaatcattaccgagcccccgttcggcctggctggaaaaaaaaaagttcggggagccctttcgttcaccccacgcccctct

SEQ ID NO: 214721 - DNA, 122 bp, Homo sapiens
gcgggacactgtggtggatgcaattcccctcgcctccagccgcgaggagctccccggcgccgcaggcagcgtcctcctccgaagcagctgcacctgcaactgggcagcctggaccctcgtgc

SEQ ID NO: 214722 - DNA, 122 bp, Homo sapiens
tggcctcagccacttgcatctaaagagcaaagctagtttacccgcggcccatgttcttttcgatggttagccttatttcttagctctgttaaccactattctaacgttagcttcaagttcag

SEQ ID NO: 214723 - DNA, 122 bp, Homo sapiens
ttcattcatacattctaatacagccaaccaagtttcgaaggaacaatgaatcagaaaatacgctatgatcatataacagtataattcttattatgattctcagtatttttaaaatcagcttt

SEQ ID NO: 214724 - DNA, 122 bp, Homo sapiens
tgttataaagggcaagggaaacacagctcctgggaaaacctgaaagtgcgtgagcgggcacgcaggtattttcagagctcctcttcccttagaaaaacaatccttcccattgacatttgaaa

SEQ ID NO: 214725 - DNA, 122 bp, Homo sapiens
tgcgtggacacacctaacccagacgccaacctgcacgagtgtctcccggtagccgggagccgggaccccaagttcacctgtaggatttcccagaaggggtgttggggcctgacctttcacag

SEQ ID NO: 214726 - DNA, 122 bp, Homo sapiens
ggtgcccagctggccaggtcccctgagtaggtgtcactatcccttcctgccccggatccccgaagtgcggcccagccctcatcaggcccctttctgtcggaggagctactgccccactgcac

SEQ ID NO: 214727 - DNA, 122 bp, Homo sapiens
ccagcatttctggctgttatggtgggagggtggtctgctacattgtcaggagcaggtctccgttgcacagcaccctgacctcactcttcctggcacacagtatgcactgtttctcaagaagc

SEQ ID NO: 214728 - DNA, 122 bp, Homo sapiens
gccctggcccagctgctggccaggtctttaagaagcagaagtgcagagcagcggctggcccgcaggcaccgggtgctaggcaggctgaggagactgggcagtgccaggtaccctccagagag

SEQ ID NO: 214729 - DNA, 122 bp, Homo sapiens
cgacgcggctgctcgcgcgtgcgcctgcgcagagggagccgcacaccctcccctgtcccccgcccaaccgtctccatggcaacggtgcagccttgagctggggtctgcgtcgctgtggcctg

SEQ ID NO: 214730 - DNA, 122 bp, Homo sapiens
ttaatttgtgaagtgcaaaaatactaatttttctcgcgttgtcgttttttctgggcttgccgaggcccctccccctcctgcctcgcttcccatccccctttcctctgcgcccttcccctccc

SEQ ID NO: 214731 - DNA, 122 bp, Homo sapiens
gctgggctgccggcgggccccaggcgtactagacaccgtccggtacagccgggaggcatacgtattatagcccagctcgtggatccgctccacaaactcgcactcggcgctgtagtgctcct

SEQ ID NO: 214732 - DNA, 122 bp, Homo sapiens
ggctgctgtatgggcacagtcgaggacagccacttaactctggaggacccccacccctcccgctactacagcccacacggtgcggccggaaccaacagctaaaatggcggcggcgacgaggg

SEQ ID NO: 214733 - DNA, 122 bp, Homo sapiens
ggaccaggcatagtggaaatgatcccggagagaacatcttgaatgaagccaggaagtcagcgggccagaggttgtacaggggctctgcggttggcgtggctgaggttgaggccacaagttac

SEQ ID NO: 214734 - DNA, 122 bp, Homo sapiens
tacccaggccttcctgactgccccctgaacaaacagtaaccactacacacttcactggtacgatcttaactcacagacctgcagccctcactgagggaaaggccttcccccaggctcctgca

SEQ ID NO: 214735 - DNA, 122 bp, Homo sapiens
gaaacaagaaaaggaaaatcagcttaggtaattttgtaaatatctgctgagaatgtattgcggagagtggcttatattgggagatgtagacctggtatgtagtcctctatctgcaagttaat

SEQ ID NO: 214736 - DNA, 122 bp, Homo sapiens
gtgcagtggtcgcccgagctcctgtaggcccttaggccgggtcgcttccccgagctaggccgcagctgccctggtgggcgtcactggcctcttgggcagtgagactgcaacacaagcgtccg

SEQ ID NO: 214737 - DNA, 122 bp, Homo sapiens
cacataattcttgggtttccgttcctacttgctagtgatttctgaacatgttcaatggagcggcacacagtctagacccacttccgcattgaaaccttcactgttcctctttggtttcttca

SEQ ID NO: 214738 - DNA, 122 bp, Homo sapiens
atgtagtaaaattaagcaaggactcttaagagggaagtagatcccaataagtattagttgcggaaaataatgttttcaccactacaaggggttgttgttgttgtcgttgtttttagacagcg

SEQ ID NO: 214739 - DNA, 122 bp, Homo sapiens
ttccgccatctccgcgctccccttcggcggcgaccgaggggacctgcgtccctcgtccgccgggctctggagccctgcgcctcacctgctgatcgctctccggagtctcgagggggcacccc

SEQ ID NO: 214740 - DNA, 122 bp, Homo sapiens
cgacatgttgccaccctgctgaactgtctcctgccacagcttggtcagaaagggcgtcaccgctgtggtgttagacaggatcatcctgggcattaaggttccactgctgcagctcaaacttc

SEQ ID NO: 214741 - DNA, 122 bp, Homo sapiens
cttcggagttcggactgacccgggatgttgctggagccggcaggaactgcaaactcaccgcgcgcgtccctgcacacccgcacctgcgcctcgagaactcctggccagttgaatacccggtc

SEQ ID NO: 214742 - DNA, 122 bp, Homo sapiens
attccttcactcaaaaacggcagtgactcgttattgcacaagtaaaagccttacagtggtcgctggggccccttgggatctgcctgccatcagctcactcagtcgcttgctcattccagcca

SEQ ID NO: 214743 - DNA, 122 bp, Homo sapiens
gcatccctgttgcctcttcctcttccgtctccgtagaagcagaaaggcacacagcttccacgacacagattcactgactgcagccgcgttaaagacacgttcacactgaagcacctgacagt

SEQ ID NO: 214744 - DNA, 122 bp, Homo sapiens
ctaattttttttttttcttaacttctttaaaactgatcttgaatgcatacatcctccaaacgcagctcccctaatcctatggaataattcaactcgtgaatgcatctggagccctagatgac

SEQ ID NO: 214745 - DNA, 122 bp, Homo sapiens
atattttgcacctgatttggtaggagaaaatgcccaggctgagaggagccacaagacatccgtgaagtaggagaaaatgcaagatagttaataacgtacccaactgctatgaaacaaatgtt

SEQ ID NO: 214746 - DNA, 122 bp, Homo sapiens
tctccctcgctctcactctctttccatatctctcactctctgggtctctggcatctgtcccgtctccagcacaaacaacatctgggcaatcgatcatcctggacacaggaggtgcagggggg

SEQ ID NO: 214747 - DNA, 122 bp, Homo sapiens
cccctcgcccctaccctgccttctactcctctacctcctttaccctcctcccccagccatcgctggtccttaccctctgcctgggctcggtggttgtggacaccatgacagagttgcagatg

SEQ ID NO: 214748 - DNA, 122 bp, Homo sapiens
gccacgggtggaatcattccaggccatagcgaaccggtggtgctcatcctaaaacacaggcgcttgaaatgcgtatttaaaagcaacacacgcgcagtgcagaaaacaaaaacagatacaag

SEQ ID NO: 214749 - DNA, 122 bp, Homo sapiens
gtttctttgtggagctttcatcaaggaggaagggggaagtttggcttttcttactgcttccggagagttctttacagggttgggttaaatgaggtcaaaggagcactctgtaggatcccaag

SEQ ID NO: 214750 - DNA, 122 bp, Homo sapiens
catctttctgttagaatgggagcatgagttttctgatcattttcccttcacagattcctccgccagaaatcttactcgcggcgccttcatttccgggtccgccattttgttgcctctgtttc

SEQ ID NO: 214751 - DNA, 122 bp, Homo sapiens
taggtttatactcttagaacaggaaggaggggacagtgacactccctagggagtgcagaacgggggccagagcaggggccaggcaggtgcacatgtcatctccaatcctcacaaaaccctgc

SEQ ID NO: 214752 - DNA, 122 bp, Homo sapiens
ccggcacttctgtggaccccttcttagttcacaggcacggctggggccgctctgtgctggcgcctgctggccactgagggacagggacacgtgccacctgctcatctctgccctgaggtcac

SEQ ID NO: 214753 - DNA, 122 bp, Homo sapiens
tgctgcggtcagaggtcatgggctgggttggagccaggcaggggtgtgcaggagggcggacggggacacacctggggcccgagagtcagccagcccccggcagaaagccttccttcggtgcc

SEQ ID NO: 214754 - DNA, 122 bp, Homo sapiens
agggtaagtttgggtgctggatcgctccatcgttccccttttcccagcgcagagaacaagcgcttcaggccccaggatgggacctagaggcagatggccaaagagaggggccctaagagtct

SEQ ID NO: 214755 - DNA, 122 bp, Homo sapiens
tgagcttgggggaggggcacagagcactctccatctcccatggctactcagggcagcctccgtgtccccaggagcccaagaaaaggacagtttcaaaagaaaaagcttccaggcctatggac

SEQ ID NO: 214756 - DNA, 122 bp, Homo sapiens
taagctgcctaggcagccagctacaggcttgagctttaaattcatggttttaaagctaaacgtaatttccacttgggactagatcacaactgaagataacaagagatttaagttttaagggc

SEQ ID NO: 214757 - DNA, 122 bp, Homo sapiens
gcattgtcgagaattaaaactgagcaaatatctgtgttagttccggtcgtcaagaaaggccgttcagaactgacatttaagctgaagtgtgatgacaagaagaaatgagccatgagaggaag

SEQ ID NO: 214758 - DNA, 122 bp, Homo sapiens
agtattaatgttactccagtctacagactagacatcccaaagccttgtagtggaagcggacgtttcaccaaatgcagaagtcctggatccctagggtatttcctttcatcttacctcacgcc

SEQ ID NO: 214759 - DNA, 122 bp, Homo sapiens
aggtagagaggtccagcaggcagctggaaaacaaaccggagccctgtgtgactccagtcccgggccccaggcccacacattcccctccattaccaattttaaaattctgtctttaagttgtc

SEQ ID NO: 214760 - DNA, 122 bp, Homo sapiens
ccagcaccgaccacagccagcgcctcctgtctggggctgcaatcactgccccggctccagcgggcgctgccatcatccagccactgcagtcgccgctgccgcgcccctgagcccgggtccct

SEQ ID NO: 214761 - DNA, 122 bp, Homo sapiens
tctgggcagttgggactttcttttcaggaaaggaggtgagaggtgccggggaagcccacacgagcagccactcttggagaaatggggaatggcgctgtaaaagcgcaggccctcctcctcct

SEQ ID NO: 214762 - DNA, 122 bp, Homo sapiens
tacaaaaaacccagggtgctggagcaagaagatcccatgctgtgaccctctagagggaagcgctttctgttgtctgaaagaaaagaaagtgcatccttttagaggtttactgtttgaggaaa

SEQ ID NO: 214763 - DNA, 122 bp, Homo sapiens
ctctagagaggattcccacatggtgtctactgtttccattctaatggtatttgacatttacgactgcccctttgaagagtctgccattcaggtcaatagctcccaccacactgcattccgtg

SEQ ID NO: 214764 - DNA, 122 bp, Homo sapiens
gctgtcccgggcagtgtgtgcccatgactgcgcctgtgtttgtacttgtgagtgtatggccggggggccgggggggtggtgcactgaagggtgggaataaacagcagggatactggggactg

SEQ ID NO: 214765 - DNA, 122 bp, Homo sapiens
acggccgagctctggaagcgcaggtcggtcttaaagtcctgagcgatctcgcgcatcagccgctggaagggcaacttgcggattagcagctcagtggacttctggtagcggcggatctcgcg

SEQ ID NO: 214766 - DNA, 122 bp, Homo sapiens
tgaaacttcagcgtgccgcgcggtggtgcgaaggtgagggcagcgcgcagaggaagtaaacggggactacaggggaccagagacgtgagatagtccttaaaatacatatctaatctgtcctc

SEQ ID NO: 214767 - DNA, 122 bp, Homo sapiens
tctccagctacagagggcccaggttcttttgctgtccatttaatgcccagtgcctggaaccgtgcctggcacacattaggattcaaggaggggagcttgggagcacagggaaggcggtctct

SEQ ID NO: 214768 - DNA, 122 bp, Homo sapiens
gggccgcggagagcagaagggctgtcgcggatccaccacgcgggcgccgggccgcggagccgggagcgcgcccaggcctgcacccgcagcaaagccaaggccaccgccccaaagcccatctg

SEQ ID NO: 214769 - DNA, 122 bp, Homo sapiens
tcttttgtttaagatctcttagaagaagcagacattcagatgaatgtttcaggtgataaacgaggcaggattttaaaagacagagagattgtggtttgctcagttctctgtcaaagtttcct

SEQ ID NO: 214770 - DNA, 122 bp, Homo sapiens
caggtttacccaggcaaggagaaccggatcgacaaccttttcattgcctgacccccaaaccgtatcctctgcctctaagtcttttgggtgaaaaggcctgggggcctaagaaaagtttccag

SEQ ID NO: 214771 - DNA, 122 bp, Homo sapiens
gcgcagcctgcatgatgccatccccagcctggcgcctccagcccatccatgagcagaggccgcgtctccagagggaagcagtgactgttccattagcttctttgcctgccgaagccctccca

SEQ ID NO: 214772 - DNA, 122 bp, Homo sapiens
cttatcttcctacttggagcgccctggctgcggccaaggccaacagcgggcgccggaaggcgggatttccgccacacgcacgcactcccgcactcccacgggagactgcttggctcggagcg

SEQ ID NO: 214773 - DNA, 122 bp, Homo sapiens
ccaatcccaagcagtgtcagattccccttcctagccagcccctgtgtcttctacctcaggcgacctccctccagcccccatcatgggcagtcgtccctgagtctcccatcctggccagtccc

SEQ ID NO: 214774 - DNA, 122 bp, Homo sapiens
aggcttccagagggatctgattaaagggaagattgggaaaagctgatgagaaggtgacagcgattctttgaggagaaacaatatcttcagcttcagagtcctaactagtccttcccttcttt

SEQ ID NO: 214775 - DNA, 122 bp, Homo sapiens
aggaaacaggggctggtggcatgggtggtgagccactgggacgagcgccaggcccgggtccgctactaccaccaactgagccaacatgtgaccgtggacgtgttcggccggggcgggccggg

SEQ ID NO: 214776 - DNA, 122 bp, Homo sapiens
ccacaccactggaggcgctctcccttcactgcggttgggtcaatgtggacgttttccactcggccagctccccacgagcacaggaggagggggaggggaagcgcaaaggggccacccacgcc

SEQ ID NO: 214777 - DNA, 122 bp, Homo sapiens
ctgaaaagaaaggtgcagctctttcctttccctaaatacctattgagccatgtggtttagcgtttactggttttctaattattttgagaatgttagtcctatttcttccaattagaaataaa

SEQ ID NO: 214778 - DNA, 122 bp, Homo sapiens
cctcaattcatttcatctctgaaccagatactaaaaatcctccaggcgagtggagaggaccggccttcctggatcgggaacctgccctctgtcttccctcgcagcgccctttcctcctttcg

SEQ ID NO: 214779 - DNA, 122 bp, Homo sapiens
cttgctgatgctctgcccctccagctccggaggggagcgaggagggggcggggcgcgcctcgagagtgacaggcccggctgccctatcaaagagccccttgggagctgcgagccgcaaccat

SEQ ID NO: 214780 - DNA, 122 bp, Homo sapiens
tggagcccgatccacgaacgttgactgggaaatgctaggtgtcccgagtcggtagtgcaccgacaatttagcagacaaaaaagacaggacgccagagcgcgcaggctgcattagcagagagc

SEQ ID NO: 214781 - DNA, 122 bp, Homo sapiens
tgggggcgggagcagcaatcgcagccatggcgtcgttactgtggggaggcgacgcaggggcggcggagagcgagcggctgaacagccacgtaaccgccaccgagccggggggccacagccgc

SEQ ID NO: 214782 - DNA, 122 bp, Homo sapiens
cacaagacaaagagataaagcgaaaacagctgggcccgggggaccactaccatcaagacacggagatgggtagtggccccaaatggttgcgtgcactgttatttattgcatacaagacaagg

SEQ ID NO: 214783 - DNA, 122 bp, Homo sapiens
cctatacccaggttcgagccctgcaataaagcgctggggacctcctggctcccacatctgcgccccaaacccaggttcacaggctccgtctccgagagcgccgaggcgcccacacgccactg

SEQ ID NO: 214784 - DNA, 122 bp, Homo sapiens
ccgcgagccccagtccttcccctgcggctgggctgggtcccccgtcccgggcggtgagggcgccctgcaggcgtccacagagctgggcttccgtggcggcaaccctaaccccagcgccacct

SEQ ID NO: 214785 - DNA, 122 bp, Homo sapiens
ataattcatgctggaaattggccggcatgtcccgccccagccccagcggtgatgtatgggcgccgtcgcagtaagaaaaaggcagagtaaatgtgtaatttctcccttgacggcccccggcc

SEQ ID NO: 214786 - DNA, 122 bp, Homo sapiens
ggcaggctggctggccccggcaggtaagccaaggtgggtgtcggtgccgtcagcctcctccggcaggcagtctccgggggacccgggcaccaccacctccaagtcagccaggtcctctcctg

SEQ ID NO: 214787 - DNA, 122 bp, Homo sapiens
tcagtgatccatccattctttgctggatcaaaagccatcctcccaaactggtctcttgatcgcaataaacagaaaaaatcttactggatcccggtagcttgatattgaaaatgccactttgg

SEQ ID NO: 214788 - DNA, 122 bp, Homo sapiens
gctcttggctggagcctccccacaccctgcatgatccctagaccatgtcccagccggatgcggctcccacacccccggggctgccgccgctcacctgtggcagcgggattttgtccgtctcc

SEQ ID NO: 214789 - DNA, 122 bp, Homo sapiens
gagaagctgaacactgtgccacgggcctgggtcactcaccaaactctgaggctgcgctggcggcaaaggcagtagcttcactaatcccaaacaacccccaaactctgtttcagaccctgaac

SEQ ID NO: 214790 - DNA, 122 bp, Homo sapiens
gaagccaggcgtcacctccaaagcaggcaaagacaggtggctggatggatgctcatcctccgttgagtgtttgcttgtgacttggatcagttatcctggtgctgcaaatgcagaatgtgatt

SEQ ID NO: 214791 - DNA, 122 bp, Homo sapiens
tacaggtgctaaagatagctgtaataaatgttgacaattggaaaaaaaaaaggtgaattacgtaaaatgagagtgcacatgcctgcacaatctgaattcagtgggccagtctggtgctctac

SEQ ID NO: 214792 - DNA, 122 bp, Homo sapiens
agcgccacctagcggcccccccgccaggagaacacgcgtccctcactacgcggaggagggcgctgtccaggaatctggagcacctctgaacttgctaggtgcttgcatgccgcctccagtgc

SEQ ID NO: 214793 - DNA, 122 bp, Homo sapiens
ctgagggaggttaagtgacttacacaaggtcactccgcctgttagtgcaggggcgggaggcgggatccacacccaggtccctctgacaccaaagtggcaagggggtgggaggggagtccagg

SEQ ID NO: 214794 - DNA, 122 bp, Homo sapiens
tccgctcggggccagcctagccaagttcctcaggactccaaggcgcggcggcagctaaatcggcacagcaaacggtcccgccacctggctaagaggaagccaaaatctcgcgagacgtggcg

SEQ ID NO: 214795 - DNA, 122 bp, Homo sapiens
ggctgcggcactcttgccggatagggtggcccggcggggctaggaaagcgtgaaatctcgcgcgattgcgctgcgaagtcggggacggggcggggctggcggcgggggcggggacccggagc

SEQ ID NO: 214796 - DNA, 122 bp, Homo sapiens
accctgctgtaaaaatcaggagttgaaattctactttatttcaacaagacctgaaagatgcggtcaggcaaatggaagtacatctgatgttgacagaaaaataaaggttttaatatatgttt

SEQ ID NO: 214797 - DNA, 122 bp, Homo sapiens
ggacagctgctgttgtgggcagcccagtgacctgtgggctccaggagggcaggacccggccggccacatggctgttgttcacggctgagtccccagtagttaggtccacagtaggttcttgg

SEQ ID NO: 214798 - DNA, 122 bp, Homo sapiens
actcatcgagctccagcgctcttccaggggctttccgctatcagtcacgtttggatacatcgcggttggccatatggttcactttgcagctgcgggctgtgacaacttacttgatctgtcaa

SEQ ID NO: 214799 - DNA, 122 bp, Homo sapiens
gcgccgccgccgccgccgcctccgccgctgctgccgcacctgccaccatgtcgccgccgccgggtcatgtctgactctctctggaccgcgctttctaatttctcgatgccctccttccccgg

SEQ ID NO: 214800 - DNA, 122 bp, Homo sapiens
acaagtgcaggagcccaagtgggcgtgtgttacagtgtgcccttttagccttgctgtccacggatggcttgagtgttggccagctcagtggaccctctgcctttctgtaagggcagagtgcc

SEQ ID NO: 214801 - DNA, 122 bp, Homo sapiens
gtgcggcgccgacgatgcaagctgttgacctgcacagataaaccgtgcgtgcggaggaatcgggggcggcggacggggtggggggagtgtacatggctgttcttttctgctggggcgcccgg

SEQ ID NO: 214802 - DNA, 122 bp, Homo sapiens
ctaggagtttggagtttcgctaaaacgctcctgttctcaccagataagagctgtgtcctccgggcacgtcagtccctcagagcttgagttagaggtggttgtagtggttgtgaggattaaat

SEQ ID NO: 214803 - DNA, 122 bp, Homo sapiens
agtgggtagcattagaaaactggcatcagcctccctcttggacacggacaaaaggtattgcggcaaaaccacctctagaaaagcatggaatgaagaccattgggagcagactctgccaggat

SEQ ID NO: 214804 - DNA, 122 bp, Homo sapiens
acatctggggtgggggccagggaaaccccccgggccattgtgtgtgtttacgtaggaaggcgctgcatgacggagagggacacgggggcgatgcccacctcccagcccgcggagctggcccg

SEQ ID NO: 214805 - DNA, 122 bp, Homo sapiens
aacaggcatccccagagctttctgggcatcagcagagcagacgtccagttcgggggtccacgccagtatgcggcagtggcgcggggccgaggctgctcacaggctgggtgccgacagcccag

SEQ ID NO: 214806 - DNA, 122 bp, Homo sapiens
tgatgaccttaagggagcactgtggtaaaagttaggggcagccctttccagtcttggtgtcggcatattttgattttgaagagaagactggtggagtgaaaactagttaggaggccatttcc

SEQ ID NO: 214807 - DNA, 122 bp, Homo sapiens
aagcgaaataagccagtcacacaaagacaaatactgtgtggctccactcacaggacacagcgaacacagtcagactcatagaaacagaacacaggacggtggttgccaggcactggcaggtg

SEQ ID NO: 214808 - DNA, 122 bp, Homo sapiens
gcctgggctgagatcctgagagctgagcctaagaaaatgcaagcatcgcggtggagggggcgtgggtgggggggagcggcgggcgcggcggggaaaccaccttgatctactgccacaagagc

SEQ ID NO: 214809 - DNA, 122 bp, Homo sapiens
cccacagtgacctctccaccctgttgtaatgagaactcctttggagcccacccagtccgtcgcaggctcttcccacagacgtctgttcccttccagcacagacagcatcccgccgagcctgg

SEQ ID NO: 214810 - DNA, 122 bp, Homo sapiens
tagaggaacggggtaggaaagagagtcctctagcaaacaagggtgtcccattgctggtggcgggtgcagcggtggtagataaagaatcttggctcagttaatccaagatgcaagggaggagt

SEQ ID NO: 214811 - DNA, 122 bp, Homo sapiens
tctgctgcctccgacaggcccaaggtacccccaggccgaatgaccggggcccggtgcccacgcttgcgccccaagttggcacggctccgatacatggcactgtcgaggatctcggtgtcctg

SEQ ID NO: 214812 - DNA, 122 bp, Homo sapiens
gtttcaggccctgccctttggctgccccactggaagctctgagcatctacccttcagggacgctttccctggtctgaccttggcaagggcaaataagaggtactccatggagggtcaccaag

SEQ ID NO: 214813 - DNA, 122 bp, Homo sapiens
cggagacactcgttccacctttgtctctgagagatgttcttgctgacaggtttcttcttacgacgctgcccttgcgtgggttcactcgcgttgctcctcaggagaaatgagagcgtgtgttt

SEQ ID NO: 214814 - DNA, 122 bp, Homo sapiens
ttacctgctcactgtctctggacaaaccaaagagtgggtcatgtcggttccacaagacctcgcagggcttaggattgggcacagccttggttcgaatcccggcgcctcctcaagctacaggg

SEQ ID NO: 214815 - DNA, 122 bp, Homo sapiens
tttttttttttttttttttaattttcttttttaaaaagacgccccctccagccccctcgccggtgaccttggccgcctcggatgctctgattccacgcggctcgctctaacttgcccccgcg

SEQ ID NO: 214816 - DNA, 122 bp, Homo sapiens
ctgtgatgagcaaacttccaggtgagcctctgatatttccgataacaacctgggagagttcgtgtaacatctggatgtggagggaagggccgtttccaacatacctttgtaactgggcaatc

SEQ ID NO: 214817 - DNA, 122 bp, Homo sapiens
gttcacaaaatgtcctgtacagtgtgggcacaaaataggtatctataaatatcaccttcacgcccactctgtcccccacaaaggcaatctctacagtctcctctagatctgcagttctgcgc

SEQ ID NO: 214818 - DNA, 122 bp, Homo sapiens
accctgtggaacccagactagtgggtcgagggaaacactctacagctcaggtggaggttccgcagacacacccgcagctgtgcccgtaggttccggccgggcccggtgagccacgctcactt

SEQ ID NO: 214819 - DNA, 122 bp, Homo sapiens
ttcaaggctgccaagttctgatgggagtgtcctcctccaggaacatctcccagcccccgacgagcagagccctggaggagtgggactcctgccctgaggctgaccccagttttggggctgcc

SEQ ID NO: 214820 - DNA, 122 bp, Homo sapiens
gctgactctggaggttctggtttctgagtttgagcctctatgtccctgggtgtccattctcgagccttcccggagttcagggtccatttccacccttctgttggcttcatgcccctctcgcc

SEQ ID NO: 214821 - DNA, 122 bp, Homo sapiens
cctgctcctttaacggcgtctccgggcgccggctccgagcgcgtcctgcccccgctgccccgtgcggcagagcttgggaaaatctattaccgccgagtcattaatctgaggctgccgcctcg

SEQ ID NO: 214822 - DNA, 122 bp, Homo sapiens
ccgacgagtcctgaggagagaaccggtgcgtcctgaggagagaaccggcgctgggcaacacgggcctgcaaactcgacaggaccctgcccgaggggccctcgcgccaacctggaccggtccc

SEQ ID NO: 214823 - DNA, 122 bp, Homo sapiens
ataaagaccatatagatgagagtggggaaaatgaggaagaagcaggtcttgaaaactcttcggaaatttctgcagatgagtggagcaggggaaatatacttaaaaattcagtgggagagaat

SEQ ID NO: 214824 - DNA, 122 bp, Homo sapiens
tgaattcaatacatagcatccacatttttaaccagaaatctgaagtgttaatttgcttcccgtttgtccagtgaacttgactcttaacattttcttaaattaggggaatgggagctgtaagt

SEQ ID NO: 214825 - DNA, 122 bp, Homo sapiens
gtgacaaagcgagaccctgtctcaaaaataatactactactaattagccaggcatagtggcgcatacctgtagtcccagggagactgaggtgggagaatcacttgagcccaggaggttaagg

SEQ ID NO: 214826 - DNA, 122 bp, Homo sapiens
cttccccagatccagcctgatgagatcatctgccatttcaggctgggctgaaagatcctccggcacaacaaagctgggcccaggagatatcctgcatgactcatcagttggccatgcattgg

SEQ ID NO: 214827 - DNA, 122 bp, Homo sapiens
gagagggctcagaaaagtgtgccagttgatacttagctgtggataatatgccaggagaaacgtacatatgggcaagtgttttagtgaaaatgaggagacaagaggttgcaagtttgagtgga

SEQ ID NO: 214828 - DNA, 122 bp, Homo sapiens
tcagtcttccgaggatgaggggatctcagagctccggacagggaatcggtggtggctgggcgtggccgggcccgggccccagccgacttgagggtggaacccggcggcggaggcctctaaag

SEQ ID NO: 214829 - DNA, 122 bp, Homo sapiens
gaaaattctgggagcgtttcaaagaggcctctcccatcctagaagctcccaggtgtgtgtcgggcgggctttaaagaccctggcttcagagcaggatacctgcgtctctcgcaaaaggctcc

SEQ ID NO: 214830 - DNA, 122 bp, Homo sapiens
tactgggagcgattcttggggcctccttgccgacaattgggtgaaaccagcggatacgatcgtagcgtctctgagcccccattgcctccttgtttctctgcccatagtagaagaatgtctct

SEQ ID NO: 214831 - DNA, 122 bp, Homo sapiens
tgaggctcaggggggtcaggggatgtgtccaaagtcatgcagctggcaaatggcagaacacggatatgttaagcactcggtcatcgagtgtctctgagcctcatatcaaccccaaggtgtag

SEQ ID NO: 214832 - DNA, 122 bp, Homo sapiens
tgggagttcagttgcagtggcgtgtctatgtgcgcagggcttcgaactcatggaggcccccggggagtgctgtaagaagtgtgaacagacgcactgtatcatcaaacggcccgacaaccagc

SEQ ID NO: 214833 - DNA, 122 bp, Homo sapiens
cgaatgttcttgccacctgtctgcacacagtacagtccatagaatttaggcagcaaagtccgagggttctggttgaggtttatgtagtatcctggaagcagcttctgcagaaactccgcttc

SEQ ID NO: 214834 - DNA, 122 bp, Homo sapiens
taagtcctcggtacatatttccagttccggattccttggtgagcctggacaagcccctcccgctctctgcgcctcagtctcccaagcctgtcaccggaaacccctcccgcggtgccgcccct

SEQ ID NO: 214835 - DNA, 122 bp, Homo sapiens
gtgctggggaagactattattgaacagataattaattacataaacaattatttacattcccggcaagtgctgttaaggagaagtacaggtggttaaagggcatgtcataagtgggggggacc

SEQ ID NO: 214836 - DNA, 122 bp, Homo sapiens
ctttttccgagcggcggcgaagtaagccaatgggaagctccacaataatatgcaagggggcggaaggcgtaagtgcgtcacggagagcatctcgggaattgtagtgtgtttctgcaagccaa

SEQ ID NO: 214837 - DNA, 122 bp, Homo sapiens
tccattttaattgtacaattcgatgagttttgacaaatatatacatcctataaccaccaccgcaatcacaatatacagcctttccatcaccccaaaaagttcccatgtgtatctctacagcc

SEQ ID NO: 214838 - DNA, 122 bp, Homo sapiens
ctgggatcccagagcctggcggcgcgagccgggcacccgggccgacgaaaaggcaggaagcgcctgacttcagacaccacccccgactgccagcgccgtgcggcagcggactccagcgtgcg

SEQ ID NO: 214839 - DNA, 122 bp, Homo sapiens
caagctgggagagggctctagtccctggttctgaacactctggggttctcgggtgcaggccgccatgagcaaacggaaggcgccgcaggagactctcaacgggggaatcaccgacatgctca

SEQ ID NO: 214840 - DNA, 122 bp, Homo sapiens
gcccgcggcctggaagaggtcggcccactcctccgggtggaagaagcgcgcagtgaactgcggtccgaagtcggcgtagctgaagccgggcgggtagttgtcgcgcatgaagcgctggtact

SEQ ID NO: 214841 - DNA, 122 bp, Homo sapiens
cgtgactaaaaccaataggtgattgttcggggccgactgtgtgcgggtgtacacggtattcggcccgggtgtcatccgcggcgctggactgtttcattttgagtttgcaacttgggtttttc

SEQ ID NO: 214842 - DNA, 122 bp, Homo sapiens
caatctgcgctccagttctttttgcccagctcggccccagttcctccagccataagatggcggctgcgctgacagccggcccgggcgtcctgtctcttccctgcgcagtgactgtgccctgg

SEQ ID NO: 214843 - DNA, 122 bp, Homo sapiens
acacccgcctcccccggcgccggccttggtctccagagacagtggggtggggggtggagacgcccaggtatggctctcctccgtggaatcagcgatcccaggaccgaggccggttgactccg

SEQ ID NO: 214844 - DNA, 122 bp, Homo sapiens
cagagcaagggctggagaagaaccaggtggacgggtctgccccgccagacgggagcacaccgtacccacgggtctaccctgctggacgggagcacgccgtacccacgggtctaccctgctgg

SEQ ID NO: 214845 - DNA, 122 bp, Homo sapiens
aggcgggagagagggaccgaggcagggcgggagcgcagaggctcggtccaggcgcgtgatcgctcccgggaggtcactttctaggcagcccagcctgtgcttgggcggggtggttgcttctc

SEQ ID NO: 214846 - DNA, 122 bp, Homo sapiens
tgattcttctaggattagcctgtgtgctgctgcctctgcctgtttatgcattcatgagttcgaataaaaacacaggcagataaacaaaaccaaaccattactgagtgccatatgccagattc

SEQ ID NO: 214847 - DNA, 122 bp, Homo sapiens
cagaactctctataggtcctctctcccaggaccggatagatgattcatttttatacgtaacgttttaccccagtctattcccgcagctggttaatgttcaacccccgggcctcgagaggcag

SEQ ID NO: 214848 - DNA, 122 bp, Homo sapiens
aggaggcggtccagctccgtcgtgtccgccgagatgtccggctgcagcagcaagtcccatcggaggacctccctgccctgtataccgagggaacaggtaagcactggcaactcctctctcgg

SEQ ID NO: 214849 - DNA, 122 bp, Homo sapiens
gcgttcagtgggtctggcctttggctcctgtttaaacagcgattgtcatgcaatggaggccgtccggctcctggatgccacttggtcgttgtcactccggatgcccgcgtagggcgtttatc

SEQ ID NO: 214850 - DNA, 122 bp, Homo sapiens
cctcacggccctgccctctcacctcgtgcccgccggccgcagcgtccgggtcttcatcagcgccaaccctgaaggtacgtccctcgctcgggtttgcccgtccgtccttctgtccgtcagcg

SEQ ID NO: 214851 - DNA, 122 bp, Homo sapiens
ccggctgcccctgtccttggagacctacctgatggggacgccaggtgtgcaggggcgtggcgcgtaggtaagcggacccggtgcctgcctcgtccaggggatgctcactagagcgctaggct

SEQ ID NO: 214852 - DNA, 122 bp, Homo sapiens
caccttctgccagcatggaagggtgaggttgcatttggcacctgtcctcttcctgttcctcgagatggtgaccccagaggaggacttgcattgggcccactgtccccgggccagtggccatc

SEQ ID NO: 214853 - DNA, 122 bp, Homo sapiens
cacagttgcgtcatagcagaaggacctcttttacagcatcagcagtgggatagtcagtgccgagttttcctggcaggacagccgacaaccaccgccacagaccagtacaaacattccaaccc

SEQ ID NO: 214854 - DNA, 122 bp, Homo sapiens
tcatccggtagccatctgaaatgtttcacattaggtctaactgcaatacggtcaaccgaccgtctgatatagatcattaatctcacacttcaaaggaagaagaatttctgtgggaagttttc

SEQ ID NO: 214855 - DNA, 122 bp, Homo sapiens
catggcttcattcttttacttttggaagcctgagtattaattttatcctacctctgactacgaactattattcctcaacatcctactagattatccacattttgaggacaaggattggcaaa

SEQ ID NO: 214856 - DNA, 122 bp, Homo sapiens
ggacccggctctcgtggacttcctcggcagccgccgcttcctcagacggaactcggggggcgccccttccgccgccccaggccgccttgcaccccaagctgctgcggcagtgacagggaaga

SEQ ID NO: 214857 - DNA, 122 bp, Homo sapiens
ctctaagaatgcgttcttgttctctagcttcctgctctctctagtgtcctcaacctttctcggggtcttctttttcctcctgcctctgacatcggtatcctcctcagcactcatggcactgt

SEQ ID NO: 214858 - DNA, 122 bp, Homo sapiens
attcaaaccctgctgcaattctccggtaaacaatgattcatggggcataatgcaaataaacggattgcaaacggcgcggttcgcgcactttgcagccggcccggtggagcagccagtgccgg

SEQ ID NO: 214859 - DNA, 122 bp, Homo sapiens
tagcctgctggctctggaaagtctaggtggcctggacaaggaggagcccccacaacacagcgtacctgctgtgttaggttgtggtcagacttattctttaagtgggaccccgatccatccct

SEQ ID NO: 214860 - DNA, 122 bp, Homo sapiens
ctgaagggaggggaggagcaggcagaaaagtgggagaggagagcaggcacaccaggtggacggcacacaggtccagcaccaggcggatttctggagtctgagaaggcttcaggatcacggag

SEQ ID NO: 214861 - DNA, 122 bp, Homo sapiens
ccatgactgtgcacttataaaggtcagtgacccagcagagagggcaggccctgcagaaggcgtgttgatgaagcattacaatgcacactgaatttgttagctctctggcttactcccagggg

SEQ ID NO: 214862 - DNA, 122 bp, Homo sapiens
tgaatttatattatcaacccagagaaagtttatatcagacaggtaggaaacctctgacaacgacagaagaggtgaactgacaaaaaccatgctgagtggttctttacctccgctgggcactg

SEQ ID NO: 214863 - DNA, 122 bp, Homo sapiens
cctcctgctcctctgcgcggtccccagccctctacccggcgggcagaggctcgggcccagcgccgccttccgctgggatctgttcccaggcccagggacgccggccccaccccagttgccta

SEQ ID NO: 214864 - DNA, 122 bp, Homo sapiens
actggacaaacctaagtacatcagaagtgccgccgtaaaaaaggcagcagccaacccttccgcgtagggatcaaagatgacctgcacgcataactgcaaatgaaagcctcgggaagagtgag

SEQ ID NO: 214865 - DNA, 122 bp, Homo sapiens
gagcttggtatacaaattgcctgaaatttcagagttggacttcatcacttgtctgtgagccgacgcaggcaggcgtattctatatcaacgacagactctcctctgccatttcctttcctgaa

SEQ ID NO: 214866 - DNA, 122 bp, Homo sapiens
aacaaccagtatttagtgcctgctgtgttctgcaggccctgccataggcgcttgatacagcggtgcatagcgtatgagaaagatctgtcctggtaagcttacattcttacagcagacgataa

SEQ ID NO: 214867 - DNA, 122 bp, Homo sapiens
gacagctacacaccctcctgcaccttcttctggggaaacaagacacggactcaatgcttacgaactttcctggaggggagacttctccagtgggatcaccccaacacgtgaactgactgccg

SEQ ID NO: 214868 - DNA, 122 bp, Homo sapiens
cttttccaaccctggaatggttccctttctttctcactgtgctgctctttagagttacgtcgggaagaggcctgagaaagagcagcgatcaacactctgatctggacatacaaccctgccct

SEQ ID NO: 214869 - DNA, 122 bp, Homo sapiens
caaaatacgtaggaaagacatatcacagaggtatgtcaggcagttaattaatttaaagatcgtggtatttttctgtatttggtgatctaatacttgtaaggttgttttgttgttgttgttgt

SEQ ID NO: 214870 - DNA, 122 bp, Homo sapiens
gcaaccctccctcccttggcctcccaaaatgttgggattataggtgtaagccactgcgcccggccccagctacaggtagttattgtcggaactgaattaaatcgtaggacactgaattggta

SEQ ID NO: 214871 - DNA, 122 bp, Homo sapiens
ccgaagtccacctccgttccccggccaggggaggagctgctctgggaggcggaactcaagcgcatccctttgtcccactcatcccggaggcctgagatgccacctgtctggcaggtctcccc

SEQ ID NO: 214872 - DNA, 122 bp, Homo sapiens
tggaccctttcactgtgcactgaacttggtgggtcagacccatccagtgtgcactgaactcggtgggtcggacccatccactgtgcactgaactcggtgggtcggatccattcactgtgcac

SEQ ID NO: 214873 - DNA, 122 bp, Homo sapiens
tttggctcagtcatcaagttaaccaaatatgaagaatgctgtagatctataacttagtttcgtttttagtaagactagacaaggtgataaaaatgagtgtatatgtacaccttttttttttc

SEQ ID NO: 214874 - DNA, 122 bp, Homo sapiens
tgacatttctcctccacactccccactcacccagcagcggtgcccacctttcctgattcacgagaagtgaagcctgcactatcttggactctccagcagcttcctgtctggagtcagcttca

SEQ ID NO: 214875 - DNA, 122 bp, Homo sapiens
ctgctgtcatagatgtggaacaccaagacaagtggctagaaaccttgtacatgaaaacagcggcccacccaaagtttgtcttttcctaggaagttatagagaaatgaggaggtaacagaaga

SEQ ID NO: 214876 - DNA, 122 bp, Homo sapiens
aatcatctgtgtatttccaatttgcctatgtaggtaaaggcagatagatagtgtacaatgcgtgttagtaatggccatagaatagtttggctagaatctgtatacagctaagacaaagaagg

SEQ ID NO: 214877 - DNA, 122 bp, Homo sapiens
caacagctacgtgcacccccccaagccctgactcaagttgggcagtcttatgagaatgggcgttctctggcatttcctgctcctcgctggcctggacgaccttgtgagaacagccctgcccc

SEQ ID NO: 214878 - DNA, 122 bp, Homo sapiens
gccgctagtccctgccacgccattgaaccttctcaagcacgcgtggcccagccagcaacgcgctctttaacccgcctcccagccccgccttcggccaatccgcatccgaggcgctgcgcgcc

SEQ ID NO: 214879 - DNA, 122 bp, Homo sapiens
gtattaaattatataggcagccacttgtttgcaactgacgcactgagctgagagttgtgccgagcaggaggcattctcttcgggaagcatttgagaagatcctatagcttcacagacctcca

SEQ ID NO: 214880 - DNA, 122 bp, Homo sapiens
tgggggtaactgacgcgtgaacagccaacaattgggccctctggccgggacaaacacgtgcgtttggggagtagaagaaggctggtattaacctccattttacaatgaggaaacggagtccc

SEQ ID NO: 214881 - DNA, 122 bp, Homo sapiens
gagacaagggcacgctgtgtttcccaggcctccttgacgcgggaaccttttgttcccccacgggacatgtgggacactagagttccaccacaggtgcttggctctgtggagtcgttggcctc

SEQ ID NO: 214882 - DNA, 122 bp, Homo sapiens
cgccggaggtaaccccggctcagggatgctttcgttgccatggcaaccgccgggccggcgcgggcccctgagtgcagctgaggaagctgggacaaaccctgcccttcccaagatggcggcgg

SEQ ID NO: 214883 - DNA, 122 bp, Homo sapiens
tttatggcgccatcgcccgggcggaatcctccacggaataaaaagtatgcagaagcaaggcgatttatgactgcataaaccctccgtgctcctggagagttcttagacctctccactccttg

SEQ ID NO: 214884 - DNA, 122 bp, Homo sapiens
cggttttatttacccggggactgtggtggttccatgagtctgctttctaaacccttttgtcgcccgcacccctaacccataacagattgtcagcttcatctctggattctaagcttacagga

SEQ ID NO: 214885 - DNA, 122 bp, Homo sapiens
tggggaagaggaactatccaccatcgcggggcttcggggagtgtggaaggctctcaggagcgggtcggcgtctggttggatgcgggttcgagccgcgtgtacgtactggagggagatggtca

SEQ ID NO: 214886 - DNA, 122 bp, Homo sapiens
actttcgccccgtcatgcccccttgcgcgggggccagagggggcccgtctcagccggcagcgggtccctcctgcttcgagagcccctcggtgccgcctgccccgtggcaccggccctgtctg

SEQ ID NO: 214887 - DNA, 122 bp, Homo sapiens
aatgcaacggaaagcagaagggatttaggactacgtctcctcctgtgaagaattcccttgcgtattctctctctaaaacaaccaaaaaaaaatggagaggctttttatatactctaagactg

SEQ ID NO: 214888 - DNA, 122 bp, Homo sapiens
gagagtcggggtccccaccccccggaaatccgggagagggcgggcagccccggaggcgggcgggggtccgggcaccgcctcctggtccctgacacattccagatgcctgggccgactcgaag

SEQ ID NO: 214889 - DNA, 122 bp, Homo sapiens
ccctcatgagcactctgatgagttgcatatctatttccagttcagacacattcctgaactcgagatttatgtatccaatggcatatttgatatttccttgtgcatatctaatgagcctttca

SEQ ID NO: 214890 - DNA, 122 bp, Homo sapiens
ttcctgtatacctattcgtagtgggtctgcagagtgttttgggtgagtgtgagggctgcccgcttcagcaagcagaacctttgacagaagttgtgggatctgtgatgggaactgatatggag

SEQ ID NO: 214891 - DNA, 122 bp, Homo sapiens
tgagcttccggatcccactgactgtcgttcgggcacttcctagagggtcaagcaccatggcgaaaggctgaggaggcaactcgtatctttcattctcctgcctcatcaagaatgaaccttga

SEQ ID NO: 214892 - DNA, 122 bp, Homo sapiens
tcccaatatcgcaggaagtgtacacccccgtgtgagatggtccttaataatattccaaggcggagggggtaatatgactccatatatggcagaaagtggacaccccccagggatattgttcc

SEQ ID NO: 214893 - DNA, 122 bp, Homo sapiens
agcgggggttggggtgggggaggctcgggcccagagctccacggtgcccaccctgacgagcgtctttggtgggagctgagggacgagggagcccagggacctcacggacagaggagccggga

SEQ ID NO: 214894 - DNA, 122 bp, Homo sapiens
aagaaactcgctactgaagtctgcagaagccaccgcaacacaccgcaaacctccattccgcgatcgctgaatgacagagacatttctgaaatgtctcaaacctgctgttcatctgtggcctg

SEQ ID NO: 214895 - DNA, 122 bp, Homo sapiens
tgagtttagccggcgggagcctggagtccgctcggcacgagcgcggggacgcgggagccgcgcgggacccaagcagtttttccgagcagccgccaggctcagccccgctcccagcctcgctg

SEQ ID NO: 214896 - DNA, 122 bp, Homo sapiens
gaccctagcgtttaagggctgtccttttttgaaccacatttccaaagcgctcgggttccccgagtggtgccccaagcagtggacgagcaaggtgcccgagaaggaggggaccacagacaccg

SEQ ID NO: 214897 - DNA, 122 bp, Homo sapiens
gcaggaaggcttgaaaagggaggtcgaggcacttctggtgtggaagtaaaacacaaaggtcgaggcagaggtccctgcccactggccaaagtgccaccccaccgtgcatgcacagggcccag

SEQ ID NO: 214898 - DNA, 122 bp, Homo sapiens
tcaagacgcaccaggtgatagctaggcgacaggagccagccctgcgtgggagtcctgggccgctcacgccgcacccctgcaacgagctggggccccctgcatcgcccaggacgcccaggccg

SEQ ID NO: 214899 - DNA, 122 bp, Homo sapiens
gcttcgaggtacaagtccatctaaacctctgagatctcacccgtccccggtaagcccttgcgccctccagacaagctcctcagtgaaagcaagcgccgcaccggtgcctgtgccagtctccc

SEQ ID NO: 214900 - DNA, 122 bp, Homo sapiens
acttgagcccaggcctgcctgattccaagacaattagtcaaaaagtcctctctgggggtgcgctgaggtgggagcttcatcttttctggtttcatcctgaaacactaccacgtgtggtttac

SEQ ID NO: 214901 - DNA, 122 bp, Homo sapiens
ccaaatgtccccggagtgcaaaaccgccccacttgagaatcaccgatctaggctatgtatcgaagagactaaataagtgtactaaatggcattagtgaatttcatgatctacctgagtctca

SEQ ID NO: 214902 - DNA, 122 bp, Homo sapiens
actgaagatgggatgtcagagggtgtcttaagaagagccaggagtttagaaggctgtggtcggccagagcaaaccagactgactgactggtcccgtcccctcactctgcagatggggaagcc

SEQ ID NO: 214903 - DNA, 122 bp, Homo sapiens
gcaaggggagatttgatgacagaagagaaggtgatgcaatttgaggagggctcaacttgccgatgctggctttgaaggtgaaggaagaggaccacaagccccagaatgcaagggtttcagaa

SEQ ID NO: 214904 - DNA, 122 bp, Homo sapiens
gagagagagcacattaatatccaaaaaacattacacttggttttgctgtgagaactttgacgtggtttttctggctaggcctgctcctctgaagtccaaagcagttacaattccattcccta

SEQ ID NO: 214905 - DNA, 122 bp, Homo sapiens
gctgcccagcctcagcctctctttggtgctcatgtcaggccttccagctctgagatctcacggcaaagggcaagctagctgccgggcagaagcctggaaacacagacacagccagcctgttg

SEQ ID NO: 214906 - DNA, 122 bp, Homo sapiens
tgttaactttgtctcgactccttcatttatcttgcagtctctgcctatttatccccaactcggtgtgagtttgagtctgttaaactctgcatgtctttgtctcttttaagaacatcccaccc

SEQ ID NO: 214907 - DNA, 122 bp, Homo sapiens
gctccggggacgggctagggcagccggcgggcagcagaggcaagcctggcaaactcttcccggcttcttcgcggcgcttggggcagacgtcctggcgacaccaggccgcgtcggttcccctt

SEQ ID NO: 214908 - DNA, 122 bp, Homo sapiens
caaagagcgagcaaaggaaagaaagcgaaggcaaggaagtagaaggtcccgactgccacacgagactgactggggaccagccacccataaccatgagccttgcggcacggtgagctcagcac

SEQ ID NO: 214909 - DNA, 122 bp, Homo sapiens
ctccctatggcttctgtaggcgatgtgactgaatcacaaaacgtaggcatcttgcagtgccgtgtaaggaaatgtaagtaccgtgaacagtttccagcatgtaatgcgcgaaaagccgggcg

SEQ ID NO: 214910 - DNA, 122 bp, Homo sapiens
tgccaatcgcacctgccaagtgaatggccgatggagtgggcagacagcgatctgtgacaacggaggtgagaagcatcccctccccctacattgctgtctccctgacggcgcccagcccgagg

SEQ ID NO: 214911 - DNA, 122 bp, Homo sapiens
agccctcccgccagcgcgttgcgcacggcgtcgtgctcggccagcaggcgctgcagcgcgcggatgtactccacggctgagcgcagcgtctccaccttgctcagcttcttgctggcgccgcc

SEQ ID NO: 214912 - DNA, 122 bp, Homo sapiens
aggggtagccctggtgcagctcccttgcctcgtctagtcctgctttagatgctcgctactcgggtgagggctgcagatccttgtggaaagagacagaaaaagaggaagagagcttgaattgg

SEQ ID NO: 214913 - DNA, 122 bp, Homo sapiens
aggcgccttcacttaaaaaggcaaaaatctagggttttaacgttattagctgcaggagcacgtggagataagaaaacctggctgaggagctgagcatttgctaggtggccttaggtgccggc

SEQ ID NO: 214914 - DNA, 122 bp, Homo sapiens
agggacgctggggtcaccagctggctcaggccttcctgctcagcctgttgaggctgctatcggtctacccagggcccaatccgtgagacagggagcctgctctgctcaccccaggagaccat

SEQ ID NO: 214915 - DNA, 122 bp, Homo sapiens
aaaaacttagttaaattcaaggctaaaagggcaaatatttcacgtgggaaagtgctccttcgttcaggagacttccttcagccattaaactatggtctggacttcaaactgtagtagttact

SEQ ID NO: 214916 - DNA, 122 bp, Homo sapiens
gaccctgtttagtgtttacaacccccataaggtctgtacagtcatcattaccatttcacacgtgaggagaccgaggtttagagaggttacccaaggtcactctgaatggtgaaactaagtct

SEQ ID NO: 214917 - DNA, 122 bp, Homo sapiens
aagcttctggaacgcaaagctagcaggggcagtagggtggatgtgtaggtctcagaaccacgagcttagtcctgcagcctgccggggcctcacgcacacaggctgtgggccaggtcccaggg

SEQ ID NO: 214918 - DNA, 122 bp, Homo sapiens
cgggtgtgttccgccgggctccgggatgcacttgcgcagtttcacccgaggctggagtgacgccaacctgttaatgttcgttttcggattctggacttcgggttccgctgaggacggatttc

SEQ ID NO: 214919 - DNA, 122 bp, Homo sapiens
ccgcccgggaacaggaatagcgaggccttctcatgtttcctgactgccggtcccagccggcgaacatcctgcgggcgcggtatccacgttcccgggcgggtggagaggaagcgtccgcgccc

SEQ ID NO: 214920 - DNA, 122 bp, Homo sapiens
cctcttgcctccaggcaggaaaacctctgtgtgaagtgctctacttgctccatgctctggcgctctctgtacctacgcaggctgaagctgagcctagacatctcctgaaaccacacctttga

SEQ ID NO: 214921 - DNA, 122 bp, Homo sapiens
cgcaaatgtaaccgtcccatgcatttccggatctttaggcggcacaaatgttttagggagcgagggtttgctaaaaagaaaaggcacattatccaaagagaaaaagaactttttttttagta

SEQ ID NO: 214922 - DNA, 122 bp, Homo sapiens
gtggagtggaggagtcctggccttggattgaggagaacaaggtcaacttctcacctcactcgtttctggcttttgcgaccttggataagtttaactttctctctcctaggtttagttttctt

SEQ ID NO: 214923 - DNA, 122 bp, Homo sapiens
agtgttaatcattgttaaccccgaaaactaaggcattcctacttggggccttagttttgccgttttcgatcaggagaacttgtcccgagtgtacatatagaatcgagagggaaaatggtaga

SEQ ID NO: 214924 - DNA, 122 bp, Homo sapiens
aagctgtcaggagacgcttcctcccgaggtggtcccggcggccaagtggggctcggttgacgggcaggcttgccctcctctgggagaatatggtctctaatcggctctaattcaagatctct

SEQ ID NO: 214925 - DNA, 122 bp, Homo sapiens
cccagactcagaaggaggtggagcgggactgcgttcaggcaaggtggcagaacgcctcgccgtggacgaagagagcacatctcttcttgcgaggcctaaggaagtagggctcccactcgcct

SEQ ID NO: 214926 - DNA, 122 bp, Homo sapiens
ctgggagggagctaataaacattgaatgtgcagcagctgccttggcggccggagtccgcccgagcgacaccggagcagtgcgcccgggaggcggcgaggggaggcggttcgccttgtccctc

SEQ ID NO: 214927 - DNA, 122 bp, Homo sapiens
cttctctggaggcggtcttcatggattgtttgccagcctagccttaaaaatgtcaggcatcgaagatggccgaatagcaacagctcccgtctacagctcccagcgtgagcgacgcagaagac

SEQ ID NO: 214928 - DNA, 122 bp, Homo sapiens
cagcagccgcagaacaagcccgattctccgagccccgtcagccgtccatgtgaatcctttcgaacatgaaaaggaggcgcgctggcctctggcttgtgtcttgagcctttgaatgagcaatt

SEQ ID NO: 214929 - DNA, 122 bp, Homo sapiens
cggcaggatttgtcagaggagcagatggtggtggcaggcccggtggggacactgcagcctcgagaggcacagcaatccatggctattagagtctgtggtatttatgggtttgattgaaaaga

SEQ ID NO: 214930 - DNA, 122 bp, Homo sapiens
agattttccccagcgacaacctagagctcagatttgaggatgagacagatgccgggggcacggagaagtgaaaatcttccgagcagacagtaggaaaatcgggcttccacatcagccacgcc

SEQ ID NO: 214931 - DNA, 122 bp, Homo sapiens
gaaagcctccgagcggaagaaattatctgcactgcgtagaaccatcagaggacgtggacacgctgtcctgagagaacccctagaatcacggagaaactgacagcctggtaggaaagaaatgg

SEQ ID NO: 214932 - DNA, 122 bp, Homo sapiens
gcacttaatacttaacacaatatttgcccactgtatatccaccataatgccacagtgtggcgctgctgtgctttggccgaatatttacgaaatcaccttttcctattgctgtcaaatttttt

SEQ ID NO: 214933 - DNA, 122 bp, Homo sapiens
aggacgctgagctgcagacagcgccacctagcgtccgagagccacggcgcaccggctgtgcgcatctctgggcgagactggaatggaaaaaaataggtctttgtaaatcaccacctcatttt

SEQ ID NO: 214934 - DNA, 122 bp, Homo sapiens
tagaatgtaaaatcattgacctagtaatatgattgctagtctgagcctggaggtagctcccgtttacttccaaggcttgccaaagattcaaatggagttaccaggaattgtaagtttagtca

SEQ ID NO: 214935 - DNA, 122 bp, Homo sapiens
aatatcttcctctcccccgctgccctttaggagcaatgtcacacaaggggtgtacactcccggctatattgggagtgatatcatcctctccgtccctctatattaggaacaatatccctagg

SEQ ID NO: 214936 - DNA, 122 bp, Homo sapiens
cattttcatttcatttttaataaaccgttttgctgtgtcacccaggctgcagggctttgacgccatcctagctcattgctgcctagatctgctgggctcaagtgatcttcctccttcaacct

SEQ ID NO: 214937 - DNA, 122 bp, Homo sapiens
tcaaatttccaagaaattaaattatttgtagtaaggagttattgccagtagcagtggtagcggtccttgtcatcgtcatcaaagtggcggtggtagtaatagcagtataaggaaatatttgt

SEQ ID NO: 214938 - DNA, 122 bp, Homo sapiens
gggcacgtcccccaccaccgcgaccttcgcggccgccgcccgggtcatgatccgctgaggcggaagggcagggcttctagctgccctggtccgaccccactcccactcccgctgcgcgcccg

SEQ ID NO: 214939 - DNA, 122 bp, Homo sapiens
cagcaacaatacgattatcttataggaaaaaaaaaatcattgtaaagtatcaagacaatacgagtaaatgaaaaggctgttaaagtagatgacatcatgtgttagcctgttcctaatcccct

SEQ ID NO: 214940 - DNA, 122 bp, Homo sapiens
ttccccgaggaacccggagggcgagccgcctaagctggacctgagggtatcgcggatttgcgtctggggccccggagaccctctgtagcccagggcctgctgacatcccgagagcctctgga

SEQ ID NO: 214941 - DNA, 122 bp, Homo sapiens
caccgcatctagcagggtcagctgttcggccaagtggtcagcgaggaacaccaggacatccgtggggtcagcagggggatcgccggggagggccaggggcttaggaaggtcgggggcctggg

SEQ ID NO: 214942 - DNA, 122 bp, Homo sapiens
cctgatggagatggagcccaaggcgctgagcgcccgcaagtgccaggtggtgttcttccgcgtgaaggagatcctgcactgccactccatgttccagatcgccctgtcctcccgcgtggctg

SEQ ID NO: 214943 - DNA, 122 bp, Homo sapiens
tttcttaggctgggtggctatagctgctaccatagcctgaaggtgaggcaggtctcctctcgccccagtgtgactcatcagcaggcaatgcccacacctcctcccttctgaaccccatatct

SEQ ID NO: 214944 - DNA, 122 bp, Homo sapiens
atctctgcgcggcctcgtagcaggcagtcctgagcggggtggggcccatagctttgaacccggagtttcgtgtgtgtgtgtgtgtgtgtgtgtgtgtgtgtgtgtgtgtgtgtgtgtgtgtt

SEQ ID NO: 214945 - DNA, 122 bp, Homo sapiens
gaagcgggctgcgcctgtggcacagtggtacggggccggaagataacttacctgaagaggcgatcaatccctgagaatcgcgggcgacccgttttttgtgtgcccgggtgcggggtgccggg

SEQ ID NO: 214946 - DNA, 122 bp, Homo sapiens
gaaaaggaaacagaacttggggaggcggtggcggcgagagtaaacaactcccagggggcccgtctgcagcgcctaggggaggggagaggccgggagccgcctccgggggtctcgcggggccg

SEQ ID NO: 214947 - DNA, 122 bp, Homo sapiens
aggaaaaggctgggacccccaccaccgcagacctggggccgaagcccatgtgccagggcccgcgtgggattcatcctcaccacggctacctcagcccctgagaaacgccttttctgatttca

SEQ ID NO: 214948 - DNA, 122 bp, Homo sapiens
cataaagtggcagaaccgacattagagggtagacagagggtaaccgcaagacacaaatttcgtgttctgcaacacttgtgtaggcttcacacacacgtgcctccggggccgaaaacaggcga

SEQ ID NO: 214949 - DNA, 122 bp, Homo sapiens
ggtgtgtggctagatcagtgacaatttatgaccacttctggggaaatagctcagagtgcacgtccttcgtgtggtaggtccaaaatattatctttgtatgttcaaagtagcataagctttag

SEQ ID NO: 214950 - DNA, 122 bp, Homo sapiens
taacgaggcagtctactcttagggcctctgccctccctgctatgctagactgcacatcttcgctgagtggccttggtgtgccatacagcatgctaggctttttcatgtgctctcaaagtaga

SEQ ID NO: 214951 - DNA, 122 bp, Homo sapiens
cgacgcgtgcggggagcgtgtgtgagtcaggagggccgtcgccacgggcacagtgacgtgcggtgagtgtgagtcaggagggccgtcgccacgggcacaatgacatgtgcggtgagtgtgag

SEQ ID NO: 214952 - DNA, 122 bp, Homo sapiens
tggcatttgattcacgaactagaggtctgtctttctccaatggagcatgtcgttcactcccgacatttgagggaggttgcagtgctggtaaagtaatgtttcttctagaaggcaaactgtct

SEQ ID NO: 214953 - DNA, 122 bp, Homo sapiens
cttggtcttggccttgctggggcggatcctgtggggcctgaagcttgtcatcttcctggccggcttcgtggccctgatgaggtcggtgcctgacccttccacccgggccctgctactcctgg

SEQ ID NO: 214954 - DNA, 122 bp, Homo sapiens
gggcgggctgtgggatgggctgctgtgagcgaggcatggagcaggccttgcatgcagatccgggggttctggctccttctcttggggcaaggggcggctcccccaggccctacctcccccct

SEQ ID NO: 214955 - DNA, 122 bp, Homo sapiens
gcccacttcttactataatctttccattcactagcggcttctctgatcccatttcctcttcgaacctgagctcaaaccagcctgggtctgaccggccaatccgagcgcagtcttccgcagtc

SEQ ID NO: 214956 - DNA, 122 bp, Homo sapiens
aaatgcacttaccctttcctgcacatagcccatcagtcactgtatctatctctaggtgggcgatgttcattattccagtagtttatttattgtcctaactagatatctttggtagaagtagt

SEQ ID NO: 214957 - DNA, 122 bp, Homo sapiens
gcccctggccaggcatgagctgagcacatctcaggctccctcccacagggcctggtcacacgccccagggcacgtagtggctgatggtccttcctgaggggatggggccactcaggaggagg

SEQ ID NO: 214958 - DNA, 122 bp, Homo sapiens
tccccactctgatgagaaaactgcccagctccaggcaccatggcgccccagtgatgtagccgaacacccgcgcctctaacgtcgccaacggcccacctctatggtgtcggcgaagacccgcc

SEQ ID NO: 214959 - DNA, 122 bp, Homo sapiens
gaccgttcaggggaacggcaatggagtcaggaagagcttgggtgctggtaactctgtggccggacagttttggacctggcctgtgaccttgtggtgtggaccccacacagaaggcctttggg

SEQ ID NO: 214960 - DNA, 122 bp, Homo sapiens
ccggctccttggcccaggcattcttgaagaaggtgcggagtctcgcggccatcttggtctcggcggcggcgacggcggcgaggacgcggagcactctgggagttgtggtccctctttttttt

SEQ ID NO: 214961 - DNA, 122 bp, Homo sapiens
gtgacacaagatggcggcgccgaacaaggaaggaccctgtctccggggcaaccgggaagccgacccggcgcctgattgctaaagccctctcagagctgctcgggatatccttctgttcgtag

SEQ ID NO: 214962 - DNA, 122 bp, Homo sapiens
cagccacggcgggggtggctgccgctgcgccgccgaacgggaggagccgcccgagcagcgcggcctggcctacggcctgtacctgcgcatcgacctggagcggctgcaatgccttaacgaga

SEQ ID NO: 214963 - DNA, 122 bp, Homo sapiens
tctttccatctcagacccagtgcggaaacgtgggggatgagcctgggcgccttcaccaaacggaaccccctttaatctgatgtgaaggcaaatctctccaccgggggacccgttgggtgcgg

SEQ ID NO: 214964 - DNA, 122 bp, Homo sapiens
cctttgccaaccccaactccctcgggcaacactgccgagacgacccgtccaaggcttcggcgcccccacccacaaactcttgtcgagagccgctcgggtgcgttccaatcctggcgcaccgg

SEQ ID NO: 214965 - DNA, 122 bp, Homo sapiens
aaataagaatcgtcaaatttcaacattgtttggtaagggaacactgttattatcacaaggcgaggaagcttgatttaaatcagagtttgactatccctaaccactgagaagccattcctttt

SEQ ID NO: 214966 - DNA, 122 bp, Homo sapiens
tggaaacctaggaagtctctggaatcttagaacctgcagagacctccccttcaacagaaacggaattttcagagaaaacatcaagactttagggaggtagattcacttatccaaagaacata

SEQ ID NO: 214967 - DNA, 122 bp, Homo sapiens
ggatggagacatgaccctcctctacctcatcagagaacagcacagaccctctccccccgccgcccccctgccaaggggaaaatatggtgctcctcaatgaacctcaccctgatcctacaggg

SEQ ID NO: 214968 - DNA, 122 bp, Homo sapiens
gcatcaggtgagatgctgggttagataattcacttccaagacagcttcttcactaaccgtcggtgccttttgctccttggcctctctctctctatctacccagcatcttaacctccagggcc

SEQ ID NO: 214969 - DNA, 122 bp, Homo sapiens
gccatgttcctgcatgtgtttgaaatctgggctgacaagaagagctggacaattttgctccgttacgtattgaattctcttctctgtggtacaggatccccttgaagcgtgacagctgcaat

SEQ ID NO: 214970 - DNA, 122 bp, Homo sapiens
gcatcccccaacttgatcccctgtctctttggctccaaaacctacactcagtcctgggagcgattagcgccaacagctcagagaaaacgtgacgaaaaccagtctgtaaaacccgagcctgg

SEQ ID NO: 214971 - DNA, 122 bp, Homo sapiens
cggtcgctaaagcccttcccacagactaggcacttgtaaggccgctcgcccgtgtgtgtgcgctggtgcttggtcaagtgggacgtcttgctgaagcctttgccacattcggggcaggtgta

SEQ ID NO: 214972 - DNA, 122 bp, Homo sapiens
tcagcacttggaaactgaccaaaagcataaaacaaactaagaaatgttcactcatgaaaacgactgaactttgggtaagaataccatgagtctctgtgattcacacctaggatcaactcccc

SEQ ID NO: 214973 - DNA, 122 bp, Homo sapiens
cagccggcgagatagcgcggctgattgatgagcagggatcgcgctgcgctggcaccaaagcgggtgggtgggtgggcgggcgggggggcggcggcggcccgcggtgccagggagctcgctgg

SEQ ID NO: 214974 - DNA, 122 bp, Homo sapiens
aaggtgctcaactcccaaatccaggacaaaggaggcagacggcctcctttgtaattctgccgcccggtggcgaagggttttaagccaggcttggctgctgacgggagggggaaggggcgtac

SEQ ID NO: 214975 - DNA, 122 bp, Homo sapiens
tcacagtgcctgactagagcaggcacttgttagatgctaccacagggatgcctcagccaacgggtggagagaggtttttaacagagagggagagagagagagagtgtgtgtgtgtgtgtgtg

SEQ ID NO: 214976 - DNA, 122 bp, Homo sapiens
tcccctcgccccaccccaccccgtgggctcccacgtgtccggagcctccccgacgggcgccgccccctgctccgtggcgcctgggcccatcgaccatccaagggctgaggggtgcaggtgcg

SEQ ID NO: 214977 - DNA, 122 bp, Homo sapiens
cggctcagcaggtccccggcttcgggaagttttgtgcgcggatcgctggtggggagggcgcgcgggccagtggctgagcttgcagcgaagtttccgtgaaggaaactgcatgtgcctttgga

SEQ ID NO: 214978 - DNA, 122 bp, Homo sapiens
agagagagagagagagagagagagagagaaagaaggggctaggccgggcacagtggcttacgcctgtaatcccaacactctgagaggccttggtgagtggatcacttaaggtcaggagttag

SEQ ID NO: 214979 - DNA, 122 bp, Homo sapiens
aactgtcaacaaaaacaagaatgaaaacaactgcttgacagcagatgagtctaataagcacgatgccaacactaaggttggttgactggacacatcctggacatggatggactgaggctcct

SEQ ID NO: 214980 - DNA, 122 bp, Homo sapiens
cgctgctgaatccaaggtcctaagctttggcacaaagcaactcttcttattcattcaacacgtctgtatggagccaaacatcgtgccaaattctgggactcagcagcaaagaagactctcag

SEQ ID NO: 214981 - DNA, 122 bp, Homo sapiens
aagtttcaaggtatgatttgaggggacactgagacggtagcaagcagtgaagccccatcccgctggtctgcaccgtgagctggccgcccctccccgtgtgtgcagggcaaacagctccggcc

SEQ ID NO: 214982 - DNA, 122 bp, Homo sapiens
aaaaggatattaatccatttgttgtttagaatttgttggtcaggattagagtaagcgtttcgtgtggctgtgactatggtcagtcagtttctgttcttgtgctgaagtggaatgaatcaatg

SEQ ID NO: 214983 - DNA, 122 bp, Homo sapiens
ctgcggggaccggctagggtctcacaccctccagggaatgaatggctgcgacatggggcccgacggacgcctcctccgcgggtatcaccagcacgcgtacgacggcaaggattacatctccc

SEQ ID NO: 214984 - DNA, 122 bp, Homo sapiens
ctggagagtcaacaacaaccagaaaggtttctgcccagagcaggcttcttaaggcctttacgaagttttgtgccttccaagtgctgaagaagacctggtcagcctaaatcttcccagtcccg

SEQ ID NO: 214985 - DNA, 122 bp, Homo sapiens
agtgtagggcattcctcactcccagaatcatactctctccccttctcctctaaagagaggcgagcaccttctacgcatcaggcactgggctagagacttcatatatatatatatatatatat

SEQ ID NO: 214986 - DNA, 122 bp, Homo sapiens
atctgcgcccggaattctccttgcccagctcggcttcagtccccttcagccataagatggcgactgtgctgacagccgggccccgggcgtcctgtcttccctccgcagtgactgtgcctgac

SEQ ID NO: 214987 - DNA, 122 bp, Homo sapiens
ggcgttgtgataaccaagctgcctttgtagaggatgcgtggacgcctcgccccacagctgcgtggggcccacagtggtgccccgagacgggcaccgtgtgaaaatggcagagcttccctctg

SEQ ID NO: 214988 - DNA, 122 bp, Homo sapiens
aactgcaaacgagtgttcctaaaccacagcagcaatgctccctggaggagggaaggaggccggggctgccactctcccaggtggctgcgtcccggcctttgccattgatgtgtgctttctcc

SEQ ID NO: 214989 - DNA, 122 bp, Homo sapiens
tctccggcgagctagatccccccgcccgcccggccgccagcctgcgcaggaacgcgctcgcggcatgcctcagccgcgacaccacctcgagccacccccacagggctcctacctccctgcaa

SEQ ID NO: 214990 - DNA, 122 bp, Homo sapiens
aaacaacggggccggccccctcaacagcgccgaaaagcgaaaccagaacccaggagccggcgcgctgcagggctttcagtcacccactgagagggactggcaagcctgagtggggagaccga

SEQ ID NO: 214991 - DNA, 122 bp, Homo sapiens
atgtctgcgtcttggagtggaacccagagctgctaagggggcggccaccaaaaccccaaccgtcaggccctgcgaaccctttcaaggcagcctcggcacacggacaaccgacaagggtcctg

SEQ ID NO: 214992 - DNA, 122 bp, Homo sapiens
cctcacccatccctcccagtttttccttccatcccgttacacgcttatcttctgcgcaggcgcaaaaataatcgtagcgcctcctgggccctgggggcttcagagctcctgcgcgcgcttgt

SEQ ID NO: 214993 - DNA, 122 bp, Homo sapiens
tccttccactgcacgtgccgctgtcctggaggacaggaagcagagccagggtgctgcgtacgtggctcttcagagggctcttcagtgtgcctccaagggcgcacagccgagttgagccgtct

SEQ ID NO: 214994 - DNA, 122 bp, Homo sapiens
cctgcatattgattaaatgcagcctctatttacctaaacaataaatgtagagattagcaacgttcacttgatcacaataatgggattgacaattaaggggcaatgcatcccagatgtagcgg

SEQ ID NO: 214995 - DNA, 122 bp, Homo sapiens
cccctgaatcatggtttcaagacccatggggggacctgcatttagaggatggtgaaacagcggccctcagaggctgcttcactgcatcaatcaatcaacccactaacaaatattaattgacc

SEQ ID NO: 214996 - DNA, 122 bp, Homo sapiens
accacttatcaagggttgtttctcccacgagaccttgtcacccctgagcctgaaatcgcgcgctgagaactaattgcagtagctgcatacacacagtgaacaaagttcactgctcccttcat

SEQ ID NO: 214997 - DNA, 122 bp, Homo sapiens
ctgaggggggcgcggcaagactccaagtagaagcggaccttgagaggcagccaggccaggcggcagccgcgcccggagggtgcggaatgaggagcgcaaggtgggcagagcgtgaaaccttc

SEQ ID NO: 214998 - DNA, 122 bp, Homo sapiens
gaactgagagagggtgcgggaggcggcgccctgagtcctgtgggctgccctcaacccagccggccagtggagggagtctgacttctcatgtcctgccgggttccactgatcggagggcttgg

SEQ ID NO: 214999 - DNA, 122 bp, Homo sapiens
ctttttctccctggtgcagggtgaacatgggattaggggagacaagaatgtctgctttttcgtccagacatgctgccttgctcttgcagctgaacagaccccagctgtatttgtaagttaag

SEQ ID NO: 215000 - DNA, 122 bp, Homo sapiens
gcaaagcgcaaaggcccgggcgccggccctgccgccgccgccagttcattttcatagagtcgcccgagcttaacgtcgccttgcacgtgttttctaagctccacaggtggctttggggtaca

SEQ ID NO: 215001 - DNA, 122 bp, Homo sapiens
gctgggccgaccccagagcggcgctggacaggtgagtgtctgcgggcccagggcgaggggcgaagccgcacctgggccaggtgtgcggggcgcgcggaagaggggaggcgggaaggatggga

SEQ ID NO: 215002 - DNA, 122 bp, Homo sapiens
cccgtccgccgcaggtggtcgtgagggaggtgccacagctccggctgcccacgacagacacgggcgccccagcgcgcgcacgtccggcgtcgctgcgccgcccccgccccctcggcgtgcgc

SEQ ID NO: 215003 - DNA, 122 bp, Homo sapiens
actatcgcagacggtgtaccctctcagtgatattattcgtaataaccaagggggagatgacgttactctcagtatcacgggggtgaaccgcctgtgaaatggttcataatatccaagctgga

SEQ ID NO: 215004 - DNA, 122 bp, Homo sapiens
ccccccgtcagcagcgggagaggctgtcgccatggcaacgccccctcctcggggccagcgcggcaggctccctccaggtgcaggccccgacgtctccctcggcctcagcaagcgctcagggc

SEQ ID NO: 215005 - DNA, 122 bp, Homo sapiens
ctcttcagctcacggcaccgggctgcaaccgaggtctgaatgttgcgaaagcgccccagacgccgccgctgctttccggccgccccctcggctacagccgccatttccacgctccaccaatc

SEQ ID NO: 215006 - DNA, 122 bp, Homo sapiens
gcggccagagactgcagctaccttagagagccgctctgaggagagctggcggctgcgccccgctatgcgctccgctccgtccccaaagagaaagaaaggctcgttaacagctccttcctgcc

SEQ ID NO: 215007 - DNA, 122 bp, Homo sapiens
cgtaagatatacctcgctgcagaggggagcaacagcggaacggagacacggtggccgggccgaaaacgtcacaaagccgcagagagcgggctctgtcccgcccgctccccaggtgggcgccc

SEQ ID NO: 215008 - DNA, 122 bp, Homo sapiens
ccggcgacgttcccagggcaagtgtgtcttgatgaccagctgggagtgtctctgtcgctgcgccctgtgcccgctgcctggggtctctggagacgcggctcccgcctccgcctccttccctg

SEQ ID NO: 215009 - DNA, 122 bp, Homo sapiens
tagcggggtttagggaggtgtggaagtccaggcaggcagtacctcggcgtgacgcggtgacgcagccgcaggcaggcagtacctcggcgtgacgcggtgacgcagccgcaggcaggcagtac

SEQ ID NO: 215010 - DNA, 122 bp, Homo sapiens
ccgctccccagcaccaggccgagcagcgcgctcagcccaccgggggcactggccgccacgcgcagcccacccggccggcccctgcgtctcggcagccggacaccttgcctaagaaaggcata

SEQ ID NO: 215011 - DNA, 122 bp, Homo sapiens
atccaagcctgtaggaccttaggtttattctggccagtattacctgctaaaaaagacctacgcttttggtttccctttggtcacttatttttataacacatgcagacgtattttggggaggt

SEQ ID NO: 215012 - DNA, 122 bp, Homo sapiens
tctttccagggggaggcccacagaagctggcctgggacaaagccatctctcagcaggtggcgcttctccccatctgcctcccagtcttgcgtggcagccactttgggacaaacagccctggg

SEQ ID NO: 215013 - DNA, 122 bp, Homo sapiens
ggggtaggaaaaaagatgcttcattgatcccccgcccactaactgggcccgcccatctcccgccaccccaatggctcatatggctgccgctcatttgatgagtctcatccattggttagaat

SEQ ID NO: 215014 - DNA, 122 bp, Homo sapiens
tccgcgcggcggggtccctgctcctgcgccccgggcgcgcttcccggacaccccggtccccgcagccaggacaaagccatgaagccagcgctgctggaagtgatgaggatgaacagaatctg

SEQ ID NO: 215015 - DNA, 122 bp, Homo sapiens
tatgttttgtgatcctcagtttttttgtatgctttctatattttagatgctgtgttatatcgttcacgttgatttttttattcatcaccaagtccttattagatgagcactactggatcaaa

SEQ ID NO: 215016 - DNA, 122 bp, Homo sapiens
caaagaacaggtaaagtgggcaaaattaggcgaggttagagcaaggcaagggtaaaaacgcgctggaaaggccctaagctgttggtttcccctcggtgtcgggagaaggttagtgttgaagg

SEQ ID NO: 215017 - DNA, 122 bp, Homo sapiens
atacttactcattctgcaaaacatttatttgaattcatattcccctatgatataatctatcgaaacagctaacaaatgagtagccaaatgagctgggttgttacttatttctttggctcagc

SEQ ID NO: 215018 - DNA, 122 bp, Homo sapiens
gatttggagaactctcagcatgcacacacgctaggatattcattggcctccacacatacccgaccacctggtcccctcagcttacttggtagcataacccatgctgagcatgcggttggtga

SEQ ID NO: 215019 - DNA, 122 bp, Homo sapiens
ctcctacctcagcctcctgaagtgtggagattacaggtgtgaaccatcatgcttagctgccgggtactgttaaaagcacttgatctgcattaactactcctaaggaatctgttttcttgatg

SEQ ID NO: 215020 - DNA, 122 bp, Homo sapiens
caaagtggccagccaacccaaccagctttctagtggggaaagattgtcacagcagttctgcggagacagaaggctggtggtagcagttgtattgtaattaaactttttattttgaaattatt

SEQ ID NO: 215021 - DNA, 122 bp, Homo sapiens
agaggtccgcgcagtgccgtgccccttcccgggaccagaatccttttccatagaggtccgcgcagtgctgtgccccttcccggggccagaatccttttccataaaagtccgcgcagtgctgt

SEQ ID NO: 215022 - DNA, 122 bp, Homo sapiens
tgggattacaggcgcgcaccaccaagcacagctaatttttgtattttttttaagtagagacggggtttcaccatgttgggcaggctcctgacctcgtgatccgcctgccttggcctcccaaa

SEQ ID NO: 215023 - DNA, 122 bp, Homo sapiens
agttagggaggactgtagacctggaacatgattctcagaaatgcatgtgaaaaacacattcgaatttgggagatttttttggagatagtgtggaacagtggaaaaagcagatcagctctgtg

SEQ ID NO: 215024 - DNA, 122 bp, Homo sapiens
cctactcaacattcagttttatgacacacatcaatcagcttgacagactgttttcaaatgcgcaacaggaggtcaacagtgaaagcacggagaggctcagcccatgagtgatggtggggccc

SEQ ID NO: 215025 - DNA, 122 bp, Homo sapiens
aaggatagtgtgggatgatgagggaccgtgtggaccggtgagcgactgtgtgggacagtgcgggacgatgagagacggtgtgggacggtgagggacagtgcgggacgatgagggacagtgag

SEQ ID NO: 215026 - DNA, 122 bp, Homo sapiens
cggcacagataaggaagtcacaagaacagcgaaagagaccagcggactttcttatcaaagcgtttggattcaactgtgaaaatggcagcccactcgggccccctctccgccacagagagctt

SEQ ID NO: 215027 - DNA, 122 bp, Homo sapiens
gagggagctgggaacagcttgccggcaaaaccttgccagcaaacacaagctcagaagagccggggtcgattttctgtcctgccatcattttgctgcgtgactttggccaaacctcagacctc

SEQ ID NO: 215028 - DNA, 122 bp, Homo sapiens
ctctagttgtatttggcttttccacaagcactctttaaactcaagcggctgaagtgctcccggctgaggaggatgctgttctgtgcaaacgccgagccattgatcatgttccgggttgtcca

SEQ ID NO: 215029 - DNA, 122 bp, Homo sapiens
aaaaagtgtcgaggcggggagtggcgggaagcggccgggagcggggcgggcgcagcagagcgggcgcggcgccgggagctggctcgtaaaagccgcgtcgagcggggaaattaccgccagaa

SEQ ID NO: 215030 - DNA, 122 bp, Homo sapiens
gagggaggcaggaagtgggtgggatgggcgtggaaatgaccagggcctcatcctgttcctcgcactgcctcctccgaaacaccagccctctggcggaggggcggtggggggaccgagctcgg

SEQ ID NO: 215031 - DNA, 122 bp, Homo sapiens
cccacagcggggaggtggggcttgtgaggaccctaatccagcgcttaggacccttaggctcgcagaggcgggacttgcagggaaagtgccccgactgccggacccccgcagggcggtcggga

SEQ ID NO: 215032 - DNA, 122 bp, Homo sapiens
ccggaacgcacccttcccgagccgggtcctgcgccaccggcgggcgggcgggagtcactgcgaatataggaagcaggggcgatttcaaatgctgctttattcttacaaatactgtaaaaatt

SEQ ID NO: 215033 - DNA, 122 bp, Homo sapiens
ctgtaagtttcctaaggtctcttcagccatgcttactgtacagcctgcctaattgtgagtcgattaaacctgttttcttataaattacccagtctcaggtagttctttatagcaatgtgaga

SEQ ID NO: 215034 - DNA, 122 bp, Homo sapiens
tgtgactctggatttaaaatctgttttgctttccttgcacccagtgcaagcatctaggtgcggcgttccaggcgcctcgcagggggtcgggtccccagccttctgtcccaccgttccgtccc

SEQ ID NO: 215035 - DNA, 122 bp, Homo sapiens
ccagggaagcgaagcccagctgttccttcggggtgtgtacttggaactgcatccaggtctcgcttagggtccccgcggcgaggcggagcagctaatttgagagcacaacaaataaacaagga

SEQ ID NO: 215036 - DNA, 122 bp, Homo sapiens
aattatacatctcaacagccctttctagtttgcagagctctctgaacattcagctcatttcgtcctcctgccacctggccctgggagctgcagctgcatctatgatgcccatctagactcca

SEQ ID NO: 215037 - DNA, 122 bp, Homo sapiens
agtgggcgggtgcacgcacgcgcgctgagatcgtgcgtgcacaggccggggtgcggccggcgtgagtacgcctgcgcgtgccgccatttcctgcagccgcagactctgcctgcggtgctcgc

SEQ ID NO: 215038 - DNA, 122 bp, Homo sapiens
aggaggaattgaagagcttttgagtaaaaaacgtgaaaagaagctcatgttcattgcctacgtggcttttaaaaaagactcttgaaaaacattccattgtgaattccaggtcctctttaaac

SEQ ID NO: 215039 - DNA, 122 bp, Homo sapiens
tggagttcacatctgtatgatgtgagagctctcactcttagccagggtgtcccactccctcgtgcgagcagctgtacctcttgtcatttgtccaggctttatttgtgtgtgacctttgtctc

SEQ ID NO: 215040 - DNA, 122 bp, Homo sapiens
ccccaaacccctacccatggcccccaataaatatttgcaggggatgccagggcttgtggccgtggcgggggtgggtatgcgccaaccctatttcaggcagcgctcaaagtaggtggagccga

SEQ ID NO: 215041 - DNA, 122 bp, Homo sapiens
agcactgtgccaggctgcatgtgagacacaaaaccagttaaagacatgcccgccgctctccgtgtatgacactaagcaccttcagtgtggccatgactcactgttggtgccaaggttccaag

SEQ ID NO: 215042 - DNA, 122 bp, Homo sapiens
ggttagagcagcgggagcgagggcccgccactttcggtcgaaagtcacttaggttcgcatcggatgcatcattggatccgggatcccacgggtttcataaacacctctctcctccctattca

SEQ ID NO: 215043 - DNA, 122 bp, Homo sapiens
acctgtacagtaagtcctcacttaacatcattgataggtgcttgtaaactgtgactttaacgaaaacataccgtgtgctgtagggacttaactcttgtttatatcagttagcctggtttcac

SEQ ID NO: 215044 - DNA, 122 bp, Homo sapiens
cccgctcatacacagcaggccagaaagacttccacgctgcacacaacgctcagagcagaacgtctgggaatcaatctatccaaatttgatttaatttatgtggaatttagagacctgagacc

SEQ ID NO: 215045 - DNA, 122 bp, Homo sapiens
tctgcatgacccatagttaacccagaccatacacagactactcaccacttgtcagggagtcgaacacgtgtttctgtggaccaaaccgatgacgtttctccgcacctaccaaagggaatcgg

SEQ ID NO: 215046 - DNA, 122 bp, Homo sapiens
gcgctgggctcttcccttcccggaggcgtggccagaagttccccttgggcctccggtcctcggggcgtaagggccacggtgtatttttgggatgaaaaccagtccttcccggggaggagccg

SEQ ID NO: 215047 - DNA, 122 bp, Homo sapiens
cccggcgcccgccgccaacttttgactttaggagtcgctgaggtctcgctgcgagggtcccgtctgcgctcggctgagcaacgccgccgcctgccgagagctgagccgctcgggccgcagga

SEQ ID NO: 215048 - DNA, 122 bp, Homo sapiens
ctggtttacatgtgaatgcacagcacggcaatttgttccaatgaggagccctgaggtttgcgccagccgctctcaggggtaagttttgtgccgagcaggatgttcaagacagactgcgcgcc

SEQ ID NO: 215049 - DNA, 122 bp, Homo sapiens
ttcttctttctgaattaccagctgctctgcgtctctgtctgctcttcctccgtgggaagtcgccgtcctggggcgctcgctctgtccccctcgcctcggaccaccaggcagagcagccccag

SEQ ID NO: 215050 - DNA, 122 bp, Homo sapiens
cccccgccggcccccaccgagcggagctctgcttcctcctcgccgcatccctgagggaagcgccgcctctgctcccgggttctccgcccgccgactccttcctggccggaccccgctgcgct

SEQ ID NO: 215051 - DNA, 122 bp, Homo sapiens
ggtgcgggatataatctcctggtgtgccgttttttaagcccgccggaaaagcgcagtattcgggtgggagtgacccgattttccaggtgccgaccatcacccctttctttgactcggaaagg

SEQ ID NO: 215052 - DNA, 122 bp, Homo sapiens
tgcactccagcctgggtgacacagcgagactctgtctaaaacaaaacaaaaaaaccacgtcgctgccttcacagggcttacagactggatcggttccctgtgcacacgtgggaagctgagaa

SEQ ID NO: 215053 - DNA, 122 bp, Homo sapiens
tcacacttaatgaaacagaccgtttacacttggaatggcctggagtaagttgatattcagcgtctacactcaaatatcaatcttggatttggaaatttggcttgaccactgtaaagtctggg

SEQ ID NO: 215054 - DNA, 122 bp, Homo sapiens
gtccgccttcattcctatgcactaaagcagcttaccaagcccgatgttctccacgtgactcgactctgcgttccatccacggaagaaagcgccaggctgcgtcctatttgcaaggcctattc

SEQ ID NO: 215055 - DNA, 122 bp, Homo sapiens
atccgagcgcaggaagagccccacgttgcccagcaggttgagcagctggaaggcggccagcgccagctgcaaggcccgggccaggggtcccagcggcggcggcccgggaccgagcaccagca

SEQ ID NO: 215056 - DNA, 122 bp, Homo sapiens
tcctctgggtcctggagtatttggcctgaaattgggaactcggaagttgctgctccagggcgctccctgcggagctccgccgcccgcctctccgcccggcctttcccggcgtccccacgcgg

SEQ ID NO: 215057 - DNA, 122 bp, Homo sapiens
aatacacaagcagttggctatccttcaggagtggtatccattcagacgcatgtccctatccgatatccacaatactgaatcaagttttcagttaaggataagatgacagtggtgcaaaatga

SEQ ID NO: 215058 - DNA, 122 bp, Homo sapiens
ggaagacccagagacccggaagagaggatgctgggctcgggtcccccgaccccctcaccccgcaacacactccccggccccgggcccggcccccggccacctacctggtggcgcgcgagttc

SEQ ID NO: 215059 - DNA, 122 bp, Homo sapiens
cagcccctgtctggaagaactgcaagttctgaggcctgaacaagaaatgtgtcctgttcccgtgctcctggctgcagctgggaagcttcttcagaaaggagacctcccggccctcaccggga

SEQ ID NO: 215060 - DNA, 122 bp, Homo sapiens
gcgagagaataaatatataaataaatacgagaacgaaatccactccgcagtctccgggctcggaaactttggccccgagcgccagagcgccagagcgcgagagcgcggcgctcgccactctg

SEQ ID NO: 215061 - DNA, 122 bp, Homo sapiens
gtggacacatgactcgcgtgaccttacccttacattggactttacattggagatgactcacgctccttaccctgccctcttgccttgtatacaataattatcagcgcggccaggcatttggg

SEQ ID NO: 215062 - DNA, 122 bp, Homo sapiens
atccctggcaatgtgatttgtgacaggaagcaaatcccatccccaggaaccccagccggccgtggcacaggggtgaggggggcaccgggcggggccagaggctggcacctggaggggagaaa

SEQ ID NO: 215063 - DNA, 122 bp, Homo sapiens
gggccagagcccggggagccgggtcacaggcagccttaggggggaaagtgagaagttagccggcagatgggctgctccacgcggccctataacctgatgcctccgaagaggggccctagcaa

SEQ ID NO: 215064 - DNA, 122 bp, Homo sapiens
tgccgtccgtcacccctttgtttgattaggaaagggaactgcctgaccccttgcgcttcccgagtgaggcaatgcctcaccctgcttcggctcgcacacagtgcacgcacccactgacctgc

SEQ ID NO: 215065 - DNA, 122 bp, Homo sapiens
gctgggactgcaggcatgcagcaccacgcccgctaattttttttagtagagacgtggtttcgtcacgttggccaggctggactcgagtgatcctcctgcctcagcctcccaaagtgttggga

SEQ ID NO: 215066 - DNA, 122 bp, Homo sapiens
ctgtgggatagtgtcgagaagaggctctcagaaggatgctgtattccttgccaaacaggtcgcttgttcctatggtggcttccagcacactcactctctggtccagtcttagacacagttta

SEQ ID NO: 215067 - DNA, 122 bp, Homo sapiens
tcagctgcacttcagcacttgtccttggccctccggctgcagcagatgcgcacatatgctcgcgcgcacgtgcacacacacatgcacacacacgcgcgcgcgcacacgcacacacacacaca

SEQ ID NO: 215068 - DNA, 122 bp, Homo sapiens
attggacgcttaccgtatactggccaccatgctaagcatgcatttactgcattcattcaacgtgtatttatgggggcatttactgtatataccgctgtatgcttcgtatataccggtcctgt

SEQ ID NO: 215069 - DNA, 122 bp, Homo sapiens
tgaacgtggacggacgagcccttgtttcagtagccaacacacacgggacagacagaccggcgtacacactcaatcctcagagcagagatcagagatcagggtaggtgcaacttgaaccagag

SEQ ID NO: 215070 - DNA, 122 bp, Homo sapiens
cgagtgcgacagtattggtcggcttccccaggaagcagccaatcggaataggcaagcttccggcgggaagtgagccagggcttggcgcggcggccgtggttgcggcgcgggaagtttggatc

SEQ ID NO: 215071 - DNA, 122 bp, Homo sapiens
ggattacaggtgtgagccaccatacctagccaagaaacccttatttgaaaacaagccaggcgcagtggctcatgcctataatcccagcactttgggaagccaaggcgggtggatcacttgac

SEQ ID NO: 215072 - DNA, 122 bp, Homo sapiens
ccacgcagcctcagcagaacaacgaggaactgcccacttacgaggaggccaaagcacagtcgcagttcttcagggggcagcagcagcagcaacagcagcagggggcggtgggccatggttac

SEQ ID NO: 215073 - DNA, 122 bp, Homo sapiens
gggagcggccagctccactactccgtctctgaggaggccaagcatggcaccttcgtgggccgcatcgcgcaggacctggggctggagctggcggagctggtgccgcgcctgttccgggtggc

SEQ ID NO: 215074 - DNA, 122 bp, Homo sapiens
gcgcgcgagaggcactggcgggcgggcttggcaccggcgggcgggcttggcaccggcaggcgggcttggcacccacgtgctgcccctgcacggccaggaccctgcacccccatcccccgccc

SEQ ID NO: 215075 - DNA, 122 bp, Homo sapiens
gcatttgtaaaactggaaacaatcaaaatgtccatcagtaggggattaggaacattaattcgtacagtggggaactcagtaccagaaggagggatgaggaagacctattgataaggggcaga

SEQ ID NO: 215076 - DNA, 122 bp, Homo sapiens
cagcaggcgtcctctaccctgctgtcgccaggttttaaacaatcgtttctgcggatggggcgctctttgcccacgttctgtgcggatcagcagttaggtggaaatgcggtagaggcagactt

SEQ ID NO: 215077 - DNA, 122 bp, Homo sapiens
ggcaaaccttggaaggcagcagtgtttcctggtcctcccaagtgggaggaaggggctccccggcaggtgagagaaggaaaatctcccactgctgtaattgctgcctcgggccgcgtgaccgc

SEQ ID NO: 215078 - DNA, 122 bp, Homo sapiens
ggtgagttaggtttgatatctttcactgtcatcatttccttacttataattttgcaaaggcggtttcaccttggcttcagccccacccatgcagtaacactgtgccctgtccttccaaccac

SEQ ID NO: 215079 - DNA, 122 bp, Homo sapiens
ctgcgcgttcccgggcccggaaccggcacacgatgcacccggctgcgttctgatcgccgccgcgcctcagcctctgccgcgatgatcccccctgagcagccgcagcagcagctgcagccgcc

SEQ ID NO: 215080 - DNA, 122 bp, Homo sapiens
gcagtcgccctctgtgtgcaggcagcagcctccgggaaacctctaagcccgcctgctctccgaacatctaagaaccaggaccagatgtccctgtggctgctgccgagccaggcggtccgccc

SEQ ID NO: 215081 - DNA, 122 bp, Homo sapiens
cgaggagatgaggcgtcttttaaggctcatgagagccttaaggagatgagaccgggatgccgtgatggtctcctctcccgctgaacctaatcccttcatacttagctgactgctagcgcggt

SEQ ID NO: 215082 - DNA, 122 bp, Homo sapiens
ttctcagcctgcacgcgggaggagttgtcaccctccctctgatggatggctcttctcggccgcccgccccccggtccattttcacctcggcacaagcctgcccccaaagacaggcagagtga

SEQ ID NO: 215083 - DNA, 122 bp, Homo sapiens
cgtccgccgcgcagttaggaaactgactgtcgctctctccggcctcggcgctgcttcggacgccccggcaccggcccccgttgctttgtagcattctgcagctgggctgcaggcgccgtggg

SEQ ID NO: 215084 - DNA, 122 bp, Homo sapiens
ttccacagaaaaactcctatgataaggtcaccaatgtcttctctttggccaaaacctcaacgattaactttcagaacttttctgaatcatctgacactgcttaccaaaccctccatttctga

SEQ ID NO: 215085 - DNA, 122 bp, Homo sapiens
aaatcccacagctattcagtttcaaagcgttcctagtgcccagctctcctaactcccagccggtgttccttgacgttatggtgatatataaagactttctgtttccgctcgtgttgtgtgtc

SEQ ID NO: 215086 - DNA, 122 bp, Homo sapiens
atgcttaactaactccagctgctgctgctgcttctactgggaacttactcagtgctcactcgctcgctgcgtggggcccaagtccccgggagaaacgggagcggaggatgggaggagggcac

SEQ ID NO: 215087 - DNA, 122 bp, Homo sapiens
ttcctcagaaagtctgaggaggggtcgggatctgcccgcgaaccccactttgaaaaacatcgctcaaggggctcacactcctcttccgaagcgggaagagccgggaggagctggggagccag

SEQ ID NO: 215088 - DNA, 122 bp, Homo sapiens
cgcggaaaccccgagggcgggtcaagggccaggtacccgagtgggagtggactctcgtgccggggtggtaggggctaccctagcggtccagggccagagcctgcacgcggcgcccccacccc

SEQ ID NO: 215089 - DNA, 122 bp, Homo sapiens
gagcccggacctcagcccgcaatgactcagcaagggccggtgggattctacatggtcctgcgatatccaggcgacggagtctcgcctctaaagtggcccggggagcaggaaggtatgagcct

SEQ ID NO: 215090 - DNA, 122 bp, Homo sapiens
tgataaactataaacatataattataaacggtactggagaaacttaatctgtcccactggcgacatactatcactattatgcccccgagagggttgatacatcagcaggtgttgcattctcc

SEQ ID NO: 215091 - DNA, 122 bp, Homo sapiens
gatctggtctggcagccgctgaccatcttctccaggcgcttgtccctcagcttgttcccacggaaattgatctccttgagcttggggcagtccgcaagctctgcagggatctcgctcagctg

SEQ ID NO: 215092 - DNA, 122 bp, Homo sapiens
agtgacccagcaacgcaaagcaacctgcccagagtcactcagcagccagtcggacaaagacgcaaacgctggcccagctgactccaggacccagctcagggcccaaatctgagatttctgaa

SEQ ID NO: 215093 - DNA, 122 bp, Homo sapiens
gcggcaaaaagccaaggcggcgagtgtgcaaaaagctgtgtcggcggtggggcaaaaagccgcggcggcgggtgtgtggcagaaagccgcggcgggcaaaaagccgcggcggcgaggggggc

SEQ ID NO: 215094 - DNA, 122 bp, Homo sapiens
gttgtcagcctccaactcctcctctagaattttctaacagatttacactcagagcctggtcgccccccgttagcccagattcaaaaggtgaacatctgtttgcagaatctgattcatgagaa

SEQ ID NO: 215095 - DNA, 122 bp, Homo sapiens
tcaaaggagcattcacaatggagctggcatccttttgcttcaaaatgagaaaaaatcacacgatcagctgcagttagacttaaggaaaaaagctgtctgttaattcaatctcattcgcagga

SEQ ID NO: 215096 - DNA, 122 bp, Homo sapiens
agagtctgctcttgttacctagattcgggcgcatttcggatttgactgtggatctttcaacgccagagggagtgcgtctcttaacactccccaaaatgtctctactgcgagtttccttccgc

SEQ ID NO: 215097 - DNA, 122 bp, Homo sapiens
tggtcaccctggcaaaggctaggactggaactggaacacagatctgctggccccaaagcccgtgtcccttttatttcctcagcagtcagcgaatgaaaggaagtaatgcatatgcttcagaa

SEQ ID NO: 215098 - DNA, 122 bp, Homo sapiens
aagctgagcttcccagggataccagaagggacactctcgtgcaattccggctagggaaagcgagggaaggtggcggctccgggcagggagcgagcgagtgctccacgccgcccgcaggatcg

SEQ ID NO: 215099 - DNA, 122 bp, Homo sapiens
gtggggaggtggcatttctggagaaggctccgtgggctattccctgaggctccttctctccgcaggtgtggcggaggccacgttccgcgagggtccccccgccgcgttcagcgggcacaacg

SEQ ID NO: 215100 - DNA, 122 bp, Homo sapiens
caatgatgttgacaataagctgggccacatcaccctgtccctagcgaaaggttatcacttcgctggggacatgagaaaggtcgggttgggggggccgtgcctgtctcccctctgctggagaa

SEQ ID NO: 215101 - DNA, 122 bp, Homo sapiens
gtgtgaacacccgaccgggccccgtaatcactctgggaaagcgccttcaacaaagccctccgaaagcaagtgctttactaagtgccccttgaggctactggcagtgcgaggctggctgtcat

SEQ ID NO: 215102 - DNA, 122 bp, Homo sapiens
cctactcaagaagttaaacaaactcaaagtcaatgaattgttctattttaagaataaagacgtaagagttcttttaatgagaactcaggagacttacagcatcatgcagctaaattcaacca

SEQ ID NO: 215103 - DNA, 122 bp, Homo sapiens
gcttcccccgcaccacacggagcggctgcctacagctttgttaggggctgaatgcaaccccgatgcaggcaccagccctccagagcagcctccatggaggaatgcggttccccactctgccc

SEQ ID NO: 215104 - DNA, 122 bp, Homo sapiens
agccggcgagaaagccctgctcctcacaaattgccttgtcggctcggagaaaaatgccagcgtgactgattgctaggtgggtccctccaagtgcgcgggaaggaaccggcacgaccgcacaa

SEQ ID NO: 215105 - DNA, 122 bp, Homo sapiens
acttccgcccgggaatcatgtgagtgcgggggcgaccggggcaggagggagccgtggaggcggtgccttggctggggcagtcttgggatggccatcgtccacatccctgaatggggcaagcc

SEQ ID NO: 215106 - DNA, 122 bp, Homo sapiens
cccgcatctgagaggcgcagctgcctccacccgcctagtcccgcccaagggttcaatgagcgcctactgtgtacttttggggcaggagctggggtctccttttgtggcccagggcacaagtt

SEQ ID NO: 215107 - DNA, 122 bp, Homo sapiens
agtcctgtttttgagaacttacttcggtcttgattagttcctttcaaagtttattttacacgattcagaggcaacacttacatctcttttttttttttttttttttttttttaagagaaaga

SEQ ID NO: 215108 - DNA, 122 bp, Homo sapiens
acagttccacgtggctggggaggcctcagaatcatggcgggaggcgaaaggcgtttcttacgcagcagcagcaagagaaaataaggagcaagcaaacgtggaaactcccgataaacccatta

SEQ ID NO: 215109 - DNA, 122 bp, Homo sapiens
gttgtgaggctcagatgccatcatgcaatcatggcaggcacacgggggcccctcttcaaacgtctgtgcgcttcccttgtgccccgccctggcacacagccgcccccgcggagcccagggat

SEQ ID NO: 215110 - DNA, 122 bp, Homo sapiens
tattcacaatagccaaaaagtagaaacaacccgcgtctgccaacagacgaatcaacaaaacgtagtccatccactcaatgtagtatcattcactttataaatttatactttataaattccta

SEQ ID NO: 215111 - DNA, 122 bp, Homo sapiens
caaagagtgtggtgcacgccttccgcttgaccgctctccagacgccacagggaggcacctcgcagctgaccacagatttctctctgtggagcagtgtcttcagagcggctgccatgccactg

SEQ ID NO: 215112 - DNA, 122 bp, Homo sapiens
tccctatctgtaaatgagggcgactagatgggtgcggactgtcatccgtgttgagacttccggcccccgcagaatcaaccttaccggcgggagcacctcgaggggacgccgctcgcactagg

SEQ ID NO: 215113 - DNA, 122 bp, Homo sapiens
tgaagacagctgaatgttggtttgggcaacagggccctggagattgccttcctgaagacacggcagatcccaaagccagcttgtggggagcccaccggtgtggggtaaccaggttgcatcaa

SEQ ID NO: 215114 - DNA, 122 bp, Homo sapiens
gaaatgtggaaagcagacctaccttattatgacagaagaaaaggaatttatttgaaaatgcgtaataaaatctgatgaatatgtggcagtgttgccacaacaccttatggtttgttattgtt

SEQ ID NO: 215115 - DNA, 122 bp, Homo sapiens
tttcttagggtaggggatgtagctcagtggtagagcgcatgcttcgcatgtatgaggtcccgggttcgatccccggcatctccaagttgttttatcctatctgcccaatactattagaaact

SEQ ID NO: 215116 - DNA, 122 bp, Homo sapiens
agtcagcggggaggggtgggggagggtggattgtcccagttctgccaggcgtaaaccaggcgactgtggccaagaggctggccctccctgtccatttcatcactttgatcgctcgggtcctc

SEQ ID NO: 215117 - DNA, 122 bp, Homo sapiens
actcgcgccgcccgccctccctcccggcggcgccaactgtcagacactcctcccccggcccgggctgcccgccccggaagcatcctctcaccgccggaagctgaactgactcgtccgcggcc

SEQ ID NO: 215118 - DNA, 122 bp, Homo sapiens
cctggcgatggaaccggccctccccggccctgctcccggtcctgcttgccgggcccacctcgcagctggtggacaccgcagttcccagaaaaatagaaccatgagaagattttactgttgta

SEQ ID NO: 215119 - DNA, 122 bp, Homo sapiens
gatatatgcgtatgcaaatgtctgataaaatgagttctgggaacccagcactgaatcgtgcgcgctggaaagacgggcggccagggagtggcgggggagtttggctgcgtccccagatgccg

SEQ ID NO: 215120 - DNA, 122 bp, Homo sapiens
cgctggcccctgaaggagcaggtgatggtgctgtcttcgcccagcagctgtgggagcaggcgggtggggcaggatggaggggtgggtggggtgggtggagccagggcccacttcctttcccc

SEQ ID NO: 215121 - DNA, 122 bp, Homo sapiens
ctgggtggacctgccctcctctatgggcctcactgtctccccctttaaaagggcactgctcgttgttttcccacacttgtcatgctgttgggtgtattattttagttttgcagtagaccaca

SEQ ID NO: 215122 - DNA, 122 bp, Homo sapiens
tgtttcctcatcctcccctgccccctattcgaggggggaaaggttagatttagaactaagcgtgtgggaagagtaagtagttgataaaacagaagaacacatctgatgttactaaaatgcac

SEQ ID NO: 215123 - DNA, 122 bp, Homo sapiens
ttgggtaacccttgctcaacacttgggaaatggggagaatctcccccacccgcaacctcccgcaccccaggttcccaaaatctgaatctgtatcctagagtggaggcagcgtctagaaagca

SEQ ID NO: 215124 - DNA, 122 bp, Homo sapiens
cccccagctctctccctttttcctcaggaacccaggggtccaggcccaagaccctcctcccgttttcttccaggaagcctccatctcaaaggcaagctcatttttgggggagaaagcaagtg

SEQ ID NO: 215125 - DNA, 122 bp, Homo sapiens
cgggggcggggggcggggttagcgcagtgcctggacacgcccactgccccgaggaggccccgcccacaatctccgggccagcctgcagggaggacccgcaatcttagagccaggtgccacgc

SEQ ID NO: 215126 - DNA, 122 bp, Homo sapiens
aataatttacgtgatatcaataataataccttggtatctagcatctcatttgacctttcccggagctctgtgaggatatttttatccactgcagatggggttatttgtgtagtgatagaaat

SEQ ID NO: 215127 - DNA, 122 bp, Homo sapiens
taaatttttgtgaagcgcttgcttacgtagctgcggagcgagcctctgcttcattacgagcggcatagcctttttcaggagtgatttccactttctttgtgagagagttgaccacacggccg

SEQ ID NO: 215128 - DNA, 122 bp, Homo sapiens
gagtggtcggaagagcaagccgcggcggcggagagaaaagtccaggagaacagtatccagcgggtgtgccaggagaaacaaggtgcgcttaaatgggctctcgttggtatcaacagccagcg

SEQ ID NO: 215129 - DNA, 122 bp, Homo sapiens
ccgccccccagagaaaggtctgtgatggggtgattctgcttggaaaggttgccaggaaaccgcgagcataacgcagaaagataaaacgaaagccctaaacgccgccgtgggaatttaagtcc

SEQ ID NO: 215130 - DNA, 122 bp, Homo sapiens
aaaactattctgtgtgcccccagctctggccaccaggctgcccctcaggccgatgggcagcggctgacttcgggaaggcagcccttcattatcagagactgtgcagcctgtggagccttcac

SEQ ID NO: 215131 - DNA, 122 bp, Homo sapiens
ctctgggcttgttttcagcttatttaattcacactgaaatgtttctgcgcgggacgaactcggtgtcaccgggtccctcccggagggttacttcctgcccccgacagtgtaatgaggcaaga

SEQ ID NO: 215132 - DNA, 122 bp, Homo sapiens
aaggaagtgtgtgcacacgcagacagcctgggagggcagtgaggtggagtcactgcaactcggtgccagcaagtcaggagacattactgctggaagtatccacagttagctctgacttaggg

SEQ ID NO: 215133 - DNA, 122 bp, Homo sapiens
tggacccggcaggtggcggttgcagtaagccgagatcacaccactgcactccagcctaggcgacggatcaagactgtatttcaaaaagaaagaaagaaagaaagaaaatgaaaaaagaaatg

SEQ ID NO: 215134 - DNA, 122 bp, Homo sapiens
attaacttttaaatggagcctgcttcttagttgcttttgtacactgccccagctgatgcccgaggccattgttgatgatgacatttgcatgtctaatattaggcacagtgtcctactgggat

SEQ ID NO: 215135 - DNA, 122 bp, Homo sapiens
ggcccccacgtacttcttgatcgagcctaaattcagccagctggcggccctggactgctgcggcacctgcagcccctcgcccagggcgccctccggcggcagcagcacccacacgaggccgg

SEQ ID NO: 215136 - DNA, 122 bp, Homo sapiens
gccctgtaatctcagcacaaccagaaattaaagtggcagttttgggaggacgcagtcaaacggctttctacagcacctcctcgtatcgtgggttacagaacctacgtcgtcctcggaatccc

SEQ ID NO: 215137 - DNA, 122 bp, Homo sapiens
ttttttctggctgttttggtcctgtctgaattctctcctgtctttctgacctggtgcctccgtactctgccccctttccctccctcatctttcccagcaaccatgacagcctggagatccct

SEQ ID NO: 215138 - DNA, 122 bp, Homo sapiens
gaactcctgaccttcaggtgatccacccaccttggcctcccaaagtgttagaattacaggcgtgagccactatgcccagccttagctttaagttccaaagataagtgtgacatatcacaatg

SEQ ID NO: 215139 - DNA, 122 bp, Homo sapiens
gtggaatccagcgtgtcctccaactctgttttcagagcctctagctcttccccaaggtcccgtttctgcttctcagctttattcctggaagcacgctcagactccaggtcttcctggagttc

SEQ ID NO: 215140 - DNA, 122 bp, Homo sapiens
cacccgggactttgctgcattccaagtgtagcgtttggagactaacgagttgtggtttggcggtttgagtctggaaaatcgccaaacgttttcatattttacacccacgttttcacagcacg

SEQ ID NO: 215141 - DNA, 122 bp, Homo sapiens
agaatccggctggcccgagtgaggcggtccaaagtgatccctggagggggcagtgccagacgttttggggtccccttcctcagcgtcgcagctcacagctttcctcctggagaaacgccccc

SEQ ID NO: 215142 - DNA, 122 bp, Homo sapiens
caggcccgtccttgttctgactcctgagaaagggaaagagagggtaaaccaggagccccacggtctgtcagcctaagcccctgatgtaaagagttcacatcatttttgcttaatttctcctg

SEQ ID NO: 215143 - DNA, 122 bp, Homo sapiens
ttaactaatagattatatggactgccttaagcaactgtataatttctgttaggatgaaaccgaaccatgttgggaattctgatttaaaatgaggtctgtactttatagatgtggaaaataag

SEQ ID NO: 215144 - DNA, 122 bp, Homo sapiens
gggattcctccagcttccttggcacccagaaatggagcgtcaaggagggtcttcagaactcggccttctgctcgaggtgctgccagggaggggggtggagttaggggtcctacggccccgaa

SEQ ID NO: 215145 - DNA, 122 bp, Homo sapiens
tacaggagcacaggagcctgggaggcggccgggggaccctccgtggaggagcctgtcccgcgccggcgagcagccccgggggcgcaggctcccccatcccctgcggcaccggaaggggcggg

SEQ ID NO: 215146 - DNA, 122 bp, Homo sapiens
cttaatttttatcttaaaatttttttaaaaaacaacatttagaccttgctctttttttaccgctgaagatcaaacttcggtttcttcatctaggcaacaggggtgcatgtgtgaggggagaa

SEQ ID NO: 215147 - DNA, 122 bp, Homo sapiens
aatattatccaccttgtagagtagtcataattttctgttcttcaataaagggatgaagcacgcactgtgattcttaagacacatcttagtgtataagaatccagatctgccgtagggcatgc

SEQ ID NO: 215148 - DNA, 122 bp, Homo sapiens
ccggggctccttcctctccgccggtacccggatgcacttcccgcgtgggggatcagcacccggacctgacccctcgtgctggttcgatccaaacaacatctgcggtggaggtgagggcgagc

SEQ ID NO: 215149 - DNA, 122 bp, Homo sapiens
gaaagaagctgaggactggatgtgcggaaaccaggtcagaggggcaggcaacagagtgggcgggaaggcggccgggagcgctatacgggtctagggaatcagtaggaagccggaggcgcggc

SEQ ID NO: 215150 - DNA, 122 bp, Homo sapiens
gcccccaaggtcacacagctagtaaaaaatgggccacggtcaaactcagtcctggagttgcggagaggagccaattattggtctaattgtgccatttgaaatcctgattttcacatactgtc

SEQ ID NO: 215151 - DNA, 122 bp, Homo sapiens
gaccccgggacgctcccgcctcccctcggaaagaggacggagatgcagattctccccgagcgttggtttgggagtctggactcttaggtccagtcccagcccagtgatttgttgggaggccc

SEQ ID NO: 215152 - DNA, 122 bp, Homo sapiens
gaaggcagggcgtctctatctcaaagcattggctgcgcctgttacctgcgacaggattcccgacaagggacgggtacggcgtgtgcactcaggagctcctagagctaggggcagcaactaag

SEQ ID NO: 215153 - DNA, 122 bp, Homo sapiens
atgtagccacaaggaaggaagaagagaccccacaaaacactcccaacagctctttgcctccggtcaccccaaagagaggccgttctgccttttaagatgaagggaaacaaggccgggcgcgg

SEQ ID NO: 215154 - DNA, 122 bp, Homo sapiens
ctgcgttgcccgcatccaggccctgcggcaggccctgtgctagcgtgttcgcaccaggaacgcaggtgctgggctgtcggggaggcctcaggccacctccaggaacagaacacagttttaag

SEQ ID NO: 215155 - DNA, 122 bp, Homo sapiens
ggccatcagactaggagcccgggacccctcagaggccgcaggcgctattcggtggtcaagcggtcaagggcagcctacccccactgcccaagataggcaggaaggaggctggacacaccctc

SEQ ID NO: 215156 - DNA, 122 bp, Homo sapiens
acacagccgcttactgtgggaagagcgatcacagcgtgctctgaggccaggggctgcacccgactcggccccctaacaaacccagggtcagatgccagcggagcacggcaggcaggggacgg

SEQ ID NO: 215157 - DNA, 122 bp, Homo sapiens
ttaggtgctcctgccccaccctcttctctacctcagcccagcctctcaaacaccttgatccgcagacgcccccaggttggtaaaccgactgaacaagagggaagaggcaagttccgtgggtc

SEQ ID NO: 215158 - DNA, 122 bp, Homo sapiens
agggcagcggcagcaggtgccggcgctggggcaggactgggaggagtctcactctgggggcgcctggttccccgtggctctaatacttgccgcatcaaatgcatacacccacatttaggacc

SEQ ID NO: 215159 - DNA, 122 bp, Homo sapiens
atggcggggagctccagttcagagccggaactccggacttctgcaaggccagacgtgaggcgacactgaattgctcccgagacgcgggaagggcgaaggcaatcgaagcgaagagctttaac

SEQ ID NO: 215160 - DNA, 122 bp, Homo sapiens
cttccccttcagcctttctccttgaaatagacagtgactcacatggaacaatgacgtgatcgcaggaatatgcccggggctgacagccagacctgcaggtcttggggtgtgggtggggtgcc

SEQ ID NO: 215161 - DNA, 122 bp, Homo sapiens
acacacacagacacacacaacacacacatacacgatgccctttttagcttggggtttcctcgccaggaaaatttctgaacattgttttataaacattgtaggctgtaagacacagtcataaa

SEQ ID NO: 215162 - DNA, 122 bp, Homo sapiens
aagttacggtccttggttggaatgcccaggctgtggcctcgggggcggggccgggagatgcgtgacgtcaccgccgggatgaccctgtggggtcgagggtctggaaggggaaggaccaggtg

SEQ ID NO: 215163 - DNA, 122 bp, Homo sapiens
cccctctgcagaggcagaggccaacggggagaagccctttctgctgcgggcattgcagatcgcgctggtggtctccctctactgggtcacctccatctccatggtgttccttaataagtacc

SEQ ID NO: 215164 - DNA, 122 bp, Homo sapiens
gatgatgtttgcttggctgctaacttgataataagaatgttagcctttggcttcattttacgtgaatacagggagttccaccacaaagtgggtaggattatgtcccctaaaaatatagttta

SEQ ID NO: 215165 - DNA, 122 bp, Homo sapiens
tgagctggcgctcccggctcacggtggcggctgcgttgctggcgatgcatgtatagttgccgttgtgcttgagggagacgctagagatctgcagggagctcatgaattccttgctctcgatg

SEQ ID NO: 215166 - DNA, 122 bp, Homo sapiens
atggaaacctttgagaatctgataaaaactgtgaacccttaaggtccctttgtaaacccacgcttcatgattgacaggtaagagacctttgagctggggcatgtaagatggggagtggggtc

SEQ ID NO: 215167 - DNA, 122 bp, Homo sapiens
agaactgaagaacaacaaccaagaatacctggatttaaaacctatactcctggccaggcacggtggctcacgcctgtaatcccagcatgttgggaggccgaggcgggtggatcacaaggtca

SEQ ID NO: 215168 - DNA, 122 bp, Homo sapiens
tctgtcaaaatgaatagaaacccaagaatcatttctgtgtgccacaggagtgctctcccccggcccccccgccccaccccgccacacacacacacatacactcctggtgctgagataatttc

SEQ ID NO: 215169 - DNA, 122 bp, Homo sapiens
ccagggagtgtctggtgctgtccatccccccgtggatgagataggctcccgcgctggagacgatggggctccccccgacatccatggtgatgcccaccatgctgtgggaggggaccgctggc

SEQ ID NO: 215170 - DNA, 122 bp, Homo sapiens
tcgcaagagcgctccggccacgggcggcgtgaagaagccccatcgctaccgccctggcaccgtggctctgcgcgagatccgtcgctaccagaagtctaccgagcttctaatccggaagctgc

SEQ ID NO: 215171 - DNA, 122 bp, Homo sapiens
ttcatccattcagccagtgcggtatttctgaggtgtgttcgatcgcggatccatgcctgccgcagtacagttgtgagccaaatgagactgagactagttcccgccctccaagagcttgcaag

SEQ ID NO: 215172 - DNA, 122 bp, Homo sapiens
ctgcctgtgtggtgtcgcgccttctcccccccggggctgggttggcgcaccctcccctcccgtctactcattccccggggcgtttctttgccgatttttgaatgtgattttaaagagtgaaa

SEQ ID NO: 215173 - DNA, 122 bp, Homo sapiens
gctccctccttccctctccaccctcctcctcccccgccccctcccgccccgcccgcgcgccgcccgctcgcagccactcgcagcccaggctcagtcgcagcccctcggagtccggagcccgc

SEQ ID NO: 215174 - DNA, 122 bp, Homo sapiens
tgctcctaccttgctatgtcacagttttctaacaaaccagagcctgttcccccaggtgaacgtgtgggaaggagaacagcccgagcgaggaggcccccggagcattcctgaccagctgggga

SEQ ID NO: 215175 - DNA, 122 bp, Homo sapiens
taaagcgagtcaaggcctgagtggcaggagggcgaggccgggaccaatcccaggaggaggcggtgtctgccacgacagaaaatgagtgtctgccccttgccggggctcacgcccctaactcc

SEQ ID NO: 215176 - DNA, 122 bp, Homo sapiens
cagctccgccctcctccagggcgacactccccggcagcgggctgagaaggctcaggacaccgagctggccgcctacctggagaaccggcagcactaccagatgatccagcgggaggaccagg

SEQ ID NO: 215177 - DNA, 122 bp, Homo sapiens
catgggccaggctgcccccctgcttacgatccccagactcagacaggcgggggccgcgggcgcctccgaagggtacgtgtcacgaaatgcaggagcacacttcccccgcctccctctcccca

SEQ ID NO: 215178 - DNA, 122 bp, Homo sapiens
ccctcatggctgtgtctcctggtggcacacagggccaggctgtaaggccagcgggacaagcgtgaggaacagaaacagtgccagcaacacccccagggccacagcaccactagcagaccctg

SEQ ID NO: 215179 - DNA, 122 bp, Homo sapiens
ggcacgtgatccccgcgcgcagaggaaggtgggcgcgcgccgacgcagctgcctggggaacgcctgtgaggcagtctccgggtgcttgatgccccagggtcttttgtcctcggagttgtctc

SEQ ID NO: 215180 - DNA, 122 bp, Homo sapiens
tccaggaaagacacatggcaggatgagagtgtgaaaaatgaacactgagcactacgggaacgtcggatcataacgatgacgaaggaaagggcgaatccctccaatggagtctgctgcatgga

SEQ ID NO: 215181 - DNA, 122 bp, Homo sapiens
cggcagcttggggctggggtttaaaatagcgccttggcctggctaggacctgcccgggatcgggttcgggtcacccgcaaggcagtgtggccaccaccatccggctcgggtttcttgccttc

SEQ ID NO: 215182 - DNA, 122 bp, Homo sapiens
gggaggcattctccctgcaggaatgttctcgatcacagtccaccaccacccccctacccccgcccacttttggagtccatcttcgcagcccttgatgattcattttatgtcagcttgacggg

SEQ ID NO: 215183 - DNA, 122 bp, Homo sapiens
gagattttagtcgaaaatatgttttcttttacatagcagaatgcacgagtaaattaaacccgggaaaatttagaaacccaggtagatcccaattctccctccacccctgcattctttgcaca

SEQ ID NO: 215184 - DNA, 122 bp, Homo sapiens
atagatgccctttatttctttttttttttttttttggacttattgctctagctgggacttcgagtactgtgctgaacaacagtggtaaaagtgggcattcttattgtgttccagatcttaca

SEQ ID NO: 215185 - DNA, 122 bp, Homo sapiens
tgagagtctctctgagcaacccaaacagaaggtactgctgtgggtcccccacttggcacgcgacggcgctgggtcggcctggcgcgccctcccgcgcccacgggcgctaggctaggtctgtg

SEQ ID NO: 215186 - DNA, 122 bp, Homo sapiens
gcggccatgcgtgtagccctccccggtatgtttttgtgcacagagttggcgccagggcagcgccccagaccccagtcctggctggacaataaatgaccggacagctgcggccgctacaaagg

SEQ ID NO: 215187 - DNA, 122 bp, Homo sapiens
atatatgatatatatatactatatatagcatatagtgttctaagtgccccacggggtttccgctaggttcccacagccacctctgcctccccctccctgcctctatcatgacacagtggagt

SEQ ID NO: 215188 - DNA, 122 bp, Homo sapiens
gaaagctggttgttaaacatttaccagcactctacggcagaaagatgcgtgtcgacagaacgtgagcaacatttaacacgcacatggaagcctgttccgcctgtacagatgtgtgctgtgcc

SEQ ID NO: 215189 - DNA, 122 bp, Homo sapiens
cgtctcgtgagacgtgggacttctcgcgggaactgcattcaaatatcccaggcgcttactcgagagctagctgagcgaatgggccggcgactgtggagttagcgtcctcaatgtggacgccc

SEQ ID NO: 215190 - DNA, 122 bp, Homo sapiens
agctgtaatctgttctgggcaggaagaggctctcagcgacaccctcagtgaccagctccccgttgcacagccacgtgacgttgagcactggtgggaagaacttgtcaatgtggcagatgagg

SEQ ID NO: 215191 - DNA, 122 bp, Homo sapiens
gcgagaggaggacgggagacgcggctccacctcccagctcaaaacggcgtcccagctgctcgcaaaccaactgctcgattctattcactgtcgagtaggaacaaaaaagtggctatttatta

SEQ ID NO: 215192 - DNA, 122 bp, Homo sapiens
caggggcctccaagctgggacgcagcccttactctcagggtcagcgccggctgggaaggccgcgacctaaccaggagattacgaacaatgtcaccagggccacagcggagctcctgccaagt

SEQ ID NO: 215193 - DNA, 122 bp, Homo sapiens
agcttcactcgtgaagccatcgagaccacgaacccaccgggaggaatgaacaactccagacgcactgccttaagagctctcacactcacttcgaaggtctgcagcttcagtactgtgctagc

SEQ ID NO: 215194 - DNA, 122 bp, Homo sapiens
caataactggaagaaaacaaaatgtccgtcggcaggagcaggagaaggcgtgaactaacgcggatgcttccacacagggggcaccaaccagcagtggaaagatgcacccaaatgccccaggt

SEQ ID NO: 215195 - DNA, 122 bp, Homo sapiens
gggcgcaggaccccagccccggatcacctgggctcgccgcgcatcgtccttctccccaaccgagccggactccacgggctcaacagcccccagccccggtggtccccgctgccctgcccgct

SEQ ID NO: 215196 - DNA, 122 bp, Homo sapiens
gccaacattctttctgaagttagcacagaatgttcatttcagaaaggcgaacagccaattcggaaaagccaagtagtcaggaattccatgtctgcctctgacagaaagaaaacattcctagt

SEQ ID NO: 215197 - DNA, 122 bp, Homo sapiens
ctacctagaaagctccagtctgtggaggagtttcaaggtgttcccgagtgtggtcaaatgcgacaatcatctgtaacttatcaaacccacaagaccatgtttccctgtggggaccaactcct

SEQ ID NO: 215198 - DNA, 122 bp, Homo sapiens
aacgctgggccctgcggggcaggtccacgggacagacagacataccaatactctgctgctcggactcaaccctgtgtcccagaggactgaagtggcaggagcaacacagaagggggccgggg

SEQ ID NO: 215199 - DNA, 122 bp, Homo sapiens
tttctccaaactttgactccagacacctccggaagacttgactgaacttccagtctcctccggtgttctgtaactggctttcaatctgtttttttgtttgtttgtgttttgtttttacaaat

SEQ ID NO: 215200 - DNA, 122 bp, Homo sapiens
ctttatgtttggctgttggaaaattctgctagtcctaatttagagaaagacttactgaaacgctatgggcaaaagagaccttcccaaaattatcttagacgtacaggaaacccagtgggcac

SEQ ID NO: 215201 - DNA, 122 bp, Homo sapiens
ataagagacggggctaggttgcctttcctcctttgaaccccctggtgcagccggagcccgcgccccttaaagtgatctccagttgtccgaaaggcccgccagggatctggcgaaacgggggc

SEQ ID NO: 215202 - DNA, 122 bp, Homo sapiens
cttcttcaccgaccagtcttcacgggaccccctggaggacggcgatgagctgctggcggacgagcaggccgaggtggagttccttagccaccagctccacgagtactgctaccgcgacgggg

SEQ ID NO: 215203 - DNA, 122 bp, Homo sapiens
tggttagaatatagattttgtgctcagacatacaaaactttgtttgaattctggcagtatcgttgactagctgtgtgaccttggtgatatggtttggatgcttgtcccctccaaatctcatg

SEQ ID NO: 215204 - DNA, 122 bp, Homo sapiens
tcccaggctcagtcgagcgccaccccctccacaaagtggtaggattatttgcgtgagccacggagccctgcggagactctggttttactttctgctcacctaagaagctcctgctgtgtccc

SEQ ID NO: 215205 - DNA, 122 bp, Homo sapiens
acgggggacagccagggcagaaaggacagggacaacgagaggctacttggagaggagggccgagtgtgatgctcagaagcacacctccgcgttgtgtctgctgcccctgccgactcagcccc

SEQ ID NO: 215206 - DNA, 122 bp, Homo sapiens
accccccaggtgatgagtgaggttcgaagaacggaagatttaaaaagcagccggggcctccgtattgaatgaaagacccagtgcaaagacatcaccatgaacactagcagtaagtggatcct

SEQ ID NO: 215207 - DNA, 122 bp, Homo sapiens
tggtttcagattccatattgcaactaacctttaagaagtcagcacctgttagtggaaccgcgactgctccgcagagctgctggtatgagcgcccgtcgccaccccacatcccaggcccagcc

SEQ ID NO: 215208 - DNA, 122 bp, Homo sapiens
cttgccaaggatggctccaagcagctgggccatgtagcctgaacgcagcagagggttggacgccttagagccagctgtgggcaccacagcccgaccagggaggcagcgggtctccccaggtt

SEQ ID NO: 215209 - DNA, 122 bp, Homo sapiens
gaggcggcacggggtgcgtctgggcccgtctgggggacgcaaagatcccggtgcctcggccgtggctccaggccccaggacagaccagggaagaaacctccaaactgcggatagttcccaaa

SEQ ID NO: 215210 - DNA, 122 bp, Homo sapiens
tgtgggcgtctaataaatgcagtcggccctgcttggtctaaaactctcccttgagtggaccggacactaaacccctccaggggtcacagctgccgctcccgccgccactttgctccttgcct

SEQ ID NO: 215211 - DNA, 122 bp, Homo sapiens
accttttccaaaatttccaatccccgcttggcattttctgcccgaaggtctccgattggacgctctgtaccaatcggaggctggagcgggccctgagaggcgcccgactccgcccccgcact

SEQ ID NO: 215212 - DNA, 122 bp, Homo sapiens
ggttgggggtgtgtgcatttttgtcagggccaaagggccaccctggcttctctctggctccgcgagcctgcggatccacaacaaacccacgtgcgcacagccccggggaacacggatttctc

SEQ ID NO: 215213 - DNA, 122 bp, Homo sapiens
atcctattcaaccctgagagctctcctgagtaaccggtgctcatccgtacacccctcctacgacagacagctttcggccttctggggagctggaagcatgaccatcaggagcctcgtgctta

SEQ ID NO: 215214 - DNA, 122 bp, Homo sapiens
aaagcacccggcagagctctcgcctccttccctgtgattgccagtgtccagatgcgcagtcggtcagccctgggactgcccgagtgttgcctgcactcggcagccgtgacccagagctcagc

SEQ ID NO: 215215 - DNA, 122 bp, Homo sapiens
gcctattcgctgcacaaactgtgccctatgtgtgcccaaggacaaacccattaagaaattcgtctctcgaaacatagtggagaccgcagcagtcagggacatttctgaagcgagcgtcttcg

SEQ ID NO: 215216 - DNA, 122 bp, Homo sapiens
ctatcagacttaagaaggtgggatctagatagtatactaaaaatattaataaaaggaaggcggggccagcaataaaagctccacagattgtttggatattgtttctgcttaagaagcacttg

SEQ ID NO: 215217 - DNA, 122 bp, Homo sapiens
accgccgccgccctgtgcattatgggagcgggaggaggctgcgctccagcgctgccaccgcggctgctctgggctctctcgggctcacgctgcctcccatcggctacgagcacagagcatca

SEQ ID NO: 215218 - DNA, 122 bp, Homo sapiens
atgcaccgacggcggggagtgagtgggctgcggctggaggagttaatacagacgaagctgcgtggacaagacggctgggcagagaccaagtgtgaaaagaaacacaaaacaaggacagagat

SEQ ID NO: 215219 - DNA, 122 bp, Homo sapiens
gtaagttacctggggagggggcggcgcaggaagtacagttcgcagcagcccctctgaaaccgggggctcccttctcgcccacccactgggcaacccactccgcagaggcgtccttctctggc

SEQ ID NO: 215220 - DNA, 122 bp, Homo sapiens
gtggcctggtctgcctgctccagggcgcagctgcgcccgcttcagcgcctcccgggtctgcgtggcctgctcggctcagaggcctccaccacggtccgctccctgccggacgccgcgctgct

SEQ ID NO: 215221 - DNA, 122 bp, Homo sapiens
gctgagtgtgtgtgagcactgagaggcaggattggaacagtgcctggcacttagtaggtgcgcaggcaggtatgtagagtgtatgcttaaatgaaggactgggtgaagaatttaccattagt

SEQ ID NO: 215222 - DNA, 122 bp, Homo sapiens
tccagttgtgtgctcctgtttctaagccacagaggttaagatgccagcagttgcccagctcgtggttggtcttgcactgggacatatttggcacctagtctctcttctcctaagggctcttc

SEQ ID NO: 215223 - DNA, 122 bp, Homo sapiens
ttacacactgccacaccgaagaaatccatgcacgttttcctgcaaacgcgcgcgcgcacacgtacttcggcgggcgcccacgtcctctgtctcaccaacagacacagacatttacacttcta

SEQ ID NO: 215224 - DNA, 122 bp, Homo sapiens
acctcgtgatccgcctgccttggcctctcaaaatgctaggattacaggcttgagccactgcgcccggccggaatctgcatttctaactttcaggtaacagcagcacgcacgcagacggcaag

SEQ ID NO: 215225 - DNA, 122 bp, Homo sapiens
tgggaggcaaggctgaggcggagggacacggagtcgggatcctggagaactgaaatggcgcgttggttactcttgagggagtaaatcagctcactgagtcatcattccaccacaaaaacctg

SEQ ID NO: 215226 - DNA, 122 bp, Homo sapiens
gtacttgagctgctggaggcagctgttcaggttcttgaggggctccttgctcacggcgggcggtggtctcagcagctcctccagcagcgaggcgggaactgggcagtccgggatcttgatgg

SEQ ID NO: 215227 - DNA, 122 bp, Homo sapiens
ggcgcagattctgggtttgatcctcgcgctgctccccctactcggggcaagcaacaaagccggcatcagaccctgcgtgctgaccaccccctgccctgggagggctgaggggaacacaagag

SEQ ID NO: 215228 - DNA, 122 bp, Homo sapiens
aatcgtcgcggcaggctctggccgggcagggcgagatgtgcgcatgcgcggcctgtggcccgaggttccacgtgctgatgaatatgcatgagactcccccgccctcgcgggctagagagaga

SEQ ID NO: 215229 - DNA, 122 bp, Homo sapiens
ggagcagccgcgggagcctccctggtgaagggagccagctgctgagcccggtggccgggccgtgtgaccacaaggcgtcgggggcagtgggaagcctgggctccggtgcctgtggggcttgt

SEQ ID NO: 215230 - DNA, 122 bp, Homo sapiens
ttcactcccttaaagtacacatatttacatttccaaatgataccatgttatagaaaataccgcatgattgattgacaatagccctcatgaggaagttgttcaactcataacagacttgtagc

SEQ ID NO: 215231 - DNA, 122 bp, Homo sapiens
agaaggtgagcaaatttagaggagaaaatgaatttcatttttggcatggtgtggaaggctcgggagagaggtctaggcaccagatgtcaacgtgaggtgaaatggatatagctgaagtcaag

SEQ ID NO: 215232 - DNA, 122 bp, Homo sapiens
tgacggtcttcggtctccgccccgacatccggcctcggccacgtggtgggcggaccggggcggtcctgagcctgcgacctcgcaggcgacctcgctggaccctaagtccaggccacagtcag

SEQ ID NO: 215233 - DNA, 122 bp, Homo sapiens
cagctcctgctctcatacattctgagagccagtttgacaataggcaactacacaaaaaaccgaaataatcccagaatgcctcagggctccaggggaaggcgaaaaaagcgggtgcgtttata

SEQ ID NO: 215234 - DNA, 122 bp, Homo sapiens
aagtagctgggcatgttcatattccttggtgtatcgattgccacgttgatctgtaagaatcgatttgctgagatctgtcagatccaagagttggtttgtccttgttttagccatctgtgtac

SEQ ID NO: 215235 - DNA, 122 bp, Homo sapiens
attttccgcttcaggacttctttcaccaggcccttgtctgggccctgtttgactttttctcgtccgattaagtacaagcactttggggtaaggagcaggtctcgctttacaccctgtaagga

SEQ ID NO: 215236 - DNA, 122 bp, Homo sapiens
cttatctcaaatctgtgaggccgacagatagggatgtggagatagagaaacaaatattgccgctttcccaaggacatgtggcttgtgagtggtagaaccagactagggcttcgcctctgaga

SEQ ID NO: 215237 - DNA, 122 bp, Homo sapiens
ttcaccctcggaagcagacagatacgaagtcgggggaggaatcccctttttcccgtgtttcggggaagctgttctgtcaggaggcgggttcatttacttccagacttcatcagcttttcgag

SEQ ID NO: 215238 - DNA, 122 bp, Homo sapiens
tcatctctttcactccatttaactctctctgcctctgaacaggcatctgcttggatcacccgtggatccggtaaaatgtaggtgctttctgagtgtcgacttgaatttattgaatttaatat

SEQ ID NO: 215239 - DNA, 122 bp, Homo sapiens
ataaatatactgggaagagtgaaagagaacaagtactcttaactgttgcatccaccattgcgctgtgcaacaatgggtgcatctgaaaaaaatcaagcaataataataaagaaatggtagtt

SEQ ID NO: 215240 - DNA, 122 bp, Homo sapiens
cctcccctgcccgggggagccccgggtaggcagtggccaaagactctgtagaacaactcccgggagggcaggctcgcggctgctcctcccgttggcagcgcctcaaaccctggcaggcccgc

SEQ ID NO: 215241 - DNA, 122 bp, Homo sapiens
ggcagcatggggccatttagggtcagccttcgggccactagagttttctcagggtgcgaccggggagggaacatttctccagtagggtcacttccttggaaatctgatcctaggagcacgca

SEQ ID NO: 215242 - DNA, 122 bp, Homo sapiens
tctttctggttgttcctgctcagcctgagcgctccataatcttggcctatccatcattgacgtcacaacaggttagcccttaatcacatattgttttgcacatcttgtttgtttttagtcat

SEQ ID NO: 215243 - DNA, 122 bp, Homo sapiens
ccctccggctccggcttcgggaaattacatccccgctccgcggctccccccaacccccaccgcgccccggagccggcgcctttataggcacatttattgcaataataaagtgaggcgcgggg

SEQ ID NO: 215244 - DNA, 122 bp, Homo sapiens
attcagccctgtctgcatgagcgggttcagctcttcacagctttcggcatctctgctcgccgtcgttttcccccacccccaatctttcttctcctacctacagcttacacacacacacacac

SEQ ID NO: 215245 - DNA, 122 bp, Homo sapiens
gggtgtcccagagcccacaggatctggcacttagtaggcgctcggtaaagaatgagtgagcggcggcgtttactcttcacctcccccagccaccctgctcagctgccccttccgcggctgcg

SEQ ID NO: 215246 - DNA, 122 bp, Homo sapiens
aaaaaaagaaaaggaaaggaaaaagagccagtggtgaaaagtgtgcctccttccttcctccggtggcccgcactaacttccttagaggtgatgctgatgctgtatgttggagacgcttctga

SEQ ID NO: 215247 - DNA, 122 bp, Homo sapiens
ttatcagcaggcccctgagacagtgtggcaaatgctcagaaacccttggcgtttcatccccgactttggcctttatgtaccaaagtttctaagctttccttagggatgctgattgcaacact

SEQ ID NO: 215248 - DNA, 122 bp, Homo sapiens
gggctcagaggtcaagggctggaagccaggtctccagactcccaggccaaggctcttttccgcagatgactctgtcctggtgtccagcagggcacagcccctagcacctccgaggccccgca

SEQ ID NO: 215249 - DNA, 122 bp, Homo sapiens
tatatccacacagcccctgatcccaagagtctctgactggagttgtacaccctgggctctcggaactctctagagggctaagaggtgggtgcaaaaaggcccctctgaggagacctgagtct

SEQ ID NO: 215250 - DNA, 122 bp, Homo sapiens
gcacatggccgccagcaggcagagttactccggtaaacacgccagggacggcggcgcgcgcgggaggcaacccagcggggcaacccccgcctttacctgtccgagcctgcacgcgccggcgg

SEQ ID NO: 215251 - DNA, 122 bp, Homo sapiens
gtagttgctggtaaagccctgagggtcccgccagcgcgtgagttggaagctgaattaccgcgagaagtacagtcttgccgaggagacctctgggaagcgtagtcagagacgtatcaaggccg

SEQ ID NO: 215252 - DNA, 122 bp, Homo sapiens
acttaacctaagtttcggtcgtgtttctaaaatggcctctgtaaatctatgaggcttatgcgcgagtactggttgctgcattaaaagacaaacttgtcacgattggctttgatagcgataaa

SEQ ID NO: 215253 - DNA, 122 bp, Homo sapiens
cctgaatcaggcaatagcagaggaaggagggactgagcaggagacggccactccagagaacggcattgttaaatcagaaagtctggatgaagaggagaaactggaactgcaggtgagtgagc

SEQ ID NO: 215254 - DNA, 122 bp, Homo sapiens
ctgctgggacaaagcgccaggaacaccacattctgccggaaccacctcatcctgggaacacgttaacatcttcccggacagcaagccatactgcctagatccctcctgcccaggcctatgag

SEQ ID NO: 215255 - DNA, 122 bp, Homo sapiens
agatgcgcatgtcccccccacggatgcgcacagcccctagagactgcgcctgagatgcggcgcggctcctcccacggcggccccgccaccctcccccgaggctcccgctggaagcagcgctc

SEQ ID NO: 215256 - DNA, 122 bp, Homo sapiens
ctgtctcggctccttgctatttcagggccacgcatcccttcccctttcatttcagacatgcggggtgacagcagggtcggcctcctcacgcgttctggactgcgggccgagggcgggcggcg

SEQ ID NO: 215257 - DNA, 122 bp, Homo sapiens
ctttcaagaagcccccagatgagttagaatgctggaaataagttctgctctattccctcccgttcaagggagggaaatgagcaacactactgaaaagttctggtttacactgagattagaag

SEQ ID NO: 215258 - DNA, 122 bp, Homo sapiens
ttctataggactgattcatatattctcacacaactctgtggcaaggctgacccatgctgccgacattctacatatcactgagacagggaggtgaaattttcctgcttccagtctaattgtct

SEQ ID NO: 215259 - DNA, 122 bp, Homo sapiens
tctgtggctggtgtcgctcattcttatttctcccaagaggccggcagggcagggcacactcgggtggggaagcaagtgaggctgaggctgggcccacgcggcacctccagaggctctgcaca

SEQ ID NO: 215260 - DNA, 122 bp, Homo sapiens
tgacgtcagcgcggccgcggcggagtgtagtggcggggcgggctgctggcagggagcggccgagacgtgcagggccttcccgggggatcggaaggttgcggatgccttgggagccgggggcc

SEQ ID NO: 215261 - DNA, 122 bp, Homo sapiens
gatctggcctggtcagtactgtatagtccttcttggttgaccaaacctcccctcagttctcgatggcactgtggctgccctactgccttcaggtacaggccactttctccctacagcaggga

SEQ ID NO: 215262 - DNA, 122 bp, Homo sapiens
ccggtgtatttcagctgcatttattactgatctcgggctgcaccagggcacttgtaggaccgcactaaaaacagcggaaagtgaggagccaagcctgggtccggggcggcccgccgtacagc

SEQ ID NO: 215263 - DNA, 122 bp, Homo sapiens
tgagggcgcgctggctgcctaggtaacctcctaccagtgaaccctggctggcagcgcccacggggtgcgcatccgcattcacaacttggtccaaccatcgggcccgcctccatgacttgttg

SEQ ID NO: 215264 - DNA, 122 bp, Homo sapiens
tgttccgtcagctgccgctcctcctcccagacgcagagcgccgctctgccccgccccccgcgcaggctgccgtccctacatccgggtaccgactccagccgcctagacgctggcactatggt

SEQ ID NO: 215265 - DNA, 122 bp, Homo sapiens
tcaagctcagggaccctccagaacttgcctttgttcgtggctgatccggggacgtgacgacgactgtgttgcagatggtgagtgcgatgaagaaatcaaagacgtcagacagctcaggcgag

SEQ ID NO: 215266 - DNA, 122 bp, Homo sapiens
cgggtccgggcagcaccagtaccagcacgttggcttccgccgcccagggccccggcgctgcgggtgggcagctcagctcgcccagaaaaaggcctgggcccgcagctcttaggctgggaacc

SEQ ID NO: 215267 - DNA, 122 bp, Homo sapiens
gctggctttttgtgccgaggtccagttctccgtgtcagagtccatgtcatgacccactcccgtctggagcctcaccgagggcagatgtttagtctagaattgcagaaggtggggctggaagg

SEQ ID NO: 215268 - DNA, 122 bp, Homo sapiens
caaactatggctcatggaccaagactggcccacaacccatttttgtaaataaagttttatcggaaggcagtcatgttcatttgtttataaattgtctatggctgcttttgtgctgccacagc

SEQ ID NO: 215269 - DNA, 122 bp, Homo sapiens
ggccgcgtccagcctgggctggggcactccctggaccccggagcgggggaccctgtggcccggtgccatccgaggagactgccacccgccaggcgctgggttcacaaaccaccggctgtttg

SEQ ID NO: 215270 - DNA, 122 bp, Homo sapiens
tggagcctagaacagtgtttttcacaaaagattttgcttatagcaacccatgctttagaacggaatattgtaaagacgtccagatcagttagatttgagtttctcaagtagtgactgtggac

SEQ ID NO: 215271 - DNA, 122 bp, Homo sapiens
gatgaaacctgccccacgcaacgtgcagggcaagaggctgacccagaggtgagcagcgaacggcaaacatcagcaagcggggagcacggcacgtgcggggcggtcagtgcagcgcgtgcatg

SEQ ID NO: 215272 - DNA, 122 bp, Homo sapiens
agtcgcggaattactgcaggcggaacttgcagcactgtgggcgtcttttccagagaaggacggagttgtggggcgggaggataaggcaaggcccagccacttcgcatcttcgccccgccagc

SEQ ID NO: 215273 - DNA, 122 bp, Homo sapiens
ctaggagggctagagttccttcttccttttggtgtaatacaactgcattttccggatcatcgtattatattgctaattccggataaaccaccatttgtcctgcacaccgagctgaggggcgc

SEQ ID NO: 215274 - DNA, 122 bp, Homo sapiens
aagggacacctccctcctgtccagcccttcaacagatcttctgttagatgacaaccgtgccgtgggccccgcgttgggccttgtctgaagggagaggccctggcatgcggatgggagattta

SEQ ID NO: 215275 - DNA, 122 bp, Homo sapiens
tttaaaatatgtcttctgaaatggcatttatataaacatgtgacacaatgcacctgatggcggggcacactggctcatgcctgtaatcccagcacttctgggaggctgaggcaggcggatca

SEQ ID NO: 215276 - DNA, 122 bp, Homo sapiens
gtggggtgaccaggcctagtgttgctggccctgaggaagaggaggcaggctgtgcttggccggggccaaagaggagcgcaggtttaaaaagcaagtgtattagcaagtttctccgtagcaat

SEQ ID NO: 215277 - DNA, 122 bp, Homo sapiens
agtgcctctgtctgcgtcaggagagtcgtgtggggtgggcttgtcatcccggaagtgctacggttgcatcgtgtggggtgggctgtcatcccggaagtgctacggttgcatcgtgtggggtg

SEQ ID NO: 215278 - DNA, 122 bp, Homo sapiens
ggagaggataactgggtgagcagactgagcggcgagctggtggttggaaggttcctgcagcgggtggacggcctctgtctctgaggaagttatagagggaggtgaggacgtgggctcgaagg

SEQ ID NO: 215279 - DNA, 122 bp, Homo sapiens
agaaactcccatctccctcaccagccggaaagtacgagtcggctcagcctggaggtgagtcggggcggggagggccgggcaggctttgttcctgtgtaaacggagcgcacgtacctggagcg

SEQ ID NO: 215280 - DNA, 122 bp, Homo sapiens
tgcgaggacccctggccgggtcagccctacctaggcagagcgggaggcggggcagggccacggtccccagcccaggcaccggcgccccacccggcgcccggaggagtcggggctctgcatac

SEQ ID NO: 215281 - DNA, 122 bp, Homo sapiens
tgaccagaaagaagagtgacgcggcaggaagaagaagccgggtcttggggagagcggaggcgggtcagggtgggcaaaggcagccgatgccaggaatacaaccgcccttcgcgccgttccaa

SEQ ID NO: 215282 - DNA, 122 bp, Homo sapiens
ctgccccgtaaagccttaagtccctggcccaagaagccgcagggcttagaaaatgcggagcggctgcaatccacgggcccatcctccactctgcacaagagatctctgccagccccagcact

SEQ ID NO: 215283 - DNA, 122 bp, Homo sapiens
gcgcggcgcagccggagcagccagtgagagcaacatcctggaaagaggggggagcaccgccgccccccaaaagggaaaaaaggccccaccctgacacgttttgctgtttgcaagtccctcgc

SEQ ID NO: 215284 - DNA, 122 bp, Homo sapiens
cgggagtccgccaggcagagccctggctgtgccccgcccctcccgccacctgggccctggcgccgcccccacaccctcctcagggctgggctgaccccagagatagcctgtgctgccccctc

SEQ ID NO: 215285 - DNA, 122 bp, Homo sapiens
atagcatgcaacctcaccttcagaaaagactccatggactttgaggccagagagttgctccggaacagggtgttggtcttttgttacttggtcataagtaggcgttttccttttgatttggt

SEQ ID NO: 215286 - DNA, 122 bp, Homo sapiens
tgcagccggaggaggaggggaacgaggaggaagaggaggaggaggaaggggaccgcgcgccgcagctgagcccttaccgagtggtttaccccccacatgaggacgctgagcagcgggtcgct

SEQ ID NO: 215287 - DNA, 122 bp, Homo sapiens
gcattgggccgcgatcgcgccactgcactccagcctgggtgacagagcaaggctgcgtctcgaaaaacaaaaaactcccaaaccgtcaacagaagatatggtgatctgggaaacttgaagtg

SEQ ID NO: 215288 - DNA, 122 bp, Homo sapiens
ctagccttaaggctgtctcactgaaacattttggagtctggagtcatctgttctgaatagcgcccacatagtttatatttttttattttttgagacagagtctcactctgttgcccaagctg

SEQ ID NO: 215289 - DNA, 122 bp, Homo sapiens
tcaggtgatccacccccgccctcggcctcccaaagtgctggcactacaggcatgagccaccgctcctggccgggtttgcctacattttggagatgctgcacaccatgtccctcttttcaaga

SEQ ID NO: 215290 - DNA, 122 bp, Homo sapiens
gggactgaccttctcgcgcagggtgcagtggacgtccgaggcgacgcgcccttcccaccacggctcatccatcatcgcgtacgcagcgccgctatccgaggctacccggctctcagggcgca

SEQ ID NO: 215291 - DNA, 122 bp, Homo sapiens
tgagtagcagaacgaagagcagtagtcacctgggcctgcactgcaagatggaaggcgccacgtttgaagggcagcatggagccattgtggtttctcgttccctcaggaaacacccagaccct

SEQ ID NO: 215292 - DNA, 122 bp, Homo sapiens
agaacttaaccctcaccggcgaccttgtagataacgtctataagtcaccatggtaacggtcgcttcagttgtttttcaggaacctggggcaactcctgtccagtttaaaccggttgagacta

SEQ ID NO: 215293 - DNA, 122 bp, Homo sapiens
gtgttcgcgctcttgagcgtgcgctctgcggggcgcgggctggtggcgggcgggggtcgccggctccagctcaggttcccgcgccaggaccgcgtccagaaccttgtctccggaagcgggca

SEQ ID NO: 215294 - DNA, 122 bp, Homo sapiens
gccaggaaagatgaagagcgcgtgcagtccccgaagggtacaccctagggttcccccccacgcgaagtttctctccgcaatccgtgccacctatcgagtaggattcctagtgttcgattcct

SEQ ID NO: 215295 - DNA, 122 bp, Homo sapiens
gccgccccaagtctcaggaccgccgactctgcccttcctctccgccgtctggggccaacccgcctcgttggcgcgctgcgcctttatagtctgcaaagccacactgaagagaccagagatca

SEQ ID NO: 215296 - DNA, 122 bp, Homo sapiens
tgcaaagacatatgtttaccaaaccagttcattgccatatgtgtgccagtttctccagagcgtgctgcctatgagtcgattggcttagcttaagaggctcagaaaggagaaataagcaggaa

SEQ ID NO: 215297 - DNA, 122 bp, Homo sapiens
caaggtcatacaaaacttttagaggcagtcagtctgctaagaaggctccagcaagagaaacgggatcttctgtttcaacaatcattacttaagaaaaaattaagaaaatgaaataagttttg

SEQ ID NO: 215298 - DNA, 122 bp, Homo sapiens
attcactggacatttatatgtataccaggcactgtactaggcacttttcatggactgtctcgttaaaacccagacaacactgagtttgatatgttttccattcccattttatagattgggaa

SEQ ID NO: 215299 - DNA, 122 bp, Homo sapiens
tctactgtggccttgatagctgcagactggtactggtccatggcctgttaggaacctggtcgcacagcaggaggtgagcagtggctgagaaagtattagcacctgagctctgcctcctgtca

SEQ ID NO: 215300 - DNA, 122 bp, Homo sapiens
gactccggctgcggcggccgactccggccggtgagtggcagtggggggcacggcggggagcgttcggtcccggcggcggtccccttctctttggtgggcggattggtcaaagcttgcccgac

SEQ ID NO: 215301 - DNA, 122 bp, Homo sapiens
ctgtccagaggcggggctgtgagggatgtcagagaaatcgggagggaggaagaggggctgcgggaatttgtaagctgggagtgcagggcccagggtctgttcccacgccccatccccaccgg

SEQ ID NO: 215302 - DNA, 122 bp, Homo sapiens
ccccattttgcagatgaaggagctagtgtccacagaagagtggttgcacagcctgtggcccggctgggactgtcccttcctcctgccacctccccaaggacacgtccatgttggccacttcc

SEQ ID NO: 215303 - DNA, 122 bp, Homo sapiens
gggtgcaggacggctgacagccccctgccctgtttctggccggggttggggtccagggcccggagcaggaccccaggaggccggttaaagtttgattttcgatttggtggcttgctggtagc

SEQ ID NO: 215304 - DNA, 122 bp, Homo sapiens
taggaagctgtgtgagcaaacaaaacatcataggtcctttctagcaggaatgcaaacaaacgctaaaagtcatttccatttttgactggatgcaaataaattttaggtattctctctcttta

SEQ ID NO: 215305 - DNA, 122 bp, Homo sapiens
ctctatgacggagcgacggcgagctctctcattggctgcggtggtggactcaatcaatctcgcctgcgttgtagtgtcgcgggattggctgtcgctggttccagcctttttctactcccctc

SEQ ID NO: 215306 - DNA, 122 bp, Homo sapiens
aggcccctttgttatatgaggcttcacaactgtgtttactgtctttgcagcagttatctccgtgtgcaattctgagctcatttgcgtggttatttaattgtgtatctccacttaactctggg

SEQ ID NO: 215307 - DNA, 122 bp, Homo sapiens
ctggaaaatcgggtcactcccacccgaatactgcgcttttccgacgggcttaaaaaacggcgcagcgcgagtttatatcccacacctggcagggagggtcctacgcccacagagtctcactg

SEQ ID NO: 215308 - DNA, 122 bp, Homo sapiens
cagttggtggaggcttcagggaagaccagagtcctggacagagagggtaacaggaggagtcggggataaacatcaaacatcaatcgtgtgtcctgatttgggagtgattggggggatggggt

SEQ ID NO: 215309 - DNA, 122 bp, Homo sapiens
gggcctaccgacataacttatgatccgtttgagaatccatcagggatccttgtgagtccccgacctgcagttctagattcatcatttgaaaaagcctctggccctggatgcatttcctgttt

SEQ ID NO: 215310 - DNA, 122 bp, Homo sapiens
atgggagggaggatctcgtttcaaaagggttaacccacagccaatgggagcctgggggagcggatcctgctcactccattcaagaatcccaagtattcaagatggacggcagggagtgtgga

SEQ ID NO: 215311 - DNA, 122 bp, Homo sapiens
aggggagcaagggacccagaagaagggatatggtgagctactctctgcagggcagggctccgccccccagcagctttcaaaccacagttgacgcagaaactttcatcagcacaagaggcgag

SEQ ID NO: 215312 - DNA, 122 bp, Homo sapiens
ctcgcccgagcgctgcttctcgtccccgcccgagccgaacctcgattctccttcccggcccgatgcacgtcactctagggttctcagctgagttcgcccgcctagttctttggttcgcgtct

SEQ ID NO: 215313 - DNA, 122 bp, Homo sapiens
cttaatagcatgtgaaatacttaccctattgtggtgacaatagctcttagagaagcacagcgtgtagccagtaaagatctttctgaggtggttttcttgaggtttaggggttaaaaaactat

SEQ ID NO: 215314 - DNA, 122 bp, Homo sapiens
aacctctgattggcctcatgggtttccaccatttgcatacctcacccattgtgtggaaaacgcagggtctttggtggcaaggagcaaactgtgtgtaattaatggaggactttcagaggagc

SEQ ID NO: 215315 - DNA, 122 bp, Homo sapiens
agccccgcccccggcggactccaggcatacctgggcggagactctcagggcgaggccatccgtggctgatggatctgggcgagtggcctctgttccagcgtggatccagctgcatttgtgaa

SEQ ID NO: 215316 - DNA, 122 bp, Homo sapiens
ggagccgcgtctactttggtagacgaagcagcatcctttccccgggtcttgaaagcgaaacgcttcttgggctgcagcccccggcgccgctcggccaaggccgcctgcagccgcgccagcgc

SEQ ID NO: 215317 - DNA, 122 bp, Homo sapiens
cctcggagtcgggctccaggctgctccgctggaatggaacaggcttgtagctcaagacctcgttgacggcagcctccaggtctgggtccaggtaggagtgacggctgacggagcggacgctg

SEQ ID NO: 215318 - DNA, 122 bp, Homo sapiens
tccctggggacacagtgtgaactacagggacctgaaactgaccaaagaggcagacggaggcgacaaatgcaggggtagggattctatctgtacagacttccctgatgaggtgataatgagac

SEQ ID NO: 215319 - DNA, 122 bp, Homo sapiens
ttcttcaccacaagagtctaagtgacacaaatttgggcagaagtaattatttggccaagccgggaggcaggaagcttaaataccgcctctgtaggaagtgcgggggatccgaagcaaacacc

SEQ ID NO: 215320 - DNA, 122 bp, Homo sapiens
cctgtggaatgtttggttgctctgaagtgggctgcggcctgttcattagtcctttcttcccgctgcccacagcatttgcatccttgctgggatcctggaggactttgtgcatgggcaggcat

SEQ ID NO: 215321 - DNA, 122 bp, Homo sapiens
gctgtatgtgtgccctgtggaatgcttcctggtgctgctgcacacctccatcacctactgcggtgagggcccctgggatctgcgctcccggcgctgcgccctcgccccaccgctgtgcctga

SEQ ID NO: 215322 - DNA, 122 bp, Homo sapiens
cagggctcagacccgtttcctaagcgccaggtgctgagttagaatcttcagctgggtgcccggggttttgtggcaggctctggcttgttaggtcctgcacgctgctcccagtgtttctctca

SEQ ID NO: 215323 - DNA, 122 bp, Homo sapiens
tttaaacaaaaagcaatggctagagtgaggagagtcagcttcaatgcttcagtaggcccccgaccagctgggagcagatctggaagatggacggttgtggtgtcttctaaatgtaaaattgc

SEQ ID NO: 215324 - DNA, 122 bp, Homo sapiens
ggtatctggcagaaagcctgtaacccagcgtgcggccaggccagcatcccagctccgctccggctctgcaccgaggccgcgacccaaggacatctgtggaaaccgacctccacaacagcacc

SEQ ID NO: 215325 - DNA, 122 bp, Homo sapiens
gacctgctcacatacagcacatactcacacagaacccacaggcacccaccagcacacacccggccaggccttagatgctggaagaggaactgctgatcagggacctggagctgctacctcct

SEQ ID NO: 215326 - DNA, 122 bp, Homo sapiens
accgggcatcagagccccctgctcactgcaggtctctctgtgtgtgtggcaggggcgtggcggggggagaggaacaggtgtcacatgacctctgtccctaagcatctgaactgaagaagtaa

SEQ ID NO: 215327 - DNA, 122 bp, Homo sapiens
aaaagacccactcttgtgctgtgtgtattgcccacgggtgggaggatgcaagtacaattacgttttttaaaactccagtccagatattggcttttccttggatacttttgtgtggctctccc

SEQ ID NO: 215328 - DNA, 122 bp, Homo sapiens
aatatgttttcacctcttccgtgcgattggatgactcgaccgcccctcctcaacctgaaccgtttaatatattattggtctattcaaatgactaaccgtcattggtcgttcccagccctggc

SEQ ID NO: 215329 - DNA, 122 bp, Homo sapiens
ctggcagaaacttggatgtatattctggtcaccaaggccagaagagaatggtaaagaacacgctggtctccggtgtgcctacctgagctccatccagctccatgctcatgagctgtgtgact

SEQ ID NO: 215330 - DNA, 122 bp, Homo sapiens
cggcgtgtaaacggccctgaagttgcgccgtctgtctgtgtgaacaggagctgcttcctccgcaggactccagctgctgtccgtggccgggccatgcgatggaaatggaaacagcagagtaa

SEQ ID NO: 215331 - DNA, 122 bp, Homo sapiens
acagtatggatataatagaaaaattatgtcaaacacacttggagatgatagactttgacacgtcagggagagagacgtggaacagatacttccctcgcagtcttcagatgaaaacaacattg

SEQ ID NO: 215332 - DNA, 122 bp, Homo sapiens
gaaagtcctgcctccccagggctgccacacccaggacgggaagagggcgggcccgtggctcgagctccaagtttctcttgggctgctgtccagaggaaggaggccagcaggacctggtggga

SEQ ID NO: 215333 - DNA, 122 bp, Homo sapiens
cagcagacgtaaacagggtcatctggggccaaagagggtgggtgtttagctttaaagctccggggttaagagtgaaagcatgtgactccagcccggccagaaacagaggagcctttgtgtgc

SEQ ID NO: 215334 - DNA, 122 bp, Homo sapiens
taatttatttatttttttgagacggagtctcgctgtcacccaggctgaagtgcagtggcacggtctcggctcattgcaaactatgcctcccgggttcacgccattctcctgcctcagccttc

SEQ ID NO: 215335 - DNA, 122 bp, Homo sapiens
ctggcagctctgcccggcccaagcgcagaacccttagctgggaaggccgcggccaggctgcggggccccctgcaggcgggctcagtgccccggcccagcacctgttgtcccaaggcaggccc

SEQ ID NO: 215336 - DNA, 122 bp, Homo sapiens
ggacacagacactgtcagggggcagaacaccatgtgaagatgaaggcaggacccgcgatgcgtctaccagcctggaccacccacaatcgccagcaccacccggagctgggggagacacagaa

SEQ ID NO: 215337 - DNA, 122 bp, Homo sapiens
aatttaattttaggtccctgaagtctcttacttggttccactgcctgtacaacaggtgttcgtatttttgtgcattgctttctttttacattaagaaagataaacaacaccaaagtgtaata

SEQ ID NO: 215338 - DNA, 122 bp, Homo sapiens
tggctttgtctactctacagtgaggagctccccgcataacaggggcgggcaggatatggccggcgggagggcccctccttcgtactgggggcaaccgtctcaaccctgaggggtcacggaaa

SEQ ID NO: 215339 - DNA, 122 bp, Homo sapiens
attgttctatttctatttctgttacgtgtttgaaaatttccaaaataagatgtttctaaacggaaattaccaagtctttaaaatgaagaggtgtatgtcaagcttaggggtggtagcgaaaa

SEQ ID NO: 215340 - DNA, 122 bp, Homo sapiens
tgctaggtcagaaagctcaattctgtgaaagtgggacatgaaagatgggagatggggaggcgaaaaagacaacaaggtatttaggatcctatgaaggtttgctaagaggcagaggaagagaa

SEQ ID NO: 215341 - DNA, 122 bp, Homo sapiens
taagaccctcgtatggcgcttaatgcccctctaagggctgaagttttccctgggcctgcccgggagatgggtggagtctcttctcaggccagctccagtttccatggaaacccacaggcttc

SEQ ID NO: 215342 - DNA, 122 bp, Homo sapiens
cctctctctccacagtcctttggccagtaaggcaatttctaaacatgcgacagcacagggcgttcacactcaaatgcttatggaggttaataacatcgggccacgtagactgttgcaaaacg

SEQ ID NO: 215343 - DNA, 122 bp, Homo sapiens
gcatcagtaggataaagcaccaaattcctgccaggagttggaacgatgccctcagaggtgcgaaaagctgaccgaaaggtgtggaaatgactggcggactcagcatatgccgctggttgtcg

SEQ ID NO: 215344 - DNA, 122 bp, Homo sapiens
ctcgcccgctctattgttggtccttagggctccattagacagaattggacaacaatgtggcgcctgccattggccaggggaggcagacggcgctctgattggccgggcccgcgcccggggag

SEQ ID NO: 215345 - DNA, 122 bp, Homo sapiens
ggggcgtggcctggtggggagcggggctggggcgtggcttggctgagtgtgctgccgcggcgcgggaggagagtgtgcgttgcgctttctcccgcgatcgccctgccggtcgctagctccga

SEQ ID NO: 215346 - DNA, 122 bp, Homo sapiens
gcattccaggtttacaggtgacagcccatggctcacagtgccaatgttcctctggaactccgggcccttccctgagactcttgatgccctccaggccgctgtggctgctgctaccacctggc

SEQ ID NO: 215347 - DNA, 122 bp, Homo sapiens
ccgtacgcccgagaactgaggtagcccgcgcgggaaacgccgcagtgcaagccgggcgaccggcaaatgtcgcgagaatacgtccaggcctaacgggattttcgccttccggcaggagtggg

SEQ ID NO: 215348 - DNA, 122 bp, Homo sapiens
cgccgcttttgaatccccaccctgcggaccccgcgcgcctcgccttctccctctggttggcgagcgcctttctgcgccttcaggcatttttgctgaggcttttgtctgcgcatgtgcgggta

SEQ ID NO: 215349 - DNA, 122 bp, Homo sapiens
tggggagtagtggatgtctgcaaaaaccagaagcggcaaaagcaggtacctgctcacgcccgagactttcacatcaacctctttcaagtgctgccctggctgaaggagaaactccaagatga

SEQ ID NO: 215350 - DNA, 122 bp, Homo sapiens
gctgctctggcccagagagggcgggagcccctgcaggacaacacagcaatgagtcccagacgcaccccaaaccgaaactcttggccccagagtcagctcatgttctctgagaccagggacta

SEQ ID NO: 215351 - DNA, 122 bp, Homo sapiens
ctggttttctggttttcgtgagcattgagcccccgtgggttttggtgggagcacacggcacggctctgggttttggtgggagcacacggcacggctctgggttttggtgggagcacacggca

SEQ ID NO: 215352 - DNA, 122 bp, Homo sapiens
gcaagaaaggagaaagaaagagaaagggtataggactgggagaagaagataggctgcaatcgtctcaagagagactttagccaatgccatgggaagctctgaagctggcataactctcagac

SEQ ID NO: 215353 - DNA, 122 bp, Homo sapiens
tcacccagccccggctcggatcgccttctctttggtctctcacactagcaccccagaggccgcaaaaagcaccttacccagctcgccatggagcacagccccaggacgctccccatctccac

SEQ ID NO: 215354 - DNA, 122 bp, Homo sapiens
tttggctgggtgctgttcacctattatgctccctctgctaagattcatccagttgtacaccgtatgtttacttttggatatatatgttaaacttcaattaaaattctagccctcccagaagt

SEQ ID NO: 215355 - DNA, 122 bp, Homo sapiens
acttcagtgatcctctgaccacaccaagtggcgactttccaggaaagttctgattcagcacgctcacacccaagccccgccttccaccctgaggaggcaggtgggcagcctgtaaggcgcca

SEQ ID NO: 215356 - DNA, 122 bp, Homo sapiens
tggttcccccggaatgggaggcatcacgtgcggcttccaggaggccacctcagggaggatcgtgtttccatgcacagcgaaggatctgggcaggtaaatcaaatcatcacagcaattcggga

SEQ ID NO: 215357 - DNA, 122 bp, Homo sapiens
gcctcgacccaggactgtgagtgcaacctggtgtcgttacccaagtcacgtcacccacaccgatggcacctccccaccagctcccaccctgggagtccgcgcaggcccacaaaccacccgtg

SEQ ID NO: 215358 - DNA, 122 bp, Homo sapiens
aggatcccaccccaggagagggccgatcctgcaccggacctgagtgagcgcgcggggggacggatttgtttggtttcaaaagtgcacgttgctaaccgccagcagggcccccccgccgccga

SEQ ID NO: 215359 - DNA, 122 bp, Homo sapiens
acctccaggcaggctcacccgagatccccgccccgaaccccccctgcacactcggcccagcgctgttgcccccggagcggacgtttctgcagctattctgagcacaccttgacgtcggctga

SEQ ID NO: 215360 - DNA, 122 bp, Homo sapiens
gtgcgtcgcccgtgccagccccggaaatctcgtgttaggcgaggtcaacgggtaggttctcgcgagaggacccgtcagccccagtcaggcgtcgtgcgaacagcagctggtaccgaaggcgg

SEQ ID NO: 215361 - DNA, 122 bp, Homo sapiens
ccctctcaccctgggctgaccccagctacctgtgctgcttgtcccgggcctccaggtctccggctcctgcgctccaggccgcgctccacctccggtccttgacagccgcccttggattttcc

SEQ ID NO: 215362 - DNA, 122 bp, Homo sapiens
aattaaatctttattgaggcatttatgtgccagaaactgatcacacacagacataaggcacggtccctgccctcgaggagctcacagtctagtaaggaagacatatggggaaccgattcccc

SEQ ID NO: 215363 - DNA, 122 bp, Homo sapiens
ccctttcttaatcctgggcacctgccacggatctggccatgactccacagctgagagtgccgtctcctaatcccccggcccgaggctctcccttaatcaccgacctccggcccctaatcctc

SEQ ID NO: 215364 - DNA, 122 bp, Homo sapiens
ccccgccccgcccccccggacccgcctcccagccccgccccgggccctcctcgccgcgcccgctccgtcccgcgccctccaccgccctacggcctgggcccgcctccaccctgcctctccgt

SEQ ID NO: 215365 - DNA, 122 bp, Homo sapiens
caaatccttcctcactaaggggaggggaggggtgttccggcctggcggggtgggaaggggcgcttgggcgggattgtgacataaggttgccctggtaacatggaacagatctggacccaagc

SEQ ID NO: 215366 - DNA, 122 bp, Homo sapiens
accccgatccccgggacagggactgagtctgaccgtctgatttgtcctcccggcttctagcgccccgctcaggtcggggcttggggagggggcgctctctggacgtttgcggcccgccgagg

SEQ ID NO: 215367 - DNA, 122 bp, Homo sapiens
ccagagacataatcattgatgtcttcccaactctaggttctcccaccagcaggatccacacgtctttcttcatgtcggcggctctcgggggccagcctccgcccgcacgtatggagtggact

SEQ ID NO: 215368 - DNA, 122 bp, Homo sapiens
gtcttcctagaaccgcgggctgagcggtggggcccgggcggggtgcgcgggccccgtcgccgggtctggggccctgagcagtgaaaggaaatactttgacagatttccaagaactttccagg

SEQ ID NO: 215369 - DNA, 122 bp, Homo sapiens
agccaacttggagtttcctggccaggaggaagagcccccatccttgctggaggagggaggcgcgggatttccgggcattcttctgcacaatggcccagccatttctcgaaaggtccactggt

SEQ ID NO: 215370 - DNA, 122 bp, Homo sapiens
accattgaggcaggggtctgtggggttagggggtcggcagtcgagcgctagggtccttaccggcccctcaaagtgacttgagggcggcgctggcatgggcccccctccacctggtctttgga

SEQ ID NO: 215371 - DNA, 122 bp, Homo sapiens
aagcccaggacatggcaaggtccacgggcccgggccgggtccatccgacaccgcgggcaccgcaccagcccatgcacacgctcgcctccaacctggggctgcacttgctcatagacgcacac

SEQ ID NO: 215372 - DNA, 122 bp, Homo sapiens
gctgggtaaagaggacgctggaaggtgctggggaagagatgggagaattttaggtaccagcgtggtcaagagagctccagttcacagttcattttcagagttagagaaagagatgtaaaaag

SEQ ID NO: 215373 - DNA, 122 bp, Homo sapiens
tcctccgcgtgcggccggctcaccagccaatcacggcctcgggtggttctcggcgcgccgcgctgcctccttggaagtgtagtcctcaagttgcagcggccaagagtgagacccgccttgag

SEQ ID NO: 215374 - DNA, 122 bp, Homo sapiens
tctggtattggccaggatgtgggtccaggatccatcagacacgattggtggacttgtcaccgctgcagccacttaggaaaccgttcggcctcacctgacgaagctgaaaatgtgcttccctg

SEQ ID NO: 215375 - DNA, 122 bp, Homo sapiens
ctagcagtgccggcccaccggcgctgcgctcgatttctcgccaggccttagctgccttcccgccgggaagggctcgggacctgcagcccgctatgcctgagactcccacccactccatgggc

SEQ ID NO: 215376 - DNA, 122 bp, Homo sapiens
taacaaaatatgacttctgattctgcaaattgcagtagacctgctattcgctattcttcccgctaacaaccctgaaaattacatattcaacaaacacaaggagactctggaaggtggggaga

SEQ ID NO: 215377 - DNA, 122 bp, Homo sapiens
cgcaggaacttaacttacacatgccgtgccaacaggaactgtcccatcgaccagcaccaccgcaaccagtgccaatactgccgcctcaagaagtgcctcaaagtgggcatgaggcgggaagg

SEQ ID NO: 215378 - DNA, 122 bp, Homo sapiens
ggaggtggtgctgctggttgccctccacgcggggacgctgcactccaagagcagctgtcacggggtcagggagagtcatcttgggatcccgaaatctgtactagtgtggtctttcagtgttt

SEQ ID NO: 215379 - DNA, 122 bp, Homo sapiens
gcgcagctccttgcggtggctcgctctgttgttgccacagggcctggttttggtgggctccggggggaccaccacgctcgtccccagcgcgtccgcggccgcgggctcctcgggccggtggc

SEQ ID NO: 215380 - DNA, 122 bp, Homo sapiens
cggggccagtgagcagctaaaaagtcctctgctaggcttcacgtctgtacttcctgctttcgctttcgcctttacccttcctcaaaggcccgtggcggttttctgcatcttgtctttcactt

SEQ ID NO: 215381 - DNA, 122 bp, Homo sapiens
ctggcaagctgaagtggaggatgattgagcagactcgagaagaaggcactcagccagcagcgaggagcagctggcaccaagagagccgttccccaaagccctgcaaactgctggccaccaac

SEQ ID NO: 215382 - DNA, 122 bp, Homo sapiens
cgcccacactctcgggcgcccacactcttggacgtccacattctcggacacccacattctcggatgcccacattctcagacgtcatctctgagccaagtctgggctgcttttgggaggatac

SEQ ID NO: 215383 - DNA, 122 bp, Homo sapiens
aagggtcctgagagagggcggcatctgggttgtgttcacccacaaaagactccccatacacgcaccccgtaccagggggcctctgtccactcggccggggacagccccaaacccagaacatc

SEQ ID NO: 215384 - DNA, 122 bp, Homo sapiens
tgggagtgtccagggtcctgacgtagccctgagacgtggccagctccctggcctgctgcccgcacagtgggcccttgtctctgctctgggtcaggcgaggcagccacccatgatgagctctg

SEQ ID NO: 215385 - DNA, 122 bp, Homo sapiens
ttgctcggcccctaactttatatgtttggccttggaccctctctacctctgtacaacgatcgtgttggactagaagaatctcagcgaatccttctccagtactgacttcaaaggttctcaga

SEQ ID NO: 215386 - DNA, 122 bp, Homo sapiens
tacacagagcggcgtgttttgacgcggaccacagcaaacgcgtcaggtcacgggcatttacgcgtatctgagagcaacgtctttatcatcagcacggtgcgttccctgcaaaggtaatgaat

SEQ ID NO: 215387 - DNA, 122 bp, Homo sapiens
gaagtgagccccaagctatccgccccacccccagccctgcggggctttctgcctgccacacgccgtccctgctcactaccccatcggtttccttcgggagtcttcaaagccagtgcacgtgc

SEQ ID NO: 215388 - DNA, 122 bp, Homo sapiens
gtggcgcgggccgggtggggcgcgacagtctgagccgagacccgcgtgggcttaagggtgcgcgaggcgggtgccctgggcgcgcccgaactggctgagcagtggagcgggaaagggcgcgg

SEQ ID NO: 215389 - DNA, 122 bp, Homo sapiens
ggctgggcagaggctcagcctgtgccgcaaccctaagcggcttctggcaagtccgagccgcggtccctttaagagggggtggagcttcaacctggcactagggatgctgctagcgtgcgtgt

SEQ ID NO: 215390 - DNA, 122 bp, Homo sapiens
ggggtgaggcagatgtcagatcccagaaggcaccctaactccttggtctccaagaggcatcggtagcagcgcaggtatttggggaatggaagtggttgagggggttcccaattgacaggaac

SEQ ID NO: 215391 - DNA, 122 bp, Homo sapiens
cagctcaggccagctgaactgccgcgcctgcggaattcccgggagagttccaaagcggtgcgtccaagttttccggcagtgggcggggcctaggaacgcccccgcgccccgcgccggcggag

SEQ ID NO: 215392 - DNA, 122 bp, Homo sapiens
tccccaggaatagtcctgctggcaccagatgtcaggcaccagaccgagtcctgcctcccacggcctcccagacagggtcatcccactcctgctgatgatggcagagggagcgcagggtctgt

SEQ ID NO: 215393 - DNA, 122 bp, Homo sapiens
gaaccgaccaccgcgggtgagggcaggatcggagaaccacaggctcccggccccggggaccgtgctgtcgtgacaaccagaacgccaaccgcacttgtctacagagttccagtcttccctga

SEQ ID NO: 215394 - DNA, 122 bp, Homo sapiens
agctccgccagcggctgtgcccggggggggggtgtgggggggggagcctacgcagcagggcgcctgccactctcacccagggtcacgagaaagcgctcggaaggagccctgcgacctaatgg

SEQ ID NO: 215395 - DNA, 122 bp, Homo sapiens
tgcaggtgggcagtaactggggcaaggctgtgtctctgtggacagggactgcgccttctccgtgaggctggtagctttgtaagggcagtgctgtgtctcccccttttgactgggagctccct

SEQ ID NO: 215396 - DNA, 122 bp, Homo sapiens
ccaatgtatatagctaatcagaccagcaatcttctaagggaagaaagaagggaggattctcgctataaatctgcaagattctgagacttgggtggtggtttgactcacccggagctcacctt

SEQ ID NO: 215397 - DNA, 122 bp, Homo sapiens
tgctcagccatcccgtcttctccaacaccacctctccagaggccaaggaggccttggaaacgattcccccagtcattctgggaacatgttgtaagcactgactgggaccaggcaccaggcag

SEQ ID NO: 215398 - DNA, 122 bp, Homo sapiens
gtttcaccacgctgtgatgctgagccttgacttgcctgttctaggtttcatgagctacatcgtggagccgctcttccgggaatgggcccatttcacgggtaacagcaccctgtcggagaaca

SEQ ID NO: 215399 - DNA, 122 bp, Homo sapiens
gcgaggagcagcgtgtatgcccttatcctcagcaagtgagaacaaggcagatcacagcaccgacacagaagatggccttctcccatgtgccagcggagaatccccttccagccaaatcctca

SEQ ID NO: 215400 - DNA, 122 bp, Homo sapiens
caatagtaggggtggggacccccacgcagacctcccagatagagcagcgtggactgtctgcgcgcccctctccaaaagcaaagcgtcccactgggactttagggggcgccaacagcctttca

SEQ ID NO: 215401 - DNA, 122 bp, Homo sapiens
tgaggatgaagacgatgatgacagtgacaaggaaaaggatgaagaggacgaggtcattgacgaggtgagaaggacacgctcccctagttggtttatacctgagaaaaactttttggcaagcc

SEQ ID NO: 215402 - DNA, 122 bp, Homo sapiens
cccccagagatctatgtgttcttttaaactttttcagttttcactttaaaatctcagtcacggtttgtgctgggtgcctggttggttacctaagttccccagcttccttgaaggaacaatta

SEQ ID NO: 215403 - DNA, 122 bp, Homo sapiens
cagagtacatctcatttccaagtggctgttgcgctgctgtttgcccccactccttcagtgcgacagacagcctcagagctggtggggagacagcatgccactggtaagtagctgagaaatat

SEQ ID NO: 215404 - DNA, 122 bp, Homo sapiens
caggccggacaggccccaggcgcccccgcccagccctgggtggcgggaaccccagctccacgctgctgctgctgcgtttccttgttctgcgtttccttgttctggccttgttctgagaagcg

SEQ ID NO: 215405 - DNA, 122 bp, Homo sapiens
ctgcctgtgactggcacagacattagccaatgggtgcttggatagggtgcgccggcgccccgccccccttagcgccccgccgccccgaggcaccctctggcagactcggcggcggcgacagc

SEQ ID NO: 215406 - DNA, 122 bp, Homo sapiens
ctccagggtcccagcctagcagccgttgcggttcccgggcttctgtgtcgagtcaggcaacgcagccaggccctgcactcctcagccatgcatctgggccaagccatgcatctgggccaagc

SEQ ID NO: 215407 - DNA, 122 bp, Homo sapiens
gccgcgcgcgctcgactgggtggccagcgccaacctgctggacgacatcatgtgaggcgccgggcccaccaggcctagcccaggcgctggcccgaaccctgccctgcccactcaggccccgc

SEQ ID NO: 215408 - DNA, 122 bp, Homo sapiens
tgaagcagtgagctggataaatccggggcaaagcactaaacaatatggatattttggcaacgcgtgcgcgtgtgggtgggcggacaaaaggactcattactcgtatgattgcctcaattctc

SEQ ID NO: 215409 - DNA, 122 bp, Homo sapiens
gctgcacagccagacatggtgccaagcaggtaagggttaatctcaatcaccttgttcacccgtaaggcacctggaagaagatggagctttgggagagaagggatgaccccatagatccccca

SEQ ID NO: 215410 - DNA, 122 bp, Homo sapiens
cgacgggctcttctcacacgtgctgcctcccgctgtccactcacgaattccccaggccagcgatcttctctgccgctaggtgaacgcccctggcactcccacttgagtttgctgtcccgccc

SEQ ID NO: 215411 - DNA, 122 bp, Homo sapiens
ctaaattcttgaatataaaagcaactataacaccacaggtgtgtgttgctggtagatgggcggggtgttgaagggggaagacagcagcagggagggcccggcatgcaaagctcccctgtccc

SEQ ID NO: 215412 - DNA, 122 bp, Homo sapiens
cagaggttatcgaatgccgaggagcccaggatgcacttccgaggctcactggtgactttccggagatacttaggcaaatggacataaatagctcttggatcctagcaggaattctcaacctc

SEQ ID NO: 215413 - DNA, 122 bp, Homo sapiens
gcagttttgtggagggaggaggtgcaactaggtggaaggacagagagaaagttgcaatgccgtgtgctagtctagggaaaggggagggagacgactacaaccccgcccccaacactcaggac

SEQ ID NO: 215414 - DNA, 122 bp, Homo sapiens
taactgaaaaatgaattgctgcgggggaggagggtttagctttcttctcagggctcagaacgaggcctaaataacttaggatgggggccaacagggcagttaacaagcaggtggaaagaaag

SEQ ID NO: 215415 - DNA, 122 bp, Homo sapiens
gtggctttcagggctatggtgctggggaggtgggctccatcacccgaggaacacctagcccgcgacagaggagatacgagcacaaaggctgggaatgccatctgcactagcaggacctggcc

SEQ ID NO: 215416 - DNA, 122 bp, Homo sapiens
aggagccaggaagaaacctcttccacagccctgcctcacccagctgacccccagagcaggcggctgcagtgtcctgggccaggagcagcatttgttccacaatggaggaggccactccctgc

SEQ ID NO: 215417 - DNA, 122 bp, Homo sapiens
cagcccgccctcgcgctcgccactgattggccgccgtccgccggcccggcgcatcataaccgccgccgccctcgccacaccgcctccccattggctgcggcgccgcccccaacccagagcgc

SEQ ID NO: 215418 - DNA, 122 bp, Homo sapiens
cggagcggcgcggcgctttggcgcagagcacaggagtgggggcccagcccattgtggcggcgcccgcgggcccgctaggccgagccgggggaggaacagaggcgcccattgagcggccgctg

SEQ ID NO: 215419 - DNA, 122 bp, Homo sapiens
tctatgtctctgcatgtctatgtgtttgtatacccttgtatatgtgttccttagaacatgcgtgagtctgtgtgtccctgtgtgtgcttccatgtccttgggtctctgtccctggctcaccc

SEQ ID NO: 215420 - DNA, 122 bp, Homo sapiens
ttcccaagcctctttttggccagcatggtttggaggtgacctgaagattttactcagcaacgtggttttaggactgctgagagcagagacaacggctacccttactgcggcacgttcagtga

SEQ ID NO: 215421 - DNA, 122 bp, Homo sapiens
caagagggggccctcccccctcctaggcgggagggggggtggtgcgcacgcccccgaggacgcaggtaaggagagggagacaagatggcgaacgccccacagttccccctcccatgacggct

SEQ ID NO: 215422 - DNA, 122 bp, Homo sapiens
ggtgaaagctacccggcttcgcggggcacctcccctcccctactcggagccagtctgctgcgaccattacccaggcgtgccattctggccacccgatctccaggcagagctgctccctacct

SEQ ID NO: 215423 - DNA, 122 bp, Homo sapiens
cctcccgctacgatgagaggtaagattgggcgaccggtgtcctggggtggggggcggtcacggggggagcccagccacacaggtctgcccacctcatccaggcccggcccctccccgcttcc

SEQ ID NO: 215424 - DNA, 122 bp, Homo sapiens
cagactgtccccgctgctcccgctgccgctcgctccacactccgccattttgaaagtgcccggccagctcatcagccatggagatatatgcgcatatatttgactgccaaacgccccctcgc

SEQ ID NO: 215425 - DNA, 122 bp, Homo sapiens
ctcccggaggtggggttcctagcgcagcaccccaactgtgcaaacagaccctggagggctcgatgcgcctgcgggggcgtggctggggacctgggcctgggccaggaggggcctttccctct

SEQ ID NO: 215426 - DNA, 122 bp, Homo sapiens
ccctgccgcttgcctttcacgtggctctcctgcctggtgactgtcggctgggcagggggccgggctgctcccagggaagctgtgctgctgcattgttcttggcacttatgccagccattcag

SEQ ID NO: 215427 - DNA, 122 bp, Homo sapiens
gtgctggccgacgtgagctacctgatggccatggagaagagcaaggccacgccggccgcgcgcgccagcaagaagatcctgctgcccgagcccaggtgaggagaagctgcccgcggccccgg

SEQ ID NO: 215428 - DNA, 122 bp, Homo sapiens
gcgccacctagtgctggcagcgcggcaatggcccttttaccgactcgcgcgtctatagtgcggcctcacacaacctctgcggagtccatgagccctggagagcacaagtggtttgtttaagg

SEQ ID NO: 215429 - DNA, 122 bp, Homo sapiens
gaaaaagaaaaaaaagagagagaacgaggattaacagaaaggaattacgattatatcacccggacacacatcatgcttaagattcaactgggagcataccagggatgctctctaacgtaatc

SEQ ID NO: 215430 - DNA, 122 bp, Homo sapiens
ggacaatgcaggaaagagtggaatcattgatgattttgagtttaagcaactgctgtataacgaggtgatttgttgtgtaaagggtggaccataaagaggtaagaagagataagagtggagac

SEQ ID NO: 215431 - DNA, 122 bp, Homo sapiens
gggctgcgcggggcccagctgcttcagcacgggcatctgcgaggggcacgggagggtcagcgcggccccagcccggggctcgcagccacgcgactgctcaaaggacgatgggggacggttcc

SEQ ID NO: 215432 - DNA, 122 bp, Homo sapiens
gtagactgggacaaagctacagtaatcgaaacagtgtggtacaaagacagacatacagaccgataaaataggatagagagcccagaaacaaatcctcaggtatttagtcaaatgattttcaa

SEQ ID NO: 215433 - DNA, 122 bp, Homo sapiens
ctagggagaaggtggcagggctgtgttaaaaatatctgaatggccgggcgcagtggttcacgatctgtaatcccagcactttgggaggtcgaggcaggtggatcacctgagatcaggagttc

SEQ ID NO: 215434 - DNA, 122 bp, Homo sapiens
ccttagataactccagtcggatgtgccattgaaaggccgcgaagaagcttccgctttagccgtagcctttgaggatgagcatgtgagggatttcttagacaaaggagggaggatggttggtc

SEQ ID NO: 215435 - DNA, 122 bp, Homo sapiens
ccccccgcatttccacattctccaagtgagaacgtgtcccgcagtgtgagggtgagctgtcgtgatataattagagtctcttggccttcttggtggtccataagatagcggcatgccttccg

SEQ ID NO: 215436 - DNA, 122 bp, Homo sapiens
cctttacccggtttaatttcagtttaggccaaaatccccgcgggttggtcggggcgggagcggggctcggtgttcggggctgacggcgggggcgaggccatggttctcacaccatccagagg

SEQ ID NO: 215437 - DNA, 122 bp, Homo sapiens
ccatgtacttcctcatcccagatctcagtccctcaagggccaggcaggtgtcatccaagacgacaagccatctcagtctcatgtactgtggggagaagacctcccagagccctctaccctct

SEQ ID NO: 215438 - DNA, 122 bp, Homo sapiens
aatggagttgggcaaaaccacgacttgaaagtccggcatttgctatcaaaatggaagacacgcactttctttaattttgttatgcccacttctaggagtttattttacagacaaacagatat

SEQ ID NO: 215439 - DNA, 122 bp, Homo sapiens
ccagatgttttagctcctctttcatgactttaatcttgtgttggattcatcaccaaaagacgaacaggagcatccgctctgcattacttattacctccaagaagaaacactgtcgcagcact

SEQ ID NO: 215440 - DNA, 122 bp, Homo sapiens
gatgagttccggactgaaccctgacatgtttacagggtctgtctgtgcaaccccaggaaccgggacagagaaccggaagagcagcgccttccagaagctacctcgccggggccagcaagagc

SEQ ID NO: 215441 - DNA, 122 bp, Homo sapiens
cgaggagagaatccttttccccgcgtacctgctctccccagttgaatgcccgggaggccccgaggggctccccaccctaaaagcagcaactgagaaagtgactgaaccggataccccctcct

SEQ ID NO: 215442 - DNA, 122 bp, Homo sapiens
actctctaccaatgcatagaagaggagagcaaaattcaggttcagggaagagaaaaagagcgtagtggttgaaaaagaacccaaaatccaggagagacgtagaactaaactccctcagggag

SEQ ID NO: 215443 - DNA, 122 bp, Homo sapiens
gaagatagggatggggaccccgaacttgaaccactctacgacatagggtgggggctgtcccgtcactgggtggatcacgtcgcatcgcaggaccacgctctccccagctcttgccgtcacaa

SEQ ID NO: 215444 - DNA, 122 bp, Homo sapiens
actcttcctcccccaggaagctctgagcttccagcatcacgggaccacagcacgtcatcacgcacccaaagatcaccgagctaaggtgtcccgccactctgaaagaacacagtgtcgccccc

SEQ ID NO: 215445 - DNA, 122 bp, Homo sapiens
gcgctgtagtcatttataaccaccctgaagttggataatgcgccgcgggagacagtcctgcgctgctgcggctgcaggatcagcgagctaccgggtgcagggggaggggcagggggcactgc

SEQ ID NO: 215446 - DNA, 122 bp, Homo sapiens
tctcccatactctgctccattgcccgcgccccaccctacgcccaaagcacccctctgacccgccgctgccaccccgcactctggcccccgccgtaccccggtcctgcagcgccccctcgcgt

SEQ ID NO: 215447 - DNA, 122 bp, Homo sapiens
agttcagagtctggggtgacgtgtggactgagagctggggcttcaagggctcttggtctgcgctgccgtcccagcacaggagtagaattcagaactagaggaggggtctcctccctgagaag

SEQ ID NO: 215448 - DNA, 122 bp, Homo sapiens
tacctgtattctgcagggacaggcggcctttctgctgggagctcctgtcttggggaccctcgggtgggttggtggcgtcggtcccccgcgccgggtcaaaggtggccaacaccaaagccagg

SEQ ID NO: 215449 - DNA, 122 bp, Homo sapiens
aatgaaaaactccaattccaatggatgaggtatattccttcatccaatacatgtcacacacgttgagcaccactaactggttagcccccatcctcctccccgcggccgccgcctagtcctca

SEQ ID NO: 215450 - DNA, 122 bp, Homo sapiens
tgttgttgccgctgctgccgccactgcgaggcggtcagggcaagggtgagggtgggggcgcggaagggggcctgggctcgggatcctgctgccaccaattcctggtgccccaggaggttgtt

SEQ ID NO: 215451 - DNA, 122 bp, Homo sapiens
ccactgatttcaggcccttcctgacgggttctggtgaggacggcggctctaagtcggcctcgtggagtcagcatctgtgttctcagaaatgctgcaggtccatccccagggacactggaggt

SEQ ID NO: 215452 - DNA, 122 bp, Homo sapiens
gaacctggcagggcgccagtgaccgctggggccagagccctgccgggaaaggagggcttccgccttgcagcgcagctcggatcagcagcagcccaggaggcctcccgcccgtactttcccgc

SEQ ID NO: 215453 - DNA, 122 bp, Homo sapiens
gggtgcagattctgaggacggctgagcccacacagcagcaccgctcagtgggacatgggccgcggcgcctgctccagccttgtgctctcctttccctctcagtctctcctctctctccttgt

SEQ ID NO: 215454 - DNA, 122 bp, Homo sapiens
ctctcccctcccattaaatatgccattccttctctccagtcatctccccctctgctttcccgggtcagcaaggctaaggcaactgctcagcaccatccttatcagcaagcttagcgcccccc

SEQ ID NO: 215455 - DNA, 122 bp, Homo sapiens
agggctgagtccatcattgtttggtaaacaatattacagatcaggcgtcgaaaaatattccgaaagcacagtccttggaattgttaatcccactcttgacaggcacaagaacacatctgtat

SEQ ID NO: 215456 - DNA, 122 bp, Homo sapiens
aaggttgatccacgttaggagtggtgtatttctattgatcccatctccggtgttgacaaacgccagcgcctaggctttgcagtccggggctgcagtttgcagtagagctaagcggtgtgcgg

SEQ ID NO: 215457 - DNA, 122 bp, Homo sapiens
ggtaatggatttgagagtccccttgctataagtacctcttcttgcgggagctcatccttacgtgaaataccctcaactttctaagaaaatcacaaccacttatattttttctatgatatctt

SEQ ID NO: 215458 - DNA, 122 bp, Homo sapiens
gtaaaccagggccggcagacgcctctctcccccacggaccggcttcccgcaggtttgtggcgactgccccatgtgctatcaacgggcactctgagggagaagcgcccaaatcagccacggag

SEQ ID NO: 215459 - DNA, 122 bp, Homo sapiens
tttctttgcttcctcacacaacacaaccttgagtattggattattcctgagatgagagaacgcatatgagacaaggtaaaggtctgttgaaatcctgtctgtgaatccttctagctatatct

SEQ ID NO: 215460 - DNA, 122 bp, Homo sapiens
cagcagagcctggggttgctaagttcctgatgttgcccaccaggctattgctctgagcagcgctgcctcccagctttctggaaccttctgggacgcctggggtgcatcaagtcccaagggga

SEQ ID NO: 215461 - DNA, 122 bp, Homo sapiens
cagaatgcggactgcgtcccaggggcggagcagaggcgtatcttggtcgagattggatagcggcggggcgcaggaaagaggtcgcgccagcccgggcaggcagctttgcaagtccgcgttat

SEQ ID NO: 215462 - DNA, 122 bp, Homo sapiens
gggaagggacgctcaaggccatcattcccaggaccttccctgtcgtcttcctgtgaaccccggccacgcaaagggatctcgcccagcctttccaaaagagccccaggcttcggactacacga

SEQ ID NO: 215463 - DNA, 122 bp, Homo sapiens
ggcctgaatggttggctaacggggctaatcgcagagcgcagggaaggttgggatgcagaccgcagctggagccctgtgatgtgagaggcctggaaggatttcagaggccactcaaggggacc

SEQ ID NO: 215464 - DNA, 122 bp, Homo sapiens
cagtgcatccccgaggccccaagcaactctcctccaactgtctttagggataaccctgagcgggcagccgctctactctatacctaactttatccgtaccagatacctagcctcactcaggg

SEQ ID NO: 215465 - DNA, 122 bp, Homo sapiens
agtagagcatcctaaagaaggggcaccttttcctaatttgcacgaaggtgctacattggccggcagctgcctttggaatcatcctgcatgtttgttaaattatcagtagccggaccccactc

SEQ ID NO: 215466 - DNA, 122 bp, Homo sapiens
cttccagggagatccaaacggctgtgcgcctgctgctacccggggagctggccaaacacgcggtgtcggagggcaccaaggcggtcaccaagtacaccagctccaagtaaactagttacctg

SEQ ID NO: 215467 - DNA, 122 bp, Homo sapiens
tcccaggacgccaatgttgggactggacgaggtggacccgttgcccgtgcccaatagccccgcgatgatgcagcaaatgccttcggtgaagatgcccctgtaaggaaagggagagtcggggc

SEQ ID NO: 215468 - DNA, 122 bp, Homo sapiens
tggggttggagctgggctgtggcactggactgcgttcggggacgggggacgcagccagaacgcgagggtggtagggaaatattgggggtttcgcgtgcaccgaagggaatgggaggagaaga

SEQ ID NO: 215469 - DNA, 122 bp, Homo sapiens
gagggggaaggccacccggcctgcttccacctcccagccagacccctcccctgaccggagcgccaacacctcccccgagagcagcagccgcctcagctccaatggtgagaaaccgttcccaa

SEQ ID NO: 215470 - DNA, 122 bp, Homo sapiens
aattgctgggattacaggtgtgagccaccacatccagccaattttttttttcaaagacaacgcaaatatgacaaaaacaaaatttattaactatagatatttattgcattattgtatgtact

SEQ ID NO: 215471 - DNA, 122 bp, Homo sapiens
ggagagaggtgttagctcactagctttacataccttatctcactcagtgcagtgggccgacgactgagacgtgtgaatcagaacattcatttcaataaagaggtttggaaactctctgggat

SEQ ID NO: 215472 - DNA, 122 bp, Homo sapiens
cgccctggaagaggcagtcaccccggaagaacaacttagtctgccccggaatctgaacgccgtcgaccatagagatgagacattctaggaaaagcggcggaggtcggctaagaacgtgtgga

SEQ ID NO: 215473 - DNA, 122 bp, Homo sapiens
gggccgggggcgcgtagggcgcctgcagacggcccctggaagggctctggtggggctgagcgctctgccgcgggggcgcgggcacagcaggaagcaggtccgcgtgggcgctgggggcatca

SEQ ID NO: 215474 - DNA, 122 bp, Homo sapiens
acttattcaatcacgttgcgtgtgtgtagcagggagcaggacgcgacaggcacaaggctgcgtgaaaccagcgacggtgccttgcactcacctgcacaccggttccacttctaacttttctg

SEQ ID NO: 215475 - DNA, 122 bp, Homo sapiens
catccaccacttcccccgtgtggggtccagagtggtgttgcatcactggtgcgcggcatacgcgctttcttctgatccagcctgtagagactcgcctttgggacccatctttgcttcctttc

SEQ ID NO: 215476 - DNA, 122 bp, Homo sapiens
agcgcgggtctcagctctggcctagcgactggacgctcgcgctgccggttgttaaaggaccggcaggcagctcccagtgcatactaacatttttaatgtataagattttattacggttcagt

SEQ ID NO: 215477 - DNA, 122 bp, Homo sapiens
gaatcagctcgaagtcctcctgcgggttccggcgggacaaatcgaagccggggttcatggcgggccccaggtgccccccgcctccctcccgggcaggggaggggggccgctcagggggccac

SEQ ID NO: 215478 - DNA, 122 bp, Homo sapiens
ttcagctaggaagttgtagatcctaaattaagagttcaaggtcttaatggctactctatgcggcctctcatagtcttttcaagggttttggagaagaataaaagatcaggtatggcttctcc

SEQ ID NO: 215479 - DNA, 122 bp, Homo sapiens
accgtcggcgcccccagactccagccgctcagaccccgacttaagaggcagcctcgaccccgcctctgccttctgacccatccctaaagatggccgggcacccctacaggacccccagaagc

SEQ ID NO: 215480 - DNA, 122 bp, Homo sapiens
gcaagccagcgactccacaaccccattgggcagggcgagaggctgccgggaaggcactgtcgttcgaaggacctgcctcgctaccttttaccccgggctgcctcaacatccccttttaagcc

SEQ ID NO: 215481 - DNA, 122 bp, Homo sapiens
ctcccaggctcaagtcatcctcccacctcagcctctggaggagttgggaccacaggcaggcgcctccatgccctgctcattttaaaaaatgttttgtagagatggggtcttgctatgttgcc

SEQ ID NO: 215482 - DNA, 122 bp, Homo sapiens
tggtgattttgttttgagtttttttttgtttaagaacagtttattagattgggccatttacgaagtcattagaacttggtgagcaaagtcagattacaggctattaagcagaaaaataagag

SEQ ID NO: 215483 - DNA, 122 bp, Homo sapiens
cctataaaaggtgaataccatttgccactgcttaatataatcgctggtctgactttcttccgctatatttttttcctcccttgcttcctttctttaatcctttcttccctctttcattattt

SEQ ID NO: 215484 - DNA, 122 bp, Homo sapiens
caggggacttgttgaaaaagcccattcctggaactttttggatcctgcagaatcacattgcgaaaagcagggccaagattaccaagtgatttataaacttgaggggttcaagatacattcag

SEQ ID NO: 215485 - DNA, 122 bp, Homo sapiens
gcgggggtcgcgtcctctccatccccgaccttggacgcaaccccgggcttgggtcccccacgatctagacagaaactcgttgtttctcgtgctccgcgccacccgcgtcctccggtctgttt

SEQ ID NO: 215486 - DNA, 122 bp, Homo sapiens
caagtaggtcacggtcttgttgccgggggctggctggaaggagccggagtaagagagttccgggttgggcttctcgttggtcagaccgatgtccattacattctctgcggagagcgggggag

SEQ ID NO: 215487 - DNA, 122 bp, Homo sapiens
agcctgtgcaaactccaggtccctgtccggtggatcccacctctgagggcccgagggtgacgcggtgaggacaccacgggttctggtccttcccacgcgcgcgtccgctagcccaggcccgg

SEQ ID NO: 215488 - DNA, 122 bp, Homo sapiens
ctctggccgtttctgtcagaggatggttgtcgaggggctcggggctgttggcagggcgtccgggctggcgggctgcgctgtagacccggacacgctgggcttcgggctccagcgcctgggca

SEQ ID NO: 215489 - DNA, 122 bp, Homo sapiens
agaacgtgaagtgtggggtgggcattctcgtttcttcaaaagcaccaatgctaagctgcccgacagtcaccactgatggtcccatcaactgcatattacaggagggttccccacaggatgcc

SEQ ID NO: 215490 - DNA, 122 bp, Homo sapiens
ccccgccccgccccgccctcctcgggccccgctccttcccaggcgcccccgcgccgccggcgctttgaagtcccaatccggcaaatagagtcaatcaattatgaagggaacaatctggcggc

SEQ ID NO: 215491 - DNA, 122 bp, Homo sapiens
gccggctgccgtccatctggccgtgagagcccttcgattggctcatctcgccaagggaggcgggcatcccttccggcctcggggcggggtcgacgccgaaagaggcgggatctttgaggtga

SEQ ID NO: 215492 - DNA, 122 bp, Homo sapiens
acccaagtccacccctctcgggatcctagagagtctccctgcccttttaggttactccatcgccctagggtttccagatcgatttttcctctctctcacaagtttacagaagaagcagactg

SEQ ID NO: 215493 - DNA, 122 bp, Homo sapiens
tgcggtgggtgcggtgtggggtccaggtctgtggtgcggtgtgcggttgtgggtgctaggcgttgaggcagacgctggcaaaacgcctgtttatcaccaatagctttgtctaaaaaggtgtg

SEQ ID NO: 215494 - DNA, 122 bp, Homo sapiens
agagtgtccgggtacaaaggaaaagtccggtcaaggccaagggtcaaggccgaggggagccgggggtcaggggaacaggtggatctcacaccactgcacacacaacacaggtgaacttgaat

SEQ ID NO: 215495 - DNA, 122 bp, Homo sapiens
gtgccaggggcgccgggaagcccgacgacgacggtgtcgtaaaagcgtcgcgaaggcgtccgcccttggcggcttcctgccacctgtataagtggagtgtgctggggtgtgtaaagtagtat

SEQ ID NO: 215496 - DNA, 122 bp, Homo sapiens
atccgggcggaaagcctccatgtccacagccctgttgtcttctcctgcaatgtcctcctccgtggggccccaggaggacaaagctcgtcccttggcaccgccaaggctgaggacaccaaggc

SEQ ID NO: 215497 - DNA, 122 bp, Homo sapiens
acatccacccagaaatcgacttcccgtgaagcactctgagtaaagccagtgggagcctcgcgtctgtggattctattcttttgaaggcgtgtgatcagcagacatatgctgtccaatgcttc

SEQ ID NO: 215498 - DNA, 122 bp, Homo sapiens
ctacgaacatcagcagggcccccctgggggcgggactggggaggcagccaatgaagtcagcgctgggcgggcactggagcgagcctggctgcgcggagagctcatcccgggaccacagggcc

SEQ ID NO: 215499 - DNA, 122 bp, Homo sapiens
acattaagccttcctagatcccgacagtagaaaccaagctgaggcatacaggttaatccgcggggattttttgttagataagacacagtatatcatatacaaaacaatgctggtaagaattc

SEQ ID NO: 215500 - DNA, 122 bp, Homo sapiens
cagatcctgcccccgtgcccgccagggctcaggttcctctgagctggtcctgggccaggacgcatctgcatggcggtggtggggaggaggggtgcgccatggcctggaggggagtgtgtgtt

SEQ ID NO: 215501 - DNA, 122 bp, Homo sapiens
ccgccgcaaacttagaagtgagacgtgcagtccccaaggagctgcagaaaagggctcttccggagtcctggggattgcgcgtttaaaggggaccctccctctccccggatcttctctgagct

SEQ ID NO: 215502 - DNA, 122 bp, Homo sapiens
gacacctagaagtaggagtgagattcgctgaagttcccttctgaggaagacccacccctccgcctggagagccggggctggcggtgcctgaggaccccttcggcctggacagcccacgcggg

SEQ ID NO: 215503 - DNA, 122 bp, Homo sapiens
taactgcggccctcagggcagtgggtcttcaggcctggctggacaccccagcttagagctcgctcaggcggccggtccatgacaccgtcctgggcaggcctttcatggacacacactggcct

SEQ ID NO: 215504 - DNA, 122 bp, Homo sapiens
aagcgccgggcccagccgctgcacgtgggtgccgcgggggcggggcctccggccgccgctcgcccattcgcacatggcttctcaaggatcgctgttgtcatcctcggggcggggtcggggag

SEQ ID NO: 215505 - DNA, 122 bp, Homo sapiens
gtccctgccctcttcagaccagggctgtagggggatgtcctgccactggcaggggtcggccgcctgccctcaccctcctggctccggcgggcgcggctggaatgtttgcctttgctgtttgc

SEQ ID NO: 215506 - DNA, 122 bp, Homo sapiens
cagagtgggggaaggcgtttcggttgtggtgctgcggcagtgagcgcggatcaagacggacgcggcggctggatgactaaaccccgagactctagaaccaaaggactagggggaccagggcg

SEQ ID NO: 215507 - DNA, 122 bp, Homo sapiens
atgctcgggggaggcggattccgggtccggagttggaggctttgggcggccgcggcgtagcgcgcggtgccggggccggcggggaggcgcgcgcttagggcgcggcgccggcgacgcggcca

SEQ ID NO: 215508 - DNA, 122 bp, Homo sapiens
ggaagacagcccaacactaatgtttacaggaaactttttactctctgattttattgtctccgcactctccagcatttagacctttcatggcaaccctttctttacctcctatgctggtttct

SEQ ID NO: 215509 - DNA, 122 bp, Homo sapiens
gtgtctgagcagacagggcgaacaagcaggccacaccgtctcgagggaggaggccagatgcggccagcgtctccaacagggtgaccatccgctcggcttgctgagcgtttaaacaaatgttt

SEQ ID NO: 215510 - DNA, 122 bp, Homo sapiens
gcagacccacgggcagtgcggtgccactttcgcccaacagggtgccaagagagaaaactgcggtggtcataggaaaacagatccaattcaggtctcatgcaacaacttggtggcaatttagg

SEQ ID NO: 215511 - DNA, 122 bp, Homo sapiens
ggagggagtagagggtttgcggaagaagggggtggacttttcaatctgatagacctgaggcgaaatcagaaaccagtctctcttagccgtggaatgctggataagttacgtcacttttctgg

SEQ ID NO: 215512 - DNA, 122 bp, Homo sapiens
agccgctgacagccccactaggaacgatctggagtctggtctagggcacttctccctccgcgttcatacaggttgccacaaaaagcttgggcctgaagctcgaaggccccggacccgctggg

SEQ ID NO: 215513 - DNA, 122 bp, Homo sapiens
gcttaatttcattactttgcaaggatcctatttccaaaggtcacactcacagattccagtcggacatgattttttttgaggcaggtccattcaacgtgctatcattgtggtgtgggaaattc

SEQ ID NO: 215514 - DNA, 122 bp, Homo sapiens
agttggcttgggtcttgggtctcatgggctgcatgtctgggcattcttcccctaaccacccgtacaggtttgttgacaactaattggaaaagatacgtctgcagatagaaaaaagaaagtaa

SEQ ID NO: 215515 - DNA, 122 bp, Homo sapiens
cacagggataggaagcactgcaacacagtgattcatacaccttatccacttaagcaacagcggtcaaggatagaatcaaatgtggatggggtcagaaagagattactgacaaaaaatatcag

SEQ ID NO: 215516 - DNA, 122 bp, Homo sapiens
ccatgggcctggactgaggtggggggtctcctgcccaggggtgggctcttcagttgctgccgcctaaggcggaaccacgggtcagggaggtgaatcagggcaggacatgaggatgggaaggg

SEQ ID NO: 215517 - DNA, 122 bp, Homo sapiens
ccgggcctccgcccaccttgtcccgcaggtcctggatggtcgtgtagtagtggctgtagtcgcgggagggcccaggcccctgcttctggtaccagtcgcggatcttcacctctagctcgccg

SEQ ID NO: 215518 - DNA, 122 bp, Homo sapiens
catggtattgtttggcatgacctcaacccatttacctgttactttggtagcaacaccacacgaatggtcaatttcattcccatgggcattccttttatgcaggacagagctaaagaataatc

SEQ ID NO: 215519 - DNA, 122 bp, Homo sapiens
cattttattaagagagttcacagaatttcgaacttttattatggtaaaacacacagcaaacgtgaatcttcaatattgggtctgattttgttgcaattatgcctggaagtagctgagaatta

SEQ ID NO: 215520 - DNA, 122 bp, Homo sapiens
gaatacataaacaccactttcggagccatctaataaagactgagctctgctacacagcagcgagcctcagctcaggggaaacagggggaaaccaggagagccgaccatggcaagcgcttcgc

SEQ ID NO: 215521 - DNA, 122 bp, Homo sapiens
gcagtctggctccccgagtcatgagttcccgcccctcccccgtcccgccccgggcagctgcgcaccctgggcctgacactccctggccctgcctccacccaggacccttctctagccaactc

SEQ ID NO: 215522 - DNA, 122 bp, Homo sapiens
tcgaatgccattcacaggaacagcccaggaacccagggacttcagaagggctggtttgtccgaaaagtgagaggaggcggaggagaggtgaggagagcaagtgcaagaagagaccagaaagt

SEQ ID NO: 215523 - DNA, 122 bp, Homo sapiens
attgtgtgaagggggcgtggctctcacccccagcagtgctgggagcaattggcaaggtgacgcctcctgtctttgcaataccagagaagagcatggactgcaacctctttcccttccttgga

SEQ ID NO: 215524 - DNA, 122 bp, Homo sapiens
actcaggccaggtccttaccgctgccgtcaggggtggcccggacgaaagtgggcagcatgcgaagggaggaggcctcccctcggagccccttggccatggccttccgcatctgtgcctgaac

SEQ ID NO: 215525 - DNA, 122 bp, Homo sapiens
tcaacaccaggtccatgaggaagaaggtgtccgagaccacgttgaacacgatccacagggcggtggtctcgtccttgaagaaggtgatgcccactgggatgatgatgaggtttcccaccatg

SEQ ID NO: 215526 - DNA, 122 bp, Homo sapiens
ggggcatgcatgagcgctcacgtgcctttgcttctgaaaggaacttgcaggctgggcagccgctgctccagggcctggacggtctccacgtatgcagaggcacagccgagccacacacccac

SEQ ID NO: 215527 - DNA, 122 bp, Homo sapiens
ataaagaaatactgtgtagcaataaaaatcatggaaaggctcagcacaatggttcatgcccgtaatcccagcactttaggaggctgaaggggaaggatcacttgaggccagcagttcaagtc

SEQ ID NO: 215528 - DNA, 122 bp, Homo sapiens
cggcgcagccttcaacttggacactcgggaggacaacgtgatccggaaatatggagaccccgggagcctcttcggcttctcgctggccatgcactggcaactgcagcccgaggacaagcggc

SEQ ID NO: 215529 - DNA, 122 bp, Homo sapiens
gtgccggccctcggctcaggccgggctgaggccccgggggctcggggtccgggggaaaggcgctgagccagacaggtcccaaggagccttcgggaagggagggcctcgtggcggcctgtccg

SEQ ID NO: 215530 - DNA, 122 bp, Homo sapiens
tggtggcctcagagttgtgccagagggtggatgagggcctgtgcctcccccagagctggtcgtggagggtccctgggagggctcagggggtctggggacctcggaagtggtgctggtccagg

SEQ ID NO: 215531 - DNA, 122 bp, Homo sapiens
ttgagtagaaatgagaccagttagtattggtaactgcagaggaatatgcattttcaccagcgttctcgggtcagagggtttgcctggcaccgcgtactgggaaactcgccaaaagcggtgca

SEQ ID NO: 215532 - DNA, 122 bp, Homo sapiens
gagacctggaaattctgcactaacaaaaataccaaatgtcaacctggattaattttttcccgcattcagagttttggttcactgtgtcaccatatttccattattcttagacttagagccat

SEQ ID NO: 215533 - DNA, 122 bp, Homo sapiens
tggggctggctagagagcgcgcgggcgcgcgctagcgggagggactggcgagcgtgcagccggggaagctgagggctcgagttagcaaaaatcctgccacttgctcacttttccctttaatg

SEQ ID NO: 215534 - DNA, 122 bp, Homo sapiens
aaactacaggaaagggaagattaaaaaaaccccaagtccctttaaacagttaaccctgagcgtggctggggctgtggtaactaaagacccattttctaaattttgccggctttatgttcttc

SEQ ID NO: 215535 - DNA, 122 bp, Homo sapiens
cgggggtctgtacaggtgtgtcctaggctcgaaaccccggcgacgaaagtccatagttagcggctttcttcctagcagaggctgatatagtggagctggggctggggactagggacttgcag

SEQ ID NO: 215536 - DNA, 122 bp, Homo sapiens
gccctcagggtgggctgaggtgcggctccctggagaccccgcccgctagccgggagccagcggcgcagtgcgagttcagcccgctttcttcgcgctccgcgtcaaatctctccagctctgtt

SEQ ID NO: 215537 - DNA, 122 bp, Homo sapiens
ctatttggcgacgcctctgccttccccttaattatacagtcatgagccgccctggaatcacggcagctccggatggatcctggatgccagaatgcagcctcagcacggggctgcaggacagg

SEQ ID NO: 215538 - DNA, 122 bp, Homo sapiens
tatggctttttacaaacaagcactctagactctggggttttggaggtgtttctgtactcacgtgatggtccacaggtatctagcaaatgggcagcaccacttcatttagatgaggaggacta

SEQ ID NO: 215539 - DNA, 122 bp, Homo sapiens
gagccaggttggtggcgcgatgagttgcagcaaggcctacggggagcggtacgtcgcctccgtgcagggctccgccccgtcgcctcgaaaggtgagtggatctcgaagagaccgacggcctc

SEQ ID NO: 215540 - DNA, 122 bp, Homo sapiens
ttccctgggtgcatcctcaaaagactgcagagtgacgacgaagccttcgtgaccacgggccgggccacacttcgcgggatacgtcctcaaaagaccacagagtgatgacgaagcctttgtca

SEQ ID NO: 215541 - DNA, 122 bp, Homo sapiens
ccgcgtgcacgggcgtgcacaaagagtgtgtgtccccacgcacttaggcctgtcgcctctcgtcctgggggcacatagcagctgcttgtctggaaacacccatagcagatgttattttacag

SEQ ID NO: 215542 - DNA, 122 bp, Homo sapiens
cccgcgggtgtgtgtgaggatgggactttgagcctgttggaccgggcagtgaggtgggtccggcgccgagggttcgagccttgcggcaaccgtgcagcatcttggcaggtaggtcctgtacc

SEQ ID NO: 215543 - DNA, 122 bp, Homo sapiens
ttgcagaaaacgtacacctgaaaatatgcctgtggcctctggtcctccacccttcctcatcgagtgggtgtgtagattcaaattttagaaacattttgtctgtcagttcagttagccgaatg

SEQ ID NO: 215544 - DNA, 122 bp, Homo sapiens
cccgcccgcgggcaccgcgcgccccgcccgtcccgcctccgccccaccgagaaccgcgcgcgccctatcccgcggcccaaagccccctaactcaacccctaccggcccaggacctccctctc

SEQ ID NO: 215545 - DNA, 122 bp, Homo sapiens
ccacctccgtaccagccccattcagcctagcacttccatcgatggctggaaaaaacagaacgcatgcatctgaaatcctcacatgacccagggcctggaaacacagacaccagtgagatttc

SEQ ID NO: 215546 - DNA, 122 bp, Homo sapiens
ggaagcttctcaatgcagaagcagcgtctccaaggccttcttgcctctcagacacagggtcgaattcagaagtacgagctgagccaaattcccccagccccatttcctgcctgacaccccat

SEQ ID NO: 215547 - DNA, 122 bp, Homo sapiens
cttcaacaccatgtcggagataatggaaagcggctatactcgcatcccggtgttcgaagacgagcagtccaatattgtagatattctctacgtcaaagacttggcctttgtggaccccgatg

SEQ ID NO: 215548 - DNA, 122 bp, Homo sapiens
agctgggctcccagagctggagggtctttttactcttccctcgttgacagtctttgttgtcgccactggtttgttgccatctttcacatgggatgccctaagccctctctattccttccaca

SEQ ID NO: 215549 - DNA, 122 bp, Homo sapiens
tctctgtttcttttgaggagtttcatgctgattattgagacaaggtggttcaggcaagaccgctctcgagcatggacgcaggcacgtaaaagttcatgcacaatcacaccacaggcattcca

SEQ ID NO: 215550 - DNA, 122 bp, Homo sapiens
ccgcgcccccgtcgctgaacaccgccctgctgcagaccctggggcacctgggcgacatcgcgaacatcctgggcccgctgcgcgaccagctgctgaccttgaaccagcacgtggagcagctg

SEQ ID NO: 215551 - DNA, 122 bp, Homo sapiens
agactttggaatgttgtgcctgaaggacattagaggtttatattcaacctcctccttttccgagaaagaacctggagcccagaaggacagattttccccaaattgtacagcacatcagtaca

SEQ ID NO: 215552 - DNA, 122 bp, Homo sapiens
actatccaaagtgcagttgcaggacctgccaggagcccgcagggctgcgggtggttcttgcgtaatcgcgccaagaaagacctggttccagtttcagggacaactcgcccataaacttctac

SEQ ID NO: 215553 - DNA, 122 bp, Homo sapiens
gtatagaatcccagggaggcatgagtgaagggaaaaggggaacaagtcaaacaacgaggacgagtcaacataagagcatgcatgatggtcctgaccacaacttaggcaagcacaattgcttc

SEQ ID NO: 215554 - DNA, 122 bp, Homo sapiens
cggacacgcgcggcctctaccgcaagatcgtcacgcccttcctgagtcgccgcgacagcgcggagaagcaggagcagccgcctcccagctacaagccgctcttcctggaccggggctacacc

SEQ ID NO: 215555 - DNA, 122 bp, Homo sapiens
agcaggggaaaaataaagaatgagtagtgagggtcttgttcttcaggggggcatcctagtcgtctgcctctagaacacaaagcccaggggaggggatgaacagttctcaagcacatcccatg

SEQ ID NO: 215556 - DNA, 122 bp, Homo sapiens
cttcctttgcggatagcacccctggacctccgaggtcagcctgtgccctgcagctggagtcgcccttgactccactgtgccaggagagggcaccctgctcccagctttggcttcagactgct

SEQ ID NO: 215557 - DNA, 122 bp, Homo sapiens
gggacaagagaggagactggcctttatataacagggagtttggcttggcaaaaggagaggcgagcaattagttgagaatcatcttgggtttggtttgcctcgtaggcattaagttacttctt

SEQ ID NO: 215558 - DNA, 122 bp, Homo sapiens
tcactctggtgatgtcagggcccctccatgctgtgggtgtgtcagcacttcctcctctttcgcaaccgagtggcgttcccgtgtgaagaggccaagctgtgctcacgcgttcttcagcgggt

SEQ ID NO: 215559 - DNA, 122 bp, Homo sapiens
accctggcctcactcttcctggaggggcagactgaggagatcacagggttctgcagaattcgaggaagaaaaggccctggcctttcagtgctacctccttttctacaaaccgcgggaaaacc

SEQ ID NO: 215560 - DNA, 122 bp, Homo sapiens
aaagaaagatgccctttcttgataaacaccaatgccattgggtaccagcattgtccctttcggtactcagagttccttctagcacccaccagctgttcacagtgccaggggactgggcctta

SEQ ID NO: 215561 - DNA, 122 bp, Homo sapiens
agccacagccaaccacgcccctttgtccctgctcagacaaagcctgggtcctgaggttggcggcacgagtagggcgcccactccttcatccacgtaagcgccttggcttacgtggcgggtcg

SEQ ID NO: 215562 - DNA, 122 bp, Homo sapiens
cagagaatgggagactgccccacagtgctggaagctgccgcacagactgaggtcgccttgcggtgaggagggaaaggacctgatggtgccctgctctgggctctgccccctggtggggagct

SEQ ID NO: 215563 - DNA, 122 bp, Homo sapiens
gtctccaggtcaccccagctgttgtcattccgggtcctgaccaccacttcacggcagcgccgggcctgcggtggggtgaagagcagccacagccccacatcctgccagacaaggatggtgtg

SEQ ID NO: 215564 - DNA, 122 bp, Homo sapiens
ggcctcaggtgcgcgctccccgaagctctcctgccacctgttggccgccggtggtgctgacgctacggggagaagccacgcttcagtggcttgcctggaattcatgacttgtgcgctccacg

SEQ ID NO: 215565 - DNA, 122 bp, Homo sapiens
ataacaagcaacttctgggtgtcccctggggccgagggcaagcttttcttgtctctgctccgggctctggtgtgaactgagttgaatcggatgagatgcgtctggggaatcgtggagtccag

SEQ ID NO: 215566 - DNA, 122 bp, Homo sapiens
aaggccagtagcttcctcctgagcggtgagtgcatcatgtcatggcttctgacaggcccccggtcctctcccagcccagcatccccgaccctctcccaacatctcgcgaccctgtgctttgg

SEQ ID NO: 215567 - DNA, 122 bp, Homo sapiens
acaaacttgacctagacattctgcctctcttcacttgggcccccccagatgtctggcctgcgtagaccagcctcagtgcacgcagctggaaggtgcagtgcctgtcggaggcacccgtttcc

SEQ ID NO: 215568 - DNA, 122 bp, Homo sapiens
ggccactctgggacctgcgaggcagttgttgcccaaagacaaggcctgggtacaggagctcgggaagctctctgctgcccgtctccgttatccacgttcgtctgggcaccctcctcgggtgc

SEQ ID NO: 215569 - DNA, 122 bp, Homo sapiens
cctgctggctcactgtcctgatgctgttccagttctccatgggacaaaatactcctgggccggcccccagggaaagagttcctactgctgtgccacttgagcaaatgctagaatgctttgtg

SEQ ID NO: 215570 - DNA, 122 bp, Homo sapiens
attgtatctaagtcccacaattttaggtttttcttttccttccaatggccttttttcccccgaagtaattttgtttgtgaagaattcctcctatgcaggtatttgttatccttattatagaa

SEQ ID NO: 215571 - DNA, 122 bp, Homo sapiens
tttttcacgccattatatatacacttcatgagaaagtttcaaacactttctcaatgatcacgagttaccaagaaaataaaagattaaatttgtacagatattgatctatatatcaaatacat

SEQ ID NO: 215572 - DNA, 122 bp, Homo sapiens
agaaccctagagctcacacaaatcagtatgtggttggatcacagtggtaaggatacacagcgagatgacgggaaagacacaggcagagtctggaaaaatccatgtgcaggcttccttatgct

SEQ ID NO: 215573 - DNA, 122 bp, Homo sapiens
tcccagctcccgcctcctttggcctacctgagatccaatcagcacagactttttccctttcgccccgccccacctcgaggggagggaaccccaggagacctggccggggcatcacgtgcgca

SEQ ID NO: 215574 - DNA, 122 bp, Homo sapiens
tgtaaaagagacctcacagcacaaaagtagctgcacagaaagaattaacaagatcccaaacggactgatctctctctgcatctggtactgaaaacttttggtatcccggctacatgccacaa

SEQ ID NO: 215575 - DNA, 122 bp, Homo sapiens
cttaagtgatccccccacctcgtcctcccaaagcgttaggattacaggtgtgagccaccgcgcccagctggtttgctaatattttgagaggattgttgcatctatgttcatcaaggatatcg

SEQ ID NO: 215576 - DNA, 122 bp, Homo sapiens
aaagagagagaggagggggccagggaccccagagcctggagtctgcaaagccgcctcactcgcgctgcatcagcctcacctctgaacccgcatacctgagaagaagtgggccctgaagccgc

SEQ ID NO: 215577 - DNA, 122 bp, Homo sapiens
ctcctcttgccccactcaggggcaggcctcttctagattcttccccccggcacccctccacgaaggttgtttttcacaagcctggataatcagcctaatccccctgcttctggccacaaaga

SEQ ID NO: 215578 - DNA, 122 bp, Homo sapiens
actttccctgcccttgccgtgggtccggcgttcctcccagccgggatcacagtgggcagccggcacccggcaccactttggcgagcgtcctgcttccgccctcgccctcatctacgctgctc

SEQ ID NO: 215579 - DNA, 122 bp, Homo sapiens
attcatggacctaaagagaaaatgctgaatgcatcatcttggtaaataaaagccctgttacgcactggggtcccttagcaaaggatctttcacccagaagatacacagagagtcaagccacg

SEQ ID NO: 215580 - DNA, 122 bp, Homo sapiens
ggggagttgttattgcgagtcacccttggcaagaaactcaatagaaaaccctggtatggccgggagtggtggctcacgcctgtaatcctagcactttgggaggctgagcggggggggtggat

SEQ ID NO: 215581 - DNA, 122 bp, Homo sapiens
cttcggcctggtctataacccgcacgaggcctgctccctgaacctggtggaccacggccgcggctacctgggcatcctgctgagctgcatgatcgctgagatggccatcatctggctgagca

SEQ ID NO: 215582 - DNA, 122 bp, Homo sapiens
aaggaatgcaatctcttgccattcatagagccccggaggccacgtgagaaaacgctgatgcggcacctccatcgagggatcacccctcttttgggctttcctggcgcgtgttgtatgatctg

SEQ ID NO: 215583 - DNA, 122 bp, Homo sapiens
tttttaaagaagtaaattagatcatataattcccaggtttaaaattctttttggaccaggcgtggtggttcacacctgtaatctcagcactttgggaagccaaggtgggaagactgcttgag

SEQ ID NO: 215584 - DNA, 122 bp, Homo sapiens
gtctgtcctatcccaatggccccaacaagatacatatagaccttagattattgctacctgcgtggattcaaatgaccaaggcacaacaatgaggggaatccaagcaatgccagcccaggtgg

SEQ ID NO: 215585 - DNA, 122 bp, Homo sapiens
tgcacttctgtttgccgcgctgaatgcggtcactttacaggtaagctgctcgggggtacacgtttaggttattaaaagcaagaaataggtgcacaaggaagcggccacgctgggtgagtagg

SEQ ID NO: 215586 - DNA, 122 bp, Homo sapiens
cgccgtgcgaggcagtggctccggcccttccagctcgggatggagtcagggagccgcccgcgcccgaatgcagaggctcctgcgatggccccggagtgagtcccccagaggagccggattag

SEQ ID NO: 215587 - DNA, 122 bp, Homo sapiens
aagacttggtggcgaacgagggtcaggacctgcatcctgcctcagagttatcgacgtatccggaatgtgggatcagaggctggtgaagttggccctgttgcagcatctgcgggccttctatg

SEQ ID NO: 215588 - DNA, 122 bp, Homo sapiens
cacacagctttgttatttgttatttttttaatttttctgcggggagcatcggggctagcccgcccagctccaacgccagagggtgtgggggagactgatttctaaatgggtgggagcgacac

SEQ ID NO: 215589 - DNA, 122 bp, Homo sapiens
caccgcacgcgcacgtcgcacgcgcggcagcggcttggctggcttgtaacggcttgcacgcgcacgccgcccccgcataaccgtcagactggcctgtaacggcttgcaggcgcacgccgcac

SEQ ID NO: 215590 - DNA, 122 bp, Homo sapiens
tccagcctgtctccagtaggccaccatgctgtagcgaaagcggagctcgtcgggccgaatcgccaagacgccggcaatgtcggctcagccgggcggttcagccgcaggaagatcagaccaca

SEQ ID NO: 215591 - DNA, 122 bp, Homo sapiens
gtggtccccagtccagcagcgtcagtttctcctgagaaagaaaggcctattttcaggccccgcccaagatctactgagtcacaaacttggggaaaacaatctatattgtaataagccttcca

SEQ ID NO: 215592 - DNA, 122 bp, Homo sapiens
aagtcccagaccaaggggctgctgggcggtttctcccaaggcctattcatggcccgcagacggtggcttctcctgtgtcctcccacggccgctcctctgcacacacgcatccctggtgtcgc

SEQ ID NO: 215593 - DNA, 122 bp, Homo sapiens
ccgccgccatcttgcgccgactccctccgccctccgcctccgctccgcctcccgcccctccgcctttaaaggcacagccgggcaccccgcccgtgccgctgggcaatactcggccgactcgg

SEQ ID NO: 215594 - DNA, 122 bp, Homo sapiens
tgggggaggggtgctacattcaaaggctgagttggggcttgggggttgcccagacagatccgcccgtggggccagtaggcagacacacaggcagctctctagtgggcggggaaggcacagca

SEQ ID NO: 215595 - DNA, 122 bp, Homo sapiens
tttcagtctctgcgccctcctctgtagaacctggcagatagcgactgaggctgtctgccacgtagggagggggcctgtgctggagttgctctgaatgtcctgtccgtttggctgcgaggtgg

SEQ ID NO: 215596 - DNA, 122 bp, Homo sapiens
taaaaatatataacaatagagaatatcagtccaaagtgattgggggagcaaaactacttacgagccccaaggactgccagcgttgatgtgtggagcagtgacagcatgtctgcaggcactgt

SEQ ID NO: 215597 - DNA, 122 bp, Homo sapiens
gcgcatcatcaccacgaatagctgtgctggctccaggagagaccctgaggtgcggccgctcggcgcttccagtagggaagagcctgaactcgcgtgcccatctgggagcccctctcacgcgg

SEQ ID NO: 215598 - DNA, 122 bp, Homo sapiens
ggagctagaaatgtgaaaaacagtctttagtaagtttgcttaaaagagaacagtaggtggcgtttgtaaacaactcaaagggacttatccagacaaaagtagcaattgtcctatttaacctc

SEQ ID NO: 215599 - DNA, 122 bp, Homo sapiens
ggggtctgggcctggggggcggcggcctccgtcgccatggaaaccggggcggggaggcggcggcccggagagccccatgcactttgcataccattgcaggttcctccccttgggccccgcca

SEQ ID NO: 215600 - DNA, 122 bp, Homo sapiens
cgggagtgaaggacaaagcctgggctcgaatctcaggctgtgtgcgccctcggctcactgcgttttcagcaccaggctctagttcagtgggaaggagaagtcctctcccgtatattcatgga

SEQ ID NO: 215601 - DNA, 122 bp, Homo sapiens
aggggcgtgaccgccagttggccgggctgagcgaggcgccagagggaagcctgcaaggtacgtctgcgagagccgggtgcgggcgcggcaggggaaaaggggggcgctgactctcttaccgc

SEQ ID NO: 215602 - DNA, 122 bp, Homo sapiens
gggggcgcgggggtggccgcagggccagactgtggaaacgcgggctcccagcgcaccgggcgccctcggggcgtccccagcccccggccccaagcttccgcctcgtgccttccgcccctgct

SEQ ID NO: 215603 - DNA, 122 bp, Homo sapiens
gcaatctcggaagtgctggtttgtcccgttcatctggtggcctgcagcagggtgcaaatccggcatgtagtggttgtgggggtaggggtgatggttgaaatactggttgttgagcttctgca

SEQ ID NO: 215604 - DNA, 122 bp, Homo sapiens
ctcagatggaacagagctctcccctgggcctccctcccttctgggactaaacgagggactcggagggttctttgcttcagagatcacagagctttgaggtcgcagatggggaaactgaagcc

SEQ ID NO: 215605 - DNA, 122 bp, Homo sapiens
attgtgcacttggccagaatcctcaatattcacacaccactggagctgttttaaagtttccggctttctctgccacataccccaaaattattaaactgatatgattcaaagtcagtataaag

SEQ ID NO: 215606 - DNA, 122 bp, Homo sapiens
cacccacgagaaaactacggaagctgtgaagacggaggtgtgcatgtggccgggagaacccggggggggagccgcactggggacagaggggtgggccccacgagcaaacgagggaggcgctc

SEQ ID NO: 215607 - DNA, 122 bp, Homo sapiens
tgacttacgggaagggcaaggaattgcaccctcagagaacacttccccagtcagctaacccggtgacaggcgagcgtgggaagggcacaagcacagggtttcttcctcttctcccccagccc

SEQ ID NO: 215608 - DNA, 122 bp, Homo sapiens
gacctccctaggcaggaggcctgtgtcactgtggtgccctgtcactgcagcccaagaggccgtccactcacagcctgagggtctgggggaggccaccatgggcagggccagagctgagggtc

SEQ ID NO: 215609 - DNA, 122 bp, Homo sapiens
gcgcctgcagacttcggtgcgcgcagttcctaagcccacatgcgcagttctcaccttgcgcgcagcctcacgtacagcccccgacaggctcccagccccactggcgcagaacccatcaccgc

SEQ ID NO: 215610 - DNA, 122 bp, Homo sapiens
agacagagcgagagagagatcaaagtttccctaggggaagggggcgctctgggggaggggcgccccaggatacccgaagactccagctgtccccaggtattttcccagccaaaaacctcagg

SEQ ID NO: 215611 - DNA, 122 bp, Homo sapiens
tgggcctcagccctggctgaattcaaccccagcacaaggctcccttcccagccttggaggcggcctcacattgtgcagtccaaggcctcgggtgcccatggggccacactcacgcccccatg

SEQ ID NO: 215612 - DNA, 122 bp, Homo sapiens
ggctggcggatcactcgccgctaggagctggagaccagcccagccaacacagcgaaaccccgtctccaccaaaaaaatacgaaaaccagtcaggcgtggcgtcacgcgcctgcaattgcagg

SEQ ID NO: 215613 - DNA, 122 bp, Homo sapiens
agtgatacacctgccttggccgcccaaagtgctgggaatataggcatgagccaccgcacccggcccatttctaaaaatctgtttggttttggggcggagtgtcattttgaacttattcagca

SEQ ID NO: 215614 - DNA, 122 bp, Homo sapiens
atttgttttaagggtggagccggagataattttaaacaccctcccccttggtgcacgttgcggggtgtgactcaccacggggaaatcagactgatttaaaaccttcagtgcaaacttgtaaa

SEQ ID NO: 215615 - DNA, 122 bp, Homo sapiens
ccgccgctcccgccgctcccgccgctcccgcagccgccccgccgcccgcccggagccccgcgtccctaggcctggctcccgcctgcccgagacccgcccagcctgccccgctcagccgccag

SEQ ID NO: 215616 - DNA, 122 bp, Homo sapiens
cccgcggtgccctgaccttggacaagtcctgggtctcggggggctgcgagccagaaaccacggggacgctgtggccttaagaggccgctggcaagtgcagcctcggagtttccagaccccaa

SEQ ID NO: 215617 - DNA, 122 bp, Homo sapiens
ccaggtgaggcctgcaggaggagggatgggctgccaggagcgcaggccacatcacggggacggtttcattgggaggaacattttatgtttactgggtattcccatttctgtttgtgtaattt

SEQ ID NO: 215618 - DNA, 122 bp, Homo sapiens
cctcgtcgccctctctccgtcttctcgcggtcattttcctaattggatggagctgtggggcgtgagcaccagcgtcagatcggggccctcaggctaccaggtgggcgcgcgggctcggggac

SEQ ID NO: 215619 - DNA, 122 bp, Homo sapiens
gcaagcttcgcagacccagcggcccgcaggcccctaggtgtagaactgctaggggtatagcgattcagccactgcccttaacaactagcagttacccgtctttttgcctttgcttgtgctat

SEQ ID NO: 215620 - DNA, 122 bp, Homo sapiens
ccccagggcgaccggtgctgtgctgccacctaggggccgctctacgcactgcaggtcagccgggcccgcagtccccaggtgctaacaatctggtttctgctgttcttttgttgttcaatttt

SEQ ID NO: 215621 - DNA, 122 bp, Homo sapiens
ccctcccggctcctcggagcggccgccgggcagcggtgagttgggcgcggggggccggcccggttgttcaatgggtttctgtttgccctacgtgctgagttagttgtggtctctactccgtg

SEQ ID NO: 215622 - DNA, 122 bp, Homo sapiens
ctggaatttaggcttcccccgtctgaattgtgctggtgtatctggaatttaggcttcccccgtctgaagtgtgctggtgtgggtggaatttaggcttcccccatctgaatcgcgctggtgta

SEQ ID NO: 215623 - DNA, 122 bp, Homo sapiens
ctcatcagtgacgtctgatctcaactgaaataataaagttcccagggaggcatcatgacccgccagtgacctccacagggaaacagtgcattttatggcctgttataggagatgatctttgt

SEQ ID NO: 215624 - DNA, 122 bp, Homo sapiens
caggggtcagaggtcaaggccagtggtctatcagaacccagttcctgcaggagccagtgccggtactaggtagactcagatgactgaatggtcctcgggatctgaaggccagtgggggagat

SEQ ID NO: 215625 - DNA, 122 bp, Homo sapiens
tcacagccaggagctgggggatgagtgcagggttgcctccgtgtagtccttatggagaggcgaaggagccagccgcagtctcttcctggccagactgacagagtactgactgtcaggccact

SEQ ID NO: 215626 - DNA, 122 bp, Homo sapiens
aaatatttattgtcttcctcctctgtgggagcagctggaaggtagaagagaaacacagcccgcttttgaaggaaaatgaggaacacagagacctctagaggcgtaggaagagcaccacccag

SEQ ID NO: 215627 - DNA, 122 bp, Homo sapiens
cataggtaaaataagatcatcataccagattgttttgaagattaaatcaagtgttattcacgagaggtgcacagcatagcatgcacaacaaataaggacctggtaagtatctaattaataac

SEQ ID NO: 215628 - DNA, 122 bp, Homo sapiens
acctccctcctcactcatttcaaaaaataacaacgtgccagccacctccgcagataccgccggctggtgcttgcccaggagacgccagggccagagcgccactcccagcatcgaaatggcag

SEQ ID NO: 215629 - DNA, 122 bp, Homo sapiens
tgggcgcgcggctaccgagaccctcgcgggacccccgcgagccctggtgctgggtcaacgcggtgaggtctcagttactgatctcgtgcgcggccctaacagacggtgtagccaaggcaacg

SEQ ID NO: 215630 - DNA, 122 bp, Homo sapiens
tcatgaaaactgacttccttggggcttgacctggggctgctctaagtgcgctacaggtaacgccattaacccgtgcaagacccaatgaacagacgctatcataagccccacttttcaggcga

SEQ ID NO: 215631 - DNA, 122 bp, Homo sapiens
tgatagctggtggccactaggggtccccagaaggcttttttaatgaacaagaggcacccgcgctcctcacccctccctttccttcccacaaatgccaggggtaaaaacaactttaagctctg

SEQ ID NO: 215632 - DNA, 122 bp, Homo sapiens
ggacttgaggggcgaattaatctcattcctgtacaatacggggtgcctctcccaaaatcacgaaaaccagaaacgcggcaggagagtcatgaacccatggaggtgaacagttcagctgctgg

SEQ ID NO: 215633 - DNA, 122 bp, Homo sapiens
accactgagccacgtagctggaaaggctgcagtctcgaggcctcatgccaggggaagtgacgcttgatccggaagtcctgaccgacttcttagaattgttcttattacatgcctttttgggg

SEQ ID NO: 215634 - DNA, 122 bp, Homo sapiens
tttgtttatgcctactatatgcggtgccagggtagacgagattggctgagctggaaactgcgtgtggaagatagcagagcaacaaaatagagggaacccaggtcactgaaaattctggagcc

SEQ ID NO: 215635 - DNA, 122 bp, Homo sapiens
ggccttggcagggcagagaacaaacacagaaagaacctgcaagccgacaccaggccgcaccgccaagcggtacaagcccgaaaacctcgactccggaagcggatgatccgctcgccacgcct

SEQ ID NO: 215636 - DNA, 122 bp, Homo sapiens
tcagccgtggtcaaccccaccatgttcttcaacatcgccatcaacggggagcccttgggccgcatctcctttgagctgtttgcaaacaagattccaaagacggcagaaaactttcatgctct

SEQ ID NO: 215637 - DNA, 122 bp, Homo sapiens
ctgggcgttccgacggggtggcggtgggggtcgggggaggcccttgagaaccgtgcggcccggggagagcccacccattgctgagccccgacacaggctttgaagttgctgcagtggctcag

SEQ ID NO: 215638 - DNA, 122 bp, Homo sapiens
cggagggcaaaaggggaattttttttttttcaggaagaggaaaggatgtttttggtgcgtcggagtttcagtaggctgggttgtgcgagagatttccaaaccggacatagccgtaatgaatg

SEQ ID NO: 215639 - DNA, 122 bp, Homo sapiens
tcaccgctcaggtttcctggccaggaagtgcacaccctttgtcttaacaatgagccactccggcaagtgctgagtttatcagtctctgcctgggaagggaggaaccgccttcactgctgtat

SEQ ID NO: 215640 - DNA, 122 bp, Homo sapiens
aacgtacatactcctccaagttaaagatgaatctgaccacaaactgcaccttttctgtcccgttggtgaagtaacagtcagcctttgcctgaatcacaaaatcttctggaaaaccaaaacca

SEQ ID NO: 215641 - DNA, 122 bp, Homo sapiens
gcagatgggagaaaagaaacgacttcctaatagaaatgccaaagtttggattagacttgacgggaaaacgaacctggaaaatcctggaaggtgtgctctctttaagacctaatatctgaaac

SEQ ID NO: 215642 - DNA, 122 bp, Homo sapiens
gagaccactcccggttacccctgcctcagacagactctgcttctgggaacccagcctgggcgcttttgtgtccacctctactggcacctgcctcccctagggctgggccctctccagcacgc

SEQ ID NO: 215643 - DNA, 122 bp, Homo sapiens
ggggcacacggggacctcaggggatcttggtagccgagggccttcctctgagagctgcaacgcaaagagactcaaaacaacggagaaaaaactcagggcaaggttggccttggctcataaga

SEQ ID NO: 215644 - DNA, 122 bp, Homo sapiens
tcctggacatctgtgtctcgctgttgatgggagagcagtttctcgtcagctggtgttagccgggcggagtgtgttagtctctccagagggaggctggttccccagggaagcagagcctgtgt

SEQ ID NO: 215645 - DNA, 122 bp, Homo sapiens
gaggaagccactatgttttgtctatgccccgaacaactgcccggcacagagtatgctctccgtgacttagttttagaatgaatgaacttacccatgtttcgcagaggtaataagttgttttt

SEQ ID NO: 215646 - DNA, 122 bp, Homo sapiens
ttacttatgaatgtgtgccacagatttcagtgtctgtaaaagaaggggaaataaacaaaccgatggcttttagggaacttaagacacatggaagaaagtgcttagaaggctattgaaatatt

SEQ ID NO: 215647 - DNA, 122 bp, Homo sapiens
accctctctgtcctttaaggcttggaaggaatgccatagggctccctcggtgggccagggcgacgttgatgactcaggatctcaaaaggacctagagccagtctgtcatccccagtttctta

SEQ ID NO: 215648 - DNA, 122 bp, Homo sapiens
gatgcagcacagtcttggcaggagcaggtcgccacgtcgtcaccttgggactcattgcaacgtgcaaccccctcattcagaggctgaatcccactccccacggcctggccaggctccaagag

SEQ ID NO: 215649 - DNA, 122 bp, Homo sapiens
gcaagggcggctttgccaagtgcttcgagatctcggacgcggacaccaaggaggtgttcgcgggcaagattgtgcctaagtctctgctgctcaagccgcaccagagggagaagatgtccatg

SEQ ID NO: 215650 - DNA, 122 bp, Homo sapiens
tgctgcccaggctgtggggtggctgctcctggcagggagttgtggaccaggtgatccagacgcaatcccagcccgccaagtgcgtcagccgctaccactgagcgcccgggtgcagaggcggt

SEQ ID NO: 215651 - DNA, 122 bp, Homo sapiens
gcctgctacagaaatcagctgggatatctgctattcttgcaaattggtctatattaaatacgtaattcagaaactaaaattaaaactaaaacgaagccacaatttctggagcaatcttcaaa

SEQ ID NO: 215652 - DNA, 122 bp, Homo sapiens
caggtctacagaggagcagctaccccttcacatgtggctgtaggaaaaccagaatcaccccgttgtggatacaagcatggctagcagcaggggagatggaactctctacccctctcttgctg

SEQ ID NO: 215653 - DNA, 122 bp, Homo sapiens
gacgaatgacgacgggagcctggcccaggaggaggagggcgccctgcggacttcctgccacgtgttcatggtggacccagacttgtttaatcacaagatccaccaaggcattgctcggcggt

SEQ ID NO: 215654 - DNA, 122 bp, Homo sapiens
tgcagcagagcctctccgtgggcaactttgccgcggggctcctccaccgccgagaacttccggctgcagtacaaccatttccgggcttgcaacaagaagcagctggaccctacgcagctgcg

SEQ ID NO: 215655 - DNA, 122 bp, Homo sapiens
cctgtctaaaggaggtgctaactcagcgtctggcaagaacgagataccttctcaagacaacggaagcagctcccctccctccaccctggttgcacaatggttgaccaagaatgtgcttccac

SEQ ID NO: 215656 - DNA, 122 bp, Homo sapiens
gctgccgcccatcgtgctgaggagccaggtgtacagccttgtgcctgacaggaccgtggccgaccggcagctggtgaggggcgtcggtgcgaccgccggaagcccctttcctaactcctgga

SEQ ID NO: 215657 - DNA, 122 bp, Homo sapiens
ggtgactgggggaaaaagtgaaaagcgatttgaactgatcccccgccctctccattataccggagaatgcaagtgtcccgcatctcaagattaaactgagcctcggttttactgacgtaacc

SEQ ID NO: 215658 - DNA, 122 bp, Homo sapiens
attgttagtttttcgcagaagctttacccagttcagttctgcattcatccactgtactaacgaagagtgtcatatatattttttgttgttaatctcataacccaaactagattaatctccct

SEQ ID NO: 215659 - DNA, 122 bp, Homo sapiens
tcctccgctgcctcacttccggggatgctcctctcgatgctattggatagccaggagaaccggaagtggcgaacttgctggaacttctcgtgtttgtgggagctgaggtaggtaggtgaaag

SEQ ID NO: 215660 - DNA, 122 bp, Homo sapiens
cctcaggtgagcgagcagccgagcgcggccaaggactgggctctgaaacccccctccgagcgtgatccactgatttcctgaagtcggggaattgctggcactggttcctttctgaattgagg

SEQ ID NO: 215661 - DNA, 122 bp, Homo sapiens
cagggtatcaaatgccagtgggacccctgaggagccagccttttcttctactgccagctgcgaaccctggtcctcggaaaatcgacataataatccctgacgtttgctcttcagtctcgcgg

SEQ ID NO: 215662 - DNA, 122 bp, Homo sapiens
cggttagtctgggggaaaatcctatgattcactccctttcccacccaccttctggtgggccgtttgtggccttaagttagcagtgtgtgtgtgtgtgtgtgtgtgtgtgtgtgtgtgttgcg

SEQ ID NO: 215663 - DNA, 122 bp, Homo sapiens
agagaggtccttccgcaccctcttgctgccaggtgcgcaacaatagctgggcgtccgccccgccctctctaccgcaggagccacagcgtccgccctcgcccccaagccgcgtctgccgggtg

SEQ ID NO: 215664 - DNA, 122 bp, Homo sapiens
gatgagttcagcatgccctacgaccgcatcctgtccgacgagcagctgctctccacggagcgcctgcactcccaggacccgctgctgtccccggagcggacggcctttcccgagcagtcgct

SEQ ID NO: 215665 - DNA, 122 bp, Homo sapiens
tggggcgcgggaagggcggtcgcgcatgaatggagaatggacgcgggaggggaaccagaacgcagtttcaatgagttacacagaaagcattagaatcaggggacacgcacagcttgaagagg

SEQ ID NO: 215666 - DNA, 122 bp, Homo sapiens
gattcataagtcttatctggaatatgaaaaatacagatttctgcacacaattctcaattccgagagagcccaggaattcatattaaaaaaaaattctttgaggcgattctgatttggattgt

SEQ ID NO: 215667 - DNA, 122 bp, Homo sapiens
ccgtctcgccacggtcttgggtctgatgcgccgcgtgctcctccggctggcgtctgcacacgtctctgcatctgcgtgtacgtgggagtatgaacatgtctgtgtgcgcccaggagggaggc

SEQ ID NO: 215668 - DNA, 122 bp, Homo sapiens
atcaacgtcatggagtagttctcaggattaaatgaaataatgcatgcatttaaagcactccgaacagggcctggtgcataggaagcactcaataaatgttatttcttattatttaaaaattc

SEQ ID NO: 215669 - DNA, 122 bp, Homo sapiens
ccttcgggggcccaggggaccctgagaagtctggccgtgcccgggcggtgagcgcggaggcggcccgccctgtgtccccgcggggcggagccgggttcggggccgcgctctgggccggcggg

SEQ ID NO: 215670 - DNA, 122 bp, Homo sapiens
cgatctcctgacctcgtgatccgcccgccttggactcccaaagtgctgggattacaggcgcgagccaccgcacccagcctagaatcagtatttttgaaaagtaccttaggagagtccaacgc

SEQ ID NO: 215671 - DNA, 122 bp, Homo sapiens
cgcagccagccgttccagtcctagacatttacccaagaaaaatgcaaacacacgtccatccggcaccatccatgtgtgttcacggcagccccagcacccgtccccgtgtgttcacggcagtc

SEQ ID NO: 215672 - DNA, 122 bp, Homo sapiens
ccagatcttctgcaacctggtttgggtgagctctcccatctctggagacatcttaggagtcgcaccgaatgacatcactgcccacaaggtacctggcctcacttcctatcttactagctgtc

SEQ ID NO: 215673 - DNA, 122 bp, Homo sapiens
ggctgtccccggaaccctccgagcggcgccctcaggcccccgccaaaaagctccgcaagccgaggaccatctactccagcctgcagctgcagcacctaaaccagcgtttccagcacacgcag

SEQ ID NO: 215674 - DNA, 122 bp, Homo sapiens
ttgacctccgtctctaaccctagaagcctcacatctcacgcacagatctccgcccacccccgtacaccaccgggatctcgccagcaggaagacaccccttcagtctcacccttctccagccc

SEQ ID NO: 215675 - DNA, 122 bp, Homo sapiens
tacggaactgcaggtactgcgttctcattactcctggaggacaggctgagtcccatggaacgatgtgtgtccctctccctgtcagatctcaacacagtccatcactgttccaaatgacttgt

SEQ ID NO: 215676 - DNA, 122 bp, Homo sapiens
actgccagggtgtgatgggaagggttagcagcgcagcggggtcaggggatccccgccccccgccctggctcaggttgggtcccgacttgggtttctgagtgcttactgtgctcagctcctca

SEQ ID NO: 215677 - DNA, 122 bp, Homo sapiens
tgcagtcaggctgcttggaagcctggactgtcctccaactgccccagccaaactccgcgtcgttccacctatcaatggcccgccagcctgtaggtgtctgttggtgtgccctccacgagcag

SEQ ID NO: 215678 - DNA, 122 bp, Homo sapiens
cgggagaaagtggcggtcagggatggagctgctgccatgacaaccccggcggtcggggcccgcgcgcgtcggggctgctcccgggaggaaggcggcgcggaggccgggggcggccgctgagc

SEQ ID NO: 215679 - DNA, 122 bp, Homo sapiens
tcttcgtgtgtgtactcggccttcagggtttccaccgatttttacaccttcttcccaccacgatagcttggctttaatgtggaattaaattatatatttttaaaacctgtttttaaaatttt

SEQ ID NO: 215680 - DNA, 122 bp, Homo sapiens
agcaggcggcttgtacatgtaaatgcatggtttgcaggaatctgggagtggataggctgacgggtgatgaatattcaaagcacaactgtaagcgactttagttacagcgaaactctaaggca

SEQ ID NO: 215681 - DNA, 122 bp, Homo sapiens
gagggtgtggacacagtatgtaatgtcttttttctttttatttcttcacttcttttcaaacgccctttccttcagtctgttatttgccttcctctgaagagtcccttctcccataaaattct

SEQ ID NO: 215682 - DNA, 122 bp, Homo sapiens
gtcttggtaggggtgggctccgcactggaggcggagctgctgctgggtggggcgcgcctccggcgcggacggaggcggcgggacgcccgctcccacgaccggcccacaatgaggcgagcggg

SEQ ID NO: 215683 - DNA, 122 bp, Homo sapiens
caactcctgagcacagcagtaacctttacacagacagcctgatttcccagaatgaattctcgtgtttacttccagatttaatgactttgactttagtagtcatctgaactatttattttact

SEQ ID NO: 215684 - DNA, 122 bp, Homo sapiens
gttcagtgatccagctttcatatcaggtgatcaggacaaccaggccaatctgatagggggcggtgtttataaaaaggccactcacctagagccagaagctccacaccagccattacaaccct

SEQ ID NO: 215685 - DNA, 122 bp, Homo sapiens
ccgggctggtctccagctcctaaccgcgagtgatccaccagcctcggcctcccgaggtgccgagattgcagacagagtctggttcactcagtgctcaatggcgcgcaggctggagtgcagtg

SEQ ID NO: 215686 - DNA, 122 bp, Homo sapiens
gggtactagggtgggtgggggcctgaggggtggcttggagccctggcggtggctgcctgacgtcaccggcctctctggcaataggctgcgagctcagctccctgaagcggcggcgaaggcgg

SEQ ID NO: 215687 - DNA, 122 bp, Homo sapiens
cggacgcttgctccagagagcggccgcagcctgcggcgagagacacctgaggctgggaaacggctccgggagccgcgcgaggacacagcccctcggcaggaagaggcacatttcacgctctg

SEQ ID NO: 215688 - DNA, 122 bp, Homo sapiens
acgaggctccctggctggctgcggctgcaccctcgagggttgttatagtaaccacacagacgcacgcagcttcgcgtgtgtgccgaggaattcacgggcagtacataaactggactccctgc

SEQ ID NO: 215689 - DNA, 122 bp, Homo sapiens
cggtgacatcacagatagggcgattcctatgcagaggaggcagctcaggggctgctgcttcgccaggaaagatttctcgtgctgtgggagctagtccaggacttccggttggacgtgatagt

SEQ ID NO: 215690 - DNA, 122 bp, Homo sapiens
acacttgatcctccatttataacagaaactgcatgtatatagagattggattatttaccacgaaaatgcagccattcaggggaaggaggagaaggtaattggtttttattccctatcaaaac

SEQ ID NO: 215691 - DNA, 122 bp, Homo sapiens
ggacagaaggggaacacacagttagggcgcagcggcggagatgggggcgcaggcacaccccgcatctgcaagacagcgaccctcgttccttcactccaggagaggtccctccgaacccctcg

SEQ ID NO: 215692 - DNA, 122 bp, Homo sapiens
gagaagggtggggatccggagccgcaacccagccttgtcggtgtcctggaactggttaagcggcagctgcgccggctttcgaagcggtcttgcctcgaaaacctcaaagaaaagtttggctc

SEQ ID NO: 215693 - DNA, 122 bp, Homo sapiens
cgtggctccaccccaggccttgcgccaggacgcgcagagagagagagagagaggcggacacgatgcggactcgcagactttaagcaaacacgtgtggggccgctcccgcctggcgggtcagt

SEQ ID NO: 215694 - DNA, 122 bp, Homo sapiens
ttctcgtgcgtgttggggtcgaagaagcccttggtgtcgtcgctggggtcggccaggacgcggttcatctcctcgtcgaagtagccgcgccggtaggccacgtccacgggcacgcggtggct

SEQ ID NO: 215695 - DNA, 122 bp, Homo sapiens
aaagctgcactaacccccggccggctgagctctgggccccgttagcctttctttgaggctcgtccactaaaaggcagccccagtagtcccagctgaaatgctccacacccgagccccgctgg

SEQ ID NO: 215696 - DNA, 122 bp, Homo sapiens
atgatgtttgaagaaatgagacagaataaataaatcatactcatattcatgccaccctggcggtggggtgggcacaggaaagcttgtcatttccttgtctcaaagtcattatgcggaagcca

SEQ ID NO: 215697 - DNA, 122 bp, Homo sapiens
aggaaggcctcgcatctgcccaccgcccagtcctgggcctcacagtgaggatgcaggtcacgctgcacagatgaggcccgtgtggcaggtggtcccaggaacgaactcgcctcccgccagcc

SEQ ID NO: 215698 - DNA, 122 bp, Homo sapiens
ctcgccgccggagaagctcaaggatcccgcctcggcgaagccaatcgcggacgagcccgccgcgcgtgcgcactacctagccgctgcactgccctgtcctgccctactctgattggacgacc

SEQ ID NO: 215699 - DNA, 122 bp, Homo sapiens
gtgtgacctgggcagtcctgacccctctctgggctggcatccccctcagtgagccgagggcgctggacagaggtggggccctggatgcacttgaccttgcacctccaaatctctcgggggga

SEQ ID NO: 215700 - DNA, 122 bp, Homo sapiens
ggctccctccgggacctcgctggctttcctgttcccgacccctcggccaagccgtgcgaccgggtgggctctgcttccccgggaccccactctgaccccatcccctaagccgctcccgcgag

SEQ ID NO: 215701 - DNA, 122 bp, Homo sapiens
tgatggtgatctccttctcttttgacgtgatgacctcgatggccgccatgaaacggtcggcgatgatggacactcccagaaacatgtagaccatggccacaaagtacaccactgcccgtgcc

SEQ ID NO: 215702 - DNA, 122 bp, Homo sapiens
tgccggggctgccacgttatttccagcttttgaggtggattttgcccgctggtgtgccaccgtcagcgcttccgggttgaactccagctgagctgagctgatcagatcccaccctacccagt

SEQ ID NO: 215703 - DNA, 122 bp, Homo sapiens
cgcgtacataaactattaggatacaggaaaagcgcgatactactggcacatagaggaaatcggggaagatgcttagaacaatgtctggggcacacgctcagtgctttacaaaatactcgtta

SEQ ID NO: 215704 - DNA, 122 bp, Homo sapiens
cgcatgctttaagcttcagtccaggactaaagatctggctttgacacctaggagggtgaccgtggctgcatcacttcaccctgcagagctgctgtcggatctgtaaagtggggccaaccgtg

SEQ ID NO: 215705 - DNA, 122 bp, Homo sapiens
accagttctcagataccttcaaatgcgtgtgttttcctgtaatctccagcaccaatatagcgcttcatgtagtagtaggcagcacatattttaaatgaatatactaaaggcttcatagcttt

SEQ ID NO: 215706 - DNA, 122 bp, Homo sapiens
ccctcctgagtggtctctagcctagtgctggtcccatcacctgagtctcaccagaaagtgcgggaggactgccgtgcttctgtggtggggcaggaagaagggaggggaaatccagacaactg

SEQ ID NO: 215707 - DNA, 122 bp, Homo sapiens
tcttggggaacgctttctggggcagggcggggacccgggggcgatggggccttcaaccgacgggcaaacacacacagacacaccccggctgtcctccagctgcgatgcggctcgctgcgccc

SEQ ID NO: 215708 - DNA, 122 bp, Homo sapiens
tcttgtcttcccaaaccaacacattccattctcaatcatcttctcacttatcagcagtgacggagttgttcatgagcagaggacactaaagattccaagtagccacttggcatcttagagta

SEQ ID NO: 215709 - DNA, 122 bp, Homo sapiens
cccccagagctctgcacacgcagtcagccactctccagatcagattggaggggcgcagtccgcgattccacacccaagccgataaagaaaaacccagcaccaccctcctggctaagccattg

SEQ ID NO: 215710 - DNA, 122 bp, Homo sapiens
gcccccaccgccactgagaaagcaaacaaaggggaggagacccctgcaggttctggatgccgaaggccaatcgaaagacttagatcccctggaaggcgggcgccttggtttaggggggtcca

SEQ ID NO: 215711 - DNA, 122 bp, Homo sapiens
cggaccacttagagaatcccgttcagggtggctcatttcgctaccagaacaccaccatagcgcgggaagcgcgcagcctcttgggacttgcagtccctccaagcccttcatagcggccggcc

SEQ ID NO: 215712 - DNA, 122 bp, Homo sapiens
gaagggagaaaagtgacccagcaggaagaacttccaattcggttttgaatgctaaactggcggggcccccaccttgcactctcgccgcgcgcttcttggtccctgagacttcgaacgaagtt

SEQ ID NO: 215713 - DNA, 122 bp, Homo sapiens
aagggagccgtgaagagccaaagagatcacagaggtgggagggcctagtgaagagtcaagcgctctgctctgtcccctgggagggaagaccgcagcccaggcctagcctggttgacctcagg

SEQ ID NO: 215714 - DNA, 122 bp, Homo sapiens
ttttggggacacagcaccagcacatcagggtctgtcaccaacacgatcacatggccagggcggggcagggagagcttcggctcacagcagggatcgcccggtggcaggggggatggggcttc

SEQ ID NO: 215715 - DNA, 122 bp, Homo sapiens
ttgccctcgaagtacgcggggttctgtgccttctcatactcctcaaaggagaactgcatccgcatgttggaaaggatgatgcggcgggacatgcggctctctgaggctgagctgcgtagccg

SEQ ID NO: 215716 - DNA, 122 bp, Homo sapiens
gagcgacagaagttgtggcagagggacccggggcctctcggagtaggaaatctggtatcccgacaacaacctgcatagcaacaaaagtagaagctggaatgggcctcctccttccggacgga

SEQ ID NO: 215717 - DNA, 122 bp, Homo sapiens
actccccgccccgaccatggtagtgttcaatggccttcttaagatcaaaatctgcgaggccgtgagcttgaagcccacagcctggtcgctgcgccatgcggtgggaccccggccgcagactt

SEQ ID NO: 215718 - DNA, 122 bp, Homo sapiens
actgagtgtggacggtcattgctctgctgcggcttcccggggagcacggctcacggcccacgtcaccatgcacctcgtgtgcactcggacaggccgcagccaccagcctctcccctgttgtc

SEQ ID NO: 215719 - DNA, 122 bp, Homo sapiens
agccaactggactttgtgtttggctttaaatgttttccgccactgtccatccaacagtctcgcttcatattcgtatcctggttcccaagtcccttcgaggagagattctcaaatgcggtccg

SEQ ID NO: 215720 - DNA, 122 bp, Homo sapiens
tgactcactcaaacatatacctttaaatggagtctgtgacagaattaaggcaaacagtgtcgatgtctgtgtgccataatgatgcatgcatcaagatagtccagtttgtgggagatacagct

SEQ ID NO: 215721 - DNA, 122 bp, Homo sapiens
taaatcttttcctaatgaacttacctggacccgagggctgcaggctggacccagatactgcgcaaaccaagaatcaaggaccagctaaataaaatcagccttcctgccatacaattccccag

SEQ ID NO: 215722 - DNA, 122 bp, Homo sapiens
cttctggctcggccacctcctgcggcgccagcccttttccgacagcgtttcggctccccccgttgctatgcactgcggctctctccccgtgggacgttttcagatgagatgaatggtgggct

SEQ ID NO: 215723 - DNA, 122 bp, Homo sapiens
ggtcggcacgaggcttggtttcttctcttctctaaggcctggaaaagctgtgggcccagccgtagctggtggaggccagacctacggcttgagctttccgtcttgcattgtcgcccactttc

SEQ ID NO: 215724 - DNA, 122 bp, Homo sapiens
cctcccccagggtggaagccgtggggtccctcaggcctgggcggtgcagcttccagagagcgagcgccctttagcggcctgccaccacagcacgcggcctcctgatccggaagcacgcagca

SEQ ID NO: 215725 - DNA, 122 bp, Homo sapiens
gctaacatggtgaaaccccgtctctactaaaaatacaaaaaaattagccaggcgtggtggcgggcgcctactgtagtcccagctactccggaagctgaggcaagagaatggcgtgaacctgg

SEQ ID NO: 215726 - DNA, 122 bp, Homo sapiens
ctttaagtagaagctaaatagagggaagggggccaaagacaaaaatatttggctggaagacgaaatcagaaaagacttcctagaggagatgacatttaagatgtgccttgaaaaacggatat

SEQ ID NO: 215727 - DNA, 122 bp, Homo sapiens
ctggacacagccagcttgactctggaagaaccgcctggcacaaagcaatcaggcagtgggcgttccctttgacaggctggctgtctttacatagaacctactggaaacatcacatctgcctg

SEQ ID NO: 215728 - DNA, 122 bp, Homo sapiens
ctttgacagacaaatcattgccctgggcttcctggcggccacgagctccggctcacctcccgctctgaggagccgcggaccctccagcagacccaggtctgttctctgcaattagttatctt

SEQ ID NO: 215729 - DNA, 122 bp, Homo sapiens
tgggcgatcctatcatctgtcatgccgggccccaggaaggcggggtccttggtcagggaccgtaacctcctccagccctacagaggcataaagactgatgaacacgaggccgattccctacg

SEQ ID NO: 215730 - DNA, 122 bp, Homo sapiens
tcggcgccggcgcggcgctctagaatagaagctgggcatctcgggggcggtggtcgccctcggtgtgcagtgttcaggtgcacaaagtaaagagcgccgttttagctgagaacgagaaccat

SEQ ID NO: 215731 - DNA, 122 bp, Homo sapiens
cggagagaaagggcagagttggtgtgaggcctgggagggcgtgtttgaagaatggtggcccgagtccaccattccacgcctgctctgcggggtcctctggctggggtcttgcctggacgtgg

SEQ ID NO: 215732 - DNA, 122 bp, Homo sapiens
gttttttctcagcgttgtgaaggagatactatcatatcctttaacagccctggtgatgttcgctgctctgcacagcacacggtgactacatcccagatccagagctgcggaactctggggcc

SEQ ID NO: 215733 - DNA, 122 bp, Homo sapiens
tggtaaaaaagaaatgtccataggaaacaaattcccgtgtcttaaaacgccttggtgtgccgtctgatactgttctctaaagacgttaggagtcacggcatctggcctgcggttgggtgaag

SEQ ID NO: 215734 - DNA, 122 bp, Homo sapiens
ggaataaaaaagcaatatttggcagcgtcgacgtagggcgttttgtgtgatgacgacaggcgcttaagggaaataaaaaacgaaggtgagaagatgtgtcatctctgttctcggcagccgag

SEQ ID NO: 215735 - DNA, 122 bp, Homo sapiens
ctgacccccttgtcagccctgctgtccttattcccagggcctcacaagctcatccagaaacgctatgacaaactgctggattgcaacagctacctgcagcgatcaacgggagaggagtcaga

SEQ ID NO: 215736 - DNA, 122 bp, Homo sapiens
aaaacaatgtgaaattaagccaaaagccatcacacgtgcatccaaaggacggccgctacccgcgaccccttcccaacgcacgcgggaggttgcgggatcagggacaggggcttcagcaggga

SEQ ID NO: 215737 - DNA, 122 bp, Homo sapiens
accctgagttcttcccggcctttcttccttgcttttcatttgtgtcagtcagctcttgctcgtatagcaatcctcaaatctcagtagcatataaaggtaagcatttagttctcacttacaag

SEQ ID NO: 215738 - DNA, 122 bp, Homo sapiens
gcacgctgaggtttgagaaccaaggctgaagagccacgtcctaacagtgttccctctattcgtgaacagactatgcatgtgagcacacagttatgaacacgcaagaaccaggcatgggatta

SEQ ID NO: 215739 - DNA, 122 bp, Homo sapiens
tttcctgctgttccgcgcttttgccaggaccgcggcagccaggctggctggggtggccgacgcctgggctggtgtatgtgtctcttgcgtgggaaggtcccagttgctccccggcctgggga

SEQ ID NO: 215740 - DNA, 122 bp, Homo sapiens
cctgctccccgcggccaagtgcagcctcccttcctgaagcagctgctgcggctggaggtccgctgcggcagccgtccttggcgagggggaggggaacgcgggagcgggaggaaatcgtatcc

SEQ ID NO: 215741 - DNA, 122 bp, Homo sapiens
taaaggtgatcgtggtggcgaatattgtgcaagctaatcagaaagtctagagcaggttctcggaacccagctacgtccctcgaacctgctgcagaagtaaggggagctcgcggttctttttc

SEQ ID NO: 215742 - DNA, 122 bp, Homo sapiens
gttactgccgtgacctttaacctcttttaacaattggaagcccactgtgtgccaccacgccgaaggctgagcatctctggggatggagagtgaggcggcagagctgcatggggcagcgcagg

SEQ ID NO: 215743 - DNA, 122 bp, Homo sapiens
aaagaacttgaagatgaactattccaatgctttattttgttcaataaagaaactgaggcccggggaggtgaagtgacttgctaaaaaccatacagctggttaatgaaagaaatagggctaca

SEQ ID NO: 215744 - DNA, 122 bp, Homo sapiens
ttgaattttcctgccaacgtgaggaagccgggattcgaaccggggagacaaaaggggtcccgaacatgtccttggatttaatagatggtcggaaatcaggggcagcggagctgttaaatgcg

SEQ ID NO: 215745 - DNA, 122 bp, Homo sapiens
tctctgacctgcaccagtcagcaggcgcagggcttgtcaaggtcagggtcttttgaggtgcggatgcttgtgaagcctgtggtgctgcagagctcagcacgcgcacaggaacgtgtgcggga

SEQ ID NO: 215746 - DNA, 122 bp, Homo sapiens
tgcaggacccaggttcctctttcctccaaagtgcctgccgcgttttccagatgctgcggtcgttatcaaaggacagcagcagccactgacacgggcctgtctgtggaccgagtgctcatgcg

SEQ ID NO: 215747 - DNA, 122 bp, Homo sapiens
aggggcgcaccgggcggcgggcggggacctggggaaggccgggagcgccgggaccgaggacgcacgcggcgggccgggccgcgcgcgcctcccccctcccccgaggcccgagcgcgagccgc

SEQ ID NO: 215748 - DNA, 122 bp, Homo sapiens
actttatcttacactccgaggcgtttcctcccactaagcctctttgtcattgctgttgaacgcaaaggtgagatggtggagggatgaaaactgtaggcagatggtgtaattctcgtggctag

SEQ ID NO: 215749 - DNA, 122 bp, Homo sapiens
tacttggtgcacgttttattttctggggtctttcccttttagcagtacaaagagatccgtcgtgtttcatataattttttgagcttcatgtcatgaccttggttttcttttggttcgcatgt

SEQ ID NO: 215750 - DNA, 122 bp, Homo sapiens
gaaatatgaaatggttctgatctaaggtagaaacattagatggatgaaagaatatcatgccgatagaattaaaaattgttaggttggagtattttatgtgggctgagagtaaaataaatcta

SEQ ID NO: 215751 - DNA, 122 bp, Homo sapiens
tggctgtgttcatcctgcccaggtcccggcccctggccacttggtcgtggtgcagcatggcgtgaaatgagccaaaatgggagcgagcatggaggggaagtgtttaacccagcccggggggc

SEQ ID NO: 215752 - DNA, 122 bp, Homo sapiens
ttctgcacgtgcctcagagcctttggtgcagctccaaagggaggcatcgagaaacaccaccggctggaaatgtggctctgctcccgatctttgtctgcgttggcgagacaccggccgctctg

SEQ ID NO: 215753 - DNA, 122 bp, Homo sapiens
cgctgtgccccattgggcggcacggacgcctgggacactctttagtccaattgcgggcggcgggcggcctgtctcagggctgggcccgcctggctcctgtgggatcagggtgggtggccaag

SEQ ID NO: 215754 - DNA, 122 bp, Homo sapiens
ctctctcagggcagagaattaaaatcctgtagagcaatggttcttaaacgttggtatgcacgcaaatcacctgggaatcttattaaaatgcagagtctgatttagtaggtcggggtgggcaa

SEQ ID NO: 215755 - DNA, 122 bp, Homo sapiens
actgcaccccaggcccatccttcccacgctccatcctcgctttacttccttgaccacttccggctggctacccgccttcagagtccactcagcatctcctgtatgattctctccccaccgag

SEQ ID NO: 215756 - DNA, 122 bp, Homo sapiens
cttgccctttgaaattgcaaatgggtggaccttttttattaacattaaattgagcaatatcgttttcttgaagttatgctagatgttctccaaagttgttaagcacaaactatgcctgctgt

SEQ ID NO: 215757 - DNA, 122 bp, Homo sapiens
ggccgccagtgactcaccctcgagaccaacgcagaggcccaagatgacagcaggacatgccgaaccctaacggaagtgatccagatttgcctcagcaaagcagagaaacacgaagccagagc

SEQ ID NO: 215758 - DNA, 122 bp, Homo sapiens
ggagttccacaagggctgaaggtttgaaagcagcacacgataaggcgagaccttccaccgcgttatattccggaccaactcaaaccaaaccgtatcccaaaccaaagtcattatcccctgac

SEQ ID NO: 215759 - DNA, 122 bp, Homo sapiens
ataggacttaggtggggattcgagtgttgggaccccaatggtcattagcgagggctgcctcgaatgaccaagaaggttctgttgcccaccttgccctcaacacgcctggctttcgggtcttc

SEQ ID NO: 215760 - DNA, 122 bp, Homo sapiens
agtcaacttaagatgggggtctgtgctggccatcctcagagctgattccttgggtactatcggtggagaaccatgatgcttgattttggtgagatctgacccttgtcacctgccaggcccag

SEQ ID NO: 215761 - DNA, 122 bp, Homo sapiens
cgttgggccccggcaatagccaatgagacaggagccacgagaacacggaccaatcggcggcggcgacagtgtggaacgcggttgccaggaggcgggacgcggcggcgtgccagcctagccac

SEQ ID NO: 215762 - DNA, 122 bp, Homo sapiens
aatccagaccctgaagtcaaagggaagtgctgactataataaagtgtctggattatattccgaatatttcagaaagttaataaaatgttaagcaaggagaaacaggatctgattatttcttt

SEQ ID NO: 215763 - DNA, 122 bp, Homo sapiens
aaacctgtttcctgccatctgcccttcctttgtggtcaaaccctcctcgcctctttaccccgtgatgctccttgtcactacagctttatgttttggagaatgacaagtaaattgaacgaagc

SEQ ID NO: 215764 - DNA, 122 bp, Homo sapiens
tgagcactgaaagcacaagtgaaagtcactgtgtgagtgacacccgctgctgcctaaccccgccctgcccagagacctggaagtgggggctcggcctctcacctatcctgcccatccccatg

SEQ ID NO: 215765 - DNA, 122 bp, Homo sapiens
tccagggcgatgagagcccgttacctactatgtcccactccacttatgtaactggaagatcgccggcgaaggggagggtaggatgggagggtgctcacattccgaggccacagcactccaaa

SEQ ID NO: 215766 - DNA, 122 bp, Homo sapiens
atgatgcatgcaaatgtaagaatatagcaccttataatggctaccaatggtgggcagtggcggggacaaggagtaaacactcaggatgaagcgggaaaatgataaagtaaaataggatcaaa

SEQ ID NO: 215767 - DNA, 122 bp, Homo sapiens
gtgggggtgggcgcagggagagccaggcctgggaccaccatgaccacagagatggcttctcgggaagtggttgggtcggaggtgagcggccgagttcctttgctccctccccttctgttcct

SEQ ID NO: 215768 - DNA, 122 bp, Homo sapiens
attccaacagtactacgggccctatgggaggaggaggatttgagaaacactgccggagaacggtcggtgcaaagattttgcaaacaggtagtcctaggaaggaaagtaagagtgagaacatc

SEQ ID NO: 215769 - DNA, 122 bp, Homo sapiens
ttggcatatctggttctgaggctcttggtcttggactgagccacactcctggcatcccagcgtctccagcttgcatggcctgtcacggtatttcccaacctccgtaatcacgctagccaatt

SEQ ID NO: 215770 - DNA, 122 bp, Homo sapiens
atttcccatgaaaaatgtgccccacccgcgcccccgggggcggcccagggccggagggagcgtggcgtgcacagtgtgtgtcatgcctgcgtgtcatgccctctgacagaacttcattgttg

SEQ ID NO: 215771 - DNA, 122 bp, Homo sapiens
aggcttggaccacctaaaactgacttacagaacagctaatctttcaggagttgacagcagcgtttcatcccatctcggagggcctctttgactttgtcattccgaagagtaaagatgaaagg

SEQ ID NO: 215772 - DNA, 122 bp, Homo sapiens
tttgagaagctcttagtggctgagatggccctgtgaccgctgtgactttacaatgggaagcgggagacccgcctgccccataaccttctctctgcctctgtttttaaggcatcacgagcctg

SEQ ID NO: 215773 - DNA, 122 bp, Homo sapiens
cccaccagagggaagaaactcggaacacatctgaacagcagaaggaacaaactccggacacgccgcctttaagaactataacactcacggcgagggtgcgcggtttcattcttgaagtcagt

SEQ ID NO: 215774 - DNA, 122 bp, Homo sapiens
ttaacacccttggccgggagggtgacctgccatgcacctgatgcttgtgagccccagatacgggaagagctgtcagctcctgcccgccccagcagccctggcattctggagccagaatgcga

SEQ ID NO: 215775 - DNA, 122 bp, Homo sapiens
tcccaggaaaggcgggctggggtcaactgcttgaaaatttagtaaccctgctcctaatcccgtgcactgctatatcctagtgtgcggcgggacacttgagagttttgaaagaaccctcaaac

SEQ ID NO: 215776 - DNA, 122 bp, Homo sapiens
cactttcttcttaaaaacactgcaacggtgatgctgaaagggtgtcagagacaacagggccgggtggggactgcagcgaaccacagaatgcaaccggggagcggctacttcccctgaccaac

SEQ ID NO: 215777 - DNA, 122 bp, Homo sapiens
tgttccttgaccacccaaagtgggacactgtcagagccaagacacaggtgaagactgaaacgcgagcctccatgcggggagaatttcagcacctttagttctcctgaggagggtgaattagc

SEQ ID NO: 215778 - DNA, 122 bp, Homo sapiens
cccagtccccaaagagcaatagagaaatggccaccatgtaagcactgggaagccagccagcggagcttgccatcatctgtctagcttttttttttttttccaagacggagtttcgctcctgt

SEQ ID NO: 215779 - DNA, 122 bp, Homo sapiens
cagctgggaaccaactgcacgtagacgggctgctctcaaacccggctacctctcgcggcgcgcgtcatgtgagccgggctactctgcttttgtgctcagggcattgaggaagaggcaccgcg

SEQ ID NO: 215780 - DNA, 122 bp, Homo sapiens
gtttccctgtagggagcagggcctcttgtatatctaagaggtcactttgtggcaagaaagcgagaatgtggttgggtcacaagaaaacccaagcgagcggtgcctcatgcctgtaataccag

SEQ ID NO: 215781 - DNA, 122 bp, Homo sapiens
acagccgccccgggacgcagctcggggtccaggctcgagctttgctcactcagggcgcttcgtgcagggaacgccaggcccccggacgcgacccacgcggccgctgccagcggggaccgagg

SEQ ID NO: 215782 - DNA, 122 bp, Homo sapiens
tttgtaagcgggagctggagagttctcggcgggcatgtggggatccagattccccgactccgtgtccgcgtggccgtggtgtggacacctgtctgtagaatgcctccacttggtattttaac

SEQ ID NO: 215783 - DNA, 122 bp, Homo sapiens
agtcccgagagcacctcgagcccccggccccctccccagccccgccgggcccgcggccgccgcactcccgcacgccggctgcccagcgcccacgggccctgccccagactcgggcgcgcagt

SEQ ID NO: 215784 - DNA, 122 bp, Homo sapiens
tgactgccgagaaactggaccaggcgccgcggaacctcacccaccgggacttcccccgagcggctccaagtcagtgactgaatcccagtcagctccttacaccactggggccagatgatggg

SEQ ID NO: 215785 - DNA, 122 bp, Homo sapiens
tcctgccctgccaatcacattctaggctggaagaaggattctgggtcaggaaggcagtagcgtatttagactcgccagagtggagagccaagcagcaaggcgactctggaggactacacgac

SEQ ID NO: 215786 - DNA, 122 bp, Homo sapiens
taatacattaaagattccaagaaatcctccaatcaaaaaacaaaacaaaacattaccacgcgatttaatatgttgcttcccaaatttactggaccagaggatcttttttcctaacacttatt

SEQ ID NO: 215787 - DNA, 122 bp, Homo sapiens
tccacattccatctctctgactgattggagatgcatgttgaacatcacaaaggcaaaaggcgaatgagtaaataagtggcctttgctgattagaattagtgtgcttcattgttacggttctt

SEQ ID NO: 215788 - DNA, 122 bp, Homo sapiens
agggaggggagggctgatcgccgagggctggggccgtggggtggaggactcagtccacggcgcctcaccctgcacacgcggccctcagctccaggacgaggagctcactgcttcccagggaa

SEQ ID NO: 215789 - DNA, 122 bp, Homo sapiens
gtctaaatgaaagcatagagttggacattctcatgagtttgaataatattgatagtgaagcgagatattgtgtattgcaaaaagcactttttggaaaattaggaggcctggtttctattcca

SEQ ID NO: 215790 - DNA, 122 bp, Homo sapiens
acctcaagtgatccacctaccttggcctcccaaaatgctgggattacaagtgtgagccaccgtgcctggcccagaagctgcagattctaatactagctttgcaatgtattcattctgatacc

SEQ ID NO: 215791 - DNA, 122 bp, Homo sapiens
gttttgattggcaacagctgagcccagaaacgagacttgctctgattggtcaagctactgcgtttccgcgcggcgattggctggcagaaaggcagaggcggggccaggagagaaagctttgt

SEQ ID NO: 215792 - DNA, 122 bp, Homo sapiens
acaagttagagccaaagaggcctggcgggcgggggtgcgggtggagtccgggccgggtggcgtggaaggccgagcacagctgcgagcggcgagtcccgggagaggaggagcgggagaaagcg

SEQ ID NO: 215793 - DNA, 122 bp, Homo sapiens
tgcaaggcttgcactttgcatgtaaccccagccggtacaaacagggatggctccgggaagcgtgaggagcagggggagcagagaagtccccaaccctacccgacagccggggtgtgggatcc

SEQ ID NO: 215794 - DNA, 122 bp, Homo sapiens
cttaattaatcagccggcagctccgtcgatctattttcgtccctgtcctcttgacgagcccgggatggtttggagtagcatttaaaagaactagaaaagtggcccagaaacagcagcttaaa

SEQ ID NO: 215795 - DNA, 122 bp, Homo sapiens
ttcgctcccggtcgcgctctcggtttccgcgttcgctccccgtcgcgctctcggtttccgcgttcgctcccggtcgcgctctcggtttccatgtttgcttcctgtcttacttttcttccacc

SEQ ID NO: 215796 - DNA, 122 bp, Homo sapiens
ccaagcccctggtacctggaggacatcagaccctcctgttcctgtgcggccttgactagacgaccacttgctctggacttgctcctcgaggggtcgctccatctggaaactgagactggaat

SEQ ID NO: 215797 - DNA, 122 bp, Homo sapiens
ggcccggtggagcagccagtgccggatttctccctttttttgcagatctgcagaatatggcgtccctgtcctgttttaaaaataagccaggctgccatttttgtttttcttttgtctgaaaa

SEQ ID NO: 215798 - DNA, 122 bp, Homo sapiens
caaatcgtctgatttatgggtaacttctggacgagcctgggaagaaacagtctaacctgacggaaacttgctgcccaatggccccacagccttagttgccctgggagagctggagctcaact

SEQ ID NO: 215799 - DNA, 122 bp, Homo sapiens
cagctgcggaggccgcggcgaagcctaggccgagaggaggttgccgggccgagaactaaacgaggccagaggcctccccagcccaagcctccagggcctgtccaaatcctccaccccgctct

SEQ ID NO: 215800 - DNA, 122 bp, Homo sapiens
tcagctaggcaacatggtaagacatgaactctccaaaaaaattagccaggcatgttgttccgcacctttagtcccagctactcgggaggccgaggtgagaagatcatttgagcccaggaggt

SEQ ID NO: 215801 - DNA, 122 bp, Homo sapiens
tgtcaggccgcatctgctccaaatttatggctcctcctcgggccgccgccggcctctccacggcctctttaccaactgcagccccagctgagacccctcccgcggggagggagggaacacga

SEQ ID NO: 215802 - DNA, 122 bp, Homo sapiens
tgaaaatatttaagtaaaaacaaaatgatgcattttgagaagaacaaagtgtgcactcagcggctggaaaggaaataagtgcatttctgcaaagatcaagataagctggatgaagtagtgtg

SEQ ID NO: 215803 - DNA, 122 bp, Homo sapiens
ctccggcctttttctccagcgtgggcagccaatcagctgcgcagagctgcatagctggaccgctttccattctgagtagcaacaacgtactaatttgatgcacacatggatgcctcgcgcac

SEQ ID NO: 215804 - DNA, 122 bp, Homo sapiens
tcggccgttcagaccccagcgctgtctctgttacgtcggaggcccccgaccgcgtgggagcgaatggatctcaactgagggctatttacctatggatgaaagagatgcgccaaactttgaac

SEQ ID NO: 215805 - DNA, 122 bp, Homo sapiens
tggctctcgccctggctctggccctgggccccgccgcgaccctggcgggtcccgccaagtcgccctaccagctggtgctgcagcacagcaggctccggggccgccagcacgggtaagccgag

SEQ ID NO: 215806 - DNA, 122 bp, Homo sapiens
ataggggaagcggcagcttgatggcacctccgggccttgccgaggaggggctggtgcctccgagacctcccccgccagccccagccccagttagtctccacggtacttttgaggaagccccg

SEQ ID NO: 215807 - DNA, 122 bp, Homo sapiens
ctcaccattagtcaccagagttagatactaagtagaagcagtacgtccataaagtcattgcggaaatgtatacttaaatgacctgagaggggcattgggttttttcccatttatacaataaa

SEQ ID NO: 215808 - DNA, 122 bp, Homo sapiens
ctctgtgcccgagcgccccccgctccctccctcctcgctggatctcccgcaggacgtgagcggaaagtgaatgggcagccccaaccacaaagacaaattaccatgagaaacataaatcggga

SEQ ID NO: 215809 - DNA, 122 bp, Homo sapiens
ttggacggggtggtggccagcagctctctcgggccagggctgaaaaaaacctccaaggctcggactgccgccccgacttctgaagcagcggtgtcgttcggggctgaccgacgagcgtccct

SEQ ID NO: 215810 - DNA, 122 bp, Homo sapiens
gaagttaatgaatatccaagtcattggcctccaggaaatctagcttacagtggtggggttcgaggctgttcaaatcaacatcctgcccttcgcatcaggacattcctgggtctaaagcgggc

SEQ ID NO: 215811 - DNA, 122 bp, Homo sapiens
gatgccggcccctcagtttccgggttcgcctggcgctcagccaggccagtcacagagagacgagcccggcgattcgccagcggaatgtccaggggcggggcagcgagcgagcgcgaagcaat

SEQ ID NO: 215812 - DNA, 122 bp, Homo sapiens
aatttttaatacaggtatctaaataaatataattcatgccacagaggccgctttcctggccgtcccattccggcccgcctgcagcagagaatgcctttccttccccggactgcatagcaggg

SEQ ID NO: 215813 - DNA, 122 bp, Homo sapiens
ccaggaggccctgatacgggctgcatccttggaaatcagtgctgcccctcccctgacagacgggtcacagaggctggccggccctggggatggggtctggactggccctgggcccagtggcg

SEQ ID NO: 215814 - DNA, 122 bp, Homo sapiens
aaaattaggtatgatggaattacccttgccaaagccatcaggtgtcttactgaagatgctcgggtatctgcctgccaaatgcaaaagcatttgcctctggtgaaagacacagatggttgcta

SEQ ID NO: 215815 - DNA, 122 bp, Homo sapiens
gtgaccaaacagagatcactgtagcagagcagtagcccgcctttattagttttggaaatgcgtcagggttctgtgcagtgaactaaaagggatgggagatacctgatgtcaggcaggaagaa

SEQ ID NO: 215816 - DNA, 122 bp, Homo sapiens
tgggtcagtgttttaagctgcaaggaatgttgtgactcagctagtcgttcagggacacctcgatgaacaaggccacgggaaggaagtcattacacagagagctggactgtaaaaaccaaaaa

SEQ ID NO: 215817 - DNA, 122 bp, Homo sapiens
agtgtaacagcagcaaactgcgcgggctgaagcggaagtggatccgctgctcagcccaggcgaccgtcttgcatctgaagaagttcatcgccaaaaaactcaacctttcatcctttaacgag

SEQ ID NO: 215818 - DNA, 122 bp, Homo sapiens
atcaagtgtacagtttttcctgttattttgggtcttctaaaaatgagaatataacaaaatcgtgatagggcatccatatagataatataatgtgttggctgcctctaaagtgatagaatttt

SEQ ID NO: 215819 - DNA, 122 bp, Homo sapiens
tgttggttgtattaatttctactacaagtccatgttgttttaagttgtaggagaaggaagcgtgggagcacaagcagcttgagggccctggtgttttacagcccttagggaaaggtggagaa

SEQ ID NO: 215820 - DNA, 122 bp, Homo sapiens
gatgtgaccggggctctgcttgtggctgcggcggtggcttctgaggctgtcgggtctttgcgggttgcggaagggggccccaatacccttcttcttcaggtatgtagtggaagcaaaggaac

SEQ ID NO: 215821 - DNA, 122 bp, Homo sapiens
acccttcatgcactctccctccatccagggagctgcttactctgccctcagcaccccatgcgcttgagcctttgcccagcctggtcctggtccaggaattccctgctgccaagtctgatgca

SEQ ID NO: 215822 - DNA, 122 bp, Homo sapiens
ccctgagccgccacaggtctacgtcgtggggccaatgttattatatctgcaaactctggccgaacttacacactacagccctcctggagttactggctggctcggaccccatcatattccac

SEQ ID NO: 215823 - DNA, 122 bp, Homo sapiens
gaggatggggagtgtgaggggtatccttgatgcttgtgtgtccccaactttccaaatccccgcccccgcgatggagaagaaaccgagacagaaggtgcagggcccactaccgcttcctccag

SEQ ID NO: 215824 - DNA, 122 bp, Homo sapiens
gtgggttttttttttttgagtgtgataacattagctgactgaattatagctctctttgcacgaagattagagttaccaaaatgttcagggaatttgtcctgcattatgttgactaatatatc

SEQ ID NO: 215825 - DNA, 122 bp, Homo sapiens
caaagaactgaccttcactgcaaccttgtggttagtcaaattcttagaagaaggcatggccgtggagtctgcatttctcagaggtaacacgtgtagcccctggccagccccaccacagaagc

SEQ ID NO: 215826 - DNA, 122 bp, Homo sapiens
tataaatgctttccatgagaactgaaggaagaaggaaataggagttgcctccattgtgcacgttgcaaaacctgtctggaaggagcataggaaatggctttagctaagtgccagtagcttct

SEQ ID NO: 215827 - DNA, 122 bp, Homo sapiens
gcgggtctgggccctcacaccacacactttcttaagaagggaggcattgtggctacggggcggaaaggaggcaagattttgatacctcctttgtcagtatctcctctgcctcgctcatctgt

SEQ ID NO: 215828 - DNA, 122 bp, Homo sapiens
gtggaggctaggcggtgagagcttcccgcgcccagggagcaggtcttcacgggaggtttccggaggcaggaggagcctgcgggtcctcgggagtcacggccggatgaaggatgggagcgggc

SEQ ID NO: 215829 - DNA, 122 bp, Homo sapiens
cgcagctcaggaggcggcagaacccaggggtggagagtggggggcgggcttcccgggcgccgccgggtcgagtcacttccggtgccctgacctttataggagtaaacagacccccgccatcc

SEQ ID NO: 215830 - DNA, 122 bp, Homo sapiens
aggctggggggcaggacgggaggcgaaaaccctggaatattcccgacctggcagcctcatcgagctcggtgattggctcagaagggaaaaggcgggtctccgtgacgacttataaaagccca

SEQ ID NO: 215831 - DNA, 122 bp, Homo sapiens
tccaacatatgcctgttaagtttacctgaattcaatcaagaacacttccctgggcctgcacgtcacacaggccttcgataccctgcacactcgtcactcaacctcccctgccacaccacagc

SEQ ID NO: 215832 - DNA, 122 bp, Homo sapiens
cccaagttttctccatgggtctttgggtgttggaataaaacccaaactggacaaagagctcgaggctgaggatggtggctatggcttcggggagcggggggacgcggacgtgtaatcgccag

SEQ ID NO: 215833 - DNA, 122 bp, Homo sapiens
gagaggaagatgacggcgggacgcagggtgggcaggggtcgcgtgggaatacaggccgcgcgctgctgcctacctcccgaaggggtctccgcaccaagccagacaccgccgccatcttggtc

SEQ ID NO: 215834 - DNA, 122 bp, Homo sapiens
gtgtgccggcgtgctctcctcgggtcctctcaatgtcgagctgcacgagtcttcttccgccgatgtgttcctcgagacgttcagccactcgtgtgcttgcctgctagggtctcgggttttta

SEQ ID NO: 215835 - DNA, 122 bp, Homo sapiens
cagtagggatacaaagattaattggacaccattcccactctcaggggcttatgctggagtcggggagacccactgaagcttcacttccctagaggtcagaggaagagctggatctggggacc

SEQ ID NO: 215836 - DNA, 122 bp, Homo sapiens
cgcgtgacggaggcgggacctaggctgtgtctcctgcggggcgaaagcacggaagagatccgagggcatttcttgagcctggcaggaggccaggggttttacagggcaggaaggaacctgga

SEQ ID NO: 215837 - DNA, 122 bp, Homo sapiens
ctacatggttgcttcctcttcctcccaaatcccttagttttcctaaatgtctacagtggacgccctgttggtttggcttgctgggttgtgggtggacacgcaaggaggggatttttatttgg

SEQ ID NO: 215838 - DNA, 122 bp, Homo sapiens
gttttcatttctgtttcttctcttgaatccacctccctgctcatctgggtgggggctgctcgggcctctgtgtgcgaacactgctgtgggtctggttatttgcccacccacacacctaaaca

SEQ ID NO: 215839 - DNA, 122 bp, Homo sapiens
ttagcccccaagagatttttggggttggatgttttaaatggcctggtggtcttctggtagcgatcgatagttatcagtcccaggaatgaaatactgatatacattgtgaaataaaatatgac

SEQ ID NO: 215840 - DNA, 122 bp, Homo sapiens
gcactttgctgatgcatgtgggaaagctcacagatgccagggcctggcttccagcactagcgacaatagtaatgacttaagagagatatttattttgtgtatttactcagatgtttggaaat

SEQ ID NO: 215841 - DNA, 122 bp, Homo sapiens
gagagcatgatattacgttcaatatcgcagtaggtgtacacacaggcggtgatattgatccgaatataatctccaggggttggagtatgacgttactcccaatataacactgggtgtgcatc

SEQ ID NO: 215842 - DNA, 122 bp, Homo sapiens
atagggggaggaggtggttattagagagaagctcttcctctcttggtttccccctctctccgcctgacagcaccgctctctcgcaggctcgctccttctcctaggtgatccatttctaggca

SEQ ID NO: 215843 - DNA, 122 bp, Homo sapiens
cctttgcttgtcggtgccactattctcccaggacccctatctccctgagattgtggcttacgtgacacacaatggagccagcccaagagcacatggtgaggaatgtgtgggcaactgcagtc

SEQ ID NO: 215844 - DNA, 122 bp, Homo sapiens
tggcaaaaatgggacaggaagagtttgcacttggttttttgtgaaagaatgttagaaatacgtgaaaccgttggtagtattttgactatcacctgaaaggtactaaatgttaaactagtaat

SEQ ID NO: 215845 - DNA, 122 bp, Homo sapiens
tctgcagattagagaggaagattttattctccctttcaccctcttcgcccccacctctgccgccccctgctttgtgtgctgaggctgcaaaccctagccattgtcctgagtatctcgggcgg

SEQ ID NO: 215846 - DNA, 122 bp, Homo sapiens
gagtggagtgggcagtggcgaatgcccctagtgtgctgggcagaggagttgggctttgcccggcctgtaagaagttcttaaacatgtcatggtagcagaacccgggagtgtcccagtgctcc

SEQ ID NO: 215847 - DNA, 122 bp, Homo sapiens
tccaggtgaagtgcttcaggcttggctcattctgacacctaagaagggccctctaggccacggttgggaagactgtttttgccttagcgccgtgcaggtttgggcattatataaacttttac

SEQ ID NO: 215848 - DNA, 122 bp, Homo sapiens
tatttgagactttgtgggctaagaggtaaaattgaatatatgatgtagctacatataaaacgagggaaaacgtctgcccttgtcctgtttgcctgggagctgtgggctctcagtagcagcta

SEQ ID NO: 215849 - DNA, 122 bp, Homo sapiens
ctcttgggggaatccacttagagtactggttgacaggaaagcctgattctcaaaatgactcgtctggtaattaattatgtataattatgcaagtcccttgtcttctttaggcttcaatttcc

SEQ ID NO: 215850 - DNA, 122 bp, Homo sapiens
ttcgaggctaaacagtaaatgaaatgaatttctggtttgcaacatcctgtgcttagaagccgccagggccgttcctcccagccccaactaacgcacccatgaaagcacgtggaaaaggcacc

SEQ ID NO: 215851 - DNA, 122 bp, Homo sapiens
cattccttggcaaacagaacaaccagagagcataaaagtcgagtctaagccagggactctcgcgaatcccttctaaggcataccctatttaaactttgtattatgctattcaggaggttgac

SEQ ID NO: 215852 - DNA, 122 bp, Homo sapiens
gccggggcccggagatggagctgggacgagtgtgtggacaggggggatggctggcccccacgagcagctccaggctggagttctggttcttccaggtggctcccgctgaggcagcggtctct

SEQ ID NO: 215853 - DNA, 122 bp, Homo sapiens
cttgcgcaggatcatgcgcgagttgttcttctttgggcgtgagcggtggctggcctccagcgcggccaggtgtgcggcgtagccctcgctcaggaactgcggagggcaggggagggcagggg

SEQ ID NO: 215854 - DNA, 122 bp, Homo sapiens
agtggacagggctggagcggggcgggcttaatccccagtgtaacctgggggcggggctgccgggatagaggagagactccgtagcggggcggggcctcagctccagctgggcccgggggcga

SEQ ID NO: 215855 - DNA, 122 bp, Homo sapiens
cggatcgcggggaagttcctctcagcgcctcaggtgtctgggcgtgtgcagctgtgttggcgcacacttgccgctacagcccttctgtcagccctttagcttcgatggggcgctggtggccg

SEQ ID NO: 215856 - DNA, 122 bp, Homo sapiens
ctacagagggaaccacttcctgctttagtctttattattcccacacttttcttcatagtacgtttctttcaccgcgtatgtgtacatccctaaacaataagccatttagtttttgaactttg

SEQ ID NO: 215857 - DNA, 122 bp, Homo sapiens
cagcgccaagggccgggttggaggcggggactggcgcagcgggcggggcacgcgtggaggcgtcacctaaggcttcgattgcagacagcgggatgctcatcgagtgcttttcttttcttttt

SEQ ID NO: 215858 - DNA, 122 bp, Homo sapiens
gcggagagcggcagactgggtgcgggaggcggggctctcgccaagccatctggagaaactcggcccagggcccgaaggggaaggtaagacccagtagggctggggacccagctggccacctg

SEQ ID NO: 215859 - DNA, 122 bp, Homo sapiens
gttctacctaatgcttgcggtgtccctgccctgggctgtttcccttcggcttcatctcagcgaatcacgaacacattccacggactcacctccttggaagccttttggattctctgcgcagc

SEQ ID NO: 215860 - DNA, 122 bp, Homo sapiens
agcttcatcaatgacaattctggttctgcagtgggatgtgatttgcccaaggtcatgcagcgctgagaagcaggcccagggctccatcagccctgccatgcaataggctttgttgagtgagc

SEQ ID NO: 215861 - DNA, 122 bp, Homo sapiens
tgtggcgcttgcgggccagctggaattccgggtgggcgtgggcttggcgggccccgcactcggagcagacagccagccctgctggccccgggcaatgagggacatggcaccctggccagtgg

SEQ ID NO: 215862 - DNA, 122 bp, Homo sapiens
cagcccatactcagaagagaagagtacacaagggcatggagactaggagacaggaaccaacggaggccatcttggaggctgtctaggggaaatcatctggaatattccatttctctgactgc

SEQ ID NO: 215863 - DNA, 122 bp, Homo sapiens
accatcatttaatccgctggcgccgctgctgctgtcactggctaaggccgcggcgaccgacgcacagcagaggcagcacagctggagcgcctgcaagagaaaaggtgacatcgcgcgtgagg

SEQ ID NO: 215864 - DNA, 122 bp, Homo sapiens
agagctctcggacacatttcttgggtgggaggctcccgcaaccctaacccgctataggtccggcgctcatctcttagaaactgacctgaccccccatgaagcagcactcccttctcgcgtca

SEQ ID NO: 215865 - DNA, 122 bp, Homo sapiens
caagcacaggcggaagcctctctgggaagtacaatccctgagcgtgtgtgtatcataaaccgggctgcaggaatgaaaaagactttggccagaaacagagccccgcggcgacttctgggaaa

SEQ ID NO: 215866 - DNA, 122 bp, Homo sapiens
gcgtcactcggctctgcagctctgcgcgtgagcaaaaggcgtcatggctccaagcctcagcgttgtctcctgcgtggtgctgctggggtcagggcggctctctcacaggaagcgcctgcgat

SEQ ID NO: 215867 - DNA, 122 bp, Homo sapiens
ggttctgggcccaagaaatctgactccagtagctggtattacccacagagggccagggctcgtgggaaacaagagacggagctgggagcaagaactttgttagacaggagttcaattacagt

SEQ ID NO: 215868 - DNA, 122 bp, Homo sapiens
tttcctccttttctttccttcccttccttcctccctctccccttcccccaccccccgccccgccccgccccagtcttggtggcttgttccggatctggtgttgctcattcactcatcaaaca

SEQ ID NO: 215869 - DNA, 122 bp, Homo sapiens
ctcccccagctgctgtctccacctcatcatcttcatagtccaagagctcattgtccacatcgttctctgccataactgggccggcaggggaagaagggaagggggatctggatgggttctcg

SEQ ID NO: 215870 - DNA, 122 bp, Homo sapiens
gcgctcccagccctggtttctggcttttattctgagggtgttcagtcaacctcccccctacgcccatgcgcctctctttcctttttcgctcctcatttccgagcccattgttggatctcgag

SEQ ID NO: 215871 - DNA, 122 bp, Homo sapiens
aagacacctcgcgagacctcacctaaatcagtcacggggtctgccttggcgttgtggttccgtcttctccatccgttggagacaccggaaacgcgctgaggacctgagcaaaaatagcattt

SEQ ID NO: 215872 - DNA, 122 bp, Homo sapiens
cctatagccccgcgctgcctccgggagagcggacggggaaagccgagggtctccgaggggcgctcgggctctggcgagaggaggaaggactcagggaagcagccggggaggcccggggctcc

SEQ ID NO: 215873 - DNA, 122 bp, Homo sapiens
acgcgcagtacgctgccgcgctcgcacacgctcgcgcccggaaagccggggaaccggaaccggcctaaagccaagataagagtccgctgatttgacgtcacaagcaggctgcctttctccgg

SEQ ID NO: 215874 - DNA, 122 bp, Homo sapiens
gaggaggactgcgcaggcgcagtgggccaggcggcccggcgaccaatcggtgcgcgcgctcgcaccctgccgcggcggccgggctgctgtttccaccaccactcctggcccggggtcgcaga

SEQ ID NO: 215875 - DNA, 122 bp, Homo sapiens
gtgcttgaattctacactgcaggaatgactcctaactatctctctgtgccattgtttttacgtagttttttaatttaaaaactgttttgactgttttctgttacataaatgccaatctctgc

SEQ ID NO: 215876 - DNA, 122 bp, Homo sapiens
ttccatgtggaggcgaggggaggaaaggaatcagggatgactctgtggattcagctataccgtttgtgaggacaacggtgccaatctctgaaatgaggaagacggaaaaggaataggattgg

SEQ ID NO: 215877 - DNA, 122 bp, Homo sapiens
ccaacatggtgaagcccagtctctaccaaaaacacaaaaaattagccgggtatattggcacgcacctgtaatcccagctacttgggagactgaggcaggagaatccttgaacccaggaagca

SEQ ID NO: 215878 - DNA, 122 bp, Homo sapiens
ctcactgccacggtcgccgcggcgggagccacaccctgcgaaaccggcaagcacacacatcgcacacaaccctcagtggcctcattgtgcagaggggccagagccgttccccaccttgttgt

SEQ ID NO: 215879 - DNA, 122 bp, Homo sapiens
tatcccaggagtgacacagtgaaggacaaaccatcctcgtgaccaattccatattagtgtcgttcatatgtttttgaatatttcctttttacagatgtaacaatagggattatcagacccaa

SEQ ID NO: 215880 - DNA, 122 bp, Homo sapiens
tggacgaccctggctgcaggctggacaggaagcaccggcaggtggaggagagcagctgctcgctctctccatccactgctcatgagttacccctcggacatctggagggcttaggataggcc

SEQ ID NO: 215881 - DNA, 122 bp, Homo sapiens
tggtaccgccccacggccatccgggccaaggccccggcaacagcacccctgcctcaccagcgagcttctccatctggaccaaggtatcctcggtcggagcaccttccaggagcttctcggtc

SEQ ID NO: 215882 - DNA, 122 bp, Homo sapiens
acggcacctgtagctctaggatggcgcattgttcattggtttatttatttactgtgcaaccgtgggtaggttacttaacgtctctgagcctttcggaagtaacaataacacctaattgccat

SEQ ID NO: 215883 - DNA, 122 bp, Homo sapiens
taaagaaatgacaggtgttaaatttaggatggccatcgcttgtatgccgggagaagcacacgctgggcccaatttatataggggctttcgtcctcagctcgagcagcctcagaaccccgaca

SEQ ID NO: 215884 - DNA, 122 bp, Homo sapiens
cctccgcggccccgaggacagctgagaacaggccagccccagccgctcagatgccagcaacgtgctggcacagtgctcgccctgttgtgaatgagtcctcagtccctgcagaagctcagtga

SEQ ID NO: 215885 - DNA, 122 bp, Homo sapiens
agctcagtatttcccaacactgtagggtagagctaaaagctgagttgtgtcttgctctaccgaagactggtgtgaatgggacaaaactatctttcccaacagggcagaggatggccattagg

SEQ ID NO: 215886 - DNA, 122 bp, Homo sapiens
cctggcccggggcgcggggacaagcgggagaggagtgttggtgcagggcgggcgcggggacgcagggtcctcgaaccagctggcccgcccccactcggcagagggtctaggcctggccgcgt

SEQ ID NO: 215887 - DNA, 122 bp, Homo sapiens
tgaataattggcacgggatcgtgcctactgcccagttcccagcagctggtcacgctggcacgaggctcctctcaacagtctctgagataatgactttggcatctgctgacgagtgcttgtga

SEQ ID NO: 215888 - DNA, 122 bp, Homo sapiens
ccacaacgtcgcggcgacagtagcccagcgcattcacggcctgcaggatgcggctccacacgcggtacctgcgagtgggctcggccttcagcagccccgtgccaaacagcagctggtggtgc

SEQ ID NO: 215889 - DNA, 122 bp, Homo sapiens
gttgctcggccctcaggaagggtctgctgagactttctacttcctgctcagggcagaggccgaccacccgcccaaggtcgtggcggcgccggctcagctttagtcgtcaaagtgcacatcct

SEQ ID NO: 215890 - DNA, 122 bp, Homo sapiens
atttatgaggccaattatgaagatgaggttggaagttcctggaacttcactaaatgcaaacggcggtccctgctgttcccatcaaattaattaaccgcgcgctattgatggccgctcaaggc

SEQ ID NO: 215891 - DNA, 122 bp, Homo sapiens
tgcatgtacccaaggcccctgagccgggacctatccttgagttagcaggaaacagggacgcggccctcctacccagcaggccctcctacctgctaaaccaggttagcagcctacctatgggc

SEQ ID NO: 215892 - DNA, 122 bp, Homo sapiens
taaacttggggagcgcgtaggctcataggaaatagagtccgttacttgtcctgggaacggcggtgggtgtcccaggaggcggacttccggtgcactcctgcgcgtgtgcacctctccctgcg

SEQ ID NO: 215893 - DNA, 122 bp, Homo sapiens
tgccccgctgttccctgcagcgcgggttcggggcagtagcaacctgctaggagcgggaggcggttgttcccaggaggaagcagcttctccgcccaggaggcaaagggcagcgggctcgaaac

SEQ ID NO: 215894 - DNA, 122 bp, Homo sapiens
ggccgcggggggagggggcggcacgggcctccgaaagcggggccatggagcccagagagtcggggaaggtaggactggaaggcccgggggccgcccgctccctcccgaggatccccgagccg

SEQ ID NO: 215895 - DNA, 122 bp, Homo sapiens
tgtaacaattactttccactgggcatgtgcacagagttccacatccttccccttcccaagcgctggtattgtcaacgttaaaatctttgccagtctgctgggtatgaaatggtttcttgttg

SEQ ID NO: 215896 - DNA, 122 bp, Homo sapiens
gcctgggcgcttggggcacgacgctgtgggtggggtcaggacgtgagggcagcgcgctggcgtcagaggcgcggctatataactaaacacaggcaccgcccctctgccccagtcactgagcc

SEQ ID NO: 215897 - DNA, 122 bp, Homo sapiens
caggccagagaactgagccagggtggagatgttccactgagaagaagccacatggctctccgccggctctcaagccaaaaacagttccgaaaatctgggcggggagcgggccagagagcgct

SEQ ID NO: 215898 - DNA, 122 bp, Homo sapiens
ggattggaaattcagcgggtcccctaagtggggagactaataggacggggagccccagtccgccgtccgagtgctcagcgctggggtgactaggagatctccgatcgaactcgggaggagtt

SEQ ID NO: 215899 - DNA, 122 bp, Homo sapiens
cttcctcccccgccccctctccctgcccgcccccgtcacacggagccctggaggatcccccgctgctgcccgccctccctacgccacccccacgatggacaggaactacgcgacctcgggct

SEQ ID NO: 215900 - DNA, 122 bp, Homo sapiens
tctgaccattggctgggaaaagtggatctggctgatgctcccagagcccaggagccagggcggagcggggcggcggctgctcccacgatcccaaggccgcgcacctgcctcctccccctccg

SEQ ID NO: 215901 - DNA, 122 bp, Homo sapiens
ctaatttgagcaagaatactgctaaattagtgtagcccatcctcaatttctgatcaacctcgatatctcatcctccagtatcctccagatgatatctgatcaccctggcctgccttcctgag

SEQ ID NO: 215902 - DNA, 122 bp, Homo sapiens
agctctctgccgggaggacgtgtgagcacgggcgccctggggcgggcgcagctcggggtgcggggggcccacaccctccctgccgggcccgacgcagcccccaccccgccgcaggcccgcgt

SEQ ID NO: 215903 - DNA, 122 bp, Homo sapiens
cgccgacggcgatggggatcggcgtgttgttctcgcccagcagacgctcctccgcagatccgaactggttgccttccaccttgaaagcctggccccacactgggaatatgttgattgaaaac

SEQ ID NO: 215904 - DNA, 122 bp, Homo sapiens
gaagaaggagagccctgtttattttcacagctgggaggcgggtagcctggggaaagtactcggtcctgcttgcccactgcctggagacagccttggtgctgctgctgggggcacaatgggag

SEQ ID NO: 215905 - DNA, 122 bp, Homo sapiens
ctgccgtgaaaccagggtcctggtgaagggcggactcccaccctggggagagggtccctgcgcaagcaggagcgaaaggggcagtgggccaggcgtatgtgcccctcggtgggtagggtggg

SEQ ID NO: 215906 - DNA, 122 bp, Homo sapiens
cagaaggcccatgaggggaaggtgaggcacctggggcagagaaaaaaaaaaaatgcgccgcgaagcgctgtctgggtcatccacgaaggaaactgtcttcccatcagcccttgcgctgggcc

SEQ ID NO: 215907 - DNA, 122 bp, Homo sapiens
tggacagggcccaggaggcgaagaaggcctcccacagccatcaaccccacccaccatggccggcgcagcaggccagggacaagccccgctccttccgaagctagagacagagaaactgagga

SEQ ID NO: 215908 - DNA, 122 bp, Homo sapiens
cctggccaacatggtgaaaccccatccactaaacatacataaattagccagacgtggtggcgtgcgcctgtaatcccagctacttgggaggctgaggcaggagaatcacttgaacccaggag

SEQ ID NO: 215909 - DNA, 122 bp, Homo sapiens
gcagaactaaagcagtgattgacctccctcttcgaagagggttggattatcaaagacgggcggggactgcgcaggctgtcaagcaaccctgtaaagaaggggtggagagtggactagatcta

SEQ ID NO: 215910 - DNA, 122 bp, Homo sapiens
ttttcctaccctcgggagccgtctgaatttctcctctgccgagttcctgcgggtgtccttcgcccaccggcccgggggagtgagtagcaggcaccaggtgagcaggcctccgctcgcagcgg

SEQ ID NO: 215911 - DNA, 122 bp, Homo sapiens
catttaacctgcaagatgctgaatgtggacagagcctgagctggtgataaagcacgcagacgataatgggtggaaaaataagtgggaacaatgtgagctcaaatgtggctgaagtggatttt

SEQ ID NO: 215912 - DNA, 122 bp, Homo sapiens
cgccccttgcaaccccgccccgcgccggccccgcccctgctctcgcgccggcgtcggctgcgtctccggcgtttgaattgcgcttccgccatctttccagcctcagtcggacgggcgcggag

SEQ ID NO: 215913 - DNA, 122 bp, Homo sapiens
tcttcccctgcgaggccgagagggtgcagagctggtggcttcaggaggtggctgtgagcgcgggtctggggccaagagcagaggacaggagaagactgccaagccaccaccggtcctgcgac

SEQ ID NO: 215914 - DNA, 122 bp, Homo sapiens
gccctggtggggaggggcacagagcgagatggggcgtaatggaatgcttgaaggctgctccgtgatgtcggtcggagcttccagactaggcgagggcagggtgaggcctcgggcacacagcc

SEQ ID NO: 215915 - DNA, 122 bp, Homo sapiens
gggctgcgcgggggcgggagtggcggaggtggccgcccctggcggcgggtttgtttatcccggggaagaagtttaggagcgggagatagggaaggagggcgggtcggggaggagggatgcgg

SEQ ID NO: 215916 - DNA, 122 bp, Homo sapiens
ggtgcgctccccaggtgacatgaatgagcggaacgcggcccttcctggggagacgtgcagcgtgtttatcacaggtgcccgatccagatctcggcgcagctattgtgggtgtgcgttcacgg

SEQ ID NO: 215917 - DNA, 122 bp, Homo sapiens
taaggctgagagtggggagagcaatccaggggcgccagggtgggagccgcagcgggcccgcggccgcccggaggacactgatgcttctggagctcgcgaagggtcccccgcgggagaggaac

SEQ ID NO: 215918 - DNA, 122 bp, Homo sapiens
cctgggtgggggccacataatcagatgagccactttgggcagccaaagtgagtggatcaccggaggtcgggaattggaaaccagcctggccaacattgtgaaaccctgtctctactaaaaaa

SEQ ID NO: 215919 - DNA, 122 bp, Homo sapiens
gaatactccgtgtggggacattaggaaaggggtagattcctgggaagccaggccctcggacggcagggccactacctgaacacaatgcggtgatcctcaataagcacgtggacatcggtgct

SEQ ID NO: 215920 - DNA, 122 bp, Homo sapiens
gttttgtgtgagaagcgctgagctgtgacggagggaatgcggtgggtcttcctgatggtgcgtgcagttctgagcctggcggggtcagcggcatggaaccagtgggacgtggtaaggccagg

SEQ ID NO: 215921 - DNA, 122 bp, Homo sapiens
tcccacacggctcatttcaactctgggagggtttacaggtaagaatgtgaaaatcagaaacgtcaggtaacttttccaaggacccacagtttaaagcgggagagagggagggattccaatcc

SEQ ID NO: 215922 - DNA, 122 bp, Homo sapiens
tttaggaatggaactcctggcttttagctaaacttgtggtctcccagaaaaaacatttctcgcagcttccctgatggctagatttggcacgtgactgaatttgaccaatgggatgtcaactg

SEQ ID NO: 215923 - DNA, 122 bp, Homo sapiens
gagttgactcattcaacattttaaaatatttgttgaacacctgctctggaacaaggcttgcgctcaacgctgggatcaaagtggtaaagacaggaagcatccctgcttcagctataaaactg

SEQ ID NO: 215924 - DNA, 122 bp, Homo sapiens
aaatatgatctatcccctataaatcaggaaaccttaaacaggctctctaatcgtaaatgccgatcctggcagtgtccaaaaaggctcatgtttataaattgttccctgatgttttaagtaag

SEQ ID NO: 215925 - DNA, 122 bp, Homo sapiens
ccccacctagcggaaatgcacggaggccaacccctccccctgcccccgcgaggagcggggcggactcggcagccgccactccccaggctcacaggaagaaactgggacgctgcggacgcgga

SEQ ID NO: 215926 - DNA, 122 bp, Homo sapiens
tcatatacaacatcggtcccaggagatgatggcgtactgatgttgtagccgtcatgaggtcgtagtgccagctatgatgcacgtgtctgtggtgacgccggtgtgaacaaaccacctgtgca

SEQ ID NO: 215927 - DNA, 122 bp, Homo sapiens
taaaaaataaaaatgtttttaaggagtgaatgtcttttatgtgtctctgtgaccaggtcccgctgccttgatggattatacacttgacctcagtgtgacaacagtgaccgactactactacc

SEQ ID NO: 215928 - DNA, 122 bp, Homo sapiens
ctcccgcacacgcctccccccgactccaccgccctcggcgggcacagcccggccccggcgcgcctttgtgcagcgcctcgccaacctgccctccgtccgccaggacccgcgccctgcacctc

SEQ ID NO: 215929 - DNA, 122 bp, Homo sapiens
gccacagctgggtgccgactggactcactggcagagaggcaggcggtgaaggccaagcctcgccccccaggaaggccctgattggtggacgggctgctttgggcagggccgccctcaggcta

SEQ ID NO: 215930 - DNA, 122 bp, Homo sapiens
gtcctacttcaccttcctccgcttcctgctgctactcaacctgctgagcctgctgctcaccgcaagcttcgtgctgctgcccctggtctggctccgcccccctgacccaggccccaccctga

SEQ ID NO: 215931 - DNA, 122 bp, Homo sapiens
agggggcggggcgggggcgagcccggatgtggccagggattggctgtggagtgtgactcacggcgcgcgatgacggtggggtccgccgcgatcgcggaatggatggaaatggaggagggaag

SEQ ID NO: 215932 - DNA, 122 bp, Homo sapiens
tgggcatattttagaggtataaatataatgatagtgatataaagacagtgagactagttgcgtagaagaagagagggtagaattctaagactgcactatctgttctgactcaaatgactaag

SEQ ID NO: 215933 - DNA, 122 bp, Homo sapiens
gatttatttttgagatgttaacagcacattttttgtatttcaagaaaagtgacttgagtccgtcactaaatattttacaaattttaaacgtgttaagtaggccaggtgcagtggcacacacc

SEQ ID NO: 215934 - DNA, 122 bp, Homo sapiens
ttgggttatctatcccctttccattattctttgcttatctttgattaagtcagctatcatcgaaatacttaaggagtatgataggtagctattaggactcacatacaaatatccattctatt

SEQ ID NO: 215935 - DNA, 122 bp, Homo sapiens
agaagcggcgtgatctcttcctaaaacacacgaggaagggggcctgggctgtgaggccggcgtggttcttgcacccctggtctctatccctgcctgggcaactgctgggaaggaagggtcgg

SEQ ID NO: 215936 - DNA, 122 bp, Homo sapiens
cattctggagtccaaagagcaggaacttgtacttgcgggccgggtccagccccgagacggcgaccgctcggaggtctccgctcacaggcactgcctggggctgcccctgcgcgtccctgtac

SEQ ID NO: 215937 - DNA, 122 bp, Homo sapiens
cctggctactctaccggctctcccataccctttgctctttgatgcataagatgagatgggcgggtaatcaggcactgaaaatccacagttggcgggggtcatttttcatttattatttcttc

SEQ ID NO: 215938 - DNA, 122 bp, Homo sapiens
tgagaaaacgctgatgcggcacctccatcgagggatcacccctcttttgggctttcctggcgcgtgttgtatgatctggttacgtccttggaccctacagacacaaagggaagctggtttga

SEQ ID NO: 215939 - DNA, 122 bp, Homo sapiens
ctctctttaagggtcacgtgggtgccctctggcagcaggccatggtggccaacctgaacgcggagaaggatgtcaggatagccagtccttgagacccctaccgaccccatcccactctctat

SEQ ID NO: 215940 - DNA, 122 bp, Homo sapiens
caataggcggaagtggccgggctgtggctcgcagttattggctgtcggcgggggtggggacgttcgattcattcacccgagtagcacgtgtctcccgaagctgcaagcacaacagttcgcac

SEQ ID NO: 215941 - DNA, 122 bp, Homo sapiens
gtccataattctccaattagtcctgctgcgaagacagccaggtaggatactagtcagtgccggcctctccagggtaagtgaggaagagaatggcctggacaaggaggacgtcaacggtatca

SEQ ID NO: 215942 - DNA, 122 bp, Homo sapiens
cgagggcagtgcggaggtggcgcgcatgtgcgaacacgcacgcagggagaggtgcacaagcgcaggagtgcaccggaagtccgcctcccgggacacccaccgcgggtcccaggacaagtaac

SEQ ID NO: 215943 - DNA, 122 bp, Homo sapiens
acaggtcttcctttcaatgagcagcagtcagcctccccgtaactgccaccacgattctatcgtcagagctaaagggagcaggaccgtgtcccttatcacggcatgccatcttctccaccttt

SEQ ID NO: 215944 - DNA, 122 bp, Homo sapiens
gcaggtttccatgctgacccgcgtcagcccaggtgcccgccgctcctccagcttccaagccgaagtctccctggtctgaccaccaggatcccaggggcccaaggcggcccctcccgcccctt

SEQ ID NO: 215945 - DNA, 122 bp, Homo sapiens
agaccgtgctggttgcacaagataaaaaggaaaagcagaagttattttctacgattgctacggaataatgggaaaaggagaactaagaaagtttactacttctaaagtccaatgaaaccatt

SEQ ID NO: 215946 - DNA, 122 bp, Homo sapiens
tgactagacatttctccaaagatacataaacggacaataatacatacatacacgaaaagacgctcaaaaccagtccttagacagatgttaatcaaaagcaaaacaacatactgcttcaaaaa

SEQ ID NO: 215947 - DNA, 122 bp, Homo sapiens
aggaggtcagagtcctgaaaccccagagcttatagattctgtctctacattttctatgcccgtgaagcctgagcctaggccctgtgggaaggacagtcaagaaaggaagattactttgttgt

SEQ ID NO: 215948 - DNA, 122 bp, Homo sapiens
ggccacctgttgaacatgaacactgtcttcaggaaattcttagctctcacctgcctttctcgccatgttgcctcaaatatgaccctcaggtaaaggctgcatctccttggggaaaaacacac

SEQ ID NO: 215949 - DNA, 122 bp, Homo sapiens
actcgaagtgaatgagtcacttcccctcctcgggcgagctcctggctttgccccagcaagcgggaactcccaggatcaggaaggtcccagagaaactccccaggggggaagccgaggccgtc

SEQ ID NO: 215950 - DNA, 122 bp, Homo sapiens
ggtcacatgcacagcccgctggttctcctgggagtgccgactgcggggacccgctcagcgcgaggccatctttacactgcactgttcctccaggtctccccaaggttggctgctgagccagg

SEQ ID NO: 215951 - DNA, 122 bp, Homo sapiens
tttatactgagttcaccaaaagattcaggtaaaatacatactatagagtaaatgtgcccacggctcatgcctgtaatcccagcacttgggaggccactgtccgagggactacttaagtccaa

SEQ ID NO: 215952 - DNA, 122 bp, Homo sapiens
agccctaacacgtcgcacaatgtctggcccatggtgggtgttcagtaagtgattacttggcgcggtgactcacgcctgtaatctcagcactttgggaggccaaggcgggcggatcacctgag

SEQ ID NO: 215953 - DNA, 122 bp, Homo sapiens
agtcatgagagacggggaacgtcgcttagctccgctctctgtgaggcctggggtctgctacgggggagtggggcttcaggttcatgtcactaaatggcagtgacgtttcatgaggtcccaac

SEQ ID NO: 215954 - DNA, 122 bp, Homo sapiens
ccagttccggccgcgagggtggagctttgtgcctcggaggcgtgggtgacgcaggcgcagcgcgggctgcgcgcgctactgcccatccccggttgtcccacttttgttcgcctctcttcggc

SEQ ID NO: 215955 - DNA, 122 bp, Homo sapiens
cactgtgcccagcctatttataattttctatggagttccataataaccaccaactggggccgggcgcggtggttcatgcctgtaataccagcactttgggaggccgaggcgggcagatcacg

SEQ ID NO: 215956 - DNA, 122 bp, Homo sapiens
ccgagtccctgcagcccgcccacaccacgctgcggcccgttttcccttgtgggggccttccgcgagaggcatagacaacctactccaatgcttggggctttacagcacacccgggacagccc

SEQ ID NO: 215957 - DNA, 122 bp, Homo sapiens
tggcgtcggcccaggtcggcgggaaccccctgaaccggagtaagtagcacccaggggaggcgaagggcgcgggggtgggcggcggcggcggctcctgcgttggggggacccgcctctcatcc

SEQ ID NO: 215958 - DNA, 122 bp, Homo sapiens
gtatagtctgagacagtatggctgcggcattttggtcctccagatgagctcttctgccagcgctgcagatttcagtgtatcccgggatgagaggctccggctccacctgctgccactgtcct

SEQ ID NO: 215959 - DNA, 122 bp, Homo sapiens
ttttgctcaaccctttgtgaaatccatctgtgattttgcatgttctccctcacttttgagcggagctggtcaagaataattcttgagccagattctgtgcttagtgacagttcacctatcaa

SEQ ID NO: 215960 - DNA, 122 bp, Homo sapiens
ctcctgtgatgctgcgtgctggagagaacccaaggtcagttacccttagagctcctcctacgatccagtccgcgtgatcctttgaataattgccttctgctgtttaccgacagattctctat

SEQ ID NO: 215961 - DNA, 122 bp, Homo sapiens
gcgccctccccccgcttccccctcctcccctccctatcgccctcaccccccttcttcccccgtgacccctgaccccagctaatctgcatagaggaatgacaggcatccgctgggcaggatcc

SEQ ID NO: 215962 - DNA, 122 bp, Homo sapiens
gttgaataaggaagaagagttagaattgcttgaagccctctggagttttagcactagtcccgcccactcccttctacttccaggtcgggggggggcgggtccaatagaaaggcggaagccag

SEQ ID NO: 215963 - DNA, 122 bp, Homo sapiens
cggagattcccaagtcagattcacaaacacatggggcgtcctggtggataaacctttccccggaagacacatttgtgaagagtcttggcccccagtgttgagactgattcggcgtcctgaaa

SEQ ID NO: 215964 - DNA, 122 bp, Homo sapiens
caggctgtctccaactcctggtctcaaggcaccctcataccttggtctcccaaagtgctgcgattacatgcctgagccaacgtgctcatcctgaaccgttttttagtatataatgtccttct

SEQ ID NO: 215965 - DNA, 122 bp, Homo sapiens
gagatcttccagaatgaagcactccaaatagaggaccaggtcttaaaatatttgagaatccggtccgtacaaactctgctgtgttgaatgattggtgagtttgtttgctcattgattgaatc

SEQ ID NO: 215966 - DNA, 122 bp, Homo sapiens
acagcacaagtcagaaccgccgtggccaaagagaccccccgggacccccctggggcagcacggcccgagccccgcagcctgcctggctccccacccgaccccaacgtagacgcttcctctga

SEQ ID NO: 215967 - DNA, 122 bp, Homo sapiens
tcccaggagaggagttggtttagctgttttatcaaaaagctttgaaatataaagtgctcccgaggagttcgaaaggacacaggaaaaacactaccctttagggagacaaagaactgtaacat

SEQ ID NO: 215968 - DNA, 122 bp, Homo sapiens
cttccgcacccccaaacaacctcgcaccacctgaaagcggggagcttgagtttggggctgcgtagatcaaagcagggtaagacgaagggaaagagggaggggagcttggaagcaaagtgaac

SEQ ID NO: 215969 - DNA, 122 bp, Homo sapiens
aggggcgggactggggcttcggggcggggcttcggggctgcggtcgtgtggtcttgaccgcgcggctccgactgcgctggctgagttcctcaggccgcccgctctctggcttccagcccgcg

SEQ ID NO: 215970 - DNA, 122 bp, Homo sapiens
cggcaggtctggaagttggatagggtctgtaaagggctgcctggctccaggggcctcacacgcagcgacctcagccgggcccaaggtgcgtgtactgcgcatgcccagccaactggtcttcc

SEQ ID NO: 215971 - DNA, 122 bp, Homo sapiens
atgccccaaattcactgcgggttgtgaagtcactccaggacctggtctcaagtcagctaacggtttccacacagtcccctggaggcccatctccatataaggaaaaccagagggaagattag

SEQ ID NO: 215972 - DNA, 122 bp, Homo sapiens
atcagttgaatgaaatagaatatgaaatgagtttctcactaagcagaagcattgaggtgccggtgcttgcaactcaatcactgaatacataaaaagcaagtgctttttcagatgggtatttg

SEQ ID NO: 215973 - DNA, 122 bp, Homo sapiens
agctcgcccgaggcctgggcagtccggagttccggagtgctggaaaagttgccgccttgacgtacccggcggggagagcacgtttgaccgctgctgctcatctctcctccaactcacttttc

SEQ ID NO: 215974 - DNA, 122 bp, Homo sapiens
tcaactgagtcgttccataatgtgagcaagtcatttactctcccaaagcctcagtttcttcgtctacaaaatagaggtagctaatacctaccctctcactacctcaaagggttgctgggaag

SEQ ID NO: 215975 - DNA, 122 bp, Homo sapiens
ccgacgtataagcaacgtcatgtaggatctgccgtttcgcgtctggtctagtgcacttagcgtcatgtcctccaggttcatccatgttgttggaaatgctaagatttttttctttgttaagg

SEQ ID NO: 215976 - DNA, 122 bp, Homo sapiens
ggacaccgtgagttttcctaagagcaaatgttctgtctgccacagatgcggcttcaagtacgtgtgatgcacctgtgtgacccctcagctcagcaccaacctctgctgcagcttggaaccac

SEQ ID NO: 215977 - DNA, 122 bp, Homo sapiens
ggctgacatcgctggctgcccctttgggcggagaggggacctcaccagtttttttagtatcgcccacgcccagttccctggccaagtccgcagggccctcctagagccaggtgggagtgggg

SEQ ID NO: 215978 - DNA, 122 bp, Homo sapiens
tcttcgtcttctgtgttacaaaacttatgggcatgtttggcagcatcaatcacacgggaccggtcccggggcctcatgggcaatttctctaactgacagtccagcactaggaccacctggcc

SEQ ID NO: 215979 - DNA, 122 bp, Homo sapiens
cttcggctttccaggagggaagtcttgcctatcatttccatagcccttcagcaaccactacggaagaggccgcctcctcctcggatctgtatccaagccgcctccagtccctgaccgagacc

SEQ ID NO: 215980 - DNA, 122 bp, Homo sapiens
atggccctgccctcagatgcctgtgacgtcagagatggaggatgggcctgctgggacccccggctctgtcagctccaggagcctcggggtcggggggacgatccacaggaatccacgagcct

SEQ ID NO: 215981 - DNA, 122 bp, Homo sapiens
aaccccttttagaggggctggaacaggctagtagttgctaggcaagttaaagtaattcagcgtccttgccaaacgtctgccaggcaaatagggaactttcagagaaggggagtgagatggtg

SEQ ID NO: 215982 - DNA, 122 bp, Homo sapiens
acagtatcagaaaaaagatcaacttctaagacaccactcactgctagcactcttaccaaccgtattatttttggtttgcggagcacttacccctcttctgaacccaaccttctttcacaatg

SEQ ID NO: 215983 - DNA, 122 bp, Homo sapiens
cctaccccaggaccttccaccagaaaaggccaaagagagaccacacgtgccgccccctgccgaagcctggcctttgaaggatgaacggcaaggggtatgtctgccctgacagagtgaccagt

SEQ ID NO: 215984 - DNA, 122 bp, Homo sapiens
ttttcagtcctctccagattttatgccaaatagcttgtgatatggtttttctgacaatttcgtccccactggttacattcctcactggttccactggagtgatcattctaaaacacacacat

SEQ ID NO: 215985 - DNA, 122 bp, Homo sapiens
cttgattgggattgtaggctgcagaggctggggaagggcagacagcctcgggagacacgccggaaagggcggctccctcgtgctcctcagtgactcagggttttggccacatagctcccctc

SEQ ID NO: 215986 - DNA, 122 bp, Homo sapiens
cgttagagttgtttctaccttttggttattgtaaatagtgttgctgtgaacactggtgtacgtgcatttgtctgaatacctgttttcaattcttttgggtattagcctaagggtggaattgc

SEQ ID NO: 215987 - DNA, 122 bp, Homo sapiens
ttcggcgcgcttgaaatcattcccgtggtgatcactttcagcaacgtgccctcggtcaggcgcgcatttgcggtatgaggatgaaacctttcacatgacaattcttacttatcttgcctgta

SEQ ID NO: 215988 - DNA, 122 bp, Homo sapiens
ggagctgtgcacgctgctgttacctaacacctcggaacggctccgtctccgcggcgggctcgcttagggattgcagtaggaagcaaacgctgcatggagaaacaccaggaagaccccctgac

SEQ ID NO: 215989 - DNA, 122 bp, Homo sapiens
accccagctcgggcggggaccgcgcgggaaccccgcgatgggagagggcagcggcagcgacgatgtagagcttggcatgccctctgctgctccagagagcctggtcgcagccttgcgaggtc

SEQ ID NO: 215990 - DNA, 122 bp, Homo sapiens
aggagggagaggagagcggtccggaagccgccgagcccgggcagatctgctgcgataagccggtgctgagagacatgaacccctggagcacagccatcgtggccttctgagcccttggcccc

SEQ ID NO: 215991 - DNA, 122 bp, Homo sapiens
gtagtattgttatagcagcaccagacagactaaggctgtgtgtgtgtgtaaatacagatacgtggcatgcatatatattattaacaaacaggtaagaatccaaacgacattcctgagcacat

SEQ ID NO: 215992 - DNA, 122 bp, Homo sapiens
acatgatggcccagatcatgccgcagccgtcatggatcagccagaccctgttggcctagtcggcctcggaggaggaggacgagggagtcataattacaattttcagccaggagaggatgatg

SEQ ID NO: 215993 - DNA, 122 bp, Homo sapiens
gaggaagaaactggaaatttagaattttactgcaagttctagaagttaggctggggaatacggtcatggatttgagaccctgcttgccttacatttgggaaatgcaggggaaaccagtaccc

SEQ ID NO: 215994 - DNA, 122 bp, Homo sapiens
gagtaagtcagttgaatgtcatcgaagaagctcctgatttagattttaactgtacgtaaacgcagatgaccccccactctcgtgccttcatttaattcccgttgcttctcccatgggtattc

SEQ ID NO: 215995 - DNA, 122 bp, Homo sapiens
ttatatattctttttgtttgttatgacagacagcacacattcacaggaactactcaaccacgtaaccactactccctgtcatgatgtgttatgaccagattacatgcaagtcaacagggaaa

SEQ ID NO: 215996 - DNA, 122 bp, Homo sapiens
ccctgacacagggcagccccgccagcctctgcatggccgggggagttacacccttgaggacgggttccaggaataagatgtgtgatatgcagaagacaacagggcctttgtgtggaaaggca

SEQ ID NO: 215997 - DNA, 122 bp, Homo sapiens
ttttgtgaaatctttatagtctctgttttcatattccttttgctcactggtctgaggaatcgtgtctttaaaactggcaagagctgggaaggtggtctctggaagagcatcttcacttacaa

SEQ ID NO: 215998 - DNA, 122 bp, Homo sapiens
gaaatcctaagaagaagaaaatgcaaatctatgatttggaggctggttccttggtgaggccgagaacccggtccagtgtttctaaggtggtctggaagagtaagcattcaggaataacgaag

SEQ ID NO: 215999 - DNA, 122 bp, Homo sapiens
acttacagaagagacgaggcctggttattcttccaacacactcccctcagccgcgcacagcgttactggctatgtggccagtgaccagatttgcagacctgtttccagacctcagctacctc

SEQ ID NO: 216000 - DNA, 122 bp, Homo sapiens
cggaaccgcgagggggcggtgaccgcggggaaaccgcggccggagggagcgagggaggggcgcccctcgctggccaaccctaactgcggccgctgggctcccgggttccgcgccgtcctcga

SEQ ID NO: 216001 - DNA, 122 bp, Homo sapiens
tagctcaaatgtcacttccttcttgaagccttctttatttatcccaaatctattttttttcgtatttcacagcattaaaagaaaaacaggctgggcacggtggctcacgcctgtaatcccag

SEQ ID NO: 216002 - DNA, 122 bp, Homo sapiens
gaagctggagaaggcggagatcctcgagatgaccgttcagtacctgagagcactgcactccgctgattttccccggggaagggaaaaaggtgggcacaggttagggaatgggacgcctgggc

SEQ ID NO: 216003 - DNA, 122 bp, Homo sapiens
ctcccgccgacgggccaccgtcatccttgtccgcggggtcccttacgggatcttgtcggccggagaccgtctggtatcctggaacttcaccccccagcgtctccaacttgtaccagccagcg

SEQ ID NO: 216004 - DNA, 122 bp, Homo sapiens
ttgtggggcgggaagttttctgtggccatctccggcgttctttataggcagcggcctagccgagagaaactacaactcccggcagggttcgtgcttgctcgtcgcgatttcgcggggtaata

SEQ ID NO: 216005 - DNA, 122 bp, Homo sapiens
tcccaccaatcccagcccccacggccttaagcccctatggctccctcccaagattccaaacgtaagaaaagaacacacaccacagtccaaaggcttcttgtctggaatagccaaccctgggg

SEQ ID NO: 216006 - DNA, 122 bp, Homo sapiens
ggcgctgctttcctttgtagctctcagacagagggagcaggaggcctacatgagcctggacgtgcacccaggcctcttgcctggaggttagcgcagggaatgatgtgctggagcaggtgggc

SEQ ID NO: 216007 - DNA, 122 bp, Homo sapiens
gtgtctctttttatagtggtctctcggcagcttggctcccatgggggcaccaggaggctccgcccccccgcccgccccttccccccgccagcgcgggcagcggtggctgagcccgggctcgg

SEQ ID NO: 216008 - DNA, 122 bp, Homo sapiens
aagaactccacatgccactgcactggcgggtggagcaagtcaagcagggcagctcatgaacgcccgggagtccaggaggcccgggtggggacgcctggatgacgtcactcgaggtgggcagg

SEQ ID NO: 216009 - DNA, 122 bp, Homo sapiens
ttctgtacacaaggggaggtgaggagggtgttatgagaaaaacctctccactcgacctcccgtgggctccagcacccgagcctccaaatcctgccccagctgccctgcagcgcagacctccc

SEQ ID NO: 216010 - DNA, 122 bp, Homo sapiens
ccttggcgtccgtgaagatgctggtcttgtggcgccggatggtgaggaacacttccatcccggcggctgcctctcccctcgatgaggtcgcgcggccgcgcttgttactgatttctaactta

SEQ ID NO: 216011 - DNA, 122 bp, Homo sapiens
gacacacatgcacacacagaaacacacacaccaatgacaaatcagcctcactgtgtgcctcgcattgccccatttaacccgcatcctgcgttgttggaaagtgtgtatgtgatgatgacgct

SEQ ID NO: 216012 - DNA, 122 bp, Homo sapiens
gaaagtcaaccttccttataagtaggttttgcatcctgcaaatactgcattttcaatccacgtttggctgaagaaaatccacatataagtggaccagcacagttcacacctgtggctgttca

SEQ ID NO: 216013 - DNA, 122 bp, Homo sapiens
tgtttgcaaatgcaagtagaagaactcaatgaaaagaattaatcttacagttttaaatgtcgtcagattttccattatgtattgattttgcaacttaggatgtttttgagtcccatggttca

SEQ ID NO: 216014 - DNA, 122 bp, Homo sapiens
cgcccggcctcaaatgtcactttctcagcaaaccctttcctggcgtgttccctgccttctcgtgttcctggtgtatcctgcctgttccacagtggtcaatggatttgtgcttactctaagat

SEQ ID NO: 216015 - DNA, 122 bp, Homo sapiens
ggaaatcagggtcgagtctaaaaagatctactttcgaagcccaagggagtgttaactatccgcagggactcggggcaaggcaccgccccacatttcctagatgtgattagtaatggtagggt

SEQ ID NO: 216016 - DNA, 122 bp, Homo sapiens
tgcaaaagctgcctgcccgcgcgttatcagcggcgcgcaggcctgtggttttctcgctctcgcaaccctgctttaactgccggtttatttttcgacaaacaggatgcctccatctgaggctg

SEQ ID NO: 216017 - DNA, 122 bp, Homo sapiens
gtaggccttagagccacagcggcggcacaacgtgtgcgtcttattgcgacgctttccaaacgatgacgttcccttcgtctgcacattaaaggaataaatagttctgaaacctggcaacttct

SEQ ID NO: 216018 - DNA, 122 bp, Homo sapiens
tgctgatgggtttctcaagttttctgcttgttatggcctgtcaacaaggctttcactctgcgttcaggtgtgtgggccttgatcattgataccatggtgtccatgagcctgttgttcacatg

SEQ ID NO: 216019 - DNA, 122 bp, Homo sapiens
gacttaagttctaaatatgccagaccacaggcgaccaccgaaattcaaagtaatcctccgcggtaccccagagaaatcttgtcaacgtgccgaggtccagcagcctgcaagacagagcagac

SEQ ID NO: 216020 - DNA, 122 bp, Homo sapiens
ggtcttttgctctccatttcgttcggcggatgttctccctcctgaggggaagttctgtcccgggagtaagaggaagtaccgcttctttacaagcacgacttggcacggaagaacttcccgct

SEQ ID NO: 216021 - DNA, 122 bp, Homo sapiens
agattcggaaacagaaaacaaaagcaggaaaagtgaccttagcccggattctgccatccccggaaggcttattcctcctatgggcaaaggagcaaagggagccagaagatgaaagcgagctc

SEQ ID NO: 216022 - DNA, 122 bp, Homo sapiens
gtggaaagtttcgctcctgcattgcccgcaggagacggaagatgcatgggtttcctggcgcgcaggttgggtggaggctcagcgtggctctgtctggccaggctaagtggtttgcagtgcct

SEQ ID NO: 216023 - DNA, 122 bp, Homo sapiens
tcagaggtgaatgtaaagtgggtgaagcggctcagtgattgagcgctagccaggattccacgccaggcctttccgtgttcaacagctgctttcagaagtgtggaagcctcggagagggtccc

SEQ ID NO: 216024 - DNA, 122 bp, Homo sapiens
ggacaaaagacgagtcaatcacgcaaatggacggaacagaggtgaatctaggaatatccccgcccatagaaagtactgattggagaaacatttgttttctctacggctggttggtgtaagga

SEQ ID NO: 216025 - DNA, 122 bp, Homo sapiens
ctcccaatacaccaggcagacactgagtacgagtctcggctggtgtcctagcaacagcgacgcgaccccgccccttcccgcgtacacctcctaccttattagcctggaaggggcgggaccag

SEQ ID NO: 216026 - DNA, 122 bp, Homo sapiens
cttgatcctagaaaagaggccgctcaggatggggatgagacttccattgctccggccagacgcatcccctcaggtgatcgaggccttcacagacccaaagcggaaccgccgcgaaaacgatc

SEQ ID NO: 216027 - DNA, 122 bp, Homo sapiens
gcggtgcgtcccaggctgaggccacgtgtgcttcaacaggtggtgaacgggctcatggagcggcctgactgggagaccgccatccagaagcccctgtgtagcctcccagcaggctctggcaa

SEQ ID NO: 216028 - DNA, 122 bp, Homo sapiens
ggcagaggggtaccttggccgacctagggacttcaagctggtccctgagctaagcaattgcgcggcggtgctcagggcaggcctgcctttctgggccttcagacttcccaccatctgcttag

SEQ ID NO: 216029 - DNA, 122 bp, Homo sapiens
cgcccgcgcgcgctggccgcggcgcgcacgcgccgctggggcccgccttcgattggccggcggacttcgaggctcgtctttgccgctctcggattggacactcacaccaggcctggccccgg

SEQ ID NO: 216030 - DNA, 122 bp, Homo sapiens
cgcgagctcgcgcgggggcggtgggggcggccgcgggggcggcggctggggcagctggggcgggggccgaggcggcggcggcggcgcgggcaagggcggcgggggcgacggcggcggccagg

SEQ ID NO: 216031 - DNA, 122 bp, Homo sapiens
cccggcacccccgctcatcctggcaccatcccagtcaccctgacaggacaaacactcgcgcgcagcgacaagtgcactcctctcaccagcccgttcctgccaggtgagccaccacacactca

SEQ ID NO: 216032 - DNA, 122 bp, Homo sapiens
tttttttttaaagaatcggtgacttatcttcacactggccttagtcctccatgcccaacacgatgtccctaggaaagtctctggaattgagcacagggttgaccttcaccgtctagagtgaa

SEQ ID NO: 216033 - DNA, 122 bp, Homo sapiens
cccaggcccttgtccagtgctggcttcttgggcggcgggggctcctctggcttggactcccgccgtgggccccgccgccggccttcccgggcttcctcgccccacggctcctcggcctcggc

SEQ ID NO: 216034 - DNA, 122 bp, Homo sapiens
tgcagaagggattccatgaggtgcgcgaaggccctacttccgctttcaccttggagacggcgactctctgcgtactgattggaacatccgcgaaatgatacgcctctctgcaatgctattgg

SEQ ID NO: 216035 - DNA, 122 bp, Homo sapiens
cctactcggatttgtaaagccgagattgcttagttggaaaccctgttctcccctcccaggcgcacacagatcccccttacacgcaagcagcgggcgcttccacgcctccgcgggccaaggtc

SEQ ID NO: 216036 - DNA, 122 bp, Homo sapiens
ccatgtatgatttcatccttgtcttattatctaagcaagtatttccagccagtgaggccgcgtagataaaccctacagcctgctgcatgaaccgagctcagcgtcctccctgtggctcggtg

SEQ ID NO: 216037 - DNA, 122 bp, Homo sapiens
gcagttaagaaacagaacaatcaagaagaaacaagaaaacgccctccaggaaacagaaaccgggtgcagaggcactgtctgcagacctactggagcctcaggcaacctgcggaggaaaagcc

SEQ ID NO: 216038 - DNA, 122 bp, Homo sapiens
agagggctgcggaggggatgttcctacctgcaggatcgcgatggcagtgatggaggcagacgtgtggagacacgggcactgacttctccgtctcagcccagagccacttatatgggcggcca

SEQ ID NO: 216039 - DNA, 122 bp, Homo sapiens
gtgtcgtgggggtgctgcagaaggccaggactccaagacaggcatggccacactcacctgcgcttatctctgccgtgtcctgggtggcagccgaggcggcggcgggcggcagcccatggggg

SEQ ID NO: 216040 - DNA, 122 bp, Homo sapiens
ctttcttctgggattcagcctgctttcctcttcacagttgccacctcctgcgtttcccaccgagttctttgggtctgattttgcaggcagcccgggaagacagtcttccaagattggaatcc

SEQ ID NO: 216041 - DNA, 122 bp, Homo sapiens
cagtcccaaaaagtcaacacatgaacaggtaaaaataaaaaatagcaccttcttgactggcgattccattcctgtttaggagcactgaggggatgccaggactctgcacagctctaggtgag

SEQ ID NO: 216042 - DNA, 122 bp, Homo sapiens
ggcttcaaggaggtggccctgggccgtgaccctacttctgtcggcgtctgttcgggcgcccgcagaagccagactcttgggcagggaagacgctaaccgaggtctccaaagttcaaagaccc

SEQ ID NO: 216043 - DNA, 122 bp, Homo sapiens
gtcatcctttaaaacctccaagtacctagcacaagactcagtaaggacgtgttcatctgccgactcactaaccaaataaaagttttccaaatgctagacagttaatcccttttctcacgcca

SEQ ID NO: 216044 - DNA, 122 bp, Homo sapiens
attcttcatcttcagcggctttgttcaggaggcaacatgactgctcccagacgctgtttccgcacggggccgccattttgagatcccaggcgtctcagtacaagcggaggactcgccaggcg

SEQ ID NO: 216045 - DNA, 122 bp, Homo sapiens
gagccgagatcgcgccactgcactccagctggggagagcgagactccgtctcaaaacaaacgaacaaaacaagactgtgaaaatgaactttacgaataaagcctaaagaagcaaataaaagt

SEQ ID NO: 216046 - DNA, 122 bp, Homo sapiens
tttgtattaaaattgttacatttttattaatagagtcacatatgaataactgataatgagcgtgtattgtatgtcaggcactgctttaagggctctagattgtttttgttttgagacagggt

SEQ ID NO: 216047 - DNA, 122 bp, Homo sapiens
caggaaactcgagacaaagacagaggcaaacgcaacgctgggaagagccaggggtgctgccgtctgcaaaagcagagacgcgtctcccttcgggcaaagtgactgctacaaagtctgttccc

SEQ ID NO: 216048 - DNA, 122 bp, Homo sapiens
aagccgtgtcactaagagtttgcctgtcgccatcattccagtatcctcagggagcatcaacgctctcccttcggccctgagtttagcgaggggattggtcttacccgtcggcctgggcgagg

SEQ ID NO: 216049 - DNA, 122 bp, Homo sapiens
atattcatctagccttctgagctttctgggcagacttggtgaccttgccagctccagcagcggtgaagactgctgctgttgtaatgaggcaggcttgagtttctgtctcagttttgccactt

SEQ ID NO: 216050 - DNA, 122 bp, Homo sapiens
gaggcggggcgcagcgcgggggcaggaggcgggccagggtcagggcagaggctgcggccgcgcgtccccattggccgggacgcagtgagccgcccggagctcggcgcgggcggggcctgccg

SEQ ID NO: 216051 - DNA, 122 bp, Homo sapiens
ggggccgtagcgggagcccttgaggccggtagccttgcagggctggcgccgggcaggagccgggtcgcagcggctgactgcacaactgcgtgcgaatcggcgaccggggcgagggcaagggc

SEQ ID NO: 216052 - DNA, 122 bp, Homo sapiens
agagcgtcgagctgtcaccatgggtgatcacgcttggagcttcctaaaggacttcctggccgggggcgtcgccgctgccgtctccaagaccgcggtcgcccccatcgagagggtcaaactgc

SEQ ID NO: 216053 - DNA, 122 bp, Homo sapiens
acactagatgcggaggaggagcaggaggaatccgaagaagcggcctgtggcagcaagaaacgggtagtgccaggtattgtgtacctgggccatatcccgccgcgcttccggcccctgcacgt

SEQ ID NO: 216054 - DNA, 122 bp, Homo sapiens
ctaaccagaacccaggttggctgagttaaccgcgctcagctgcctggaggccacgggacccgatctctggggatgctcgagctggcgcttgcggcttcccgctgcgcgtagtgggggactga

SEQ ID NO: 216055 - DNA, 122 bp, Homo sapiens
tgcagtggaatggctcctaatcagggtttgttcccaccattgccctgagctgctaggatgcgctctgtccacccatggccctgtactggaataacagggtaaataattatcttatctgtttt

SEQ ID NO: 216056 - DNA, 122 bp, Homo sapiens
gggcactggctcccagcgaaggctctcggccttaatcatgtgtgaaatgttttccttcctcggctgcagagcctcggtggtttgcagcagtggaaccaggcaggcccagttgtgggtaggag

SEQ ID NO: 216057 - DNA, 122 bp, Homo sapiens
cacattcttctccctgggtaagcttctcctcatccacagccgcaattatcatctgtctatcgacaacttctcatcttcatctctagcccagacctccacgccacgtccaaacccaggtttcc

SEQ ID NO: 216058 - DNA, 122 bp, Homo sapiens
acctttcggccacactcaacatggccctaaccgaaggttggcatgcctgtggcactgtctcgggacagttctcgcgaggtttgcctgggcccgactgctcccgccctgcctcgcgccgccgc

SEQ ID NO: 216059 - DNA, 122 bp, Homo sapiens
tccttggggagggttcagctgaagagcccggagcccctgaccctcacccctactctacggcgagtccctccggcacctcgccacccacaatggtcccgccctccatggctacgcccaccgtc

SEQ ID NO: 216060 - DNA, 122 bp, Homo sapiens
gaaaagaacccgcccagagccccttctctccattccctcggcgaggcaggaagctatctgcgttccgaatcccgcgacatcaggattatctcgcactgcagcacagagaccaatcgctagta

SEQ ID NO: 216061 - DNA, 122 bp, Homo sapiens
acgagtcttcggagagggcgtcgccactccagaccttccagcaagcttgaagtcatctgacgctaaaggactacttacctcaagagctccatcgtcacagaaggaggcggccaagttcgcgg

SEQ ID NO: 216062 - DNA, 122 bp, Homo sapiens
ctcagatcccacgctgccattcggtagatatgtgtctttagataagtgacttaactttcccgaattttagagtcctcatctaaagattctaataccttcctgacagagtgagtgtctggttg

SEQ ID NO: 216063 - DNA, 122 bp, Homo sapiens
agccatcacctttcttcttagagtgaatcaacttcccagctaccattacgtcaaagaacccggtggcctggggagttcccttgctgcagatgtccaaagtccagaggaactcatcttctttt

SEQ ID NO: 216064 - DNA, 122 bp, Homo sapiens
ctccgcggctgcgcagtagcgcttggcatgcgtgcgtgactcctgggggtcaaagggcctcgccctctcccccacttttgacctactttcttaaagagtcccttttacaaaaatatacatat

SEQ ID NO: 216065 - DNA, 122 bp, Homo sapiens
cttcatcatcagatatcccagctccttctggctttccgcttttccatgcttagctcatgacgtccatcctcagagatgccgcatgatctcacttgctgctggagcacaagccatcatatctg

SEQ ID NO: 216066 - DNA, 122 bp, Homo sapiens
ggggtggcctactcacctgggggcgaactccttctggcacatggggcagctgcgcagggccgcggcaccctccacagacggctgctgctccaccctgggggccctgcagggatcaggtgccg

SEQ ID NO: 216067 - DNA, 122 bp, Homo sapiens
cttcctcgtcctccgcagagccgtgtgtgtatgtgtatagggcccagcgtgctgaccgggcggttcttcaacacagtgagtgacagcaggagccccgaaggttctcaggtcttctgtccatg

SEQ ID NO: 216068 - DNA, 122 bp, Homo sapiens
cttttactatccaccaagaatctccacttgctgtctcagactcagcagcctcaacatcaacgtttacacaaccaagctcatttttcccctcaaagcttttcctctgtcgacagtgccacaat

SEQ ID NO: 216069 - DNA, 122 bp, Homo sapiens
cggtggcagcggtaaggacccttccctcgccctgcgcctctggacctgcaggtgctcgggcgcggcccaggccgccccctgtctgacctctgctccggccctgctcgggttcccgggagtgt

SEQ ID NO: 216070 - DNA, 122 bp, Homo sapiens
tgctggggtactcatgctctcacacactgagatacgcacgcattcccgctggggtacccacgctctcacacactgagttatgcacgcattcccgctggggtactcacactctcacacactga

SEQ ID NO: 216071 - DNA, 122 bp, Homo sapiens
ccacgctcactaatgcctagatagtgggcaggagaacggccgtccctgggggtcatggtgcgcgtctcctcgttctttggtgctgaggaaggaggtggcagaggccttggagcaacagagcc

SEQ ID NO: 216072 - DNA, 122 bp, Homo sapiens
gctggggggcgcctccagctgcgcaagcgcatagggatgcgccctttgtggactccattgcgcagggtgcattgccctgaagagcgctcctccttccggtgaaagtcgtcgggttcccagcc

SEQ ID NO: 216073 - DNA, 122 bp, Homo sapiens
caggcaatggccgtgaacaaaacaattaaaaatcactggtttgcggggcgtggtggctcacgcctgtaatcccagcactttgggaggccgaggcaggcggatcacctgaggtctggagtttg

SEQ ID NO: 216074 - DNA, 122 bp, Homo sapiens
gttccaaacgggaaataatccaaataccagtcaacagtagataaagatttcttggttcttcgtatagtggaatactagacagcaacccaaaagcactaactgctgatgcatgctttggcatg

SEQ ID NO: 216075 - DNA, 122 bp, Homo sapiens
tggcgcgctgcgctgtcaatggatgaatgagagccgtgaattctggacgctggcgcgctgcgctgtgagtgggtgtttgagagctgtgagttctggacgctgatctcacaggcagcactcta

SEQ ID NO: 216076 - DNA, 122 bp, Homo sapiens
ctcatacatgcacttatacatgcatgaattcacttcttaagtcattcatgcactcaatcacgtatgaattcgcttgttcactcattcatgcactcactcatgcaggcatgaattcgcttgtt

SEQ ID NO: 216077 - DNA, 122 bp, Homo sapiens
tggagtctagctcttggtgactagcattagaataagcagatggattttaataattagtggcgttgggaagttcagtcaattccatttattgaattgatacagaaattaacttaggcacatta

SEQ ID NO: 216078 - DNA, 122 bp, Homo sapiens
cccaactacttttcttgccttctgtctcaaccaggcttattctccccacagatactcaagcgacctttttaaaatgaaagtctaataagcctctgccttacttaaagtctagccagtagctt

SEQ ID NO: 216079 - DNA, 122 bp, Homo sapiens
tgtgaagacaacacactcctgggcacacatagatgacagaaagctgccccacagcctgctcgggctacaactattgttcaagcttctgtggatctgactcagctcaggcaaggcttgttgtt

SEQ ID NO: 216080 - DNA, 122 bp, Homo sapiens
gcgcgggggagctcggccgccgcaccgcctcccgcgcctccgccccgccgcccgctgccgcgactgccaaagtttctcggtcacgtgctggcccccggcggcccaaaggtcagcgtggagtg

SEQ ID NO: 216081 - DNA, 122 bp, Homo sapiens
gctagggaggggtggagggtgaagctcccgggagctcattggcactagaggttctggccacgccctctccgcgagtccagtcccacgcgggatgaagagggcaccctccgccaagaggctgc

SEQ ID NO: 216082 - DNA, 122 bp, Homo sapiens
ccccactgcaggggcccccactccccccctcacgcgctgcgggtcctgtcactccacccacgctgtccatccccgctgatgctctgagccaggtggtagcaggtgggggtggcgccccgctc

SEQ ID NO: 216083 - DNA, 122 bp, Homo sapiens
aaatcccggtaccggctctgcggcccgggcgagggaccgattctccatcggaaaacaggacgagaggcccccaccccagaggcagggtcctggggccctgaggagctctgcccttcccctct

SEQ ID NO: 216084 - DNA, 122 bp, Homo sapiens
cgtcgcccctccctcatggggagccccttccccctggaaagacagcaggtactgtagcctcgcctgctggccaggggcgccggctcagaggacctgccctgacctgcacgtgctgaccagac

SEQ ID NO: 216085 - DNA, 122 bp, Homo sapiens
ttgatagttttggctgtcatctgaaacagaaaatcagttcaacaccactgcagttaatatcgactaaacagctccgaacctcaattggccaacgttttaatcatatggagacaatttgaatt

SEQ ID NO: 216086 - DNA, 122 bp, Homo sapiens
cgccccgtaggaatgataaaaagcagcctgtgtgctgagagttggaaaatgtcgttttcccggtttgttccatgccacagaatcgccccaccctgcctgggtaggcactgggagggaacttc

SEQ ID NO: 216087 - DNA, 122 bp, Homo sapiens
tttgcagcatgttttgtggtgatgtttccaatctctttcccaaccaatggatcaggacggcgatcagtagcttggacggtcgcggatcctggctccgcaaacgttaaaggaaattgatgatg

SEQ ID NO: 216088 - DNA, 122 bp, Homo sapiens
gtgtgttctgtcagacacaacatgtgtgctttgtgacaggcctgtgtttaaagcaagtgtcgtcaaagtttctgggaagtatttagtctcagatcttctctccagctccaacatcaggacag

SEQ ID NO: 216089 - DNA, 122 bp, Homo sapiens
acccactgtggacagctgtctgtcagcatgcagagggatccaggaatccccccggcagcacggcccgctttccttctcctccatgctgggccagccagataagtcagggtcctggtggagaa

SEQ ID NO: 216090 - DNA, 122 bp, Homo sapiens
ttccatcccggaggtaagggaaacacacggtagagaaggccagggctgaaccccaagggacggtcttgtgtgttcagaggctggttttacaggtgaagagaagaaacagccgcagaagttgc

SEQ ID NO: 216091 - DNA, 122 bp, Homo sapiens
cccgcctgccggggaggggagcgcgtgcgtgggcggcgcgtgtgtgtccaaagagggctgcgcgggcgccaattatgattgggactgggggtgccgaaaatcaggggtggggggcctcgagg

SEQ ID NO: 216092 - DNA, 122 bp, Homo sapiens
ttaggaaaagttgtctggtgttacttaaggttatgacattgtgctctgtgaagtcacttgcgtccccgacacctcccaactcagctgggactggccagtgccctgctccctgacctcgccgc

SEQ ID NO: 216093 - DNA, 122 bp, Homo sapiens
tcccaggtagagaaagcccgtgaagaaatggcccgggccggcctggagggagacacctcacgcccccttagctcctgggccgcctcctcctgcagcccctgcctttcccggggcttggactt

SEQ ID NO: 216094 - DNA, 122 bp, Homo sapiens
ctgacgacgccgctggcctccctagcccctcgcctggcctccatcctgacctcggcggcccggctggtgaatcacacactctatgttcacctgcagccgggcatgagcctggagggcccggc

SEQ ID NO: 216095 - DNA, 122 bp, Homo sapiens
aagagcctgctcagattctgctagccacaccaagcttttggagagagtggagtcaagagacgtgttttccaattgtaggaagtgttgtttctaatgcatgcgatgagcttcgtcaacaagtt

SEQ ID NO: 216096 - DNA, 122 bp, Homo sapiens
gcccgccccgcgccacgctgtggaacggggctccggcaagtgaaacccagagggtgtttccgaggtgctcgacagtaggtatttttggaagctcagatttcaccatttgattgtataatctt

SEQ ID NO: 216097 - DNA, 122 bp, Homo sapiens
cccgaagtctgaccacagcaatgctccaaaccatgtgtctttcctggcttaaggttcagtcgccctcctcagaggggagcctatgaaagagcccagtggagtgtcagggtcctgagtcctag

SEQ ID NO: 216098 - DNA, 122 bp, Homo sapiens
gagcaggagcagcgccagacgcgtgccagctccatgccgggcctgggagccggccagccacgccatcaacccattggctggcagcccaaggagcagcagggccaccaggaagaccgtgtccc

SEQ ID NO: 216099 - DNA, 122 bp, Homo sapiens
acgaatcaagtccctgtggattctcgagtataaacggagctggtgacgaggcctgacacacggtcacacctcaattcgcgcgtggcgcccggcacaggctgagccccgccagatacaccatt

SEQ ID NO: 216100 - DNA, 122 bp, Homo sapiens
cttctgtcccggagaagaagccgtatttggtctccctcgatgggcgagaccggggccacgcgggcaccgtgatcccgccactgcatcccggggacccgccgctcatcctggagcggctcagg

SEQ ID NO: 216101 - DNA, 122 bp, Homo sapiens
gaagctggaattaatcagatatctccaattaatgtgcgatctgaacgaaattttgcctcccgggggtgagcactttcctattctagcggtcacccctgcctcttcctcgttccgggggcccc

SEQ ID NO: 216102 - DNA, 122 bp, Homo sapiens
cttcgcagcagtaaataccgactctctcattcatctgattcctagcggtggactcgcctgcgccgtggcggccctgttcatggacacgttcacaggcatgttcaacatccctagagtggcga

SEQ ID NO: 216103 - DNA, 122 bp, Homo sapiens
tgctctctccctccctgctttacacagatagcattgtactttgccaataaagtccacagtcgtgggaaatctttgagttggaggatatgagaaagagtttcattttgccggcagggtttaat

SEQ ID NO: 216104 - DNA, 122 bp, Homo sapiens
ccggatggaggatgctgagccctgcctgttccttgttcgtctctctcttcccctcctatgcgcacttttcgcagagccccagccagccgccttcaggagaggacgaacctgggcgcgttttc

SEQ ID NO: 216105 - DNA, 122 bp, Homo sapiens
ctcctcagcacctttctcctggtctagagtaggtgccaggcctggcggttctgttgcctgcgtgggtgccagggcttctccttgggaggcttgccctctgtgagagggagcagagagttgac

SEQ ID NO: 216106 - DNA, 122 bp, Homo sapiens
ctgggagcgcatgtggatgcacgtggccaaggtgcaccctaaggggggagaaatggtgggcgccatcaggaacgccgccttcttggcaaaggtcagtggcttccagggcggagttggggggc

SEQ ID NO: 216107 - DNA, 122 bp, Homo sapiens
cccaaaggggtgaaacctcagctacagccgccgcagcctcccagggaaccggctccgcggcgcccctaaaccccggcgaggagccggagcggactcactcacccgcgcttctcctgagcagg

SEQ ID NO: 216108 - DNA, 122 bp, Homo sapiens
aacactgtgaaaccccatctccactcaaaatacaaaaaagtagccaggcgtagtggcgggcgcctgtagtccaagctaccgggaggctgaggcaggagaatggcgtgaacccgggaggcgga

SEQ ID NO: 216109 - DNA, 122 bp, Homo sapiens
ctgctaaacttctattattgatttttgtttgcttcctctctgccccttgtttcctcatcccgtttttttccctcttcttcactccttccgttacagcttttctcttgcctcaggtacccagt

SEQ ID NO: 216110 - DNA, 122 bp, Homo sapiens
tagagcgcggaggcggggccatgcggggcggggccggagcggaggaggggctctcccgtgcggccagccccgcccctcacccgggtacccggcggcgatctccagctccccaagcccattta

SEQ ID NO: 216111 - DNA, 122 bp, Homo sapiens
ggtccctgggcaagagaccaagtaaacccatgcctggatttactctctttctgctatacccgcccaagtgccctgtgaggttcactcacttctgtgttagaaaggacctacacctccggagt

SEQ ID NO: 216112 - DNA, 122 bp, Homo sapiens
agggggctggctctgagagccccaggactggctgccccgtgacacatgctctaagaagctcgtttcttagacctcttcctggaataaacatctgtgtctgtgtctgctgaacatgagcttca

SEQ ID NO: 216113 - DNA, 122 bp, Homo sapiens
ttgcccgggtcacatgcttcctcagagtcaatcactgaggctgggaagatagaatgatctcgttgaccaggcttgggtcatgtattccccttggataatgagaaagggagggaggttcactc

SEQ ID NO: 216114 - DNA, 122 bp, Homo sapiens
caacatggcaaaaccctgtttgtacaaaaaatacaaccattagcttggcgtggtggtgtgcgcctgcagtcccagctactcgggaggctgaggtgggaggatcccctgagcctgggaggtcc

SEQ ID NO: 216115 - DNA, 122 bp, Homo sapiens
gcgccaaaaagatcttcggctggggggacttctactttcgggtgcataccctcaagttttcgctgctggtgaccggcaagatcgtggaccatgtgaacggtaccttcagtgtgtatttccgc

SEQ ID NO: 216116 - DNA, 122 bp, Homo sapiens
acacagcatccctttaaatgaccctggagaccgtgatttgccattgccagacaggatggacgggaacagataggcaactgtgtgcgatcacaggacataatggaatgaaatgtcagatcagg

SEQ ID NO: 216117 - DNA, 122 bp, Homo sapiens
accctcccaccacattctgtgaccataaaggatgcaagatagcacgactacttcgtagagcgtgttcattttacagcttttcttgctcaaatcactcaccgagggaagatgacaaccaggat

SEQ ID NO: 216118 - DNA, 122 bp, Homo sapiens
accagctcaagggccgcaatgacctgatggaatatgcaaagcaacacaggattcccatcccggtcacacccaagaactcgtggagcatggacgagaacctcatgcatatcagctacgagtct

SEQ ID NO: 216119 - DNA, 122 bp, Homo sapiens
gatcgtgtctctccaggcgggaagtgtggtcgtgaggctcaagctcaccgtgcaggaccccgggtttcccatgggcatctccacgctggcccccatactccagcccctgttggcaagcacag

SEQ ID NO: 216120 - DNA, 122 bp, Homo sapiens
gacaagggagaagcaatgctgaggaagaccctagatagagctcattttactccacctaatcgttatatctggatatacccattttctgcatcttctttctcaacaataaaaaatgtaactat

SEQ ID NO: 216121 - DNA, 122 bp, Homo sapiens
agccacagcgtcgcgatgaacttgccccatctggtaccggtgatcccgagcgctccagggcgatgagagcccgttacctactatgtcccactccacttatgtaactggaagatcgccggcga

SEQ ID NO: 216122 - DNA, 122 bp, Homo sapiens
cgctgccgaatggaaaaggatccacggaatcttctgattatctgagggtgagtgtcaccccgggcccctggtccttttatcctctaggtaaccctggttgatttcctttcagcttcccgtct

SEQ ID NO: 216123 - DNA, 122 bp, Homo sapiens
ctgacttgagccgccgtcgggacaccggggaacctctctaaggcaacctatgttctgccccgctgcacccgcctatctactgtttccgcccggatcttgttcgctgaacaaccattactgcg

SEQ ID NO: 216124 - DNA, 122 bp, Homo sapiens
gcacaaagtaatcacagatcacagcatttaatcactgaaaacaagcactccagaggacagcggtgtcaatatcccactctctcattatctgtttggattgcacatccacactgtcagataaa

SEQ ID NO: 216125 - DNA, 122 bp, Homo sapiens
acacggacaagtcccgccaggggctgggcgcgcgccagccggcaagagcttggcgagccccgggtgctgccagcagaggctcagagacccacagacacccgaactctgactcacacacactc

SEQ ID NO: 216126 - DNA, 122 bp, Homo sapiens
caaacagttccccaccagtgaccctggggagacaggcatggaatcaccctctaatagaggcgacaggtgctgcctcatctggaggagtctccaggaaactaaggatggggcccagggacctc

SEQ ID NO: 216127 - DNA, 122 bp, Homo sapiens
ccccgcccactgggtgctgggcagatgattggtggagactcagcttcttagcaactagaccggcccctgccgctccgcagggagcctggtacccgcctggagttcctttcccagtgctttcc

SEQ ID NO: 216128 - DNA, 122 bp, Homo sapiens
cgctgtgaggtaggcattgcggacgtgcgtctcctcgagggagggcaggatgttcggctgcggcccctgccagccctccctgtcgtggtctgggtcctgggacgtcccctgggtcgtcccct

SEQ ID NO: 216129 - DNA, 122 bp, Homo sapiens
tggaggtggtgtgtggcctctggagaatcttcccaaactgaattacattcgttcacataacgacaaatcacagtgaggaccaagcacggtgcctggcaccactaaatgctgctcaagaaagg

SEQ ID NO: 216130 - DNA, 122 bp, Homo sapiens
aggcagagccactggtttcttgcagggacaaagtcaggcagcagtggtagcgttcccttccgggatggcctgtgtgtgtgtgaatgcagggcgtggggagggacaaaagttgtttccccagc

SEQ ID NO: 216131 - DNA, 122 bp, Homo sapiens
cttagtgtctaacttatcctcctttcaatccatcctattcttaaagtgagaatcatttcccgcaaattccattttgatcactcatatctatatactaaaactaagaaaggatttcctttgcc

SEQ ID NO: 216132 - DNA, 122 bp, Homo sapiens
ttttttttttgcgacagcatctcactctgtcacccaggctggagtgcagtgacaggataacggctcacagcagctttgacctcccaagctcaagtcagcctcttgagtaattgggaccacag

SEQ ID NO: 216133 - DNA, 122 bp, Homo sapiens
ctgtgcccgagagcgagcgcgggcaggtgtaactacccggggctggggctccgggggctccgcgcagcctccttccctcccagggacaccgcccagctgcgccccgcgccccgccgactgcg

SEQ ID NO: 216134 - DNA, 122 bp, Homo sapiens
agctacgtagaactcaatccttgagagcttaatttactgccaataggactgccaatttcgcggggcttctgcaactcctccccggctctaagcaaaaacagcccctgtacctgttcttgggg

SEQ ID NO: 216135 - DNA, 122 bp, Homo sapiens
cgcgggtatgaacagcacgcctacgacggcaaggattacatcgccctgaacgaggacctgcgctcctggaccgcggcggacatggcagctcagatcaccaagcgcaagtgggaggcggcccg

SEQ ID NO: 216136 - DNA, 122 bp, Homo sapiens
tttcttaaattaaatattaccagtcccctaccatcacttgtcagatgtggtttcaagtcccgttactatctggtcagtttcctctgaataaactccagtgtgtcaatatgctctgaaaatgt

SEQ ID NO: 216137 - DNA, 122 bp, Homo sapiens
agggattgcgcctgcacttgcccccctcttaccccgcggcctctgtcacgcttccgggtccgtgcccctaggcctctccgaaatgagagtggtcgggagactctggagtctggggcgggaga

SEQ ID NO: 216138 - DNA, 122 bp, Homo sapiens
atgtttcatctgtgaacaactggaagaaagcaattttactgccaaacttaaaaaaaaaaacggcaagtttcattggcttttaattctatataaaggtacgccctgcctgccagatgtgggta

SEQ ID NO: 216139 - DNA, 122 bp, Homo sapiens
cagctttaatttcatggaggaatcaaagctgcacactggtattaaaacaacttgattttgcgcacacagttgcatgcatggcaagctgttaacctctgggtggcattttcattatgaatttg

SEQ ID NO: 216140 - DNA, 122 bp, Homo sapiens
ccctccacttccttccactgaacaaggaacgtggaggcccaggaatccccctgccctgtccgcagctgttgcaggtgctgggtggcaccagcctgccccccgttccttctctgccagacacc

SEQ ID NO: 216141 - DNA, 122 bp, Homo sapiens
cccaagcaatcctcctgcctctgcctcccaaagtgccaggattacaggtgtgagccactgcgtccagcaagaataatttcaatctctggtaaatgcacctgatagaactgtgaatttccaac

SEQ ID NO: 216142 - DNA, 122 bp, Homo sapiens
ggggtgtgcctgagaagtttgcttatccaggcggggtgggcggcggagagggctcgggttcgttcttcagcacttccaggatggccgcagaggcaaacctgctgattgccctcggtctgatg

SEQ ID NO: 216143 - DNA, 122 bp, Homo sapiens
gggagactggagaaattcctgacaattcacttgtccctctgccctgccgccagcttatcacgggccagcagaagacgcgcgctcgggtgaaaaaattaagtattgatcaaattaacagtttt

SEQ ID NO: 216144 - DNA, 122 bp, Homo sapiens
ttccccattccctgtctctgttcgtaacgctcagagactgtttttcctcttttacatccacggccctgtcatttgaaggaaagggctggttggccagcatctaccgaacaaagactgggcgt

SEQ ID NO: 216145 - DNA, 122 bp, Homo sapiens
atgacatcatctgtggacatgtctgtctccccactaatccctcaaagacccagaccccatcgcactcatctctgtatctcaaagctcaccagggaaactggcccataggggattttcaacac

SEQ ID NO: 216146 - DNA, 122 bp, Homo sapiens
gggaatgaagctgccttgttccattaaggtgatggagggaggatggaggagcagagagaccgcaagaagccaggggcctgacaggcacctatgccctggaagcctgattcacctctggactt

SEQ ID NO: 216147 - DNA, 122 bp, Homo sapiens
acaggcatgagccaccacgcccggcctatttatgttttatgtacactttatacacatagacggaaggtaattttatatgatattttaaataattttgtgcataaaacaaagtttgtgttaag

SEQ ID NO: 216148 - DNA, 122 bp, Homo sapiens
aagctggttgaactgaattgaatggaaatttaatctaacccctctcagagagatgagattcggtgctattttaaaagatctaggaaggaaattccagtttttctgactcccttagctcatta

SEQ ID NO: 216149 - DNA, 122 bp, Homo sapiens
agttgaaccaggcggctgcggaaaaaaaaaagcggggagaaagtagggcccggctactagcggttttacgggcgcacgtagctcaggcctcaagaccttgggctgggactggctgagcctgg

SEQ ID NO: 216150 - DNA, 122 bp, Homo sapiens
agccacgacgtgggccctggaaccctgtggtagatgcagagaaccacaaacatttccgtacggctagaaagcgagtgggggtggcaggaagtggtgggaggggctcacgatgccagtaatga

SEQ ID NO: 216151 - DNA, 122 bp, Homo sapiens
ttttagggtttagggtatttttaaccaaacctttactttcaagactagcagaggcactttcgcagcccaccctgcgccactcagcctctgcgctgcgccctcctcgcctctcgcgcggcaag

SEQ ID NO: 216152 - DNA, 122 bp, Homo sapiens
tggagaggaaggaacgtggtgagtggtggagacaggattcagggcgccattctgaaggaccggccttcagcaggggactccgtattctggtttccggtctatttacagcatctctctctctc

SEQ ID NO: 216153 - DNA, 122 bp, Homo sapiens
cttcgcctcctgaggcacaggtgggcgcggcagctagagtgatttaggtttgggggcatccgaggctgggccacgtttgcgttcctttgatctttttcgtgaaactttatttgaaaagtttt

SEQ ID NO: 216154 - DNA, 122 bp, Homo sapiens
gacgcccggtgcggggggctaattccctgggagccggggctgagggccccagggcggcggcgcaggccggggcggagcgggaggaggccggggcggagcaggaggaggcccgggcggaggag

SEQ ID NO: 216155 - DNA, 122 bp, Homo sapiens
cctgtgattcctgcagttgggcttttcctgctgttcacccagcagtcagtgggagaggatcgaatcagagcccctgtctatggcaacggccaagcggatgtggctacacagggaagaagcca

SEQ ID NO: 216156 - DNA, 122 bp, Homo sapiens
cataataaaaagagtgaagtctctgcagtttgacccaggaccagatgccaggcccaccaacgactctgtatctggatgaccttgggcaagttttctaagctctcgccagccttaatttccca

SEQ ID NO: 216157 - DNA, 122 bp, Homo sapiens
tttaactgtagtcaccatgctgtgcccacagaacaccagaacttattcctcctatctaaccgaaagtttgtacccattgaccaatgtctcccctttccccatccaccctccctcgaggctct

SEQ ID NO: 216158 - DNA, 122 bp, Homo sapiens
gccgggcgcccccagagttcagggagcgctctcgggcacctcttacctttgctggggccccggcgcgcacttccggggactgcgcttggggcgcgcggggccgagcagggggacccggagct

SEQ ID NO: 216159 - DNA, 122 bp, Homo sapiens
gcactccagcctgggtgacagagcaagactgtgtctccataagtaaataaataaccaggccggttgaaacagcatttgaatcaagatggtggtcaatagaatgctgggaaccactgtgttat

SEQ ID NO: 216160 - DNA, 122 bp, Homo sapiens
tcgcgcagctcctggcttctcgccgcctcaagcggaagctctacaaatgcattaagaaagcggtgaagcagaagcagattcggcgcggggtgaaagaggttcagaaatttgtcaacaaagga

SEQ ID NO: 216161 - DNA, 122 bp, Homo sapiens
atgcgcagggcagctgcatggtgcaggggcgcacggctgggggtgctggtggggcagctacggaggtggttcacgcgtcccaagctagggttgccccacaggggaaggggcgcccgggcgcg

SEQ ID NO: 216162 - DNA, 122 bp, Homo sapiens
catgataaggtgtgtgaagacgctgtgcaaattgtacagcgctctgcttaaggagaacctcgatcttcatctcgcccccagaacttccctcccttgaaaataaaactcccacctgaatgtaa

SEQ ID NO: 216163 - DNA, 122 bp, Homo sapiens
tcataggtcttcaagtggagctttcttcattgttttttttctatcctaaggaatctttcccgccccccacccctcccctctccttataacttcaccatattgtttctatcaccagcagagcc

SEQ ID NO: 216164 - DNA, 122 bp, Homo sapiens
gttccccaaggtaggagagtgccacgggcgccactgcagagcgggccgcctggccagcctcgcggggcactccttttacgtttgctttgctgagatccttggtccttggtcctagccccctt

SEQ ID NO: 216165 - DNA, 122 bp, Homo sapiens
ctcgctccccggtcgctccgggcgcattaccgcttcttcttctgcttgagggacttcctgcgtttcaggatcatctcatagagcttgtccatgccctcggtgaggccctcgccgatgatggc

SEQ ID NO: 216166 - DNA, 122 bp, Homo sapiens
ggagaaggggcctcactccaggtaagtgtggctcccagccagcactatccattcccttctcgtaactgctcttactgaataaatcactgatgtggttaatttcaaaattcttaatagcttaa

SEQ ID NO: 216167 - DNA, 122 bp, Homo sapiens
gcggcctggggtgggggcggcggggcccccaggagctcctgggaaccgagggtcctggggcggtcccgccccgcacagctccgggtgagcttggggagggagacacactctcagcccacctc

SEQ ID NO: 216168 - DNA, 122 bp, Homo sapiens
tcaagggccgagggcccactggggagtctggacttacaagggcaagccacagaaggaaggcggtcagcagcggaacagcaggaccaggcttgcactttacatcactcaggcaggggagatca

SEQ ID NO: 216169 - DNA, 122 bp, Homo sapiens
aaatggttgtcatgaggattgaatgagagagggaatgcaggtaaagcacataacacaatgcgtggtatgtaataaataacaaatgttactgcaatatcatagtgataccgatgaaggagaca

SEQ ID NO: 216170 - DNA, 122 bp, Homo sapiens
cgcgggcgtcacttgtgcggagcaggtagggcggtgctcaggcggttccgcctctttccccgaccccaaaggggatagcactggaggccttcctcccaccccctccctttttcttcttccgg

SEQ ID NO: 216171 - DNA, 122 bp, Homo sapiens
ggaactcagggtggggcaacttcctatttcgagtctaaagtaatcttggtctcttccggccgccgtaaaggggttgggtttagtgttctcccgccaatttaagcctgtggcatggaacctaa

SEQ ID NO: 216172 - DNA, 122 bp, Homo sapiens
attggaaagagggatggccgtggtgagagttgacagtgtgctggtagccctcgcagcccacgctcgctctcggcgcctcctctgcctgggctcccactttgacggcacttgaggagccctcc

SEQ ID NO: 216173 - DNA, 122 bp, Homo sapiens
ccctctggcgcagctgggccctcagtgccctcggccgcagagtggggctgggctggcatccgggaccccgggcatcctgtcccgttcctgcgcgacgcctgcggccccggcctcagcctcgg

SEQ ID NO: 216174 - DNA, 122 bp, Homo sapiens
ggacccagtcccgtcgcggacacggcggggcgggcgggggtggcagcgtccgaggcggcgcgggccctttaaggcggccggcctcgttagcatacatttgcatggccccgccccgccgcttg

SEQ ID NO: 216175 - DNA, 122 bp, Homo sapiens
tgggacccccaggatcccggctattgggagacgctgcgctggagggaacgttttggaacgcggggtggggtcggtgggcgcttccctcctgcctctgggctccagcctgatgtctcctccct

SEQ ID NO: 216176 - DNA, 122 bp, Homo sapiens
ccaggctcaggtgatcctcccaactcagcctcccatgtagctgggactacaggttcttgccgccatgctcagctaatattttgtagagatggggtttttccatggtgcccaggctggtcttc

SEQ ID NO: 216177 - DNA, 122 bp, Homo sapiens
cctactgcattatcagcaaaagcaacagggcttcttctagcacctagaaaacctttcacccgggagaggcaggcgcggcgagccccgggcgaaagcagggcctcggcaaaaaaacggacaag

SEQ ID NO: 216178 - DNA, 122 bp, Homo sapiens
atggtgagcggagcacagccttcgaagtaagaactcagagggagctcggcgctcccgcagcgggtcccccacccaggcacgcccccggcccggccccgcccacagcactccccactcggccc

SEQ ID NO: 216179 - DNA, 122 bp, Homo sapiens
ggttgcagtgagccagaatcgtgccacagcactccagcctgggcaagaagcgcgaaactccgtctcaaaataaaataatcttctaaaaatgacagggccaggtggggtggcacttttttata

SEQ ID NO: 216180 - DNA, 122 bp, Homo sapiens
aggagcctgtcaaggagggcaaaggcctcgctttgaaaacgcttctccagtgtgctggctcgtgggacttggcaggcccagggaacggcgccgcggggaagaaagcccctggataggcctcc

SEQ ID NO: 216181 - DNA, 122 bp, Homo sapiens
gcagggactggcccatggacctgatctcctgttgtctatcccaggactcctcccacggtgcgttggagaggcatttctggccccagagagcaaagagctctaccaagaacacggctcagaga

SEQ ID NO: 216182 - DNA, 122 bp, Homo sapiens
cggtccgtgggtcgtctcccgtgccgtccactcagcccagcacggcggggggcctggtcacggattcctatgcgtgtgagtggtggattaatctcgtttcaccaacacctggtcacacagga

SEQ ID NO: 216183 - DNA, 122 bp, Homo sapiens
agccccgcccctcaggccggggcgcgaccgcggatccgcagttcccgggccagcctggggcggccggccaggaaccacccgttaaggtaggctgggtttctcgttcccctatttgacaggtt

SEQ ID NO: 216184 - DNA, 122 bp, Homo sapiens
ggagctgctggggctcccctagggggtgggcggcgggcgggtcagcagagcgcattggaacgccagcctagacctctggcctggccccgcctcccctaactcaccaggccgcagcgtgaccc

SEQ ID NO: 216185 - DNA, 122 bp, Homo sapiens
tcacgctgctgtgctctgtccctgtttgtgatttgaggtccccaagctggcggtcagtgccggggaaggactgtgagttgggactctggccacccctcagcccaggcctccccagccgtaga

SEQ ID NO: 216186 - DNA, 122 bp, Homo sapiens
aaacttgatttaaaaaccaacaaatcctgatgtttgcaaaccatacgatacacagaagtgcgtacattgtaaagtaagtcttgcagggatggtgatgaaaacgtacaaatgatttgtggcta

SEQ ID NO: 216187 - DNA, 122 bp, Homo sapiens
gccccaggagccagcctgggtatgggctcccgccctgggattgttgagctcgggcaggaccgggtcttctttccgcccctagggggcacaagcgggcatgtccaagcgcctaggagcccgta

SEQ ID NO: 216188 - DNA, 122 bp, Homo sapiens
agtaaacaaacacattgatttttttttaaaggagaaatttttcagtaaacgatataggtacgttaacatgggcgatataggaaagttactgatggagagacaatcctacatagaaacctaag

SEQ ID NO: 216189 - DNA, 122 bp, Homo sapiens
tatgcaaatctttgtttaaatcattcaactaattaaatgatgggattattcctctgcctacggtgacatcattcgcggtaattagtactctatttggactgtggcagtaagattcctgatat

SEQ ID NO: 216190 - DNA, 122 bp, Homo sapiens
actcggtccagcccccaaatgtttttaagcatggaaaagactcttcgaaaatagcatatccgaagctgggtgcagtgactcacgcctgtgattccagcacttcgggaggccaaggcggttgg

SEQ ID NO: 216191 - DNA, 122 bp, Homo sapiens
ccacagtgcaggtgaccccagtgctgctgggccacagagggcaacttgtgcacgcactggcgggtcctatgtgtccaggaggcccgaggaaggagagagtggagacccggatgccgggttca

SEQ ID NO: 216192 - DNA, 122 bp, Homo sapiens
tcacatctctacggacgttttcctgttatgacagcctcagaaaaccctttccaaaagctccggcccggaaatcccatcctccacccgaagaaaaccccattttcctttcccgtcaccttcgt

SEQ ID NO: 216193 - DNA, 122 bp, Homo sapiens
gagatagggagtaggatgcccacacagggagtggcgggcagcaatccctactccgtgatgcggagagccgtccgacgctagtgtcacggaaagggcgaaccgaggacgacccaggtcctatc

SEQ ID NO: 216194 - DNA, 122 bp, Homo sapiens
gaaaaggataggcctgggggcaagacctagtccttcaccacaggtaaatctaggcgtccgcgagggtctcctggctcattttcctgcatccactggcctcccaccacactgcgacatccaga

SEQ ID NO: 216195 - DNA, 122 bp, Homo sapiens
ctctctgggggacaggacacggtcaatgctccccgtccactgactcaaggccggcagcttcgtctaaaacaaaagctgccatccctgccctggagcccgcagacccagcagacgatgccgtg

SEQ ID NO: 216196 - DNA, 122 bp, Homo sapiens
gaacccgggaggcaggcgttaggacggggtggccgagacagggaagggagccatggcggacgtcctcacccaagccagggcttcctgcccctgtggtactgacaggagccccgcaggacgtg

SEQ ID NO: 216197 - DNA, 122 bp, Homo sapiens
accattctcccactggacttggaggatatcttcaagaagagcaagccccgctatcacaagcgcaccagctctgctgtctggaactcaccgcccctgcagggcgccagggtccccagcagcct

SEQ ID NO: 216198 - DNA, 122 bp, Homo sapiens
tgtcactcacaggcacacacgtgctcgcatgagcccagtcacacagacatcattgcttgccgtgacagtcgctgtcactcagtcagatgcaaacacagttacacaccaacacatgtatacac

SEQ ID NO: 216199 - DNA, 122 bp, Homo sapiens
aagcaaggaaggtatatgatctgattatatttgaaaatatgggctcggggttgttcagggcggggtgggctctggacccagcaggcccggcacccaggctaggcctccaggggaggccaggt

SEQ ID NO: 216200 - DNA, 122 bp, Homo sapiens
tgccacacgggtcggatgttctccttcttaaaaggcttcttgcagagtgggcagacggggcggctccctgagatggggcggacgtctgtggtgcagctgcggcagaagacgtggccacagtc

SEQ ID NO: 216201 - DNA, 122 bp, Homo sapiens
gccctcctctttatgggactgaaagaggagagctgctataaactaaatgtttgtgtccctcgcaatattcgtatgttggagactaaatccccaatgtgatggtatttggaggtggggccttt

SEQ ID NO: 216202 - DNA, 122 bp, Homo sapiens
gacgaaatgtgaatgaaatactgcgatgaacattaaccgccccagctcccagtggtggtacggtctcaacagaggacgatgacttctatggtctcaggtaatcttcacaaaacccgaggaga

SEQ ID NO: 216203 - DNA, 122 bp, Homo sapiens
aacccggccggctgcgctgggcagcggattcgctgccccactgcccgcgccggccacccgcgggcccagttcgctgctggaaaaaagctccagctcggacaaaaaaaggcagcgcggaggga

SEQ ID NO: 216204 - DNA, 122 bp, Homo sapiens
tgctctgtgaccctgggtgcagggattgtgtgaagattgagagctgggggcgccctcttccgtgatcagggccccgttggccccaactggcatttaattcccctggctgtcttttcggattc

SEQ ID NO: 216205 - DNA, 122 bp, Homo sapiens
ctcgtccctatctcggatggggatggggcagggggcgcggggtgagccatcaactccagccgcctgcctggccgcgcaaggcgggaaagtgggggcgcttttgcgcctcacgttaagtttag

SEQ ID NO: 216206 - DNA, 122 bp, Homo sapiens
agcccgccatgcctgagcctcccaccccctccatgggctcctgtgcagcccgagcctccccgacgagcgccgccccctgtccacggcgcccagtcccatcgaccacccaagggctgaggaat

SEQ ID NO: 216207 - DNA, 122 bp, Homo sapiens
caggagcaagagaggaaggcttaaagagccagactgcgcagccaggactggggtgatgggcgctgtcctgccaggccaaagaatgaagatgtagccccgcccccaacctagggaggaggacc

SEQ ID NO: 216208 - DNA, 122 bp, Homo sapiens
atgttaactggggtgtctgaagtctgtctggctacaaatgttccacttttcaaggactgccgttgatttcttgggtgtgctttgctagggcacctgtgctgaatgttctcccgaggctggtc

SEQ ID NO: 216209 - DNA, 122 bp, Homo sapiens
aacattcggactcgagataatcgtcgccttggggagtgggacttgcctgaggctgtgcagcgactggtggagctacagaacacgagggtcccaaatgccgaagaaattttctgagcctttgt

SEQ ID NO: 216210 - DNA, 122 bp, Homo sapiens
attctaaagccaggcactaagtactcacagaatatttagtcattgtgtcttttatcttttcgttttttggaaatggagcctcgttctgttatacaggttggagtgcagtggcgtgatctctg

SEQ ID NO: 216211 - DNA, 122 bp, Homo sapiens
cagcaggcttcttggcgcccagtccatgcgactatctcttcccagccccgggactaggcccgccccactcggattctccactcttggtagcgcgcgtcccccggactgctgagaccaggcgg

SEQ ID NO: 216212 - DNA, 122 bp, Homo sapiens
ttacctgtctcttcacctattttgaaaacaccaacgccagagccatctctaatggagtatcggatctccccatctcttctggcgtcctcatcatgagccgacaccgtcattaccaatgaacc

SEQ ID NO: 216213 - DNA, 122 bp, Homo sapiens
ttactcttccctcctctcctcacaggcagatctttttctttcttcagttctaagctcaagcgtcacttcctcaaggaatctttcctttgcctccacctccaagaccccatcacttaactggg

SEQ ID NO: 216214 - DNA, 122 bp, Homo sapiens
ccgcccgcggcggcgttggcgctgggggcggctcccgcggcgtctctgccgctggccgagcgctcgcgcaccgcggcacccccgccagtggcgtccacactcacctagcgcgggccgggagg

SEQ ID NO: 216215 - DNA, 122 bp, Homo sapiens
aggtagttttacctgagtggggtaaagagagactgctggagtgagtgctggcaatgttctcgatatggatagtgatgtaagtatttacatatctagacatacatcaaatttctgtgccctta

SEQ ID NO: 216216 - DNA, 122 bp, Homo sapiens
aaaataaagttcgattatttcacctggcttgtcagtcacctatgcaggcgtctgagcccccgggtttccaggagccccccgtataaggaccccagggactcctctccccacgcggccgggcc

SEQ ID NO: 216217 - DNA, 122 bp, Homo sapiens
tgcagggaacttgaagggcaatgagggctgccgtgaaggagcacccgagcacatgtgaggcgtacacgtgtgtccgagacagcccaccacgaagggtgatggggtcaggtgagccagaaaag

SEQ ID NO: 216218 - DNA, 122 bp, Homo sapiens
ccagctgcgaattcttaatgcacaacgcgacggagggaaggaaattcaccagcgcagcgacgaggaaggggaactcaggaccccttcaagtacacactgaggtgtgatcagagttttatggg

SEQ ID NO: 216219 - DNA, 122 bp, Homo sapiens
aagctggccttggaaccaggccttgactcctttatcactgtggcatgatatcactgtggccgtccacctgggagccgatttatcactgccgtggcacagctcagaaaaaatcaggtgaaagt

SEQ ID NO: 216220 - DNA, 122 bp, Homo sapiens
gactgccctctcacacccgagcaagctgacctcagaggtctggggcagccgggcaggggacgcaccactctcacccgcgggcagtcctctgggtgggttctgaccgtgacctgtgagctgga

SEQ ID NO: 216221 - DNA, 122 bp, Homo sapiens
tttctacttccgctatcaggagatctacttccgggccctgcgtggcagttgaaagagtggcgggagaagttgcaggtgagcgtccccggtcgcaggcctgcggattgggcagggcttccctc

SEQ ID NO: 216222 - DNA, 122 bp, Homo sapiens
gccgtgtcctggagaatgtagctgaaggcctggccactttcgacaagaacgggaaagagacgactaacttgtactaatatcttagtgcttggcagggcattttttcattccaggaaagaaga

SEQ ID NO: 216223 - DNA, 122 bp, Homo sapiens
agctgtctgcaccaagggactcctggtttccacgggaatggagtagctctctgactgtctcgttcatttcatcagacctccctctatgtgtatgtcataagctgcaaggtagcaacagccag

SEQ ID NO: 216224 - DNA, 122 bp, Homo sapiens
gacccagcccgcacactgcgttctctgaacattaccgacaactgtgtgattcactgccaccgctcacccccagggtcagctgttccaggcccctcagcctccttggccccctcggccactga

SEQ ID NO: 216225 - DNA, 122 bp, Homo sapiens
ccccactcaaacttgagctggtagttctgtagcaattgaaattgttgcctgatgaatagccgtgttccagattaaagcatatttgagacatctttttctggaagagaacgtccaccttacac

SEQ ID NO: 216226 - DNA, 122 bp, Homo sapiens
ggtggacctctgctactcgcggccctgtggcccccacgggcgctgccgcagccgcgagggcggctacacctgcctctgtcgtgatggctacacgggtgagccaagggaggggactcatgggc

SEQ ID NO: 216227 - DNA, 122 bp, Homo sapiens
ctctgtaggtgccttctcccttggcaaagaagagccccattgattttgataggaagtgatcggccagggcacctttggggcatggagattagcatgctccccagggcaaacctgacaatggg

SEQ ID NO: 216228 - DNA, 122 bp, Homo sapiens
gaagtggccagaggcgaagtcttgataaacagctcaaattggctcttactccacaggtgacgcctagtttatctgggtaattgtaaaaggcatttttacagcaaatcaattaaatgaaaatc

SEQ ID NO: 216229 - DNA, 122 bp, Homo sapiens
ccagatcccaccgctaagagcctgggctgggaaagcaatctttccaggcagcccccagcccggtgcgccggccccgacaagtcccagccctcggaggcagggcggggcgcagggactcccgg

SEQ ID NO: 216230 - DNA, 122 bp, Homo sapiens
ttccttgtcttatgtgacattaatatttttgaaggcccgaacggagcggggcctgctgagcgggcgcggcaccagccgccgcaacccaaagccccgggcttcctgcagccaccgccgctgcg

SEQ ID NO: 216231 - DNA, 122 bp, Homo sapiens
cagataaatcaaaaatctctatatgaaaagaggctaaaaaatggctaaaacaaatctgcccgagtactctacacttgttctggggtgacaaaaaaatgactgtgacaccctgcaaagtgcac

SEQ ID NO: 216232 - DNA, 122 bp, Homo sapiens
acgttttgatgtgatgatcactggaaactatttagtggcacgaaaacataaacacgcctccgctcctcgtcctgccctacctcccggtactcgcatctatttcatctctcactgttcatcca

SEQ ID NO: 216233 - DNA, 122 bp, Homo sapiens
tacccggggcccagagtcgggcggcggtcttccagcaccacgaactccagtactggtctgcgttgtagggagctggaagcccgacccagcactcctcagccccctgtgcccctccctctgct

SEQ ID NO: 216234 - DNA, 122 bp, Homo sapiens
ttcccaaagtaactcatttaaccttcataacaataagaagcagttgttctaagaagccttcgtgtctctgtctgagatggagaaaggctcagaaggctgagcagtgtgacaaggtagagttc

SEQ ID NO: 216235 - DNA, 122 bp, Homo sapiens
acctgttctgtttattcttgctcatgtaggataaaggtcctgagacctctcagaatcttacgaggttggagagttgtttggaatgctgggttctggtcttgtctctgcttccaaccagctat

SEQ ID NO: 216236 - DNA, 122 bp, Homo sapiens
cccccagaccgtggccaaccgcgtggcctggttccgctacttcaacgccggccagacctgcgtggcccccgactacgtcctatgcagccctgagatgcaggagaggctgctgcctgccctgc

SEQ ID NO: 216237 - DNA, 122 bp, Homo sapiens
gccagtaggccagaagcaacagatggtggtcagcaccgcgatgggcatgtagtcgtgtggcgggcgcctcggctccagtagggccagccctgggccctggggcggcggggggagagtggagg

SEQ ID NO: 216238 - DNA, 122 bp, Homo sapiens
gggagggatacagtggtgtgcaaagacaggcatgcatgaactatgcaaagtggacctcatcgcggattttggtgctaaaaacaatagtaacttctgaataataaacacttaatttggctcca

SEQ ID NO: 216239 - DNA, 122 bp, Homo sapiens
catcctctagctatggctttatttctcgatttcattttacagaaaagctctccacacacacgcaaaccccagctaacttactgatatcacttatcttctcacatactctcctaaacctgctg

SEQ ID NO: 216240 - DNA, 122 bp, Homo sapiens
aaaaaacaagacagccaccacaacaacaaaaagaacagatataagccggctgtggtgactcgtgcctctgctactccagaggctgaggtgggaggatcgattcaaccaagatacagtgagac

SEQ ID NO: 216241 - DNA, 122 bp, Homo sapiens
gtgagtgctaaaaacagacatgctcacatcccaagtgagagacagctccgagaaacacggcgactggagtctctgccactctaaaggctcagaagctgacagcgcagggcttttgcccagag

SEQ ID NO: 216242 - DNA, 122 bp, Homo sapiens
tttattctgcctaattttttgatcgttacatctgtgcctccaaatagtgtgttatagtgccgttttgtttttcactcttatgtatcatccttagtgtatagctccctttcatatacccctct

SEQ ID NO: 216243 - DNA, 122 bp, Homo sapiens
agggggggctcaaggaacatctggtgggtgtccccttcacaagactcggcctgcagagttcgtgcagggagttcgcacataggagagcaccggtccgggagtgccaggctcgtgcccggccg

SEQ ID NO: 216244 - DNA, 122 bp, Homo sapiens
gaagcgatgatgtggcatggtggatctcccggggaagagggctccagggagagagaaaagcgaaggcaaaaacttcagcaagaaacgtgcttgacttgtcccaaaaatagcaaagcaaccac

SEQ ID NO: 216245 - DNA, 122 bp, Homo sapiens
catagcgctgctcgggcgaccaggaggcccttcagtgctccggaggcactttcagagcatcgtgactagataaaagtaggtgaaaagggaatcgcagcctgccgagagctttagagagactc

SEQ ID NO: 216246 - DNA, 122 bp, Homo sapiens
ccgctcccggccagcgggcggctgagggcaggcggcggctggactgcgacggctaggacccgccggggagggaagccgagggggcggggccggtcgggggcgcgcgcggggtcggagcgccc

SEQ ID NO: 216247 - DNA, 122 bp, Homo sapiens
ttttacaccacgaacttctcttgaaggtctctataatctggagacgagccccaggcaggccgcttaagtaatgcaggacacacatccccatttctctcaaacgaggagcacccagtgggtac

SEQ ID NO: 216248 - DNA, 122 bp, Homo sapiens
gcgcgcgcccaacggctttgccaggctcactcggtctgagaggtcggaggctgcgagtgtcgttgctgaaggctgtagtggaccgggctggatcgcggattttggagatcatagatatcgga

SEQ ID NO: 216249 - DNA, 122 bp, Homo sapiens
actctttgcattgatcttcacatggctgggtccttctcaacattcaggtctcagctaaaacgtcacccttctcagagaggtctttgctgacaaccatatctgagaaggtatcctgagctctc

SEQ ID NO: 216250 - DNA, 122 bp, Homo sapiens
agccccctaggactcctgtgttaataaagggtgctaacggtgccccccgagtgagcggcgcgggcccgcgcgcacccgcacgcctcgggcgccaggcgccgccgtgtgggcggagccgggca

SEQ ID NO: 216251 - DNA, 122 bp, Homo sapiens
acaaacaaacaaaacaaaccctcaaatctgatcatgtcagacaaacccacacacacatgccgaatacttcttcatgactccccattgctgtcagcataaagatccaaatccctacaatgata

SEQ ID NO: 216252 - DNA, 122 bp, Homo sapiens
tttactaaccaagacagtgtaggatagttacacgaacccaggtctagtaaataattcattcgcgattgtgggattgagtgcaaataattagtgtaaattgtcactttctcaaaacaaccgcc

SEQ ID NO: 216253 - DNA, 122 bp, Homo sapiens
gagcccgacacgggcggacccaggtgtgcggggatccagcccaggtgtgccggtggcggccgcccccacggaaccacctggcccgctcggggacccaggtgtgctgagaagggggtactggc

SEQ ID NO: 216254 - DNA, 122 bp, Homo sapiens
ccctcctccctccgccggtgggagtggcccgcgctgcctccgctctgccaggaacatgaacggactctgggcaccctagctttggctgcagcccaccagagcctgtcagtgccgggctgcgt

SEQ ID NO: 216255 - DNA, 122 bp, Homo sapiens
ctcggacgatccatgtggaatccgtgagtagtgcgactcctttacgcaactggcgttatccgaagtgaatagctaggtggcgcgtgtacgcccatagcgtagcacccataggcggacggggt

SEQ ID NO: 216256 - DNA, 122 bp, Homo sapiens
gccggcctctgcgctcggtaggttaccgctgcatctcccagagcagaattggtaagagtgcgtccattcaccaggcgtagacgctgcattcgaggaggcccccgggtcaccccatgtgcaca

SEQ ID NO: 216257 - DNA, 122 bp, Homo sapiens
ccacgggctaagtgtctccgggcttccctgcaagatcacgcagggtggtatctgggcctgcgctcgctacctctttcatcccatgcagccagatgagaatccaactgaacatccgagcttta

SEQ ID NO: 216258 - DNA, 122 bp, Homo sapiens
agacctagcacccttctagaagattaatccaccaacatttcaaaatcttgtaaggagctgcgacccgctaggacgggagcctactgcgccctcaaaccccgcggcggctccctccccggagg

SEQ ID NO: 216259 - DNA, 122 bp, Homo sapiens
gcatcttggactcaaatatttgctgtttcttcttccctgtcagtacacgccacgcctcatcgtcctgccttggtttgattcagctccttcttctaggctgggctgaagggctacttcttcct

SEQ ID NO: 216260 - DNA, 122 bp, Homo sapiens
cggggtggcctctgtccccgtcccggacgccctggttctctgtgtaggtcgcccgggccccgtccctcctggcgagtgccctgccctacccctctggccgcctgccagtccgcctgttcctg

SEQ ID NO: 216261 - DNA, 122 bp, Homo sapiens
ccgctctccgacccctccccagacctggtggggcgggctgctgacctggctgggggggcgcgctcccggggcctgggggctgggcgcggctcggggagctgcgctttgcggactggaggtgg

SEQ ID NO: 216262 - DNA, 122 bp, Homo sapiens
ggaggatcacttgagcctgggaggttgaggttgcagtgagctgtggcactccagtctgggcgacacagcgagactgcctagaagaaaaaaaaaagtgtttgtataccattgcaattaagttg

SEQ ID NO: 216263 - DNA, 122 bp, Homo sapiens
ttttctcaccaaacacattaaggagaccagcaagtgtcagtctacaaaactactagcggccgaggacaagataaacaccccaaaggaaggagcagacaaggaaaaacacacacacacacaca

SEQ ID NO: 216264 - DNA, 122 bp, Homo sapiens
atctctgccggaggcttttaatctcttctgccactcttctggaaagtcaccagcaatgcacgctgctggctctgcaggagggtcagggggacggccctcggcctgtgcgtggtgccagccac

SEQ ID NO: 216265 - DNA, 122 bp, Homo sapiens
cagaaacaagcccatagtcatggtgatagccagataacagcgaatacaggtatcagaagtcgaaaaagggaagaactagaggctatactagaactgctgctacaagttatgtagagacagac

SEQ ID NO: 216266 - DNA, 122 bp, Homo sapiens
gatgtgggttcagagaaggatctagggtgacagcaatgggaacaggtggcaactgcttcccgggcctttgggtcagtggtcctgcgctgtcgcccccagagaagcagctgacggccagcaac

SEQ ID NO: 216267 - DNA, 122 bp, Homo sapiens
aaactttacttgtccacaccggtagaggtgaccgcgatgagaataccagaaacagcactacgaccctcagaactcagggtacctccagctgcaggggccagaactgccgactatcccaattt

SEQ ID NO: 216268 - DNA, 122 bp, Homo sapiens
actaatgaaagaccgggaggttaggattatgaggggagaattctgctaaaatgtagtaaacgataaccagccattgtttcggaggacatcggatgtgtaacttccccaattattcctgtaga

SEQ ID NO: 216269 - DNA, 122 bp, Homo sapiens
tcctgacctcgtgatccacccacctcggcctcccaaagtgctgggattacaggcgtgagccgccgtgccaggctggtaggcaccttctatagctacccacagttatttgtctcagcaacatt

SEQ ID NO: 216270 - DNA, 122 bp, Homo sapiens
gcaggataagaggggctccacagcagagtcctggcatctcagcagtggcaggggcagacacggcaggggggtttgaacagatgctcttgcaggaggctgggaagaaccaggaggtcgcaaat

SEQ ID NO: 216271 - DNA, 122 bp, Homo sapiens
ctctcaatccgcagcagctgcttcatctgctcaatgccagactccaaaaagcatttctctcgcaacaggccaggggaggcagcgttcggggatgggacgccaagagttaagggtgaggccgc

SEQ ID NO: 216272 - DNA, 122 bp, Homo sapiens
agctttcaatttagtttgatgagactaatggcgtccaatcgcacagtgccgggcacataacgggaagtccaaaaatacagttattattggaataaaaattcaggctgggcgcagtggctcac

SEQ ID NO: 216273 - DNA, 122 bp, Homo sapiens
cggttagtggaatcacggtcccagtcctcgcgcggttcctcagctccgcctggtcccttacggaggcaaaaaactacatttcccacaatcccagggggtgcgggccctggatatacccgcag

SEQ ID NO: 216274 - DNA, 122 bp, Homo sapiens
tgtggaaagtgaggcaatcctctcaggcagcaatatgcaatataaataaaaggtgagccacgcgtgtcatttaaaattttctaggatctggcgggtcgtggtggcttacgcctgtgatccca

SEQ ID NO: 216275 - DNA, 122 bp, Homo sapiens
gggggctccagaggggaaatttgccgtttctgccggaccgctctagagcgtgcctgaacccggcctttatgggatgttgacagctacgtttattcagtgccccagaggccttctttatgccc

SEQ ID NO: 216276 - DNA, 122 bp, Homo sapiens
tcgcgtgctgggtgcatcctctcatgtgtgtgtcctggctcgtggcccgtgtgtaggtcgcgtgctgggtgcatcctctcatgtgtgtgtcctggctcgtggcccgtgtgtaggtcgtgtgc

SEQ ID NO: 216277 - DNA, 122 bp, Homo sapiens
aaagttacggcctctgagcaagaatatcaacagccgcaggcgttgaccattcaaaccttccgccagcccagtaacctatccccgctcgcctctaagctgcgtcagccaatctccgcgcgcgc

SEQ ID NO: 216278 - DNA, 122 bp, Homo sapiens
agtggtgattgtgatgggagctagaggatccaagatcacacaattagcaactgctgagcccgaatcctggccttcaattctaattcttaatcctattgattctaattctaactctttgtaat

SEQ ID NO: 216279 - DNA, 122 bp, Homo sapiens
cggtctttaccctggatgcttccgaaccggcatcatctggcatctccgacagtcttgatgcgacttaacgcatggtaagaacccatcagagaaggccaaagggatttccagagacaggtaga

SEQ ID NO: 216280 - DNA, 122 bp, Homo sapiens
caggttgcacaatcattcttggtctggaccgctctgattttcctgctgccacggcgtctgcggtttgtgcagggaggaggggcagtgaccgtgtcccagatgttggccttacacggtctgca

SEQ ID NO: 216281 - DNA, 122 bp, Homo sapiens
actagactgtgaactctttgcaagccagaactggcgattagttcattgtcaaatccctagcgtaggacctggagcagagaggtactcaataaatatttgctgagtgaatcattgaatgaaca

SEQ ID NO: 216282 - DNA, 122 bp, Homo sapiens
atcagttcagggccaccacaaggtgtgcacaggcatctcacaagtttgcagaaatgccttcgtagactgtgttcttctggaagaaagatcactttgtacacatgtacctccctgcagtgtgg

SEQ ID NO: 216283 - DNA, 122 bp, Homo sapiens
ccagggagcctcgcaaccacaggtctccatgtcacgccgtgggaagcccaccccggcccgcgcccctgggccccagggccgcactccatggcgcctggccgcctgcccgtgcgtccgtcggt

SEQ ID NO: 216284 - DNA, 122 bp, Homo sapiens
ccctgctggcgccgctgcccacctgttgtccggaacaggccattctctgggcgggagcttcgcctggaacttagttgggatgggtccgggggtaggaggaagcggaggcgtacttggacttc

SEQ ID NO: 216285 - DNA, 122 bp, Homo sapiens
aaggaccccccaggccaattttgatttccatcgtgagccagcctaattccaaactacatccgggttattcatagttaaatgtccaaacatctgctaggtcaaaactctggctaatgagttga

SEQ ID NO: 216286 - DNA, 122 bp, Homo sapiens
gcctcgcaaacactggctcatgctctgaaagcgtggccgcgagcacaggctgggaggaggcgaggctgcagcttcacagctatcctggcaccatgcaaaaggatctagtggtgtcgccatcc

SEQ ID NO: 216287 - DNA, 122 bp, Homo sapiens
gtgggggcggcgcggagggcacggagattacggcggcgccacccgggacatccagggccccgaggccctgggcggtccccacgcgagatcgcaaaccatgacaataggcagtcacccgaggt

SEQ ID NO: 216288 - DNA, 122 bp, Homo sapiens
atattcttccaaccacacattaagatttaagattactctgacttttttccaactaaatcacgttatttcaacttcacgtttgatttcacacaaaaaattccagcaaatatcaagttcagaca

SEQ ID NO: 216289 - DNA, 122 bp, Homo sapiens
attttcactgtagctaccagctttgtaatcccacagacaacctactccagactttgtgcacgtctctgggaaatgcatattgtatgtcacagcgttcagagtggaaagtaaccatagagatc

SEQ ID NO: 216290 - DNA, 122 bp, Homo sapiens
tgaagagcgggaaggcgaggaccgaatcgcctctggtgtgcgttgtccgacaggaagtcccgaatgggctgtgagccgccggtggaggtgcccgggcaggtgcagagccacagcctgcgccc

SEQ ID NO: 216291 - DNA, 122 bp, Homo sapiens
gactattaagtcattcataagaaaccactgtgaggattaaatgagtgttagcagagggctcgcccaggtgcccagcccagggtgggctcctggtggcagctattcacatgctaaatttaaaa

SEQ ID NO: 216292 - DNA, 122 bp, Homo sapiens
tcccatatacagagaccctcataccatttggggacattgccccaaaaggacgggctttggcgtgaaagaacatttctaccccggctgtttgtgtgctgtcatcccaggtcagggctgaataa

SEQ ID NO: 216293 - DNA, 122 bp, Homo sapiens
gccgggcagtctgattgtggctcaccctccatcactcccaggggcccctggcccagcagccgcagctcccaaccacaatatcctttggggtttggcctacggagctggggcggatgaccccc

SEQ ID NO: 216294 - DNA, 122 bp, Homo sapiens
gactacagaactctaggtgaaaaatcaggtagggttcaaattaagtagaactgcccttgccggaatagtgatcttcaaaaaacccttgcttttaggggagggaagcggggaaggaaaggaat

SEQ ID NO: 216295 - DNA, 122 bp, Homo sapiens
cccgtttcctgggattggaactacccttcttggccagcgggaagtccccaaggacggagtcgaaaggtcaaatcttatctgtcagtgctgtgtgacagcatcgcaacgggatctgcagaacc

SEQ ID NO: 216296 - DNA, 122 bp, Homo sapiens
taaacgtgtgtgtccgtgtgcaaaacatgcatcctgtgcatatgtcctgtgcaaaacatgcgtccgtgtgtaaacttgtatccattgtaagcatgcttccctgtgtccctttgcaaagcatg

SEQ ID NO: 216297 - DNA, 122 bp, Homo sapiens
gatagcgcccccaacccgtccccacctcgaacactgcagcacccaatagagaccccaacccgcccccacactgggagaaataacgcccgtaacagtgccccaagccccactccatccccggg

SEQ ID NO: 216298 - DNA, 122 bp, Homo sapiens
gcacctctactttatccatacatccgtcttatctattatctttctatattttaaagtccacgagtttatatctgactccaattcagaccacaaggtacattcagtttcccactttccttatt

SEQ ID NO: 216299 - DNA, 122 bp, Homo sapiens
ggtgtgtgcaaagccaccgtgtccgggctgggaccagcccccaggcttgtcctcctcagccgctacgcatgcaccaccaggtcctgctctcccggagccacagtgtgaggccaaggtcggcg

SEQ ID NO: 216300 - DNA, 122 bp, Homo sapiens
tatttatttacataagaagatcttacaggagttctttgcttgaatccgttctaacacccgcggcagctgcacgcgctcacagaaggtggaggttacttgcccaggtacagacgacctcgggg

SEQ ID NO: 216301 - DNA, 122 bp, Homo sapiens
taagaagatggctcgactctgactgtgaacatttaatctgttaaactaacacctccattgcgctgtttaaatttctgtctggttgttgaaaagaaggtgtgggagaaatgttgcaggtacat

SEQ ID NO: 216302 - DNA, 122 bp, Homo sapiens
cagccctctccgtagtagtgttcgtcacacacgaagcggtaggagtacttgaggtccgtgcggccgctgctgtgcaggtcctgggaccactcctcgcccaccgtcaggtgcctctgggtggc

SEQ ID NO: 216303 - DNA, 122 bp, Homo sapiens
cagagctcagctatgctccggggaccgtggccagcagctcttgggcaggcgcgccctgtccggtgggtgcccggggcctcctgacacctcagtgctgacatcgtttatgcttttgggtcctt

SEQ ID NO: 216304 - DNA, 122 bp, Homo sapiens
gaacggcttggtacttcttaggcgcgataaggagtccgagagggcagaggcgctaagatacggaggtgacaagatggctgcgctgcctcaggctttcgttagttctgtcagctactcttaga

SEQ ID NO: 216305 - DNA, 122 bp, Homo sapiens
aagaaaaatgacaaaaaggaatttggataattaggaagtaaatgcagactgtgcaaaaatcgttcctgatagaaagcaggtaggagaatactcagaaaatgtaaaggtttcacaaatcagca

SEQ ID NO: 216306 - DNA, 122 bp, Homo sapiens
ccctgggggcacagcggtctccagtccctggagaagctccagctggggatactgtcaacccggtaaccagcacggcgctcctgggcagcccgggaccagctgtaaagtggtgatggcaggag

SEQ ID NO: 216307 - DNA, 122 bp, Homo sapiens
tttagacaggctgtggggactcccctgagttgagccttggccaggggtccggtgctgtcgcgggaaacctccagccttgttcttcaaaccactcagctcatgtgttttgcactgactagtac

SEQ ID NO: 216308 - DNA, 122 bp, Homo sapiens
ctggccgggtccgtgcctctgcaggcggggtggggtgtaggtacccctgtggaggccattcgatgagtctaaattctccgagttcagacccacctttaccgctgtctataatgggttatttc

SEQ ID NO: 216309 - DNA, 122 bp, Homo sapiens
ggcggcccaacggagaggcggggctaggggcgggaccaggacgcgggacagcaactgtcccgcaaggcccggattgaggaggcgggagggaccgaagcaggcggacccaggatttggcgccg

SEQ ID NO: 216310 - DNA, 122 bp, Homo sapiens
taaatattcagttaaaaatgaaacctctggccgaggcaggggctgaaggccaactggtttcggaagtgatcctgggtgagaggaggagaaggaggaggaggaggtggaggtcggctttccat

SEQ ID NO: 216311 - DNA, 122 bp, Homo sapiens
cggggaggagacagagcggccgagttcggagagagtgccccctggcggtgatcctccaggcggactgtggcgcgggccgggcggcgcccccagccccgcagcctggctttcttcctgctcgg

SEQ ID NO: 216312 - DNA, 122 bp, Homo sapiens
cggagtagtgacatgaggagtgttttgccaaacttgcaactggagttaccccaaaagtggcggcaagggagttccccacactatcctcaggtgggaccagttgggataccaaagaaagaagt

SEQ ID NO: 216313 - DNA, 122 bp, Homo sapiens
tgtccaagggcaatttggaaaacaaactgtacagtttcctctcatttatcaggctctaagcgatctgcagtttatctgggctattatgcaatgtgagatattatttatgagaggcaggcagt

SEQ ID NO: 216314 - DNA, 122 bp, Homo sapiens
tcagtcaagtgaattggctgaggtgttcctaaagctccttcacattttgggtctggtgtccggagtgattttgactcagagtctcgggttcttcgtttctccaccagacagcatcctctgtg

SEQ ID NO: 216315 - DNA, 122 bp, Homo sapiens
ggcggccattgcagacaattctaactcgagcaactggtgactggggaaggagaacctggtcgaagacaacgtgaaggaacaaaattagtcaagaagtatttcatcaaactaaccaattgtac

SEQ ID NO: 216316 - DNA, 122 bp, Homo sapiens
cctcgtagcccaggtcccaccacgccgtgaagtttgcggaaagttttgcagttgcttccccgcccgcgccagcgggggagttgtgacgcagcgtctggggatcctggccgggacagaagaga

SEQ ID NO: 216317 - DNA, 122 bp, Homo sapiens
ccccagcgcgggtcccgaagcaccgctggccacagatgaaccgcctcctcagcgcaggtccgggattcggggaggcagcgccaatatccggtctctgcagccatcttccctccgtccctccg

SEQ ID NO: 216318 - DNA, 122 bp, Homo sapiens
cagaggcctggcctacgacgtatcccattcattcattcacgcgttcgttctttcagctcacgcgttcgttctttcagctcagcctgcattgcgcgcgttccctgctggctctgcagtgaacg

SEQ ID NO: 216319 - DNA, 122 bp, Homo sapiens
ccgaagaacggcggtaactcctccccctcgagccgcccggcctggggccagggtgagctacgagagccgctctcccggctccgcctcccgctcacgctctgcttccgccttccgtccccgcg

SEQ ID NO: 216320 - DNA, 122 bp, Homo sapiens
acacagctgtgctttgctcagtttataacatatgtcagcatcagtttaggagctcagcatcgtttcctgcccagatataattcttcagacaattcttgtggtcagtgctaagggtagtcaat

SEQ ID NO: 216321 - DNA, 122 bp, Homo sapiens
agagttcgacggggtgcgaagtttcggggacaggcgcggacccggtactgcgcacgcgcgcggtcgcaccgattcacgcccccttccggcgcctagagcaccgctgccgccatgttgagggg

SEQ ID NO: 216322 - DNA, 122 bp, Homo sapiens
tgggggcccatggcaatggcgaaggggcagcagccctagttatcccatactcactctagacgcttttatgcatgtctcaagtttcccaaaacggaggcagtgtgaacacagtctacagatga

SEQ ID NO: 216323 - DNA, 122 bp, Homo sapiens
cgcacactcccccagcctcacctctggggccgcctcggaacaagacagtggcagggaacacgagtaagagaagcagcagcaagcgggggaggagtctcatggcgctgccggtccagtgtcca

SEQ ID NO: 216324 - DNA, 122 bp, Homo sapiens
cagcccacttctccccggcgctgccgcagcccctccgaggacaccttctcttccctaggccgcccattgccgcgccccagggagtgtctgcagccacgggtccctccaaccccgcacttgtg

SEQ ID NO: 216325 - DNA, 122 bp, Homo sapiens
ttcctttacagaatttctgctgcatctttgctgttgctcagtgttctcctttagttatttcggtcaaaatgtagttgtttatttgttattttggggcctttctatgtgtgtgaggggaaaag

SEQ ID NO: 216326 - DNA, 122 bp, Homo sapiens
ttgtcattgcctactttatgaccttggttgagttgctcattttattcagactgtagttgtcgcaactcataaagttgccttgaggagtaaatgaaaatacctttgtaaatgtatggtagcag

SEQ ID NO: 216327 - DNA, 122 bp, Homo sapiens
ggccccgtgaatgtactaaatgctgctacattctacgctttaaaatggtgaattttgccacgtttgttttaacagagagagagaaagagagaaatcacagagaccctaaggccgacccaggc

SEQ ID NO: 216328 - DNA, 122 bp, Homo sapiens
cgcgcgggacgtgagaggagagccgagggctgttggggcgggcccgacccgcttgcggggcgcccaccgcacgcagatgcgccagcccgcgccccgctcgcgcctgtcctgggcttcgcagg

SEQ ID NO: 216329 - DNA, 122 bp, Homo sapiens
ttgagagctgatcctatcaagggtgtgtcagaaaccaaccagcagagtccccaaatcattcgagtccctggcattcttttttcaaggctttcttcattgtaaccggttcctgatggtaattg

SEQ ID NO: 216330 - DNA, 122 bp, Homo sapiens
gacaagcgccacgcatgcgcccacgtcctgaaaggccaggtggaaaccccgccggctgagcggtccgatctcgcgcacctctgtgttcagcttcatcttgcgctcacccaggtcgccctgcg

SEQ ID NO: 216331 - DNA, 122 bp, Homo sapiens
acctcaagtgatccacctgccttggcctcccaaagtgctgggattacaggtgtgagccaccgtgcctagccctggtctgtttttgagtctatctctcttgagtgaacattctctttctctgc

SEQ ID NO: 216332 - DNA, 122 bp, Homo sapiens
tggagaggggtcctcggggtctcccttccctccgccctgttttataatcctggtggggtccgataccccgtggcttagtcccaggaaacagtcagtctacgcggctccgtgccccggggtgt

SEQ ID NO: 216333 - DNA, 122 bp, Homo sapiens
tgctgccgtctggtcacctttccagaactccgactaagaaagtgaggatagaaatgggaccgtagacggagaggatcccagaggaaagagaagtttcagttagaacgttttattcaaacatg

SEQ ID NO: 216334 - DNA, 122 bp, Homo sapiens
gctcgggactgaatatgcctcttacatatttatacattagtgattttctcctttccaaatcgggccatctatctttagctgtgacactgaacgagccaccaccgcctcccttccccagtggg

SEQ ID NO: 216335 - DNA, 122 bp, Homo sapiens
gaaaaacacacgaatcagaaggcgacccttctgtcagagaagtcatccaggagtgacttgcggattcacttacgcagcccggaaaccaaaaaatgcttcagcttaaagaaatgatcagcaag

SEQ ID NO: 216336 - DNA, 122 bp, Homo sapiens
acccggcgacacccggcagccccttcacccctgtgtacctcgcaggatgcagagattgtgcggacccgggatcccgaaaaactcgcttcctgtgacatcgtggtggacgtggggggcgagta

SEQ ID NO: 216337 - DNA, 122 bp, Homo sapiens
gggtggaacaaacacgaatgaacataaaatcaaagggagagaaaatctgattatcatccacgtggagagcaacacttactccaaaaggagatagaggaatcgattctgcaacccaaagagct

SEQ ID NO: 216338 - DNA, 122 bp, Homo sapiens
ccttcctagcttaaatccgtactgagagctgctctgtgtcacactcatttctcttcaccccgcctttcccattaacctctcggtcctcatttcccatcaccctccccggctctctcctctac

SEQ ID NO: 216339 - DNA, 122 bp, Homo sapiens
ctcgagagctgattgggaagcttattaaaagcagaatactccaggggcagtctctccctgcggagcaagaaaacggatttgaaccaagaggccatgagatggtaccttgttttgtttttagc

SEQ ID NO: 216340 - DNA, 122 bp, Homo sapiens
cgacccaggtggacgaaagagctcggcacaccgtgtgtccccaggcccgcttcctccgtgcgcctctgtcatctgctccatctccgggaagcaaagggacttggggtgtggcacaaagagca

SEQ ID NO: 216341 - DNA, 122 bp, Homo sapiens
ggaattctaacttattatattgtacaattattcatgagtgaaagtcttgctacttcaacacgctccttgaaatcacatgcttcgccatagcctccaaagtaccttccacagatgctgagccc

SEQ ID NO: 216342 - DNA, 122 bp, Homo sapiens
gcacggagactttccttcaccccgcggcttctgttcctttcaggacggacagcgcccacccggaggaaagcctgacagatgagacttcgcaaggtgagaactcccttcgctccacacgcagc

SEQ ID NO: 216343 - DNA, 122 bp, Homo sapiens
ccccttgtgcgagcctgcgaacggctcgggggcgtggggaatccggagtggagcgctctgcgccgcccgccctgccaggatggggagcgagggaggggcaccctggcagcgtcggcgggagg

SEQ ID NO: 216344 - DNA, 122 bp, Homo sapiens
attggaccccctccgctgcggcgcgcccaccttggcgccgatctggttgccgcactggcccgcctggatgtgcacgatctcacgcatggtgcctcgtcagcgtcctcctggtccggcggcgt

SEQ ID NO: 216345 - DNA, 122 bp, Homo sapiens
ctcattgatttattccgaaggctagagtttctactttacattctaattcatctgacatagcgtgtttttaaaaaacttagcattgcttgctttgattttccagttgacttttgctgatggag

SEQ ID NO: 216346 - DNA, 122 bp, Homo sapiens
ttgcacgctggtcatcatcttgctgcacgtgttctgggacattgtattttttgatggctgcgagaagaaaaggtggtacatccttcttatagttctcctgacccgtctgctggtgtcagcct

SEQ ID NO: 216347 - DNA, 122 bp, Homo sapiens
atccgactagatagtttttcagaggtcatcttccccgtgcaccccactcactaccctgaccgtgacttagacactcagggtttgtttctgtactctgttgtgtcctgcaggtgacaccgatg

SEQ ID NO: 216348 - DNA, 122 bp, Homo sapiens
gtagccagggtgtctgggtgttgggaccgcttagtcgcgagaccccagcaaacctcttggcgtctctgagcctcagcttttgcttctgtagaatagggtgtactcatcgtacatttcatggg

SEQ ID NO: 216349 - DNA, 122 bp, Homo sapiens
cagtgcccttgcctacagatcccacggtgtcctggatcccaggctcttggtgggttgtgccgtggctgtcctggctgtgcacggggccggtaatttggtcaacacttactatgacttttcca

SEQ ID NO: 216350 - DNA, 122 bp, Homo sapiens
agtgcatgtgcgcgcgtgcatgtgtgcgtgcgtgtgtgttcacgtgttctcgtgcgggcgcgtgagtggtcttcaaacgagggtcccgatccccggggcggcaggaagggggccgactccac

SEQ ID NO: 216351 - DNA, 122 bp, Homo sapiens
ctgggagaggtcacaggtcagtggccggaccccagtcgtagccatcttcatcggggactccgcatcgcggactcgtgtaaactttttcttcagggcttccggttcacaggttcgcatgctgt

SEQ ID NO: 216352 - DNA, 122 bp, Homo sapiens
gtgctgggattacaggcatgagccaccatgcccggctgtgttactgtctctttttgaggccgttttctcagtataataatagcacccacatcacagggttgtcatgaacattaattgaaaaa

SEQ ID NO: 216353 - DNA, 122 bp, Homo sapiens
tctgcagagcactgggtgctgcagtgcggaagccaggaggccattaatcggccgggaaggcgggcatagcacaatcagattatgatctttaagatgcatgctttgaatctcaaaatcagcaa

SEQ ID NO: 216354 - DNA, 122 bp, Homo sapiens
ctgtcttctccgtgggatccacaggatagtccgaggatcctaggagagggcagatgtgagcgagcctgaagaaacgtcaggcagagccccaggagtaaaccgcgaaatccctagggatccaa

SEQ ID NO: 216355 - DNA, 122 bp, Homo sapiens
gccgctcgcacagcgtgttttctaaagtttctgctgacacagcttcgcgtacacatgagccggcgcggccagactcacgcaggcaccgagtgtttcccctgcgccgtctcgcgccgccgccc

SEQ ID NO: 216356 - DNA, 122 bp, Homo sapiens
tcctcacttagggctttcttccctttttacgcaatgactgtccttctccagagaaagcgacgaatctgcctccagcttcatcctaggtttgaagagaagatactattttcagaaactccctg

SEQ ID NO: 216357 - DNA, 122 bp, Homo sapiens
agggagggcggggacacgcggatcggtttaggggccggggatgcccagtggtcgaggacccggaaggggcaaggagccaagacctccaagagccagctaccaactggagtgaaaggaccggg

SEQ ID NO: 216358 - DNA, 122 bp, Homo sapiens
cagcactgccagctgagccccacgggccacagcagcgggaagcagccagggagggccggccgggtgctctcaggtctcagcaagccacgtggctctgaggccaggacactggggaagccagg

SEQ ID NO: 216359 - DNA, 122 bp, Homo sapiens
gcccagaaagagcgggcagctctgccctggggcgcccgccgcctggaccctgattcctggcgctggggacccagatattactgttatgaataatagtgatagccaacgtttacgggcctcct

SEQ ID NO: 216360 - DNA, 122 bp, Homo sapiens
aaggctgtaagcaacagagtgcaatagaaatatttcactgaggtcgggcaccatggctcccgcctataatcccagcattttgggaggccaaagtgggcagatcacctgaggtcaggagttcg

SEQ ID NO: 216361 - DNA, 122 bp, Homo sapiens
taggaaaataaatatatcaaaatatgcttctgacctcaaggaatttcagtaacatggatacgaaattattgttctgatagaaactctgtcacattccagctaggtgaccttggatgaatcat

SEQ ID NO: 216362 - DNA, 122 bp, Homo sapiens
aagcagaaggcaccctcatccccagggcatccccgatcccagcaggagtctcctagtgctcgccctgggctctcctgcaaggaggctgctgctttccccagaacatccagtctgggccccag

SEQ ID NO: 216363 - DNA, 122 bp, Homo sapiens
cgccccaccgcctgccggccccgagcacacgtgactccgccccggcccgccccgccccgccgtcccagcgcgggctcccattggcctttctgggaggccccgtccccagccggggaggagcc

SEQ ID NO: 216364 - DNA, 122 bp, Homo sapiens
cgaggaggagggcgcgtcccgctcgctccgtggagacgccgcggaggcgcacacgcctcacgcctcctcgcagaagccacaggggctgcggctctttgtcgcggccacaccggaaacggccc

SEQ ID NO: 216365 - DNA, 122 bp, Homo sapiens
atccccagtccttcctggaccaggaggaggcagatgaccagcagctgctggaaccagaggcgtggaagacctacaccgagcgccgcaatgccctgcgtgagttcctgacctcggacctgagt

SEQ ID NO: 216366 - DNA, 122 bp, Homo sapiens
cgtgattcagcggattctaaggttgtgaagtgtaacaatcagcgcactttgggaagatagcgccagtccatttcgagtattgattcgctgcactttgtcactctaatgatgttatctcatta

SEQ ID NO: 216367 - DNA, 122 bp, Homo sapiens
cgaaaatcgggaatgtaatgttttgtttttacattccaatttgctccctccccaggctggcgtggaatccgagggttcctgatgactgcagctcctcgcccctcccgctgtgttcccgccgc

SEQ ID NO: 216368 - DNA, 122 bp, Homo sapiens
tttattggtaaccttttgaggttaccaatacattttagtgaataggcaaattctcagatacgaataatgaagaatgaagatcaactatacttcctggcaatatcaagggctgcccatatctc

SEQ ID NO: 216369 - DNA, 122 bp, Homo sapiens
aaacagttgggcttctctcccgagcaaatgtcgacccgtctgccctctgcggtgtgctcccgcccgagagaagtaattctggtcctgtccttcagcgcttcgaatgggagccctggccagtc

SEQ ID NO: 216370 - DNA, 122 bp, Homo sapiens
caggctggagtgaagtggcatgatctcggcccactgcaacctccagcccctgggttcaagcgattctcctgcctcagcctcccgagcagctaggattacaggtgcctgccaccacacccagc

SEQ ID NO: 216371 - DNA, 122 bp, Homo sapiens
aagcccacaggatgggcagccagggcgtgagtgtccctacagctaactcagggagatgtccgggccccagaggccatctgcctgcatctctaaaaagtgctgtgggaatgtaacttttctga

SEQ ID NO: 216372 - DNA, 122 bp, Homo sapiens
ccatgttaactatttttaactgcacacttcaatggcattaaggacattcacactgttgtgcggccgtcacccccatcatctccagaactctttcgtcctgcaaaactgaagctctgcaccca

SEQ ID NO: 216373 - DNA, 122 bp, Homo sapiens
gggcttgttgttgactttgaggaaaactcctgacgtcaggggctggctctcggcgactggcgggagcggcttccccgcgtccccggccctgcccgccgcctctgctcccctccctgcccggc

SEQ ID NO: 216374 - DNA, 122 bp, Homo sapiens
atgaaaaggtggaagtagtccgtctgtggaggcgggtagagttcagacacgggctctgaccgagccccaggccctgcactcagggggaaactgagtgccagggtgcgagtgagggctccagg

SEQ ID NO: 216375 - DNA, 122 bp, Homo sapiens
cccattggcggaaggcgacggcgggggggctcgctcgtgattggtcggtggcggggaggccgcggacctggcaccttattggacgcgccagctccggtctagggggtgatgaaggaatctga

SEQ ID NO: 216376 - DNA, 122 bp, Homo sapiens
ggcctgttttcacatcattctgatcatctctgtccttcgtcttcattttgctgtgcaactcggggagccgaggagaggtggcaaaaacagcggttgccgagacaaggcgcaggccttggcgc

SEQ ID NO: 216377 - DNA, 122 bp, Homo sapiens
acaggcatcaaggaggtacttacgcagctacagctcagtggcagctgcaaaccccatctacgaaacatgtcatcaggactgtcctttaatagtcttcctcctctctgcagctgcgggaaaga

SEQ ID NO: 216378 - DNA, 122 bp, Homo sapiens
ctgtgatctgcagcccggctttcccctcctcaccctctgctctcagacagacttgcttttcgctggtgtctgtgagaggtgatgcctcatggtgccaagaatgtggatttttttgagagcag

SEQ ID NO: 216379 - DNA, 122 bp, Homo sapiens
actccatcagttgaattcaggtgcatttttccctacagggatacaggtcagggagtctaacgcatgctcatcaaggggtacagtagcagtacccagatcatgctattccccagctgtgaggt

SEQ ID NO: 216380 - DNA, 122 bp, Homo sapiens
agtgggagacacgtgttgcacagcctgcatttggaatacccagagggtgggtgggcgggacggctcgctgccccattcccctcctagctgctgggacaggtgggaattcctgtagcaaagtc

SEQ ID NO: 216381 - DNA, 122 bp, Homo sapiens
cctacctggatcacgacgaggtgaatctccagttctgcaattctccgccctatgcagctgcgaaccccatgaccaaaggggatggatccaaaattgtcaactctatctaagtctcctttccg

SEQ ID NO: 216382 - DNA, 122 bp, Homo sapiens
ctttgcccgcgaccgaacagggcgagcaggcattttccttcacgtaggcctgaaaagccacgtcacccgcatccctgaaggcggccccaccagcgactacggcttgggctccacggcgcgct

SEQ ID NO: 216383 - DNA, 122 bp, Homo sapiens
acatgggggccggctcgccaaggtggaggtggggaagggggcgtgtctggtcccctaccccgaagacctcagtagctggaggaatgggcgctccacgctcccagctccgttagttgggagtt

SEQ ID NO: 216384 - DNA, 122 bp, Homo sapiens
tgacgagaggggtcgtgacccctccccgccaaaagattaaggacctgcgatcctacagaccggagccctgtttgaagtctgcgttgcccctcacctcaagctggtcactgtgtgaagttggc

SEQ ID NO: 216385 - DNA, 122 bp, Homo sapiens
cttcaccactcaggccccatttcaaatgccacctctttggggaaggcttccctgattccccgactttggtgactcttctccccagttgctccattcaccatttccctgttttattggcttta

SEQ ID NO: 216386 - DNA, 122 bp, Homo sapiens
gcccgtgcagcagggaacggagatcaccgggcactcgggagccatccactcggtggtgggcgatttgagccgctgtcttcaggaccgagaccaggcatcagggaccccagattgtggagcag

SEQ ID NO: 216387 - DNA, 122 bp, Homo sapiens
ccactcagacgtagttcagaccctggatcacagccgtccagaccccactcagacgcagttcggaccctggatcacagccgcccagaccgcactcagatgtagttcagaccctggatcacagc

SEQ ID NO: 216388 - DNA, 122 bp, Homo sapiens
agcgtcactcgcctcaggcggaacagctgagaccgtgtcgcgcaaaaggagataacaggccgatactaactagactaactcgacttccggacagcgtcggaaacggcgagccaacgagagga

SEQ ID NO: 216389 - DNA, 122 bp, Homo sapiens
cagcactgagagggggtgcctagaaggctccccgtccagccccgccctgcctcccagcaacgcggagcgagagggaacccacacgcccacctgctcaggtagaaggagaagatgttctggtc

SEQ ID NO: 216390 - DNA, 122 bp, Homo sapiens
cccctggggtctgctgcgaggtcccagggacaagcagtcagcacaaagcggtggacaaagcggggagtaggggaagagggacctatgagactccgaagccttctgcttcactgtccctgagc

SEQ ID NO: 216391 - DNA, 122 bp, Homo sapiens
tctcgtttcagaggtgaggacacgcctatggtgctgtgtctgtgtccagcaggttctgctcggccccgacagtgctgcccgccaggtgcccttcccgcacgcttgctgcagtcagccctgca

SEQ ID NO: 216392 - DNA, 122 bp, Homo sapiens
gatcaggcctagagtgctggggtctgagtctcagcttcccttttctcagggggccttggacgcaatcccttatgactttgagattcgctttcctcccgtgtagaacgataataaaaagtggt

SEQ ID NO: 216393 - DNA, 122 bp, Homo sapiens
tgccataaccctaccagagaaaccagccacagcccattagcacattctgaaactatgacacggtctcctttcagcacacagggagccccctacctgcaacagcagataacctgtgccttctc

SEQ ID NO: 216394 - DNA, 122 bp, Homo sapiens
aagggcgggaccatggaggctttttcttggccccttagttgtgggttttcctctgggcggcgaagccagtttccatcagaactgcccagaggcgggcgctgccttcctggggtgacgcagca

SEQ ID NO: 216395 - DNA, 122 bp, Homo sapiens
cagttacacacagcaacctttccgtgttcaccaaccaagagctgcagcaccccacacagacgaaattgcgttcacatgagccgggtgaaccagtacccgagtcgctgggccagcccgccagg

SEQ ID NO: 216396 - DNA, 122 bp, Homo sapiens
aaagttaccatgtttttcccccttattttaaattgtgcaaacaattagacattttgaaaacggcatacatcaagtaaagcaagtcaggttttaattactttaaaacctttataatccctgct

SEQ ID NO: 216397 - DNA, 122 bp, Homo sapiens
gattgcaggaaagtgctggggaaatgcttatagactaaggaatgggcataagtcagttaacgtccaactgcgttttgtctgagagccgatgggagtaagagtgtctgcagcttgtcgatgtg

SEQ ID NO: 216398 - DNA, 122 bp, Homo sapiens
ctaaagccagattgggctgctccaacctaatggcatgtgagtccttgaactgccatcaaccggatctgacagcaggcatggctgcagcaggcagttacagaaatgggtttaaatgtgggtga

SEQ ID NO: 216399 - DNA, 122 bp, Homo sapiens
gctgcggcagaccacggctccacgcctgctgcagttccctgagctgaggctggtgcagttcgactcaggtatgcggcagttgggggcgtggcccgtgcgggagctgcaccggccctggatga

SEQ ID NO: 216400 - DNA, 122 bp, Homo sapiens
tccctcagcagagtgctaaacacgccaatttctaaagaagtgttttctttctttcaggcacgaaaattaatgagctccgtctttggcatgggctagaaaattccactgtggcattggcaggg

SEQ ID NO: 216401 - DNA, 122 bp, Homo sapiens
gagcgctggagacgcaggttcctaatttgctgtgtgactgtggacagggagcttcgccgccggggcctcggtttcctcatctgtcacatggaggtgtagtggagggcacatgatatccttct

SEQ ID NO: 216402 - DNA, 122 bp, Homo sapiens
gctccgaaattcttcagacctgatgaagaggtgtcccagaagcgggtggtgctccaggcccgcctcaccagctccagggaggtcaaggttggagagagacaattctaggggcgaaccagaca

SEQ ID NO: 216403 - DNA, 122 bp, Homo sapiens
ggctggcggatcactcgcggttaggagctggagaccagcccggccaacacagcgaaaccccgtctccaccaaaaaagtacgaaaaccagtcaggcgtggaggcgcgcacctgtaatcgcagg

SEQ ID NO: 216404 - DNA, 122 bp, Homo sapiens
caaggcagaggaggatgggagggcaggcacttagcacgggcatgaccatcctgccccctccgctcccatgggtggacacctcggcctggagctaaagggtctgtgaatgggtgtaggggagg

SEQ ID NO: 216405 - DNA, 122 bp, Homo sapiens
gtgtctgaaggcagggagggagcaagatcaaagcagatgggaatacacttaaaacatacgcgcagaatctcactggctggccccagactggagctgccagaatttgacccagcaatggtctg

SEQ ID NO: 216406 - DNA, 122 bp, Homo sapiens
taacacgaccgggccttcgtgggcctgacaacagacctgacatcccacgggcgggagaggcgtcagcccgaggctgggatgctcggccggaacggcggctggcggcaggctgggcccaggga

SEQ ID NO: 216407 - DNA, 122 bp, Homo sapiens
agcaggggaagcgctgagcaagcccaaatccgagacagtggccaagagtacctcggggggcgccccggccaggtgcactgggttcggcatccaggagatcctgggcttgaacaaggagcccc

SEQ ID NO: 216408 - DNA, 122 bp, Homo sapiens
tgacctggtcacctcggacagccgctccacgctcatggtcagcagctcctactattccatcgggcactctcaggacctggtcatccactgggacataaaggaggaagtggacgctggggact

SEQ ID NO: 216409 - DNA, 122 bp, Homo sapiens
ttacgcccttggtgcttaagtaattggatttctcaaccccgcctccaggcatttttcccccgtgtaatcctaacctcatgggctttgcaaaggaaacaaaggcattgaaagggtttgcaact

SEQ ID NO: 216410 - DNA, 122 bp, Homo sapiens
gaaggaaacaaagacggcgagggaggggggaagggggagggggggcctctgcctttgaaacgccgagcgatcagatgcaaaatccttcagcgtctgaaaccatcgcggacgccgccgccgcc

SEQ ID NO: 216411 - DNA, 122 bp, Homo sapiens
tctgccccctccccacgaggaatctcccttggcctccttcacaggaaggcaaagtacccccgcttcattttaatggatttttgtctaattactgactggaacagatgcagagacaacctcat

SEQ ID NO: 216412 - DNA, 122 bp, Homo sapiens
tgcaaccctatggttaacatttccttccaccactaggcaaggaaggcctgcgacgctccccgtctgagcatggtgctaaacacagtgcctagcacccagtaagcgcacacgcatgagggaag

SEQ ID NO: 216413 - DNA, 122 bp, Homo sapiens
ttttctgacctggtgtgttaatgccctgggttggccctctaagaagctggccacctacttcgggcctcaggtgtcagacgccccagcttcgaggtctatggctcccagcaactcgagcgcct

SEQ ID NO: 216414 - DNA, 122 bp, Homo sapiens
ggcagcagacaaagactgggcagcaccgggcacgttcccgctcctggcccctccccgggccgcacttccagaatgggagtgaattgcctcccaattaaagaagcaattttttaaaaaatcct

SEQ ID NO: 216415 - DNA, 122 bp, Homo sapiens
ccgcccttggtcccgtttccttacgtatccccgagaacagtccggccccgcctccatccccgccccttacgccattacgtaatccccgcaggctttgcgcgggtcgccctgagcgccgcacc

SEQ ID NO: 216416 - DNA, 122 bp, Homo sapiens
cgggtgcattcctggcgcgatcgccttttattgaagcttttaattaaaggggccagttggcgagcccctgaaacaaccgccaaaaccccccaaaagagaaaaataaacgctgtagccttcga

SEQ ID NO: 216417 - DNA, 122 bp, Homo sapiens
agagacaataccaaagacggaaacagacacagcacgggtgctcgccgaggctcagctgtccgggctctgggcccccaggagcgccggctgctccaagtggcactgcggcgacgaacagcagt

SEQ ID NO: 216418 - DNA, 122 bp, Homo sapiens
caggcgggggcaagaggaaagctgagcagaggcgaagctccttacacacccgagtccaggcgaacctctgcgcctgattcccaagcctctgataccccccgggggttaggacagtcgggcat

SEQ ID NO: 216419 - DNA, 122 bp, Homo sapiens
ctccagggccctttcgtcctcagtgcctgcgcgcctccatgtccctcggcctcccctccccgggctcttgggggaactgcccaggctcaggccacaacagcctctggcctcttgctgctggg

SEQ ID NO: 216420 - DNA, 122 bp, Homo sapiens
acagaagctccacaacaaatcctgctcaccctgcactttgcagcccggccacaaagcaagcggccacacccagggttgggtttggaactgttccaggtcacgcccttgtaaaatgagtaagc

SEQ ID NO: 216421 - DNA, 122 bp, Homo sapiens
cagtgtcctttgtagctccctacctagtccctaatcatccccaaggagatgatgcggattcgtcagacatgagaacactaggtgggccatgtttaccagtaggtgggggtcattttgcatta

SEQ ID NO: 216422 - DNA, 122 bp, Homo sapiens
gagcgggggttggtctggggagcaggttgtgctgggcagggctcgctgctgggcagtgctcgctgctgcccccatgcgcctgccgccgcggattgggccggcctctttttttccttttacta

SEQ ID NO: 216423 - DNA, 122 bp, Homo sapiens
gtagggaatgagaaggcaggaaagggaggagtcaagcagggaggcttcaaaggagtaatacgctatacgtttaatacttattgatccaacctgtgcttttcaaatgtaaggcagtagagaag

SEQ ID NO: 216424 - DNA, 122 bp, Homo sapiens
aaattttagaaaaatactgcctaaagcattgtttcaaagtatcgatcgcttgaacaaaaccgctaccctagatgatcttgggcagggtaggggaatctgtatttttaacaagtgtctcaaat

SEQ ID NO: 216425 - DNA, 122 bp, Homo sapiens
tggggcggggcttcaggtcaccccgcccatccccagcctacgcgaccattgaacagctgccgcccaacggctgggtaaatcctcagcggccgaaatgattagcccagggggcagccccgccc

SEQ ID NO: 216426 - DNA, 122 bp, Homo sapiens
atgaacccccccccgcccaactctaagcacatgtgctctcaatccatcacgatcctttcacgtggaaccccttagagttgtaagccctgaaaagggccagggagtctgtcttccttcgggga

SEQ ID NO: 216427 - DNA, 122 bp, Homo sapiens
catcctaacctagtcctgtcagaggatcgtaagagcgtcaagttcgtggagacaagactccgggatctccctgacacaccaaggcgtttcaccttctacccttgcgtcctggctactgaggg

SEQ ID NO: 216428 - DNA, 122 bp, Homo sapiens
ccttctcgccctctccagccgtccggttgggcttgtcacggcaccgcctaccaagacgggcggttaagacactaggataggctcctctccaccggaaaaggcgggatttagatcacgtcccg

SEQ ID NO: 216429 - DNA, 122 bp, Homo sapiens
gcagttcacccctggcacttccaagggcagctgctccagggagaggccggccagtgccatcgggaaccccctgcccagggaacccacccccgtctcaagcaagggccggcctcacaggcggc

SEQ ID NO: 216430 - DNA, 122 bp, Homo sapiens
aacccacacatttcttttttcatatgttgcccaattctggaaagagtcccttgcactccccgcctgcgcttcctgactcctacgcatctcagaatcccttgcagtccggcagatgtgcctct

SEQ ID NO: 216431 - DNA, 122 bp, Homo sapiens
gtattaaaactgctctaattgcattcttcaagccagctgaaggctgacagcttccgctcccggctcattatcagagcacttcaaggggctccattatgagcagagcacctggtccaaattta

SEQ ID NO: 216432 - DNA, 122 bp, Homo sapiens
ctaggcttcctgcagaaacaaggttctctacaatcagaaagggtactcctggatgagcaacgctggaagaaacacctcagaaaagacgtacactgctctatctgacctgtaaatgagaattt

SEQ ID NO: 216433 - DNA, 122 bp, Homo sapiens
tgccaagcagatggtaactccgagggggcaaggtgcatgaggagcgctcattatcctcgccggagccaacagcacctgccctccgctggagaccgtctttgcttagtagagccggcctgacc

SEQ ID NO: 216434 - DNA, 122 bp, Homo sapiens
ctctgttaggagcctttttctcgacagagtcgatttatggtttggatagggaaagggggacgtcaagtcaaggtttaaaatagaaagattcagccttattgggtttaaaagagagaggtgca

SEQ ID NO: 216435 - DNA, 122 bp, Homo sapiens
gccacctcctgctgcctgtgcctgaggccgtgggctgcctcggggcttctttggcagaggcggcccacttcacgctctagggactgcgggggaagccggggtcagaggctggggcaggggag

SEQ ID NO: 216436 - DNA, 122 bp, Homo sapiens
tcccgcactatacccagaggctttcttaattggccctccgagggggtcggggtgtgcacgcgtgtcacctgcagcaccagggccggcagcagcggggtgggcgggctgccaggctccgggct

SEQ ID NO: 216437 - DNA, 122 bp, Homo sapiens
ggtgcccatgagcacctcatcttgaggccagtcttcatgctagaccctgggtggagagagcgaggcggctggaggtgggtgtgtgacaccaggtgacttagcggccccaggagggtgacttc

SEQ ID NO: 216438 - DNA, 122 bp, Homo sapiens
tttcgggaatatttgaggagggcaacctgagaggcaagcaccaaggaggctaagcccgggcgcccggagtcccaacaaggttctcctgggcagaccccgagggaagaatggaagtgttatga

SEQ ID NO: 216439 - DNA, 122 bp, Homo sapiens
atggatccaaatgcctcctctggctcatgaaatcccatgtacttcacaatctagcctaatcgtgtatatgcataaaagccactggtatactttttacagacatctttgtataatagtccaga

SEQ ID NO: 216440 - DNA, 122 bp, Homo sapiens
gtgattttggggggtaggccttgaaggatgagcactttgcggctgacaagcaggcccgagcgtggtgcaccgcaggagctcagccctcgcccgccgacctgacctgggccgtgccgagacct

SEQ ID NO: 216441 - DNA, 122 bp, Homo sapiens
catatggcggccgggccggaggtaattggaacaaacgccgtctgaaaagggcacaaaagccgcagctggggctttgtccgcgctcccacggggagccgccggccccgccgcccggccccttt

SEQ ID NO: 216442 - DNA, 122 bp, Homo sapiens
ctaagggttaggaatggctatgggagtgtacaccattgtgtgggtgcttcatcccattaacgccgggggagaactccaaaacaagtgcttttggagaataagtacaagtaggagcaatcagg

SEQ ID NO: 216443 - DNA, 122 bp, Homo sapiens
ggcccagatggaaggcgggtccttgttacccacaatggcagtgtcctaacaggtcccgtccgccacgaggctgtagatggaggtgtccacctggccgttgcgttgctgcaggggctcctctg

SEQ ID NO: 216444 - DNA, 122 bp, Homo sapiens
gctttctggctacggccgcgcaagccgcggagccaactgcggggctctatctccccctggcggagcagagctggtacttcagagcgctgcctgacaagcccgctcccccgcgccacctgctc

SEQ ID NO: 216445 - DNA, 122 bp, Homo sapiens
ccgactcagcctcccaaagtgctgggattgcaggcgcaagccactgcaactgcccagattcgcttttctttgattattggaaggttgaatgtttgtcacatgaccaattgacatctaatgcg

SEQ ID NO: 216446 - DNA, 122 bp, Homo sapiens
gcggctcacttacctctggcccatcgcgaccggagcgccgccgccgccacccggccaccccggaatcggaaaccgatctcaccgccctcgaggacccgacttccggaacaaccggaaggaaa

SEQ ID NO: 216447 - DNA, 122 bp, Homo sapiens
tgcctgagtgctgggcagtaagtctaagaggacagtgacacatgatatccctggcttgaccgcaagactggactcctattttcccatcagtgcacctttctagtttctttctctctcttttt

SEQ ID NO: 216448 - DNA, 122 bp, Homo sapiens
atctgaataattgcaggcagaagacatctattttagaatttcttgatctattacccttgtcgagtgaagcaaatgacactgcaaatgaatatgaaattgagaagttagaaaatacatctaga

SEQ ID NO: 216449 - DNA, 122 bp, Homo sapiens
atgcatcaagttaacgtctaagcaaaagatcagcagagatcagagattgttgggtacacacgtatcttgtgatgtcttctgagaaccaacttattcctctttctctgagaagaacttgaccc

SEQ ID NO: 216450 - DNA, 122 bp, Homo sapiens
aaggtcaagttaaagctaataagtgggagaactgaaattcaaatctcgactgcctaattccgggaacaatgcattcatcctcggctctacactgcccaagtcttgaatcctagtgttggaga

SEQ ID NO: 216451 - DNA, 122 bp, Homo sapiens
cttataaagctgcagggctgccgagaaaatgacagcagacaggtacggcttgcaggcacccgtgggtgcccgtgattaacccagaccagggtagccacggcctgcgccctcttgctctgtgc

SEQ ID NO: 216452 - DNA, 122 bp, Homo sapiens
agccatgggccttgttttctgatgggtgatatgcccttgagcagactatctccaggccagcgttaatactcaacacctgtcagctcatggcttctccttattacactgcattcatttcaacg

SEQ ID NO: 216453 - DNA, 122 bp, Homo sapiens
atcccggacgaccgtaaggtagggccctacagactgactggggagccagttggggaaactcgtgaacagcaactgcggtggcggctccgcctccttggggctggagctccccgacggccaat

SEQ ID NO: 216454 - DNA, 122 bp, Homo sapiens
acaggcagccccagctccctgagacaccatttctctacaacgggatcacgctgcctgcctcgtgggatttccgtgggcactcagggtaattaatctgggagaaggctgactctctacctgac

SEQ ID NO: 216455 - DNA, 122 bp, Homo sapiens
tagcagttgatggaccaagcaaaggtgtccgaggccgacaatgtggagtctgggaggatgcggggtccgggttgcagcgcgtggagccttgttctgctgttctgttttcctctatgcttgaa

SEQ ID NO: 216456 - DNA, 122 bp, Homo sapiens
tcctgagtaataactatgtgaaacagatgtttcagcaacacttaaaactaatcatgtgggcgtggtggctcatgcctgtagcactttgggaggccgaagccagtgggtcacctgaggtcagg

SEQ ID NO: 216457 - DNA, 122 bp, Homo sapiens
ggagggcgcgtgaggcggaaactagggaccccacctccgactcgcagggacctgccgagtcgccccactcacccgtggccccagcaacccgctgcacacggaggccgccatcttgggccaag

SEQ ID NO: 216458 - DNA, 122 bp, Homo sapiens
accctctgtcgccggcctccattggaggatgcgttgtccctggagctgggtgcgctgttgcgtgacctggggcctgggtggtgggcgggcctgtccatggcaaagggcacggctgcgcgcta

SEQ ID NO: 216459 - DNA, 122 bp, Homo sapiens
cctctcgtgggcgtgtccagccagggctgggggtccagggaggactgagtttccctctcccgccgtcctcgcagccccgggaggtgcaggggcatcgcgggaacagccccggtgacacgctg

SEQ ID NO: 216460 - DNA, 122 bp, Homo sapiens
cagcgccaccgacccttaagcagcgtcaaggaaggagtcccgatcaaggacagggatctgcggccatggccgaggccgcggagccggagggggttgccccgggtccccaggggccgccggag

SEQ ID NO: 216461 - DNA, 122 bp, Homo sapiens
ccctagggttagcccttaacaagttttctgacgatccctggggctaaatgagtgccccggcgccacctatggggcttgcagcacactgcaacaccgggaatgaacctcggacctctctcact

SEQ ID NO: 216462 - DNA, 122 bp, Homo sapiens
gctttctgacctaatgtgtgatcaatgttgttaactataccatacgtatttaagaacacacgtattcttgtaagaactggaagcactattctgtgtagatttgttaggtcaaattttgttgt

SEQ ID NO: 216463 - DNA, 122 bp, Homo sapiens
ctgaatttggaatcttgcgggcctcccccttctaaatcgccgcctcttccttagttcttgcggccccataactttttcttggtgttctatggctttatgaatggaggagccaactcacagac

SEQ ID NO: 216464 - DNA, 122 bp, Homo sapiens
ccacccggtgattttgctcctaatattcacggaagaagagaatgctattactcccaacatcgcaggaagtgtacacaccagtgtgagacggtccttaaaaatattccaaggcggaggaggtg

SEQ ID NO: 216465 - DNA, 122 bp, Homo sapiens
tctaggaggacttgggtcttgtgagagtcgccctttgctcctggagtcgtctcacaaggccgttcactccctgctttcttcaaaaaaagaacctgcaggcgacacaccaaggactccacgag

SEQ ID NO: 216466 - DNA, 122 bp, Homo sapiens
tgggtttctccagccccgtcactcgaacccacgggctcatcaccgcacggtgcggccagacgccctttctcctacgttgggagcgaatctcctcggctcacacaacccagccaccggctccc

SEQ ID NO: 216467 - DNA, 122 bp, Homo sapiens
ccaccagctacagtcggagatttggagcgcttgtgtctgaggctcaatcccgtcaggtgccgcgcaactcagcggcgcattctctttggacccgaggcaccaccatactttccattgcttac

SEQ ID NO: 216468 - DNA, 122 bp, Homo sapiens
gagtggtcagggctttgaactaagagccacgggagggaccctggccttttctccctcaaacgcatctcgcagcccgagggccgcgccccggccccgtgaacccctgtagcctccaggagtgg

SEQ ID NO: 216469 - DNA, 122 bp, Homo sapiens
gtaggcgtgcggcggaggcttaacgtggaagacatgggagctgtccatggtaccgtaaggcggactgggcagcccaggcgactggtaggagtaggggtgtacagggaaggaagcgctggccg

SEQ ID NO: 216470 - DNA, 122 bp, Homo sapiens
gctcttccaactcccagctaccctgtggaacacccctgttggagccgatgtcttttctggcgtagccagatcccagaaagcaacggcttcctctgcgaacaaatatggtctcttctcagaaa

SEQ ID NO: 216471 - DNA, 122 bp, Homo sapiens
caagtccgttctctaaagccagcggatctccatgtcctcgcggtgcttgcccctggcactcgctgtagtgccaggcactcgatgtagtagtccgtccttcagcatcgaaggtcttttcatca

SEQ ID NO: 216472 - DNA, 122 bp, Homo sapiens
gcagggccggacgctctatgacgtcatcttgtacgggtgagcgcgtgctgggagggcgctcgggggcgggcacccaggggagtggccagggaccggcacccagggacagggcgggcgcccgg

SEQ ID NO: 216473 - DNA, 122 bp, Homo sapiens
atgagggtggcccggggcaccggaggacctgggcagggctggcgtgtgggccgagcagcccggcaagttaatcagggcttcacacccagactccggggccgccggcgagatgtacaggccct

SEQ ID NO: 216474 - DNA, 122 bp, Homo sapiens
ctggcttctccacgggccgccccggttgcagccccccgcccggagccctgcggtcagccgcgcctccccagcggcctttcctgcccacaccccgggcaccgcccgtccagttccgcagtctc

SEQ ID NO: 216475 - DNA, 122 bp, Homo sapiens
agggagccaggcaggggcggggtgggatgggatgtggacagcgcttttgcggggggaaagcgtttttgctgctggaattgagcagtaggaatgtgtcagtcacatccccaccttcccaattc

SEQ ID NO: 216476 - DNA, 122 bp, Homo sapiens
gtccggctctctgagcagagggtagcgtgtgggggcgggataccgacgcggctcggctgccgattggtcagaagaggatagaaaggggcgggaagccggcgcggctcgactcccgattggcc

SEQ ID NO: 216477 - DNA, 122 bp, Homo sapiens
catgaagcaggccaggtaagaagctggagggcctggaggggtcgcgtgagctggagagcacgtgtccaccctgaagtgggcagtgatacacaaatcccgacaattattaccgggggcaagta

SEQ ID NO: 216478 - DNA, 122 bp, Homo sapiens
gtatggaaactgaggctccaagtgggagtggcttgccctcaaggtcccattggtgagagacgctgtggaagggctgccctggcctgggcacacagtaggcgctttgatgcgggctggagaag

SEQ ID NO: 216479 - DNA, 122 bp, Homo sapiens
ctggccacgtgactctccccatagcagtcacaaaactgtggggctgactttgttttcctgcgtgttgtctattttgacttactcacagctgttcgtggcacatgcagacggtcggagaagag

SEQ ID NO: 216480 - DNA, 122 bp, Homo sapiens
tacccttcatcaaaccatgccaggggccctcactccctttggtcttttcaattacataagcgtatgtaattcaaattcaaattccctttgttttaactaatttgagttgcattttctgttat

SEQ ID NO: 216481 - DNA, 122 bp, Homo sapiens
gaacttcggcatccaatggaagtctccgaaaaaaaaaaaaaaaaacaagggctcaaggtacgcggcggaaggttgtcgccactccagcaaatccctagtgtttgtttaaagtagaaagtcgt

SEQ ID NO: 216482 - DNA, 122 bp, Homo sapiens
gggcgctttcctcgcgccgtccggggctagctaggcgcgggtagacgccgccacctgctgcgctggctgcgctctgccctctgcgggcccggcactcggcctctagactctgtggcgggtgg

SEQ ID NO: 216483 - DNA, 122 bp, Homo sapiens
gttactgtctttgtccgccatgttagattcaccccacagagatagcggcagagctggcagcggacggtctttgcattgccgcctccccagggggcgggaagctggtaaggaagcagcctggg

SEQ ID NO: 216484 - DNA, 122 bp, Homo sapiens
aggagaggcgcagcaggttccccatcccccccggcaaagcgcattcacagcccgcctctccgtgggctgaatgaaggaggaagacagctgttttctgatcacctacgtgtgccagacactgg

SEQ ID NO: 216485 - DNA, 122 bp, Homo sapiens
gtatagtcctgcttaccttgaaatagatgggttagggagaaggaacaccagggagacgttcgaattatttcacctaaaaatgtagagaagttttgtgaaacagtgcttaattaataaaaagg

SEQ ID NO: 216486 - DNA, 122 bp, Homo sapiens
gattttatttttaaatgtggacaggcaagcagaggtggttggcaaaggcaaggtggctgacgatccggaagctgtacaggagagataagggcactggctgccagagtgccctatcgaagcat

SEQ ID NO: 216487 - DNA, 122 bp, Homo sapiens
ggccccggggggactaccctgcctgccgtgtgcattgcaggagtgtgacgtcatgacctacgtgagggagacctgcgggtgctgcggtgaggcactgcccacggcagggtcggggcccatgc

SEQ ID NO: 216488 - DNA, 122 bp, Homo sapiens
cgtgacaccaggacacagatggccacaaggaagcagaggatccgcccgacctggaggccgcgcagctcccaaacaggcagaacctgccgctgggggactgtccctgctctggcagccgcatg

SEQ ID NO: 216489 - DNA, 122 bp, Homo sapiens
aaacagccttagaatgctttttttgctgtgggatttcccctaaagggcttggtttctaggcgttagagggtggaaaaaccaactgggtttccgagcccctacctctcctggaagcagtgggc

SEQ ID NO: 216490 - DNA, 122 bp, Homo sapiens
cagccagacagctggacttgcagacacagcagcctgatttcaggggccaaagaatgtgtccgagacccagaaacgaagccagcaaatgtaggtcgggaggagagagagggagagtgagcccg

SEQ ID NO: 216491 - DNA, 122 bp, Homo sapiens
ctgcgcgttcacctccggtcccgccccctcacggggcgggttttcggccccctattgcatcgggacatcccggagttttagaactcgcggaggcccaagtatctcgaaacgggggcagattc

SEQ ID NO: 216492 - DNA, 122 bp, Homo sapiens
agtagtttttttcccggtacatgcgtgggtgggtagtgaggagaagggagcagaggtgcgcgccaggagccaggctggttctctgcagagaacaacctccagatcctcccagggaagcctga

SEQ ID NO: 216493 - DNA, 122 bp, Homo sapiens
aaccttttcctgttgtatgtgttataaacattttttgcacacttgttgtttgttctaagccgttgtttatggggatattttgcccattcctgattggagaaatggggctttaggaagttatt

SEQ ID NO: 216494 - DNA, 122 bp, Homo sapiens
cccttctcaccgatgacgaggagcactgcgactgtctgcaccctggctgccccttctcaccgatgctgaggagcactgagactgactgcactgtggccgccccttctcaccaacgatgagga

SEQ ID NO: 216495 - DNA, 122 bp, Homo sapiens
ggaggtaagagggaaagcccagtccctgcctgagcctgtgaaccaagtgaagagggcagtcggaccgattcaacattgacctctgctcttagatcagggcgttctcgtatgaaatcccattt

SEQ ID NO: 216496 - DNA, 122 bp, Homo sapiens
tttacatgcatgaaccatcgcgcccagccctctctaaccatttttaaaacaactatcaatcgggctagtggagtgtagataaagtgcccaggatttctgagcctgagactggaagtccatga

SEQ ID NO: 216497 - DNA, 122 bp, Homo sapiens
cccagacggcagcctcccgcggacccagcccctaacacaggtgcagcttctggtgctgcgcgaggtgcgttttatagcggaagcctttgccgcagcccgcacacttgtgcggcttgttgccc

SEQ ID NO: 216498 - DNA, 122 bp, Homo sapiens
gctcccctgccaccgaggccaatttggggacaggttcccttgagaaagggagcagggccccgctcttagggagctgctttcaaaaatgtctccagaggaacctggaagccagagagaaagcc

SEQ ID NO: 216499 - DNA, 122 bp, Homo sapiens
gagccaagattagtccccgagtgcgcgccaggaggtaaccactgccggaggcggggccgccgctagccactcacagggcccaatgggaatcccgttagttcactggctaggagggcgggaaa

SEQ ID NO: 216500 - DNA, 122 bp, Homo sapiens
aggtgggggagttggaggggagcggggcggccgtccacaccccccgcgcccagggccttgcggtgcctggcactccctaggaaggatggtaagaacgcttttctgcttgcactggcgagcag

SEQ ID NO: 216501 - DNA, 122 bp, Homo sapiens
tgggactcggcggggatgccatcaggcccctactagagttggacactttacaccccgggtcgtattgaaggctcctcacacaccatcttgtaggaggaagggaacccttccaagacggccta

SEQ ID NO: 216502 - DNA, 122 bp, Homo sapiens
gtggggcgggatctgttcgagcctgggcggggcagcgaggggcccgaaagggtaaccaggcgggcagaccttcctgtcggatgcggacgcgggctccgggtctcagcgggcggcctccgagc

SEQ ID NO: 216503 - DNA, 122 bp, Homo sapiens
gatggcgcccgcccccagctgccagggccttggcaggcagggcacggcgggtgcccagagcgcgcgcaggctgcagagcacggcccgcatgctccgtgctgcttgcagggccatgttcgcag

SEQ ID NO: 216504 - DNA, 122 bp, Homo sapiens
agcgtgagccactgcacctgcccttgcatttctcctttaaatactgaagcctaggccgggcgtgatggctcaggcctgtaatcccagcaccatcagaggccgaggtgcatggatcgcctaag

SEQ ID NO: 216505 - DNA, 122 bp, Homo sapiens
ggagctaaggccactgcatttgatctctctgaatatcctttctacccaccaggctgcaatcggtagcagtcaccattgaacatccttgaagcaattcttccaaaattaccttgcatcaaaga

SEQ ID NO: 216506 - DNA, 122 bp, Homo sapiens
cgtgtccatcagtctatcagcctcagcccgggattccgccctagccacgtccctgctccccggccagttagacctggggcccttcaccttgaaagactcaaagaagccgccgcccccactgc

SEQ ID NO: 216507 - DNA, 122 bp, Homo sapiens
acagcctgccgcccagcatcggttctcccacccatctgcctgtccccacccgctatgagacgccctgggtctgcttccctgggaccagccctcagcgttgccttaagtgattctggtgccag

SEQ ID NO: 216508 - DNA, 122 bp, Homo sapiens
ctcccctggaagagcccacagccttctatgatctcccccccgggctcgccctgccttccacggccatggtcacgttgggtatgcagtacttttcaaggataaatttttgtttatgtttttta

SEQ ID NO: 216509 - DNA, 122 bp, Homo sapiens
aaaatatacagatcgtgtgacacgtcttctgggaatgaaagtctgctaaactcgccgtcacgagtagatgaacacatttaaagtttgtagttaagaggaaaacaacgccaacgacacaaatg

SEQ ID NO: 216510 - DNA, 122 bp, Homo sapiens
ccctccctccgtctctcgccctcgccctgcctgcctgcctctctccgtctccgccgccgccgccgctgcctctgcgagctcgccttaccttcgccgctcaccatccggaaccccagggggga

SEQ ID NO: 216511 - DNA, 122 bp, Homo sapiens
tcaagttctacccctgaaagtgagacagcctgagccaccagcaccgcgcccagctcacatcgtggcttctaaccgcgtcaccatcctcctagctctgcggatgcctgcgatgtccgaactgc

SEQ ID NO: 216512 - DNA, 122 bp, Homo sapiens
ccctgcttattacagaaagaccagcttgatagggaaacccacagacctggattgtggcaccggcaaacctcctctctggcaaggagttcagagcggcttttcacagggtccctgggaggcag

SEQ ID NO: 216513 - DNA, 122 bp, Homo sapiens
taaaaatttgctatttaatttggagctaggaaaaaaaattaagtatatttagaatcattccggatgactaccattttataccaaatgttgccatgagatttcagtgcaagtacttgaatttg

SEQ ID NO: 216514 - DNA, 122 bp, Homo sapiens
acggccatttgtgtgggcacatggctaatggcgccctcttattaatgcgttaattaatatcggggcgacggactgcggaacagcagtgttttcggacaccccgcacgtgtttcggcggggtt

SEQ ID NO: 216515 - DNA, 122 bp, Homo sapiens
cgcctagtacgtatgaggaagaacggggtgggtggctgcctgagtctggaggcgacgcctcggttgtgcagtctgaacctgcccttctcagctgagggtgctgacagcaaggggtgggaggc

SEQ ID NO: 216516 - DNA, 122 bp, Homo sapiens
gtcaactgaagaatgagaaagttcatgaatttggaaaggagagctttatttttcataaagcgtggccactggcagggtagccattgctacagtctggaaagtgtagcctccagccagaaacc

SEQ ID NO: 216517 - DNA, 122 bp, Homo sapiens
acagcctctggctcagatttggggttctgtaaaaacagcctgttgttatagcagatcctccgtgggctctggtgtctccccagacatccccatcccaactcttccacatgttgcccccagat

SEQ ID NO: 216518 - DNA, 122 bp, Homo sapiens
gaaggtgaaaagtttatgcattccataaatgttagattatctcttctctaccctctttagcgatgtagtgaagtttaattcaattattaaatcctagaaaagaatgaacattctttatcttt

SEQ ID NO: 216519 - DNA, 122 bp, Homo sapiens
tgcagtgtgtggatgtgaggagtggataggccacggcgggggtactaggccccgggggaacgcctgtaccttcccacccaggccctggtgggagcccggccaacccctttaaataatttcag

SEQ ID NO: 216520 - DNA, 122 bp, Homo sapiens
aggcccgttttagagagaggtgcagggagaaaacaacccagaacattacacctaactctgcggcgactggttggaaagaactgggaatgctcaccctggttgaggaaggccagcgaacgcag

SEQ ID NO: 216521 - DNA, 122 bp, Homo sapiens
cggactgtaacctggacccgggcagggcggggtccacacccttggactgtaacctggacccgggcagggcggggtccgcacccgcggactgtaacctggacccgggcagggcggggtccgca

SEQ ID NO: 216522 - DNA, 122 bp, Homo sapiens
tggctttccgcgctggcacaggggtgggacaagccaagtttccaggagactcgcccagcgcgggcccggccctcgcagcgtgggggtggccgggcgtccccgcggcgctcctcgtggggcgg

SEQ ID NO: 216523 - DNA, 122 bp, Homo sapiens
tggcgcaggtagacccgagccggcctggggtctgcagcggggcctgctagccgaagtctccgccaggatgggccgccagagcccaatcacacatgagaaacgcgacagatgctgggacgctg

SEQ ID NO: 216524 - DNA, 122 bp, Homo sapiens
acagaggagctcttcttgctggaggactgcgacgagtgggaggaatgggacaggctggcccgggactggccggcattgtggtcaaactgcattaagcagaagatcaggtccgtcggcacgag

SEQ ID NO: 216525 - DNA, 122 bp, Homo sapiens
gggtcagatgggggctcccctcccgaggcccccttcccctgagcctctccctcctgaccccgaccctcgaacccaggcccagccccggcccacctcccgcgcctcccaagcggcgccacgta

SEQ ID NO: 216526 - DNA, 122 bp, Homo sapiens
agttggtgattggatcaaaacccacagtgttttataattaaatgagagcattatatccaccggtgcagtaggagaaatgcttgtattcctaaagcaattcagttcagtttttaaaagctcta

SEQ ID NO: 216527 - DNA, 122 bp, Homo sapiens
cccctcttctttcttaaaatgttggcctccccaggatcatccctgcctttcccattcagacgatgagccgcgtaaagaatgtttgtcaaaccttggtgaacagctgtagcattcaaacatga

SEQ ID NO: 216528 - DNA, 122 bp, Homo sapiens
taagggaattatgtcagtgttaaatggatgagtaccagttatctaaaaattaaaggatagcgagtctcctgacctagtagagacataggttctaaaatttatctcaccaggtgcagtggctc

SEQ ID NO: 216529 - DNA, 122 bp, Homo sapiens
cggggacgctcctgggcatccatctgcaggttgacctcatccatccagagcatcagttcccggacagccttgaagaagcggaacttgtctgtggtgtccagcagcagctgccggcgggcggc

SEQ ID NO: 216530 - DNA, 122 bp, Homo sapiens
gggagttgtatctgctaactattgcattagtaatgctgcacaataaatctccccaaaagtcggtagcttaaacaacagtcttgttttctcacacacagatctgtgagtctgtgagcatagct

SEQ ID NO: 216531 - DNA, 122 bp, Homo sapiens
gtcagcgggctgttgactccccgcctgggtgaaaccggagcttccgagtcacgtggcgcgcgaagacaaacctggctgctcagggtttcccggagctttctcccagcttcccggcgattcat

SEQ ID NO: 216532 - DNA, 122 bp, Homo sapiens
cagcgagtggagtcactcttaactacatttcccaggattccaagggagccgcgcgctctgcgctcatcttcctaccagaaatcggcaagtcactgaccctcgtcccgcccccgccattcccc

SEQ ID NO: 216533 - DNA, 122 bp, Homo sapiens
aaggcactaggagaatgggtggggggtaggaggggtctactctttgaatttggctctgcacggtccagacagagtgaaccaccaatgctatgtgttgtcctgtgacccaaaaaagttaaaaa

SEQ ID NO: 216534 - DNA, 122 bp, Homo sapiens
tccaccaccacccctctgcttctcaattgaatttaacttcagatcagatctgaggactttcgccagccaaccttggactcagacagaagacaaagaaggattaaaaaaggaaagaaaaaaaa

SEQ ID NO: 216535 - DNA, 122 bp, Homo sapiens
ctgggttccacggttctcttctgtgacccgtggcttctaatagagctataacactcaccgcgtggcccaagattccatttattggaatccatgaggccaagaaccccaggtcagagaacacg

SEQ ID NO: 216536 - DNA, 122 bp, Homo sapiens
cctctgccccgccccgccacgcgcgtccgccgccggtggcccgggcccgggctgcacccccgcatccccaagccagcggcaggaagtctcaggaactgccccagggccgaaagggcgccgct

SEQ ID NO: 216537 - DNA, 122 bp, Homo sapiens
tgggtctgtccgttatccaatcccgttaactgctgtgctccaacctctgttcttattggtcgcctcccttctctgtcccctgcacgtggtcctgatcgacggctttgccggcccgtgacggc

SEQ ID NO: 216538 - DNA, 122 bp, Homo sapiens
aggctccatgacttattcttctattgggaagaaggaaaacagacaataatatcaataatacgttgtccccaagtcaggcctccaaaacactgaattagagagaaaggacaagggaaaaatga

SEQ ID NO: 216539 - DNA, 122 bp, Homo sapiens
ccaccgccggggagctagcactctgccccccacccctcactccagcgccgctgcttccgccgccgtaacgagcctcccgtctattggctggcgcaggccccgccccctgccgagtcagccag

SEQ ID NO: 216540 - DNA, 122 bp, Homo sapiens
tcaccagcacctacactgaatatgcacagagtggacagagcttgtctttgctctcacgtacgctgtcttccaagcctagtacagtagaaagaacacaggcttgggggtcagggaggcctgta

SEQ ID NO: 216541 - DNA, 122 bp, Homo sapiens
agtgtctttgtgctgaagcccaatgtgagcattttcttcccagtagcaaggatttgaacacgttatattgatctaaaaggtggagttgctttggaaccttttaattcgaggtttccactgga

SEQ ID NO: 216542 - DNA, 122 bp, Homo sapiens
agccacagatgcacacctaagtgagtgctattggacttggctgagaggcgaacgctgctgcgtgccctggaagtccccaggacttttacctttatgtcacctaggtggacacagtttgctcc

SEQ ID NO: 216543 - DNA, 122 bp, Homo sapiens
ggagggcgggtcggggagaggccccctttcctgctctcggctcacccctgtccccgagggcgctgggctttgttccctctgcagcccgcagcacccggtgtggcaacctcaaggtcatcatt

SEQ ID NO: 216544 - DNA, 122 bp, Homo sapiens
ctcctgctgctcttgggggccctggccctgaccgagacctgggcgggtgagtgcgggatccggagggaaatggcctctgcggggaggaggtaggggcccgcgcactggggcgcaggacccgg

SEQ ID NO: 216545 - DNA, 122 bp, Homo sapiens
gagactctgggctgctaagaaggcaaagcctgaggtctgtgcctgaccaggagatgctcacgtctctgagctgaaaacagtgactgaacaaatgactcattagagggatcaatgaacaaact

SEQ ID NO: 216546 - DNA, 122 bp, Homo sapiens
cggcgattgatgcacatttcaggatgaagatgtagataggttgaacttagtacctgatggcgagaacatattgaatggaaggacaccagcttttgtgtcagctgaaaggttccatggaagct

SEQ ID NO: 216547 - DNA, 122 bp, Homo sapiens
tgcgaggactacgactgacttccaaggaggccatggcggaactgagccagatgccggaagcggaattacgtaatgtggcgcggaaaaggacgggtcggaccgtaccaaattcggaagcgggg

SEQ ID NO: 216548 - DNA, 122 bp, Homo sapiens
tgggtggctccgggagtggcaagggcgtcccgatctgccaccagacccagcagaagcaggcgcctacctggccgtccaaatagatcccccagggtaccacggaggcgaaggagttggaggtg

SEQ ID NO: 216549 - DNA, 122 bp, Homo sapiens
agtgaaaatgtgttttaaacagggaaacaaaaggaacttggaaggatttagcaaatattgcgatcttggaggtgagtatgtatggtaggattgggagatgtttaagagcattagcttcataa

SEQ ID NO: 216550 - DNA, 122 bp, Homo sapiens
cgcacgggaaagctaaacagcttgtccaaggtcacacagctagtaagccacgaggcagggcgtgtagcccttgtcttccggcccctctctgtctaaagcgcctggtggtcaccttggagagt

SEQ ID NO: 216551 - DNA, 122 bp, Homo sapiens
aagcgggacatcctgctcggccggctccggagctcggaggaccagacctggaagcggatccggccccggcccactaagaccagcttcgtgggctcctactacctgtgcaaaggtgggtgggc

SEQ ID NO: 216552 - DNA, 122 bp, Homo sapiens
cagggctggacttgaaacttagactcctcacacttgagccagtacattttcatgaccactcgccatcatcacacagcctctctggatctcagtcttttcatctaacaatcgctgtttggcct

SEQ ID NO: 216553 - DNA, 122 bp, Homo sapiens
ctgggtgacagagcgaaactctgtctcaaaaaaaaaaaaaaaaagaaacttgcccaaggtcgcccatccaggaagcagctgaggcagggctgaaacccaggtctggctctaaaatccattaa

SEQ ID NO: 216554 - DNA, 122 bp, Homo sapiens
ggggaaaagggagagagagacatctgggtgcggacggcagctccagcgtctgaagccttccgttgtgtgctgcaatgcggcggctgcacgcccccaaccccccgagttccaaaagagcgcct

SEQ ID NO: 216555 - DNA, 122 bp, Homo sapiens
ctgggagcagatactagctctgaaacttttcccctggctggcttggctgcctctccctgccgggcaggggccaggaagcctgggtgtcaggcagacccgagccaggctctgcacagcagggc

SEQ ID NO: 216556 - DNA, 122 bp, Homo sapiens
ggaatactgtcaataaacagcggtaatggagaaactacagcagggcgaagggaatggacccgagacgttggtagctacttgattttcaagtccgagagggcctcactgataagaacactgga

SEQ ID NO: 216557 - DNA, 122 bp, Homo sapiens
gggagctacaagtacgggctcttcgtgaaatgaaaagaaataagatcatcagggggcgaccgttatccaaagtcaccagagttagacattgaattctcagaatcgttaggtgggggaggagt

SEQ ID NO: 216558 - DNA, 122 bp, Homo sapiens
gcagtttccaggctcccctcggcggggctgaatgatcaaaactggtggtgagaatttttccgggccgtttctaggcagccctccccctccaccagctcggacccccccctccctcctttctc

SEQ ID NO: 216559 - DNA, 122 bp, Homo sapiens
ggaagtaaaaggggggaggtttgttctccctgcgtcaggatgcccaggctgccgcccagccgggaggaagcgtctctctctggccaaacctggaggccacgcaccttcctggcgagctcctt

SEQ ID NO: 216560 - DNA, 122 bp, Homo sapiens
aagtggtaggccaacttctctgtttgttgtcccctgagtgggaaagacacattctgtcttcgagatgagatttaattcaatgtaagacacacagcaaaacaaaggtaaggtgagtgaaaatg

SEQ ID NO: 216561 - DNA, 122 bp, Homo sapiens
tggcgagggtacaggacccatcacaccaaggacctgagtcactcagctctgcgatggcatcgtagccttagcgtgagaccccagagaaaaccccagctttgcacctttccctttaaatgcca

SEQ ID NO: 216562 - DNA, 122 bp, Homo sapiens
tttactaaaaatacaaaaattagccaggagtcgtggtgggtgcctgtcatccctgctattcgggaggttgagacaggagaatcacttgagcccgggaggcagaggttgcaatgagccgagag

SEQ ID NO: 216563 - DNA, 122 bp, Homo sapiens
cgctgggaggggactggtctgggaaggccccagacagcactgaggtgaggtccacagtggcggcaggacacccaggaggtctccggctgccacctgccaggaggaaagcctgtgcccgtgga

SEQ ID NO: 216564 - DNA, 122 bp, Homo sapiens
tgacctcgtgatccaccctcctcggcctcccaaagtgctgggattacaggctggagccaccgtgcctggcctgaacagagaacacttctacactgctgataggaatgtaaactagtacaacc

SEQ ID NO: 216565 - DNA, 122 bp, Homo sapiens
ctcgacttctcacccggcgttagctgccttcccgcggggcagggctcaggacctgcagcccgccgtgcctgagcctcccacccactccatgggctcctgtgcggcccaagcctccccaacga

SEQ ID NO: 216566 - DNA, 122 bp, Homo sapiens
gagggaaggcggctgctgggcacgcagccggaggcgattgagggcgaataattcccagcccggctccccgggagacgggctgcggggcgggcacctggctgggtggggagaggggcggtacg

SEQ ID NO: 216567 - DNA, 122 bp, Homo sapiens
atgatatctgtgagagagaaatgctgctagagaccccagcttctgttcacttcccatctccgtgcccttggatgccagcacagtgtcttgagcatgggaaattcttagtgaatatttttggg

SEQ ID NO: 216568 - DNA, 122 bp, Homo sapiens
tcagggacataggtagaagctggttggggagtgtgcgtgccagcctgacgcgatatagtgcgcacatgcgtgatgacgtagagggcgttgattgggaccgagtacagggcccgcgcatgcgt

SEQ ID NO: 216569 - DNA, 122 bp, Homo sapiens
cctggccatgaactttgcgtccgggccaatgctgcagtggccgggcggtggtgagccttccgttccccgcctgtccctcccggcccctcccctcggtctccgcagcttctcggctcagcccc

SEQ ID NO: 216570 - DNA, 122 bp, Homo sapiens
gaaccccagcctcggggtccgtggccggtgaggagctgggccgcatggcacggtgaatggcggccactgagtattcttgccggagctccagctcctgtcagagccgcggccttagattctca

SEQ ID NO: 216571 - DNA, 122 bp, Homo sapiens
tacagcaggctattggtctaggttgaagcttgacatttagaaaatacctgggctgctttccgtctactgctgggtgacagaatcaggcaggggagggcacagcctgttgttgctgcccaccc

SEQ ID NO: 216572 - DNA, 122 bp, Homo sapiens
aataatatcgataacgcatcctgaccatgtgtctctgtagccctgtcacctcctcaccaccgtcccataagacgggaccctgcgaggcagacgcagcctgcacacagaggagggaggggagg

SEQ ID NO: 216573 - DNA, 122 bp, Homo sapiens
tcccagcagaccttgcattagcaccaggtaaacctaggggttgtttgtacctgagcatgacgtagcctgccctgacaatttcatgctcctgtcaagaagcgtgagctcctgcatccacacac

SEQ ID NO: 216574 - DNA, 122 bp, Homo sapiens
cttctccccaggggtgcccggtagtttcagggtctggggcccttgtttcccaaacctgcccgaacagaaccacctaggacatctgacattcttgcagaaatatatgggagttcagaagagga

SEQ ID NO: 216575 - DNA, 122 bp, Homo sapiens
tgcatccagcgcggccactgcaaatggcaggtactcctctgcccggctcgggtaggcaggcgccaggttaagccagcctgtgtgccagcggccacaacaactatggtagctacaggggtggt

SEQ ID NO: 216576 - DNA, 122 bp, Homo sapiens
atacagagcatgaaatttttactccagaaatagtgcacctctctcccccttggggaaaagcgttttccctacttccgtaggagttaactcgccaaggcttttaggagacgccgcacagctgt

SEQ ID NO: 216577 - DNA, 122 bp, Homo sapiens
acacaatatgttgagaagattgttatcaaaatgcaatgtatgggtggcccctttctctttcggttctaggcgcttcaggagccgcggcttaaggtgcagacatggccaagtctaagacccat

SEQ ID NO: 216578 - DNA, 122 bp, Homo sapiens
ttccgcgtgtgggagcaggccacgcccctggtcttccaggaggtgccctatgaggacatccggctgcggcgacagaaggaggccgacatcatggtactctttgcctctggcttccacggcga

SEQ ID NO: 216579 - DNA, 122 bp, Homo sapiens
cataaaatccaaagcaaggtttgcaagaaaaacacccccgaatgatgcacgaaatccaaccgtcttccagtgctgaatgtgagtaagatcatagtgaactgtgcttcaatggatggacgagc

SEQ ID NO: 216580 - DNA, 122 bp, Homo sapiens
gcggggtcgcagggctgcgagcccggctgtagcaaagctttctcggccgcgtcctccctccggattcggtaggccaggctcgggcgcgcccttcccacaccaacaaaccatctttcccgact

SEQ ID NO: 216581 - DNA, 122 bp, Homo sapiens
ggagagggcgtggtttgcaggcaccagtgctggttccgtgtctgtcggggaggggatggacgtttgtgttgctgtcagggaccttgccgacccagcccccgccccgccttcaagtttgtgcc

SEQ ID NO: 216582 - DNA, 122 bp, Homo sapiens
aacagctgcactattcttttagaccacacgagggcaatggtgtcacgtgtaaaagatgctcgcctgctgctttctgaacagatggcacatttgttagacttcattggatgtatttttccttt

SEQ ID NO: 216583 - DNA, 122 bp, Homo sapiens
tccatattatttttctcttcctcatacatttatttatttagagacggagtctccctctgtcgcctaggttggagtgcagtggcgcgatctcggctcactgcagcctcagcctcctgagtacc

SEQ ID NO: 216584 - DNA, 122 bp, Homo sapiens
ccacccagcagttggcgtggccggataccactcaccctacctgcatcctggggcaacgggcgacccgccacggcccctaccccgcagcttcagccccgtgctgggcccccgcccccgggagc

SEQ ID NO: 216585 - DNA, 122 bp, Homo sapiens
acagcccagggccgctgagccggggccgcaggaaaggctggcgctggcaggcgcttccgtcggcagcactgtgtttgtgtttccacgtggaaacagcagcgcacgtgtacaactgtgcatac

SEQ ID NO: 216586 - DNA, 122 bp, Homo sapiens
gtccccctgagcctccaatatgccttatgcagttcttttggggttcctttcgcattttaccgtgtactttcgcttttgatgcgtctagtttctgctactggactctcctagaatcgaagttc

SEQ ID NO: 216587 - DNA, 122 bp, Homo sapiens
gcttctgaacatttggaggcttttccggtcgcctcgggtagggcgggggagggctgtactcggtgctgccaagaattctccttcgtgcacctaatcgggttctgtagattactttgtggaat

SEQ ID NO: 216588 - DNA, 122 bp, Homo sapiens
atatgccggagctttgtcttgtccttcaaagttcggctgcccttgaagtgatttgtcaggcggcccacgggtgacagggaggatgtgcagcggggagcgggggcgggacatgccggggggag

SEQ ID NO: 216589 - DNA, 122 bp, Homo sapiens
gcctccagaaaggagagcaggagtgactgccacattgtcatggcgggagcgcgtgggggccggtgtctgtgaagccggggaagagtggggtcctgtggaatatgagcagggcaggaagcccc

SEQ ID NO: 216590 - DNA, 122 bp, Homo sapiens
ttggtccaagaaggctctggtgtgtgccaggcactcactgatcatctggtcttacggagacgcctctaagccatttgatcccgttccgggaacgaaaatggcagcggtgacggttgctcctt

SEQ ID NO: 216591 - DNA, 122 bp, Homo sapiens
cacagcaaagtggcaaaatcagcattcaaaccttgtctatctgactgaagccttcactctcgaccactgtgtgatgctgcctctcaacaaattaatgtccagcagtgaatgtgcactggaac

SEQ ID NO: 216592 - DNA, 122 bp, Homo sapiens
tattttactactgcgctgtacctagatgatgatgatacgtgagttaggctaacatttcaacgtaattttggatagagaccttgtctaaagtttacttcatattcaaacctgtccaaatgaga

SEQ ID NO: 216593 - DNA, 122 bp, Homo sapiens
ctaccggcttatgactggacagcacagacgccatggcggcgagacgcgctactgcgcttgcgcggccagcccagcgcccaggaagcctcttgagccccgccttgctgcttgcttcgcccgct

SEQ ID NO: 216594 - DNA, 122 bp, Homo sapiens
cttttcaaggatgcccaaagcgtgtgactcttacagagacccaatggggaaaggcagtgtcgggactaagcaatgaatggctcttcaatggccagctgcccgcccaataggataaaagaaaa

SEQ ID NO: 216595 - DNA, 122 bp, Homo sapiens
tggcattcatcattactctcagatgtccctaccaacacaggcttcatcagaggcagggcacgagagccgaggcttctccgcagttctactctaacatagtcgcagcttaggtcacgcatgca

SEQ ID NO: 216596 - DNA, 122 bp, Homo sapiens
tgatgtaatagtaggcggcgatcatgcctaggttcagaggcgccacgtccatctcgtcctcgatgctgatgcacttggactgctccaggtcactcagggtctgctccaccagctctgacaag

SEQ ID NO: 216597 - DNA, 122 bp, Homo sapiens
aaaattcactctctcacagctctggagaccaggaggccaacactgaggaaccagcagggccgtgatctctctgcaggctcaggcaagggtccttccttccctcttcatggttccggtggctg

SEQ ID NO: 216598 - DNA, 122 bp, Homo sapiens
attaaaaacgaggcacgttgcagcttaactattcaggcaggtagggcaggtgcctcctgccgagactcgactcccaccccagctttcagtgggtaattagaccagggaagtagctttacttg

SEQ ID NO: 216599 - DNA, 122 bp, Homo sapiens
gggggttctcctggcttgggccatccaggcttggctaggattgccggcctggggttgaggcgctcgcagtggtctcttccgggccggggtggatccgggcctctccagcgagtgggcggcgt

SEQ ID NO: 216600 - DNA, 122 bp, Homo sapiens
gcctacaagcaacacacctaaacggagtgacccagaagggtttagtggcacgtccaggttcgtgtgtgaagaaatagatgggtccccttcagagtttgaagcatgacccatgtgaccagata

SEQ ID NO: 216601 - DNA, 122 bp, Homo sapiens
tgagcagctggtttatacagcattccctgaaacagcctagtatgtgtccatttatgtgcccggcttattatgtgtccacttatgtgtccaattagtaatcactttttctttcggtcaaggta

SEQ ID NO: 216602 - DNA, 122 bp, Homo sapiens
ccaggaaataaggcagggcaggcgctgatgtggcaagctggtaataaattttcatattcccgtgcaaagtcgtcacagcctgctaaacattcaactgctggctcattcatcagtgatccata

SEQ ID NO: 216603 - DNA, 122 bp, Homo sapiens
cttcgccacatgctgcttcgccacgaaggagttcccgtgccgtgggagcgggttcaggaccgctggtcggacctgagtgtcccagctgtgtgtcagggctaggagggctggggggagggggg

SEQ ID NO: 216604 - DNA, 122 bp, Homo sapiens
tttcaggaaatcccaaggaaagcaggggtgttggtgggttagcctgaaaatctagagtgccgtggatcagttccattgtcgtagggtcagttactgagggaatcaggaatctatggcctgca

SEQ ID NO: 216605 - DNA, 122 bp, Homo sapiens
gtgtgacaggatccattataaatccatcacacaggagtagaaagtgttctgagtaccttgcgtagtacaggtcacccgcataattcttgcgtgtgaagctccatttttatggcttttggtgg

SEQ ID NO: 216606 - DNA, 122 bp, Homo sapiens
ggccgaaggatgcaaaagtggttttctgctttcgatgatgcaatcattcagcgacagtggcgggcaaacccctcccggggcgggggaggtgtgagcttcacgaaggaggttgacaccaacgt

SEQ ID NO: 216607 - DNA, 122 bp, Homo sapiens
ttttacagattgtagattagtaaagaacccaaagagagcctttcattgagagcagaaaggcgaatggaattcgctgttttctgtctaaggaggaggaggatgggcaggcaggtcagctgccc

SEQ ID NO: 216608 - DNA, 122 bp, Homo sapiens
atcccagcgcctaacggcagctggacttcgctcccgggacctccaatgggctgccaccttcgcccgcagaccccagcccccgccacgcccacacgtcgcactaggttggcccgcgcctcact

SEQ ID NO: 216609 - DNA, 122 bp, Homo sapiens
gctttctgattggctgcggggcttctagccactctcctccccttggcttctggctttaatcgccttcggaaaaattagttccctggcggatgatttccagcctgacgtttaccagcatccct

SEQ ID NO: 216610 - DNA, 122 bp, Homo sapiens
ccagccattccggcaaaaccccagaaggaatccacaggaggtggggaccgggaaggcagccgggttgcgccagtgcctgcaagggaacctctggccccatttcctgggagcctgaccccgcc

SEQ ID NO: 216611 - DNA, 122 bp, Homo sapiens
gaaacatctgagtttctttaatgttagagaattggacttgatttctaagctcacaacccccgtattatttaaggactcatccagctctaaaattctgtgtttttaaatggttttattatgtt

SEQ ID NO: 216612 - DNA, 122 bp, Homo sapiens
aaaaggaaggcacgccagtggtctgcgagggggccagtggaaacatcacctccgccgacccggccgcggtcacagctctctggcttggctccagccaccagcagcacccctgcagcccggcg

SEQ ID NO: 216613 - DNA, 122 bp, Homo sapiens
tatcaaaagacgccatctgaaatccccgatgtagttattttgggttagctgcactagtgtcggttctccaacatccgccccagcactttcctgcccccgccctctgcatgcacccacctcag

SEQ ID NO: 216614 - DNA, 122 bp, Homo sapiens
cgattggggtggggcgcctgcgattaggttgggaagcctgcgtttagggtggggcacctgcgattaggttgggaagcctgcgattaggttgggaagcctgcgattagggtggcactttcgag

SEQ ID NO: 216615 - DNA, 122 bp, Homo sapiens
cagtgagctaggatcagtgagctatgattgtacccacacacttcagcctggctaacagagcgagatcctgtctcaaaaaaaaaaaaaaaaaaagacattagcttgtatgctttgagatgcaa

SEQ ID NO: 216616 - DNA, 122 bp, Homo sapiens
gtgaattcttccacaaacgtgcccggtgcggcctccgagccataagagccataaaaggggcgcatttggctggaaattcaccgtgacgggactcacagagtaaatgcgcgtgactctgggtt

SEQ ID NO: 216617 - DNA, 122 bp, Homo sapiens
ccaaggatgttcggttatctcgccttgagggttcgcgcgtcacgtgccccccccgtcccccgcttgtttttcagtttaaaagtggggcccgtgtctgcaggactctgtgagcacacagtaat

SEQ ID NO: 216618 - DNA, 122 bp, Homo sapiens
gcgttctaacgagatggggtgcagcgttctaaccagatggggtgcagcgttctaacgagacggggtgcagctttctaacgaaatggggtgcagcgttctaacgagacggggtgcagcgttct

SEQ ID NO: 216619 - DNA, 122 bp, Homo sapiens
cactcattgccagtgcggggaaccttgttagggcccggttcgacgtagctgcaggctgggcgccagaggcagggggcaggcagtccgagaggaccctctacctgcatacctgggggctgcag

SEQ ID NO: 216620 - DNA, 122 bp, Homo sapiens
cgccggcattggggtaccaggaggacgcgagctgactacctgactccgggcggcgcaggacgcccgccgcgcgaggggcgggggctaagcgtatcgaggggcggtgctcgagggcgcgggag

SEQ ID NO: 216621 - DNA, 122 bp, Homo sapiens
cggtgtccagtctgttggtgcttaccctgctgctgtacacggcgttgcggtgctcagcgccgtcctctgagggcgcatgtagtttggtaaagcccactctggtgtgctccagcgcggtgggg

SEQ ID NO: 216622 - DNA, 122 bp, Homo sapiens
gtgagagagacacagactgctgtggtatacaaaacacaccaagatgacatgaggtagaaacgagcatcagacaggagttccttctgtgtgctgggttctctaactgcccctcccaggatggg

SEQ ID NO: 216623 - DNA, 122 bp, Homo sapiens
taaccgcgcgtgcgcgtgcggtggcgggcgggaggcggtggcggcccgaggtgtgtgctacgcgctcctgctccgaggggctcaaccgcctccagggggagccgcacatggagcctgtgccg

SEQ ID NO: 216624 - DNA, 122 bp, Homo sapiens
aacgacgtgagtgcagatggagaagggaagagggccagggactaagcaggtgctggaggccgggagagaaaaggagacagaggaccctctgccgtcccgtcattctgcagtcctgcacagcg

SEQ ID NO: 216625 - DNA, 122 bp, Homo sapiens
tactggggctagggaaggtatccggtggctggaggcgcttcacactgggtcgggtgagagcgtgaagcgagccttttccctaacgtcacgggagcagctgggaagagaccgaagaacgaggg

SEQ ID NO: 216626 - DNA, 122 bp, Homo sapiens
agttgcctctcatgacacctagaatgaaatctgcaattttttattaaggactgcagggcccgacataatctggctcttgtcgctctggccctacctcctgctctgcctccttctttctagcc

SEQ ID NO: 216627 - DNA, 122 bp, Homo sapiens
actagtaactagggacgcttctggtctctaggcgaggagagggggagagcgcaatctttgcgcctgcgcacactcctgctcttacccgccggaaccctgggccacgcccggctcgcgtaatc

SEQ ID NO: 216628 - DNA, 122 bp, Homo sapiens
gagcagtggaggaagacacaagaagaggcagcagcccacgaagggcagcaggagggccaccgtgagggacggagcgctgtgactcatctctccaccgacgcccagttttcatctctgcgggc

SEQ ID NO: 216629 - DNA, 122 bp, Homo sapiens
gaccacctcttcctctgagactcaccagttctgcatctcttgctcctccttctgtttctccgaccacttccacctgtggctgtcacagaagggcggatgaaggaggggacactggagataga

SEQ ID NO: 216630 - DNA, 122 bp, Homo sapiens
tgtatgtcttggatgcacacgtgtcttcccttctctgctgggtcttatggaggagcggcacggattgggcatgcgtcgtgtgtgttgagcaggtactgctggatcgctttccaaagtggttg

SEQ ID NO: 216631 - DNA, 122 bp, Homo sapiens
ggctccagggggcgtggccgggctcatgggggcggggcctggacgcagtctttgctcagtcggcttcctgggttcctgcctccgccctccacccagctgggtccccgcctgggcagagccct

SEQ ID NO: 216632 - DNA, 122 bp, Homo sapiens
tgtacctggctgcggtgctggagtacctgaccgctgagatcctggagctggctggcaatgcggcccgcgacaacaagaagacccgtatcatcccgcgtcacctccaactggccatccgcaac

SEQ ID NO: 216633 - DNA, 122 bp, Homo sapiens
cattgataagagcggatcagatggcagttcgcatggactcggcgccctgcttcggcagcacgcaggctcgatctagcaaccaaacacagcgacaatgtgggcatcgcccgcgcccattgaaa

SEQ ID NO: 216634 - DNA, 122 bp, Homo sapiens
ggttccacggaggacacaggagagtctgcggccatgtgaagagtagacccacgtttctgtcgctccctcccgggggagctcagagctgcatcccatgagtccttcccactcccctctgtctc

SEQ ID NO: 216635 - DNA, 122 bp, Homo sapiens
tcattggctattgcaaagggcgaggcctactgattggctgcgcggggcggagccttcgggcgcgaaaaagggactgggctctctgcatgatatagggctctcaatcatgatttacgcttgcg

SEQ ID NO: 216636 - DNA, 122 bp, Homo sapiens
ttttgtcggtcgctctaatggggcggattcgcgaagactaggacgtcttgggcttctggccgcaagtcccgtctctggaataaccttttctagtcctggagaaaggagctctgaattgaagg

SEQ ID NO: 216637 - DNA, 122 bp, Homo sapiens
gagacggaaagaagctgcatcaagaagggtcccaggtggttcagtcaggagtctgaacaccgtttggcaaaaatttaagcagaggaagaacattttaaaattattacttagtgagagtgcac

SEQ ID NO: 216638 - DNA, 122 bp, Homo sapiens
gggagcaccgcgattgcaagatggggcgaggtgatcaaagatcccgcctattttcaaccccggaacctcctccgctcgctgctagccctcccgccctcctccagcgagggagcgccaggctg

SEQ ID NO: 216639 - DNA, 122 bp, Homo sapiens
cccgttgcatctcctttcctggtccactccccggcctactagagcctcagggcccctgtgcgggttcctggctcccttgccgacacctctacctgctctgcagcccggagctcctccacagc

SEQ ID NO: 216640 - DNA, 122 bp, Homo sapiens
aagagttgtccttcctctgtgtctccttatggtctccctttgtgcctgttgtgccctactcgcctcttcttttatgatcatcagtcatattgaattagggtctatcctaatgaccttatttt

SEQ ID NO: 216641 - DNA, 122 bp, Homo sapiens
cctggagaagaaagtttcccagatggctctagggtgaatcttgaatgttgtgatgcagctcgccaggcctacggggaggtaaaggacttgccaggctgaagtaacttcagaagcagaaaaac

SEQ ID NO: 216642 - DNA, 122 bp, Homo sapiens
acgccaaggttaggggaatggagccaggcaaacgaggggcggggctgtagatgacccggtcgggagagggccacggtttgttgggggagcggctcgagattgcgttctagagaggaaccaga

SEQ ID NO: 216643 - DNA, 122 bp, Homo sapiens
ttccaacatgccagagtctgctcatctcggagacctgctgcagacatgggtatggccctgcgtgagacttacaccgtctaccctggattttcaagggccagccagagctcaccagatgccac

SEQ ID NO: 216644 - DNA, 122 bp, Homo sapiens
ctcaccctcctcctccggcctctcctggtgtccggcctccgggtctctgattgtggtgggcgcaggcgccagcccatgttcggggctgactagcaagagccaggctggaggggctgacgctg

SEQ ID NO: 216645 - DNA, 122 bp, Homo sapiens
cctcggccctgctgagacccggcaaactccggccttgaatgacagtgcgatcggcgactgcgcagcgcgggacgcgccggggcactgccgctttaagcacgcttgtccattgttcggaatcg

SEQ ID NO: 216646 - DNA, 122 bp, Homo sapiens
ccgcatcctccagacccctgggaagttgcccaaacaacaaaatacatatttctgaagacccgcaagggatcttccgccgcggatccccgagtccgcgcccaggccgggcgcacgtcccagga

SEQ ID NO: 216647 - DNA, 122 bp, Homo sapiens
ggactcatgtgccagggccaagggcccttgggggctctcacagggggcttatctgggcttcggttctggagggccaggaacaaacaggcttcaaagccaagggcttggctggcacacagggg

SEQ ID NO: 216648 - DNA, 122 bp, Homo sapiens
ggcaaaatagtgggacccgtctctacaaaaaattgtaataattaaccaggtggggtggcacgcagctatagttccagctacttggaaaactgaggtgggaggattgcttgagcccaggagtt

SEQ ID NO: 216649 - DNA, 122 bp, Homo sapiens
cagcccagcggactgtcggcagaatgaaccaacgggaaagaggtcagaaggagccagatccgccagtgccagccctctccagggctccctggggacccccagcgggcaagggctgcaggcgg

SEQ ID NO: 216650 - DNA, 122 bp, Homo sapiens
gtgggggtgtgggaggtccacaggccagtgtggacccatggggcagggttgggtggaagacgggctcactgagcgtacgtatattgaggcaggggctgtgggggagaaagaagagctgtgct

SEQ ID NO: 216651 - DNA, 122 bp, Homo sapiens
ggcgtgagccactgtgcccagccatcttgctctatttctcagggttctctgaactgagtccgctgcccagtggggccagtctcctcattcttttaacttctcattctttgtccaagcaagct

SEQ ID NO: 216652 - DNA, 122 bp, Homo sapiens
cccctcatctctcctcactcataccctcagcccccatacggtgcccctgaccaccttctccgcccagcctggaccctaaatgccagcctaagcctccatcagaggaggtgggaccggaagag

SEQ ID NO: 216653 - DNA, 122 bp, Homo sapiens
gcgcagtggctctgccgacgccgcgttcagaaaggtgtggagggggctgggggcgcaggtcgcgatcaggctgcgtctcctgcccgcccagccacctgcggccctggccccaccctgccgct

SEQ ID NO: 216654 - DNA, 122 bp, Homo sapiens
tttggtgggatcccatatatttgggacattcagccaagcaaaacaaaacaaacaaatgaccgatgtcctgtcaagtctaaagagagttgaaggaactaggtgtccacagatacttgttaaac

SEQ ID NO: 216655 - DNA, 122 bp, Homo sapiens
gggggtggaggggaggtgctgttagggtagatgggaaatggggctagggaggtgaaagtgcgtggtcacaaaatatcagaaatgccagtagcccagagggacttgcaggaaaagcgtgccta

SEQ ID NO: 216656 - DNA, 122 bp, Homo sapiens
tgggcagagaatttcggggaagcgttctcctccgtctcgcggggtcagtggatatcctcacgttgtggagctgtcaaatccgtgctctgccccaaaaggctgttaacagctgaacgccctcc

SEQ ID NO: 216657 - DNA, 122 bp, Homo sapiens
ataaaggcaggtgagtataggtgagggcatcagcagcaagagccactagagcaggttgggcggcagcaggtggacacacagcagctggggcggtagcaggtggtcctgcagcaggtggtctg

SEQ ID NO: 216658 - DNA, 122 bp, Homo sapiens
cctggacaacatggtaaaatccccatctctactacaaatacaaaaaacttagctgggaatcgcttgaacccggaagatggaagttgcagtgagccaagattgtgccactgcactccagcctg

SEQ ID NO: 216659 - DNA, 122 bp, Homo sapiens
aatgtaatctcattcctcctttagagagaacgggcaggcagcttaacaggaaacaacagccgggtgggactaggctgtggcatgcaggaacctgcactgtgccttcgcagggttcggggaat

SEQ ID NO: 216660 - DNA, 122 bp, Homo sapiens
ggaggctgaggcaggagaatcgcttgaacccgggaggcggaggttgcggtgagccaagatcgcaccattgcactctggccggggcaacaaaagtgaaactccatctcaaaaaaaaaaaaaaa

SEQ ID NO: 216661 - DNA, 122 bp, Homo sapiens
tgaatttacctactctagttcccttctaactgcctctattacctcatactgccagccccgcgatctatttcctgagagacttgcttaaaatcttgagctgatgttccaagcccaagacctcc

SEQ ID NO: 216662 - DNA, 122 bp, Homo sapiens
tccgccccccctcacctgaggccacctgggccggcgtggctggggctctctgcgcctgcgcgtctcgcctacccgtcagactccaaccgactcagacctgacagcaacatccggcgcctgtc

SEQ ID NO: 216663 - DNA, 122 bp, Homo sapiens
tgaagcccagaccactctgctcacatccctcttccttatataggatccggcacaaggggacggcaccccccttcctgcttggcctccctcccccactcagcctcctccatggattggtggaa

SEQ ID NO: 216664 - DNA, 122 bp, Homo sapiens
tggatcactatggtatattgtttatatgtaatatagagtagcatcttagagtgagttatacgtatttaacttctttagtggaagaaggtgaagaattcatccctttaaagtcaattcatatt

SEQ ID NO: 216665 - DNA, 122 bp, Homo sapiens
tgccccccatgctccagcaagccccctgcctggcagcctgggcagccccctcctgggagtcgctccctgggctgaagactaaggaagggagaacccagaagcatggcttcccagggtggggg

SEQ ID NO: 216666 - DNA, 122 bp, Homo sapiens
ctgctggggtggcagccgggcgacaggcggaggatgtattgccgccaacgtccgaccagccgctgcctgacaccaagccgctgccgcctcctcagccgccgccggtccctgcgcctcaaccg

SEQ ID NO: 216667 - DNA, 122 bp, Homo sapiens
actccatccccctgtcaggcagtgactccatccccccatcaggcagtgactccatccccccgtcaggcagtgactccatcccccgtcaggcagtgactccatcccccatcagtgactccatc

SEQ ID NO: 216668 - DNA, 122 bp, Homo sapiens
acagcctcttccacaacaacaccgagggccagtgcggtgagtgggcggcgggtcctgccccggccagggctgctgctgggcctgacaacccagtgagcataggggaagcctggggaggggaa

SEQ ID NO: 216669 - DNA, 122 bp, Homo sapiens
cagtaaaagccagtgacacttacgaccattaatcttcagaatcccttccacgtccttggtcgtgggtccacgatgctgaggagggaggcccagggacctgtgcctttgagtcagacctgtgg

SEQ ID NO: 216670 - DNA, 122 bp, Homo sapiens
acggtgccctttggaaggtgcggttactttcaagttgccctgggaggatttggagtgttgcgtggtcattgaataaatagctcattcgcttgtccggatatgaccccactcagagctggctc

SEQ ID NO: 216671 - DNA, 122 bp, Homo sapiens
gggactgccagctggggtcccagcaggcgggggacctagaggaggtctccgttagctccccggtgccggcgttcagtttgccctcccccgcaaataagggcagcgctctcgcccgcgagata

SEQ ID NO: 216672 - DNA, 122 bp, Homo sapiens
gcttcgctttcacttctctagggagttctgagctgcaagagcccagctactcgccgaacccgggccgcctgcgtgagtaacttggggcggccaggagcacgggaagggcgccagacagagag

SEQ ID NO: 216673 - DNA, 122 bp, Homo sapiens
gcagtgggagggcggagggcgggggccttcggggtgggcgcccagggtagggcaggtggccgcggcgtggaggcagggagaatgcgactctccaaaaccctcgtcgacatggacatggccga

SEQ ID NO: 216674 - DNA, 122 bp, Homo sapiens
gccaccgccgctcccctcccaggatcaagcagcaagaacacggtggaaacaaaagcagagcgttcaccttgttgcaatagtaggggtccaggcagggagaaggtcccagacagggagcgtcg

SEQ ID NO: 216675 - DNA, 122 bp, Homo sapiens
gctcacggatgctacgcttgttcctgtctcctctgcccatgctccagaaaacgcgtactgcgctcccagttggctccaaaagcctccgcggccatctttacgaagggcaaaaccctccgcac

SEQ ID NO: 216676 - DNA, 122 bp, Homo sapiens
gaaaagggggcgctggcgagccaacccggaacctcccggtccgcctcccgcccccggccccggccccagcgcgcctcctgcatacacgcccgcacccagaaagttcagtcaggggcgagccc

SEQ ID NO: 216677 - DNA, 122 bp, Homo sapiens
ttcagctggtcgaacaatcaaactatgggttttggagaccaaagaagtctacagggtgagcgaatcaaattatttgtaagcataaaaattatagagtaaacacagagaaaggcagaagtttg

SEQ ID NO: 216678 - DNA, 122 bp, Homo sapiens
taaaccatgcgcacccgtggctatctgttttaccatgttagctcttataaaaacgaatgacggaaacaacttgtcattttagttgctactataaagacattacttcacaagcccttcatctt

SEQ ID NO: 216679 - DNA, 122 bp, Homo sapiens
caggagtccgtgcctccggtctttgttccagcgacctgaggaatggcatgcatcagaagccgcttccgtgtctcagatggggcctgggtcaagtcctgggagttgatggagcgtttcccaaa

SEQ ID NO: 216680 - DNA, 122 bp, Homo sapiens
ctccctctctctctctctccccctccctccttccctccctcccatccctgcagcgctacccgggtactctggatgcacatagggcggctctcgctcctaccttgtcatcctgctgtctaatc

SEQ ID NO: 216681 - DNA, 122 bp, Homo sapiens
cagctccgccattgttcgcctcaggctcgccaccttccgacagctgtgtttgcgcatgcgcgacgggtgtgcaccgcctctcgacttccggttcacccagcatttcctcttccctgttttct

SEQ ID NO: 216682 - DNA, 122 bp, Homo sapiens
ttgaaaacgcttaccaatgtgtatgatgatgaacataattttattgtgaaggtgctcaggcgacgtttgaaaaggcacagaaaaagccacaagtacagaaatactgctttacaacctactaa

SEQ ID NO: 216683 - DNA, 122 bp, Homo sapiens
gtaaggtcttgtttttatattacactaatgccactcctcattgggaaaaggcttccccatcgtgtttcagattcctcagtactttctgctggctcatagtagcttgaatggaatgggtgagg

SEQ ID NO: 216684 - DNA, 122 bp, Homo sapiens
taaccaagccccctgcccagcttccaccacttccagggccctcctcacattggctgaagtcgccaagcccttccatccaatgatagggcaaagcccggaagggaggcagggccagagcgtcg

SEQ ID NO: 216685 - DNA, 122 bp, Homo sapiens
gcaaacccccctgcttcaagttgtctcatcattgctttgagttgtcccacctttccagatcgaaccaatgttcatcttacatatgttgatttgtgtctcatgtctccctaaaaagcataaaa

SEQ ID NO: 216686 - DNA, 122 bp, Homo sapiens
tagatattccgcttcacccgatcctccagggaggaagtagatgcactctccagcttcatgcggctaggaagagaagacaggcaaatgcaagtcaaaaacattttcaatcagtcaactattct

SEQ ID NO: 216687 - DNA, 122 bp, Homo sapiens
ctgtgccgccggctgctgtcacccatgaacctgctgtctctgcacacggcttcggggctgcgcctcttctctgtgctcagcctggcctggggcttcattgctgatgtggacctagagagtga

SEQ ID NO: 216688 - DNA, 122 bp, Homo sapiens
ggcttccccaggtctctcccaagcactcaggtccagtattcacagcctgaaaatgggaaacgttattcaagatgcaaccgcaaagcttgggcaaggggcaaatgaatgatgtctctccagcc

SEQ ID NO: 216689 - DNA, 122 bp, Homo sapiens
aaacgtctgaagggcaaacggcagagcatcaacttctggtagctccgaatggtgggtccacgggcattcgtgacggtctcctaggtacagtttatacattggaagcatttttgtaattgtta

SEQ ID NO: 216690 - DNA, 122 bp, Homo sapiens
gtggatttcacatccccgtttcacggacgaggacacctccggtgacctgcagggaccccgcgccagtggctgctgcagctgactcatccgactcccacgcgcgacgctgccctagtggcgtt

SEQ ID NO: 216691 - DNA, 122 bp, Homo sapiens
ccaggagccacctcctcaaagccttccatgatcccttccctccccactatctgtttctctcgtagatttttgaaggtagaaaccgtgttttgcatttgtttcccaatttgttaaatgaacaa

SEQ ID NO: 216692 - DNA, 122 bp, Homo sapiens
tggcgtcctctctgtctctgccagtggttaaaatagagaaaggagagagagggaaaattacgaggtggtggtgccccagagtgttggctcataacaccccctcccgcatcccctcctcccca

SEQ ID NO: 216693 - DNA, 122 bp, Homo sapiens
cgcgcacgcgcggggttggggcggggcccaagcccctgagttctgcggcgcccgcggctacgcgtaccgtaaatgtcagaatagcagggaaaagagaattagaggcccgtccccactttccc

SEQ ID NO: 216694 - DNA, 122 bp, Homo sapiens
gtatgtccaaacggggaagatctcatttgttatctgcaaagttggtaaattgcatgaccacgaagcaccggtactttactaaggtacctgtggtttgtatctcaaattctgcctccaattgg

SEQ ID NO: 216695 - DNA, 122 bp, Homo sapiens
gagcctggactctcgggttgcgcaacggagtcctagatttatagggttgctcacagaacccggcgcgaaagcgagcttcgaagagttggggtggtctctgaggccttctaagagaggcgttc

SEQ ID NO: 216696 - DNA, 122 bp, Homo sapiens
tcgctgccgcgccgccgtcgctctccaacgccagcgccgcctctcccgcctcttcctcgccgagctccagtcgaaggagaagggagtaagtaaggaagtctctataccttggctcgtacaaa

SEQ ID NO: 216697 - DNA, 122 bp, Homo sapiens
ttattatataggattatagaatattcaactttgagtagggtctgtggactccatcaattgcgttctgggggaggtaccatgaaagaacattcctactttagaaatagatattctctgttcaa

SEQ ID NO: 216698 - DNA, 122 bp, Homo sapiens
acgctgcccgtcaccggccgggagcccgacacgcacaggtccccgcataagaccccgccgcgagagctgctgacacctgccagagggggaggacagggcccagtctcctggcggccagaggc

SEQ ID NO: 216699 - DNA, 122 bp, Homo sapiens
ttttttttgagacagagtctcactctgtcatccaggcactctagcgcagtggcacgatctcggctcactgcaacctctgcctcccaagttcaagcgattctcctgcctcagcctcccaagta

SEQ ID NO: 216700 - DNA, 122 bp, Homo sapiens
tggccaacatggagaaaccccatttctataaaagatacaaaaatttgctggctctggtggcgcatacttgtaatcccagctacttgagaggctgagaggctgaggcaggagaatcgcttgaa

SEQ ID NO: 216701 - DNA, 122 bp, Homo sapiens
ttcaagggacactcagcctccaaaaagaagaacagcacgatcagacggatccttcccctccggggcaagctagttgtggggaatctcacagctatggttccagcagaattaggagcagttgc

SEQ ID NO: 216702 - DNA, 122 bp, Homo sapiens
ggtacccgcggcggtcctcctcggctgtgacatcgcccgtgcccgtcgggtgctggaggccgtacctcccggcccccactggctgttggggacaccactgccgcccaaggccctgcccaccg

SEQ ID NO: 216703 - DNA, 122 bp, Homo sapiens
attcttgataaaaactcaaagcctttgcagagtcttgcattggttgaaatcaggggctggcgcctccaaatgaaaggcagccaccattcgtgttgactgacgctcaaagccatgccatttct

SEQ ID NO: 216704 - DNA, 122 bp, Homo sapiens
tggtgtgagggatcgggcgcaaagggcaaactttttgtcagagtgacgccgagttgaggacgcgcctggaaatgttgcctgggttttgagccattgcacgaccccttcactttcttttccag

SEQ ID NO: 216705 - DNA, 122 bp, Homo sapiens
agaccttcaggagccatgaaattttcctgttgggatgagaggaagcgctggcggtcgtttcggcagcttaatgaaaccagaaatagataagcacgagtgaggggtgatgtccgcttgtttgc

SEQ ID NO: 216706 - DNA, 122 bp, Homo sapiens
catcagaggaatccagtgtcctcttcaatttgggccacaaagaagaaaggaagccagctgcggtcttttctgccgcattcagctccctgcaggggccccacaggctttgtcacgtggccttc

SEQ ID NO: 216707 - DNA, 122 bp, Homo sapiens
gcactcatggcttgcgacgctttaagccagagaccgcagatcacccgccactcacctgagcgccgagcctccctcccacgtgacaggctggcctaggaacttccgccacaagtcccgcccct

SEQ ID NO: 216708 - DNA, 122 bp, Homo sapiens
agcgctgggtcgccaggactactccgcagtccccccgccccgcctccaggccccgtcaggcgctgcaagcccagctcagaagcccgggcccgggaccaaggtcaccgcagcagtccgggccc

SEQ ID NO: 216709 - DNA, 122 bp, Homo sapiens
actctttattacgacctacaaaatctttgttttgatctacaggttctttttctccacccccgcccaagacggagttttgctctgttgcccaggctggagtgcagtggcgcaatctcggctca

SEQ ID NO: 216710 - DNA, 122 bp, Homo sapiens
ggttttacagcccgggaagctcaggcgccagagggttagaccagctcaaggtcgcgagcgcgagcgcggccggaggagaacccaggggtccagccgcccagcgggggcttctcggggacggg

SEQ ID NO: 216711 - DNA, 122 bp, Homo sapiens
cagggcatcagagcccagagggtgagtgatccgggcaggctgccctaggctcctttcccgcgtcccaaactacatcccctgcctcgcctcggccccaaacgtcctcccttccacacacaccc

SEQ ID NO: 216712 - DNA, 122 bp, Homo sapiens
ggaccccacagaggcggagctcgggctgtggggttgggtgctgagggcactaggagctgccggacctcaccagggccttttctccctcggacctcccgtctgggccccaaaccccctcggcc

SEQ ID NO: 216713 - DNA, 122 bp, Homo sapiens
catgaggagcccctctgcccggctgcccagtctggaaagtgaggagcatctctgcccggccgccatcccgtctagtaagtgaggagcacctcttcccggccgccatcccatctaggaagtga

SEQ ID NO: 216714 - DNA, 122 bp, Homo sapiens
aataaagtgaagaactatttatggcctagttgagcagataatttggtcaacatatttcagcgactttcttcaaatttgttttcttttttttttgaaacagggtctcgctctgttgcccaggc

SEQ ID NO: 216715 - DNA, 122 bp, Homo sapiens
aacgatactaaatatttaattatgtccttttctggtgtattttatgtcagaattgtagttcgcctaatcaagatggtaatctatggaaataaggatgtcaagtctcatatgcattaaattaa

SEQ ID NO: 216716 - DNA, 122 bp, Homo sapiens
cagcaattacgagctctgcggctcctcctgtcctagctcttgtgccgagcctgccctgcccgacagctgcctgacaccatgccaggatggctgccagtgtgacccaggctttgtgctcagtg

SEQ ID NO: 216717 - DNA, 122 bp, Homo sapiens
tatagtttactcttagctcctctgtcgtacttaatgcataaaggctcattgacgcagggccgttccttatcattttagctgattcccggctgtattccctaattacatatcacagctttcac

SEQ ID NO: 216718 - DNA, 122 bp, Homo sapiens
cggctttcatttctgcaccagagctgggggcgatcggctttcctgccgctcttagtggggcggaccgtaataagggggcttttattactaatctgcactccttgacctaaccgtaacccact

SEQ ID NO: 216719 - DNA, 122 bp, Homo sapiens
tccacccccgccgaggggacctttgtgtctcgggggactttctgcctctttcccctcctccgcctcgcgaggagaccggcctcccccgcagaccaaagcggcagcgagcaccggaggcggcg

SEQ ID NO: 216720 - DNA, 122 bp, Homo sapiens
agagaataacagaggcagccactgtgttcccctgattatggaagaggcagcagcttcctgcgtgggccagttctgcagtgctgctctgggagccatttctgcaggtccagcctagagcctgc

SEQ ID NO: 216721 - DNA, 122 bp, Homo sapiens
tcagggtgtaaagcgagagagagaatgccttccagccagcgagagagaatgccttccagccggtgacattgagaatagcaggaaagaggcagaagaagaaactgacttgaagggtgatgcca

SEQ ID NO: 216722 - DNA, 122 bp, Homo sapiens
ccacccccgcccaaagacacccccagactcacagtccctgggggccacgctaagcggcggcggctcctcaggaaagaggccgtgggcgccccccagtagcagcagcagaagcagcagggccg

SEQ ID NO: 216723 - DNA, 122 bp, Homo sapiens
cagggtctggccctctagactcactggcgttactgactgcgagaccctccagacaaggcgcgtgctgaggttctgagcccccttccgctcccagtggtgcctgcggctctgggccaggggca

SEQ ID NO: 216724 - DNA, 122 bp, Homo sapiens
ttcagtacacttcttgtttgcagatggtgaagagcgctcgcccggtagcagaaccgaacccgggcttctggtctcagctccagaagtatgaggaggccctccaggcccagtcctgcctgcag

SEQ ID NO: 216725 - DNA, 122 bp, Homo sapiens
ctcgatctcctgacctcgtgattcgcccgcctcggcctcccaaagtgctgggattacaggcgtgagccaccacgcccggccaacaattctataaagcagaaattcttgtccccattttacag

SEQ ID NO: 216726 - DNA, 122 bp, Homo sapiens
gaaaatatgtttgaacgttgttcgtgggtgcccccgtacctgtcactatcccttggtactcggcctcaattccttctttagtgcttcctagttcttgttcttctctgcccagtccctgttag

SEQ ID NO: 216727 - DNA, 122 bp, Homo sapiens
gactttcccgacggcgaattggccctctggaaacagccgaccaatcacaggcagcaggggcgcgccctgcagcggggctccggctgcggttccgtggactcggcgactaggcgccgcctgac

SEQ ID NO: 216728 - DNA, 122 bp, Homo sapiens
actttgagagtaaataaactgcctctgctttttagtatgggatcaaatatgtgctttccccgagtagggtattcccacaggcttataagcaaattcagctcaagaactattggatgtgaaag

SEQ ID NO: 216729 - DNA, 122 bp, Homo sapiens
ggagcggcagtggaaccgactcccagaactccggacgtgtgcggcggtaagcgcccggcccgtaccccctccgcaccccgcaactccgactttggcggcccccagacccggcgaaaccgtga

SEQ ID NO: 216730 - DNA, 122 bp, Homo sapiens
cgcgccctctatttccagctgcagcactcgcaggtctttacagcacagggtgatggtgcccgagtcactcgcaaccctggggagggacgttcctttcccaggagaggggcaacgagtttccc

SEQ ID NO: 216731 - DNA, 122 bp, Homo sapiens
tttgggcctggcccacatgtaggagttagtctgaggcttggggcaggggggtgttgacatcgtagttcagatctcacagcctttgttctgctgttttgagtctgccccataaatgcataact

SEQ ID NO: 216732 - DNA, 122 bp, Homo sapiens
cttcaaggcgcctgagccggtgtgcgctgcgccggggccgccgcacggccccgcgggcgccgcctccaacttctacagcgcggtgggccgcaatggcatcttgccacagggcttcgaccagt

SEQ ID NO: 216733 - DNA, 122 bp, Homo sapiens
cttcgggagaaggccccttacagccagttgccctggagtctgtatttgctgtgccgcgggcggaggtggcctgggcagccaggatccccagctctgcagcgcctcacccagtaaaggacagg

SEQ ID NO: 216734 - DNA, 122 bp, Homo sapiens
tctccccatgtgatagcctgagatatggcctcatgggaagggaaagacctgacagcccgacgccagtaaaggggctgtgctgaggattagtaaaagaggaaggcctctttgcagttgagata

SEQ ID NO: 216735 - DNA, 122 bp, Homo sapiens
catgtcactcagcgtgatgtgcccaaggttcacccatgcgtcgggctctcattcctgaatcgcatttctctgtacggatagactgagttttgtttgtctgttcacctgtttaggaacacttg

SEQ ID NO: 216736 - DNA, 122 bp, Homo sapiens
gggggcagcgctcccgcttgttttctgccctgctggctccatggagggcgcagccctggccgcgcctccccggatgcatccagacaggctgcggctgccatcaataatgcttatttattagc

SEQ ID NO: 216737 - DNA, 122 bp, Homo sapiens
acatggcagaaggggtaaggggtctgtctttacctctgttgtaggtcactcaacgcccgacgagggctccacattcatgacccaatctgggccaatcatgacccactctgacctttccaaaa

SEQ ID NO: 216738 - DNA, 122 bp, Homo sapiens
cggaggcccaggtctccgtgcagcccaacttccagcaggacaaggtgaggggctttcctgcgtcatccccaagggctacaggaccctgtcaggggaagggcactttccggctgggtcttccc

SEQ ID NO: 216739 - DNA, 122 bp, Homo sapiens
tatcgggaggaagcccagacaacatgaagaggtcacctggaagtgcttggattgacaacccgaggacagcatcaactgacagctatgtgagtgaaccactttagaaatatccaccccagtca

SEQ ID NO: 216740 - DNA, 122 bp, Homo sapiens
ctgagttcccgggcagttgggtattttcatctccagttctcagatgctgaacttgagactcgctaaacaattccacatggaggagaggatggaaatcgttagtctagggcaaggggaggggg

SEQ ID NO: 216741 - DNA, 122 bp, Homo sapiens
tgctgagtgacaagctagaaagcctcagggactagccagacctcaggctgctgctactgccgtaacccctcacacgtttaagccttttcaaactgtgcagtttattttctgacatggtgaaa

SEQ ID NO: 216742 - DNA, 122 bp, Homo sapiens
gggtaaactgacaggagatgatgacaagaggaatgaggcgcggcgtgtagtagagcacagcgaccaggtttgtaatcgtagctctgttttcacgcacactatgaccttgggcaagtcatctt

SEQ ID NO: 216743 - DNA, 122 bp, Homo sapiens
ccatcgcccccgtagagcccgggagagctttctaaagcgccccacggcagtgatgaatcccggcagaggcctctgaccccggcgggcctgtcgtcaggggtgcccgccgcacggatggatgg

SEQ ID NO: 216744 - DNA, 122 bp, Homo sapiens
ggtgtccctgtccttgtcctcccatgctgcacatccagctcttctttccgaggcaggccacgctgaaccaacagttttcccagctcaccactggatatttggctgccaatcctcaggtgtgg

SEQ ID NO: 216745 - DNA, 122 bp, Homo sapiens
gatctgttaggatacaggagatagtgcatgtcaaatgtttagcacatgcctggcatagagcgggcatacaggaagccatctctgttgatattatgtttttgagggttgtggctgttgtttta

SEQ ID NO: 216746 - DNA, 122 bp, Homo sapiens
atctttcaaagagggatttgcagtagattctttaggcttatgagatttagtatgtaagaccgtagtgctcacacgtactttgttgcttatgttgctgtttggcaacatgaatatatttgcca

SEQ ID NO: 216747 - DNA, 122 bp, Homo sapiens
gggccccaggctcccggaagtgctgcccggcgctccggaagcgattcatcgggccgcgagcgccctccccgtcgttttccgtgagagacgtagagctgagcgacccagcccgcgagcgaggt

SEQ ID NO: 216748 - DNA, 122 bp, Homo sapiens
ggaaccgcgaggtgcattgtgggtgggggaggagacacggttgggccctgaagtcgcctgcgtggtgacccaggaaatccccgagccgagccgtaaggtccttaagtgagtaactttgccct

SEQ ID NO: 216749 - DNA, 122 bp, Homo sapiens
ttgctggtctttggtttttcaaagataggaactgccaagagcacaggaatccctggctgccggtgatttctaaccaattctagccttgcccatgtgcgattcctttgtagtgcttgggcaag

SEQ ID NO: 216750 - DNA, 122 bp, Homo sapiens
caatggcactgcccaagggctcccccatgtgatggtgagggaggaagcctggctctggcccggctctggccaactctggccccaagttgatgtgggagatcagacaggtaagtgaactgtct

SEQ ID NO: 216751 - DNA, 122 bp, Homo sapiens
acccccagttcgggacagagggcggggagggtaaagggcgatggggacgcttctcaccatcgctgtccccatccagtcactggagcagcttgtggaaggtggcctcggtcggtcacgctctc

SEQ ID NO: 216752 - DNA, 122 bp, Homo sapiens
taagggcaaattttcctaggttctttcctaggcaagtagatcccgggagcggtggaggggcgggactccacgtctcctaggaaccgctgcgcgctcactgattggctgatcgctgctcagcc

SEQ ID NO: 216753 - DNA, 122 bp, Homo sapiens
gcctttcggccgtgaagtctggctggatcccctgcatgacctggtgttgcaggtgcagcccggggaccgctgcgcggtttcggtactagacaacgacgcactggcccagcgaccgggccgcc

SEQ ID NO: 216754 - DNA, 122 bp, Homo sapiens
ccaagaacacagcctcggagtggctttgctgcgcttgccccagcttggtcaagagggccacgtgagcgtcctcacattctctcacaggccgagggctgggtcctccctgtccagctctgaac

SEQ ID NO: 216755 - DNA, 122 bp, Homo sapiens
tggcctctgagacaaacacaggtttgtcggagtcagcaaggctacaagagagggaggcagcgggcaccttctgtgccacaaggtgaggttttctgggtcctgggcagcacggctgtctgtgt

SEQ ID NO: 216756 - DNA, 122 bp, Homo sapiens
ctgggtgagcacaacccataaggacactagcgggacaggggtgagcacctgcggtggaagcggggcgggcggccgacccacgaggacactggcgggacaggggtgagcacaacccacgagga

SEQ ID NO: 216757 - DNA, 122 bp, Homo sapiens
ggcagctgccccccaacccccttcagcaattttcaagcagtaactgggctacactgctgacgtccagctgtgactctcacactggcaatgggtccaggcatccataagtcagggaagtgagt

SEQ ID NO: 216758 - DNA, 122 bp, Homo sapiens
caatccatggtgtctatatactacatttaaaaaaatccagtccaccactgataggcaccccggttgattcaatttctttgttattgtgaatagtgctgtgataaacatgctcatttggtaga

SEQ ID NO: 216759 - DNA, 122 bp, Homo sapiens
ccgagactctaccaacaccgcggaaacacaaagccaaccaggagcgcaactgtaacagtgcgtccccatgccaaacacatcccccgcgctctcctccgtttccggtctggcttgttcccctc

SEQ ID NO: 216760 - DNA, 122 bp, Homo sapiens
ggcttttgcccgggacttcgccgcccaccgcaagaagtcggggtgagcggcagagcagggcgtatggggcgagcagtggtggctaaggccggggagctctgctcagaggctcccttcgtgtc

SEQ ID NO: 216761 - DNA, 122 bp, Homo sapiens
tagtcgcgcacactcccgtggctgtaacagtttattggcagcccagaggggcgaaggcaccgcgggggagggagctcagcctgagacatgcagaggaccgggagccccgggggacgtcgggg

SEQ ID NO: 216762 - DNA, 122 bp, Homo sapiens
aatgatgtactagagtagaaactctggttagaaaggtgagttgatatgttcaagatcaaacggttggtttgcaggagagagggcatagactggttttgagtctttgttctaccaaatttagg

SEQ ID NO: 216763 - DNA, 122 bp, Homo sapiens
aaggccttgaaatactggcaaccattgtgcagggaaacaacagtactcaagaaataaccacgatcctacaatttctacaactgctctctcagtgtaatcctctgactacaaaagtattaact

SEQ ID NO: 216764 - DNA, 122 bp, Homo sapiens
agccgtaatgtttgaattggaaccagaaaatagctctcaaatttgcagagtcagctttgccgggcttcaggctgagtgggctcatagctggttggccctgtatctctggcctgggcaccgtg

SEQ ID NO: 216765 - DNA, 122 bp, Homo sapiens
ggctattgtgagactttgctttctttcaacaattaatatatatgttttcacattcagttgcgtttggtgattacaacagagaattccttgaaaatcgcagaaagatcagtacctgtcacatg

SEQ ID NO: 216766 - DNA, 122 bp, Homo sapiens
gcgcttggcgtgctccgggtgggcactggctctgtgggctccgagtgtgggattgccagccggcacctcaggccccacagctgtgaggggcttagcacccggccagcagctgtggagggtgc

SEQ ID NO: 216767 - DNA, 122 bp, Homo sapiens
ctcttccccgctctctgatccttgccatcctgggtcactcctttactgagtgaccatggccggggtacttggtgctagctgccctgcagaggtcccggggaccccagcgagatgaataactg

SEQ ID NO: 216768 - DNA, 122 bp, Homo sapiens
ggtcgtttcggctcaggatgcgcgctcccggcgtagacctggggataggggtccctgtcgcgctcgccccacccctgcagggagcaaggccgtccttctgcagcaccgcgccacgcggcggg

SEQ ID NO: 216769 - DNA, 122 bp, Homo sapiens
ctgagcgcgaggcccggtgtgggccagggcagggcgaggggtgtccctgctgcctcagttcgggggagggcggcgaaggggatagtatgggttttatacgtttccaagtataactttaaatt

SEQ ID NO: 216770 - DNA, 122 bp, Homo sapiens
tactgggctctccgcagcccagacaggtgtgaaggtctccacgcccgtcttcccggcccacgtgtgtaccatgtacgtgcacccgggaccctctggccggaatccgtggtgtctggctcagg

SEQ ID NO: 216771 - DNA, 122 bp, Homo sapiens
aggggagaaagcagtggagccggcgcccctccattatacgttaatgtaatcagcagtgtgcgaaatgactgcgcggaaaatagcatcactgacatttatattagaggatattgatggcagga

SEQ ID NO: 216772 - DNA, 122 bp, Homo sapiens
cattgtaaacctctctctgatcctgaagtccgggatgataaagagcctgagtcacaatcccggatgcaacactgaaatgctgtgccctgaagctgccttcgccagcctgagcccagtgtccc

SEQ ID NO: 216773 - DNA, 122 bp, Homo sapiens
tcatctagtgtggggacaaacacatacatgcacatgtgagcctaacaccatgtgtggaaacgcatcattgtaaatcactcaggtattcacttattttaatatacacaaatcaaagcacagct

SEQ ID NO: 216774 - DNA, 122 bp, Homo sapiens
ctgaaggccagcccgatgcaacgaaactgcggtaccgcaactcctctgcctggctgcaggcgtttccgagagccgacctccacaattcagcatcctccgctggcttgcatttcttttccccg

SEQ ID NO: 216775 - DNA, 122 bp, Homo sapiens
agaccctaaggatatagaaatgaataaggcaacacccctgctcttatgaaactcatataccggtggaggcagacaacacacaaataaacaaggaaagtgtcacatcgtgataattattctga

SEQ ID NO: 216776 - DNA, 122 bp, Homo sapiens
gcttccagctgcagctgcccacaggtcctggctgtttagagggcggcttaagaggcatgacgacatcacaaagagcaaatggcttcagatcctggcttcctcctccactgcctggtggtgca

SEQ ID NO: 216777 - DNA, 122 bp, Homo sapiens
gggagccggaaccacatgcctggaaaccctgagcccctgcccgccgccgtccaagccggccggctgcagcgcagtttgtttgccgaggtttgcatgcacatattcagttgcccttttttttc

SEQ ID NO: 216778 - DNA, 122 bp, Homo sapiens
cctactgtctcagagggcggacccagctcgggctggtagtggggcgggggtcgcagggcgcgggccgggccctcagcgcgcatgcgcgacaagggggcggggccagggcggggctgcgcccg

SEQ ID NO: 216779 - DNA, 122 bp, Homo sapiens
tgacgacaggtgggggcgccgtgcccggcgcgtgggcgtggttcaggaagagcacggcaccggtgacagctacagccagcagcacagccagggccagcagcacggtgcacagcacgtagccg

SEQ ID NO: 216780 - DNA, 122 bp, Homo sapiens
gtgcggcgccggggcggggggcccacccagggtgtggtcggatccggtgcaccgggcgggcgcgccgcaaccgcgacaggcgcccttctcggaccggacgcaggggccggcgaccacgccct

SEQ ID NO: 216781 - DNA, 122 bp, Homo sapiens
ggtttcagcgggagccatcctgtagctgcaggtttgctggcaggcagagggttgggctggcgggggacactgagtgccccacctgctcagactcttcatgccatcaaggggccagtcggggg

SEQ ID NO: 216782 - DNA, 122 bp, Homo sapiens
aactgggtgctccagtggcgcaatcggttagcgcgcggtacttatatggcagtatgtgtgcgagtgatgccgaggttgtgagttcgagcctcacctggagcattgttttccaacccaaaata

SEQ ID NO: 216783 - DNA, 122 bp, Homo sapiens
actgagcacagctgtggctgccccaagggaaacttgctggcaggtggggtttcctcagggcgtgggcggctgctagaaacgagaaccaggagaaccacgcagccaggaagccagtggccacc

SEQ ID NO: 216784 - DNA, 122 bp, Homo sapiens
tgtgattagccagtacgcagtacttccccagggttgtgtttcctttttcctgagatttggcgaagggtaaagggtcggagtcacatggatacaaagcttttgattaatgtccaagtcactgc

SEQ ID NO: 216785 - DNA, 122 bp, Homo sapiens
aactgtgagaaagtccgtttctgttgtttaaagactcccagtttgtgtactttattagggcgatcctagaaaacaagtagagattcatgtctggcaaataatgatcaaacaatgatttgttg

SEQ ID NO: 216786 - DNA, 122 bp, Homo sapiens
aaaggggtgactgacgcacctggaaaatcgggtcactcccacccgaatactgcgcttttccgaccagcttaaaaaacggcacaccacgagattgtatcccgcacctggcttggagggtccta

SEQ ID NO: 216787 - DNA, 122 bp, Homo sapiens
cctgccacatcatcctgtctccaggatggggcttgtgatctcagcagctggggcagcagccgcagcagtaaacagggctagaaggtggagcagagcccttggaaatcaactaggccaacctc

SEQ ID NO: 216788 - DNA, 122 bp, Homo sapiens
acttcattggcagcactggcgagtcagttttccggtggcggcggcgctagttggtctgcacgaaacgtttcccttctcgctccgtgtgtcccattctccatcccacgtcctccagtgccggg

SEQ ID NO: 216789 - DNA, 122 bp, Homo sapiens
ctttggactggggaacaacagagagtggggagatgatacaggaggtgatagcctgaggtgcggggaggcagagtccatcagagagaggctgcagctgagaatcagatttcacttcccacagt

SEQ ID NO: 216790 - DNA, 122 bp, Homo sapiens
tccggacttcccgagaagctccaggttatccggagtcaacggtaaggagggaagtggattcggtgacactaaggttctttacccactgcgaaagcgaatggcttggatctagcgcaggtcga

SEQ ID NO: 216791 - DNA, 122 bp, Homo sapiens
taagtatgatgcctaggctagagagctacgtccggtctcctaggcaaccatatcaacttccggcttgaggcacgatagcggttggcgagaggccacatttccgccacgtgacccgcgcatgc

SEQ ID NO: 216792 - DNA, 122 bp, Homo sapiens
aagtagagaaacaaccagtcaccagctccaccccatccagatttgctgtggatgtgtggacggttttagaagcacccagaggatatttctcagacagcacccccaattctccacgacgcccc

SEQ ID NO: 216793 - DNA, 122 bp, Homo sapiens
accgagccgccctgctggggccctgacggcggcctaactcaatctaggcagtgtcccgtgcgtttggcttagtgaccaaatttaatcacaccgagttcccacaaggcattgaaacagctatc

SEQ ID NO: 216794 - DNA, 122 bp, Homo sapiens
actgtccctgggtttcatctagaggaacaggaggtcccttagatgccctggagttggccccgcgcgaggggtgctgggagttgacaggaaagaggaagtggcagccgagaggccctggtggg

SEQ ID NO: 216795 - DNA, 122 bp, Homo sapiens
gctggagttgaagggaagtgactcgaggggtgtcacctcgtatgtcacaaactccacggccgccagtccaacccagactcggagatattttggctcctgcttctttatataggaggagccgg

SEQ ID NO: 216796 - DNA, 122 bp, Homo sapiens
tcaggccctttgttgaggtataccctcatttagctccacacacattttgtgagcacttaccgtgcacaaggcgctactcttagatctttcctggcagataagaatactctctgaggagtcat

SEQ ID NO: 216797 - DNA, 122 bp, Homo sapiens
agcagggcttgttggggctgtcagggctctccgtggccaggtgctgggaggcgatctcagcgcacagggcctccagctcggtctcatcattgatctggagggtggaggcagagcgaggctca

SEQ ID NO: 216798 - DNA, 122 bp, Homo sapiens
cggagaagactgggagcataaccgctgggcagcgggcagcggacagcgggcggcatgaaccgccccactttgccggatacctggagctgcaggaacgacccacacccaggcctctttacccc

SEQ ID NO: 216799 - DNA, 122 bp, Homo sapiens
gggcaatgttaaaaacagatgaaaatggctgtcttccaagtccagctatgaacctccccacgggatgttgctggacagtacttcggtagcacagttattctacaaaaaaaaaaaaaaaaaaa

SEQ ID NO: 216800 - DNA, 122 bp, Homo sapiens
acagggattcatccagctcgttgtagtctgaaggagccaggaacctacctgaatgatctgcgctgtgccctcttaagactcaggcggaccaaagagagtgcccgaggccaggaggaaaaagg

SEQ ID NO: 216801 - DNA, 122 bp, Homo sapiens
ttcaagtgatccacccaccttggcctcccaaagtgctggtattacaggcatgagtcactgcgcctggccaggagggtatttttttgtttgtttgtttgagaccgaatctcactctgatgccc

SEQ ID NO: 216802 - DNA, 122 bp, Homo sapiens
gtctgtctatttggggcttctaaaagttgttaggccctgagaagggctgactttggagaccgagaaatggagcagaccccttaaggactgaccttttgatatagattaatttccttcctttt

SEQ ID NO: 216803 - DNA, 122 bp, Homo sapiens
gttgcaaatgaacacggcgtactagctacagtttctttccccagccatgctgctacattacgttcagtgaatttaaggggtgaaggtggttgacaaaacaaagacctagctcgaagtgactt

SEQ ID NO: 216804 - DNA, 122 bp, Homo sapiens
aggtgcagagggcgatgggggtgctggtgggggcgtaggggctccggtggcttcagaggccggggtgggctcagtgggggccgggatgtcctccggtggtggggtgggtggccctgggggtg

SEQ ID NO: 216805 - DNA, 122 bp, Homo sapiens
gaatccaaaagtaaaaacattttcctttgacctaatctatttcttaatgttctctttcagcgtgttacccatataggcatcatttcggtagttatttagtgtacacattctataatgcattt

SEQ ID NO: 216806 - DNA, 122 bp, Homo sapiens
ggcgcgggaagaggccaggagcagcaacgggtgcggggcggggccgggagcgtcaaggggcggggaagaggggggaatgggcggggccgagctctgcgaggggcgaggtggggaatgcagag

SEQ ID NO: 216807 - DNA, 122 bp, Homo sapiens
aaaaccaaatcaactgtccttagcccaggccacggtgccagcaaagaagctggccttgcccgagacggaagcttagcccacgccacttttccctgccgcactgcctgcctcaaactataaag

SEQ ID NO: 216808 - DNA, 122 bp, Homo sapiens
gctggcggagacccaaccagtctggtggctgctggggcagctggaggggaaggcagccctcgtaaggcagcaaacacgtacccgcccctcgtctgatgcaagactgctccgtgctttcgccg

SEQ ID NO: 216809 - DNA, 122 bp, Homo sapiens
ttttaggaaagaatggtccctgttcttccacttccttaaagtcagatttctatctctcctcgtggtctaaattcaaaaacctttgccccagataccactgcaaatttgtctgttattactgg

SEQ ID NO: 216810 - DNA, 122 bp, Homo sapiens
tcgacggccccacagctgagaccacgttttcctggggacaggcccaaagtggctttctggcgcccccgggagggctccggggccgggggctgcacctctccggagcccagggtgggccggct

SEQ ID NO: 216811 - DNA, 122 bp, Homo sapiens
aagacattcttggaagccttaccggtaggttcagtggtgtgctggtcaatgcttaacaaccggctccaccctccaacctcccctccctgccaccccaaaaaagaaaaagagagagaggcccc

SEQ ID NO: 216812 - DNA, 122 bp, Homo sapiens
tggcagctaaaaggatgtagcctagggcacgtgcccagactgtgcggctgccccgctgcccggtgagtggctctactgcgctccgcccgaggcgccttctcatgcacccccggcgttctcag

SEQ ID NO: 216813 - DNA, 122 bp, Homo sapiens
ctgggtgctgcaggccaggttcaccccaacgtctgtggctcaggaggcttggccactgagcgtgaccacatctcccccattctacatgctgacttgatacctgggttaggagagtgtctgag

SEQ ID NO: 216814 - DNA, 122 bp, Homo sapiens
cgcctgccctgctgcgtctgcccactgcccctggggcgcgtgatggtcccctcgacgctccgccctggcttcccccattagtgccattagtgcctgtgtgagtgggacctgggttggaggga

SEQ ID NO: 216815 - DNA, 122 bp, Homo sapiens
tcaagatgattaacgacatggacacacatgggtgagttaagaagcggaaagtttaataggcggaagaaaagagtgaggagaccagctctcagacatccttaagggaaaggctggcccgtgac

SEQ ID NO: 216816 - DNA, 122 bp, Homo sapiens
gcagccagagaggcgcgggtgggctctgggctgccagcccagagctgccagcagtggggtcgaggcaggggaggcaggacaggcgcgggcgggagcggaaacccaacggtttttctgggaat

SEQ ID NO: 216817 - DNA, 122 bp, Homo sapiens
gcggccagcatcctggcgttgggcaaatccattcatcatcctgacgttctccagttgatccgtcttctcagagccattagcccccacgtccttgacggtggaacagttgtaaactcgagacc

SEQ ID NO: 216818 - DNA, 122 bp, Homo sapiens
gagctttcagtttgttccgctgtttgaaattggcgccggcggagcgttaaggtcacgtgacggaacgtcgccaatcggcgccggccttgtctcggcattccgggctcgaaggctgtgcggtc

SEQ ID NO: 216819 - DNA, 122 bp, Homo sapiens
acagcaaaccacagcacgtgccttccctctgtggtgctctaccagcttgaggcgaggcaccgggtgcagcccatacatgggggtgaataccagggggtggggaccactgggggtcagttcag

SEQ ID NO: 216820 - DNA, 122 bp, Homo sapiens
tcaaacctgagtctggaagtcttggaacttacccttgaaaacaaggaattgtacagagtacgagaggacagcacttgagaacacagaatgagccagcagactggccagcgcctctgtgtagg

SEQ ID NO: 216821 - DNA, 122 bp, Homo sapiens
gagggacacccagggtgcctgaaaggcaccaaagccgggtagtgagtacatgaacgtgcacggtgtagaatcctttatagctgacatatatcttattagtatttttatatctactccgtggt

SEQ ID NO: 216822 - DNA, 122 bp, Homo sapiens
ttctcatccatcctccaacccggtcaagctccaggagaccggcatgccccccacttgggacgcttcccagggccaggcggcccaaccccgtgccacgcaaacacggtcgtcggcaccggtcg

SEQ ID NO: 216823 - DNA, 122 bp, Homo sapiens
tctgcacacagatgctgcctgacatggtgcccgactctccaaggcgtcaggtagagagaacgtaacagacgcgagtgtggggttgttttgatggtctgaatcagctaccacacctactaact

SEQ ID NO: 216824 - DNA, 122 bp, Homo sapiens
tgctcccctaggctggaggctgggaatccaggtgtgtccttagaccccacctcccacccacgtgggtgccggaggaggagggggttaccgttccccgtttcagtgaccactcaggtgatact

SEQ ID NO: 216825 - DNA, 122 bp, Homo sapiens
actgcctttatgagctgcaaccctcaccgcgaaggtctgtagcttcactcctgaaaccagcgggaccacgaacccaccgggaggaacgaacaactccagacacaccgccttaagagctgtaa

SEQ ID NO: 216826 - DNA, 122 bp, Homo sapiens
ccagagcgcggcgtaggtgtggagaaaacattacgtcgacggggagttcgcctccagtagcgtttctactggtgccaccccgcctccgacccgccctgcggccctcccttttcttttctgcc

SEQ ID NO: 216827 - DNA, 122 bp, Homo sapiens
tttactgagcggaagaaaacggaaataagacattttcctcaaggagcagaaatcattacacgtatttggtccaaacaaataaaaataaagagaaccaatgaagactgaagtaaaccacatca

SEQ ID NO: 216828 - DNA, 122 bp, Homo sapiens
ataataacataataccatagaataattaccaatacctgctgaatgctcccagatcttatacgtatataacacacataaagtattcacgcacatatacttattttcttacttgtttataagca

SEQ ID NO: 216829 - DNA, 122 bp, Homo sapiens
cttcctgagcgtctgtatcccacagggcaggcactgtgtgaggttttgtggaaggtctcccgccgagtcctcaagatcattctgtgaggtgcgagctttattcctcattgtagggatcagaa

SEQ ID NO: 216830 - DNA, 122 bp, Homo sapiens
gggccaaggctgatgcgccctctccctctccctagtactgctgcgcacggccactgccaacggcttccagatggtcaccagcggggtacagagcaaggccgtgagtgactggctgattgcca

SEQ ID NO: 216831 - DNA, 122 bp, Homo sapiens
gagccagattgcagggtgtgaatcccatttactagctctgtgatttggggcaggttaactcgctgtgcctctttcttcatttgggctgttgtgaggatttagtgaattcatatatataagcc

SEQ ID NO: 216832 - DNA, 122 bp, Homo sapiens
ccggcgcgcacccctcccactcccatccactcggagccacgtcccctgcccggctccggccggctcccaccgtccccggccaccgtcttcgcccctgcccggcccccgccccttccagccac

SEQ ID NO: 216833 - DNA, 122 bp, Homo sapiens
cgcgtccccgccccagttccctgtccgtgagccgatttatctgcccagggtcggcgcgcgcggctgtctcagaactcatgcagctgttcccgcgaggcctgtttgaggacgcgctgccgccc

SEQ ID NO: 216834 - DNA, 122 bp, Homo sapiens
aaagccgggagagaggatagaggggcgttctcgctgcgctgcgtgtcagctctggtaagccgtctagcatgtcattagtggggacctgaggcgccagcgggaaagtcccctccccgtgggct

SEQ ID NO: 216835 - DNA, 122 bp, Homo sapiens
ctgcattgattattccctcattcttgaatcactctcctcccttgactaccaggacttggacgctggttgcatataatgacttattctgtgcttatttccttgtctatagagaaggggataat

SEQ ID NO: 216836 - DNA, 122 bp, Homo sapiens
tgggaactacaaccatcacatttgtgaagagattgcccccaactggtagaggccacaccccgatggaagctgtgtaccatctctgagctgcagttgatggcaacccaggtcattctaggaat

SEQ ID NO: 216837 - DNA, 122 bp, Homo sapiens
gtggcaccgcagaaagttcattaacactcccatttgtggcgtctgattcacggctgctgccgctggtgggaagctgggagctgctgctgcgagagcaaatcagcttgggctaatgcatatgt

SEQ ID NO: 216838 - DNA, 122 bp, Homo sapiens
gcgggagttaagtgcccctgtcatttccaaagagtataattgggacgtttcacaggtcagcggtggagacaggcttcccttttgatcagtgttagactgataacaaaaattacagtttccag

SEQ ID NO: 216839 - DNA, 122 bp, Homo sapiens
tgatgtacctgcagcgtgctggcagacgcggtcaacggtaagtgctccaggaacgcgtcacgttcttcttgctccctgctgttcccgctactgcttggacagtggtagccctgcaccttagt

SEQ ID NO: 216840 - DNA, 122 bp, Homo sapiens
gctcacgtgtgcagggcactctgggcagacacggcctgggggacccactactgggtgttgcgcgggcgccctgcagggtgcggggctcagggcgtgcagggctgaggcctgggaggcctgcg

SEQ ID NO: 216841 - DNA, 122 bp, Homo sapiens
gaaagattccacagtgaatcagaggcagtacgtggactttaaagctcatagggctgggcgcggtggctcacgtctataatcccaacactttgggaggccaaggcaggtggatcacaaggttg

SEQ ID NO: 216842 - DNA, 122 bp, Homo sapiens
tatggagaaactggggcccagagagaatacatggcttgtctcaaatcacaagattttagccgaaattagaactcctactccatactcctagttcattgttttttactaaaatgcatttccca

SEQ ID NO: 216843 - DNA, 122 bp, Homo sapiens
gcacgtcgtgtgagtgcagtcggacgttgtggcgcgtattgagtagcttcaccacggagccgcaagtaacgacacccaggctggacgctcccacagcgctccacaaaccccccaacaacagc

SEQ ID NO: 216844 - DNA, 122 bp, Homo sapiens
gcccggtcaaaacgttgggggttgtctggtgagttctgccatttgtaggagaactgagctcgctggtggtcctcggacaagaggagcttggggtgggaagtctgagggtctagagaaatgtg

SEQ ID NO: 216845 - DNA, 122 bp, Homo sapiens
atgaaacgctgttcttgaggcttagagaatctcccaacccatcaccccagagtacctgtccgttcagaaagtaccttttcatcctcttttgacgcttacatccagtctatggagtaaggtat

SEQ ID NO: 216846 - DNA, 122 bp, Homo sapiens
gcaagaggctgtgacagtcaccgggggctcccgaggtggaggacgtaaaacagcagagaccgatcccaagctgtggcgggagtgagatacaaaggccccaccaaatgccggaagccacgccc

SEQ ID NO: 216847 - DNA, 122 bp, Homo sapiens
tgggtgtcccaagattcttttaaatccaaagaccatttaggttccagcttccttgagcctcggtttcttcctctatgaagtggagataatggcaaacatctgaaaacattttatcaggattt

SEQ ID NO: 216848 - DNA, 122 bp, Homo sapiens
gaatatttgattatttcttcataaacaaccaattcctttagcacctgctatggttcctgccgctgtgagaggaatatcaatggcttcaatattccattgtttgtgactgagaagcatttgcc

SEQ ID NO: 216849 - DNA, 122 bp, Homo sapiens
ccataccaaggccctttccactcacccaccgcttctcttcctgcccggggcatctgctggcggaggaaggcttgtccacggaaaggcaaaagcgactcccgatcaaaatccgggggcacctg

SEQ ID NO: 216850 - DNA, 122 bp, Homo sapiens
ctcaagtgatccgcccccctcagtctctcaaagtgttgggattacaggcgtgagccaccgcgcccggccaatgcccctcattatatagcctctgctccagccagctgagccctggaggttcc

SEQ ID NO: 216851 - DNA, 122 bp, Homo sapiens
ggtcccaagcacaggtctggggcggctcccgggagatgtgtgcccgctcacccaccctcccgagaccgtcctgcagttcaatcacgctctgcatctattctaggccacgctcatttcctgtg

SEQ ID NO: 216852 - DNA, 122 bp, Homo sapiens
agcccagttctggaatgtttctgtgtcatgattcatctgcctcccaaaataggagtttctcgtcctccaggaggacctggttttctagttgactttgccccctccctttgctttacttcatg

SEQ ID NO: 216853 - DNA, 122 bp, Homo sapiens
tttttttttcttttttgagacggagtcttggtctgtcacgcaggctggagtgctgtggcgcgatctcagctcactgcgagctccgcctcccgggttcatgccattctcctgcctcagcctcc

SEQ ID NO: 216854 - DNA, 122 bp, Homo sapiens
tctgggaagcagaagttacagtgagccaagatcacgccactgcactccagcctgggtgaccgagggagactctgtctcagtaaaacaaaggaaagaaaagaaaagaaaagaagagacacaga

SEQ ID NO: 216855 - DNA, 122 bp, Homo sapiens
aatgccaatcaaaaggaaaatgctcggtgagagtctcactacctgcgctgcagctcctgacgttattattgtgactagcgggtggctctgtccccaccctgggaacaaggactgggtcattc

SEQ ID NO: 216856 - DNA, 122 bp, Homo sapiens
catgaaggtctgcgagaaggtgcagaggaaagggaccacttcctacaacgaagtggcagacgagctggttgcggagttcagtgctgccgacaaccacatcttaccaaacgagtcagtaagtg

SEQ ID NO: 216857 - DNA, 122 bp, Homo sapiens
gactttagccatgaaaagctgggaagggtgcctcagtagagtgggggcaggacctggcttcggattccacactgggctcagaaaaagtcctggcctcagactgggagatgggtgcgtgcagc

SEQ ID NO: 216858 - DNA, 122 bp, Homo sapiens
gggaccttccaggcctcacggatctggctcctctaccccatgagcccagtgaacacctctcgtgtgcagggcctggcgtccgacctgcccttgagatgcaccccgccacactgcagtcggtg

SEQ ID NO: 216859 - DNA, 122 bp, Homo sapiens
ggcagaaaggtgggtgctggccttctggcgatggggatgtggggacagtagatgcacgaccgagtgggcacaaggtccccccacaagtccccccaggaacctgtcagctccaggtccatttt

SEQ ID NO: 216860 - DNA, 122 bp, Homo sapiens
ttcctcggccatgtccgaagtgctgggggtgcggctacccccgaaaggtgggccctggggcgtaggggacgggcggctgggctcctggcttcgcttccggtccacgggcagggcctgggaaa

SEQ ID NO: 216861 - DNA, 122 bp, Homo sapiens
tcccaccttcactggctgccttacccgaacgttgtggacctggttgggaccagcagtctccggttctgtttttccaggcatccgatctgtgggtcgttatgggtggcaggttggggggttgg

SEQ ID NO: 216862 - DNA, 122 bp, Homo sapiens
tgaagcttgttcttggcgttaccaggttggttctttgagttgaaccaggggcattacatgcggaatattcctgaacagatcacctctggttctgctgtctcaagggccacacacaagagctg

SEQ ID NO: 216863 - DNA, 122 bp, Homo sapiens
gagtattttctttctgtaacaagattcagggcattgtcggagcgggactttctacttctccggcggcggtggtgatgagacctggatcccctctcttcaaaattgtagacgcgtctccgagt

SEQ ID NO: 216864 - DNA, 122 bp, Homo sapiens
agacagagagatccataatgagcacacaagaagaaccaagctgagatacattcgttaacacgtgtgtgataaagcccttagattgtatctgtacaagtgtgttatttttgattttaaatcca

SEQ ID NO: 216865 - DNA, 122 bp, Homo sapiens
gaatttaggtgctatttgggcagagacctgaatgaagtgagggagtcagtcatgtgataacgtgaatgacaaccagatcctagacagaaaagcaagtgcaaagttcctaaagtagaaacatg

SEQ ID NO: 216866 - DNA, 122 bp, Homo sapiens
caactctccccgtcatggcaaacgagcaacagaggtggcctcattttctctcctctcccacggcctccccacctcctccctttttataggacggaaaacctactgctggttattcttaccct

SEQ ID NO: 216867 - DNA, 122 bp, Homo sapiens
taaaaaaaattcttaaatgaaataccataaaacagagaaacaagtttccaaatgcaacaacgtggattttgcatttgaaaagccaacagggcaagtgcaatggggcactatactctttcctg

SEQ ID NO: 216868 - DNA, 122 bp, Homo sapiens
ccgctcgggctggccgcgagccgggatccgcgagggctggcgggctctggcccccgaggacgcagacatgtggcttgaacctccgctcccctagccgttgcctctgtgcatctttctgggcg

SEQ ID NO: 216869 - DNA, 122 bp, Homo sapiens
aaagacgccatcacacacctctttccacacagtaatctcgtgggcagcaatgtccatgaccgtgaacaccacgggtcatgtggcagacgcatcctggcctgtgaaaccgtcatgccatgtac

SEQ ID NO: 216870 - DNA, 122 bp, Homo sapiens
gtactctgggagtatgaggagggtcactttatccctcttcagggaggggcagaggtttcccggaagagagaaaaatccaagtgtattgtgaaacatgatgagtcagcgagaagtaagagcgt

SEQ ID NO: 216871 - DNA, 122 bp, Homo sapiens
cctgaaatgcccaggacgaagaacgtcgcacggacgaccctgccgtgcctggcgcgcgtccgcttcctgggaagctcaggatccaaaagcatcttaatattctctataattcgccaaaaacc

SEQ ID NO: 216872 - DNA, 122 bp, Homo sapiens
ttatcatcaccccaactttgcaggaatctgaagcacaaggttaggaaacgcctgcaaagtcgcacaatcactacattcgaaggcacatgcagatctgggcagctggatctgaagcactttct

SEQ ID NO: 216873 - DNA, 122 bp, Homo sapiens
aggaaaaaaatctgcaccagcatttcacgtacagtaggtgcatttctcctcgaactgcttcggtttcactggcaatctgtagaaatagctgtgttagtgttcagtttcgccctgccaaaggt

SEQ ID NO: 216874 - DNA, 122 bp, Homo sapiens
tttctcgagataggtgaggctgcgcgttccggaactggtttcccggaaggagcatgtctgcgcccgcgatccgaccggaagttgcacgctgagccgcggacaccatgcagtcggatgatgtg

SEQ ID NO: 216875 - DNA, 122 bp, Homo sapiens
gaggtgaccggcagcggcggggcctacatgcgctttgatgtgccgcggccaagggtccagcgcagctggcccaccttcagaggtgagtgcggggagtcctctgctgccctggctctggcacc

SEQ ID NO: 216876 - DNA, 122 bp, Homo sapiens
agcatcacttacaatcagaaaagatccctgatgaaagtgcatgaaggaacacaaagcaggcgactgcacgtctatgaacacgctcacggtacggtgcacagagcaggcgacagcacgtctat

SEQ ID NO: 216877 - DNA, 122 bp, Homo sapiens
ccactgcccctgtcactaaatctggagctgccaagttagttaagagaaatttccttgaggcgctaaagtccaatgacttcggaaaattgaaggctattttgatccaaaggcaaatagatgtg

SEQ ID NO: 216878 - DNA, 122 bp, Homo sapiens
ctccccaccaaacagcacggtccccggtcccgccccgccatgggtggtctggccagattgcggtgttattaggatggagggtgggcaggtcccaccacctaccccattattcagacatagca

SEQ ID NO: 216879 - DNA, 122 bp, Homo sapiens
ctactttccacctcttttctcctggggctttgctctcgagactctgctagtctcagactccgctctggagtttctccaggactcagcctccatttccatgcctctgacagtcgggagctcct

SEQ ID NO: 216880 - DNA, 122 bp, Homo sapiens
ttggtgtctcagcatttattttcctgtctcttccaccaaaagccagctgtagctttatctcgtaaaagttacccatcttctctactgtccccattctctctcctcccaccttcaccccagat

SEQ ID NO: 216881 - DNA, 122 bp, Homo sapiens
ggcggccctggggaagccccggggatgacctgaactgaaggcgctccctatttggtctcgcgacacagggactattttcagcacgcccacagtgactgccaggaccccccagtcgtccgttc

SEQ ID NO: 216882 - DNA, 122 bp, Homo sapiens
agactttggcaaaactttccagtagttcagtaaaacacatctggagaatctcacgcacttcgccaggcaggccaggcacaccagcagccctgtgaggatgaagaactgttccaggacgtccc

SEQ ID NO: 216883 - DNA, 122 bp, Homo sapiens
gtggataggcagatagaggcccgagggactcggtgaaggtcgcccagccagttagggacccggaacaagagagggcacacgttgtcccacctaagttttaggttcttctcagtctcccacgc

SEQ ID NO: 216884 - DNA, 122 bp, Homo sapiens
acaagccgagagtccttggacaaccttggaaactcctttttaggacagaatcaactgagacgatacacacgaaggagcttttgtgagcagagtacagagctcgttattgcagtacaaggttg

SEQ ID NO: 216885 - DNA, 122 bp, Homo sapiens
gactgcggtcccccagtccgcgccccgcccagccgtcccccgtcggctccagccaatccgcgcgcgctcccctggccgtctcccaccggatcaggtgtctcctctgcgcagactcctccacg

SEQ ID NO: 216886 - DNA, 122 bp, Homo sapiens
aaacgttatccaatcagcgacgctaggctgggaaccgtccaatcaggcacgcagctggagcggacaggacggcttccgggatgtggcggggcctttgtctctcgccgcagcctgagctccag

SEQ ID NO: 216887 - DNA, 122 bp, Homo sapiens
cccacggcgaccacacggcccgggaggccttccggctccagtcacccccaccctcctgcccgccgacagacgcaaggcctcactaatcgatggccgcgccccgcccactgaggatcgttgcc

SEQ ID NO: 216888 - DNA, 122 bp, Homo sapiens
acagcaaagacttgtcagataaacttgggaacaagtctaagtggcagatgaaagacacaacgaggcaagcacagtggcagcagagacagccagtgtcagagggtaaggatttcacttgttga

SEQ ID NO: 216889 - DNA, 122 bp, Homo sapiens
gatgaagagtacacagagataggagacagtgggtggaaaactgaaaaggacacttcacatcgaggtgggggagtggcaaaacacagtgcatttcagcacagtctgtacccggccttggcctt

SEQ ID NO: 216890 - DNA, 122 bp, Homo sapiens
accactactcaccttccctgccctgtcccttgggatcaggacggctttggctaatgcccacgaggtgccacaagggactctcagaccgctgctcaccttccctgccctgtctcccccaccgc

SEQ ID NO: 216891 - DNA, 122 bp, Homo sapiens
ctcgatctcctgaccttgtgatccgtccgcgtcagtctcccaaagtgctgggattacaggcgtgagccaccacgcctggccacgagtggattttaaaaacatcgtgattactgaaaataaga

SEQ ID NO: 216892 - DNA, 122 bp, Homo sapiens
tggttgaacagaagccctggaggcagaaataggacttgtgattcaccttcagtttaaaagcgctaatttctgccttctgggtgcctttataacaacttgtccccatctttggcatcaaaaag

SEQ ID NO: 216893 - DNA, 122 bp, Homo sapiens
cccgtgcaggagcagcctggctgcgggacctgccccagcccggcctggctgccttcagtgcggggcagcctgttcctgcagccggctgtgactcaaatgcccgcccccctcagaggcgagcc

SEQ ID NO: 216894 - DNA, 122 bp, Homo sapiens
aaacaagctccccccaatttcagggccgttgtcgcctccgggcggtccgcgggtcccgagcggactgggactctggagacgtgcccccaaccccaccgccattcaccctgtcattgcagggg

SEQ ID NO: 216895 - DNA, 122 bp, Homo sapiens
attctatgttgaatttttttgaaaaaccaccatactgttttccatagcagccacaccattcgacattctcaccagcagtgcagaagggttccagttgctccatatccttcaacatgtatttt

SEQ ID NO: 216896 - DNA, 122 bp, Homo sapiens
ggagtctgctggcagtggttgtggtggtataactattgatccgttgtttatgagttcacccgttcagaatagcaatgctactcaggaggcctgtgctgctcccactgccctgccccctctca

SEQ ID NO: 216897 - DNA, 122 bp, Homo sapiens
ccgggctcggcggcggaccagatggccttgcgcccgggcacccagattgtgatggtgagccgtgcgaggcccctcctgtcccccgggctcctcatggggacagtggcagcgggtggggtgac

SEQ ID NO: 216898 - DNA, 122 bp, Homo sapiens
ggaatagagcggggaaatggggagggaggaggacacctcaagtagcaagggatagtttgtcgttaagtcctcgaactgatttatttcatatagacctctattgacaaggaacagctttcctg

SEQ ID NO: 216899 - DNA, 122 bp, Homo sapiens
cagccaggtgcctggagcgggagagtcggactcagattcctgctttacctagaatagcaacgtgccctgttcccgttgtaccctcttaaatactatacttcttaaacggcctgtctcccggt

SEQ ID NO: 216900 - DNA, 122 bp, Homo sapiens
aatctctacttaacattactgccagagtccagcttaaaacttcattggggttgtcataagcgagtaagacaggaagaaaatggcattaacctaaaaaaacctcactttaaaaatctctctag

SEQ ID NO: 216901 - DNA, 122 bp, Homo sapiens
gcaaggcgtcaggtggaggggcgcaggggcccggtgagcccgtcagactcgtcagacccgcgaggcctagaagcagcaaaggaggctgaactccccttgcaaacggaaagacacagtaagaa

SEQ ID NO: 216902 - DNA, 122 bp, Homo sapiens
aatattttaagtgtagatattgtgggctctttaaaagccaaacatttttataccttttctcgaactcccgagctcaggtgatttgcccacctcggcctcccaaagtgctggaattacaggcg

SEQ ID NO: 216903 - DNA, 122 bp, Homo sapiens
gcaactgggacttgctctcagcgaggtgacgggaaggactcgagagagaagccgatgcgacggcagctgtttgcgccgcctatgctgccaattccctggggcgtaaggtgtccgcgaggccg

SEQ ID NO: 216904 - DNA, 122 bp, Homo sapiens
ctgactcacttaccaaacacatagtttatatttgttcctcttattgtcatttattactcacgtattttttacacaaacaccacagttgttgaaagagtttcataaggtgatgttcagctaac

SEQ ID NO: 216905 - DNA, 122 bp, Homo sapiens
ggaggtctctgtagtagtttcatcgccgagaatccaggcagaggacagatttggcgacgtcgtcattctagaagctccctttagcaactgacctccgtgttgctaaacccagggaacgcttt

SEQ ID NO: 216906 - DNA, 122 bp, Homo sapiens
cttctggaattttctgtttactgtctttgggctgaggttgaccatgggtaacggaaaccacggaaaactaagctatggataagtggctgtaattgatatttttatctgtcttctctcccacc

SEQ ID NO: 216907 - DNA, 122 bp, Homo sapiens
ctggagaaaccacagcccgctcttgactcggacggggtagcccgaggcccagcgcccgcccgggagctctgcacctacctgtgaggtggacatgcgagaggtatcttgtcggcctgtgaggt

SEQ ID NO: 216908 - DNA, 122 bp, Homo sapiens
cagtgggctcaaggacatgggggtaccacttccacgtggctacctcacgcggacgccccacgtgcggcctgacccacaggaagtccagtcataatattgacacaggcagggcacacagcagc

SEQ ID NO: 216909 - DNA, 122 bp, Homo sapiens
ctagggagggtgttggagcattcagcgagataaaaagcctgcttttgtctacactttttccgttttctaaaaattccagacacaaggggagagctgcccaaacacagaggtggagaggagcc

SEQ ID NO: 216910 - DNA, 122 bp, Homo sapiens
gaggattctaaacctacaaggggccagcgtggtggctcatgcctgtaatcctagcactttcggaggccaaggcaggccaatcacttgaggtcaggagttcgaggccagcctggccaacatgg

SEQ ID NO: 216911 - DNA, 122 bp, Homo sapiens
tcagggagttggagaacttgggaggtgaccacagcgaactgcctgaggggcctaccccaccgggaccgctgatgagcctcctccgtggggccagcccagtgctgggagcggagggagggagc

SEQ ID NO: 216912 - DNA, 122 bp, Homo sapiens
ccgccgccagggtctcgagtccgggtccaggcaggcgtggaggtggcgggaacggcgcaccgcccgggtgggcgttgttttaaggccgcagggcttgggaggcttgtgttgagttacaggtc

SEQ ID NO: 216913 - DNA, 122 bp, Homo sapiens
agggccgcagttgcagtcagggtccgccagctcggggccagcgcatggggctgctgagaccgctccggacgtgcgaagcgttcgcggtgcggtaggtaggcagtgtcccgcgtgcgggtgct

SEQ ID NO: 216914 - DNA, 122 bp, Homo sapiens
tgtgagcagccgctggtgcgtctgcatgccttgcaggggtcggtgactgaggatggttggcggatcgcgggggttgagagaacgtgtgctgttttgtagacccgcggccagcagcagggctc

SEQ ID NO: 216915 - DNA, 122 bp, Homo sapiens
agtaattaaaacagatatcattactgtttgacagataaggaaaccgaagacaatcatttacggaatgtcttacagcaaattagtcttggagccaaactaaaatctatacatcttttcactga

SEQ ID NO: 216916 - DNA, 122 bp, Homo sapiens
cgcctggaggtctggcacggcgggcgctggggcaccgtatgtgacgatggctgggacctgcgcgacgctgctgtagcctgccgggaactgggctgtgggggggcgctggctgcccccggcgg

SEQ ID NO: 216917 - DNA, 122 bp, Homo sapiens
cctctgcagcttcacgtacttcgtacgacaggagcgcacttgttctctgtccgagaacttcgtcccgagagaacctcaggaactcgccgggccacaccccctgtccagggaaggaacacgcc

SEQ ID NO: 216918 - DNA, 122 bp, Homo sapiens
actcgcttcctggggctgcagtaacaggtcaccacaaacctagtggctgaaaaccacacacgtttatgatgttatcgttctgtaggtcagaattccaacacagggcccactcagctaaggtg

SEQ ID NO: 216919 - DNA, 122 bp, Homo sapiens
tgattatccagcttgctaatctgccagcgggcaccacctgccattcctccttcgtgccttcgagtagcaggctcagtccattttgaggaggctggcacgaggctgtcttcacactccccgcg

SEQ ID NO: 216920 - DNA, 122 bp, Homo sapiens
gagggggtaagtgtagcagggaggggaacgtcgccggggggtcttggacctcgggtcttccgcgtgtccggtgttgattggctccagttgtcaggttgaaaccacaactcctcccctaagag

SEQ ID NO: 216921 - DNA, 122 bp, Homo sapiens
tgtggccggccggcgcgggcaccaagctgccctgtccccgagactctgcgctccggcgggcggctttctctgggaacctcacggccctgccctctcacctcgtgcccgccggccgcagcgtc

SEQ ID NO: 216922 - DNA, 122 bp, Homo sapiens
agcagcacagagcagggcccgtgttccggctccgggcaggggtggagagacgccgtcgtccgaagcaataggggtttgtaagcaccaccccagaataagggactctccccattcctctctcg

SEQ ID NO: 216923 - DNA, 122 bp, Homo sapiens
gttcgggaaacgcatcttttttttttttttttcacggttattaaaaccgagggtggggggcggaggacgcacgtgggaacccaccaggcgcctcagcttctgcactacaactcccagaaggc

SEQ ID NO: 216924 - DNA, 122 bp, Homo sapiens
gcattgagtaatgtcttgtaacagagctgattgaattcctgaatgagttgaatggcagcacgatagcaataacatctgaccagcctaccataggtggttctattactacctatgtagtcata

SEQ ID NO: 216925 - DNA, 122 bp, Homo sapiens
tgatgaccagatgttccacaaggaagtaactagcacgactctccatccagtggcacaaagcgactcttcccctttccttgactctacatctaatttatttggaaagcatgtcaagcttacct

SEQ ID NO: 216926 - DNA, 122 bp, Homo sapiens
catgaggaaggagctgagagcagcgcagcctgcctgctgctgagattcgaccgcagggagcgggtgtacatgccgcagggacgcaagacctgccagtgctggacagagtggccatccacaaa

SEQ ID NO: 216927 - DNA, 122 bp, Homo sapiens
gagcggggggcggggtcagcgcgcgcgggtggggctctggccatgggcatggggcggggccgtcagcgggggcgtggtcggggtgtcgcgcgggaacccgcgcgggaggagagcggggattc

SEQ ID NO: 216928 - DNA, 122 bp, Homo sapiens
gcagtggagcctcggcgccttttgcggctgcgcagtggaacccctgctgggccgcgggtgcggttgtttcccactgcagtaatttactcctgcgggttgaactctactgacgagcctacatg

SEQ ID NO: 216929 - DNA, 122 bp, Homo sapiens
gctgtttatcaattgttttataaatatttttctatgaaatcagtaaaaaagaaaaaagaacgcatcgtagagataaaaaccttgtttcaggctggacgtggtggctcacgcctgcaatccca

SEQ ID NO: 216930 - DNA, 122 bp, Homo sapiens
acgcctgcgcaaaagccccggagcgagttggggggtggggctgctccgggcggcggggggcgggatccgagcgggctgtgtggaggcttcagactcccggcgccatttagcgcggagagttt

SEQ ID NO: 216931 - DNA, 122 bp, Homo sapiens
aggcaggggagctggggcggggagacccaggcctggcccagccgaaccctctcgagcacccgtctgcccatccccaggtgcgcctcctgtgcgggaaagagaccatggtgaccagcaccaca

SEQ ID NO: 216932 - DNA, 122 bp, Homo sapiens
tgtgattcacaccaggccaggttatgcagaggacatgggcttcctcatcactgatgccatcgagctcctcatgggtagacaggaccctgccagtgacacagggatgaacagctctcaccctc

SEQ ID NO: 216933 - DNA, 122 bp, Homo sapiens
ttcctgcacatgcccgcctaagttcctgcctcggggaggtaacagcataactgtccgactcgtcgctcccaaagagatggctggaacaattagttccgctttcccagctagtcgaatcactg

SEQ ID NO: 216934 - DNA, 122 bp, Homo sapiens
agaagctcagtggtcccggaccgaggtcctcctgctccccacacatgcccgtcagcagcacgttgatgccccagccccacccgtggagaccatccaccaactctgcggtcccttagccccac

SEQ ID NO: 216935 - DNA, 122 bp, Homo sapiens
agtggaaggcgcagggtctgaccccggccgcggccgccgcagcagctgatctgtcaaccccggccagagccgagccgcctgaggcctgcagtgttctccatcaccactgtgatggcatccgc

SEQ ID NO: 216936 - DNA, 122 bp, Homo sapiens
ctgtacacgattttaaagcctcaccttacctcagctaacagagaggcagggggcggagggcggaggacccaccaacccaggggaattgtaaggagacaaagatgaccccaaacgcacaagcg

SEQ ID NO: 216937 - DNA, 122 bp, Homo sapiens
catccagatctcccctttagagtctggcctggagttaggggagggtgctggaatcttctacgggccacccctttattagcataggaaacgtcctgaccaatagcaagttccaggaagtgctc

SEQ ID NO: 216938 - DNA, 122 bp, Homo sapiens
gcgggtgtggaaccaggtccgcaggtagggcagccgggcgagctcatcgccttcgcgcggcgtgatgttggcacctgccttcaggaagtgctcgctcaagtaattgcggaaatatttaagga

SEQ ID NO: 216939 - DNA, 122 bp, Homo sapiens
ggtagcgcgcgccggaagttggtaccatagagactggagagccggaggtgcccccgccaccggggcggggcggggcgaggtcctagctagctgggttagtaagcggcgcgagcgtgcgagtt

SEQ ID NO: 216940 - DNA, 122 bp, Homo sapiens
ctcctacaccctgttcgtccgcgagaacaacagccccgccctgcacatcggcagtgtcagcgctacagacagagactcaggcaccaacgcccaggtcaactactcgctactcccgccccagg

SEQ ID NO: 216941 - DNA, 122 bp, Homo sapiens
agggaccacaggcagcatgaagacccccgtggagctggccgtcagtgggatgcagaccctcggccttcagcaccgctgccgaggtggctaccgggtcaaggccaggacgtcatatgtggatg

SEQ ID NO: 216942 - DNA, 122 bp, Homo sapiens
tcctgcccgccgggtcccgggggacccaggcattccggccttcggtcggcccccccacgccggcccttacaaaggcccccattcatgccttgcgcacaaagcggcccattcaccctggcccc

SEQ ID NO: 216943 - DNA, 122 bp, Homo sapiens
gagcctgtgcaatcgctctaagatgtagcagaaaggtcgcacaggctgtggactcaaagccgtttaccttgaccaagttactcggcatctgggaggtttagtttccttatttgtaaaatgag

SEQ ID NO: 216944 - DNA, 122 bp, Homo sapiens
ccttacccgagaaggcattattggtgttgaggaagtagatctcctcccggccgtccccgtcgatgtcgcaggctgtgaccccgatggcgttcccctgccggtcccgcagcgcgtagtagggt

SEQ ID NO: 216945 - DNA, 122 bp, Homo sapiens
aaagcctgaaactcctcaagcacccagggccagataaagatctgcctcctacgctgggggcggcacacacacacacacacacacacacacacacacacacacacacagacacacattgtcaa

SEQ ID NO: 216946 - DNA, 122 bp, Homo sapiens
tcaggaccagagctgggtgtcctcctttaaagttgacttgtttgacttctcagaaaggctcgaatacaagaacatccatagagttaatgcaagcggttgcttttggggctttattacaaatt

SEQ ID NO: 216947 - DNA, 122 bp, Homo sapiens
ataacggataaggtatcgtgtgaacactctctaggccctctgggatttccttcaaaataacgggacagggaatggggcgtgaggcagaaatgacacagacttggtgtcttgataatggtttc

SEQ ID NO: 216948 - DNA, 122 bp, Homo sapiens
aactgactgacagcaaaggtcatcccacaggaacactggatgtgtaaacgtggagatctgcggagtggcagagcaggagagggcgctaaggggcatttgatccaacctccttctttcacttt

SEQ ID NO: 216949 - DNA, 122 bp, Homo sapiens
gatcacatctgccagctccccagagagaggacgccggcaaggcaggttcagagcagttgccgagcctcgaacagcctctgctggaccgttgccgctccagggaggcttcaagcaacgccctc

SEQ ID NO: 216950 - DNA, 122 bp, Homo sapiens
gacttagccaattatttttagcttatttctccattttactgacaagagaatgccatttaccgaacatttaataagcaaaataatttcttacacacttacttctcttaacttttgaaaggaat

SEQ ID NO: 216951 - DNA, 122 bp, Homo sapiens
gctggccgcggaggctgcctctggggtgcggtttcccaggctgtgtcttttcagcgggtgcgcaggttcccgccctcccagtgtcccttcctgcggtctggacgtgggggcccgcggaccca

SEQ ID NO: 216952 - DNA, 122 bp, Homo sapiens
ccaggcacagctcccactcgcctccccacacaccctgctgcccccgctgcccttttccggcgactacttcagccccggccagcggtgagacccaggtcagcacaagggtttgtatggacaag

SEQ ID NO: 216953 - DNA, 122 bp, Homo sapiens
cgtgcacaaaagaaggaacaggcaaagagatcggtacctctcagaatagcgaaggagctccgcatcaagctgttctcgaatgccggtgcgtttcctgttaaggtagcggggcgacagcgcga

SEQ ID NO: 216954 - DNA, 122 bp, Homo sapiens
gccatcacataaacccctcagaatgcagccaaagcgagactttgctagtttcccattccacgcagatgccccagggctcagcagacagtttgaaaccctcgtcctaactgtggcaaacagct

SEQ ID NO: 216955 - DNA, 122 bp, Homo sapiens
ccacccactatttcagtctctcctgcactcaagcccacccacgctgtcatcaccatcccccgcagcctgtccgctgctaactccagggggccgttctctgacctcctgttggaggccttcct

SEQ ID NO: 216956 - DNA, 122 bp, Homo sapiens
gacattttcctgctcctctctcagctgagcccttagcagagaatcaaagccatgcctggccgaaggggtacttccaggtcaggggaaatttcagtcccccatctccatcatgaacatggcag

SEQ ID NO: 216957 - DNA, 122 bp, Homo sapiens
ctgtgcccatacagctatgacgtgctttacttcttgtccggctgcagcttctgcagcccacgttcaaactgctctcccctttgccggctctgatgtgcttctccagtgagcctatgtggccg

SEQ ID NO: 216958 - DNA, 122 bp, Homo sapiens
cttccctctgccgcctgcagcccgcacccctccgagattcgtgccccactggacggtttgcgaaggctgaggctgccttggggactcacaaaagaccacaggggtgattcgaagtgtaaata

SEQ ID NO: 216959 - DNA, 122 bp, Homo sapiens
aatctcattaatatcaagataaggtcgtactaattcttagatatagcaggtaaagacacacgcttatgtagaggtaagagttcaagcaaaaatagtgcaacacttgggacttggagaagaca

SEQ ID NO: 216960 - DNA, 122 bp, Homo sapiens
agtcattcttacaattgcactgctgttcctgctccatgactggctgtctgcctgtattttcgggattctttgacatttggtggtactttattcttgctgggcatactttctctctaggaggg

SEQ ID NO: 216961 - DNA, 122 bp, Homo sapiens
gcactggaaggaggaaaagacagagacggtgaagtctcgcgagaaatacaaactctcgcgcgaggtcgctcgactcacgtgactccgcgcgccctctagccagtccctggctgtcagggaca

SEQ ID NO: 216962 - DNA, 122 bp, Homo sapiens
ccttcccctctgcttatctgcaatgtcaccacctgttgcttccccgttaccgccatgctgcgtggagcatgcacctattccagtggccctgtgactgtcagctccttaagaagcaccagggg

SEQ ID NO: 216963 - DNA, 122 bp, Homo sapiens
tttggcttgcagcacagtgggatgcgggctaatgccgtcttcagccaggaaagggctctccggctggcccctggagacgtgggtttggttaggaatgcgaggtccacactggggcaaggtgc

SEQ ID NO: 216964 - DNA, 122 bp, Homo sapiens
gtaggttacctgtcccctctggaataccataaaagtgatgttgtgtccttctcagtgcatcgcatcaggaaacacatggtatctgtctggcttgttattggtgatgttgattttgattattt

SEQ ID NO: 216965 - DNA, 122 bp, Homo sapiens
gtatccactatctcgggcatggctctgggggatcacacagcacagcgacctacagcccaacgctcagctaccagactcgtcgatagagaacctgaggaggagggagagaggtaaagaagagg

SEQ ID NO: 216966 - DNA, 122 bp, Homo sapiens
gcgcggtgtccagtctgttggtgctcacactgctgctatatactgctctgcggtgctccgcgccgccaaccgaaggcgactgtgggccgggcaagcccacgctggtgtgctccagcgcggtg

SEQ ID NO: 216967 - DNA, 122 bp, Homo sapiens
gcaggcgagggcgcgctggggcgggggcgggcgggctgcacagaggggtcggatgtggggcgagttgggcagaggaagaggaaccgcagatgccgggtggcgggagaggggctggggctgca

SEQ ID NO: 216968 - DNA, 122 bp, Homo sapiens
tcttgttcccacctaaggggcaagctgttctcagcctcctgctcaaagcagggaataacacgcatctgcctttattccacgggcgcagaatatggcatccctacgaggagcaggaagaacag

SEQ ID NO: 216969 - DNA, 122 bp, Homo sapiens
cctcctcagcctgtcgctgctccgccccttccttgtgcccctactcaagcacggatggtgcgcctgctgtatgccaggcgccagtcagggcactcgctcagccactgcacgcccaagctccc

SEQ ID NO: 216970 - DNA, 122 bp, Homo sapiens
gcaagacttgcattcttaccttcagatagttttccgtgcagaacacgtccgtgtctctgacgcacacgcctttgaggggcagagacagaaagaccgcagtcttcgtctgctgccagctgtaa

SEQ ID NO: 216971 - DNA, 122 bp, Homo sapiens
aggccaaccccaggctcccaaggacaaaactagtggctaaaaccttcatgtctcggtaggcgttttgccaccctcagccagcacccacaaggtattccagctgaatcctctataaatcataa

SEQ ID NO: 216972 - DNA, 122 bp, Homo sapiens
gtgtattcttctgtcccaaccaccacgggaaatgtaaactgaggcagaggtgggcagccacggagaccaggcatccctgaggaccagtggtccctcaccatgaagagctgctctgagtgccc

SEQ ID NO: 216973 - DNA, 122 bp, Homo sapiens
ccgcaggcagccgggaatgtccacagagatacaccacagccctgtgagacgggccaggcccggggagcccccaccttcatggtggagaaactggggctcagggctcagcctcacacccgaca

SEQ ID NO: 216974 - DNA, 122 bp, Homo sapiens
ggggggttgacagacagaactgttttggggaccagttccaattccttggatgacttggtgcgtccacctcagcttttcttccatgttcctggagaaggaccattcattcctctgagccccgt

SEQ ID NO: 216975 - DNA, 122 bp, Homo sapiens
aagatgcctctgcgcatgcttaaaaaaaaaaaaaaatacgagcagcttaaaagttttggtcgctcggaaagaccagagagacacagagacagggagaaggagacagagacagagcacccagg

SEQ ID NO: 216976 - DNA, 122 bp, Homo sapiens
ctcgacctcccaaagtgctgggattataggtgcgagccactgtgcccagcctgtgaatgacgtttttatacaaaaagtctgtccatgaaaaagtcaggcaagggctgggtgtggtggctcct

SEQ ID NO: 216977 - DNA, 122 bp, Homo sapiens
aaactcacaggtcaaggaaaaactctgtgatgtgcggtggggcgatttgccggcagccggcggcatcctcgcctcgggcctgtttagaacccagagctggccttcttcatttgacacctgtc

SEQ ID NO: 216978 - DNA, 122 bp, Homo sapiens
ttaacataactgatgatgtgaatcctttgtttgagggttcctaccttagctcactcccatcgtattaggaagggtgatgggtacttctagaatgcttcacaatggtctgaagtctttctctg

SEQ ID NO: 216979 - DNA, 122 bp, Homo sapiens
gaacttctcagaggacagattcgggcgacgaatccgagtccagtctcttcgtgcccaggacgcctgtccgcaagtcgcaagctgggaaagcagggctgataactgaactggagaccatggac

SEQ ID NO: 216980 - DNA, 122 bp, Homo sapiens
aatggcggaccttcctgccagaggagcgcacagtcacccaggcaggtgatgtgacacacacgttagggtctaaaggtcccaaggctggagtcccctttactggaccctaaacatgtctgcct

SEQ ID NO: 216981 - DNA, 122 bp, Homo sapiens
ctcagatcaagaatccagttacctcaaagctccccaacttccacctccgcagagctatgacgtcatggcaggcacgccagaggccgaaggatgcaaaagtggttttctgctttcgatgatgc

SEQ ID NO: 216982 - DNA, 122 bp, Homo sapiens
ttccatccgggaacacagaaagcatactaattacaagcttctgcctggtgtggaacactgcggccttggcttggacaggcttcacggccagacgggcagaggctgaccaggctgcagtcatc

SEQ ID NO: 216983 - DNA, 122 bp, Homo sapiens
ggacaggtgagcctcaaaattggggatcaacctgagagggttgttggcttcacccaggaacgaactcaagggtgagccagtggtgacagaaagcagtgtttatggagccagtgctgctcctt

SEQ ID NO: 216984 - DNA, 122 bp, Homo sapiens
aaataaataaataaataaataaataaaaataaaaaataataataataaaaaaagcccgcacgaactaggaaagaaaatacacaaccggccctccgtgcgatcacccatctccctcaccagga

SEQ ID NO: 216985 - DNA, 122 bp, Homo sapiens
aactagtcacaggaggagccaggctgcatgatcacgcacactctggacgtctaggttttccgacctaataagggggcaggtcgcgtcgttccctgcttaaattagagaccacctccacctgc

SEQ ID NO: 216986 - DNA, 122 bp, Homo sapiens
gggggccgttacagcccatgaggacatctccgagtccttctatatgacactagggacccccgtgccatatacagacactgttctcagagattaggagggggaaagaggatattgccacagtt

SEQ ID NO: 216987 - DNA, 122 bp, Homo sapiens
ggcgggcgacagccccccggataaccccgccgagggaggggcgcttgtaaaaccgagcggcgacggcctcgttacgaccgactcgaacattctctaataaatcatcggccttagctagtatt

SEQ ID NO: 216988 - DNA, 122 bp, Homo sapiens
ccgccttcaggcggaattgtgcccatctgtgcttcagagcctttccctgcacaatgaagacgtggtctgcacctcacatggtggctgccgtgaggatgaaggacgaggcttgggaagccatc

SEQ ID NO: 216989 - DNA, 122 bp, Homo sapiens
cgctcccagaaaccctgtacgcgatgctttggggcttggtggatcaggctctcacctgtgcgagcatccaggcggaacctgccttgctcgttcccgctgaccacgcggtagccggtcttctc

SEQ ID NO: 216990 - DNA, 122 bp, Homo sapiens
ggctaacagtggggcactgaggctccggaccattaagagacacgcccaaggtcacatagccgggaagcagagagctgagactctcccacttctcccgattcaaatcctacattctctattct

SEQ ID NO: 216991 - DNA, 122 bp, Homo sapiens
tttactgggaggttgcatcagcatctagacacttccatacattgaggaaaaacagacagccgtgtttaaggacctcagagggcttgctatcacccatttataattttcccagaacttatgag

SEQ ID NO: 216992 - DNA, 122 bp, Homo sapiens
ccagagggtgaagtcgggacccatttaaatttggtagtatgggtgaggaaggtcataacacgctaagtaaactggtgtctaagcatgtgacggcaacagctaatggtctagttcctccatgg

SEQ ID NO: 216993 - DNA, 122 bp, Homo sapiens
taaacttccacagggcctccggctccagacgtgccattcccggcttccccgggaacctcccgcttccaccaacaactccgcgacgcgcgcccagcctcacctctccgggcaggtccaggcag

SEQ ID NO: 216994 - DNA, 122 bp, Homo sapiens
tgaattgcgctttacatgcgctgcaaaatctgagctgcagaagagtagcactacaaaaaacgctacaaaaacgatgcgattagccagcccgacaacagcgcttcattgcgctgcgaggcaca

SEQ ID NO: 216995 - DNA, 122 bp, Homo sapiens
gcacccatgcccactcctggctttggggcttgtgcctgctggcacagcatgacctcagcacgggctggccgactcccagcccatctcagaagcctctgccggtgcccggcttacacacctcc

SEQ ID NO: 216996 - DNA, 122 bp, Homo sapiens
ccttggggaaatgggctttgcagggcactcggcaaagtcgctctgcagacacagcctcctcgttagagagcggtgctaaacctgtgtgctcttccggcgacacggtcctaacttgggtggtt

SEQ ID NO: 216997 - DNA, 122 bp, Homo sapiens
tagccatactgaaaatgatgattcattaggtccatatcccctggtcacaaggagtggggacgaggaggactgggctcgttctttgtgtcttttggcccaacagctgcgagaggaggggggag

SEQ ID NO: 216998 - DNA, 122 bp, Homo sapiens
cggacgtgacatcaactccaggtcgccgggcgggcgccgggcgggcgcatgcgcagagggcgcgggcaggaagctccaccctcactccaggaagctctggcttcgtttgtgaaacccgacgg

SEQ ID NO: 216999 - DNA, 122 bp, Homo sapiens
aaatggtcgccgcgctagtcccttgctgttgcaggtgactgtcgggggcgcgaaagagggcgcccttccctgagaggacaaaagccaaggtttggctatccagcgagcctgtcccccaattc

SEQ ID NO: 217000 - DNA, 122 bp, Homo sapiens
gtcggctcaggacagacctgcgccagtgtgagcatctggacctagggctcaccctcctgccgtggaggtggggcccttatttgcacaacctcttccagctcagaccagcccctgggctggga

SEQ ID NO: 217001 - DNA, 122 bp, Homo sapiens
agaagggactaagacaaggactcctttgtggaggtcctggcttagggagtcaagtgacggcggctcagcactcacgtgggcagtgccagcctctaagagtgggcaggggcactggccacaga

SEQ ID NO: 217002 - DNA, 122 bp, Homo sapiens
gcaacaccccagaggcaaggtgaacgcgagggcctataatgcaagaaccaaggcgagtcacgccctgtctgggcaaaagaggagtaaagacccctcagctgcagcccggcagcgcattccta

SEQ ID NO: 217003 - DNA, 122 bp, Homo sapiens
aaagagttaagaacaaataggcagcaaggaaacagaaatatcaggagatttcttcatattcgagaaatctggggccaggtgcatgctcacacctgtaatcccaacattttggcagactgagg

SEQ ID NO: 217004 - DNA, 122 bp, Homo sapiens
caatatggagtccttcgtgtctagtttcttctacttagcaaaatgttttaaacattcatccggccgggcgtggtggcacacgcctgtaatcccagcactttgggaggctgaggcgggtggat

SEQ ID NO: 217005 - DNA, 122 bp, Homo sapiens
atctcttcaactgcccagttacatgattcaataaattcccctttgaggctttgtggttaacgtaagctgggtttctgtcacttactgcgcaaacaatcctggctaacatagacctgcttagc

SEQ ID NO: 217006 - DNA, 122 bp, Homo sapiens
ccccggcagaaacccggaagtggaactctgagccattcagcgtttgggtgaagacggaggcgggttctacagagacgtaggctgtcagggagtgtttatttcgcgtccgcttctgtttctcc

SEQ ID NO: 217007 - DNA, 122 bp, Homo sapiens
attaatatttaattaatcgggaaggccagacaaaggagggtggcaaagagaagggaggcccgaagcagactctttggatctgtaaggcgggcacattaccctaagaagtgctgcaagttaaa

SEQ ID NO: 217008 - DNA, 122 bp, Homo sapiens
ccctacccagatcagtacaggatcttcagctggcagacgagatccagcaaatggaattcacgaagaaactcatgtgcgtttggaaaaaaaggtgggggagagtgctgcttcctgattccttt

SEQ ID NO: 217009 - DNA, 122 bp, Homo sapiens
agagtctcccggaagtgacgcaacgcggagggatccgcgttcggcagtgggagaccgaagcgaagtggttcccggaagcggctgcagctgggctgctggtggcggggcgggggtagagtggg

SEQ ID NO: 217010 - DNA, 122 bp, Homo sapiens
gtggcacagccgtgggctggtgtgccccaccagggtgcagcagtgacatcagccccgcctcggggcacatgtcccttcccggtgacagcaggctaggtgcctggaccagccgtttccctgaa

SEQ ID NO: 217011 - DNA, 122 bp, Homo sapiens
ttacacaaattgtgaattaattgcaaacacactggtgatattctgctctacttctgcggacgacaaccaaaaaaaatttttttttgcaatggcaaggtggccacagaatctctgggaaaagc

SEQ ID NO: 217012 - DNA, 122 bp, Homo sapiens
ggggccgtggacccgccccgagactcagtgacagtcgcagcttaaccccgttgggggcgccgccccgctgaggtggttgcgtctccaagtcgtgagcctccaatagctgctcccgctttcgc

SEQ ID NO: 217013 - DNA, 122 bp, Homo sapiens
atttcctataaatcctctttttaaaactggctctgccgctctggcacataccagaggaaacgctgccagtctatcacaaaccaaggggggtgctccttctcctaggcacccccaccgctagt

SEQ ID NO: 217014 - DNA, 122 bp, Homo sapiens
gttcctgaaaggaatgtcgtggaactttttctagttttcctgctggaatcaacataggggcgggcacatgtttgtcagaataacagtggcatttaactgcatgggaagctctttcaattttc

SEQ ID NO: 217015 - DNA, 122 bp, Homo sapiens
tcctaaccaggcttctgccctcagggctcccccagtgtcttgggagtgtcttgggccacacgactgcctcttagaaagttccaaccttgcccccaattcaaatttctcctcccctctttcca

SEQ ID NO: 217016 - DNA, 122 bp, Homo sapiens
cctcaatccccacacagtcagtttctcggtccaagttttactggtgcggcccagccctaccgagagtacccgaatacacgtctgcagaggacgcgggcattgggccgggtgagctacgatgt

SEQ ID NO: 217017 - DNA, 122 bp, Homo sapiens
taaggtcgccttcacgccaggcttgtggaggcccttcctgtcccttccttcctgtccccgcgtaggccgcagggctccgtgcccagggcccagtcagccccgcccatccagtggctgggccc

SEQ ID NO: 217018 - DNA, 122 bp, Homo sapiens
ccatgtggcgctcccgccggacgcaggcgcggggctgccgctgctcccgggcctccatgtcgtcagtcaggtgggtgccccacattcccgtgggtgtgcagaggcttctcaccgcggcttca

SEQ ID NO: 217019 - DNA, 122 bp, Homo sapiens
atctagaccttagtgccttcttcacctttgaagataaaacctgccaggtgtagtggtgcgcgcctagagtcccagctattaaggaggctgaggcgaaaggattgcctgagccctggaatgtg

SEQ ID NO: 217020 - DNA, 122 bp, Homo sapiens
atctgctcagaaacctccgttctcatggtcactcggcaacatgctgcggagaagaagactcggcctcggaacagccatgcccgggttcgatcccagtcctagcttgtggcagccgggtgact

SEQ ID NO: 217021 - DNA, 122 bp, Homo sapiens
ttgctctcagcgtcttcccttgggtcggtttctgtaatgggtgttttttaccgctgcgcccgggccgcggctcgatccctccgcgcgtctcacttgctgcgtgcgtcagcggccagcgaaga

SEQ ID NO: 217022 - DNA, 122 bp, Homo sapiens
cagaagcttagattatttcttggcagtagatggatggggaaggggcctggagaccaaatccgcgcctgagttaggattttagagattaagtgaagaaatacagctacaccttaaaacttttc

SEQ ID NO: 217023 - DNA, 122 bp, Homo sapiens
agggtgtttgggaagaatgacagcctctgggcagcgtcccccactctcgcttcgtcgggacggtgcaaggaaccatgcagaccgtgagcgccaaagaagaacatttcctggctccttcccct

SEQ ID NO: 217024 - DNA, 122 bp, Homo sapiens
gacacacgtctctgcgcacacattcacacgctcatgttatcttcaaatgaagggactggccgggagacatgggagcttatctcttctctctgtgattaggggtggcagtgccaaaccgaggc

SEQ ID NO: 217025 - DNA, 122 bp, Homo sapiens
cccacgattcccagaatgcgtcgcaggttaaggaaacgctttgggtaaagggctccctaccgcccagggtgcttcagaagggctaccacaactcccgtaggtcccgtgctccggggctccct

SEQ ID NO: 217026 - DNA, 122 bp, Homo sapiens
ttgtgttgggggtgggggagaaacagaggtatcctgtcactgggtgctgagctgccggcacgcctcctatcaccattgccatggccagcgtcatcaccatcgcggtggccagcgtcagcgtt

SEQ ID NO: 217027 - DNA, 122 bp, Homo sapiens
gtcagctgagggaacagctcagttaccttaagggtgataatttttttaggtttacttgttcggattgctcagcagatggcaaggagcagtatgaaaggctgaagctgacatggcagcaagtg

SEQ ID NO: 217028 - DNA, 122 bp, Homo sapiens
tccaaacctcaatgtgactgtatgtgaaaagagaagggggcggggaggggggagaccgaccgacctatttgttggtctccatcgtgtgaaaacatgaggaagtgggcacttacatgccagga

SEQ ID NO: 217029 - DNA, 122 bp, Homo sapiens
gctagtggttgagaaaggcacagaaagtgtgcgtgcatctcccagaactgtaacgtcacacgtgtggatggtggagttgcttagacaccaatgcctgaggttcaggaagctgccgcatgccc

SEQ ID NO: 217030 - DNA, 122 bp, Homo sapiens
ccgcgaggcctcagaaggggatggcgacctcttgcagcgggagcgcctcccccacctgcgcgaaggcgaggaggtcccacctgcctcagctgtcccacctgccccatctaccccacctgccc

SEQ ID NO: 217031 - DNA, 122 bp, Homo sapiens
ggggttttggcagagggttgatgaagggctttgtgggggaaccctccgagcccctatacacgttctcaaggctccggtcccagggccttctgcatgaacctttcctgtcctccacaagctca

SEQ ID NO: 217032 - DNA, 122 bp, Homo sapiens
ctcttctagcacataggcatcaccacgtttccctcacagcttcgcacgtgagatcacaatcgacaatgcagtgaagcgcccgcaatggactgcagatattaagcagtgaagacagtgagtta

SEQ ID NO: 217033 - DNA, 122 bp, Homo sapiens
gccctccacgccttccctggagggctctcagagcagcgcagaggggaggtaaggctcacacggactacaaggtctccccgagcaggaggagggagccataaggctgagaaatggcattactg

SEQ ID NO: 217034 - DNA, 122 bp, Homo sapiens
gctctctacgatgcaggggggtttaaaggagcgggagagggaaaaacagctaagctagctcgattaattcgaaagcgctcctcggccgcccgccccctgcgcttgcctaccctctttttctc

SEQ ID NO: 217035 - DNA, 122 bp, Homo sapiens
ctgctaaaatgaaaactctttaacatagcactcaaggtcctctatcataatcagattctccgtacctttccagctttatcagcagccaaactgctcttcaaagaagccctgtgctttccaat

SEQ ID NO: 217036 - DNA, 122 bp, Homo sapiens
ctggagggcgtggccatcctgctcatcatcagcgtggaccgcttcctcatcatcgtccagcgccaggacaagctgaacccgcgcagggccaaggtgatcatcgcggtctcctgggtgctgtc

SEQ ID NO: 217037 - DNA, 122 bp, Homo sapiens
cagaaacggagggggtaggggaccttaggcttccgctttcttctttgcagcagcagaaaccgctgcggcagacgagggggaggcaaaaccctgcaccccctacccgaaacccccacaggtcg

SEQ ID NO: 217038 - DNA, 122 bp, Homo sapiens
tcccgctgcactttgagaagcaaatccttaacagcaccacttgctgattaggtagaagggcggttcagagaagtggcccaatggcaggctgcccaagtccagtactccttctgcctcccacg

SEQ ID NO: 217039 - DNA, 122 bp, Homo sapiens
cggggcgctccgggcgagggattccacctctccgggttttgcccggactgggaagatgggcgctctggaatcgcccgaggaggcacctcagggaagagggaggaggggaaggtggctggaag

SEQ ID NO: 217040 - DNA, 122 bp, Homo sapiens
ccgcaggcccggcccccacctgcttgatcttctcacgctgctcagctgcgctgcccccgccgttgatgtggaggctcttcttgtacatggccatgcgcgtcttgccctcactcctctggatc

SEQ ID NO: 217041 - DNA, 122 bp, Homo sapiens
gtttgggagagctttggaagcaccatgaggactcatgggaatgttggtagccttcagatgcgtgtgtgcaggggtcaaaggaagtgaagattgggagggtttagcattacagggttgggggg

SEQ ID NO: 217042 - DNA, 122 bp, Homo sapiens
cccataataattttactctcctacccacatcctgacatcccataataattgcaaggagcccgtggtcaaccaaacataccataatactcccaacacaacccagtgtcacatcccataatgct

SEQ ID NO: 217043 - DNA, 122 bp, Homo sapiens
agtcttagaccaaaggggccttgtcagtatgcttggctccttaaggagtgctgggagggacggtttttcaagtgatagttacttaagaaagataaatccggtgttgatctttttcttttaaa

SEQ ID NO: 217044 - DNA, 122 bp, Homo sapiens
aacatggtggctcctagttcaggggcagggcccaagacatctttctccactgttaccacccggggttcacacgccgtccacactgtacccaaccccaccccttcaggtctgcctactcttgt

SEQ ID NO: 217045 - DNA, 122 bp, Homo sapiens
ctgtcctgccttggctccgcgagatttggggcgaaagcttaggcaacaggggcacgttctcgcgaggtttaggaaatttcccacggccgtgttgtgtctgagccgagtagtggaaggcggtg

SEQ ID NO: 217046 - DNA, 122 bp, Homo sapiens
ttggaggggccgcttcctggcctcatggcccatgtgcaccaggtgagctgtgagctgagccgtgcgcagcagctgcttgcctgtagccaattacctcagccctgctgggtgcagaagagggc

SEQ ID NO: 217047 - DNA, 122 bp, Homo sapiens
acaaatcttgctggcttccagtatggtattcgtttcatctcaccaaactggcgtggcctgcgctagcttcagagtctcgacaaactccaatacaagtaaggtacacattattttagcagtct

SEQ ID NO: 217048 - DNA, 122 bp, Homo sapiens
aagtgatccagtgatgtcttaaggtgcagctctttgtcctccccagctgtgctccctgcccgctgaccccgtgcgctcgagccagtgggggtggggagcccgaaacctataacataaacggg

SEQ ID NO: 217049 - DNA, 122 bp, Homo sapiens
tcaggacctcaaccgatgattgggcgagcgcagtacgggcgttgcctggggaacgccttccgcgcctcgaagtaacgtcagcacgtcgacgcggggcttttctttagccgggtcccgctaac

SEQ ID NO: 217050 - DNA, 122 bp, Homo sapiens
gccgcacaaattcgcagcaggcggctggggcggcggctggggcagcggctgcagcagcggcggacgctctgcattacccagtcttgcgtcctcggcaggcgcccgaagctgagtgcgcatcc

SEQ ID NO: 217051 - DNA, 122 bp, Homo sapiens
tgccccagtgcattcttttttcactctgtttattctattttaaagctgattccttcatgacgtctctgactgtgttagttcatcctgttctgtcctttctgtaatccttgtattttaattct

SEQ ID NO: 217052 - DNA, 122 bp, Homo sapiens
tgaggaaggccatgctgggcctgatgacaacgaagaggtcatgcgagcactgctcattcacgagaaaaagacttcctctgccatggctggttcagtgggggcagctgctccagtgaccgctg

SEQ ID NO: 217053 - DNA, 122 bp, Homo sapiens
ctttacctggcaaccctatctttgattgaactctgttttcacgctgttttccagggcattcgaaatctagctgagtgactgctgagccagggcgcgaggtcctgggccttggagcccaggtg

SEQ ID NO: 217054 - DNA, 122 bp, Homo sapiens
aagccagtgcgggggagggaagcgctaaacggaaggaactaaagagagggcgaagcagtgcgaactgggcttgaggagaggcagtgaaaaccagctaatactgtgagttgtgaaggagaagg

SEQ ID NO: 217055 - DNA, 122 bp, Homo sapiens
ggttttaagagggtttcgccttaagggcagatgttttgtgctaggccagtaatcctcaaacgtcccttttagccccactcagctgtgtgagtttccatccccatcccctcctctcacccgac

SEQ ID NO: 217056 - DNA, 122 bp, Homo sapiens
ctgggtggtccatcctcacactttacgcctaaataaactcttcttttaggttgacacctccgccttacccccaggaattgtgattttgttggtttgtatgtggtctgggttttggaatcttt

SEQ ID NO: 217057 - DNA, 122 bp, Homo sapiens
aggggcatgtggcgtctgcggaggagcctcatcctccagaaccaaggggcaccccagctgcgtcagctctgagtcctgagcccaaccctggagatagcttgatacgttgtggtggccacaag

SEQ ID NO: 217058 - DNA, 122 bp, Homo sapiens
cccttatccctccgtcgtgtggcttttaccccgggcctccttcctgttccccgcctctcccgccatgcctgctccccgccccagtgttgtgtgaaatcttcggaggaacctgtttccctgtt

SEQ ID NO: 217059 - DNA, 122 bp, Homo sapiens
acagtgcacgccgtgggccgcctgccctcctctcgtctgcctggcaatcccagctgtggccgggtccactcaaccctacacatcgtgggagcaggtccagccctgctcctgccccagcccgg

SEQ ID NO: 217060 - DNA, 122 bp, Homo sapiens
aaaaaagaagcctgagagtcattcttttgtgtgtgttgagatcaggtctcactgcagcctcgaccttcaggttcaagtgcctcctgcctcagcctccggagtacctgggactacaggcgcgt

SEQ ID NO: 217061 - DNA, 122 bp, Homo sapiens
agagctctaggagagccggccggcctctcctttcatcttcccaagtgcaccctcacgtcgcgatcacattaatttgggccatttgaaagcgaggggggaggctggggctctcttctcctgct

SEQ ID NO: 217062 - DNA, 122 bp, Homo sapiens
cattgtgtttggcaagggtgtgagagctgtgggctgtgacctcaggcagctttgttctcccgggacactttgaataactgcagatggctggtttagagcaaatgaatgttctaaccacagtc

SEQ ID NO: 217063 - DNA, 122 bp, Homo sapiens
ttcattctccgcactcacaggggcccagggtatgcctggctgcctcgcacccccaggtcccgcggctgtgacacgtctgctgcctctggacccaggtctcagctcacatcggcgtgtctgtg

SEQ ID NO: 217064 - DNA, 122 bp, Homo sapiens
ctccagtgacagctagctgcactgtggaaaggaagtgtttgcagaccttgaagggaagcacgttgtaccccacacggaaactctgcctgcctgaggcatgattgtaagtgaaaagagtaagc

SEQ ID NO: 217065 - DNA, 122 bp, Homo sapiens
gaatggggcgggggccgggaggaggatggctctttctgtggttcttccgcctgggatcggcgtcccgagctgcttcccaagtcccagagtcgaagatgggagtaacttttgcgtgccctttc

SEQ ID NO: 217066 - DNA, 122 bp, Homo sapiens
ctagcagtggaagccaaaggcagccatgctaatacagctcgtccttgtacccttaagcttcgttctgaaaaggcaggcagaacactgagagaagaaactggattttaatcaagaggcttgga

SEQ ID NO: 217067 - DNA, 122 bp, Homo sapiens
tcattactcttcttttaggattctccaaaagcccagctacgccggacaatagaatgttgtcggaccaatttatgtaaccagtatttgcaacccacactgccccctgttgtcataggtaggtt

SEQ ID NO: 217068 - DNA, 122 bp, Homo sapiens
gggccccgggccggaggcgggcactggagggccggggttgtcctgggcctgaaggagctgcgccccgggggtctggggttcatggggtctgggggtgtccgagacccgcagcggccccgccc

SEQ ID NO: 217069 - DNA, 122 bp, Homo sapiens
gcgctgggccggagcggcctccccctccccgagctcgggggtcctttagccgctggggaccggggctgcagcctctgcagctgggtttcccactctgacaggcgccattttaccgtccaaag

SEQ ID NO: 217070 - DNA, 122 bp, Homo sapiens
gagaccgtagccttttcccctcagcgtcatgggcgccgtggaaattaccatcaactcagccgtttgatcccagggctccagcatcaacagagaggctggagggcacaagcaggagcaacaca

SEQ ID NO: 217071 - DNA, 122 bp, Homo sapiens
aggtgttgtgacccttgggacagaagttcagagcgagggtgggggggggggaatacacatcgtgtatgaaaaccgactgcagattctagataatcttacgtattctcacatccttggcacta

SEQ ID NO: 217072 - DNA, 122 bp, Homo sapiens
agcgatgggtaggaggggcaggggcgccggaatctgcgcggctctggcggaggggcttggcgtctggctgcaggaagctaactgaagccaggcaccgcacagggcattgcgagcctcggggc

SEQ ID NO: 217073 - DNA, 122 bp, Homo sapiens
gcgccccctccccagcgcgcccccggccgctcctccgcgccgcgctcgtcggccatggcccgggagaacggcgagagcagctcctcctggaaaaagcaagctgaagacatcaagaagatctt

SEQ ID NO: 217074 - DNA, 122 bp, Homo sapiens
cacctaggtttattccatgtctttgctattgtgaatagtgctgcaatgagcataggggtgcgtgtgtcttttcagttgaacaattttttttagtagatacccagtgacgggattgctggatt

SEQ ID NO: 217075 - DNA, 122 bp, Homo sapiens
agctaaacctgcggtcgagggaagcggagccgcccagcccaaagctcggagtgtgcccgccgcctccccaacgagtggaaacttgaaactcccgctggtgccagcaaactcactgagggcgt

SEQ ID NO: 217076 - DNA, 122 bp, Homo sapiens
aaaggaacaaagctggagaatgcagacgtggatcctgcaggccgctgcctcccaagtgagcgggttacaaattccgctaaccccagccccccaccacgctattggctatttgaggcatgtgg

SEQ ID NO: 217077 - DNA, 122 bp, Homo sapiens
tgccctgtcagtgcaggtggaggccccggcggggcaaagtggcaggaacctcttaaagggcgagagcggcgcggagccagaacgcggtcggcccggtccccgccgcacccagcccaggtgag

SEQ ID NO: 217078 - DNA, 122 bp, Homo sapiens
gggccttcttgacgctttggggtgctgcatgtgggtgacacacgcatcccacgacccccgcggatcccacgcaggggttactgggaagaaacttttgtccattttaggacccaggacacctt

SEQ ID NO: 217079 - DNA, 122 bp, Homo sapiens
gttcatagccctttaaatcatcagaaggcatctgtgcatgtgattttattgggttcacaccgtaaactgttcattgctcaaacactgattggatgccaggccccaaagcaagtcctttacat

SEQ ID NO: 217080 - DNA, 122 bp, Homo sapiens
gatctttgggtcctggctgcctgaaaattttggttcaattaaaaaatgaccaaacaagagcgtgcatataaactagctcctgttgtatagctggctgctgccaggattcatgttacagatgg

SEQ ID NO: 217081 - DNA, 122 bp, Homo sapiens
gatggggtttcaccatgttggccaggcggactcaaactactgacctcgttattcacccggcgcggcctcccaaagtgctgggattatagtcatgagcccggccctctttttttttttcgttt

SEQ ID NO: 217082 - DNA, 122 bp, Homo sapiens
cccagaccggaagcagcgccgcactgcctgggcctggcgcggggggtgagcacaggggcccggtcggacatggacaagaagcacaagcacaagaagctcaagtcggacaaacacctctacca

SEQ ID NO: 217083 - DNA, 122 bp, Homo sapiens
cggagaaaaatctggaagccgtcgtcggaggatgaccaaatcctcgctcctctgggagtgcgattacgggcctctcacttcgtaaatcacgcaggcctgaaacgctcacatttgtttaccac

SEQ ID NO: 217084 - DNA, 122 bp, Homo sapiens
cagtctaaattgggtcttcccctgatactctcatagcacctgtgctgcttttattctccacgtcacacactgactttgagttatttgtcagatgtctgtgtgtcccgctggaatgttaattc

SEQ ID NO: 217085 - DNA, 122 bp, Homo sapiens
ggaagacgtgggcggacttgggctctgaggcgatctcctccagctcctccttgagtgcctcgcccacgcccacggcaaagatgcggatgccagcgcggtgggctgccgccgcggcgtccagc

SEQ ID NO: 217086 - DNA, 122 bp, Homo sapiens
tcacggtccaggctcagctggtggcccaggataaagggacaatcaaactcaaggtgcccacgggcctccggggccaggcgcttctgaaagtgtggggccgcggctggcaggcggaggagggg

SEQ ID NO: 217087 - DNA, 122 bp, Homo sapiens
tttgaacatgcctggaattcctttccttcatgagtctcctctgccttctccacttcactacggctcactgtgtgtctataagtttctacccattctacccattcctgactcaggagtgctga

SEQ ID NO: 217088 - DNA, 122 bp, Homo sapiens
tcaacccacaacagaggaacagatggttccactgactttctcacaggggacagccctgaccgctgttctggctttcacacatcaggtcagcggataccaacccagccacgagtcagggctga

SEQ ID NO: 217089 - DNA, 122 bp, Homo sapiens
cgcacgctcgcctgccggcgccgagcgctttgtacgagcgactcccggggaggaggaaatcgacttgtcacttcctgaagtgtttgcaactcgtccctttaaccggcaccggccaggccgcc

SEQ ID NO: 217090 - DNA, 122 bp, Homo sapiens
ggggctttccctgcgaggagggcactttgggagcagccttctcattagagggcaattagccgggctcccgcacccggtgccctgagcggggctcctgagtaggcagggcagacgcgccatct

SEQ ID NO: 217091 - DNA, 122 bp, Homo sapiens
tggatacccccaaataccctggcttaatcactacatattctacacatgtaaaatatcacacgtaccccataaatgtgtaaaatagtatgtataaataaaaaataaaatcttagctcttcttc

SEQ ID NO: 217092 - DNA, 122 bp, Homo sapiens
ccaagtttgggaggggggagtggggctctgctgggagctggggcggctgcagccagccagcggctgcttgagtttgccaggggcctttgcttgaaaaaccacaccaaacatcgtggttattc

SEQ ID NO: 217093 - DNA, 122 bp, Homo sapiens
caacccgttcacgaatacacaggcccacccaggactccccaggtgcaagaagaaaacccacgtcagaaagaggccacactgagcagagggctgcgcctgtgagaaactgaggcaatgcctga

SEQ ID NO: 217094 - DNA, 122 bp, Homo sapiens
atatctgaagcaaataaaaaaatttagttcccatattctttccaatagaaataattccttcgtggagaatttatgcctatctcgttcctatgacaaaaaggaatttggccagcctggccaac

SEQ ID NO: 217095 - DNA, 122 bp, Homo sapiens
atcaacgcaacacacagagcagtccttcccaaaacataccccgggaaccggttagaaatgcgcattctcaggcccagctgagaccaattgaatgaggtgtccgggagcggggcccagaattc

SEQ ID NO: 217096 - DNA, 122 bp, Homo sapiens
attggaccttcagtttagtaatgaccagagctaaagataggcctggcacacctgggcacccgtctatatctttatattctgtttatgtggcctgtttgctagtggatgagagtagactatga

SEQ ID NO: 217097 - DNA, 122 bp, Homo sapiens
ctcccacgggtggcggcgaggagcctgagccggcgatggtgctacaggaggcgctggagccggccatgtgcctggatcgctacccgcatgtgcagcttgaggcctcggagctgctgctggaa

SEQ ID NO: 217098 - DNA, 122 bp, Homo sapiens
ccccgggcacccctggggccccggggatctctgacgcccccttccctccaacccccgctgcgatcccacaggtggggtgaacagcgcccctgctgtcccacggggcgtcttcgcgggtgatg

SEQ ID NO: 217099 - DNA, 122 bp, Homo sapiens
ggccccggggatggaggcaccgccagccttgtgggcagcaacatgttccccaatcattaccgcgaggcggcctttgggggcggcctcctatccccggggcctgaagccacgtagccccgcga

SEQ ID NO: 217100 - DNA, 122 bp, Homo sapiens
gggcatctgaagacagagagcatgctatttttgatttcccaaaagaatctgacagagtcacggactcgttttattgactgacagtcagtgctagcagtgacttcagctgcaagtaaaaaaac

SEQ ID NO: 217101 - DNA, 122 bp, Homo sapiens
ctgagcggtagggaggggaagagagaccgagccacgcgcctcgagaagcagtgcagagagcggaagagacagaggctgcgagacctacccacagagaccaagagagacgctcggaggggaga

SEQ ID NO: 217102 - DNA, 122 bp, Homo sapiens
agcaatgtatatataggcaagaaattctgaattgtgtggagtatataagagagcatctaccgttcggaaaatggaaatctgtgtggactggggcaattagttaaaactttaagtagcattat

SEQ ID NO: 217103 - DNA, 122 bp, Homo sapiens
agccagctgggcacgtttccgttcacctcacagattcctggtaagttgtgaccagctaagcgttgaccccatttccagtggagggcccaggaatgtgggagtgtttgagttctgaccttcct

SEQ ID NO: 217104 - DNA, 122 bp, Homo sapiens
ccattgctgagtgcctggcagatgagctcatcaatgctgccaaggtgggtgagggcactccggttggggggtcttaagttgggcatttgtgggggtccttcagaattcagagctgtgtgtct

SEQ ID NO: 217105 - DNA, 122 bp, Homo sapiens
gcgagtgaggtgctggctaaaggcctgggtgtcctcatttctactctgcccaccacaccccgacatcccgttgaccagcaaatatttcaagacgatccaggctttgaccctccccacactca

SEQ ID NO: 217106 - DNA, 122 bp, Homo sapiens
aaagtttccccttaccggttttccgggctccttgtctctccatggctctccctgaccatgcgggctacctcagggaagccagcttcttcagcgagctgagccgcatccctgccactcagctc

SEQ ID NO: 217107 - DNA, 122 bp, Homo sapiens
gctcagcctcgctggccatgcgtcaccccggccttggtgggggcggggctccgaagagctcggttcagatcccggccgcctgggctccaggagccccggaaccaggataagttggatggctg

SEQ ID NO: 217108 - DNA, 122 bp, Homo sapiens
tttatacatcacacttctgcatctaaagaattcaggctcttagaatcagaatcctcttcacgtagcttgcacccagaagagcaaagagaactagacattctggctgcaggaacctctccccc

SEQ ID NO: 217109 - DNA, 122 bp, Homo sapiens
aaaaaaaggaagcttcaaatgcagtagtttagtccatgccacgttccatattgtcttcctcgtggtctgatttggtttccattttcccatcctccgaactatcgtccatggagtgatctcca

SEQ ID NO: 217110 - DNA, 122 bp, Homo sapiens
attggcctggtttcactctctgcttggtccaaacctcaacttgtgcctagaattagcaaccggaggagaaaatggccagcagagagtctacccaagaagactagactaaatttccaggggaa

SEQ ID NO: 217111 - DNA, 122 bp, Homo sapiens
caggcctctagtcaaaatgcccacacccttcccttctgctggatggaagctgggggatggcgaatgggagttacaaggtattgagtgccactgtcatacatcatacacacgtctcatcctaa

SEQ ID NO: 217112 - DNA, 122 bp, Homo sapiens
gacctagccccatcgctagttccttggaacggaggggcttctataatggaaagactcctacgctttcaggttaaatagctaccaaagagataatctttgttttggtgatccctccatttata

SEQ ID NO: 217113 - DNA, 122 bp, Homo sapiens
ccggattggccagcttctggccacgtgacggatatgtccgtttggccctggcggcacctgcgcaagactgcggctgcgtgagtaacgagaggcttctgggaagtggagtctctcccccacct

SEQ ID NO: 217114 - DNA, 122 bp, Homo sapiens
gcaaaccaaaataaagccgacaggaaacagcccgctggtttaggggagctggaatgcctccggcagcatcaaatgtcatcaacaactgacactcagcccgttcccggaggcctcttcacacg

SEQ ID NO: 217115 - DNA, 122 bp, Homo sapiens
ggcactgggtggttaggaaagagcccgtttatataaccgtggtggagagcacgggcctcccgcctaccattgcacttggtgatgagctggtccttcttgctggactcctgaaggactttgct

SEQ ID NO: 217116 - DNA, 122 bp, Homo sapiens
tctggagcattttttttatacttacgttgaaatgccagtttatctggtgttataggaatgcgcaaagaatgaaagtgcactgaagacctaatgaaaagaaaagctacaaatcttgccagatt

SEQ ID NO: 217117 - DNA, 122 bp, Homo sapiens
ggctcatgacgagggcgaggctgcggttgctgtagaagcctccgctccagatgctgaggacggactcgcagtgggagatgctggtggagatcatgtagcccaggaacgccttcatctccgtc

SEQ ID NO: 217118 - DNA, 122 bp, Homo sapiens
tgccttgctgactgaaacagcgtctcccggttgtctgccaccgcctgcttggccaggtagcgctcgcgcagttatcttggtagccagggctggcacatcgggcacgagccggtcgttggggc

SEQ ID NO: 217119 - DNA, 122 bp, Homo sapiens
cattttgccgattttttatttcttccaagctcatgtcatcttcatctagaaacgccctcacggaaatggaattgctgcctgtgaggacaacaaggagcacttcagtgatgggaacgacagga

SEQ ID NO: 217120 - DNA, 122 bp, Homo sapiens
gagccaaagtcgacgtggaggcttggggcagatttttcagtcccagttgtgtgtctacgccgaggcatgaaccctttcattcattctggcttttagccagaggtgttctaattggacttgtc

SEQ ID NO: 217121 - DNA, 122 bp, Homo sapiens
gagactgccccaggtgtctcggcttcctggaagttatttagggtctcttctgaggagctgcgttcgggctcccctaagtcagtagccctggaaagtgacacatcaaggatctccgaagaaga

SEQ ID NO: 217122 - DNA, 122 bp, Homo sapiens
cgtggcctcctgaccatgtgactgtgggcgagtcctccccgcggttttgctacaacgttccgcgtgaacacaggagaacccccaaagttgccaagactcagaaatggcaggaggaaggccgg

SEQ ID NO: 217123 - DNA, 122 bp, Homo sapiens
gtccccttttgcagccctctctggggatggactgggtaaatgttgacagaggccctgccccgttcacagatcctggccctgagccagccctgtgctcctccctcccccaacactccctacca

SEQ ID NO: 217124 - DNA, 122 bp, Homo sapiens
ggtttgggggcaagtcacctaacctctctgaatctccgaaatcctctaaaccagggattgcgaaccagaaacacaccggtgaagtctgaggatattcaacttggccaacacagtatctttct

SEQ ID NO: 217125 - DNA, 122 bp, Homo sapiens
caaagagatgattccttaaatacttagcaccactttccactttacagtgtattcttctggcgtttttcatactgttgtatatcccctcgaaatcagctggaaatcagctggaaaagaaatca

SEQ ID NO: 217126 - DNA, 122 bp, Homo sapiens
acatagctcctgagagcgcgggacttggacacggacctcggcgggcgggactgggcggggcggggcatcagaactcaggtgttttttatttacgcgtcagggcttttcttgtttaataaagt

SEQ ID NO: 217127 - DNA, 122 bp, Homo sapiens
accttgtctcaaaaaaaagagtactagttctagacttgacacatttgaccttttagtactcgttagtactaacacacaaatcatcacctatataaaattggtctcactgcagttgagtcaaa

SEQ ID NO: 217128 - DNA, 122 bp, Homo sapiens
gccggccgcccgcagcctatttctgaagcggaggtttgtctagagctcagcggggcccggcggaagcgggggccgcgcgtcccccggcgggcggcgcccaggtccgggtcccgcggttccca

SEQ ID NO: 217129 - DNA, 122 bp, Homo sapiens
gttttctcctaaatcttatgagccccgcctcccacagtagtttcacttctcagtttaatccggtctgagttaacttcctgacccaggaagtggcagcaacagaggggactagcagcgaatat

SEQ ID NO: 217130 - DNA, 122 bp, Homo sapiens
ttcaagcgattatcctgcctcagcctcccgagtagctgggattacaggtgtgcgccaccacgaccggctactttttgtattttgagtacagaggggtttcaccattttggccaggctggtct

SEQ ID NO: 217131 - DNA, 122 bp, Homo sapiens
ggcgagtgcccagcaggtgtgtttgccaggagggggcacctgtccatgcccacagaaacccgaccgcgactccatatccacctgcagtgggccgggtggccgagtgttccacagaaggccca

SEQ ID NO: 217132 - DNA, 122 bp, Homo sapiens
gcgcccagcctcgcgtccaagtgggacacagacagctccacacagccggtgcaccggtgccggagaaacccaagaggggtgagatttaaggctacatcccctacagggctaagacactggga

SEQ ID NO: 217133 - DNA, 122 bp, Homo sapiens
gagcggaggcgggtcagggtgggcaaaggcagccgatgccaggaatacaaccgcccttcgcgccgttccaaactaagagatggcagcggtttcccagcgcactgctggaagtgtgctccagt

SEQ ID NO: 217134 - DNA, 122 bp, Homo sapiens
agtccgcccagcagggcaggccgggcagcattctggggcttgtaacacttggttggtgggcgagagccagcaggaggtccggcccggggctggaggggccgaggcaccccgcaggctccaag

SEQ ID NO: 217135 - DNA, 122 bp, Homo sapiens
catgggggctggggcctgactgctgccactggggagtaggggtgtgggtgggcacagagtcgggggccttagggtaaggcaagtgaactctcaggatttagaacaaggcaaaggattttact

SEQ ID NO: 217136 - DNA, 122 bp, Homo sapiens
cacctccactatgtaaggggatggccgtgaccaaataaggactttgttccccgacggctgcggaagctgtggaacttggtgcgtgcgtgtgggggaggacgcagcaggaggactcgctagag

SEQ ID NO: 217137 - DNA, 122 bp, Homo sapiens
ctcccctctgccccttcatcctgggcgcggagggcggaacagtttctggaccagagcacccgcgagaagcagggagcggccgcacagcagccagaagagggcgccagcaccccggggccggg

SEQ ID NO: 217138 - DNA, 122 bp, Homo sapiens
gggccggggagctgggcgcgagacggccatcctagatgacgaagagcagcccactgtgggcggaggcccccacctcggagtgtatccaggccataggcctggcctcagccgccactgctcct

SEQ ID NO: 217139 - DNA, 122 bp, Homo sapiens
cagtttcactcctgaagccagcgggaccacgaacccaccagaaggaagaaactccgaacacgcccgaacatcagaaggaaagaactccagacgcaccatcttttagaaccctaacactcacc

SEQ ID NO: 217140 - DNA, 122 bp, Homo sapiens
aagacagagaagctttagcagaatcaacacattttccattcaagaccagtgcataggctgcggcagcttgactggtgatggattgatacacttcaaggaaggttactttatcactccgtaag

SEQ ID NO: 217141 - DNA, 122 bp, Homo sapiens
cccgggctggcttaaagcagtgactcccaaccagggcaatgctgtcccccaggggagacccggcaggtctgcagacatctttgttgtcataacttagggcaagggttagcggcatcggctgg

SEQ ID NO: 217142 - DNA, 122 bp, Homo sapiens
cagctcctccctcgggaagcagggcgtttttcttcctggagggcctgtggagcggaggcccgaggcctagggcaaacttgccatgaagaaaggagaggctgttcgagagccctaggctggga

SEQ ID NO: 217143 - DNA, 122 bp, Homo sapiens
actggtagctgcagcagcagattaagaatgactgtggtgtgtggcctttaaggattagagcgaggctggcaagtgcacaacagttagcctgctttcagataatggtgcatcgttgtttgaaa

SEQ ID NO: 217144 - DNA, 122 bp, Homo sapiens
tggtgcaggcagcaatgttagtactttatagaagcagctccaggctttggatcctgcccccgactccgggggtgggggctggagggtgggggaaacacgttgccgtggcacttgctggcgag

SEQ ID NO: 217145 - DNA, 122 bp, Homo sapiens
aaatacaaaagttagctggacgtggtggtcgcgcgcctgtagtcccatctactcgggaggcggaagtttcagtgagccgaatgcactccagcctgacgacagagagagactccgtctcaaaa

SEQ ID NO: 217146 - DNA, 122 bp, Homo sapiens
aactggttatccctcaggtcctgctaccccatctttcctgatccccgatccctccaaatacgaagcacctcgcatttgggtcagcagctgtttcccctgcctggtgacaaggccggtgtgca

SEQ ID NO: 217147 - DNA, 122 bp, Homo sapiens
gatggcaacggaccattgtttgcaaggagctctgagggccacctcggggccaggccagggcggcaaggatgggggtactgcagtgtgtctacatggctcaaccggagccctgtgtggtgggg

SEQ ID NO: 217148 - DNA, 122 bp, Homo sapiens
gggaacactaggcagcaggtgagcgcagagccggaggcagagcggagctgagcgcggagccgagccgagctgcctctctcctcccgccccctccccgcggctgtcaccgcctcctcccctct

SEQ ID NO: 217149 - DNA, 122 bp, Homo sapiens
ccagttgggggggttcacacatgtaatcccagcacttttgggaggccggcctgtgagggtcgtttgggcgcaggagtttgagaccagcctggacaacacagcaagaccctgtctctataaaa

SEQ ID NO: 217150 - DNA, 122 bp, Homo sapiens
gtgactgctttgtcctacaatggtcatttggtccatccttctgcccctttcccgcctccccgtttgagccaagcctctttcagattactggttagagtgactccagctttcccttttccccc

SEQ ID NO: 217151 - DNA, 122 bp, Homo sapiens
ttcctgtagtgcctgtaggtaccagtcactgcgctgtaaaacctgtacacaggtttaccccgtgtagtcttctcagccacctgaccagatgattattattatactattattgacagttttat

SEQ ID NO: 217152 - DNA, 122 bp, Homo sapiens
gaaggtcagataacaactaaatttaagtttagtgatgtgaaactttagcatgagtaactccgttttgatttttagtctggtcacttggggcctagtgcaggagattagtccacaacggtagc

SEQ ID NO: 217153 - DNA, 122 bp, Homo sapiens
ccccagcgactcgcaggggctggtggggctggggtccagctgccgtgctcccctgccctgcgccgcgccgcgcgtcttggtaggcgctgcgctgccggggccgggtcctgggccagtgcaac

SEQ ID NO: 217154 - DNA, 122 bp, Homo sapiens
cccagagagtgagcagcagcaagatttattgcaaacagttaaagaacaaagcttccacagcgtgaaaggggaccctagcaggttgcagctgctggcacaaatagcctgcttctattccctta

SEQ ID NO: 217155 - DNA, 122 bp, Homo sapiens
aagttctccgtgccactgtttgggtttcctctttgttttgttttccccaaaccccagggtcgctcagtctgtgtggcgccggctggactgaccgccgcgctccgccacccggaccccgggtc

SEQ ID NO: 217156 - DNA, 122 bp, Homo sapiens
ctaccaagactgaaaatagaccatagttctcatttcttgaacagatatcatcaggagagccgagggggagaccattaggcagccccacattttccaactcaacaggtggaggacatgggatt

SEQ ID NO: 217157 - DNA, 122 bp, Homo sapiens
aagtgatccgcctgcttcgtcctcctaaagtgctgggattacaggcgtgagccaccgcgccgggccttttacaatgtgattttgaagctgacactggcagtgggtcctcaaagtgcagactc

SEQ ID NO: 217158 - DNA, 122 bp, Homo sapiens
tcctcgtcctcgcttgtcgcggggctgtgggtcattgtggggccacggggcgacgggggacggcagcatcacaggcggctgcaggggccaagggcggccatcagactaggagcccgggaccc

SEQ ID NO: 217159 - DNA, 122 bp, Homo sapiens
ttgagatggagccttgctctgttgcccaggctgaagtgtaggggcgtgattttggctcaccgcaacctccacttcctgggttcaagtgattctcctgcctcagtctcccgagtagctgggac

SEQ ID NO: 217160 - DNA, 122 bp, Homo sapiens
tgccggggtttccagtcagcatttgtgtttatctgctcttgagctgcctgatcaaacctccgtaaagatcagggatatctaaattgacccaatatctgcatgctggctgctcagagctggtg

SEQ ID NO: 217161 - DNA, 122 bp, Homo sapiens
agtgcaccctccgcagctgctggcccaggtgctaagcccctcactgcccggggccggcaacgctggccagctgctcggagtgtggggcccgccaagcccacgcccacccagaactcgcactg

SEQ ID NO: 217162 - DNA, 122 bp, Homo sapiens
ggctccacctctgcactgtggccctctgaagctgccaggcccgccggcacacactaagtgcgcccagaatgcggggtggccaggggcataaatgttgaatgaatgaggatggaatgaatgaa

SEQ ID NO: 217163 - DNA, 122 bp, Homo sapiens
tggggcgggtgggggtgggggtcccctgggtcctacctttccttggctggctgacaggcccgccccagggcgaggagaccgcctgcctgtttacagccctttccaattcacaggccaaacag

SEQ ID NO: 217164 - DNA, 122 bp, Homo sapiens
tgccccctactgccccctctcctgctctgagaccctccgggtcctgtctcatgcaacccccggcctcaccgtctcttcttggagcgtgtgcgttccgcccaagcctcacagactctaccgcc

SEQ ID NO: 217165 - DNA, 122 bp, Homo sapiens
aacttcctctgagtgaaggcatcccctccagcacctttcagcctgctagttaggacgacccgccgccaccctccaggacctccagccctgcactgcctttcctctcttttaaataattcttc

SEQ ID NO: 217166 - DNA, 122 bp, Homo sapiens
ctctccaaggaaagctggagccatgcccgctccgaccctgacactggggctgggctcagccgggcacactcacgtgcatctgcagaaacgtgtgtctgtctgtctgcaccgtccgcccccac

SEQ ID NO: 217167 - DNA, 122 bp, Homo sapiens
ctctgggaaacggcatcggagggtggcacaaaagggggactgttggtctgaatgccaccccgccctcgcctgtccgtcctgtgcaccagggcctccagagagtagtgacagtccccttcccg

SEQ ID NO: 217168 - DNA, 122 bp, Homo sapiens
tttacattcccttgcgctggggcaggggtgggacctaaagggttggaggggaaaggaacccgcagcccagacgggacagtcaaccaaagcgggatggagagaggacccatcgcggcggaggc

SEQ ID NO: 217169 - DNA, 122 bp, Homo sapiens
ggaatcacgggacgcgggaatcacgggacgcgggaatcacagggtgccggaatcaagggacgccagaatcacggggcgcgggaatcaagcttctccataaatgactgacgcaggggagacat

SEQ ID NO: 217170 - DNA, 122 bp, Homo sapiens
taaatgctaagaaagctgatctgtgttgccacttctcacatacatccgcagactaacattcgaggttgaaaatcaacataaatgttcttactcaccttcttctattcaacaaggcagatatt

SEQ ID NO: 217171 - DNA, 122 bp, Homo sapiens
ggtgagcagcttgatggtgcggttctggccgaagcgctgcccgtccaccttgtaaaagaccgggccgtcattaggctggatgcgcagcgcgatggagaggcgcacgaggcccggcaggtccc

SEQ ID NO: 217172 - DNA, 122 bp, Homo sapiens
cgtgtcgtgtgtctcatgagcactgcccagcgccttctcaggcctcccctctgccggggccgcacacctgccaggagccgggcgctgtgctgggcagcaagttttcagacagcatcagacga

SEQ ID NO: 217173 - DNA, 122 bp, Homo sapiens
gagcacctgggcaccacatgtgccctctgctcggggaccgctgttgacccgacaggcgcacgttccacacccacaccgtcgctgctttgctcagagggaccagggctggaggccgagctgag

SEQ ID NO: 217174 - DNA, 122 bp, Homo sapiens
tgcccacgctgtgccaatagctggtgtgctttttctcagtcttgatgggaccgttttatccgcctattacaggtaagaggtttagaccgattaagttacttcctgaaggtcgcttagtcact

SEQ ID NO: 217175 - DNA, 122 bp, Homo sapiens
ggggctggagcccaggcggggcagggggcggggcggagctgggtccgaggccggcgggggcgcctccatcccacgccctcctcccccgcgcgcccgcccgctctcgggtgactccgcaacct

SEQ ID NO: 217176 - DNA, 122 bp, Homo sapiens
gccctccgggtacgcggggctggctgggctagcgggagatttgagctgccagcccccactcgccgccctctacgcctcctccgctgggccgccggcgaggaagccgcccgcagcgcagaaca

SEQ ID NO: 217177 - DNA, 122 bp, Homo sapiens
gtgaggagcagcagagtggggtggtccagaaccgtcaggatcgggagggggaagatggaacgagacagcagctgcctacgagccagggagcaagagctctgtgctttaacctgaggagcagg

SEQ ID NO: 217178 - DNA, 122 bp, Homo sapiens
cgcccagaaagtgggtatttgaggttgcagcctctggcttacggtaactctttcacccaccgggagcttggtgttatttctgtggacgctggggaattgggcaccggggaactgggcaccga

SEQ ID NO: 217179 - DNA, 122 bp, Homo sapiens
tcaagtgatcctcctgccttggcctcccaaagtgctgggattataggcattgagtcactgcgtctggccaaacttcttactatgtgtcttacattgtgttcaacacttgttattgctcaaaa

SEQ ID NO: 217180 - DNA, 122 bp, Homo sapiens
caaattcaggtcagtcatggtaagcgatgacactctgaacggcccaccacacactcgaaacgtcccaatcaaagaatccccattacccaggccttttccctctgccccacccccgaccactt

SEQ ID NO: 217181 - DNA, 122 bp, Homo sapiens
acccggggctgtcacacggcgagctgagccctgggccggcgggtgaggttccccaagcggcgatgcccctggctccctgttccgccattgcgagccgttagggccaagctggagggagggcg

SEQ ID NO: 217182 - DNA, 122 bp, Homo sapiens
taccccagaggactttggtttgggggcccccaccccacccaccgagagcctgccaggccccgggcccactgtcctggagcccccaaactcctgagcagtcaccagctggggaccacgggccg

SEQ ID NO: 217183 - DNA, 122 bp, Homo sapiens
gaacggcagtgccctttagtacatggagaatggcagtgcccgtgagcacctggagaacggcggtgcccttgagcacgtggagaacggcagtgccctttagtacgtggagaacggcggtgccc

SEQ ID NO: 217184 - DNA, 122 bp, Homo sapiens
agagaggagcgatcgtgaaatctaagtgggctgcccccgggtcttccagggttttgtactcggtggcttggcctgagttgatgtgcccatattttcaaacagccaagtgccctgagacacag

SEQ ID NO: 217185 - DNA, 122 bp, Homo sapiens
gtcaagaatcctggggaacccgctccgccccctggctccagcgccctccaatgatgtcggcgtacagagggctgttccgcccaatcaggtgtcggaaagcccagccagtccccgggagtgta

SEQ ID NO: 217186 - DNA, 122 bp, Homo sapiens
tctccttcgtaactgtagcttccttcctctgtcccagttttcaggtgatttttccattgtcgctccctcccacctccacttctctttgaatctcagccagcgcggaaaaaatgcaaggaggg

SEQ ID NO: 217187 - DNA, 122 bp, Homo sapiens
ctggttcctcctccattttggccagaacatagcccacaatcttcccgtcctcatcctcagcgatgtaagaaagctggggccaggaaaggccatgatataaatagtatttcatctggtagttc

SEQ ID NO: 217188 - DNA, 122 bp, Homo sapiens
aatatgatgaaaccctgcctctactaaaaatacaaacaattagtcgggcatggtggcacacgtctgtaatcccagctactcgggaagctgaggcacaagaatcgcttgaactcaggaagtgg

SEQ ID NO: 217189 - DNA, 122 bp, Homo sapiens
acaggcttgctctggcatctcttttgagaatgtactgcagaggggcaagggcagaggcagcgagaccagctaagagactgttgaacaagccagcaaggagatgccagtggattagctcaggg

SEQ ID NO: 217190 - DNA, 122 bp, Homo sapiens
tgagcgagcttagagagcccgggcaatgctccgaaagcctctgacctcagtcttctcgtccgtttgaccttcctacaaggcctctagaattcccagcctgcgtcagaataggaagaaacttc

SEQ ID NO: 217191 - DNA, 122 bp, Homo sapiens
gaccgcccccgccccgtcaatagcagctaaagcctggtctacggtttgaggatgcggccgcgtcacagaatttgcccagaagtgaaggtgggagttcttctgcctgtcactctccatcaagc

SEQ ID NO: 217192 - DNA, 122 bp, Homo sapiens
gagccaagaaaggccgcttccgatcctccagcccccgaggcgcgggggcgcgcggacgcccggttataactgaacaacccgagccccacgtctctgattggctcaggcagaggaagggggcg

SEQ ID NO: 217193 - DNA, 122 bp, Homo sapiens
tgagcctgggaaggaggacacagagactgcccaggagcagcgctgagggggccctggcgccggggactgtggccccgacaaccccccagaagtcgcagtggcgtcggctcttctcccttgct

SEQ ID NO: 217194 - DNA, 122 bp, Homo sapiens
cgaattcggagtcccggttccctgtgccacctggcgagctcagcaaactaaaaggtatgacgtggagctgagacataattgcacatgcttagaaacagaatggtttctcttttttttttttt

SEQ ID NO: 217195 - DNA, 122 bp, Homo sapiens
aaaaccagtggaaggagcccatgatccaccaaacagggacttctcagctacaaatgggaacgtttgtgtctccagctgggctgcagctccacctgcagaatgaggaggaagggaccacaaag

SEQ ID NO: 217196 - DNA, 122 bp, Homo sapiens
tctcctgcacccaggtaagcagcggcgctccactacctagctgtaatcggctcaggacaccgctcagtggggccggaagttgtgttcactcgggtccactccgcagagtcccgacggaagcg

SEQ ID NO: 217197 - DNA, 122 bp, Homo sapiens
tgctgttcagacctgtatccccactgcggacacccctgacgctgtttagacctgtatccccgctgcggacacccctggctgcagttcagacctgtatccccactgcggacacccctgacgct

SEQ ID NO: 217198 - DNA, 122 bp, Homo sapiens
tgcatcgtcatatcaatatttgcacactgcccctgaccttgttaggatattatttatggccgcgatcagaaggtcccgctcgctcctttctctccccttgggctgcggaacagagtggctgg

SEQ ID NO: 217199 - DNA, 122 bp, Homo sapiens
atcctccgagcttggcctgtgctccgcttcctcctttcctgccccagacgccacagcaaacgttatttccccgacatctggtggttttcaaaggacaatgctcagaccagtgcaccaggaag

SEQ ID NO: 217200 - DNA, 122 bp, Homo sapiens
cacaaggccacacccacgctctaaccacgccccctcaagtctctaggactcgccgggtcccgcccaccttggtcctcgcagcagcccttgtacttgatgatgtgctcgtggtagagcgtgcg

SEQ ID NO: 217201 - DNA, 122 bp, Homo sapiens
gagcccgagcgcctcggaccaatccccagtgattatgcaagacagcggaccaatcagctccgccagctcatgaatatttatgaccttcgctgagtcaaagctttgaaccgagtttggggagc

SEQ ID NO: 217202 - DNA, 122 bp, Homo sapiens
cggcctgtccatgatgaccattctgctccggagcctacacagagggcactgttcaccctgcggccgcctccctgcgctccaaggatcagcctcatgataaggtcagaaagaaccttggcttt

SEQ ID NO: 217203 - DNA, 122 bp, Homo sapiens
tggccggccccgcgaaagactgcgcgtgcgtagagcacgccggcgcggccccgggactctcgcgataactgtactgagataaagtgtggcaactcgagctggctggtgattcatcctcggcg

SEQ ID NO: 217204 - DNA, 122 bp, Homo sapiens
ttattaattttccaacttgcttttgtagtcccaagctctaacagtcatatcctgaccgggcgcagtggctcacacatgtaatcccagcattttgggaggccgaggaaggcggatcacctgag

SEQ ID NO: 217205 - DNA, 122 bp, Homo sapiens
gcagagagggtagcgcggtttcttaggccagagtggagtgggacaggaggtgcccagagacgactgtggtggcttgagacatggaagcgctgcagcctttgagcccagtatccagcattgca

SEQ ID NO: 217206 - DNA, 122 bp, Homo sapiens
ctctaatctagaactgcaccggtaaacggtcagcaggactgtgttcctcaatgaaggttccggggtggtggggtttgggtgggggacaggggtgggatctgctttcagcctcaattcaggtt

SEQ ID NO: 217207 - DNA, 122 bp, Homo sapiens
cgcacgctccagggttggttgcaagtggcccagagtcttggatccctggtcctgttccaccgggagcagaaccacctcgacgcggggacagcggcctcgctcgctgcccagcgcccggacac

SEQ ID NO: 217208 - DNA, 122 bp, Homo sapiens
acttacatgaaggctcagccttgactttaaacggtggaagcgtctctcctcttgatgtggcggcaggaagtgtctcccacgcgaggactctgtgctaaacgtgtgactgtcgcccccattgt

SEQ ID NO: 217209 - DNA, 122 bp, Homo sapiens
ctccccgccatcagacgcactgcagacctggggcctttgtttcccaggcagggaaatgggcgtgctgcgcccacgggcgcagggaggacgggggagcccgccctgggggcctggaggattcg

SEQ ID NO: 217210 - DNA, 122 bp, Homo sapiens
ctgctcctccacaacagctttctttctggctgaatcaggaagcagcttccaaggccttctcgacacagagctccaagtagtcactgtcatgaccatttgttaggagctggcacttgagatac

SEQ ID NO: 217211 - DNA, 122 bp, Homo sapiens
gggcacccgcagcaccacgcacctgtctgcaccgccaccacctacaacgtggcggacccgcggagattccactgcctcaccatgggtagggcggggtcttggggcacctgcgctccgcgcct

SEQ ID NO: 217212 - DNA, 122 bp, Homo sapiens
ccaacgtcactcgcaaaatccccggggggcgggcctttccgcccacttccgtgtggccgccgattggttttgccagatttccctgtcggcttccttactcgaggtagagccgcacggcagcg

SEQ ID NO: 217213 - DNA, 122 bp, Homo sapiens
acccttcggaaacgaaagaaaaatcgatgcgagaacacccttcggaaacgaaggaaaaatcgacgcgagaacacccttcggaaatgaaagaaaaattgatgatctccagtgaggacgcacta

SEQ ID NO: 217214 - DNA, 122 bp, Homo sapiens
gtcttcctggaagaaggtggccgaaggcctgcggtcgccgggaggcttgcggagcaggagcgccctctctccgcccgagctatccggtggcttcctgcatcccacctggcggactcctcttc

SEQ ID NO: 217215 - DNA, 122 bp, Homo sapiens
cctgcagggcctggagaaggtagaagggccctggggcctggactctggtcagggtggacacgattggagggtcctgcccctggggagagtttgcctggccccaagcacacaaaggcaagcga

SEQ ID NO: 217216 - DNA, 122 bp, Homo sapiens
cgcatgcgcagttggaagtaggcaaaggtgtcaggctgggcggtccagaccacacggaggcgccctgtctcatctctgcccagcaccctcaactctcccagctcctgggggcgctgctgcag

SEQ ID NO: 217217 - DNA, 122 bp, Homo sapiens
cttagagaagacgcggataagggccaaggaaagagggaggtagcggttgctgagctccttcggcgcttcggctcctgtagctctgactattcggaccgtcaaggtagaataggaggcggcca

SEQ ID NO: 217218 - DNA, 122 bp, Homo sapiens
tgcattcctccaggtctcacggagaagggggagggcttcctggtccactccagctgggggcgctatggcccggcagaccagggtcctccagtgaggagctctggaccaaggtctaacttggc

SEQ ID NO: 217219 - DNA, 122 bp, Homo sapiens
aaaaagctgaaacgttttaactattttaatattttgtttatagtacttaatatttgtgaacgtgaagtaaaatggacacagtcatagtaaaactgtggtaaaactaacttggatggtgtttg

SEQ ID NO: 217220 - DNA, 122 bp, Homo sapiens
gttcctcccacttagctcggtgctaggggcgcatttccccggcatgcctctgctcctttgcgcacgcgcgccgcttcccagtggcaagcgcgggcaggaccgcgttgcgtcatcggggcgcg

SEQ ID NO: 217221 - DNA, 122 bp, Homo sapiens
gctaaggtcccagaccgccctgaagcttcataagacctctccttgtctgtgtacgatggacgggtggctgactctagagctgtggctgttgcctccctctctggtggtgaatcccccatagt

SEQ ID NO: 217222 - DNA, 122 bp, Homo sapiens
tgtagcagacgtggcatcagagaccacgtggccccaacccctcaggggacaccacctgcacgcctcgctcaccctacgtggggacatcacctgctcacctcgctcaccctacatggggatgc

SEQ ID NO: 217223 - DNA, 122 bp, Homo sapiens
gggcgggggggcaggcgggcgagaagtagtggagtttagggcgcgtttcctgcacttccccgagaggctggaaccaggtgcggcagggcgcgctcccgtggcgcgggcacggcacgggcggc

SEQ ID NO: 217224 - DNA, 122 bp, Homo sapiens
ttcttatcaagtgccaggtaatagacttcaaacctttggtggtggggggtgttacatgaacggctgctggggttccttaataccttaaagttacatgtaaattttttgcataagagaaattt

SEQ ID NO: 217225 - DNA, 122 bp, Homo sapiens
cgtgtcaggtccttcttcctggatactcataacgcggccccatttctcactcccattgggcgtcgcgtttctagagaagccaatcagtgtcgccgcagttcccaggttctaaagtcccacgc

SEQ ID NO: 217226 - DNA, 122 bp, Homo sapiens
aggagagaggagctgtggggccggtccccaggacggcaggagaagcagcggcgcagggaccgggagggggcgggccgccgcgctcaccgggcgggcgggccgggtccgcgctgcagcgaggt

SEQ ID NO: 217227 - DNA, 122 bp, Homo sapiens
gtacatattcttctgcaacttgctatttttcttcggcattatattcttgagattcatcctcgtttttgaacctacctgtaatctatttgtttctgctgctgaatggtattcccttttataca

SEQ ID NO: 217228 - DNA, 122 bp, Homo sapiens
atttgtacagtcagagactcttaccagacatctccaggaatctgtgagccattgtcaaaacgtccattttcatctggctgtgaaagtgaggaccacaacaggtaggtattggtagaaacagg

SEQ ID NO: 217229 - DNA, 122 bp, Homo sapiens
agcaccggtccgggagtgccaggctcgtgcccggccggggagaggagtgggagactaagtcgcagggcaagggcaactgcatagtcggggacctctagggaatcctgagtcccggcattctg

SEQ ID NO: 217230 - DNA, 122 bp, Homo sapiens
ctttcctttgctcctgcgcgctctctggggtggggggctcagcgagcttcaagaggtggccgagattcccccaccccgcccccagatccccgggagaggtcagcacggcccctcccgtgggt

SEQ ID NO: 217231 - DNA, 122 bp, Homo sapiens
ctcccagatccctagattcaccagggactccccaggccagaaagcaaagtccccagcccccgctgactgacctctgcaagcagtgcgcagccgtgaggacccactggtggtggatgagggag

SEQ ID NO: 217232 - DNA, 122 bp, Homo sapiens
ctcctcgtgctccaccacgccctggctcaggttggtgtagttggccagcttgttgagcagcgaggacaccatggggttactgtccatctcctcctgcgcggcgtggacatggtcacaggcgg

SEQ ID NO: 217233 - DNA, 122 bp, Homo sapiens
ctggggctgccagaaatgtaaaccctgggtgcaagtgacgggatccctccagcgtcaagccgaagagtcatcctctcacctcacccacctccgaatgaggattaacaaactcaattcaggac

SEQ ID NO: 217234 - DNA, 122 bp, Homo sapiens
agtaatctagagagccaggggccgcctggggtccagcttgaggcctcctagctagcggaccgaacgtctgggctgtagctctagctagggatgggacttcttgcttcccggaatttgccgga

SEQ ID NO: 217235 - DNA, 122 bp, Homo sapiens
tcaggcctttaagaggcaggcccaagaagggaaccccaggaagccctagaagctccccagcgcctccatcccatggacccggatcccctgcaggagggggaagttgagcagtggcccaaaga

SEQ ID NO: 217236 - DNA, 122 bp, Homo sapiens
ccccaggcctgcaaattattctccccgtggtctttctgcttgagtcactgactctatgctcgtttaccaaccaggtaccctgtgccaggtgccgtgtccacgctgggtcacctcgggggcca

SEQ ID NO: 217237 - DNA, 122 bp, Homo sapiens
ccgtgggccgtaccattctggccggggggacctgggaggggacgcgcggagggcttcccccggggactgcctgtatcgagactctctccagcccaacaggaggatgggaaggagacttgtgt

SEQ ID NO: 217238 - DNA, 122 bp, Homo sapiens
gggcccaagttactctcatccacaaatacaaagcactggcaagaaatacaaattatgatgcggcattttcagagcttgtcttaaaattcagaacaaagctcagtaaagggaccaagtctcgt

SEQ ID NO: 217239 - DNA, 122 bp, Homo sapiens
ccctacgccccgagccagtcccgttccctccctccggaagaccccggtggttcccggctccgacccagcacactcacctgccagccgctgccgtccgccatgtctgggcgaccggcgcgcca

SEQ ID NO: 217240 - DNA, 122 bp, Homo sapiens
aactactcggtggagagcgccgtggcggacgcgctaggagccgccggagtcactatgtaccgggatgcgatcctggcccagtggaatgacggcctgcacccagaccccatctacagcgcctc

SEQ ID NO: 217241 - DNA, 122 bp, Homo sapiens
aacttctgggacacagggagaagaatgcagggagctgggcatttgcaccacggtaaaagccgttaaacttagtccagcgggctgagatgaaatcagttccaggaggtggcataaagggaagc

SEQ ID NO: 217242 - DNA, 122 bp, Homo sapiens
cttgctgaaggctgagctcaccctgtgttgtacggttcatattccggtgtgcaggaaagacgtgtctaggctctgagcacagttttggataaggatgaaataatgttcatttaatacttaat

SEQ ID NO: 217243 - DNA, 122 bp, Homo sapiens
ctgataaggaaatatgcctgtgtgtttcaccaaatgcctctgaaactctcctttcgtatacgaaatgtagctgcagtgagaacaaatgaatttaatctcctcgtgttgaagggtgtgctttt

SEQ ID NO: 217244 - DNA, 122 bp, Homo sapiens
ctgattgacaatggtgaggggcagaggggccgcagtgagaagaaaaggacaggagtgagccgtagcattactctagccaaacagagccaggaatctcgccaacgagaaagtgcaggattggc

SEQ ID NO: 217245 - DNA, 122 bp, Homo sapiens
taggggccagtaaccatgacgacggccgttgccaaggccgagagccaatagaggcgtcgccggggctgtttcaaaaacctaaagcaaacaacgaaaaacgctacatcgttgggggaggggaa

SEQ ID NO: 217246 - DNA, 122 bp, Homo sapiens
ccccacgctctcatgccggctcccagacacactcaccatgctgggtgaagatattgaagccggtctctgtggtgcgccccgccgggtcccgcctgcggccggagggcctggctgcactgctg

SEQ ID NO: 217247 - DNA, 122 bp, Homo sapiens
gccccctcaggcgtccagatttggggaggtcaagagaagctggtctgcccctctcctctccgcctgctgtcttctcaaactggatgggccagttccgatgccaagatccgccccccatcagt

SEQ ID NO: 217248 - DNA, 122 bp, Homo sapiens
aaaaaaagtgggctctagtcttgccggggactcgtggggtaacttgttcttgggagccagcggtatggcgtcgggctgcaagattggcccgtccatcctcaacagcgacctggccaatttag

SEQ ID NO: 217249 - DNA, 122 bp, Homo sapiens
caattttattttatttttagagacaggatctcactttttttgcccactactgggctcaagcgatcctcctgcctccatctccccaagtgctgggattacagccatgagccaccatgcccggc

SEQ ID NO: 217250 - DNA, 122 bp, Homo sapiens
aggctcccgggagcaggtgggaattcgttccgggatcatctgaggggctgtcagaccctccgaggacctggagcccctgcctcggcagcagaagccgctccagagactgatgaatggaagag

SEQ ID NO: 217251 - DNA, 122 bp, Homo sapiens
tgcctggaacaaataaacctcatgaaatccaatttctgatggtcccaagttcagaagccccgtggccagtgcttatcaaaatgtaaggctgaggcaggagaattgcttgaaaccaggaggca

SEQ ID NO: 217252 - DNA, 122 bp, Homo sapiens
gggttctcagtactcaccaagacagtctcactagccaaccatattagtctgccagctacacgttttctacttctactcaaaatgccctcatccactgtctccatcaatccaagatttccttt

SEQ ID NO: 217253 - DNA, 122 bp, Homo sapiens
cgactccagcaccatggtggcgctgaggcacaaggagagggaggagccggaaccgcccggcgcagctgagggctgcgaccagcgctgcaaatgacagcccctccggcgcaggcccacccccg

SEQ ID NO: 217254 - DNA, 122 bp, Homo sapiens
ccaatccaaatcccacatctcctccaagaaacgctgccatgacgatgaaaaccaccatgacgctgtgaggtggagtccaccaacgtcctctgcccgaccaaaagcatggaattcctcggagc

SEQ ID NO: 217255 - DNA, 122 bp, Homo sapiens
cagaagccatttatccacaagtcacgtgatttaacatatggctcccgtgtggttcctgcccgctccgtgtgggctaccgctgggagtgcacgggcaggatggagggacactcggggggtgag

SEQ ID NO: 217256 - DNA, 122 bp, Homo sapiens
taaaagaaaatgttaagtccttgaaaaataatagtgttacttttttaaaaaaggaaccaacggtaagatagagcttttgcatattaaaaatatgacaagacaaaatttagcaaaaagattgg

SEQ ID NO: 217257 - DNA, 122 bp, Homo sapiens
cagcagaacagcgaaaatcacttttcctgtgatcctcatcgatgcaacaaactgaggtggcgccctcagtgtgggattggggtaaagaggaaatgtcgacccaggctgcaggtgttttcctg

SEQ ID NO: 217258 - DNA, 122 bp, Homo sapiens
ctctcttccacagcgtccactgggacagttcaaccctatctgcgggaccaatctccaagacgtgagttggcacagccatcagttcgtctccatggatgtctccacgggcaacctgagctccc

SEQ ID NO: 217259 - DNA, 122 bp, Homo sapiens
ctagaagctcagctgaaagcttgcaactgccgactcatcttttcaaaagcaaaagtaagtcgattccttgcttatgtatatatctcacagtttgtattttgaatttttaaaaaatatttttc

SEQ ID NO: 217260 - DNA, 122 bp, Homo sapiens
cacactgagaaactgctgtgtgcagcctccgtgtcacacacacgtgtgcccctcctgcatcgctacctcggaacacgtgtgttcaggcatggatgcatctgtgtgggtgttcgtgcactgca

SEQ ID NO: 217261 - DNA, 122 bp, Homo sapiens
ctcaggtgatccacccaccttggcctcccaaagtgctgggattacaggcgcgagccaccacgcccagctgttgattgtgttttctcattgaagtttagattttcccatttcttggtataatg

SEQ ID NO: 217262 - DNA, 122 bp, Homo sapiens
aactgggaggccgcgaaggcctgagagtcaaggcagtcgggggagaatgcaggtcactcacgcggactctcgccaagaggccaggagaggcggctgcctggtccggagcacacttctcactc

SEQ ID NO: 217263 - DNA, 122 bp, Homo sapiens
catatacaaaagaatgccagagaagaaaccaaaataccaaaaatatttggagcctggttgcggactgaattttatacaactttcaaagacactatttgagaggctgtcgtgtgtagcctact

SEQ ID NO: 217264 - DNA, 122 bp, Homo sapiens
tcgttccatgcgactgggtgcagcatcgccccatgcgactgggtgcagcatcgttccatgcgactgggtgcagcatcgttccatgcgactgggtacagcatcgttctatgtgactgggtgca

SEQ ID NO: 217265 - DNA, 122 bp, Homo sapiens
gcgttctcccagcccgggtcgcaggtggagggggagtgcctcctgcagggacggttctcccgcagacactcaaactccgggatgtaaaacccctgttaataattgtcaggggtctgttaatt

SEQ ID NO: 217266 - DNA, 122 bp, Homo sapiens
aaccatcacatgttcttataataaggaggggttgttctacatctcattactggctcaggccgaagataggtcaaaacttaaggacctaggggagggagaggagcttaactaaagcttggtca

SEQ ID NO: 217267 - DNA, 122 bp, Homo sapiens
attcacgcatttatttcacaaatgatcccagtgtgcctgtgtgtgcctgggccccggcagcggccagccttgccctggaacacaaatgactcacagagagggacgggtcacgcggagaataa

SEQ ID NO: 217268 - DNA, 122 bp, Homo sapiens
caggggcctcagccccatttatttgcacagccaggggttcctgccacaaacagcagttttcgattatcagtagctgtttccctctagcctgggcaggggctgagagagacacacacagaaat

SEQ ID NO: 217269 - DNA, 122 bp, Homo sapiens
gggaaagcccagtgactgtgatttaatttttattttctagagtggatgcctgtgtggtttcgaatcaaatctgctcatgcttatgaatcttgctggtatagaagccctgccattcactactg

SEQ ID NO: 217270 - DNA, 122 bp, Homo sapiens
ctatcccgcccccctgaacccttcctattggcccgaagagaagcaaggctccacgccgcacgggtcaggcgggcttcttattggacaatccaggctgtcagtcaccaggcgggcgacatgac

SEQ ID NO: 217271 - DNA, 122 bp, Homo sapiens
tcagaaagacttctgaatagattgtttttgcttcaccaatgaggatcactaggtcaaactcgggcaaaactgtaaagtctttggtttctctgctttataatctcaatctcttttcttcatct

SEQ ID NO: 217272 - DNA, 122 bp, Homo sapiens
tttgtagtatgtttctcctaaggtggttaaacaaactctcatttgactgtgagaactcatcgaaactggggaaccatgatgataaaattatacagccaggtgggaagcagctcatgagataa

SEQ ID NO: 217273 - DNA, 122 bp, Homo sapiens
aaagttcactatatagagagctcagtgagctgatcgcggagaagccacttctgccagccccggcgcctataaatcgcattccctcccgcgcccccctttttagcatatttgatcactttgat

SEQ ID NO: 217274 - DNA, 122 bp, Homo sapiens
ccagaaggaagtaaccacagcaggtgcctaaatgaggcaggacaggcccggagcaggcgccgccgccagtgagaacccgggccctgagccgggcggtagtttgctggggctgagtctggggc

SEQ ID NO: 217275 - DNA, 122 bp, Homo sapiens
ctcccccacccccaactggtgcatgcctggtgcctgggaaacaagcaaacggctctgggccgggatggaaaccaccattccaacagtcacacgtgcaacccacctggtatcccctgcactca

SEQ ID NO: 217276 - DNA, 122 bp, Homo sapiens
acatcgagtgtgaagagtgatggggctggtggggcgcgggcttccttccgtggccgtggacgggggcgtggtcgcggccggggacgcggccggggtggcactcgaagtacgtgaggcccctt

SEQ ID NO: 217277 - DNA, 122 bp, Homo sapiens
cagccatattgtcaagttcgcagcccctcctggcctccagctaatgcgttgggattctaccgcagaaacgctcccataaacctctgctcatcaagtgtcatcagccccatgcatcatgtgac

SEQ ID NO: 217278 - DNA, 122 bp, Homo sapiens
agtcaaaaagaacgcccgagtaaggagcgaggtggcttctgctgtgaggctggccagccccgcgggtggggtggttgagggacgccctcaagccggtccatttgtgcggctgggctgccctc

SEQ ID NO: 217279 - DNA, 122 bp, Homo sapiens
acctccattggctttggcttttggcgtttgtgctgcccgaccctttctcctgtccggatgcgcagggcagggcctgagccgtcgagctgcacccacagcaggctgcctttggtgactcaccg

SEQ ID NO: 217280 - DNA, 122 bp, Homo sapiens
cgctgaagggaccgggatttactgacatattgcacccgcctccctggctgtggaccccgccggctccagcccatctcccagtgggtgagagacaccaggaaggggctccctcgacctccggc

SEQ ID NO: 217281 - DNA, 122 bp, Homo sapiens
aggaagagggtgatggtggctgaatcagtggccgcagcaagaacctgccccagcccaggacggcaggcagggttggggaggaagatgactttggtattggaacagagagagtggcaagagtt

SEQ ID NO: 217282 - DNA, 122 bp, Homo sapiens
ctgctgtgtgcgggtgaaatgcaaagacccctgtgaaagcgttgcccactgtgcggcgtgcggcacccagcgcggaaccgtcctaatgggacgctgagacccagagggcgcccagggttttc

SEQ ID NO: 217283 - DNA, 122 bp, Homo sapiens
cctccctccatggccctacgcccatagttagctctgtccagccctctggcggccctgatccgaaaggaaaccccaaagccagtacccggcagcaggagcctagtttgggtttgtccaagcca

SEQ ID NO: 217284 - DNA, 122 bp, Homo sapiens
gcgccactgcactacagcctgggcgacagtacgagactcggttaaaaaaaaaaaaaaagacgaaaaaaagaaatggcacaggcataggaaacaaaccagtattcagaaataacttggatcgg

SEQ ID NO: 217285 - DNA, 122 bp, Homo sapiens
gctctcctacaaaacccgtcctaggcggccgcggaagattcgggagggacagcaggtattcgccgggacacaggctcaccttcctgagcccaggccactgggaccaagctgatactcagaaa

SEQ ID NO: 217286 - DNA, 122 bp, Homo sapiens
cctctcctgctgttcccggtgtaccccgggggccgcccacctcagaatttaccccttcggcgccgcctgtcatgtggatgctgccttgcctgtcactcaacttcttaccccgcccccgcgtc

SEQ ID NO: 217287 - DNA, 122 bp, Homo sapiens
acctccgactgttgaggccgatctcaagcctggacttcctcaccggggacatgagttccccggcccggagttgcggtgaggatgaaatgagatcacatgcaggaaagctcttaggcagcaat

SEQ ID NO: 217288 - DNA, 122 bp, Homo sapiens
atttgtaatgaaatgtatttcgaatacagatgctctttgatttacgatggggttacatcccgataaacctatcataatcaagtcaggggctgtctgtagagggatctctaggatatccccta

SEQ ID NO: 217289 - DNA, 122 bp, Homo sapiens
gtgtgctggtggttggcaggaggatctagaaagttcctgtgatgcgttacacctatctagcgggattagagaggcagagcacatcaggggaatggaaaggaatgaggacaatatacagcttc

SEQ ID NO: 217290 - DNA, 122 bp, Homo sapiens
aaagtacccagcaaatgggcattttacaagaagtacgaatcttatttttcctgtcctgcccgtgagggtgggggggaccgggcccctctctagggacccctcgccccagcctcattccccat

SEQ ID NO: 217291 - DNA, 122 bp, Homo sapiens
gcctggctcgtgccagaactacggaggaccccgcgaaaggaagaagatgcaacgtgtgcgcgtacccgacgccgccgcagccttcgctccgcccctgcgccgcagctactgccgacaccgcg

SEQ ID NO: 217292 - DNA, 122 bp, Homo sapiens
cactcccttcctcttttctgctcacacaggaagccctggaagctgcttcctcagacatgccgctgctgctactgctgcccctgctgtgggcaggtgagtggctgtggggagaggggttgtcg

SEQ ID NO: 217293 - DNA, 122 bp, Homo sapiens
gtcccagtacctgcgagccccctgcgtggacagcacgctcggccgcggggagccagcacgcgtctaatcggaaggctgtcaagtgcatccagtaacgtgggataaaacgagtttgggcacta

SEQ ID NO: 217294 - DNA, 122 bp, Homo sapiens
gcacggggctggcctgtttgaactagctgacggcttcactggggatacaggattgccacacgcgaaaccgttagataacaggagaagatagcgcaggatgtgagccccgagtgggactggca

SEQ ID NO: 217295 - DNA, 122 bp, Homo sapiens
gagatggagaagcccaaacccctgcagcgctcccccatcacgtccggccctggaagcccccggaaaccctgccacgccctgagtgggagagcgcaggtccctttccggccctggaagccccc

SEQ ID NO: 217296 - DNA, 122 bp, Homo sapiens
ccgattcccggcaccgagagctttgcaacttccaagtctccacccccaggtcccgagtcccgagaggaaggtggagccacattactcctattgtgtaggttcccacctgcaagagtgctgtc

SEQ ID NO: 217297 - DNA, 122 bp, Homo sapiens
ccatatccacctcccgtctcccaccctgcccccgggccactggtccctggccttgcctcccgacctgacctcctggtgcaggccccagaagttgcggtgagtcgatatcacgccattgcact

SEQ ID NO: 217298 - DNA, 122 bp, Homo sapiens
cccaagagtccggctgaggcagggctcggagtgcctcccccaagcctttccctttggttccgagttcgggtctccgcggccgtcttcccggggagctcgcggggcgaagagccgagcccggg

SEQ ID NO: 217299 - DNA, 122 bp, Homo sapiens
acggtggggcctagtgctagcccgaggagcggacgggggccgggcaggggcggtgggcgccggcctcgtctcggtgctgctcggtcaggctgtcccggcgcggcggcctcgggaggccctgc

SEQ ID NO: 217300 - DNA, 122 bp, Homo sapiens
gtgttgagtacgttctggattactcataagaccttttttttttccttccgggcgcaaaaccgtgagctggatttataatcgccctataaagctccagaggcggtcaggcacctgcagaggag

SEQ ID NO: 217301 - DNA, 122 bp, Homo sapiens
ggatcccgagcagcgagagtgtggggtacctaggcccctcacgctggacttcacagtctccgggccgcctgacctccgcacgggtatatgggatggaagcgggaccctcgggagcaggtaag

SEQ ID NO: 217302 - DNA, 122 bp, Homo sapiens
tctttgttttattgatttacttatacccctcgccttaggacttcgttccccctctttgcccgtcagcggtatcagttgaggcctgttgtggctctgagtattttgtgtccccagcccgttga

SEQ ID NO: 217303 - DNA, 122 bp, Homo sapiens
tcagaggctgcagaagtaatgacagacccgagacaggccgagctcacttcagtgtctgttcggactggggatttgttgatgacattacccagactgcagcgttaggagatgccacctagcag

SEQ ID NO: 217304 - DNA, 122 bp, Homo sapiens
gccttcctctagcgagcttgaagtgggctcagccctggtcagaagggagggcagtggccccggtgcatgaagggaaacaagcctttgttgaaaatgtcctagattctaatctctgtactgga

SEQ ID NO: 217305 - DNA, 122 bp, Homo sapiens
atctggccctggccagctctgcatttgacaaatgccaggaagaggaaactgttgagaaaacggaactactggggaaagggagggctcactgagaaccatcccggtaacccgatcaccgctgg

SEQ ID NO: 217306 - DNA, 122 bp, Homo sapiens
ttcccttcctgaagaactagtccaaaagtcattatgaaaccaactttgcaaaattatgaccgtgaaagaaatcagacctaaccgaccctatcttgcttctaacccttaagctgccctggttc

SEQ ID NO: 217307 - DNA, 122 bp, Homo sapiens
attgatgccacagctgaggaggcctgagctgccatccagccagaacgtggctctgctggccggagcaaactctgctgtctaacctgtgaccagtctgacccttacagcctctgacttaagct

SEQ ID NO: 217308 - DNA, 122 bp, Homo sapiens
cgccggcgggcagtgcccaggcggggtcgcctcgaggccgtcggtgagcaccgggcaatgcgaggccttgttaccgaggttgttgtgctgggggcgtttccagcacagtcattcaagggacg

SEQ ID NO: 217309 - DNA, 122 bp, Homo sapiens
cggcttactctccagcgccccattgcccccatggtagcgccctaggacacagtgaggagtcggaacagagccctagtctgggtttcaaacccagggccatcttctgccaggtctctcaccct

SEQ ID NO: 217310 - DNA, 122 bp, Homo sapiens
aatttgtgttggggccacattcaaagctattctgggctgcatgtcctggccgacgagctgcgagttggacaagcttggtatataaccttttgaatctggctttcactgaaggttttttttgt

SEQ ID NO: 217311 - DNA, 122 bp, Homo sapiens
tcgggtcagtccttgaggactgcctgaacacgagggggtccagaggggctctgggtgccacgggggtcacatgggagctctcagtccctagagtgtggtgtgtgaatggacccttagggtta

SEQ ID NO: 217312 - DNA, 122 bp, Homo sapiens
cagctctgccccatgcgcatgagcggccgccgctcgccctcagccaggcccagcgcgccccgacgcgtccccacgcctgcgtgatccaccggaacccaagcccaggcaggcggtgagagggc

SEQ ID NO: 217313 - DNA, 122 bp, Homo sapiens
ctttttttcattttaccaactccagtcctacagccaagacaactctcactgcacagtgaccgtcctctgaattctagcaccctcatccaaccaagccacgctctatggcaaacttgtccaac

SEQ ID NO: 217314 - DNA, 122 bp, Homo sapiens
ttcggttcagagtagctgggttgaatttttgtaaagaggttgccgtgtgtgcacttttgccgacctcaaagccaccagaaggagggagctgagtgtacctttttgtaatgatgactctctat

SEQ ID NO: 217315 - DNA, 122 bp, Homo sapiens
tccgcggctcccggccgggaccctccacccggcggctggcggctcgtgaccccgccccctcggcccgctctgggcccgcctcccgccggctggctccacccacaatagcgtccctagcgcga

SEQ ID NO: 217316 - DNA, 122 bp, Homo sapiens
attgccagagaactgcagctgcttgcactgcaactaaaaagtcgatcttaaactctggggcgaaccctagaaaagacagcaagaagtaaaccaatagaaaaaccactccaggtttattctgg

SEQ ID NO: 217317 - DNA, 122 bp, Homo sapiens
gaggcaccgctcccggagcgtagcttcatttccgttagtttgcgagatttggaggcctcgcgtggggagagggccgcgtctgtggaggagcttggctccgcacctgctgggctggcgaaccc

SEQ ID NO: 217318 - DNA, 122 bp, Homo sapiens
atgcctgtgtttccaacaccaacaccagctctcctgacgtctcagaatgccaggaccacgcgtgatggaacaccaggcaggggagactcaaatatacaaggcgagaggccaggcagggccag

SEQ ID NO: 217319 - DNA, 122 bp, Homo sapiens
ccggactcaggctcaagtctgagcttcgcctctgtagctccggtttagcggtctgctctgcggcttgtgtctgaagctttcggtctctggatgggccttctgtgggctttaaggatccgtag

SEQ ID NO: 217320 - DNA, 122 bp, Homo sapiens
cgggcacggagctcgctggcacaggggctggccccggggtgcttgcctctgtccatgggccgagccaacagcgagcttcgtgcagaggggagaattgctcacgtggggtcagagctgagctc

SEQ ID NO: 217321 - DNA, 122 bp, Homo sapiens
gtccccaactcacgtttccacggagtctgtctcctagctgagccacaggcctgggctgagcggccttctttgatctcaaggagctgtgctgtttctcgaaggtgtgtagaggtttgaattta

SEQ ID NO: 217322 - DNA, 122 bp, Homo sapiens
cagaccaccccatccactcacctcctgaggtgctaaagaaccctgtgctgcctgtgactccggtaagaacagagcagggatgctcagaacagagcaggagggaaggaggggcagggcctccg

SEQ ID NO: 217323 - DNA, 122 bp, Homo sapiens
gataaggtgaacaccaagagctacctgtggaggttttcaccttttatctgtagctatcttcgtttcttgcatcactcagctttcagcttaatttttcccttttggcagagtgaattggggtc

SEQ ID NO: 217324 - DNA, 122 bp, Homo sapiens
aaggggcatgtggtccagctgttggaattctttgtctttcttgggttatgataaattacacgtgtcatacaaggatccattctccttttgaaaacactagaacatcacaggtaaagaccctg

SEQ ID NO: 217325 - DNA, 122 bp, Homo sapiens
ggaaatagcttgttttgcatctagcaactgggatacaagagagcaccgcagccagagtgccgggctccaagagggtgaggggtagaaaatgatttcagatacatacttccctctggctttat

SEQ ID NO: 217326 - DNA, 122 bp, Homo sapiens
ggccccacgggcaggcctgtgtcccccgcaagaagcaaatccccaaatccagtccttctccgaccaccatcacgactcccacgcctagaatgcaagctccccgagggcaggggtttccttgg

SEQ ID NO: 217327 - DNA, 122 bp, Homo sapiens
ctaaatcagtcactggtggcagggatagattgtgatgactggctttgactaatcaacattcgcctcttgaagatgccagtttgacagcatgtgagagggtggatatccccggtaaattggag

SEQ ID NO: 217328 - DNA, 122 bp, Homo sapiens
caaaccgccagcgaacttgacaattgtattgcgatggcgtgggctgcgtgacgtcacctccggtcgtgtctctggtctccgtgttttccagttaattacatcctcatgcagccgtgatcaag

SEQ ID NO: 217329 - DNA, 122 bp, Homo sapiens
aactgactggcgtatcaatgctgagacgcttctcttgagtgctcagctgcctgccagcagcgcgttacctacttccaatcacctcccgcttcgtctgtgcgcttttcctctccgcagccttc

SEQ ID NO: 217330 - DNA, 122 bp, Homo sapiens
tcaaactgggggatgtgtgccccccaggacaaatgaagtcttccatgggacatacaccaacgacatgtgtaattttaagaaaaaggcttccagatcctttactcccatgagtacttctcact

SEQ ID NO: 217331 - DNA, 122 bp, Homo sapiens
tcttgcttttttctgtttgaactaaaaactttcaaggggaacaaatgcatactcaggtcccgcattccttggctcaaatagtgatcaaggggttactgtaataattatcatataattgtgtg

SEQ ID NO: 217332 - DNA, 122 bp, Homo sapiens
gacactctctgctccttctctcatcccacacgctttaccggttccttcaacagcacccaccgcgttcatcctgtgaacacttccttagtgataaccttgtgccaggcctgcgctgcctctag

SEQ ID NO: 217333 - DNA, 122 bp, Homo sapiens
tagaaccggcagagggcggggccggggcgggacctgtgtgtctcacatcctggctcccagcgcctctgtttttcgggtttgggaggcgacagcggccaggaagtatgaggcatgattcaaaa

SEQ ID NO: 217334 - DNA, 122 bp, Homo sapiens
taccaacccaggcagtcctgctccagagatcgttctggaccattctggatcacacttcctcgcttaagtgattgaagcaagatatttatcatatagcatgggtccaaaactgagtttgcttt

SEQ ID NO: 217335 - DNA, 122 bp, Homo sapiens
gcgggcactatccacccgagggctgaccggtgagggaacgacgctaaaggattggttgggcgctgcggggaatctcgacgctcctcactattggcccaagcctcagagacatgaacgtcgat

SEQ ID NO: 217336 - DNA, 122 bp, Homo sapiens
tctatctttggtcaacatctatctgactaaaagctagttctgaagtatgtaaacatcagccgtctctgcttctgaactgggcagctgaagcctgctggaaaaaaaaatgtagatagattgtt

SEQ ID NO: 217337 - DNA, 122 bp, Homo sapiens
gagacaggcaagctgcaaagggaagtcgacgaaataaaattaaagccctacaatcgtgttcgtgtcaatgtagatggggtgcccccctcggtttgctcacagaggtgggtgtgagatcctac

SEQ ID NO: 217338 - DNA, 122 bp, Homo sapiens
tgcccgactttatttcttccatgatagaccacaacaaatattgcttggcaagccagacaccgttaccccctctgcagcagggatcccagcccgggaatcttaaggccgccgccggggttgga

SEQ ID NO: 217339 - DNA, 122 bp, Homo sapiens
gcgggaggtcagcaggcgaggaaggggtcgcgcctggtcccactccgctccctgcgggcccggcatcctcaattgttgctggtgagcagcccggatttcggaggatcttggttaagcaggtg

SEQ ID NO: 217340 - DNA, 122 bp, Homo sapiens
tttactgaaaaggataaagctgggacaaatgaccaaactcgagtaaggtctgaagacggccggcaacagtgttcgtttcctagtgccatgactgcatggtggccgtgcaggacaatgccccg

SEQ ID NO: 217341 - DNA, 122 bp, Homo sapiens
tgtaccccaaggagcagcttctccctcccacccacccccgccggccaggggtcctcatgccgtggcccatgcccatttgcacagggacgcagggggtctcacacacaggcagggtccgcccc

SEQ ID NO: 217342 - DNA, 122 bp, Homo sapiens
cctcctggtgggcaggcagggctggccgaggactcctgggctcactgcttcctggcttctcgggatgccagttctgcccttgtatttataagaagaagaggaagttacagggcagaggtcag

SEQ ID NO: 217343 - DNA, 122 bp, Homo sapiens
gaggttgaatttctgcgtaagaatttaggttacattctggaacacagaagtctccaattacgagctcaagacttcctgaaatgccttgaattctgattattgatgtttaatcttactgctcc

SEQ ID NO: 217344 - DNA, 122 bp, Homo sapiens
gagccagtgtgtccttagcaatgatctcttttcattcctgataaatgctgctctgctggtcggggacttaaagtgcagacttggagtggagtttccaacttgcaatacacacatagtgggag

SEQ ID NO: 217345 - DNA, 122 bp, Homo sapiens
tatatgctcagagtcacagagccagctggtagttgttccagggtttgttttctgccagaacgtgagtttgtaacctctctaccatgccgcctccttactccaccaattttccaggcacagac

SEQ ID NO: 217346 - DNA, 122 bp, Homo sapiens
gccccaaaaccaaactaggccctcactgactgctttacttacttctttacgttttgtttccggacattccgactgcagagtgagggttgcaccttcaatatttcttggcatgggtgtggaac

SEQ ID NO: 217347 - DNA, 122 bp, Homo sapiens
acatccaagaaaccacctattcacaagggattggcctcacacagatacatgtgcatctgacgtagtcctggaaagttatttcatctccagcatgttctgagctatcatcatcacattcatat

SEQ ID NO: 217348 - DNA, 122 bp, Homo sapiens
gcggaggagggtggggtgtcccaggggctcccggtgctgggcctcagtgggagggcctggcgacacactcctggtcccctgtgaggagccggctccagtccccggctccagtccccggctgg

SEQ ID NO: 217349 - DNA, 122 bp, Homo sapiens
ttcccagtccttggggctgcagctgctgccttcttcgaccgatttctgcggagatggtttcgtgaggacagcattataaatgggaatgatccatgatactcatgactgggcccttggggact

SEQ ID NO: 217350 - DNA, 122 bp, Homo sapiens
tcaccctccagaatggccatcaggaaagctgaaccagaaccgagtttaggtccaggttctcgttctggcaaatctttctccttaccttcttcctccacccctccacttatgccatgttttcc

SEQ ID NO: 217351 - DNA, 122 bp, Homo sapiens
ccaggcatctgtggtggatgagcactgggactttattacacggcacggcactcgtgacaacggaaggggtgggcagaaatgcaggccggaacattccacagtccagggacggttggtcattc

SEQ ID NO: 217352 - DNA, 122 bp, Homo sapiens
ccacttcactggaatcagtctccttcagcatcctaaggcactcagctctaatgaactgcccggactcccgtttgcattatgataagctcctctttagaacctctactgtctgcttttgacag

SEQ ID NO: 217353 - DNA, 122 bp, Homo sapiens
cacagagtgggtgctgcagacgggctcagccgctgcgggcaggtgcaggcaggatagcagcggtggccctgggcctcgcagtcctgcagacacacgtctggggactgctcctgggggcgcgt

SEQ ID NO: 217354 - DNA, 122 bp, Homo sapiens
caaggtagacgaagagaagcaaacgtttaatccaggtagactgaaacacactcatagcgacgtggcctttccccagcgcgatctgcttccgggtgtgcaggaaactgggcgcggaaagaaaa

SEQ ID NO: 217355 - DNA, 122 bp, Homo sapiens
tcaccgagtgcccagagcccggatccaccagcggccggagagctccctgccatgccacctcgcccctgggctgcggctgactccctgccattgtccaccaccattgttgccagggagaggtg

SEQ ID NO: 217356 - DNA, 122 bp, Homo sapiens
gcgtctgcctctgaagttagcagtgatttcctttcgggcctggccttatctccggctgcacgttgcctgttggtgactaataacacaataacattgtctggggctggaataaagtcggagct

SEQ ID NO: 217357 - DNA, 122 bp, Homo sapiens
ggccacactgtgagtaatgagtgtaaacaatgtaagccaaatgggcggttcagacacaagcgctctctgcaggtgaagccctccacaccaggtgggggacagaaggcgcttatggacagcag

SEQ ID NO: 217358 - DNA, 122 bp, Homo sapiens
ttaatgaaattctaacagtgaactggacgatagaagaggtcaggacaagagtggccatgtcggtgctgaggctgagatacctaccgaggactgtcactctcacggcttccagcccttcgacg

SEQ ID NO: 217359 - DNA, 122 bp, Homo sapiens
tctgtccgctgaaaaggcctagaagcaataacacaccaagccctgtcgaatggtggggtccgccaggacctccaggcttgctccccgccctacccgccagcttctccgccacattccactgc

SEQ ID NO: 217360 - DNA, 122 bp, Homo sapiens
actgggtcctggccctccctctcatgtgtccttcccctcaggctcccttctcctgggaatcgtgccccaggaagaaagctataagttgctcagaggttgcaactctggggtgctgtactgat

SEQ ID NO: 217361 - DNA, 122 bp, Homo sapiens
caccaatggcctctttccttgactattaaaatagattttgattccttttcctcctagcaacgcattctgtacacaactaccaggttgatcttcatgaaatctaactttcattatgtcattct

SEQ ID NO: 217362 - DNA, 122 bp, Homo sapiens
cggggtttccttcagagctatttccacgttactgctaaccgcctgtcactgtccctcagacgatgccacaacgcagtggttttcgagttttaccaaagcgacagaatctttttcttttttta

SEQ ID NO: 217363 - DNA, 122 bp, Homo sapiens
cacgcgagttagcacaagcccttgagtgtggctggaaccgcgggtcacactcccttaggccgagtccaccacttcacttgggtcaactcaactaatggcagagggaatgcggtgccctgacc

SEQ ID NO: 217364 - DNA, 122 bp, Homo sapiens
gctttgcttcactcgcgccccttccggcttcccttccttctcactctcttgccgtagctgcgccgccaccggggcctcacgtgacactagactctcccggcacgtgacgtgagaaaggggcc

SEQ ID NO: 217365 - DNA, 122 bp, Homo sapiens
ccgctcagcggggctgaggggctgggggcctcgagtctcagctggactgtggcatcaggccggggctgagctgggccttcccctgtgggagcagaaatggactcctgggaacaagtttgcaa

SEQ ID NO: 217366 - DNA, 122 bp, Homo sapiens
tggaggcggggtcactgtgctcctgagaagggtcctcgggggtggagtctatcaaggttgcgggggcgtggtcacggagcggagccaataaaagcggggcgtgcacggccgcgggccagtgc

SEQ ID NO: 217367 - DNA, 122 bp, Homo sapiens
gctttggaggggagccgggagcttcccatctccttttgcaggggagggttgtcagtctggcgggatgtgcactgggggcactccaacctctgctagctaaccccacatcaccacccaccccc

SEQ ID NO: 217368 - DNA, 122 bp, Homo sapiens
gatgtctcaaagcctccctacctgctctgtgtcccctccctctggagcctgcctctctcccgagcaaagtacctgccacctgggagtgatctgggacagtcagatgcaccttttgaagtata

SEQ ID NO: 217369 - DNA, 122 bp, Homo sapiens
gccccctcccgccacccccctgctctcctgcggctgtagaagccggggcctgagctgtgtcgctcccctgaagacctcggggcagcatgtgggccaagttccagcctgcttcacagtccttc

SEQ ID NO: 217370 - DNA, 122 bp, Homo sapiens
cgctgaggacgccgaagagccagtgtttgctgtagaccgtgctccctatgcagtctccaccggccacctcctcctcctcctccttgtcgcgacccggcggcggcggcgaggggttgcggtcc

SEQ ID NO: 217371 - DNA, 122 bp, Homo sapiens
gagagcagctttgggttctgtgctggttgttagaactcatctccaggtagcccacggatacgtggttggcacagacacaagactcccagagttgtcctaacaataagtctgagcccatctca

SEQ ID NO: 217372 - DNA, 122 bp, Homo sapiens
cggagccgcagtgtccagaggggcgaagtttgcggccaccgccggccgtgcagtctcccgcgcttcccccgccggagcgccggccccgcattcctccgggttgagcaacagcttttcctccg

SEQ ID NO: 217373 - DNA, 122 bp, Homo sapiens
gcttaatggaagcctgtgcgctgttcatgaccacccggaggttctgcaaggccacgtcggcgttctgcttcaccactgtcaggctggcgccctggccgcactgcagggcgtcattctctcgc

SEQ ID NO: 217374 - DNA, 122 bp, Homo sapiens
tcaatgagtgcttgtgttctgggaatgggggcggggtgacatccagcctctttccctctccgcccccgacaggatgtcccaggctggacgcggcagaggaggtcccccacaagtgaaggtcc

SEQ ID NO: 217375 - DNA, 122 bp, Homo sapiens
cctaattttttaaatactactcggatactcaagaatagaacagaggaaaagttgcatttccgaaggggccaactgtaaattaggtttagaaagccaggaccaattaaaagtgcacgtcgacc

SEQ ID NO: 217376 - DNA, 122 bp, Homo sapiens
atgcatgagagaaggacgcatgacggcagaggcagggttggagtgacgcggctacaagcccgggaacccctcgggtggctggcggcccccagaggctaagaagccgtggggaggattctacc

SEQ ID NO: 217377 - DNA, 122 bp, Homo sapiens
cacatatctaaggccatcttccagaaagcatcaatataagtagcacagtagttgctcttacgccagagcacgacacacgttgcttgctctgctagcgtatctccaaatttgagagttcttgc

SEQ ID NO: 217378 - DNA, 122 bp, Homo sapiens
agagcgtgctcgaaatctcttgaccctccggagtattgactttggtcccaagaaattgctcgcggttgctgggagagtactggcggtgggctgaggctcctggagagcccgcggggtggaga

SEQ ID NO: 217379 - DNA, 122 bp, Homo sapiens
ccacccacacccggccgagactcgggcttcccccgcgagcgccgactgcagcccgcgcgacgcgcgccccattcatgcaggccccgcctcccgcccagaggcctcacaggcggcccggcccg

SEQ ID NO: 217380 - DNA, 122 bp, Homo sapiens
aagctaagaaaaccagtaaacaaggctattgcagccatcctggtgagagatagggcttggcgtacaggaggacagcgaaaatagaactagaacgttcctagataggctttggatgtagaata

SEQ ID NO: 217381 - DNA, 122 bp, Homo sapiens
cttggatgagatctcaaggctgcatggcaggtcccagggccagggccccacggtgtcacacgtatcacggatggccgccagcgaagcacagcacagctccgagctgctgcatgggagcctgt

SEQ ID NO: 217382 - DNA, 122 bp, Homo sapiens
atcagtgtcaaacctgtcaatttaatgcatggatggatttgcatgtctttttccttttatcggttggctgatatttgggtttctttatgcacctacatctgcttgtaatgcttgtgggttaa

SEQ ID NO: 217383 - DNA, 122 bp, Homo sapiens
cctggcgcgggccagggggaaccggggaggagggagggccggtcgccggagcagagcgcgcggggacagggtggagcccaactacctgaggatgttgtgcgcctccatgctccggttctggt

SEQ ID NO: 217384 - DNA, 122 bp, Homo sapiens
aaaaaaaaaaaaaaaagagactaccactcccagcatgatgcgcgtccccagggcttcgcccgcccccagccctgcgaaataatactgtcgctttgtcactaaggggctaggagcgattaaga

SEQ ID NO: 217385 - DNA, 122 bp, Homo sapiens
ccgaagacgtgtattcccaactggaagcgctgtgacggccaccaagattgccaggatggccgggacgaggccaattgccgtgagtagtcagagagcccttcaccccctgggcacgtttctgc

SEQ ID NO: 217386 - DNA, 122 bp, Homo sapiens
cgcagcggcgtttcattagagccccgggcccgggccgcgcgccaggaacttccccgcacgcggcgagatcgacgatcccccgcccccagccccagcccggctccaggcctcgcaatgtcagg

SEQ ID NO: 217387 - DNA, 122 bp, Homo sapiens
tttcctgacgtcattggcgcgtgccccggtttcaaaagctcgggggcgggcttctgagttcgcgcatgcgcctctgtgcgtttgtcccatgctggttccgtgagtctggccttaggtgtctc

SEQ ID NO: 217388 - DNA, 122 bp, Homo sapiens
gcggcgtcgcccggtcagctcggcgcctcctcccttggcgactccgcctcgggccgctgccggggctccgcccacttgagccgccgccacgtccccacctcacgctccacacgcctgcctgc

SEQ ID NO: 217389 - DNA, 122 bp, Homo sapiens
tcccctccctctgccccatgtttgatatcaggacagataagactccatggcagctccagccgcccacactccttagccggaagctgggctctgcgtccagtgtggaggaagatgcgtccttt

SEQ ID NO: 217390 - DNA, 122 bp, Homo sapiens
gaccaggctcagaggcaaggaggggaggagggaaactgaggcagccgcggggtggggagacgtttcaaggtatattctcactgcagcctcacggcgaccctgcgggtgagttatctgctatg

SEQ ID NO: 217391 - DNA, 122 bp, Homo sapiens
gcaggtgaggctctcctgccccatctccttgggctgcccgtgcttcgtgctttggactaccgcccagcagtgtcctgccctctgcctgggcctcggtccctcctgcacctgctgcctggatc

SEQ ID NO: 217392 - DNA, 122 bp, Homo sapiens
cccgggtgagggggccctattaccccttgatttctcaggagcgtctgggggggctcagcacgcacaaactccttctccttctaccactcttaaatttactccctccccacccagaacccaga

SEQ ID NO: 217393 - DNA, 122 bp, Homo sapiens
agacctgatacctgcgtccttgactatctgttctgtttttgtgcagacttgtgcttggaccgcaggaattttctatcatctgcatgcaatgcctactgatgacacactatcacaataaaggc

SEQ ID NO: 217394 - DNA, 122 bp, Homo sapiens
tgtggagcaagacttcccggaggctagagcaggatgatcgtcaacttttctccttagagccggttcagtctgataaagcaggggccaccccggagtttggaggggaagagagcccaggcaca

SEQ ID NO: 217395 - DNA, 122 bp, Homo sapiens
ggcgtcaggaaagtgtggtgtcccagccgaggagggtgggctccgagtcgggcacctgagcgtgggggcttcccaggagcccagccctcccgtcacttctgccatcccggcctcctgctggg

SEQ ID NO: 217396 - DNA, 122 bp, Homo sapiens
cccgcgttcttcgggcgaatccgagggacgggcgctgcgctggggaaagtttgtcccacccgcgtttcgcagctggttgcaaggagaggaggaggagagggagggtcaagctcggagcctgt

SEQ ID NO: 217397 - DNA, 122 bp, Homo sapiens
tgtggtcctgcagcaccacctgggggcggcgagaagagtagccgcagaggctcgggaggacgcgccctcgggtccagccgcagccagcacaccgggaggtggtcaggggtcatctcttctgc

SEQ ID NO: 217398 - DNA, 122 bp, Homo sapiens
tgtgacctttggggaataactgtcctctttgagcttcaattttctcatatgcaagtaaaacgagaagattgataggtaatagccatggtctctctgctgcccacatcatatgagactatgca

SEQ ID NO: 217399 - DNA, 122 bp, Homo sapiens
gctaggatatcgccctccctctagtcctgagtaggaagaatcttcctggctttcgagatccggtaccagagagtgactgtgagagtccgccctgctctctgggacaattaagggatgaaatt

SEQ ID NO: 217400 - DNA, 122 bp, Homo sapiens
tgatcattccagtttattttcaactttccgctggatcttccatgccctccccaatttggccgatgcagagggaggcgaccctgctgggttcacagcagcaaatcgtcgtttaagtccaacaa

SEQ ID NO: 217401 - DNA, 122 bp, Homo sapiens
tccaagacgaagcttctggcctggtggaggtcacgttctcatgaaaggagttggtgaacacggaaggtcatttcagatggcaagaggaggtgacactgacgttgagggtggaaaggacctgt

SEQ ID NO: 217402 - DNA, 122 bp, Homo sapiens
acagctctttagatgccatctggcctgggactcaggattttcaggagatggaagccatggcggcggggggcgggggtccaggggcagccaagggatgggagtctagatttcacagtgtggcc

SEQ ID NO: 217403 - DNA, 122 bp, Homo sapiens
ccttgccaaatccctggggctgatagagatggcgggcggaaggccggccaataaggctcccggaaccgggctgggcgggaccccgggggtgccttcctgggttgggtggaccggtccctggt

SEQ ID NO: 217404 - DNA, 122 bp, Homo sapiens
atcataccttactgtaacctcaaactcctgggctggagcaattctcctgcctcagccttccgagtagctaggaccacaagcctgtgccgccacacctggctataatgtctcattttctcatt

SEQ ID NO: 217405 - DNA, 122 bp, Homo sapiens
gaaaagcactatagaaatgtaagctattattaatccaccccttctccagacacatgttgacgggggctctaaaatgtatatcagctaacggcatgtctcagctcaaagaaagctgcaaaatt

SEQ ID NO: 217406 - DNA, 122 bp, Homo sapiens
aactggggctgcgcgtggcaattgcgggccagcacaagttccaggtgggtgtgggctcggcgggcccacactgggagcagccagccagcaccaccggccctggatagtgaggggcttagcat

SEQ ID NO: 217407 - DNA, 122 bp, Homo sapiens
ccaaccccgtttctccgggaaccctccgcgcccccctcctctcccggagccacccgcgcccgcacctgcccgccgggcccctacctgtccggccaggcctgagcacagcagcagcagcagcg

SEQ ID NO: 217408 - DNA, 122 bp, Homo sapiens
tgtagagattgttgctcatgtgagttcatgccattagtgttatatttcttccatgtgtaacgtgtagctctcaggaagcaatatttaatatgctcaagagcattagaatctttacttatcac

SEQ ID NO: 217409 - DNA, 122 bp, Homo sapiens
cttcctaggaaaaattctctgtcgtggggagggcctggggactttcggaccctgctgtctcgtgttcactcccaagttgtttgctctaccaccttgttagcccttctatgactcccgtaaaa

SEQ ID NO: 217410 - DNA, 122 bp, Homo sapiens
tcgggggacggggctacaagccgtcgctgggggcggggcttgcggcccacctgtaggtcccggtgccacctcgtcagtgtcccgagagatccccagaagaacgagagggctgaacaggggac

SEQ ID NO: 217411 - DNA, 122 bp, Homo sapiens
atgtcctctgaggcagcgtccatctccccttaacattaaggaataaggccagagggttctcgctcatttgggaaaataaaaaaagcaggaatggggcgctggaaattctataagcttttccc

SEQ ID NO: 217412 - DNA, 122 bp, Homo sapiens
gagctatcacaatctcttcaccgctattttaggcccaagaccccctccccccgcctcccacgtgtgaccagagtagctgcttctccacccaacagctctggattgggagcctggaatctcgg

SEQ ID NO: 217413 - DNA, 122 bp, Homo sapiens
aaggctcaataaaagttgagtaggagtttgtcagtgaagacaggaagtcttaagggagaccgattagagttctatgccaactatgctcaggtcactctgcatgtaccgtttcacttagtctt

SEQ ID NO: 217414 - DNA, 122 bp, Homo sapiens
cacgtcctgcccacctggccgagcaggtgtggggctcaggcgcccggccctggaaggccccgcaccctggacccagcactcacacttccaggtctcctgagggagcagcgggacccatgggc

SEQ ID NO: 217415 - DNA, 122 bp, Homo sapiens
aacacaaaagatcatttccgtttcagatgcaggccttttgcatatactgtttcctctcaccggatatgctctgccttcatgtaactcttccttctcctatcatagttagctccttcttttcc

SEQ ID NO: 217416 - DNA, 122 bp, Homo sapiens
caggcacactaaacgcccggacttcaccactatgcaatatattcatgtaacacaactgcacgtctacctctaaattacataaaaataggaaaatttttaaaaatacatataaaaataaaaag

SEQ ID NO: 217417 - DNA, 122 bp, Homo sapiens
tgaacagctctgataccacagaaaggacatcatcctatgtcatccccacagttccgtgaacggctctgataccacagaaaggacgtcatcctatgtcatccccacagttctgtgaacggctc

SEQ ID NO: 217418 - DNA, 122 bp, Homo sapiens
gacccattctggcaagaagcacttgggacgggctactaggagcatcctcgtctgtgtctacgtgcaggagtggaactgcccagccctgggacacgcatgctgagccccagccaacgtcacac

SEQ ID NO: 217419 - DNA, 122 bp, Homo sapiens
cctgtctccctttgctcgcccctaaatccttcctcggactccaactcccgccgtgccttgcgctgagatccctgcggcaaagaaccgggctgtgtccaaagtgttctctggaagttgtagtt

SEQ ID NO: 217420 - DNA, 122 bp, Homo sapiens
tatttggctgtcactctgtggatggcctcatccaggctcgtgaggatcaaggcaacattacgaggctcaccattttagtctacatctcatcccaccacttatcagactatgcctggtggcag

SEQ ID NO: 217421 - DNA, 122 bp, Homo sapiens
agcagctcgggaactcaccgagacgagacttagatgccaagggttggtaaagagtgtcaacgcccagaccgtggaaccattcctgttttaactatagatgtaaaagtctaaattaagaattg

SEQ ID NO: 217422 - DNA, 122 bp, Homo sapiens
aagatatcgcgagacctttacctctggtttcttacacatcctttagaaactggaatttagcgagaatacattctttcatactgcctcctcccttgtttttctgtctcagagagatagtctgt

SEQ ID NO: 217423 - DNA, 122 bp, Homo sapiens
aaggcgatggagctgagcaggggcaggggcaaggtccagagcagcagcgcggcaggcccacgtagcggcgcgaagcggaggagcaccgcccggagaggctgcacaaactctgtaacatagta

SEQ ID NO: 217424 - DNA, 122 bp, Homo sapiens
atttacttcctctactgctgcttaagggaaatctactatggcattcctggtttctaaaaacgcaccacaacgtcaactgatgagtcatgggtcacactccaagttcttatgtaccaaagaaa

SEQ ID NO: 217425 - DNA, 122 bp, Homo sapiens
caggcaggacccaccaccccctctgctctgcccgcagcgaccctgtccctgcaggccccgcgccccaaagaccagggacctcgcccatccaggttcctaaatatgaaggaaatggcggtcaa

SEQ ID NO: 217426 - DNA, 122 bp, Homo sapiens
ccagcgagccaagaagtggccccgctcctcatggctgcctggtgacttgtacatttcatgcgttgttttgtttcttgcagtcaagtggtgagtggagggaggcgcctcaggagccccactgc

SEQ ID NO: 217427 - DNA, 122 bp, Homo sapiens
ccttccccctcgccctggtcagcggcatcatctacatccacctacggaagcgggagtgagcgccccgcctcgctcggctgcccccgccccttcccggcccccctcgccgcgcgtcctccaaa

SEQ ID NO: 217428 - DNA, 122 bp, Homo sapiens
cgtgggcctcattcacgcttccccgggcttggggagggggcggaggcccggcgtgacaagcggcccagactcccgtgggcgccgcacacctgttgtttgcagcagccagcgacccgcactac

SEQ ID NO: 217429 - DNA, 122 bp, Homo sapiens
tggcaagttccatgtgtgctcaaggcattctggcttcacgggaattagaaaccctaggagcggatggggtcgtttttgaccgtctgtgtcttcctttttgcgctcagatccagttcgatgag

SEQ ID NO: 217430 - DNA, 122 bp, Homo sapiens
ttcttccctgtcgccactccctatccctgtgtgaactgttgcctcggcctcataagttatcgtttctttcagcctcagcccttctaacacttctgcaggaattctcagagcctctagtggcc

SEQ ID NO: 217431 - DNA, 122 bp, Homo sapiens
caaggtgacagagggacattctctggcagaatgccttgagagaactctgtcccgccatcccgcatttgcccattcattcaacattaattgagcacctactatgtggcaagcattgctcaggg

SEQ ID NO: 217432 - DNA, 122 bp, Homo sapiens
gagaaggaagatcacccctactcccaaattcgtagttataagggcgggttattagaagggcgccaggaaggtctctctacaaagatggggggccggggaactccctatttgccctattttgg

SEQ ID NO: 217433 - DNA, 122 bp, Homo sapiens
gcggcggggcctccgtgaaggccagcgccagtgagtgccaggggcgggcaggcagggggccggcccagcccgcgtcacccggcagcaaacacgcagggtgagtgtgcgggctgcccaggcag

SEQ ID NO: 217434 - DNA, 122 bp, Homo sapiens
ctaggaggttcccggaagggacactaggaggacgagcgctgagtgacagggccacccacccgtgacaggcgctgcccctgctttgtgctggtctcctgtgtgggcaggtgtgggggttggtc

SEQ ID NO: 217435 - DNA, 122 bp, Homo sapiens
aggtaataagttaatgtatgtacacgttataaacactgtgtcagtttacgatggcagcaacggaagttgttacaaagaaagtgactgcggggtggctggagctcagccgcccccccattgag

SEQ ID NO: 217436 - DNA, 122 bp, Homo sapiens
tcgatgggaactaaggccacttcctgggcgctctaggaagcttctctcggtggttgtctccgaattaacccattagctaccctgtccttacctccacgcaagggaaggcagttaagggatag

SEQ ID NO: 217437 - DNA, 122 bp, Homo sapiens
cgggccaagaaagccaaggccagctcggcgctggtggtctgtggagggcagggccaccgccgggtgcacaggaaggcccggcagccccaccaggaagagctggcgccgaccgtcatggtctg

SEQ ID NO: 217438 - DNA, 122 bp, Homo sapiens
gaggtctcctttcagaggatctggcctgggctgcccactgacccgcgcaggcgacggggacggggcacgtgcctcccaggcactgtcagtcggccacccacagggacccagcacctccaggg

SEQ ID NO: 217439 - DNA, 122 bp, Homo sapiens
gcgtgtcatttcccgcatgtgacacagagtgcggactgtgcagaaggcggctctgtgcctcggaaggcagggtgcagaggcgtgcagcgctcaccacggggatgcggccggctcctgggacg

SEQ ID NO: 217440 - DNA, 122 bp, Homo sapiens
gcccctcaccctccatgatccccttaaaaaccccagttcagggccaggcgcggtggctcacgcctgtaatcccagcacgttgggaggccaaggtgggtggatcacctgaggtcaggagttcg

SEQ ID NO: 217441 - DNA, 122 bp, Homo sapiens
acagcgggagtccaggccgagataaagttcccttcccagtccgctggggagacaactggccgcggctgccctctgctccgctcccggctgtcccgcagctgcgaggccggggccagagcgct

SEQ ID NO: 217442 - DNA, 122 bp, Homo sapiens
ctgcactgtgggagtccctctctgggctggcagaggccggagctgactccttctgcttgccggaggtgtggagggagaggcaccagcgggaactggggctgcacgctagttccgggtggatg

SEQ ID NO: 217443 - DNA, 122 bp, Homo sapiens
gaatataggtctgttggttacattttgaccttccctttctgatgccccattcctgttttacgtgatggtcaaacatgggccaagttcaaatcccagctctccacctgtgacatgggcagatc

SEQ ID NO: 217444 - DNA, 122 bp, Homo sapiens
caaaaaacagaaaacaaagcatgacatttagtcagatgcagatcctgaatttaagacttacgctacagaggaactcctgagtttgtttgtggtcttgagtgaaaaaaaaatttgcatttcct

SEQ ID NO: 217445 - DNA, 122 bp, Homo sapiens
aaagctgatgctgagaacttgcttcctgattggtagccgggcgaatccacgtgacttggccgctaatgcccgcccaacccgctcccctattggttgaaatcacagcccttcagctgccacgg

SEQ ID NO: 217446 - DNA, 122 bp, Homo sapiens
tgaggtctgccttatacatgaggcctgtattataaagtgcaactccgcattccccaaccccgttgtttcttctctccagaacactaggcaccatctgatctcctatgccttttccttattgt

SEQ ID NO: 217447 - DNA, 122 bp, Homo sapiens
atgcagacaccatttccacctgccagttgcaattatccaaattaaggccaagtggacacacggctggtgttctaactgagctcacagccactctgacccctgcatccccgaggcctaggcat

SEQ ID NO: 217448 - DNA, 122 bp, Homo sapiens
ctccctcccagggctcttgactgtgatggcgcagtcggggccgccagagcccagggaagacgtgcgcgaggatgtggggctctgctcacagtcggccagcttctcccggagccggcccttca

SEQ ID NO: 217449 - DNA, 122 bp, Homo sapiens
gtcgcccgacgtggaccaggccagcttctccagcgacagcccgcaggatgacacgctcaccgagcacctgcagagcgccatcgacagcatcctgaacctgcagcaggcccccggccggacgc

SEQ ID NO: 217450 - DNA, 122 bp, Homo sapiens
agatgacgggcctgctttccagggcggcttgtcgaaagcccgggagcatctggccgcttccgcctcaaccatgggctggggttttgtgagctactagtgccaagggttttctttccaccaga

SEQ ID NO: 217451 - DNA, 122 bp, Homo sapiens
agagcaagaggaggcatagagcatgtagcacaagccattgtcatcgcttactattcaccccgcaccacttacaggagctgaattcagcatatgctgtgggtgacacacaaaccaatctctcc

SEQ ID NO: 217452 - DNA, 122 bp, Homo sapiens
tgaagaagaacatataccacgagttaaaataaatttcccgtgctgctgaaaaatcagtgccgccatcctctgaccctgctcctcccacgcgccctgcaggctgtctccctctggggtcgaga

SEQ ID NO: 217453 - DNA, 122 bp, Homo sapiens
ccataaagcccagctggaaggggcctgtctcgggagtgtccagccccaggagccggggaccgtccgcgtcgcgagccgggccaaggcagtgggcagagggcagagggcagagggccggggct

SEQ ID NO: 217454 - DNA, 122 bp, Homo sapiens
tttggcgcccccctcctcggtgcaacctatataaggctcacagtctgcgctcctggtacacgcgcttcaacttcggttggtgtgtgtcgaagaaacctgactgcgccctgaggagaacagcg

SEQ ID NO: 217455 - DNA, 122 bp, Homo sapiens
atttagttggcgccccagcccggagcgggagccggggcgggaaggcagctggttggggagcgacgagggggaggtcgggggggaagccagaagagtttgcaaagaaatgcaacccctctttt

SEQ ID NO: 217456 - DNA, 122 bp, Homo sapiens
ttccgcctctgctgggggcagggccgggcgttaccgccacttccgggggcgcaggaaatgcgcgttgtccgggatgcacaggccgcctgcgcgcgggccgggaaggcgcttggagacaatgt

SEQ ID NO: 217457 - DNA, 122 bp, Homo sapiens
aggatagccaacaagtaaaagcaaaattgttccttaaaattgcaacatttgggcccagcgcggcggctcacgcctgtgatcccagcactttgggaggcggaggcctgtaatcccagccaccc

SEQ ID NO: 217458 - DNA, 122 bp, Homo sapiens
gtaacaggtttttgttactcacatggttagctacatgatcagacactactgcatttaaatcgtgtctagggtacttataacacctaatacaatgtaaatgctatggggaggccagacaccac

SEQ ID NO: 217459 - DNA, 122 bp, Homo sapiens
agggccgcgtctcaggactgaccttttgatccgcagtgcggttcctcagggcacacgatccggccagcaggatgctgaggctctggaaatcttcagttgagcgaagaccaggaagaacatga

SEQ ID NO: 217460 - DNA, 122 bp, Homo sapiens
ctcccgcagggctgggatctccaggctcaggcgggagtgaggccccctagaactgcccttcgtccagcgaggggccatctccctcagcagaagccccgtcttccccctcttccctccctgct

SEQ ID NO: 217461 - DNA, 122 bp, Homo sapiens
aaatggagaagtggatcgattatttcatgcacaaaccaaaaatggagaaaatcactaacacgatctctggagggtttggtgcaagtttagctagtgacaggaccagagccaggacccatgtg

SEQ ID NO: 217462 - DNA, 122 bp, Homo sapiens
tctgggcactggcgccacctagtgctggcagcgcggcaatggcccttttaccgactcgcgcgtctatagtgcggcctcacacaacctctgcggagtccatgagccctggagagcacaagtgg

SEQ ID NO: 217463 - DNA, 122 bp, Homo sapiens
gggggcctgaagcatgggtgtgctccccatggggcaggaagagcacccagaaggctagtccgcccccttccccaacacacacgcgcacgcgcgcactcccctcgccagaccacgagccggag

SEQ ID NO: 217464 - DNA, 122 bp, Homo sapiens
gctggaagcgcgggggaggacgcccaggaaaggcctgcgggagggggtcgtccagccccgcgtccccggcccggggcaggacgaagccccccttcccgtcgctcccgcttccagcaggacgg

SEQ ID NO: 217465 - DNA, 122 bp, Homo sapiens
cgctggtgtgtggttggggcttttttttcttggatcctttccttcttttgctctccctctcgctccctccctctctctcctgtctctctctctctctctctctctctctctctctctctctc

SEQ ID NO: 217466 - DNA, 122 bp, Homo sapiens
tgaggtagatgtagacggtactgttaatatgtatcatatagttaatgaaactgaatttgccgtttacaaatggcagatctgagatgataaaccatcttatgaattattgttctatgaccaag

SEQ ID NO: 217467 - DNA, 122 bp, Homo sapiens
actgcccgcagtttgatggcatttgtttagatgagactacatctttaaggcttctgtgcccggttaaaaatcttcctttctcccaggctggtccaaaggtctggtcacgtgactccaacagt

SEQ ID NO: 217468 - DNA, 122 bp, Homo sapiens
cagagcagagagcccggtgctcccttcctggctcgcggtgggtcttcgtgcatccccttgcggggcatggcctgtgacttatactctcccaataagctccatttatggagcactttatacat

SEQ ID NO: 217469 - DNA, 122 bp, Homo sapiens
ttcctgggaggccggcgctctgacgtggacccgggggccgcgggcgcggcgggggggcggcggtccgggggcttcttaaaccccccgccccggcccagcccgcccttcccgagcaccgctcc

SEQ ID NO: 217470 - DNA, 122 bp, Homo sapiens
cacatcccctcctctgtatggccttccccaagcacaggcccctccctaaagtgtgtgcggcgttatcagattggtgtgaatgttaatctctttaaaggaagcaggaatttatctgtactcca

SEQ ID NO: 217471 - DNA, 122 bp, Homo sapiens
actttgagcatgccagtctgctgtttgtgcaagaattctcatttgtaggagttggttcttcgggatggtaaatctgttcattgtgctgggcctagcagtaattgtgctaggccaaacacttt

SEQ ID NO: 217472 - DNA, 122 bp, Homo sapiens
aaacaaccagaaaatacttaacaaaatgtcaatactatgtccttaactgccaataattgccgtcatgtaaatggattaaattcttcaatacaaagatatagaatggctaactggattattaa

SEQ ID NO: 217473 - DNA, 122 bp, Homo sapiens
atatttatgtttcctcagtgttgtgggctgctaccctttagcctgggaaccctggatgtacggggccagtggcttcaaagtgactgccattgttcctgggggtccttgggccacctccatgt

SEQ ID NO: 217474 - DNA, 122 bp, Homo sapiens
ttgtgtttctcccaggaccacccccaaaaagaaaagctctcacgttgctccaccaataaacgtttcgatctttaaaatataaagtggcgaaccgctgccgctgaagttttgctttgttggaa

SEQ ID NO: 217475 - DNA, 122 bp, Homo sapiens
cgccttccccagggctgccccttcctctcctgcgggaccctctcctggaagctgtcccaccgcaagccctccagctgcagctctgcgcataggctgcttttcaatctcccctggcaactagg

SEQ ID NO: 217476 - DNA, 122 bp, Homo sapiens
cgcccgcggctgggagcctgtcgctccgctctgcgccgctaattggtctcgtcaggcggccggcaggagcagatccgagccgtgtcatcctcttagcgccctcacgccacccgccgctcccg

SEQ ID NO: 217477 - DNA, 122 bp, Homo sapiens
cactggctaggtatacgtgtgcatgtgctaatgtgtgggggcagggattgatggagtcaacgaaatgtgccccatctgcatctttgacaggaaaaagagagaatgggtgaattccaattttc

SEQ ID NO: 217478 - DNA, 122 bp, Homo sapiens
ccttcagctccttgatctgctcagccaactccgggttcaagtcaaactccgctgggaaggcggagatccagtacctggaggagcggggagtcacccaagatagcccttcccccaccatcacc

SEQ ID NO: 217479 - DNA, 122 bp, Homo sapiens
tgaacgtccccctcccgaatcacgcgagttctcctgatcagattctcctgaccgagtgaacgaccccctcccggatcacgcgagttctcctgatcggattctcctgactgagtgtttcctga

SEQ ID NO: 217480 - DNA, 122 bp, Homo sapiens
gagatcgggcagcgattctaacttttgcctttcggagatacagtggcggggcaggccaaacggcatctctgcagagagaagccgctaaataagcaccgtcctttaagtagaatttctccttc

SEQ ID NO: 217481 - DNA, 122 bp, Homo sapiens
tacattttggggctattactaagtaaaacaagggttccttgaacacaaacactgggaaaccgatggtagatctgatatctgaagcagctactaagtggttaatgagcaggtagcgaatacag

SEQ ID NO: 217482 - DNA, 122 bp, Homo sapiens
ccttagattttgatgtcacctagacaacacttaaactcatatgaaacaaaaattaaaatacgtattacaagtacttggattgttccttagtcattaaataggatataaattaggttgagaag

SEQ ID NO: 217483 - DNA, 122 bp, Homo sapiens
ttgggaaccccagaccccaaagtgcgggggtagggtgcccggctctgggcaggccccaggcggtgccggtatgggagatgtccatttagtcacgcccccaccggcgcctgcctgcccctgtc

SEQ ID NO: 217484 - DNA, 122 bp, Homo sapiens
gaagcactaatgcaatcctagttttctcccctaaagcccattctagccaggtggcagggacgtggagcctcactgtaggtcacaccctggcgtgaagggctgatcagccaccccatggtgtc

SEQ ID NO: 217485 - DNA, 122 bp, Homo sapiens
taaaaatagagcgtgtgcaagtacagtgtctctccagcagtggtctacactcgagaaactcggcagcgtttaaaaatagagcctgtgcgagtgcagcgtctctccaacattggtctacactc

SEQ ID NO: 217486 - DNA, 122 bp, Homo sapiens
ctacatccatagtctacagcgactacttcagagtccaccttcctccgataatgttctagtcgttttcaaatacattgtcgcatatgatcctcacaatccagtgaggcagtggggtgacggcg

SEQ ID NO: 217487 - DNA, 122 bp, Homo sapiens
aagtgctagagttacaggtgtgaaccaccggcccagcctggtagcagattttttaaaagccgaatagaagtacttgattttgtaaaccatgtgcatacataactgacaaaaatcacaaaaca

SEQ ID NO: 217488 - DNA, 122 bp, Homo sapiens
aaggccccacattgacccctcttcacttgtaatctcttttaatggagtccgggagagtcacgatggctgtcctcttggggacaaggagtcttggggagaatcgtggggtctgcctctttcac

SEQ ID NO: 217489 - DNA, 122 bp, Homo sapiens
gctgctcgcgctccgccgcccgggagatgcttcctcgcgcggcgcagcgctgaggccgtgcgtgcgccccggctgcgctgcgcgctccccacatacacaagctctccatgtgagctgacagg

SEQ ID NO: 217490 - DNA, 122 bp, Homo sapiens
gtgctggcaggtcgccgggtgccacctcacgtgctggtcaactgggctgtgcaggtggcccggggcatgaactacctacacaatgatgcccctgtgcccatcatccaccgggacctcaagtc

SEQ ID NO: 217491 - DNA, 122 bp, Homo sapiens
tgaaaaaactaaagcaagctgggagagtggaggctgatgtttgcaagatgccatgttactcgtgtctggggggaaccagtctctgtactcaggacttctcaaggcaggcatcatctcccaaa

SEQ ID NO: 217492 - DNA, 122 bp, Homo sapiens
cccacgtgataggtttctggcatcgcccctccttgctggcgattctggggaagattttaacgctccctggagccgtccccagtgacgtcacgggcgcggctccgctccttggccaatcacgc

SEQ ID NO: 217493 - DNA, 122 bp, Homo sapiens
tggctgagtgagttctgcaaagggaaagagaagctaacatttactaagccgctgttctgtcgagcacagtgctaggaaggatgcatacatgtaattaatctgcagcctaaccctagggagaa

SEQ ID NO: 217494 - DNA, 122 bp, Homo sapiens
ggcagccgggccacgtgcagcgccggccgcaagcgcggaaaccaagcgtgggctcctgcccgctggggccctactcactgcggtctccacaccagcacactgctgagcacggaggggaccga

SEQ ID NO: 217495 - DNA, 122 bp, Homo sapiens
agagacagcagagggagatgattttagagttttagaatgtagctgagggttcagtaggatcggtttgctctgagaaagagtgattttattaacctctgtagtatacgagcagctggagtcac

SEQ ID NO: 217496 - DNA, 122 bp, Homo sapiens
ggatgatttctaccaatccgtcaggacactgaaatgtgtgcaggaagtgtgcctgctacacgtccaagctaggcccccgctaggagtgtgaaatgcccaacatacctgccaggacaaccata

SEQ ID NO: 217497 - DNA, 122 bp, Homo sapiens
tctagcaacaaactgtggcgggggcgggggcagtggccacgtgacttacccctttccgtgcggtgctcggcgccgcgcaccacccccggagttttattattacttaaatcagcctcctcaaa

SEQ ID NO: 217498 - DNA, 122 bp, Homo sapiens
ctttcaccttgcccaggctggctcagaggtgactgccttagtggataggatcccttccaccgtgggctagcagcctaccctggtcactgacaccacaccatgtaggaaagaatcgccaccac

SEQ ID NO: 217499 - DNA, 122 bp, Homo sapiens
caagagaatcgcttgaacccaggaggcggagttacagtgagtcgagatcgtgccattgcacgccagtctgggaaatagagtgagattctgtcttaagaaaaaaaaaatttgttagattatgg

SEQ ID NO: 217500 - DNA, 122 bp, Homo sapiens
tcgcgctcggtttgttagttccagttccggccgcgagggtggagctttgtgcctcggaggcgtgggtgacgcaggcgcagcgcgggctgcgcgcgctactgcccatccccggttgtcccact

SEQ ID NO: 217501 - DNA, 122 bp, Homo sapiens
tctctcccgcagatctcgcgagagtggctgactggctgtgggggttgcggcggcagcaggcggagccggggagggaaagcagcggcggctgaggcgactgaggcggcgggcggagcggcagg

SEQ ID NO: 217502 - DNA, 122 bp, Homo sapiens
gagatggatgcgctaaggtctaaagatacctttctccctcgactaaattaagaattgccgcgacagttcccaaaagctgagtcccgctgcagctgccaggtcgccacactcgccaagcggcg

SEQ ID NO: 217503 - DNA, 122 bp, Homo sapiens
gggaaggcatcgaagttcgtgcgcacgggatcacggcagccgaacttggaagacttgaagcgacggatgatgtcctggagggtggcagccaccacgaaatactcctgcttcagccgcagctc

SEQ ID NO: 217504 - DNA, 122 bp, Homo sapiens
attccgcaaaacctgtgtttgaaatttcttatagcattcctttacaaacaggagaagcttcgtctaatgtaaaaaaaattaaaggagtccacagggcaataatttttccaccagaggtctca

SEQ ID NO: 217505 - DNA, 122 bp, Homo sapiens
gaaagaaaatcaaggtcactcctcaatactcaccctttctgccaagagcacaggccagttcgctaccaaggaagcccccaccgataatcgtaattgatttgacttcccgtgaaatcttctcc

SEQ ID NO: 217506 - DNA, 122 bp, Homo sapiens
tgattccgcgggaacagccagtgcccctgggagctgctaagctcctcctctcagttgtcccggctgtggaatcatgcgcctctggacccctagaaggaacgttctagtgcattcagggttat

SEQ ID NO: 217507 - DNA, 122 bp, Homo sapiens
ttccggtgccgccacattccgggcaccaggctccgggctcttcagagcatttggggcgggcgacggaggtcccgtccactctcgcttgggtgcagaagggcgcggcggtgccaggaagccgc

SEQ ID NO: 217508 - DNA, 122 bp, Homo sapiens
aaatcgatctttcctacgtccagcaagggccaattagagatggctgtggcacggcggccccgccccggaactcctcaagagcttcgcccctccttacctatggaaacacaggaagtgaccta

SEQ ID NO: 217509 - DNA, 122 bp, Homo sapiens
acgcccccagaccagcgcttccgcttccacgtcctgcccctagcggcctggcgcatggggcggacgtagcaggggaagctgaaaaaagcatctttatgtgactcatattttttcttaattca

SEQ ID NO: 217510 - DNA, 122 bp, Homo sapiens
tgggaagagtctgcctaaagcattaaataactcaaatgcaattgctacttacatgagaaccgaaagggccttgctcccaacccacactgcctcacaccctctccgtggaaaagcccgtactg

SEQ ID NO: 217511 - DNA, 122 bp, Homo sapiens
ctcagcttatttggggcctttttttttttttttaacttgggtggaggaagtggcttctagcgacggacacacacggtgccatttggtattgcggatgctggagtctggttattgagtagaca

SEQ ID NO: 217512 - DNA, 122 bp, Homo sapiens
gctttctctttgtggtgcttatgtggtgtcacaatgcgtcttgtgcctctcatctgattccgctacacggtgcaagttacgccagaccagaaactgaaccgacgctgaaagtatcaggcctt

SEQ ID NO: 217513 - DNA, 122 bp, Homo sapiens
atgtcttcccagctcagccttttccccactcttaaatactgtactacttcactgtaagaacgaaagaatagttaggataccaatgagtaaaagggttcctgttcactctgactctgtgcaaa

SEQ ID NO: 217514 - DNA, 122 bp, Homo sapiens
gcgtttgagaactgctgggtgggctggtgttacccaggatttttaaatttttgcaggagacgctttgcaggagatctctagggcttttttctgtgtcaattaaagagcctggccagctggac

SEQ ID NO: 217515 - DNA, 122 bp, Homo sapiens
acagtggcccgatccacgtctcgagttgctctgaattcccagcactgtctcgtggcggcccgcagcccgtgggccacaatggagggcttcatctcagaagcttcccatactccttgcctgtc

SEQ ID NO: 217516 - DNA, 122 bp, Homo sapiens
cgccgccggggctgtagctactgttgctcttgctgatgctgtagctcccgctgctcctgccgcggccgctgcagccgcttctccccctcctcctagtgcctcaaactcggaaccggttgaaa

SEQ ID NO: 217517 - DNA, 122 bp, Homo sapiens
tgggaggcagccacagtatacagtcggtgctcaggatgcatttgttttcctgtcccccagcgctgccgcctaaaccccccaaggcaaagccggcctccacagtcctggccaatggagggagc

SEQ ID NO: 217518 - DNA, 122 bp, Homo sapiens
ggacccgacgggcaagggcgggcctcgcgggcaggctgggcagccctcagggaacaggtccgtgcggcccacgtgggtcgcctgtgagcttctgccaagggtgggggcccacgcggaggcga

SEQ ID NO: 217519 - DNA, 122 bp, Homo sapiens
tagaaacagttcctgggtttaaatttcttgccatggaccaggcctcagtttgaggagcaccgtcctctgcggacggccgtgacgccttctctctcctcccacgggctccgtttctcctctcc

SEQ ID NO: 217520 - DNA, 122 bp, Homo sapiens
ggtcagctctggggctctggccccaactgctctccctggggacttgtttaaaaagcagctcgtgacctcggcactttggctggggttttccctttgaggaatgtgggctagacctgggagat

SEQ ID NO: 217521 - DNA, 122 bp, Homo sapiens
cgtgtccgccggtcccacttggagtctggccaccaggcgcatcggtggcggaggcggctgcgctcggcccgcggctgcccggccgagtgtccgcccgtggggccggggtcggggtctcggcg

SEQ ID NO: 217522 - DNA, 122 bp, Homo sapiens
cttgcggagatttgacctacgtacttagcgtcatgacgtagtacgtaggggctggctagccgccatcttgcttctttttctcgctcgctcgctccccctcggaaagctgcgaaagtgctttg

SEQ ID NO: 217523 - DNA, 122 bp, Homo sapiens
cttatccgatgcttttgcatccaccaatggggtttcgagtgctgtgtggccaggctggcccggccttgcgtcgtaagagaatgccaagcccggggagaaggcgttccgggcctcaactttgg

SEQ ID NO: 217524 - DNA, 122 bp, Homo sapiens
aaggtatttctctgtccacatccttcagtgttcttattcatacatttcctgagcatctttcgtgtaccagaaacacttctacatgttgggaatgcaggagtgaaagaaacagacaaaaatcc

SEQ ID NO: 217525 - DNA, 122 bp, Homo sapiens
aagtttcggctgattcccgcgtaaagaagttacggaagcgctgtctggacgctctctccacgcgcgcgaggtcctctagtagagggagaaagccccccccacttcaccttcctcccactggc

SEQ ID NO: 217526 - DNA, 122 bp, Homo sapiens
cggcccgcgctctccccctccgcccggcgccgctgccgagtgaactggaaccagtcctcgcggccggcttcccacaatgcacagcgcgccgctcgtcacatcccttcgcggccccgagcgtc

SEQ ID NO: 217527 - DNA, 122 bp, Homo sapiens
ggccgggtcgccggcatgaaggaaagctgggccgcggcggggggcggaggcggggcggctcggacccctggactctagacctacgccgccagggcacgacggcccagccctggccccggctg

SEQ ID NO: 217528 - DNA, 122 bp, Homo sapiens
tttcccattgtcaagaggtggtttggagcccttctaggcaacagggaagattcagcaatccggattctggagaggtccttcaggaatggaacatttgtccagcgcagggtctgtgagccttt

SEQ ID NO: 217529 - DNA, 122 bp, Homo sapiens
caagcacggcttgcagctttaaatccctggcacctagttcgctgcctggcacgtaatacacggcaattcagcaagtatctctaactcagtgaggagtacaaaggagaagtcagaggcccaga

SEQ ID NO: 217530 - DNA, 122 bp, Homo sapiens
cagccaccatgtcccgaggagcccgcatgtcctcgtggtgcttgggctggagtcacggctcggaccgcctgtgctcagtttaccgcccgctcttaatttaccgcccgcccttggtttacctc

SEQ ID NO: 217531 - DNA, 122 bp, Homo sapiens
gcggctgcactgcacgcgcaactacatccacatgcacctgttcctgtccttcatgctgcgcgccgtgagcatcttcgtcaaggacgctgtgctctactctggcgccacgcttgatgaggctg

SEQ ID NO: 217532 - DNA, 122 bp, Homo sapiens
tgtcagcacgtaaactgagctattttaaggtcaaggccagggtgcagcccaacagaattgcgaaagcaaaatgtgtttgcttctgcagttggctttttaaatacatttttctttattaattg

SEQ ID NO: 217533 - DNA, 122 bp, Homo sapiens
ttcagaacttactggggcttcccgatggcttcacatgttaactcaagcgcgtccccttcccgggttaagccttgtagaggataagtcatctgaatgtgcacttgaggcttatctgtgtgaca

SEQ ID NO: 217534 - DNA, 122 bp, Homo sapiens
atgaactgatgagcagttctctttgactcccagtattaggaatcacgggggagtttctctcgtgcctgattctcagccccacaccaagagtttttggaggtctgactccagcttttctcagt

SEQ ID NO: 217535 - DNA, 122 bp, Homo sapiens
agtgtgagggctgagaggatgagagtcaggctcacagctcacctttccaggtgaggcagccgcatccaggtacaggcctagaagggagactgggagtggggccgggaaggtttcctccctct

SEQ ID NO: 217536 - DNA, 122 bp, Homo sapiens
gactgcaaaggacacttagctcttccggaatgaaagcacgcaacgcagcataaaaagcatcgaaaccccaaacagcagagtgttaaaggcaattgcttccaggtagtgacgtagtagaaccg

SEQ ID NO: 217537 - DNA, 122 bp, Homo sapiens
ctcctaagaaaaattgaccaatgaaaatgccaaatcgtccaagggcagggctactcactgcgccagccagtccagtgaagggagggcgaggaagaagtccagctgtctccctaatctcgccc

SEQ ID NO: 217538 - DNA, 122 bp, Homo sapiens
tggggaggacggagttgccttcaggcttctggtctccagccgcggggcactcacagctgccgctatgaaaatgcagacctgtggggcaggaattccgagtccggggtggagcgcgatgtgga

SEQ ID NO: 217539 - DNA, 122 bp, Homo sapiens
tcaccgcctgcaccagttgtgtggtatgctaagaacacactgccaactaccaactgtcaccggttaccttttcacaggcttatgtcctgttcccttgaatagactgtcagttccttgtgggc

SEQ ID NO: 217540 - DNA, 122 bp, Homo sapiens
cccaggccgcgcagagtcggcctctgtgatcccacccagaatacagttttccctcccgggcgcctggatctcccctcccccggctcctgtttccttgtcaaaacttcctgccttggcgaggg

SEQ ID NO: 217541 - DNA, 122 bp, Homo sapiens
caaactcctgacctcaggtgatcctcccgcctcggcctcccaaagtgctaggattacaggcgtgagccactgctggcctaaaagatgcttctggagtaggaggcattgggcctggctggaag

SEQ ID NO: 217542 - DNA, 122 bp, Homo sapiens
catgggagaggtcagaggtcagagttccctcaacccccagggtcctggttaacactgccccgtgagaatcattccgtggggggagagatcagagacgggaggggggcgggggcgaagaggac

SEQ ID NO: 217543 - DNA, 122 bp, Homo sapiens
tgcatctcacagatcaagtttcagtcttccagcagggttctgaaagcagcctgctcccatcgcgcccctcggatgtggacacccagggtgggctgcagaccgcggccgggccgcactctctg

SEQ ID NO: 217544 - DNA, 122 bp, Homo sapiens
cggcacagtcctggatttggtctaggctttctggcttggccctggaactctcagcaaggacgggtcgagtacccaagccgtggagaaagcccaggaagggcacgtgctaggatctcacacct

SEQ ID NO: 217545 - DNA, 122 bp, Homo sapiens
atcttccaccagttctgttctgcaggtcgggagtgggctgaggagtggcgtgtgggtctccggaagctcgtcgcaggccatctgtgtgactccggtgcgagtggaggttggtaccgttcagt

SEQ ID NO: 217546 - DNA, 122 bp, Homo sapiens
cctcctgagagaggtccaggtaaaggtttacggttgccacaggtcagtcctgacgaaaaccgcaagctgcgccaaatctcgcgcagcggggcgggagggcgggtggggaatgtaaggtatcg

SEQ ID NO: 217547 - DNA, 122 bp, Homo sapiens
caggtcatctgccagctcagggatcttcctcaggatttcctcaggatctaggcagtccaccgtgctgccctcagaggagcttgtgtcgtccactccctgcaggggagaagcccagggcagtg

SEQ ID NO: 217548 - DNA, 122 bp, Homo sapiens
ctccggccacacagaaagaggtgttttcccctcggtggcctccaagcgcagcgggcactgcgtgccatccgctccctcaccgggcgccccgcgcggatgaaacggagcaactgggaaagagc

SEQ ID NO: 217549 - DNA, 122 bp, Homo sapiens
gggtgccggctgagtcccaggcccttcctgatgggtttgggtggagcagctctgctgctccggtccctctaaggagggcctcagcctagggcgcagcagagaaggtgggatggagactgcca

SEQ ID NO: 217550 - DNA, 122 bp, Homo sapiens
ggggaagaggcggcagcggtgaggccaggtcgctcctcctcgcgctccccgccctttcgccgcctccgcccccgagccgagcccaccgcctgttgcagccaaagccgcgatgctctgtctgg

SEQ ID NO: 217551 - DNA, 122 bp, Homo sapiens
tccacaaaatagctttttagaacaaaggcatcagccagtttctcaaggactaggaagtagcgtcattctgagatctcagccatttcgataaaaaatagatataagaaataggacagaaaatg

SEQ ID NO: 217552 - DNA, 122 bp, Homo sapiens
gctcaggagtccccaacccctgggctatggacaggtaccagtccatcacctgtcaggaaccggcctgcacagcaggtgttgagcggcatgcaagcgagaattaccgcctgagctctgcctcc

SEQ ID NO: 217553 - DNA, 122 bp, Homo sapiens
aaatcttttggaaatcggagctcacataaggtctggaaagttagtcttttcctccttccccgcggtgcccctatctgctcgagtcagctgtgtgccagcgagaaggagacgcactcggagaa

SEQ ID NO: 217554 - DNA, 122 bp, Homo sapiens
gccaatgggcgcgcgcggtctggactgcgggtgccaatcccggggcgggccggccggccgcgcccacctattggctccaagagctcccggggcgtgtgtcccccgaccttccgtattacccc

SEQ ID NO: 217555 - DNA, 122 bp, Homo sapiens
tggtttctaagcagatccttctggaaagacgcttagggagagtctagggagcagctctgacgtcagtagctgccatcggaagtcaggtcatgttctacaaaaagcagtgacgcacgcccgac

SEQ ID NO: 217556 - DNA, 122 bp, Homo sapiens
agttatgggcagtgtccgcccagtagctggacagcatagccaccggcgtgctgcacaccccgtccttcccaggccctgggcctgctttgcaaaccccggcatggcaggggcctccccaggca

SEQ ID NO: 217557 - DNA, 122 bp, Homo sapiens
ccgtccccgtgtgtccagttcccagaggatgcgcctgggggctctgggaagttccctcctcgacgctgttccgaaggcctcccaaccatttcttttttcttttttttttttttttgagacgg

SEQ ID NO: 217558 - DNA, 122 bp, Homo sapiens
tcaaccagtccctaatccattaagtgactcccttcccattcctgtgtctcagtttctctgcgtagaaactagaggcttcttctctagtgatatgcagccatttaggctggcactaggttgga

SEQ ID NO: 217559 - DNA, 122 bp, Homo sapiens
tattggcattcatttgatttttccatcttctgatataaccttcaaatgttaatagtgtgtcgaagaatttattggaaatgagaaacaagaaaacagtgagtctaacctagtcattctagaat

SEQ ID NO: 217560 - DNA, 122 bp, Homo sapiens
accagaattgccctggtgacacacactgtccccagcctccttggccaagaaataattctgcgatcgttaatactgactctgcttctgccgcccgcctcgcccagagactgaccaatcgctcc

SEQ ID NO: 217561 - DNA, 122 bp, Homo sapiens
gcctccttcaggagttctgaacctggcatttgatgcccgatggacaataagggctccccacgaggctgctcctcagggctcaggatcttcagtcaggcaaaggctccccaagttccaggggt

SEQ ID NO: 217562 - DNA, 122 bp, Homo sapiens
tcttcagcgaaatacatttctagggtagaatttacctccacttagatagatggacccgatcgtaatatttccaagtttcaaaaattacttcacaataccagcagaggccagggaactgataa

SEQ ID NO: 217563 - DNA, 122 bp, Homo sapiens
agtccctccgcccccaagtccagtaatgccagcgatggacagaccttctacccaatagcacgccccttttctgccgttgggtcccgcccccttgagggctaagccaatgagcgctccgggtc

SEQ ID NO: 217564 - DNA, 122 bp, Homo sapiens
attttaggccaaatgtagtttcctgatgaaaatatcttccccagaaaagccagagcttgacgtgcaacggaccaaccagaggctgctgggattcccatgttgtgcctggctgcagctgtggg

SEQ ID NO: 217565 - DNA, 122 bp, Homo sapiens
cagcctccgagtccgcaacctgctggggccctcctgtgcttccgggagcctctgtatgcccgcccccttcggccagccaaccaatggcgcggcagcaactcgctgactggcacggagtttct

SEQ ID NO: 217566 - DNA, 122 bp, Homo sapiens
tcccatcctctcgctctctcttttaaagcgacaccagctctctctcctcctctactatctcggtatcaccaaacccttgccggctcttatgggcatgaaacactcctcccgctgcctgctcc

SEQ ID NO: 217567 - DNA, 122 bp, Homo sapiens
tgagcacgagtgatgtgtaccacatcttgcttgggctcataaagtcctcctggacatactcgtccacactctttccccctttctgtctaactgagatggaaatgcctcccctattctgccct

SEQ ID NO: 217568 - DNA, 122 bp, Homo sapiens
tattttgcccctgccgccatggctttttccgcgctcccgcggctttttgccccgccgcggcgggtttttgccgccgtggctttttgcccgcgccaccgctgctttttgcacctttttgcccc

SEQ ID NO: 217569 - DNA, 122 bp, Homo sapiens
tcctgccctcccaagctgcagcacgcgctggctggggggtcgtgggggctcccgtgggggcgcggccggacgcgggacgctgcctccgggaatggggctgctggagcgggaggatgcgctag

SEQ ID NO: 217570 - DNA, 122 bp, Homo sapiens
tgtgtgaggagggggccgatgacctgctgggcctgaggggtgagttgcaaggtacagatgcggaagcctccatccagacctctggacctcccccttcctaccctgccatccatcacctgcct

SEQ ID NO: 217571 - DNA, 122 bp, Homo sapiens
gtaataatttcaatcctgcttccatggagtaaaattccagactgggacaagcgttctttccgcaggcagctttgcatcatcagcttcctcttacacacattggtcatcatgataatacctac

SEQ ID NO: 217572 - DNA, 122 bp, Homo sapiens
tgagaagattcgtgtttctgagtgtagagggtaaggagggatataggaaaaaatgagcttcgagcagtcaacagggatcttcagggtgtgagcttttacctgaagataaatgggaaactatt

SEQ ID NO: 217573 - DNA, 122 bp, Homo sapiens
tcctctgcatccagctggtctcccacacccaggttttggccagctgcccagacatgggagcggcacccaggctgtggggattggctggcccagcccagcccagcctagcctcccacagcctt

SEQ ID NO: 217574 - DNA, 122 bp, Homo sapiens
aggtccatcactgcgggacctctcagagcctttactaagctccatcgctgcgggacctctcggagcctttactaagctccatcgctgcgggacctctcagagcctttactaagctccatcgc

SEQ ID NO: 217575 - DNA, 122 bp, Homo sapiens
ggagaaatgccccaaaggagactgacccggcgcggtgctggcgggagcgctcaagggcagcggatttgttgttgttgctgttttcctttgtgggtgtttggtgcttgatttccagaaactct

SEQ ID NO: 217576 - DNA, 122 bp, Homo sapiens
aaaacaggcagctgcccctttcagcaggctcggagtctccctccaaggcagggtctgccccgagggcttacagggggtttttccggacatcaatcatccccgggctggctcgtcgcagttcc

SEQ ID NO: 217577 - DNA, 122 bp, Homo sapiens
agggcaggggctgctgacctggaaggtgacccacaaggtatagagctgggcggctttcctcgttataggtggagtcttggcccagatgtccgagagccgagcatgtccggtgacgatgtcca

SEQ ID NO: 217578 - DNA, 122 bp, Homo sapiens
cgtcacagcacgacaccatggcggcagtcacttccgctatgcctcacgacacttctgctacgccttgcatcacttacggtgcaccttgcatcacttccgctaggcgcagagaggagggaggg

SEQ ID NO: 217579 - DNA, 122 bp, Homo sapiens
acccggagggctcggcccctcctcagccaggaaaaggctggagagtgcgcccgagcgggacgcgtgctcctcctaagccggaaggagcagcaggcatgtctggtctggcccaggcaaccagg

SEQ ID NO: 217580 - DNA, 122 bp, Homo sapiens
caggcagcccagcgggggcaggggcgggcaggaggccggctcgcaggggccgcaggtgtccgaagaggaggaagaggagaggggcaggagcaggagcagcagcccagcggcgccgaggagca

SEQ ID NO: 217581 - DNA, 122 bp, Homo sapiens
ttcaaaacttaagaatttcacgacagcggcagcaggacgttgggctggtgaaactggtcacgccaaggggcctgaaagtctgtgttcccaaagggccagggtttgaggcgctgtatttctgg

SEQ ID NO: 217582 - DNA, 122 bp, Homo sapiens
tggcctttacagactgataaaaatatggctgtttcaggtggtgttttgagctgctaagggcgtggcttttcactgagtacgtggtccccgttcctcagggaacacccagtagccacatgcct

SEQ ID NO: 217583 - DNA, 122 bp, Homo sapiens
gcagctaggggaggcccaggtgggcctggaatgggcccagagagggcttcctgggtcagacgtgtagatccagtggacgtgaaaaccgggtgagtgtcccggtgggacccagagcgcgggga

SEQ ID NO: 217584 - DNA, 122 bp, Homo sapiens
tggttttgtttccgaggagcgggcgtgctgcgctgcttctctttgagtcatctgggtcctcgcctgttgactttcttcctggtagatgtggactgacctcttcctggtagatgtggactgac

SEQ ID NO: 217585 - DNA, 122 bp, Homo sapiens
gcattttctcaacaggctgtattttcagacgacacctgtcccacccaccaggatgcacagcgggaccagcgctgcccgcgcctctcacggcaccgcatccgcctcctgccagccaggaagcc

SEQ ID NO: 217586 - DNA, 122 bp, Homo sapiens
ggtcagtttatagatcatattttaatgatttattggtaagttgattcattcctgttgtttcgtatagcttttttgagattatcttaataactgatgagaaagtgaattctgttcactggatg

SEQ ID NO: 217587 - DNA, 122 bp, Homo sapiens
gggcccgttgtgggtcggcccagcgcgtattcgagtagagggcgagcccgtcccgcccctcgtcgggcgcttcccagatctgcttgagtctatggaggaaaaactccgcggggtccgcgatt

SEQ ID NO: 217588 - DNA, 122 bp, Homo sapiens
ctgagtgcgtctgaggcccgtgccccttctcctgattctcagaaaggcgctgtttgggctcgtggtgacggctgttgccaggctctacgggtggaggctctgcaggtggagtcaggatttca

SEQ ID NO: 217589 - DNA, 122 bp, Homo sapiens
agaccccagggcgctgcttaccatcaatattcagcatcattttccagagagaaggccggacggactgatggaagccaaaccacacttctcggcccccgccaagagggttagagcagccttcg

SEQ ID NO: 217590 - DNA, 122 bp, Homo sapiens
ccgggaaagggagagggcccgcgccgccccctgctcacctcctcggacgccgccggtcgccgccacctgtcccactgcagcagcagcagccgccgcggccgccgcctcccgcctcccggctc

SEQ ID NO: 217591 - DNA, 122 bp, Homo sapiens
gcccttgtgtggcacagctgctttgcagatggagacgccgaggctcagggcagcctgctgcggctggcttgctggtgggtagttgaatctggttggtcttaggctcctcctctggtctctca

SEQ ID NO: 217592 - DNA, 122 bp, Homo sapiens
gttctggtcttcaatccagacagccaagtactgtcgaatgtccacaggcaggaggctgtgcgagtaaagctggtgcagctgatcctgaaaggggctgtcaagattctgcagcatttcccact

SEQ ID NO: 217593 - DNA, 122 bp, Homo sapiens
gcggcaggtgccagtgaagatcgccagggcggggagacggggcagcgtttgggttccttccggggccatgcagtctcaagcaggggactaagactctctcgtgttctgaaaaccccctcgtt

SEQ ID NO: 217594 - DNA, 122 bp, Homo sapiens
ccagggaggaggcgcggccggagccaaagcgcagaggcctccctccctcgcgcgccgggtcgcacttcattcctgcacaggcagaatcatctggcttctgcaaagcagtcgcgcagcgctgt

SEQ ID NO: 217595 - DNA, 122 bp, Homo sapiens
tccgcggctgtgcgggagggaaggagggactcaggtgggggtcccagctccgagggcgtccgtggcctctcccggctggggtggggctgcccacaggactctccccacgcccatactcggga

SEQ ID NO: 217596 - DNA, 122 bp, Homo sapiens
gctgagaaagctatgccatgaactcacttggcacatttattaaccatcaggctatgtctgcggccccacgtgtttgctgccccatgcacggtggtggtggtgggaaggcagggccgggtggc

SEQ ID NO: 217597 - DNA, 122 bp, Homo sapiens
ttttttgcttctttatgacacaggtataataaagacagcctgttatagtaaatgatagtgcgttatatactgtttggaaaataatgacctataaaaatgttttgaaagagtttgatttttta

SEQ ID NO: 217598 - DNA, 122 bp, Homo sapiens
ctgggtcctccctgaaggaccatcgtcactggacccacaagatgcgtcactcccccgactcgtacggcagctgtcagcaattcccgcatgtgcaccagtgcctgcttgcgagtgtttccccg

SEQ ID NO: 217599 - DNA, 122 bp, Homo sapiens
agctgagtcaaattactgtgtacctcctcatgccaggctatgctgcttcagcacttggcacgcgctgccgtctctgtttcgaatgccctttcccacctaactcattcctcccacccttccat

SEQ ID NO: 217600 - DNA, 122 bp, Homo sapiens
gcctctaccaaaaatttaaaaatcagccggaagccagacactagggacatggctgaggatcgctcccgcccctcggaggccagaaaccgagggtcactcccgctctctagaggccggaggcc

SEQ ID NO: 217601 - DNA, 122 bp, Homo sapiens
ctggcacacacagccccagcacatgtggcccgacgtggctggcccctggggttgcatgggcgggtgccctcactgacctgcacggggtagggagaccccagggcattgcgtggttctctgag

SEQ ID NO: 217602 - DNA, 122 bp, Homo sapiens
aggcaggcctaggccctgatgcaaaatgtaccacccacctccttctgccaaatgtcaactcgacccagctgcaaggcagagaaaacttggcagtgttcccaaaggggacaggagattgtctc

SEQ ID NO: 217603 - DNA, 122 bp, Homo sapiens
gattcgtgactgggtcacggtcctcactcattcctcagaaccgcgaagaaaggaagctagcgtgtttgttagaaaacctagttgggagtgcaaggcagagagcgttcagcacccttgttcct

SEQ ID NO: 217604 - DNA, 122 bp, Homo sapiens
tgggttacaacagcactaacgacaggtagcattgcacacaggcagctgctgggaagtctccgcccccatctctggctaggagccctgcaggtgatgataaacaagctcctgtggaattgtgg

SEQ ID NO: 217605 - DNA, 122 bp, Homo sapiens
ctcagcctggcaaaaaacttgaattccaagaacgacttataggaacaaaaaccagtttggcggcagacagaaggaagaataaatgcaccaggtctgcaaaagccttcagaattcaggcaagg

SEQ ID NO: 217606 - DNA, 122 bp, Homo sapiens
gacggaacactggctcccggagcgggtgtccatctgcaggacacagaaggggaggacctgcgccatcagctccggggagggccggccccacccactgtcagggagaccacggggactgggaa

SEQ ID NO: 217607 - DNA, 122 bp, Homo sapiens
gaggagtgcgggggcgccttttctggccggcaggacgggggcagccggagaggtgcaatgcgggctccccctccccaccctgcagcggggccctgcagaaggtaccgggcggaacacgcgtg

SEQ ID NO: 217608 - DNA, 122 bp, Homo sapiens
ctgaaagccggagtgggggaagacggtgtcgggggaggtcgcctcgtccacgggcgggcgcgctatgacagcggcggggtttccaacggagactgcagcctcggcgtgtccggggacgaagc

SEQ ID NO: 217609 - DNA, 122 bp, Homo sapiens
agaaaaaagggtgagtagcgactgtagtcccagctacactggaggttgaagcaggaggatcgtgtaaaccaaaaagtttgaggctgcaatgagcccctgcactccagcctgggcaacagagt

SEQ ID NO: 217610 - DNA, 122 bp, Homo sapiens
tatctgaggtaggcagtctcctctgtgaggtcggtcccatccatactgcctagatccctgcgcaggaagactgagatgaggaccctaggagacagcagccagggatagcgaaggtggaggat

SEQ ID NO: 217611 - DNA, 122 bp, Homo sapiens
aaatcttgctgctgctcactcttgggtctccactgcttttatgagatgtagcactcactgcgaaagttggcagcttcactcctgaggcctgtgaaaccacgaacccaccaggaggaacgaac

SEQ ID NO: 217612 - DNA, 122 bp, Homo sapiens
aggaagagaagggaattttcttaactaataaagagtatctctaacacatcacacagtggccgagatcatgctgctgcactccagcctgacaacggagcaagatgctgtctcaaaaaaaaaaa

SEQ ID NO: 217613 - DNA, 122 bp, Homo sapiens
tcataatttggagggaagctcttggagctgtgagttctccctgtacagtgttaccatccccgaccatctgattaaaatgcttcctcccagcataggattcattgagttggttacttcatatt

SEQ ID NO: 217614 - DNA, 122 bp, Homo sapiens
ccacaggccgctctgctgccttcccacggaccccgtgctccgactgccctcgctgcagtgcgggaaccatggaggactgctggcttgtcctgggcagtcctgagctgctgagccccaacaaa

SEQ ID NO: 217615 - DNA, 122 bp, Homo sapiens
cagagaagggggcacccggggcgcacccccgaacctcctccccacacactcgcgcggatacgcacacctgcatggccacaccgatatgcacagccgcggacacactcagagccacagtcgct

SEQ ID NO: 217616 - DNA, 122 bp, Homo sapiens
caagtctcaggagctagcagcaagctgaggaaagagagagagccagcaccatggaaacatcgctgccttggaggcaggaagaaaggtccacacagggaaagtgctcaaggccaaccttgcga

SEQ ID NO: 217617 - DNA, 122 bp, Homo sapiens
accctcccctccgtcccccgacgtcccaatcagttaccacctccccgaaggaaaacaaaccggcccttgacacatccctccacgtgcagcgcccgacgccacgggccttgggcggctgcacc

SEQ ID NO: 217618 - DNA, 122 bp, Homo sapiens
gggcgcctggatagctgccggctccggcttccacttggtcggttgcgcgggagactatggcgtcctcctcggtcccaccagccacggtatcggcggcgacagcaggccccggcccaggtttc

SEQ ID NO: 217619 - DNA, 122 bp, Homo sapiens
cgcggggctgcgagtgtttggtgccaactcattaggggggccgggcggtgtgtcgggaaacgcgggcttgggcactgcggccgggagcgctggcggagaacgggggatccagtacccgaccg

SEQ ID NO: 217620 - DNA, 122 bp, Homo sapiens
cttccgccccgcccgctgccggccgcccgtttgatgtcgcgggcccggcaggaatgcggccgggttatcaatcacccagctggatcccgaaggtctctgcctaatcacatttaattgctcgt

SEQ ID NO: 217621 - DNA, 122 bp, Homo sapiens
tccttctctaattttcttggcttcctatggtttcagacctactcgactttaagaagatgccgtgaaatatggcttttagtcataggcatttctctggacagaaaaacaaatttgtgcttgta

SEQ ID NO: 217622 - DNA, 122 bp, Homo sapiens
agaatcttgggactggaaagacgcagtttcactcgggtttctggtaagcagtggggctcccgtcacccgcttccccacccacagggcggctctccatgggctttctatgccaggccatgcag

SEQ ID NO: 217623 - DNA, 122 bp, Homo sapiens
gcgtggggcctccacagtcaagacctttgcctgtgtgcagccagtcaccacgtgggcgggcggcactaaatgagaatgtgtttctgggactattatgtgatcttgagcccgacacttaggct

SEQ ID NO: 217624 - DNA, 122 bp, Homo sapiens
ccctagaagaaataaagtaatagtatatagtcacaacaaggcttaatatttttctgatttcgttgtgcagacttgttccaggctaggtttttcaaaacctaaccatatgcaaaatgtttaac

SEQ ID NO: 217625 - DNA, 122 bp, Homo sapiens
ccgtttgaagcaggccagccaggcaggatgtgagggcaccctaggggttctgaaatgtaccgctgcccagtaaccgatgttctgtagtagcattttctgtgtgtttgtgttggggtgcccct

SEQ ID NO: 217626 - DNA, 122 bp, Homo sapiens
tggtaagagcctgggaagagatgctgtctgtggtgagcacgtgatagacattccacgacccgacctgtcggtgccctggttctcattgtttcttctcatttccagctgcatttatctcttgt

SEQ ID NO: 217627 - DNA, 122 bp, Homo sapiens
aatgaagtggaaggagtgataagagttttgtacagtagtatacggaacactcagtcgagccggatgcgtgaccacgactgcccgcacctgctcctgttggcagcatcaccgcgcagcccaag

SEQ ID NO: 217628 - DNA, 122 bp, Homo sapiens
gctcaccagcagtagtccagcaggtgtgggggcagcgtggggatcagcacgtgctcccagcgcatggggtacaggagcgcgcaggacgcgtggacgcacgaggtcagctggggagcgatggc

SEQ ID NO: 217629 - DNA, 122 bp, Homo sapiens
aacaaaaggaaataaaaaattgcctattttgccacctactttcaggtaatggaaaatgatcgcgaccgcttgatgactttcttcctgcgctgggtcagcccgagcttccaaaaataaaataa

SEQ ID NO: 217630 - DNA, 122 bp, Homo sapiens
gcgaacggaaaggggaagcgaacgacgctgggaggagccggctccgggcccggaggggtgcggcgggggcaggcggggaaggaccacgtgccttcggagagaggggttggaagcaatagaga

SEQ ID NO: 217631 - DNA, 122 bp, Homo sapiens
aaaacgtcataaaatccctctgcatagtggttgtctgatgctgcatgagatgaacctggccggtcctcgcaagccccctgaggcaggacccgccctatgcccttccttcaggggaggggcct

SEQ ID NO: 217632 - DNA, 122 bp, Homo sapiens
cataaaagaggagacatagggggcttggtgagataccctgaaacctcccccctctgaccccgcagccaggccccaggctggccgggagtggcccctcacactggttctccccactttctctg

SEQ ID NO: 217633 - DNA, 122 bp, Homo sapiens
ctgcagcggaagatggagaaccgtgattaccgggatgcacaggagtttgctgctgatgtacggcttatgttctccaactgctataagtacaatcccccagatcacgatgttgtggcaatggc

SEQ ID NO: 217634 - DNA, 122 bp, Homo sapiens
acaaggggtggattattcatgagttttccaggaaaaaggtggggaattcctggaacggagcgtcctcccttgttagaccatgtagggtaacttctctaagtgggcatggcaaggggcaaact

SEQ ID NO: 217635 - DNA, 122 bp, Homo sapiens
acaagcatcctattaccctctcggacatcaggcaggggctgctgggatggcatttccgtacgtggaaggaccgaggccctctttcttggcccctcccattttttttctttccacaggtgcct

SEQ ID NO: 217636 - DNA, 122 bp, Homo sapiens
tgccaactctctgagtgcctcagcttccttatctagaaaatggggctggggtttcctgcccgcccaggggtgtggggagtaccggagtaaatgaacatgactttgtctcgtgacttagaaag

SEQ ID NO: 217637 - DNA, 122 bp, Homo sapiens
caaaaacagcagggagcatctttttatattgtgcaaaaatcagtataaaatttggccaggcgcggtggctcacgcctgcaatcccagcactttgagaggccgaggcgggcagatcacaaggt

SEQ ID NO: 217638 - DNA, 122 bp, Homo sapiens
cagtccttagctagagtacagcgtgatatggaagcgccgggctcagcctctgatttaagccgctctgcgcactgaggacaccgccccaaaccccatgactctacccagaatgcaagcaagat

SEQ ID NO: 217639 - DNA, 122 bp, Homo sapiens
caaggagcagaatgtcttccagtgaccacccctgtatctttgtaggaataagtgggactgcggagctagtggtttggagctagacagacgcacatttaagtcattggcttatcactttcttg

SEQ ID NO: 217640 - DNA, 122 bp, Homo sapiens
gaaccaataggaagagcggacagcgatctctaacgcgcaagcgcatatccttctaggtagcgggcagtagccgcttcagggagggacgaagagacccagcaacccacagagttgagaaattt

SEQ ID NO: 217641 - DNA, 122 bp, Homo sapiens
cctttacgctccgaggcccatcctgccggagtactacacagacagggtcatttcagttgacggttctgggtcaccagagcagaggaagccccaatttcgccctccggtcacacctcctactc

SEQ ID NO: 217642 - DNA, 122 bp, Homo sapiens
atcaagtctggggagggagccaggtttggagacggaaggtgcacaaatgatcatccctcccgggctgtagttaatcatgcaagctgctgtgtcactggggccggggtagttaacagttaact

SEQ ID NO: 217643 - DNA, 122 bp, Homo sapiens
atcccggtctcaatttactaagcgaacccagaggatgccccgagtcctggaccgcagagccgctcgcgagaggcaccggggctgtaaccgcgcaacctcgtgccgcgggcggaggcgaggga

SEQ ID NO: 217644 - DNA, 122 bp, Homo sapiens
tcggagccacccagcacttgaccatggccctgacaaggcccctttgtactcactggcagtcggagggcgtgggccggtagtagaaggagggtactttggactcaaacctggctctcgcggcg

SEQ ID NO: 217645 - DNA, 122 bp, Homo sapiens
ctgggtgattccccctccccgcactcccccaatcctgccgctctgtcatctgctgtaccacgtgcacagtaccagggatccagaagagaaggctggttgccagggcaacggaagataaagcc

SEQ ID NO: 217646 - DNA, 122 bp, Homo sapiens
gcaggattgggttttctgaagaggcctggttatgccagacttggctttggcggccgctggcgggtctccctcagcaccccctcttctttccccggctataagaaagctagaccagggtgcgc

SEQ ID NO: 217647 - DNA, 122 bp, Homo sapiens
cgcccagactgtgctttctaacacttcccagatgaggctgcccctgtccacactgagatgcgctgatccaatgtgtccacgggcacacaccagctgcggggggtggaggtggcggtgggcac

SEQ ID NO: 217648 - DNA, 122 bp, Homo sapiens
gaagcaccgtctttttcaggattctccagaattcatacgtatttcaaagttaactcatgtcgaaccccacaattccttattgaatgtggttgatcttctaaacagaccttcatttatgagaa

SEQ ID NO: 217649 - DNA, 122 bp, Homo sapiens
gtccggccccagctggcccagctgcccagtcccaaggacaaagtggtcgaatcaacaaaccggtcccaagaggatgcttccagaacacctcctgacaatcggggaaacctccttttctgtta

SEQ ID NO: 217650 - DNA, 122 bp, Homo sapiens
cacagaggaggggttgggggcagcggaaaatcgggcaggtcgaggcagccgaaccccggacgatgtccccccacccaccccgaaggtcgcagcctgggccgcgttctcagcaggagtcgggc

SEQ ID NO: 217651 - DNA, 122 bp, Homo sapiens
agcaacaatttgatctctggtttacttggtggtgccccaaatatttttccatatgcttttcgcaaagagaatctgacatcagcatggtttacctttaccaatgaatgcaggcttttttcacc

SEQ ID NO: 217652 - DNA, 122 bp, Homo sapiens
ggttgaggggggcagcggcggcttctcctctgcctcttctttcgacgagtctgaggatgacgtggtggccgggggcggaggtgccagcgatcccgaggacaggtctggggtgagtgggaccc

SEQ ID NO: 217653 - DNA, 122 bp, Homo sapiens
cctggtgccgccccctctctggcaccgtctccaaaatcacacggtgcggcgccgttggttcgtttgtggacagaggtcctgcagctccctggaaccaaggcctgtggcgccctaaagctctg

SEQ ID NO: 217654 - DNA, 122 bp, Homo sapiens
agggctgggctttacaaatagtgagatcacacctgcattattacaaaagttatgaaataccgagattgcatttttcgcttcctttagtcaggcaaaatgttcctgcctccagctttgacttg

SEQ ID NO: 217655 - DNA, 122 bp, Homo sapiens
gtcctgtatccccaggaaaaagtcctctgattggactgacttagggtacatgcccatttccgaccaggccagagcctggtcattggcctggcccaggtactggctccatccctggagccagg

SEQ ID NO: 217656 - DNA, 122 bp, Homo sapiens
caagctaatcctacgagagagctgccattttcccccagcttacagatgggggaattgaggcgcgaagagggcaggcgatgtgctcaaggacagacatctagcaggtatgaagccctcacaat

SEQ ID NO: 217657 - DNA, 122 bp, Homo sapiens
gggagcggagagaagccacgctccttccgtaccgtgggcgggcggccagagcgtcctgtgcgccgcctagacttcaaaaacgttgaccgctagatgacgaccgatgacaacgcatggaagtg

SEQ ID NO: 217658 - DNA, 122 bp, Homo sapiens
actgccctgttttcagctccggatttctgggaggtctccccatggctaacttgtccctcccggcatcctttagcgctctgcaaaatttgccttcctcccacagatgccccgcctccgacgtg

SEQ ID NO: 217659 - DNA, 122 bp, Homo sapiens
tagttcaaggcttacggacaagggcttcagacaagttcaggactcccccttcttagaagacgtggcacatttaccaccaactcttttctcaagggtcacgaacctacctttaaagagttaag

SEQ ID NO: 217660 - DNA, 122 bp, Homo sapiens
aaccaacccaaggttggctcactttcatacaatgatgatattaagagaaataagagaattcgagataatgtgtccaatggtggggttacagatggcggatacatctggcaatgtccacttgt

SEQ ID NO: 217661 - DNA, 122 bp, Homo sapiens
aggaaatgtaagtaccgtgaacagtttccagcatgtaatgcgcgaaaagccgggcgtccacgccggtgttaccggggaagggtcagtcactgcaaccccggcattgcgcccgctgttcccag

SEQ ID NO: 217662 - DNA, 122 bp, Homo sapiens
cctagtgtctcccttccgagacccgggtgctgccgctgaatcctctgggaagggtagtcccggggctattggctaaggctgctcagggtccaactgcccctgggggtgatgaaggaacgagc

SEQ ID NO: 217663 - DNA, 122 bp, Homo sapiens
cctcggcggtttccctgtcctgctggggagcggccatggggcaggtccccgagctgaagtcgctcggccgggagacgagtacccgccccgcgggagggcccggacccgtgcttccggcgccg

SEQ ID NO: 217664 - DNA, 122 bp, Homo sapiens
tggccatcctaaaggcgcctcttactcttatacatcatctaccactgaaaccagagcttccgctgtgcactgtccatgcgtggggccgatcaaggacaccaaggctgtgcaatgacaggttt

SEQ ID NO: 217665 - DNA, 122 bp, Homo sapiens
aatattaagtgatcatgaaaatggtccttacaaagaccatagcgacacggcaaatttttgcgccacactgtttagtaaaaactgccgagcgcacagtgccgtgtgcatgtgacgagtccgtg

SEQ ID NO: 217666 - DNA, 122 bp, Homo sapiens
ctagtggacagtgtgggaagctctgggggtgttttcagttgtcaccgagccaagggctaccggcgcgaagggcccggcctcctgcaatgcgtggggcagtgatgcgccatgaggaaatgtca

SEQ ID NO: 217667 - DNA, 122 bp, Homo sapiens
ccagagcgaggggatgagaagcctgaggccggcccgtccctgctccagacgcccccccaccgctccccctcataggagccaaggaggaggaagtgcttcattctttgcaaagaatactccgc

SEQ ID NO: 217668 - DNA, 122 bp, Homo sapiens
gtgaactctcttatacgtccttggtcggactctggagccatgcagaatacgcctactccccgttcgacatgatagaccttcagatattgggggggcacttatctgccttttgaccttcagaa

SEQ ID NO: 217669 - DNA, 122 bp, Homo sapiens
taggccacctcggtcccatcctcagcacgaccctcccgggtgtagcaggcatctcgcgtgcgattagcaagccggtccacctcatccagggggaaggcacagagggcagaggctccagatgc

SEQ ID NO: 217670 - DNA, 122 bp, Homo sapiens
gggccgcgtgagaaagctctgcgggactgagggctgggtgggtcgaccgggaacggcgcgcgctcccgccgccatcgcgcctccgtccccgcctgcggcctgtctgggggtcgcggggcgca

SEQ ID NO: 217671 - DNA, 122 bp, Homo sapiens
gtctcccattggccaagtccagctggaagccagagagcaaaagagccaatggataccatgcgtgcgattcagcctcctggagcacacagcctggtagagaagagtggagggggcatctgagg

SEQ ID NO: 217672 - DNA, 122 bp, Homo sapiens
gcggggggtgggtggatgacttgccgagatcccacaaggcagtgggatttggggaaagagcgaccgcttcctgttgctcgactgcctcgccactgtacggactgatttggcggcctacgccg

SEQ ID NO: 217673 - DNA, 122 bp, Homo sapiens
gacgccggggccctggcctgaaggggggttccccggggatggaggtctcggggttccagacggccctggagggcacccctgtggggtccgggcagggggaggggcagccggacggggcccga

SEQ ID NO: 217674 - DNA, 122 bp, Homo sapiens
ggggcctatcgggcttgcgattgcccggaggacggcatgctgggacgtgtggtttctaagcgactggtactcattgtctgcattgcatcctgggattggtgctttttgaaatgtgaagaaag

SEQ ID NO: 217675 - DNA, 122 bp, Homo sapiens
agctgaatattcgttatttggactccggcaggaaggcgtgggctcagcttcgcgcttgcgcgctgctcttggagacggcgtctacttcgccccgcccctcatagtctgcagttccggctctg

SEQ ID NO: 217676 - DNA, 122 bp, Homo sapiens
tgcggggccagtcggtggggagataaggccgctgggcgtgcatccatctcatggctcagtcggcccagtgtctctcagtgctcacgtctgcctcctgggaggtgggagacacaagatggaag

SEQ ID NO: 217677 - DNA, 122 bp, Homo sapiens
gcgcaggccagtgagccccgaggctctggctggcctgggggacccttaccctccagttctcgccgccaagggagattgggagcggtggttgccctccttaggtctcccggagaaggggacgc

SEQ ID NO: 217678 - DNA, 122 bp, Homo sapiens
cgtgcgcattccccgcctggcccaggccctgggagtaccacaggagccaggtagccctttcgccccctccctctcgtccgagcctcccttcgtcctcctctcggcctacctaccccgacagg

SEQ ID NO: 217679 - DNA, 122 bp, Homo sapiens
tcggcgcgggaggtccggatgatcgcaggtgcctgtcgggtcactagtgtgaacgctgcgcgtagtctgggcgggattgggccggttcagtgggcaggttgactcagcttttcctcttgagc

SEQ ID NO: 217680 - DNA, 122 bp, Homo sapiens
gagacgcgagaggtgtgattggcactacgtcaggcggtatccggggacgcccaaagagggcgttcatcactgaaacttggcggccgcgcaatcgaagctcgaggcggggagcgactggcgcc

SEQ ID NO: 217681 - DNA, 122 bp, Homo sapiens
cctttaacatgccctagacaaagagtcttttagtcattgtgtcaaggccaatcagcctggcgtgccaacaaagacggccttttctctgccttttctcaaggttgacagtggtagttgtcctg

SEQ ID NO: 217682 - DNA, 122 bp, Homo sapiens
tctggggctgtagtctcatcagaaggctctactagggaaggatctgcttctaagttaactcgtgtgtctcttggcagaattcagttcctcaaaggcctctagagagagggctgcagttcttt

SEQ ID NO: 217683 - DNA, 122 bp, Homo sapiens
taggaaagaagcagagcaacgaagcagaggcgcccagcggcggactggccagggactgagcgccgtgcaccacagagccctcctcgcccacttcccgcggcgagggtggcgttgctcccact

SEQ ID NO: 217684 - DNA, 122 bp, Homo sapiens
caggtttcgccgagcccgcctgggtgtgagagacattgaccatgaacccctcagagcagccgttcttaatactccgactgccattcctttcgaaaatgaccgggcttcggccaccgcagccc

SEQ ID NO: 217685 - DNA, 122 bp, Homo sapiens
gcgggccaactgaacatctgtacacggagttgtacaaatagacaacagtctgctctagcccggctctcttcggccctgtgcctgccacaaactcagcctcccgggctccgggttttcaaagc

SEQ ID NO: 217686 - DNA, 122 bp, Homo sapiens
acccaatgcactgcatctaaaaatggagaaactgaagggcactggactccaggtttgaatcgcagctccaatacatactagctctgtaattttgagcaagttaactggcctgtgcttcagtt

SEQ ID NO: 217687 - DNA, 122 bp, Homo sapiens
gggcaagcggcctcaggttccacagttgttccaaggccggttccgggccgccgatgctcgcgcgtctttgttctcgcgagaatgaatgcgtcacttccggtaaccgctgcgagaaggccctt

SEQ ID NO: 217688 - DNA, 122 bp, Homo sapiens
tggcacgagcagcggtgggggcgggtgggggaaggagcgagtgactctccaggcgtcttccgctacctgacaccagccaggcagcccccagggccagagcgtcagcgcccaagccaggctta

SEQ ID NO: 217689 - DNA, 122 bp, Homo sapiens
cctgtaaaatgtctactccatagtatttaatataaaaatgtttaaaattgctgaccaacacgctaacttacccttccttgggcaaaatcatgggtaaaaactgatgggccaagaaaagacac

SEQ ID NO: 217690 - DNA, 122 bp, Homo sapiens
agaggatcgtccacgactcacttcaaggctgaaccaagaaaacacagtaaaggaacttgccggcggccgcgacggtagcgtcagttagaaatcaggtctccagtgttcccagttcccaccag

SEQ ID NO: 217691 - DNA, 122 bp, Homo sapiens
gcgcgccttcagtgaggatcctaatttacaccccgagtgtggccccgtcaaagactagagcgaaggtcactgaaatgacacaagatcagcgaggcccagggcgctgccgctcacagaatgcg

SEQ ID NO: 217692 - DNA, 122 bp, Homo sapiens
tccccagagttctcacttaggggagaatgtgatggaaaaccaggtctcctttcacagtaacggaatagaatagaacatcagaaatcataaactatgccagtttgggtgctccatgaagcatt

SEQ ID NO: 217693 - DNA, 122 bp, Homo sapiens
aagatttaggctttggggcccacgaccccgcaatctgacttctcccatttctgggcctcccgagacctcccagaatctgagaccgcagtgaatagggcgtaaggataatggggcgggaggca

SEQ ID NO: 217694 - DNA, 122 bp, Homo sapiens
caggtgctatctgaacacggtggcgcaaaagagatgaggcctcgccactgatcaaacactcggctggtaagtagaagtccttaaaaaagacgaacatcaaacaggtcctcatctggggcgct

SEQ ID NO: 217695 - DNA, 122 bp, Homo sapiens
ttgtttgttgtttgaagataccaatgccctggggcccacccaaggattctaatggaaccgcggtgggcaccagcattttttaaactttccaggagactccgtgtgtgcagccagctttgagg

SEQ ID NO: 217696 - DNA, 122 bp, Homo sapiens
ttgagcaaccactgcaaccagtcccctccctgccaccttctctgggcctcatccacggtgcgctaggcctgcgcacatccgtgcgtgtgcatgtgtcacccccacctcaggtcctccgagag

SEQ ID NO: 217697 - DNA, 122 bp, Homo sapiens
acaggctttgtgttagatgatttttcccaactgtaagctagtgtgttctgagcacatttacggtaggtagatggccaggcacggtggctcacacctgtaatcctagcactttgggaggccaa

SEQ ID NO: 217698 - DNA, 122 bp, Homo sapiens
gagcggggagcccccgccagccccctccttgttcttggtggcctctgtgcggcggttcagcgctggcagcttgctcttcttaaggccgaaccagctggcgatgctgctggtgttgcggtgct

SEQ ID NO: 217699 - DNA, 122 bp, Homo sapiens
ctgggaaaagttgtcgctgagagagagcccagggtgggaatgcaagggctaggctcggtccgggggccgcaagaatatatagccttcagcatgacgcccctcagaaacatggctctcaaact

SEQ ID NO: 217700 - DNA, 122 bp, Homo sapiens
tcctcagggcacgtgtcggggagaaacaacacttagggacctgggactttctccagctcacgctcacgggtcacctcacactccaagatcacctcaaagaggacacctcacacagggcacac

SEQ ID NO: 217701 - DNA, 122 bp, Homo sapiens
ccctgagcctactgacgactggcggataaaacggcagcagcagcacttaacagtttaaagcgggagtcatctaatatgcagctgctgctgggggagaaaaggggaaaatgagcagccatggc

SEQ ID NO: 217702 - DNA, 122 bp, Homo sapiens
gggccgggccaggactgatggagcgagcgagaacggactgcgcgtgcgtggctgcctggccggcgctgaggggctgagcgtacgcgggcggcggggtgggccgctatgctgcaactgaagcc

SEQ ID NO: 217703 - DNA, 122 bp, Homo sapiens
cgccattgtcagggtgggtgtcctgggccctctggataccccctgtctggccggggttgccgctccgttctgaccccaggccaccctggaggagggtttctgagagtgccggtggctcactc

SEQ ID NO: 217704 - DNA, 122 bp, Homo sapiens
agtgggcctcggaccctcgcccactccccaggtggctgggagtgcccaccctggaactgccggccccgccggtgccacagtgttctctgccgtgccagtgccacaatgtcctctgccgtgcc

SEQ ID NO: 217705 - DNA, 122 bp, Homo sapiens
ccggctgcctttcaggtctcttactatcgaaaaagatcagcccccattttgttcaggcggcggggaggccgggacgcgatgagagatttacaaggtgtcctttcaaaaagaattcccagtgg

SEQ ID NO: 217706 - DNA, 122 bp, Homo sapiens
ggggaggagcagagagggaatcagtagcggaagggaaagggtggagatggattacctgagcgcagcaaaacttagttgagtagaaataagctcccgtatgaacaccgggcactaaaactgcg

SEQ ID NO: 217707 - DNA, 122 bp, Homo sapiens
tttggggctccattgcctgtgggggatgaaaaacattctggaaaagcacaggatgcaaggcgcaaatttatcactggtgatgcttggaacttcagagattaatttttaaatagtttagatct

SEQ ID NO: 217708 - DNA, 122 bp, Homo sapiens
tattagtcaaagtcagcttgtcatgactcatcataggctttctaacctactccctgaatccgggtcctcattgtgaaatgcatgccatacgaaatttgaacgtagctttggaaaaagggact

SEQ ID NO: 217709 - DNA, 122 bp, Homo sapiens
ggagagaatctcaccacaaatgaaaactacgtgaaaggggagaggtaactgtgtttctatcgcagggcatagtacatagaacagtttcagacgctcttattggccagagtaatccagcagaa

SEQ ID NO: 217710 - DNA, 122 bp, Homo sapiens
cctgcatgccctgcagctcccctctgccctccaatccattttctttatactggtggctttcgccttcctgttagtcattgctatttcatcatagcctccttttatccttcctacttcatttc

SEQ ID NO: 217711 - DNA, 122 bp, Homo sapiens
aaagggcagcgtggatgtctaggagcatgagtgcctgtggaaggggagagaaggtgctagcgcggcatccagttccagtccgaaggctttgccttgtgatggagatggtgcttgtgggccca

SEQ ID NO: 217712 - DNA, 122 bp, Homo sapiens
tttcccagtctcagcactcaaccctatcccactctaatccgctgagggacagcatcagaccgctcaaactcagagggcacgccgagaaccgcgtcccttccccttgaagccacgagggggcg

SEQ ID NO: 217713 - DNA, 122 bp, Homo sapiens
cctgaacgtagccaaacgcatcgcacgtgggagccaagtgggagatgaaataatccaatgcgtccccctcaccaccaccacccccaccaaattagttaccgtcggcttaaactcatcgggaa

SEQ ID NO: 217714 - DNA, 122 bp, Homo sapiens
tggcgcagctgagcttcagcaccggggcgatgtcacagaagaagtgctccacgtggtctccgccgcaaaagggcgatgagaagatcatgctggtctcgatcaaggccaccgagaacccagag

SEQ ID NO: 217715 - DNA, 122 bp, Homo sapiens
aaagggatcctgcaagtgccgggagaagatgaaaggtgagggagccagccccctggactccggcagtgttcgcaccaaaggccatcctcctgcccgccagaaggctgtacccaagttgaagt

SEQ ID NO: 217716 - DNA, 122 bp, Homo sapiens
gaggactgacaggataagtaagcatggcaccttcaaaatatcctgagaagttccctatgacgggaacataaaatatgtgacagagatttgtgggagatgggtctggaaactctagcaggggc

SEQ ID NO: 217717 - DNA, 122 bp, Homo sapiens
tggaaagcccactattccccttttccagatcgtcccaagtcccacattctgctgtgcagccggctcctatttagccactgtcaatgtcactgttcttggattataagtgcctcaaggacagc

SEQ ID NO: 217718 - DNA, 122 bp, Homo sapiens
tgcatgtgtgtgtgcgagtgcatgtgtgtgtgcacgtgtgtgtgcgcacgtgtgtgtgtgcgcgtgtgtgcatgcacatggcaggtggacagatctcacgggaatcagatttctgttttggt

SEQ ID NO: 217719 - DNA, 122 bp, Homo sapiens
gtggtaaggggataagccaaggcctgaagaataaagagttactaaggaggcggcattgatcggaactgagaactgattaaatgaagggagaagtaaggttgacacttaagtaacccagtgac

SEQ ID NO: 217720 - DNA, 122 bp, Homo sapiens
ccgcaagcactttccttccaaggttcagctggccaccagttcagcctagtcctatcttcccgctagccccagcacctccagggcccaggggctcacctcaccaataaccacctctaccctgg

SEQ ID NO: 217721 - DNA, 122 bp, Homo sapiens
acatttcagtgcaggaagagccctcgcggcgacaaccgcgaagaggacttcccgcgagtgcgtggggctagaagcacttccagtgattctttgcaaggttcaaagtgaaagtgaacagacca

SEQ ID NO: 217722 - DNA, 122 bp, Homo sapiens
gattaaagtggcaggtcataggccatcttgcccagtctcatgcagggctgtcattgctctcggtggcagaagtggggccagctcccaaaggcagaacaagggctgtgatggaagctaggggt

SEQ ID NO: 217723 - DNA, 122 bp, Homo sapiens
acataacaatcaccccccccccgtggatgtgagcgctgtctcagtagcgggtgtgccccacggatgatactactgagctggcaggtgcatggtcctgtcataggtgtccgcttagagaagta

SEQ ID NO: 217724 - DNA, 122 bp, Homo sapiens
ggtgatagcaacatgtttcctgctctgatagagttttacatttgggagggaagagacaaacgaataaattaacaagataatttctgagagcagtaggtttaatgaagccgtaaagcaggaca

SEQ ID NO: 217725 - DNA, 122 bp, Homo sapiens
gccctcacccctcctctcactgtctcctcatactggcaacgccagtactgaggccagagacgggagggggacagggcagttctgtgggtgccagaccagcagcataacagataaaactggac

SEQ ID NO: 217726 - DNA, 122 bp, Homo sapiens
cgatgagaagccgctgccccgacctgaccccggccctcgctgccctgcgccgcgcccgggcgtccaggcctaggctgcgcagcccctggacagcgcccgaggtccccgcccgccccgcccct

SEQ ID NO: 217727 - DNA, 122 bp, Homo sapiens
gcgcccgaggaagaggtttccttaccgtgggtgcaccttgcctaccagcgtttcagaagccgtctgcagaacttttccagaatcctgaccatctaccctcaggttctccacagcctgatgga

SEQ ID NO: 217728 - DNA, 122 bp, Homo sapiens
ccaaagacacctgggcaggtaacttcatcaggaagacggctacctctcttctccagagagcgagagtgaagtgagcaggtgatatccgtggtgatccctccacaaggagggaaggaggcagg

SEQ ID NO: 217729 - DNA, 122 bp, Homo sapiens
ttagagagaaattcacttcagcaggaagctgggcatccaaaatgccaagattaaagacaacgataaacaaaaaaaagaaaaagaagctcctacagtttcggccaacagccctaatcataaat

SEQ ID NO: 217730 - DNA, 122 bp, Homo sapiens
ctggaaattctgagcttttgtagggggtcaccccacccaggccaggggcgggccaaggggcgggccttggattaggaggccaggccagccaggcatcagggctacctctgaatccctggcaa

SEQ ID NO: 217731 - DNA, 122 bp, Homo sapiens
atcgcatgtatgcagtttggcatgacgacaccgacatgcaggaaaaaagaccatgtctgccgtcagggcccatgtgtcgtaagcactgggccaagtatttctccatgagaaccctgtgaggc

SEQ ID NO: 217732 - DNA, 122 bp, Homo sapiens
ccttctcaaaaaataaataaaaggatactatggtgatacccagtttacactttgggaaaccgaggttgtcatttcactgaagtgaggtcactcgctcttgtatgactcaatatgactcttgt

SEQ ID NO: 217733 - DNA, 122 bp, Homo sapiens
tttttttaacttttattttaggttcatgggtacatttacaggttagttaataggtaaactcgtgtcacaggggattgttgtagtactattgtattgttgtaatattattgcacccaggtact

SEQ ID NO: 217734 - DNA, 122 bp, Homo sapiens
gcctttctcgcccgctcattggctgggcctcttcggtgacggagagggtggggcgcagctcgtgagctggtggcggcgcgagtttgatcggggcgcgcggcagcgttctctttgcttccccc

SEQ ID NO: 217735 - DNA, 122 bp, Homo sapiens
cacacacacacacacacacagacacggacacccttctccacctcctcccctcttgtccctcggctgcccaagaagcttccctcaatctgggaaagtgatcaggtttaagggacctggattgg

SEQ ID NO: 217736 - DNA, 122 bp, Homo sapiens
tctccacccaccatgctgttgatctttgtcacttcacttcaagggagttgaatccgtccccgacttgggcattgagcctccttctctgaccttgctgggtgctggcacagagggtcaaggga

SEQ ID NO: 217737 - DNA, 122 bp, Homo sapiens
tcgcgaagcccgggagcctcggagttgaactcacaaaatggaagccgcgcgctgattggccgccgccactcccggacctttaataaagaaaggggaaggaaaagataaatgcaaaaaagggg

SEQ ID NO: 217738 - DNA, 122 bp, Homo sapiens
tcctgccaggtgctagttgtagtggatctgctgcctgtctacagctgggagcggtgacaacgatggagcgtcctcggagagggtgggctgccccctgtcactcccgggggaagatcgccctg

SEQ ID NO: 217739 - DNA, 122 bp, Homo sapiens
cttccgtcctacttgggacgaaatccataacgcactccgcggtccgaagttgtggggtctcggagcttccaggtgtgtctcgtgaactgcacaagcatttttttgtccccatgcgtcctacc

SEQ ID NO: 217740 - DNA, 122 bp, Homo sapiens
cggactcggccccgcctcccggaccctggacccctccccaagtgggcccgtcctaagttccgcctcccagagtccgcgcaccgcctggccatgtggtacgacatagtcaacgccctgccccg

SEQ ID NO: 217741 - DNA, 122 bp, Homo sapiens
gaacagcacactcacacccacacagttgcacttttacacacacacacatgcacgcacatgcgtgttctagcccgtgagcacacacatgttcaggattcagtcgcacaacctctgagctaaga

SEQ ID NO: 217742 - DNA, 122 bp, Homo sapiens
cccagttttgcaagtgggcagcatcttggacaggtaaaacatagcagttatatccactaacgacagcattccaagttcccgtccccacccaactgtggaaatgactctccaccacaccacac

SEQ ID NO: 217743 - DNA, 122 bp, Homo sapiens
ttgcagtaaataaattaatcatggggaagactgtggggagaatagtttttgtggggaagacgaggattcagttttgggagcgttcattttgagatgcccattagacatctaagaggcaatgt

SEQ ID NO: 217744 - DNA, 122 bp, Homo sapiens
gcacctgcagcacgggcgcacgcgtcgctggcttgcgggttctcctgggctcccgcgggacgtcccggaatcccaggagtgcatcccttcccgcctgagggcctgcctggccctgactcccg

SEQ ID NO: 217745 - DNA, 122 bp, Homo sapiens
acctcgtgatctgcccacctcggcctcccaaagtgctgggattacagacgtgagcctccgcgcccggccgaaagatggtctctttacatcaagaagtgtattggaataactctattgtccaa

SEQ ID NO: 217746 - DNA, 122 bp, Homo sapiens
gacagagcgagactctgtctaaaaaaaaaaaaaaaaaaaaaaaaaagcaataatctgatacgacaaggcagatagatctcaaaaaagccccaaaccaaaacagtccatactgtatgattcca

SEQ ID NO: 217747 - DNA, 122 bp, Homo sapiens
cccagcccgacaagggcctcgtgagcgggcaagggagcagtcccgctgcaggaactgcctcggaacccgggtttcctaaagcagcgcaaagccctccgtatacccacgcgctggcgtgagca

SEQ ID NO: 217748 - DNA, 122 bp, Homo sapiens
tgaaactcagaatgaacaataccacgtgtgtgatgttttggtcgcaaacattaaagacagcgaataattataagcagctgtggaagtcaacatccactgttaaacccatgaaccattccaaa

SEQ ID NO: 217749 - DNA, 122 bp, Homo sapiens
ggggagacaggaggggagggaggaagagggcgagacagcatggtggccggcgaggggccgcgaggaaacctcattctggggctccccagggcccctgggccccatccaggcagctgcgaggc

SEQ ID NO: 217750 - DNA, 122 bp, Homo sapiens
ctcagatgatccacccactttggcctcccaaagtgctgggattacaggcatgagccactgcgcctggcctgcttcactgattttgttcttgggaagttttagagtttatctcaatattaacc

SEQ ID NO: 217751 - DNA, 122 bp, Homo sapiens
gcagcttgcgcatttcgcagccgctgccgcctcgccgctgctccttcgtaaggccacttccgcacaccgacaccaacatgaacggacagctcaacggcttccacgaggcgttcatcgaggag

SEQ ID NO: 217752 - DNA, 122 bp, Homo sapiens
caccaagaggatgatgcaaagagcccagatgccacgtgcacatgcagcgagttgtgcaaccgagagaaacactaaactttggaattcactgcttctacagcaagcaataagcaagcctgatc

SEQ ID NO: 217753 - DNA, 122 bp, Homo sapiens
ggggaatcccaccaccaactcccaccgttgcagcgaacccggacctccgaggccccactgcgctcctctagtctcggtcccgccacctgctttctgcgcccggcacgtcccctacgaacagt

SEQ ID NO: 217754 - DNA, 122 bp, Homo sapiens
tccctttaatgtatggtacagacattttcccaccccagaacgccggacactgaacaatgccggacggattctctagcagaaattccacgcaatcagttcgataagccagggtctctctctat

SEQ ID NO: 217755 - DNA, 122 bp, Homo sapiens
cagcagcaggctttctgccctagagactaagcaaggctactaggcagaggcaacaacaaacggcccccacgaaggccgtggtgcatcagccatacctgaagagagaggttcctccccttccc

SEQ ID NO: 217756 - DNA, 122 bp, Homo sapiens
cgcccctgggccttcgattaataaggttcggtcaacggacaagtgagcggttccactgctcgtcagtcgatagggggagtcggtagtctgtccgaccgtaccattaggcgcctgggccggag

SEQ ID NO: 217757 - DNA, 122 bp, Homo sapiens
cttaagattatgagggcattccatgcactgtccaacccatagcaatctagattctgtcttcgatattttagtggaactacccttcaaaaggccactagtgactaattgtcaaatacacaccc

SEQ ID NO: 217758 - DNA, 122 bp, Homo sapiens
acgatgtgtcttccttcagctttttccagagatccaggtgagcggcacaggctggtgggccgtggcggtcgggcggagaggactggggtgggggtccgagtcggagtgggcctggggtcggc

SEQ ID NO: 217759 - DNA, 122 bp, Homo sapiens
acccactcgtggaacgtcatggtttgcaggtggcaaatgtccgtctccctgatgaacgggcgcttctggacgcggggaccttatccactgtaggcccttggagaggtcgggcgtcgaggaga

SEQ ID NO: 217760 - DNA, 122 bp, Homo sapiens
ccgtgtggccaagggcagccaggggcctctccccttccacgagaaggtgttgctgggctccgtcagcggtgagctgccgggcgggagggggaggggcgcggggtggtcaggtcggccgagga

SEQ ID NO: 217761 - DNA, 122 bp, Homo sapiens
atagctgtaatacagaagaaagaaaattaacagaataaaagaagagaaaatttaagacatcggagctaagaagcacagcctggccaggctggctgtgctaaagcagggctttgtcacaaggg

SEQ ID NO: 217762 - DNA, 122 bp, Homo sapiens
ggtcgccatggagatggataccgccatccagaaagcagcagccgtcatactgatggccatcggcacggggagaacagacatggaggaagcgcaggccggcatggggagaaccggggtgcaaa

SEQ ID NO: 217763 - DNA, 122 bp, Homo sapiens
gagaagcctcggccgggagagagtctccccacgcggcctccgccacagggtcctaaagcccgccagcccatctttccgacccggacctgggtcctagcgccgctgtgcctcctgcaactctg

SEQ ID NO: 217764 - DNA, 122 bp, Homo sapiens
ggacagagagtctgggagggggtggtggctggcagtctcggtggctggcgacgcctcttccgctcttccttcctgggaggaggcgggcaaggcgaagcctctccgctcagtcgatggtttcc

SEQ ID NO: 217765 - DNA, 122 bp, Homo sapiens
tgacagacctggattgcagctgatggcccccaaagtcctctagatgggccctgcaggactcgctgggaggcctggttgcccctcccggcgtgctgggacactctgggttcctgcagttagat

SEQ ID NO: 217766 - DNA, 122 bp, Homo sapiens
ttgcagagacaccggaaactaaaagaaacttaggccccagtctgcaggtcggcattcactcgctgaccaatgagagtgaagcctccggggagagccaatggggtccttccttggcgggaggg

SEQ ID NO: 217767 - DNA, 122 bp, Homo sapiens
cagcgctgtagtgggcactgcggattccgcagggaggaaacaccagctctgctgatgagccggctgatttcacacccaatcaacaagctgggaaaataaaaacaataatcggttaaagtgac

SEQ ID NO: 217768 - DNA, 122 bp, Homo sapiens
aagttggtcctagaatccaattcttcctggaactgggtgtcatttcaggacagagaataccgggagtcataaattggccctgaagcaaacgaaagtcttccaatcctgcatgacatagcaga

SEQ ID NO: 217769 - DNA, 122 bp, Homo sapiens
gcctcccctgggcacttcagacccagacggccaccttctgccactccagcaaagaataagcgccctgcttccttcaggtctcagaccaggactttatggctcatgcagatttttaaggtcat

SEQ ID NO: 217770 - DNA, 122 bp, Homo sapiens
aggggcctcccaggccggcatgacaggctacggacgacctcggcagatcatcagttagagcggagagggctagccctgagcccggccctcccccagctccttggctgcagccatcccgctta

SEQ ID NO: 217771 - DNA, 122 bp, Homo sapiens
ttctccccgaatgggaatagatctgggctctcctggctggttgggaagcgttcttcctcccgccgcagccgaggccgggggcggaggagaggggaggggagaggaggggagggaagagagaa

SEQ ID NO: 217772 - DNA, 122 bp, Homo sapiens
aatgtactgacagcttgtctagcccatcctggtcactgacacagtcccctgaggtcatcccgtctgaaatggacaatggtgcctctacacaagaggaaaaccttgtaacttttcctttatta

SEQ ID NO: 217773 - DNA, 122 bp, Homo sapiens
catttgaccttgtttctatcaaccattccatcttgcacgccctccctccgcagctactctcgtgtaggaaggaggccgagcagctgagcttctccagggtccctcaggacctctcctgcaga

SEQ ID NO: 217774 - DNA, 122 bp, Homo sapiens
accaaggagcaggaagagaccacagagcagggcaggttagctctagggaatgggagtggccgccactccaggctctctcatggaagggtgtaccaagcccggcaaaagctagaagccaggga

SEQ ID NO: 217775 - DNA, 122 bp, Homo sapiens
gatctgggactcagcagcacccggcacgctgccgtccctcctgttctttggcgcctttgacgggcagcacatcttctgtattcacacccgtgccctccgtgggagcaccaggacccgccact

SEQ ID NO: 217776 - DNA, 122 bp, Homo sapiens
aggtggctcctgcgccgggtatcggggcgcgtggtatcggcctcagccaatgggtggcagcgccccgccccctgcgtgggggggctgcgggggacgacggcgcccacgcggcgggggcgtag

SEQ ID NO: 217777 - DNA, 122 bp, Homo sapiens
aagaggatggagttcaccagctcctgtccaaatgtctctgagcgcagttttgataatgtccggtccctgaaggtggaaagtggcgcgtgagtatggacttccgcagaaccgcagccccttat

SEQ ID NO: 217778 - DNA, 122 bp, Homo sapiens
ctcctgcgtaggctgggcttgcggggactggggtctcagttctccgcaggcctcaatgtgcgggcttgacacgcagccctcggattagccccgaagctgcacccgagcaccgcctgcctccc

SEQ ID NO: 217779 - DNA, 122 bp, Homo sapiens
gaaagggggttggagacccaggggcaggggtagcggccgcagctaaggaacccagcggggcgtcggcagccaactgcccggagccgaagggggccctgcaggggctccgcacaaggcaggta

SEQ ID NO: 217780 - DNA, 122 bp, Homo sapiens
gcaaccagtgtgttaccaatacttactattcatttattcacccaataaatattaaggattcgttgtgaatttggtctgctaccacgtgccaaatagaagaccaaaaagaataagcagggacc

SEQ ID NO: 217781 - DNA, 122 bp, Homo sapiens
tgaacattcaagtgaagcaaaagcctttcctgattctagtgcagcagctgccctgagccccgtgcttggcaacattccccccaacaataggatgcggggaggccgagtcccgccagggtcct

SEQ ID NO: 217782 - DNA, 122 bp, Homo sapiens
cccctccccagaggccagagctgcgggaaccccagtgagagtgtggtttcctctcagcctcgcccctcagagacttccgctcagcagcagctgcggccaggccagctcgaggcgagacatca

SEQ ID NO: 217783 - DNA, 122 bp, Homo sapiens
gatagatgcctgcctggatttctagaaccctgggtagggtcctgaggtcaagggagtggacgaattcttccagtgataatgccattgctatgccttgggtagtttgtagacctggtgctcac

SEQ ID NO: 217784 - DNA, 122 bp, Homo sapiens
agcgcagatcctgccggctctggactagccgctcagcaccagggcggaaggaagacgaggcgaggcaagcgccaagcttccatccggacttcaaggccagtggctgggtctggttttctcaa

SEQ ID NO: 217785 - DNA, 122 bp, Homo sapiens
ccggacttttccccgcccccatcggctcgcggcgagaacggccccgcgattggccacacgcgttccctagcctgagcgccagggctcctcccaattcgctgctggcttggctccgccccacg

SEQ ID NO: 217786 - DNA, 122 bp, Homo sapiens
gcacagccgcgcctgattaagccacgtgggggccggccgggggccgctgagatgaaagcgcggccgcaggccagagtagggggtgcgccgggcccccacccgggacaccctcttcccaggcc

SEQ ID NO: 217787 - DNA, 122 bp, Homo sapiens
ttatagtttatggaagaaaatacaggatgctgtctgaggacagtctaattacacaagactcgaagtagtagatactataaattaaaaatttattttcatcaaaattaagaattcttatttaa

SEQ ID NO: 217788 - DNA, 122 bp, Homo sapiens
gcggcgctgggcagacagacaggcgtcggccagctgaggccggcgttgctattcacagcacgtcacctccttcccaagtgtctgccacagcccattaaactcctgtcgaggccacctcggca

SEQ ID NO: 217789 - DNA, 122 bp, Homo sapiens
tctgccggctgcgctttacagaggccaacacgctccggcgccatgcgaagcgcaagcacccggaggccatgggggtacccctgtgtgcaccagatccagggtctgaaccgccgtgggacgag

SEQ ID NO: 217790 - DNA, 122 bp, Homo sapiens
cccttaagctgatcaagaggtggaacatcactgagtctgggtcaggggcccagggaagcccgttcttcttcaacatactgcaacttcctacagactagattttgcaggaccagagcagggca

SEQ ID NO: 217791 - DNA, 122 bp, Homo sapiens
gcactcaagacaagcaacctgcgggtactagtttggtttctagctcaaatcccagagaagcgaattcattgaaattccacttgctgagtgatctatttaccaaattcactgattttcttaag

SEQ ID NO: 217792 - DNA, 122 bp, Homo sapiens
gactccgggtcacctctgcctgggtggctgaagcccctgcccagggcacaaacagccgcacgctgggacaaagacaggcacacctgctggcggctgaggaaccacaccctgtgggttgcggg

SEQ ID NO: 217793 - DNA, 122 bp, Homo sapiens
tcctcgcaaacacatgcaatgatgtgcaaacagcacctggagcagctcagattccaacaacgaggggctggtgggaaaatctgtagcccacagggccacggaatgctacggagtttacaaaa

SEQ ID NO: 217794 - DNA, 122 bp, Homo sapiens
gtcttcccaagatagccatttggttgtgcctaagtcattccccagaactttgatgtgcctcgcacatgaaagcacccataaataatggcaagaacaaattcactacaaattttcaaaattat

SEQ ID NO: 217795 - DNA, 122 bp, Homo sapiens
ggttcggggaggaggagaccagacggggccttggctggcatggcctcttcacagggctgccgtgaagaaacttcgtgacagcggcggagaggtggcccaggagtgagacaagcaggccccgg

SEQ ID NO: 217796 - DNA, 122 bp, Homo sapiens
ggacagcggccacctttcgcgggaagatgacgagtggcttgcttccctcttttggattttcgacactctcaacagaaaacactgtggagggtgccccaaggttccgctgcagttagtcttcc

SEQ ID NO: 217797 - DNA, 122 bp, Homo sapiens
acaacagacttcacttccctgaatgcctcccccatctccatcaggaaaaatacaccccatcgcccagcacccctgctgataccaccagacagagagagagagcacttgattcttcccgagat

SEQ ID NO: 217798 - DNA, 122 bp, Homo sapiens
tgacaaccgcaccaggacaaggccgcgtgctgccctgaacagtggcccttgtgctaaatacgaatcctctctctcccacaggcatagcccgtcacctgcgtctggtttttgctcctcatttt

SEQ ID NO: 217799 - DNA, 122 bp, Homo sapiens
ctgaatgtttgtttcttggaacaaagtaagcgcagagggtttggaggatgtcgtggtacccggcagaagcggagctagaatctgagctgggtggcaatatttcaataagagttaaaacctca

SEQ ID NO: 217800 - DNA, 122 bp, Homo sapiens
ttgaatgagtgaaaattcagtgagtaagaaggttattcattcaaaaacatctgtgtatgccggcaaaaatggtgaggacaatgataaaagcataatgaaaacactgggcaacacctcctcac

SEQ ID NO: 217801 - DNA, 122 bp, Homo sapiens
agtaagacttggagcagtggcctctctaagcaagttgggggtctccaagcagagtcggggcgtgccacgcgggccccagggggcctcaggactggggtgctcctcactgctgggcacctcgg

SEQ ID NO: 217802 - DNA, 122 bp, Homo sapiens
ctgagcgcaaatgtgtcaatgctaattggacatgcgcattcgagacggctccatacggaacggaatgggaccgtggccccgaagcaacactccctcccagcaccatattacgcaaacaaaat

SEQ ID NO: 217803 - DNA, 122 bp, Homo sapiens
aggggttggcaagcaacaacctgagggtacaacccagctgcagcctggggtttactggagcgtggccacacccaccacttatgcatctgctgtggccacttcaactcaggcacccagttgag

SEQ ID NO: 217804 - DNA, 122 bp, Homo sapiens
tcacatggtacaccaactgggctgtctggttagtgaccagggctgccttaggcacaaggccggggcttcccccgcctccagcacgtcctagactcccagagcgatccctggcgggagccctc

SEQ ID NO: 217805 - DNA, 122 bp, Homo sapiens
ggaccattgacagtcatgtggtggggctgggccggggctgtctcccttctctcccaaacacggcttgtaataatatcaagacatttaaggtgcggtgaggtaagtcaaccaggggctgggca

SEQ ID NO: 217806 - DNA, 122 bp, Homo sapiens
aactggtgcagctgcgccgcaagggagccgccggggcggtgggtgcgaagcgcgcatgcgcgcttcgtcacaagggtgcgaggaaagtcagtgagcaaatcgcggaccaccggggctgccag

SEQ ID NO: 217807 - DNA, 122 bp, Homo sapiens
agaataaactggaggtaacctgtctgcgggggcatggtagggcacactgtgatgggcccacgggcagggactgaatccaggaatacatgtggagggcagaaaagtctacctgggaaactgaa

SEQ ID NO: 217808 - DNA, 122 bp, Homo sapiens
ccctaatgtgtttctccttctcaactgaaatacacagaaggcattacttattacttgtttcgtgaccttttgtcttaccttggttgtccttttcttccaattccatagtttatcttctctcc

SEQ ID NO: 217809 - DNA, 122 bp, Homo sapiens
gccgcccggcggagccagagacgtcacggggtcgctgtctccggagcagcccctgggtggcgccagaggtccagcaggcccggaggccgagtccgtgggcaacttggggagcgttgagtcat

SEQ ID NO: 217810 - DNA, 122 bp, Homo sapiens
gcggctctttcgggcccaggcggtggctcggaccggagcgtcccccctgcagccttcgggcgcccaggccaggtctgagttggccagtttgagcccagccaggtgcatggcgcggcctcggc

SEQ ID NO: 217811 - DNA, 122 bp, Homo sapiens
tcctgctgcagagccagtgaactcaggtcgggcttctcagctgcgcacagtgagtggggtcggagggggtgggcacgaacgtcgagggagaaaaaggggctctcccaggggccatggcccta

SEQ ID NO: 217812 - DNA, 122 bp, Homo sapiens
acccggctgtgagaggatcctggggtcctgcagaccccggacaagtgggagctgcgggtgcgctcgggtgtcccgcactcactgctgggcctgagcctgtggggaaccaggtctgggagcgc

SEQ ID NO: 217813 - DNA, 122 bp, Homo sapiens
gagggggcactggcagcggatctgggaatggagcccgcgagttcctgcttcctggttccccggagcaagtgtcctttggtgggagccgcaggaagggagcagcccttcctgcgcgccgggag

SEQ ID NO: 217814 - DNA, 122 bp, Homo sapiens
gaccatcccgagagtaagtccttgccccacagaccaccaaaagatcacctgtctttatgacgatgaatattttattatagagatggactgaactcacttttgcataaagaatctctgaattg

SEQ ID NO: 217815 - DNA, 122 bp, Homo sapiens
gtcgaagattaccggaagctaccgagtctgacccaaagcgtaggtttctcttctcagccacgccttcagccacgcacaccacgcccaatcggccgtcccagggttgggctacgccaaatctg

SEQ ID NO: 217816 - DNA, 122 bp, Homo sapiens
cccctaagtaaggagacaaaaactccagctgctagatcacatagtatgtatgcacagtgacgtcatttctttgaaagcaaggtggcctgcatgtgttggcatctcaggaacagcagaatcag

SEQ ID NO: 217817 - DNA, 122 bp, Homo sapiens
agcaaaggctattttttaatgacatcttttccaaaatatgtcaccaagtacccactcctgcgggagccgcccgggctggggagggcgagtccgagcggggcggggcagaggcggccgagggg

SEQ ID NO: 217818 - DNA, 122 bp, Homo sapiens
agacacggttctgcccaattactttcagctaaagccacccacctgaaacatcccccaggacgtgggcaggtgtcacccagagagcagggatggtgaaaaccatgctgcacagatcgggacgc

SEQ ID NO: 217819 - DNA, 122 bp, Homo sapiens
cttgcggtcgctcgggtcccggtgtcctggcccagaaataccctctagagggcgctgtcacgctgagacccgggacaggacgcaccggcgcgaatcagggcccctcgccacaggggagtgtt

SEQ ID NO: 217820 - DNA, 122 bp, Homo sapiens
cggctccagctcagggggccgggagccggagcagccgggagcccccgtctcagacagaggcgccggtccctcctcacccgctgcgggtgcaggggtgagggcgggcggggagacaggaggcg

SEQ ID NO: 217821 - DNA, 122 bp, Homo sapiens
tgttagttcggtcattaaaaatcagctcacgccgaggagctagtggttggggagttggcccgtgttggacgtgtgttatgtatcacttacaagcacatttaattgggagataaagataaatc

SEQ ID NO: 217822 - DNA, 122 bp, Homo sapiens
gcaggggtgagtcagtggagtttttctttgatcatcttctagattagtgtgagcagcgagcgaatgagcaagagcgtgtgacaacagaggatgacaggctgtgaggttcgaagcaggaagga

SEQ ID NO: 217823 - DNA, 122 bp, Homo sapiens
gaaggctacatgggggaaaggctcatttgagaagctgaccctgattctaaacagacttgacgatttaccaccaaatggggacaatgctattttgtcagggataaatgtattcttcttcatgg

SEQ ID NO: 217824 - DNA, 122 bp, Homo sapiens
gcgccggggcctggtgctcggtcggcgggtgctgccgctttaagcgggggcgggactgcgcgcggccgagcggttgcgacgagggctcggctgggggtcgccggggtcgcgggccgggcctg

SEQ ID NO: 217825 - DNA, 122 bp, Homo sapiens
atcagcaaagggagtctgtccctaggcagttctgcttcccttccgccccagccgggaagccgggacggcctgcctgcgctcaacaccaagatcctgtacccaagtgagtggcggccagcagg

SEQ ID NO: 217826 - DNA, 122 bp, Homo sapiens
agaagttctttgcagatttggggcgaggggtgatttggaaaagaagacctgggtggaaagcggtttggatgaaaagatttcaggcaaagacttgcaggaagatgatgataacggcgatgtga

SEQ ID NO: 217827 - DNA, 122 bp, Homo sapiens
tggatggctttcctttccaagcattgtgaaggaggatgccaatcacacacaggtttcccacgaagcccaccaggcagacagccaccaagagagccgggatgatggttctccagtcctgggaa

SEQ ID NO: 217828 - DNA, 122 bp, Homo sapiens
gccgcgagggcatacccccgaggggtacggggctagggctaggcaggctgtgcggttgggcggggccctgtgccccactgcggagtgcgggtcgggaagcggagagagaagcagctgtgtaa

SEQ ID NO: 217829 - DNA, 122 bp, Homo sapiens
tgtctactaggaacttgttttaaacagattaaacataaaaggatggaaatatgtgtgccacgaaaacattaatcaaaagacagctgaaatggctacaaaatgacagagtctatggtagaatc

SEQ ID NO: 217830 - DNA, 122 bp, Homo sapiens
catcccagggggcctttgggatccatgcctggcacgggcttggaaggaatccccaggcaccggcccactcagtcactaaaggatgatccggcctgcccatctgtcccccttttcatcctcta

SEQ ID NO: 217831 - DNA, 122 bp, Homo sapiens
tggagcgtgcaagatgctcctctcctgccctattgcttccccagagtcctttggcaagtccgctgcctatctgtcagcctccccaagtcagggctgaagaggggccgggttctgggccctgg

SEQ ID NO: 217832 - DNA, 122 bp, Homo sapiens
ggcgtctcgggggcggggagggcgtgcctggcgggacagcgcgcgcggaggaacggcgggcggtgctcctcgggtaggccccccacacatccccttggctcagccctgccggggcccgaacc

SEQ ID NO: 217833 - DNA, 122 bp, Homo sapiens
ggtgttctgtgtgtaatggacaccctttagctttagctgcagttgtctttcacctgctcacggctgtatctggaagtccagctaggatgaggggtattcagtcatatatgacctgggaacag

SEQ ID NO: 217834 - DNA, 122 bp, Homo sapiens
gattcaagcttcctcattgctgaacatgtttaggcaggtacaggcatccttaggtgtccacgtatttgggacatgtaagtggagaggcatgaacctgattcatttcctgatccagtgatgct

SEQ ID NO: 217835 - DNA, 122 bp, Homo sapiens
acgcgggtgaggggctgaggggctgaaaggctgaagggcgggcagcgtgccgggtccctgcggctgggtccaccgcacgtcacgtggcagaatcccggggctgctttctctccggctgctca

SEQ ID NO: 217836 - DNA, 122 bp, Homo sapiens
gtcacctgaatccaatcactttcatttggaaatataccaggtttcacactgaaaacctgacgtgcacatgtcccaccttattcacttggggagcacaactacctttagagtgtaaaagacaa

SEQ ID NO: 217837 - DNA, 122 bp, Homo sapiens
cagaaggggcctgacacccagggcttttcaaggtgtttttgttgacttactatgtgcacacgtggactgccttcatctcacatatagtgcggaaatgaagaatagaaaccccagccgggcat

SEQ ID NO: 217838 - DNA, 122 bp, Homo sapiens
ttttctagccaataggagacgtcgggtcggcgggtggatgaacgcggccctctgtaatggcggagcgtggcggggacgggggcgagagtgaacgattcaacccgggggagctcaggtaagga

SEQ ID NO: 217839 - DNA, 122 bp, Homo sapiens
gcagccactgtctcttaggcatgcgatggcctaggggccagacgctcggtgcagtaccctcgcccggcccgccagcgcccccctccagccgcaggcactgtccctgacgaaggcgaaggcgc

SEQ ID NO: 217840 - DNA, 122 bp, Homo sapiens
tttcctcttgcaaaatgcactgtggtgaggcaccttaaggctatgcaggtacttactcttcgtcaaaaattctctctagatttagcatccattgatggttcttgcttgatctgatctcataa

SEQ ID NO: 217841 - DNA, 122 bp, Homo sapiens
cttgtaaacttgccggaaagaaacatacctttcacactggggagaaatcctatggatgctcgaccactggtcaattagcagtggaagaaagtggatggctagctgtcttaaagagaaaagtc

SEQ ID NO: 217842 - DNA, 122 bp, Homo sapiens
cacctctctttcctagcgggacaccgtaggttacgtctgtctgttttctatgtgcgatgacgttttctcacgaggctagcgaaatggggcggggcaacttgtcctgttcttttatcttaaga

SEQ ID NO: 217843 - DNA, 122 bp, Homo sapiens
taacagaggagcatggaatggtaaccctagagacaacctggtgccattcctgctagataccgacatctcctatatgaattttggtggtggggtgaggggatagggaaatgggggctgtgagc

SEQ ID NO: 217844 - DNA, 122 bp, Homo sapiens
gctggggccacactccccagaggttctgattccagtgggtgttggggagcgctgcgtagccgtgaagttccccaggtgattcaaggtagagagtacaggaccgctggtaggaaaggacccgt

SEQ ID NO: 217845 - DNA, 122 bp, Homo sapiens
ccccccaaccttctggagcgctgctcccgcctcagtgggccaccgagaggaggcgcctgccggggagctggcccaggctgccccaccgccatccccagttggaggacttaggccccagccgg

SEQ ID NO: 217846 - DNA, 122 bp, Homo sapiens
gccagcgtgtgaggaagaagctccaggcggcggccgccagcgtgtgaggaagaagctccacgcggcgcttgctcagggaatcctgctccagggcgtgctcacttgctgttattgtgttttat

SEQ ID NO: 217847 - DNA, 122 bp, Homo sapiens
tttgctcctggtgtggtgcaccggcctgtaatctgggaatcccagcattctgcgagcccacgcccaggcctaggagggaggatcctttgttctatgagtttcacaagcctaggtagtagagc

SEQ ID NO: 217848 - DNA, 122 bp, Homo sapiens
ctcactcccagtcctggaaaacatcccactttctgtattgttttcttacaaacattgagtcgaatctctgaattgataagctgcctagctgataacgaggctaaagtaaacccagcaacttt

SEQ ID NO: 217849 - DNA, 122 bp, Homo sapiens
ggcgtgagtacgcgcctcagtcctttgcaaaaacgcgttcccggttccttggaggtaacacgaaccagccattaccaggctgggggattagggtctaaggacactgtctagaacctggtact

SEQ ID NO: 217850 - DNA, 122 bp, Homo sapiens
cacaaagagctccgtgctacacttctcgccacccaccacgcactggtaggctgcgtcgtccgccaatgagcactggctgatggtcagggtacgcttggcaccgatggactcaaagatgtacc

SEQ ID NO: 217851 - DNA, 122 bp, Homo sapiens
gccttccctctccgctctcctccctccacccgctctccttccccctcccccctccgaacccgggcgcaaggggggaattagaaactgctctagaaggattttaaacaactggctgttctctc

SEQ ID NO: 217852 - DNA, 122 bp, Homo sapiens
gtctgcaggcaacattcaactgcaaggcatcggccaatgggaactattgctgggctcgttcgaaagtaaacggtggacggcgcggcccgaggcaggtggcgggagtcagtttaaggctggcg

SEQ ID NO: 217853 - DNA, 122 bp, Homo sapiens
atgtttcctttgtttttctgacttgcaatattttcaacttatgatggatttattgggatgcgaccccattctaagttgaggaacatctgtaaaataaatacaaatgtatgtaataagaaaca

SEQ ID NO: 217854 - DNA, 122 bp, Homo sapiens
agccccaagccccgtggcagcctggcagcagagtgaaacaagagggcaaagaaagcctatcggtggaagtttttatttacccttgacggtgggtactcccagacagtgggtatgtctgaaat

SEQ ID NO: 217855 - DNA, 122 bp, Homo sapiens
cagaaggcacaagtgagctgaccaccattccctcttttcttgtcacttgggtttgggccacgtcaaccctgtggaaatgtccaaagacacacacactctcacagatacacagaaagcaaaca

SEQ ID NO: 217856 - DNA, 122 bp, Homo sapiens
tccaggcagctatttatacttgctctgaataccacggctgctctgcttgcttcctctcaccgcctccctccggccccacccgacaccctctcacctctattcttcactccttcccttcctcc

SEQ ID NO: 217857 - DNA, 122 bp, Homo sapiens
cgccgggagccctttctctgagaggagctggttccgagccgctcttccagggaaatggcccggcggcgacagagcgggagggaggggccgcaggcgctgcgaggacgcacagcttcccaatg

SEQ ID NO: 217858 - DNA, 122 bp, Homo sapiens
cttcgcagccccctttcacggggtcaactataagaaccatcacaaagttacatctaactacgcagagagtttgaaaagaaaaatctctttaagtcaaaccaaaagatattttcaagcttttc

SEQ ID NO: 217859 - DNA, 122 bp, Homo sapiens
agagccagccaatggccgcgccccgcctgtggcttctacccaatcaccgacaggtgcccgcggatttaaaccaatcacactctatcacttgcagaagtcgaggaagaaatcaggctcctgct

SEQ ID NO: 217860 - DNA, 122 bp, Homo sapiens
gggcactcaccgtgcagccatcgacagtgacgctgtaggtgaagcggctgttgccctcggcgcggatctcgatctcgttggagccctggaggagcagggccttcttgaggttgccagtctgc

SEQ ID NO: 217861 - DNA, 122 bp, Homo sapiens
aacttcagcggctcaaggctcagcaggagaagaaactgcaggctctgcaggtgggtttttcgggttcctgggaaggactccctggagtgttctcaggagcccttacttaactattctggaca

SEQ ID NO: 217862 - DNA, 122 bp, Homo sapiens
aggcccgggagaagacgcgcctggccgggtccttggcggcaaaactggtttgcatctccacgctttacctaaagcccgggctctggggactggatggctagctagctggcggctcctactgc

SEQ ID NO: 217863 - DNA, 122 bp, Homo sapiens
tgtgcctttcagagaaagaaaacatctctgttccacaattttcagcaaacatcctaagatcggttctgattggattggcttagtctgcctgaactaattattgtggtggaatttgctgattg

SEQ ID NO: 217864 - DNA, 122 bp, Homo sapiens
ccagcccgcaacaccagttcccgggccgcagccgccatggtcgcagcggcggccattccccgcagcctcacttccggcaactgtcagtcccggcgagtccgttccccggagtggagctacaa

SEQ ID NO: 217865 - DNA, 122 bp, Homo sapiens
cggcaggccccgaagcctggagctgcccgctccactcccatttactcagggtctggtctccgttcatttaactggaccttccctgaacttcactctttagggtgactgatctttggaggctc

SEQ ID NO: 217866 - DNA, 122 bp, Homo sapiens
catgagactcgcagggagacaatgacggctccaggaaaaacgcagcgctcacggggctggcgagggagcctggcgcagctcccttcccagacccgctctccctgccagcccagggctcccag

SEQ ID NO: 217867 - DNA, 122 bp, Homo sapiens
cagagtttggggctgtctttaatgaatcaacaagtatttgtctattgagtttagatcattcgtccattccagaagtatctactcacggctctgggggaaagctaaagaaatttggaaagatt

SEQ ID NO: 217868 - DNA, 122 bp, Homo sapiens
tgtgaggagcctctctgcctggctgcccagtctagaaagtgaggagcgcctcttcccggccgccatcccgtctaggaattgaggagcatctctgcccggccgcccatcgtctgagatgtggg

SEQ ID NO: 217869 - DNA, 122 bp, Homo sapiens
gctaagtgaaataagccagttagaaaaagacaaatacggtgttccttcacttatgtgaagcgtccagactgagtaagcaaactaatagaaacagaaagtagaacggggtttgccagggacat

SEQ ID NO: 217870 - DNA, 122 bp, Homo sapiens
attgcatcttctcttaattagtttgacagatattcatttaaatttgaaaagattcccagacgtgggatagcaaaggaaagtcttgaattccttttgcatcttaattctgtttttgttatggt

SEQ ID NO: 217871 - DNA, 122 bp, Homo sapiens
gcggccgcatcagctgagcgcgcggcgcgtgtcacgtggtgtgcgtgtcgaaggtcacggcgcgctcacaatggagctctcggagtctgtgcagaaaggcttccagatgctggcggatcccc

SEQ ID NO: 217872 - DNA, 122 bp, Homo sapiens
ctcggtaaggagactggaaggattctccgcgaatgctcatttttatttctggagtggcgtcggagttaccaattagttttcttattttatactctctggagttgccaaattctttacgttga

SEQ ID NO: 217873 - DNA, 122 bp, Homo sapiens
ctagaattccatgacaggcactggcaaaacagttaccttaattatcatctccaggtgacccggatgaagtactactcaaactgagactctggcgatcaagggcctgctgcattcactaagaa

SEQ ID NO: 217874 - DNA, 122 bp, Homo sapiens
atctcccggcggcggagaggtggctggaacgtctgtctgtcgctgtccattttactttgccgctcccgaactggctgccggagctggagtctccccactagcaaacagtctccaatcccaga

SEQ ID NO: 217875 - DNA, 122 bp, Homo sapiens
aaggtagttggattcagaaggattttgtgagatgcctgcgtgaggcagaaaagaacatcacggctcttgccagattgttcttgcatattggtcagaataatccaaagacttggctgcaggta

SEQ ID NO: 217876 - DNA, 122 bp, Homo sapiens
tgttgctgactttcaggtttgccacaagcaggaagtaaaggcaaaggaagtaaaggcaaacgcagcattataaatgatctgggtaagcattaaaggagtttcccaaaacagagtcaatatat

SEQ ID NO: 217877 - DNA, 122 bp, Homo sapiens
tgtgttcttggcccatccttggagctttataagtgacctgagtgggatgcatttagggggcgggcttggtatgttgtatgaatccactctctgttccttttggagattagactatttggatt

SEQ ID NO: 217878 - DNA, 122 bp, Homo sapiens
aaaaaaagatgggaagggtaaatggcaagtgcctgctgaactagcctacttacagagcttcggagagggcatcccagtgcttacatctcactggccagaacacaataacccctacctgtaag

SEQ ID NO: 217879 - DNA, 122 bp, Homo sapiens
aaacttcgtcaccctgcttgagagccaggatggtggagcctgaggccacatcgtggttgccggtgttggcatcaaaggtccggatgcggtactggccgttgtgcaccaggccgatggccagg

SEQ ID NO: 217880 - DNA, 122 bp, Homo sapiens
gctagtccgcccctggcgagacccctgctctcacccacccaggacttctcgctcccaggccgggtcctctcaccgtcaaggcccgccccctgccaacggtcctcacccattagccgaaggcc

SEQ ID NO: 217881 - DNA, 122 bp, Homo sapiens
tgaagagcagctacccagattacacagtggtgcagcggtccatgaaaaaagcagagttgacggattatccaagttttggtggaaagtttgggataaattagtacaaaccatggcaatcaaga

SEQ ID NO: 217882 - DNA, 122 bp, Homo sapiens
cccctccaaagcaactggggtaaaccagacgcactgtgaggccagcgcagctgctggacacggtccccggcgccgctccaaccagaccgcgaccgctaagcccctcctttcgagaaactctg

SEQ ID NO: 217883 - DNA, 122 bp, Homo sapiens
aaagaaaatcctagtctttcttactgtcaaatttatgagacaaagtagcaccccaaaagacgcttttgaagtgatagattgcagcacgtaccacctggacatgggcagtgtaaaacagcagc

SEQ ID NO: 217884 - DNA, 122 bp, Homo sapiens
ggggagtgctttgaatatctatacgtggaaagccttgttttttactttttaagaaagggtcgttaaattcgtgctttgtagaccttcaacagctcatcaagggctactctccacctccttgc

SEQ ID NO: 217885 - DNA, 122 bp, Homo sapiens
ctctgctgtccgctcgccgggcccccacgtgacctactgcgcgggccgccgcctccaccgcgcccaggccccgcccccgtgacgtctcatcgccctctgcctgtccgagcgttcggctcttt

SEQ ID NO: 217886 - DNA, 122 bp, Homo sapiens
cactttcctcgcaagatctccctcgttttgctcaaggcagtcgcggcgttgagaacgcctcgcagctcctttactggctggggcactggggagaacgggtacccttgagttttggtacaggc

SEQ ID NO: 217887 - DNA, 122 bp, Homo sapiens
cagagcttacacatgcacttagaaggaaatgggatggataccactccaaaagatagagcacggaggagacagtcaccttcaggacatccccctctgcatgcgtggagtagaaaggattgggg

SEQ ID NO: 217888 - DNA, 122 bp, Homo sapiens
aaattctcatggtttgggttgggtggtggagagcgtgtgtcacccgcgggtggcactgcccgcggtgggcggtgggcagtgggtggtggtgggggggcctctctactcaaaggtgaccatgt

SEQ ID NO: 217889 - DNA, 122 bp, Homo sapiens
cgctacggcaaccacgtggtgctgctgctgaagatgcaggtccgtggggccgccctggcgcgcccaccctgctgcgtgcccaccgcctacgcgggcaagctgctcatcagcctgtcggagga

SEQ ID NO: 217890 - DNA, 122 bp, Homo sapiens
cacaggaagttcgcttttctgtgtcactatatcaaaagctaccacaaatgcagacaataacggctctttaatattaaagggaaaagctaacctgtccagctacagcagcaaagtaaccatac

SEQ ID NO: 217891 - DNA, 122 bp, Homo sapiens
ctccgtgaaatcatggtacagtcactgcccagaggtactgaggaaaaagcaatatgggttcggcagatggtggtggtaaaatgaatcttaaggagtgtggtaaatatgtgctccgcttttgt

SEQ ID NO: 217892 - DNA, 122 bp, Homo sapiens
cagcgccggtgggctggcactgctgggggacccagcacaccctccgaagccgctggcccgcgtgctaagcccctcatttcctggggccagcagggccagccgaccactccaagtgtggggct

SEQ ID NO: 217893 - DNA, 122 bp, Homo sapiens
accttgaagtggactcattttggcatataaacgtgaataagatgcgtctaaccaggcaagcgagccccccaaacaggagcgccctggctgacgggaaacactggatctggggagaatcgcgc

SEQ ID NO: 217894 - DNA, 122 bp, Homo sapiens
aagtgcgcggtttgacctctgacttggggttttatacgttgggatatttccagggtcttgcgtcccttctcccctgattcttccgttggggtgggctgtccacatgcgcagaggctgccagc

SEQ ID NO: 217895 - DNA, 122 bp, Homo sapiens
tcacagacacgtcagtgccctctgtgctcaggcacttttgtttatttgaatgctcattcccggcccatagagctgtgaggtgagagaaagcagggccaggaccttgagtatgtctgggtaaa

SEQ ID NO: 217896 - DNA, 122 bp, Homo sapiens
agccaggcggtgaggcatggactgagggcgaaggtgctgacgctggacggcatgaacccgcgtgtgcggagagtggagtacgcagtgcgtggccccatagtgcagcgagccttggagctgga

SEQ ID NO: 217897 - DNA, 122 bp, Homo sapiens
ctttggaccatggagattctgcagttgttgctctaggagctgaaaccagtgggtagatgtcgttctgaaacgcaggtgagtttggagcgctacgagctaccttcccatctcaggctgcgggg

SEQ ID NO: 217898 - DNA, 122 bp, Homo sapiens
catccagaaggcacctggccctgcatggaatggggactccacgatgcgcctcgtgcttctcgggccaccatcttgaggactggtccctaaccctcagaggcacaccacgggtctgaaagtgt

SEQ ID NO: 217899 - DNA, 122 bp, Homo sapiens
aagttttcaaggggtagccgtgcttgtgcttaattgtggtgtttacaggactttttgtagcgtaagcatgctggcatggttccccaacctcttagggggatgctagtaacccgctcccccgt

SEQ ID NO: 217900 - DNA, 122 bp, Homo sapiens
aggaagatggcgtggagtgagcaggagacgcgaccccactcccaacatgggccgtacgggcgcagtgtggcacgtggcatgggcacctacctctttgtcttccgtgagctttgacaacaggt

SEQ ID NO: 217901 - DNA, 122 bp, Homo sapiens
caggaggaagaggatgccagctcaggcaccagctgaggtttggcatttgctggccgcgggcgccgacctccagggggcgccgtggcctcgcgctgtccgggccgttgcatttccgggcactg

SEQ ID NO: 217902 - DNA, 122 bp, Homo sapiens
cacccccaactgatgaattccagagtgttgggtagtgttgaagccaagtcacgcagcactcgccaccagagcccatgggttggcttcggtgccaacctgcagagaacccagggccgtcccac

SEQ ID NO: 217903 - DNA, 122 bp, Homo sapiens
cctgcaggggtgataagctgaccatgctgtgtaggacttatgtagcgaaagccaaatgcccggggcaggtggggtcggggcagcttcatgtgaagcttttcaaagcccggattccaaagggc

SEQ ID NO: 217904 - DNA, 122 bp, Homo sapiens
tctccactgcacagggtggcccctgctcagtggctcttgctggttccttctcagtgttgccgtcctaaggctgcatctttggccagctcctctacctgtacttggtgatctcatccatctca

SEQ ID NO: 217905 - DNA, 122 bp, Homo sapiens
aagagattctttgtacaactgagctgtggaaagacactactctctcatactggatgtaaacgaggaagcttgtagccctaattgctactggcctttcttaggacctaagaggaactgaccaa

SEQ ID NO: 217906 - DNA, 122 bp, Homo sapiens
aaggctgtgagggccaggacctgctcggcagccagggtgtgggcccactggggtctcctccgctgcctggctgtggggcgggcccctcagctgtcggacctcagcttccacatctgtaaagt

SEQ ID NO: 217907 - DNA, 122 bp, Homo sapiens
cgcaggtaccaggggccatgggcgccttccctatctcctgtagatctcttgggatggcctcgcacaaggttgggaggaaagtggacccaatgctaggatatcgccctccctctagtcctgag

SEQ ID NO: 217908 - DNA, 122 bp, Homo sapiens
gtgggccctcgaagcgagtctcctgcaggtaagggtcgggtggcatgcggggcaaggtagcgcagccgggtgggggtgccccggcagcagggccgggaggggcgtggtgggggggcctcggc

SEQ ID NO: 217909 - DNA, 122 bp, Homo sapiens
gcacctctgccccgccgccccgtctgagatgtgaagagcgcctctgccaggccgcgaccccgtctgggaactgagtagcgtctctaccccgccgccaccccgtctgggaggtgagcagcgtc

SEQ ID NO: 217910 - DNA, 122 bp, Homo sapiens
cgatcttgccccatgcggggtgttcttgaaagcagtgttaggaaaacatggtgcttcactcgtccagctttaacccaatccatttgcagctaccctggaactagctgccttcttctgagctc

SEQ ID NO: 217911 - DNA, 122 bp, Homo sapiens
ttagagaagcacgactcaggattgttagtcacttggagagcatttcacaggttcccttttcgctttggtccccagaatccccctcccctaatggtactggtgagaggcgggctgtggtccca

SEQ ID NO: 217912 - DNA, 122 bp, Homo sapiens
gactgacatagacctgcagaagtggagctggaggtccagtttgccctctttagctatccccgtggcttttagccttcacctgtttttcctccaggcataggggcagtaatctagggagacag

SEQ ID NO: 217913 - DNA, 122 bp, Homo sapiens
aaagaccgaagaagaccaccaacttgcgtcccactcccactccgactctgaaggaaaatccgaagatgaaactaaactccaaggctgcaacccgcggcggccgtgcaagcggccccagcgca

SEQ ID NO: 217914 - DNA, 122 bp, Homo sapiens
ccccccttccccaccctgtgccttagataaagccggcccagtgggaccctcaggttgcaccgcgcggaggtgtccgcggctctcgggagtcgtcgcccttggcgttatgttggctttaggga

SEQ ID NO: 217915 - DNA, 122 bp, Homo sapiens
cctcgcgctgatcttggtgggccacgtgaacctgctgctgggggccgtgctgcatggcaccgtcctgcggcacgtggccaatccccgcggcgctgtcacgccggagtacaccgtagccaatg

SEQ ID NO: 217916 - DNA, 122 bp, Homo sapiens
caggaaacagaagcccaaggagcccgcgtccccaccccctgctacctgccggcgtgacagcgattcggtggccccccgaaccccaccttgaggaagacgcggcgcagtcctgcttccacgac

SEQ ID NO: 217917 - DNA, 122 bp, Homo sapiens
ctgccggacatctcgcagacttcgggcagcgatcgtggcggccgcctccccggggctccacggccgacctgccgcctgccgcggccatccccggcccactcctgccaggcccccgaccggag

SEQ ID NO: 217918 - DNA, 122 bp, Homo sapiens
aaccaccatcacttcctttcttcctgaggcccagacactaagcaaggagggtgaggaatgcggcatttcaacggggccaaattgaggaggcttaatacgaaagcgccaaaagccaggcaaga

SEQ ID NO: 217919 - DNA, 122 bp, Homo sapiens
tgtctacacagctagttttccctctaacgacttcttcaagatcaggggctatgtcttattcgtttttttatgtccccggggattagctagttcttgggaaacaactgggacttgggattcaa

SEQ ID NO: 217920 - DNA, 122 bp, Homo sapiens
ggcccgcctctctgatctcacaactggacacacagtgcctggcatggttcctggccatagcgggccctcacatcctagcttttaaaggagtatatggtggccactaggtttcaagcaccagg

SEQ ID NO: 217921 - DNA, 122 bp, Homo sapiens
gctggttctggtggcctctctgcaggtcgtctgatgctggacgggggagggtctgtcttgcgagcagtttagatgcagttgaccctgaaattcttcgtatggaaatggaaacttctccagtg

SEQ ID NO: 217922 - DNA, 122 bp, Homo sapiens
agaacaacaagaaaaaaaaaaaaaagaaaagaaaaagaaagaaaaccagtaatccgtgttcgctttatgctgaggtctataacaagtcatttcctggatggatctgtcactgtggcctacag

SEQ ID NO: 217923 - DNA, 122 bp, Homo sapiens
cccccttggctgggggcctttgtgcagttcatggactgggagtcacccccatgtctagaccgtcaggaaacccattggcttttcctttagagcataccaagaatcaacttctcagaacatag

SEQ ID NO: 217924 - DNA, 122 bp, Homo sapiens
taagggttttgggtgccagaaaacaaaaactaaggaaggactaaaaaaaaaaaaaaaaatcggggcaaacagacacagctcccaatagtcaaagagctacaataatttcagcaataaaataa

SEQ ID NO: 217925 - DNA, 122 bp, Homo sapiens
tgtgggaagtcgctgtggcgggactcaggcctccttgcagtcagccctaccatctgcgcccgagttttccttggccagctcggcctcggtccccctcagccataagatggcggctgcgctga

SEQ ID NO: 217926 - DNA, 122 bp, Homo sapiens
agccagggttatcttttcagaccaaaaatctggcctgctgctcttcaccctcaaaccctgcgacggctcccttacatgcaggaaaaaaagaacactccttataatggtcaattcagccttgc

SEQ ID NO: 217927 - DNA, 122 bp, Homo sapiens
gatgtttgtagatgaattttcagagaagtacttatttacaacggccagaggtggagatggcgcagatgaccctcagctgtctatgaagaaacagcatgtggcctggccacgtattactcagc

SEQ ID NO: 217928 - DNA, 122 bp, Homo sapiens
gcaggcctggatttgaactgggttttcgctgcttgctctgtgccagtggaattttgcagccggtggaattaccctaaagcccagagtcctcatctgtaaatattcatatacggtgaatatat

SEQ ID NO: 217929 - DNA, 122 bp, Homo sapiens
gcaagctagaagcttgcatgggctaatcctggcagctgcaccaatagaaaagggctacctcggggccaggcatatccaacatagaggctacatcttccctttgtgttaccatgtgtacaaga

SEQ ID NO: 217930 - DNA, 122 bp, Homo sapiens
tgcaggcccctatccgacctcaatgggaggcgtgggagagttatggggagtacatcccaccggcacagctgtcatgtcagccctgtctggctgccggagttcgactggtcaggcgagatggg

SEQ ID NO: 217931 - DNA, 122 bp, Homo sapiens
ggacgacgtgcaggggtgaaaacatttcttttctttccctgtttaggttcttagttgacacgctcccctggaaacaaaagtcaacttaacaaaagaaaaatcagccaaagttgattaacaca

SEQ ID NO: 217932 - DNA, 122 bp, Homo sapiens
ggattgaataaaccctcctgaatggtttctagtcagttgcaagtggcgaacccaactccacgcaactgaaagagcaagttactgtctcacacaaccaggaaggacagggaagtgactgggga

SEQ ID NO: 217933 - DNA, 122 bp, Homo sapiens
tccctgtgccccggcgcacgcgcaagaggcgcaaaaggcacagcttgctgggcggccgcacgcatgcgcacaagcagcagaggggaacccgcccagtgctgagttgtcttcgaggttggcgc

SEQ ID NO: 217934 - DNA, 122 bp, Homo sapiens
tgtggctgccgcgccgcccctttggcatcgtttgaatgagggtctgcgtgggaggaaccccgcgccgggagacgcgcgctcaggccccgagtcgccggggtttcgaggttccacaagccccg

SEQ ID NO: 217935 - DNA, 122 bp, Homo sapiens
gccgcaggtgtctgaagggtcgatccactctggaaaggctttgccctggtgacaggcttgcgctgctgctgctgcacacaggcggggttggttttgtaggtaggtggctcctgctgccactc

SEQ ID NO: 217936 - DNA, 122 bp, Homo sapiens
tgctctcagtgcgctgacagagggtccgtgagctgggacactgtgacctcggcaccgctgcgattccagcgcaaacctgcgtggcccagggggagggggctggcgcggggctgaggaaggcg

SEQ ID NO: 217937 - DNA, 122 bp, Homo sapiens
ggaaaaaaagaaagtgagttgcatggaaggccccagggaagcccctatcctccaactcctcgcccttcctcacctggctgatgagagagaggcctggctcctgagtatagaaccacttctcc

SEQ ID NO: 217938 - DNA, 122 bp, Homo sapiens
gcctgtgtggcctggcacataacacacgttccctaaatgcaggttgttattgttgctgagcggggtgtgtgggtggctaacgagagggatgggggctgtctctgaggtttggattcggaatc

SEQ ID NO: 217939 - DNA, 122 bp, Homo sapiens
gcacacctgcgttcattatcctccttgacaggctccctccaggcatggcctggtttgttccgagtgcccactggctgctgggtagcgcaggccgggcacaccacctccaagggtgtgcagac

SEQ ID NO: 217940 - DNA, 122 bp, Homo sapiens
aacaggtagttatacttgggagggtcatataactatgtcaacatgaagtggttgttaatgcgaaataagaagaaactcttctgatatttataggcccctataaagggagagaaaggaaatca

SEQ ID NO: 217941 - DNA, 122 bp, Homo sapiens
cctccatccgtccatttcagcgtctaaatagtatcaagcccttaaaataacattaagacacgttccagcttgccctgccagtcaaaggaaaaaggagaaaaaaaaaaaaaattgaaaccctg

SEQ ID NO: 217942 - DNA, 122 bp, Homo sapiens
ttcagttgattacctttcagcttagaaggcactttccagaaaccatccacacttctcgatcgttgtatgaatcaaaccaagtgcaaaccaagtgtttgcagtcatgcctgtttccataaaac

SEQ ID NO: 217943 - DNA, 122 bp, Homo sapiens
tcagcttatgttattttatttatcaacattcagtagcgtgtggattcaagaacacgtcctcgagtggaacgccaaagaagatgcctgctctaggggccagagcgcgctccgagcaggaagcc

SEQ ID NO: 217944 - DNA, 122 bp, Homo sapiens
ggggatgggggaggtttgggaagggttcggggaagacgcctgttcctcgggaggcgctgccgctgcagttacttctcccctcctccctcctcctcctcctcctcggagagttgccgagagcc

SEQ ID NO: 217945 - DNA, 122 bp, Homo sapiens
cgtggccggcggggggagtgggggcggcttttcccggcacatgcgcaccgcagcgggtcgcgcgccctaaggagtggcactttttaaaagtgcagccggagaccagcctacagccgcctgca

SEQ ID NO: 217946 - DNA, 122 bp, Homo sapiens
gggcggggccagcccgacagccggcttgaggctccttataaggccgcggcgggcgggaggcgggagccggagcccattggtccaatttagcttggctggggctactgcgccgtgggctaggc

SEQ ID NO: 217947 - DNA, 122 bp, Homo sapiens
taaaatcctaagtctttaaatatgaacgtttttaaaaacaaatcaagcacagccccaaatcgccccagtttgccagaattggaaataagagagagggattctctcctgtcaccgcctccact

SEQ ID NO: 217948 - DNA, 122 bp, Homo sapiens
ggaaccacggtgctttggtgtgagctcggtttttggcgggggcgctaaagtagggggatccgatattggtttccttggcaggcggggtacccaagtacctcccggttacacgtctggacaat

SEQ ID NO: 217949 - DNA, 122 bp, Homo sapiens
tttgtatcatagtgtcagcctcctcagaaacccataaagatttctttaaggatttggatccgatatctttctgaattaggccctaaattattatgaatgtgaacctaggttatatgtcttgc

SEQ ID NO: 217950 - DNA, 122 bp, Homo sapiens
gaaacccccgaggggaaaagcgggtatcaaatgtgaattccactcgtccacagcgccgggcgttatgaaaatctgagcacctttgaccggagaagcaatagctatgggattaaggcgaattt

SEQ ID NO: 217951 - DNA, 122 bp, Homo sapiens
ggtcgggggctgcagagtaagtcttgatctagaggtgagtgactcagagaggcctgatctcgcctatgtgcagaggaggccaggccctcccaggcaggacacacacatacatagttgtgctc

SEQ ID NO: 217952 - DNA, 122 bp, Homo sapiens
caggcaccaagtctcgcccttctcggcgtccacatgcctcctgtgccgagggcagccaggcggtggtggcttctcgtggcctttctgtgggctccaccgtgtgcagtgaccttcagcctgag

SEQ ID NO: 217953 - DNA, 122 bp, Homo sapiens
cctctctcctcagacgtggacgaatgtcgcgagcgaggcccagccctgtgcgggtcgcagcgctgtgagaactctcccggctcctaccgctgtgtccgggactgcgatcctgggtaccacgc

SEQ ID NO: 217954 - DNA, 122 bp, Homo sapiens
gtgtgagccagaaacaagtggccatgaagcgctatcattctccatcaggcctgaggctctcgtttccagcccagagatactgagaccagtgggcagaactggaaaaagagatccagtcataa

SEQ ID NO: 217955 - DNA, 122 bp, Homo sapiens
atctttaactccagagacacccgtttggtgcccgccgttttaagcattggctctcatttccgtccgcaagctatttcgctgaacttaacgctctgggttgttgaaacggcctatgaggcaga

SEQ ID NO: 217956 - DNA, 122 bp, Homo sapiens
actcccgagcccccgggagatgacttcacctcgcggagctcagagagccgggggtggggccgtcggaaagacagcgcggacagccctcagcttgcagggggcggaggccgggcagcctgcgc

SEQ ID NO: 217957 - DNA, 122 bp, Homo sapiens
acctcctgtgcgtacgtcgacattttaaccataaatccagagttttgggactgcaaaactcgaggccaggggattgggggagggggataactacccggaggtccgaagcccggcggagctgc

SEQ ID NO: 217958 - DNA, 122 bp, Homo sapiens
caagtcgctgaaatcgattttctgcttcttatagtaagcggcgggctcgccagcctcgagcgaaagtgtgactgcgaacgggcaggcgcgcgcggggctcggcggaggcgcgcttgggctcc

SEQ ID NO: 217959 - DNA, 122 bp, Homo sapiens
ttttttttttaactacaaataaggagacggaaactattaaataagaaggggggaaactcccgcatatttcaccttgacctggctggactggtctgctgcctctaagaggcgggtgttgtatt

SEQ ID NO: 217960 - DNA, 122 bp, Homo sapiens
aggtcagactgtgcacggtaccgaggactagttccattcctgagtatgaaagggtgaaaccgttcacctcaagtttcaccccggagttattaaataatgaatgcatcagtcacacttatagt

SEQ ID NO: 217961 - DNA, 122 bp, Homo sapiens
cgaggcttctgttttggccacgccctttaccccatcgctcagttcaggctcccaatgaggcggcccaccatcagcgctggtagagcaaagagaccgacttcctgcgcctcgggtgggcgggg

SEQ ID NO: 217962 - DNA, 122 bp, Homo sapiens
ggagtgtccttcgtgccagcatgtctccaaggaggaaacccccaagttctgcagccagtgcggagagaggctgcctcctgcagcccccatagcaggtgaggcccaggggtgctggtggaggc

SEQ ID NO: 217963 - DNA, 122 bp, Homo sapiens
tgaagtaaaggggttttgcggtttgtagagaaataaagcacttctgagaagggacggcgacgtgactttgaacttggctcagctcttctgtgccctgcagagagaggagaactagagccggg

SEQ ID NO: 217964 - DNA, 122 bp, Homo sapiens
ggttctcccctagagtccattccttcctggacgcggctcactgaggatgaaaagtcggaccgaggagagcacacactgtcacgtctctgaaggtgacacaggtggtcagacggtgccttcac

SEQ ID NO: 217965 - DNA, 122 bp, Homo sapiens
gaggcggggctgggttggggggcgggggttcaagtctgagagacctaaaggcaccgctagcgtctgggggcgtggccaaccatgcgggaggcggggccttgatgctggacatcaggctgtgc

SEQ ID NO: 217966 - DNA, 122 bp, Homo sapiens
atcagaacaattctaaagaacatagaggagctcccaaatataacccctagtgtacaatgccgataatagggtacggtgaggttaagaaacgtggcctcaggacaaagccctcataatcttct

SEQ ID NO: 217967 - DNA, 122 bp, Homo sapiens
cccctgcccgccgccggggtctagagtgcagcgagtgcaagaagctgttcagcacagagacgtcactgcaggtgcaccggcgcatccacacaggtgagcggccatacccatgtccagactgt

SEQ ID NO: 217968 - DNA, 122 bp, Homo sapiens
ggagaagggtcagtctcgatcttcccctgtgaagctgtcagcgaccatcagagggtacgccggggtggcgcggggacgatgccaggagccttggagtgaagaaggcttcgactccccgcacc

SEQ ID NO: 217969 - DNA, 122 bp, Homo sapiens
gtcgcctgtctcgacagtctcccctgcggggtatctggggaccctttctttgggaatccacgctctttgtcagagtagccaatgcctctcctgtccaaaatctcatacccttggcccttctc

SEQ ID NO: 217970 - DNA, 122 bp, Homo sapiens
gacacctggggccaagcccgcatggccctgaccacagcagggagcactcagtttccactgcgtgtcattgcgagagcagatctttacatgtttcattctcttcaagttgcgtttctttacca

SEQ ID NO: 217971 - DNA, 122 bp, Homo sapiens
ctgagtacatctcctcatcatccagttgtggggctgtggctgtgagtggcgccctgtccccgaggccccctgggatggcccaggctcccagcagcagcagcagcagtggcagtgacagcctc

SEQ ID NO: 217972 - DNA, 122 bp, Homo sapiens
gactgctctcacctcttgagctgggacgtcctcttctcttgcccttgaacatctgagttccgggttcttgggcctttgggtttggactggaacgacaccactggctcgcctgtatctccagc

SEQ ID NO: 217973 - DNA, 122 bp, Homo sapiens
ccctcatccgcagcggcctcttccactcccacctggagaacctgcagcaggtgcccacctcggagctccacgagcaggtgcaccatcctccgggccccgccaggactccgagagcacaggaa

SEQ ID NO: 217974 - DNA, 122 bp, Homo sapiens
tgaggatgacctggcccccagctctgtgagctgcgccacttgggcaggcatggaggaccccgggcagggagacccgggtccagccgggccgcgacgggaggtggctgcgcgagtgaggggcg

SEQ ID NO: 217975 - DNA, 122 bp, Homo sapiens
tgcttggtagtgtctgaggtgaactgtgggggttgcgcacagccagccgcgtggatcccacgcagcgctgaaccgaaccgagtaggaagcctttctccccaggcacgtggcttcagggcgtt

SEQ ID NO: 217976 - DNA, 122 bp, Homo sapiens
ctaaagggggacaagaagcagccgatgtgtcaggtttgcctctcaccagcatgctcccctcgttgtccacagtcccatcagggacatccttcagtgctgtccccccatcccagccagtatgg

SEQ ID NO: 217977 - DNA, 122 bp, Homo sapiens
ttccattatgcgctaagaactctgatctcttcccgctgcggcagccccgccctttccttgcggctccgccctttccgtgaagtcacgcccgtccttaggctgtctctgtctccctaagagcg

SEQ ID NO: 217978 - DNA, 122 bp, Homo sapiens
gggttcagaaacttggtgccccctcgggcttctgtttcttcactggaaaaaaagtgaagtcgtcgaacaaaaccgagcccttatcgtgtgccaggttttgtgactagtgttctgtattgtta

SEQ ID NO: 217979 - DNA, 122 bp, Homo sapiens
agtatcgataagtggtcagggtgcagtggctcaggcctgtaacccaacccttgaggaagccgagcccgaaggattgcttgagcccaggagtttcagaccagcctgggcaagtgagaccccat

SEQ ID NO: 217980 - DNA, 122 bp, Homo sapiens
cacggagcacgggaaggtgtggaggagccttccaggcagggcccactcagtgaaggaagccggcctgaaaatgcttccaacagcatgattccaaggacgtgacgttctagaaaaagcgaaaa

SEQ ID NO: 217981 - DNA, 122 bp, Homo sapiens
gccgactgcagaagcagacgcagtgcacggtggacatctgccccttttgggggcctgccacggtgcttcctgaaaactcaggttaagctgactctgctgtcaggctgatgaggcgcctgcac

SEQ ID NO: 217982 - DNA, 122 bp, Homo sapiens
ccgatgcatgcccaaggacaaggccattaagaaattcgtcattcgaaacacagtggaggccgcagcagtcaggggcattctgaagcaagtgtcttcgatgcctatgtgcttcccaagctgtg

SEQ ID NO: 217983 - DNA, 122 bp, Homo sapiens
tctccttggcgaccttctcgttggggcaagtaacaaaggctgcagagaccgagcccggaacgtagccagagccggaatccgaggccggcgagggctgggtcggagggcttccagaggccatg

SEQ ID NO: 217984 - DNA, 122 bp, Homo sapiens
gccgctgccgcacgggcctggggccagtggccaaaccagcccaaccagcgcgcagagccccggagccccagagccttggggactcttcggagcgtccaccgccctcaaggttttgcgcgtcc

SEQ ID NO: 217985 - DNA, 122 bp, Homo sapiens
aattgtggccaccacaggtgcagggagcagtttctctccactcacagcctgaagcatacccggcaggggctgtccccaggcccaacaagcaaagggcccagtagcgagggccactggagccc

SEQ ID NO: 217986 - DNA, 122 bp, Homo sapiens
ttctcaggcttctcggcccgagggagaaacattttgaaattctttaagaagcaagttttccgtgggctgagtggacttctagggccctgaccacactgacctgggcttgtcgagctctgccc

SEQ ID NO: 217987 - DNA, 122 bp, Homo sapiens
taggaagcgttgagcaggacgccgctgcgcaggagcacggcgcggggcaccaggtagagacgcagcagcatggccagggacagcagcgcttccccttggcccaggaatcccggccagggctg

SEQ ID NO: 217988 - DNA, 122 bp, Homo sapiens
gtgacagaaaagtgaaaaggagtccccctcatcaggatgacacaaccttaaagtacaacccgacaaacctccacccacttgaaacccactaactggaaactccagacaaaaacttattttca

SEQ ID NO: 217989 - DNA, 122 bp, Homo sapiens
tgaacgacggcgagccggtgctcttccactgcggcgtggccgtgggcggcccgctctgggcgctcattgatgtctacggcatcaccgacgaggtgcagcttctgggtaggtcgcgggcgcgg

SEQ ID NO: 217990 - DNA, 122 bp, Homo sapiens
cctaagccaaccccaccactcccgagacctggaccccaaaccactcctcagccttcaccgcgacctccaagcagacccctgcccaggccgtgccagctgaatccccacaagtcccggggcgc

SEQ ID NO: 217991 - DNA, 122 bp, Homo sapiens
catcttttaaacatggaaggaggcatctgtgaggtcaggctagacaagtaccagtctaaacggagacaagagtgagataaggtttctgttttgtattagctcctttaagatgagtgtcctag

SEQ ID NO: 217992 - DNA, 122 bp, Homo sapiens
agctaaagtggtctcatcctccttgcttggtccctgtgcccatctgtgggctggtttttacggccatgagaatgtggggctctgattggccaggcctcagtcacacgcccatttctggaact

SEQ ID NO: 217993 - DNA, 122 bp, Homo sapiens
gtccaccacatccgtgaacttacccagaatctcgtgaccggaagctgcggagctggggttcgagccccacgggttctcctcctgcagtcctgccgtcctcgcagtggcatcctctttctgcg

SEQ ID NO: 217994 - DNA, 122 bp, Homo sapiens
tcagggctgggaggggcctatacctggtttctcagtggtcactgagtttgtctacagcttcgagacaccgggagggaggaggtaggagctgtgggtgggagtggcggtgggtgaggcaagac

SEQ ID NO: 217995 - DNA, 122 bp, Homo sapiens
atgccggacgtgaaggggaggacggaggcgcgtagacgcggctggggacgaacccgaggacgcattgctccctggacgggcacgcgggacctcccggagtgcctccctgcaacacttccccg

SEQ ID NO: 217996 - DNA, 122 bp, Homo sapiens
agccccgcacgcggcgggactggtgactctctgcccgctcctgctctgtgcagcaattgccgtccctcccaccacggttcctggtggccttgggatgggttcccgggggtctcctgctgtcc

SEQ ID NO: 217997 - DNA, 122 bp, Homo sapiens
caagaggcaagctgtgacttctggatgtctacctccctactgactaaatgatgacattcccgcagaacagctattaggtttcttccctccagctcggttacacatttacttaaacctctacc

SEQ ID NO: 217998 - DNA, 122 bp, Homo sapiens
ggctgctcgcctcctgcctgtagtgtgtgggctggggttggtgcgagcttccagcttggccgcagttggttcgtagttcggctctggggtcttttgtgtccgggtctggcttggctttgtgt

SEQ ID NO: 217999 - DNA, 122 bp, Homo sapiens
ttcctcccagttttgtttccgagtttgatgaaagggcaataataggaaaagttgcgcgcgcgcgcttgcgtgtgtacgcgcagacacacatataaataaaatcgatttagtgtctattttac

SEQ ID NO: 218000 - DNA, 122 bp, Homo sapiens
gatcacctcttaaatatccgtcccctcagcactactgcatgaggggttcagtttccaacacgtgaaatttgggggacactttcaaaccatagtaagtaggaaatggcaaaaataaattactt

SEQ ID NO: 218001 - DNA, 122 bp, Homo sapiens
cgcgtcaccgttggcgcggcgtccctcccggcaagcgccggaacccggccccgctgaccgcgtcccccaggcggcctctgtggcttccaggcccgcgctccccactggacccccgcgcccct

SEQ ID NO: 218002 - DNA, 122 bp, Homo sapiens
aagtgggggagctcacctctcagaggtgaggcttaaacatctgagaagtgcctgtcgcagcgccagctcgcagcacgtggacttctctccacaggtgcctcagaggacctcatctatcgcca

SEQ ID NO: 218003 - DNA, 122 bp, Homo sapiens
aggagacgggaaggggctgctggagcgcaggaggacggccagaggtgcgcgggcccccaccgcagccccagctcccagatggtgcacggaccaaccactcaacaatcagcctgtgagttttc

SEQ ID NO: 218004 - DNA, 122 bp, Homo sapiens
agtacttgaaatattagatctttgaaagactctaattcatgttggaatttaactcataagcgctttttaaatcctacattgtgcggtaatttctcatttcatacaatttcatctctgatcct

SEQ ID NO: 218005 - DNA, 122 bp, Homo sapiens
cttcctgtgtcactcttaccgctgaagtcaggacctgacattatcttgttgacatgtttgcgtttttatcgtcagcctcgtcgaaaggggcgtacgattgctccccgaaaccagggtctttc

SEQ ID NO: 218006 - DNA, 122 bp, Homo sapiens
cccgacagcagcctggagatcctgcccgaggaggaggacgagggcgccgactcctaaccccgccaggcagcctcgttctgcacaggcactttagcccgagccaggcacacctgcgagggggc

SEQ ID NO: 218007 - DNA, 122 bp, Homo sapiens
actactgctgaaaatgttaatacctcttacaaccaggactctcctaagtttgccaggtcacgtgaatttaaaattaaccaagacacagaatcctggaataccgttggaattctgctgttctg

SEQ ID NO: 218008 - DNA, 122 bp, Homo sapiens
ggagggaaaccgaaaagaactgccaactgcaacagagttgcagcttgagcagcgtcggctcgccgaagccccttcttgtctgcaaaagaaactttttcgcctccaccccgcggcactgcgcc

SEQ ID NO: 218009 - DNA, 122 bp, Homo sapiens
agcagaggtactacagccatcctaactgtatcgcggagccccaaatcttcgaagaaaactcggcccctccccggaaccggaagctaatggcgaaaccacggagagaaggaagtgaagaagcc

SEQ ID NO: 218010 - DNA, 122 bp, Homo sapiens
cctcagggaagccagagaaacttagtcaggagaggaaagagagggggtgtggagtgacaccgtgcctgcttcatcttggccccaccccctgagggcccgaggactcagtgcaagggatgctg

SEQ ID NO: 218011 - DNA, 122 bp, Homo sapiens
acagggggaggaagagcagggggttagtggcattggggacacccagcaggacgagggccacggcacccacgtggcacaaccccttctcctgctaagatccaaggttcaggcaggcgagagtt

SEQ ID NO: 218012 - DNA, 122 bp, Homo sapiens
gttgcctaacaatatttagagctatttctctcttttcactctcattctacgagtgtacaccggagtttctagcaactacatggtatgtgaagtcatccctctaatgataacctgtaatgagg

SEQ ID NO: 218013 - DNA, 122 bp, Homo sapiens
aaaagaacttcttgtgatgacagaaccgttctgtagctgtgttgtccattgacaggtggtcggattgtggccattgagtaactgaaatgtgaccagcatgactcaaggaccttaattttaaa

SEQ ID NO: 218014 - DNA, 122 bp, Homo sapiens
cgtgctacgagcgctggagagccggcagcctgagggacccagcctcagacacctcctccccgtcatggccaaggtcgtggtcctcagcccgggcaccctccaggagggtacgcggggcccct

SEQ ID NO: 218015 - DNA, 122 bp, Homo sapiens
aagaacacttgccgcccgcatttccccttgacttctccctttttcttcccaatctcgaggcgttcatgcctggctttaagacgccaagataactctcttgttttggcattgtcgcaatgtcc

SEQ ID NO: 218016 - DNA, 122 bp, Homo sapiens
caggggcgctccgcggagaccgagaccaggccccggcccgcagctccgcgcgttcccaggcgcagctcctgatgccaagttcacttggaccccggctgagattagagaggcctggcgaggtg

SEQ ID NO: 218017 - DNA, 122 bp, Homo sapiens
atgcccgggaaccagtagctccgtaacagcacctgagcctgcagcctgccaagcccctggcgggaggaggagagccttcagggattccccaggaagccacctgagcaggactagggtggaaa

SEQ ID NO: 218018 - DNA, 122 bp, Homo sapiens
ggcccctcccttcctgctcatcctggtgtgcacggctccggagaacctgaaccagagaaacgccattcgggcttcgtggggcgggctgcgcgaggcccgggggctcagggtacagacgctat

SEQ ID NO: 218019 - DNA, 122 bp, Homo sapiens
catggagcagcgcagtttttccacactgactgtctcccaccacaactatcttgcatttcacgttctgattaggatccatgatagatttgctggataatttctggctggctcttctctccttc

SEQ ID NO: 218020 - DNA, 122 bp, Homo sapiens
aagacgcatgaaaaatatggttgggtcaccccgcccgtgtccgacggctgatgtctgccacgtgcagtagacgctcgagcgcctgtccacacacacaccagtaccctgacatctcctcaatg

SEQ ID NO: 218021 - DNA, 122 bp, Homo sapiens
gagaaccctggatgtgtccacagtcactcctccgcccagtggagcgatccaggcagaaatcggggccctgagtctgaatccgggttctgcaaccagggcagatgcgggcttgcctctgctcc

SEQ ID NO: 218022 - DNA, 122 bp, Homo sapiens
tatgcgcctcgccccgtccccaccagcgcgcaccccctcgtccgtctcctccgccacccgcgaaccaccatccacagccagggcactacctccccagagccggggagccgggcggcctcgcg

SEQ ID NO: 218023 - DNA, 122 bp, Homo sapiens
cacacaggacgaagctcagggatgattcttagatagtggctctcccccggggcccagcaccggtcacctgcagtctcatcttggtcatccacagcgccgcagtcactgtcacccacaggagg

SEQ ID NO: 218024 - DNA, 122 bp, Homo sapiens
ttgcttaagcatactcttcttctaggacaaaattagtattaaaataaagtgggactctgccggcttattacaaaccagtaaagaattgttaagacacataaatctggtctgcacattccaga

SEQ ID NO: 218025 - DNA, 122 bp, Homo sapiens
ccgtgcggccccattccaaggaccccgccagtgtgagtcactgacagcttcgcgaatcaacggtgcccagaggaaaaaacttctcatttggacttctaggcccggcagtggccggcggccag

SEQ ID NO: 218026 - DNA, 122 bp, Homo sapiens
tcgatgagtagagaatcgtcgctcggagcaaaggcgagaggagagagaagcgtgcgggtgcggcccttgctgctttttaccaggcgacaccccggtcgactttgacccccgagcaggtgaaa

SEQ ID NO: 218027 - DNA, 122 bp, Homo sapiens
gggtcccctcctggagagggcgtgggcagttcgtggacctgggtcccttcctggagaggacgtgggcagctcgtgaacccggtgtcccctcctggagaggacgtgggcagctcgtgaacccg

SEQ ID NO: 218028 - DNA, 122 bp, Homo sapiens
caggccttctgagacttgaggagcaggggctgccgtggtgtgtcctctgaaagaggccttcgccacgaaagcacagaagacccagggctcactggaaccatcaagggtcctctggttcttct

SEQ ID NO: 218029 - DNA, 122 bp, Homo sapiens
caggtgatccacctgccttggactcccaaagtgctgagattacagaatgaaccaccgcaccgggcaatgatggcattttttaagatgtgagggctggatcatgcctggcctctgatgtcagg

SEQ ID NO: 218030 - DNA, 122 bp, Homo sapiens
cacaagatctcaacaacggtgggcaagccctacatggagaccgccaagactggggataatcgcaaggagacattcgtggggcaggaactcaacaacacaaacgttcatctcaagctggttaa

SEQ ID NO: 218031 - DNA, 122 bp, Homo sapiens
tcctctgtagtcgactaccgcagctcttctttgcattctggctctttaataatctcccttcgccctttctttaaatcagttcccaccctcccaacacctgtaatctttctcccctctggact

SEQ ID NO: 218032 - DNA, 122 bp, Homo sapiens
gggatccttgtggtcatgaaaatgttctataccttgactacagtagtcccttcttgtgctcggggaatgcattccaagacacctagtggatgtctgacaccatggatagttcaaaacataca

SEQ ID NO: 218033 - DNA, 122 bp, Homo sapiens
agctgtggccggagaggtgggagtcggagcgaggccctctcgggggagcagggtgaacgccggccactctaggatcctcactcggggagaggaggcatagctcgcggtgtcacctccagccg

SEQ ID NO: 218034 - DNA, 122 bp, Homo sapiens
gaacagatgtctccccgtgaaaggctgatgtgggatcgatcgcatacctcttgagtaagacgttagcgggagatgaggctcgcacatagtctcaaactctcggatttgaggactgagcagag

SEQ ID NO: 218035 - DNA, 122 bp, Homo sapiens
gttgctgttgccgggtgatagttggagcggagactgtgagtgccggctgcctcgacagcacgtttgcgacgctcggagtgaccttcgagcgactggggaccgggggcgggagtcgtgcatgc

SEQ ID NO: 218036 - DNA, 122 bp, Homo sapiens
tgatagaggatagatatagatgggtgattgataggtggatatagatgatggataggtagacgattgacaggtaaagatagattagatagatagatagagatgattgatacgtaaagacagat

SEQ ID NO: 218037 - DNA, 122 bp, Homo sapiens
cttgctcaagggtacaagcttgctgggcagggcttggactaaaacccaggaatggccctgcgcgcggattacacagcctggggcttcgcacacgagcccgagtttgagtccgatcggcagtt

SEQ ID NO: 218038 - DNA, 122 bp, Homo sapiens
tctggtaagggagacgctctccatcgcttcccccgggggcgtcaccgccccctgatgccccgccctcctcacgactcaagttcctcccacttagctcggtgctaggggcgcatttccccggc

SEQ ID NO: 218039 - DNA, 122 bp, Homo sapiens
tccggcaggatcccagtttgcagagggctgagctgctccagcctcactgccagcaaaacccggaaaacagaggcactggaggcgtggcctagggaagccccgccccgtcccgtcccggtccg

SEQ ID NO: 218040 - DNA, 122 bp, Homo sapiens
gcggggtattgggcttcgatatcatgtaacccccgtcctccatggaagcaatgcccccctcgtccagcccaggatctaatgtgcatgcatgtacgtggacacagtctctagccaggggtggt

SEQ ID NO: 218041 - DNA, 122 bp, Homo sapiens
cgggccggacgctgccggcaccgccagcgcacagccccaaccgccgccgccccccccacccgctcccaaggagtccccgttctccatcaagaacctgctcaacggagaccaccaccggccgc

SEQ ID NO: 218042 - DNA, 122 bp, Homo sapiens
ggagggccctactgtccggctgccaccgcccgaaggcacaaccacagcggccaggggagacggcatctggggagagccctactgtccagctgccaccgcccgaaggcacagccacacctggc

SEQ ID NO: 218043 - DNA, 122 bp, Homo sapiens
cagcactcttctgccccacccccaactgtcccttcatgatcatcctttctcgctgcacatcgaggtccctacctggcgatctccttggcgaccttctcgttggggcaagtaacaaaggctgc

SEQ ID NO: 218044 - DNA, 122 bp, Homo sapiens
cagcttctcagcctttaggctgctatgggccctagatgcatgctggtcgattctgatcaacgagcaactgcttttgtttgtttgcttttttctacagctgcagctgtgggtgattcggatgg

SEQ ID NO: 218045 - DNA, 122 bp, Homo sapiens
cagcaggaagccgcgcccagcacggtcatgctcagcctcagtgatcctggcgggaaagaccgagacagaaattcttcgcacacccaccaggcctccggatccagccagcaccggggctagcg

SEQ ID NO: 218046 - DNA, 122 bp, Homo sapiens
taccttttctatgtttagatatgtttagataacaaattaccactgtattacaatgccctacggtattcaaacagtaacatgctgtacagatttatagcctaggaggaataggttattccata

SEQ ID NO: 218047 - DNA, 122 bp, Homo sapiens
tctacccgctgcaggaggcggcggcggacgggtgcagaggtgagtgtgtggctgcccgaacggccccaagggaggctggcgtgtgccacccatgggcgcaggtgccatgacctagttgtaca

SEQ ID NO: 218048 - DNA, 122 bp, Homo sapiens
tcccgggtctctctctcctctgtctgtcgtgtctgtgtctgtcaggatttgttcgtgtctcgttgagtttccgagtcttcttttccctaggtgtctctagcccttccctgcgggcttttctg

SEQ ID NO: 218049 - DNA, 122 bp, Homo sapiens
tctctcacaggcgggctgcagcaggctagcagcaggctgatgcccagggccccgtagtctcggcgcaggtcctgcagcgtgctcacaccggctgcgtctaggaacagcagcggggcgcagtc

SEQ ID NO: 218050 - DNA, 122 bp, Homo sapiens
ccagcctgaatgtaggcacttctatattcaggtttaccaagagcacccacttaggaggcacgaaaccatggttctcatcctggctctgtcccttacagttctgtggtcttgagtaagacaca

SEQ ID NO: 218051 - DNA, 122 bp, Homo sapiens
agcagcgggcgaggcacgcgcaacagatgttatggccgcagtcgagcatcatgggctctgcgaagtactgcaggcacacggggcaggtggtctcctgctgcaggcactcggccacactcccg

SEQ ID NO: 218052 - DNA, 122 bp, Homo sapiens
cttcctgtccctggggacaactgagtgcatcctcttgacagtgatggcttttgatcgctacgtggctgtctgccagcccctccactatgccaccatcatccacccccgcctgtgctggcagc

SEQ ID NO: 218053 - DNA, 122 bp, Homo sapiens
tggagctgggacgtggagtgcgatacgtgcgccatctgcagggtccaggtgatgggtaagcgctgcacgcgagtccagggccgccctgcggcctccgggagccgacctcggggttgggaagg

SEQ ID NO: 218054 - DNA, 122 bp, Homo sapiens
cccacggtgacagaagggaggagggactctcctcatcacggcccaccccgccaccccccccgcccccgcctttaggagttcaggtgcagctgacccacactaactccaaaatagttatccaa

SEQ ID NO: 218055 - DNA, 122 bp, Homo sapiens
tttatgaatggtgtattttcagtgtattcagaacatgatatctagcagaatagattttggcgttaataggcattacctaacattacctattcatgcagaagagggctatttggtgtgttagt

SEQ ID NO: 218056 - DNA, 122 bp, Homo sapiens
ggcctatcggcataacttccgcggctgcatagaaaacgtaatcttcaaccgcgtcaacatcgcagacctggccgtgcggcgccattcccggatcaccttcgaggccagtgggcaggggggtc

SEQ ID NO: 218057 - DNA, 122 bp, Homo sapiens
gaggcaccccattctccagtgtgggcaaatcagtttggatggcaggagacaggaaggaagcggcgcccataggcagccgtgcacacatagcagagtccactaggaaagccagtcggccaggg

SEQ ID NO: 218058 - DNA, 122 bp, Homo sapiens
gaagttctgtgttgtcccgctttatgtacggctgagggcgcgagacctcacaattgggcacgcaagcggcggtgccacgccacaatgagatgatgtaaaaaccggccctgccggaaaccagg

SEQ ID NO: 218059 - DNA, 122 bp, Homo sapiens
cctgtaaacagaaacacatgcacgtgggcatgcgcacgcacacacacacaccatgctcagcgacatcactccgagttggtgacatcctcctgacagctccatcgcacccatgctgtaggtgc

SEQ ID NO: 218060 - DNA, 122 bp, Homo sapiens
ctgggcccctgcatatgcccctgagcctggggctgccacgtgtttaggaaacaaagtatgcgctactgtctgaaaacaaataaagcagatgcctttgttttcagtcgttgactcactggcaa

SEQ ID NO: 218061 - DNA, 122 bp, Homo sapiens
ctgctgtccaatgacaacagtttttgacttttagttaatattagcaatgttcccttgcatcgtgctaattatcacatactgaaagaccaactcttaaaaaagggatccaatgatatatggat

SEQ ID NO: 218062 - DNA, 122 bp, Homo sapiens
actcgccagcgcgcatcacgcactaccagctcaacttccagacgggcctcctggtgcctgcgcatatcttccgcattggccccgcgccagccttcacgggggacaccatcgccctgaacatc

SEQ ID NO: 218063 - DNA, 122 bp, Homo sapiens
cctttcgggtctcattccctcccccgatatgtcaggtgaaatggcactgggcgtaacgggcgcccttgctgtgtttccttgtccgagggaatgactgggtttgcccaggaggaaagagccgg

SEQ ID NO: 218064 - DNA, 122 bp, Homo sapiens
aggcaccaaaatgattttccagtttgaaagcttccccagttacacttggatgcagtaaatcggatgtaaaagctaagaactgatacaaaatcactatttctaataatgttaattataaaagc

SEQ ID NO: 218065 - DNA, 122 bp, Homo sapiens
gactggcatagacccttattcgtcagcccacgctacggccatgtaacccccagcccggcccggacctgaggcgtggtctgaaagccgggtctgcaccctgtcctctgagcctagccccggcc

SEQ ID NO: 218066 - DNA, 122 bp, Homo sapiens
gtctcgagtgctcctgggagcagccaggtctccgtgagctcctgtttactctaaagactccggcagcccacatgtgtgcacgctgaataaaatcgtgctgcgggaccacagtgcggggaggc

SEQ ID NO: 218067 - DNA, 122 bp, Homo sapiens
aaagggtctctgtgggaaggcagggatctgaggtgggagggatggagaaaagggctacagcggtaaagtgaaagagccaggcaggctgagatggaatatactaacagcttgcgcatgggaca

SEQ ID NO: 218068 - DNA, 122 bp, Homo sapiens
gccgcgaggccctgagatgaggctccaaagaccccgacaggccccggcgggtgggaggcgcgcgccccggggcgggcggggctccccctaccggccagacccggggagaggcgcgcggaggc

SEQ ID NO: 218069 - DNA, 122 bp, Homo sapiens
caccctgcaccccagtccctgcttcctcaggagaacccgccacggcctgcgggttcgaggcgatgcagaaccctgattaggaaaaggcacaacctgccgcatgcggaaccagcagctccctg

SEQ ID NO: 218070 - DNA, 122 bp, Homo sapiens
ctgtgagcctcagcaagccttgctgcaagtcttcagagaagcatgagctgtttggttagccgcagcagtagcaaccccattgcaggctgctggctttactaaaaatttcctttcctttttgt

SEQ ID NO: 218071 - DNA, 122 bp, Homo sapiens
agggaagatcatcccccaggccccaagccccactctagagaccctggccccaagcccgcacgacgtgctctggtgcctccaagccaaacattccgggattcggcttgacacacaaggtcagt

SEQ ID NO: 218072 - DNA, 122 bp, Homo sapiens
ttcaatcgtaataaggtggacacagaagaagggagaaaaggcagcctcccggacttccaccgggctcaccctaaatgggggccggcccctggctcctggtaaaatgatggctgaggcctcgg

SEQ ID NO: 218073 - DNA, 122 bp, Homo sapiens
gggtgcggccggcaccgtctctgggcttcgacttccgggtgagaccgtgaaggtgtggcgcgacgttggagaccggggcagcgccatgtaccacagtggatggaaggatgcgcggtgcggcg

SEQ ID NO: 218074 - DNA, 122 bp, Homo sapiens
tcattggaatcctccacccacccaagcagaatttagcagagatttgccttcaaaccctaacggcccccttgttctctggtccttctcaaacccacctttgtaggccacccagcattgcagga

SEQ ID NO: 218075 - DNA, 122 bp, Homo sapiens
ctgacttttccaacggaactccacagttggtaccacaaatttgcattccggtcgtttctacgaaagaccacctgacgtaattttaggctcatgcttttctgtggaaggacagaattactggg

SEQ ID NO: 218076 - DNA, 122 bp, Homo sapiens
gacgccgaggggaaaatggatttaattgattcgttacctctggtattgtaatgcctgctgcgatgtttaaccgaggggggaggaaaaaaaaaaaaaaaaacccttacatttaactcctgtca

SEQ ID NO: 218077 - DNA, 122 bp, Homo sapiens
ggcacttggctgacaccccgacgtcccggctgtctctgcgcggctgacaccccggcgtcccggctgtctctgtgcggctgacacccctgacgtcccggctgtctctgtgcggctgacacccc

SEQ ID NO: 218078 - DNA, 122 bp, Homo sapiens
gtgaagttacacctgagcgtggtcgttgtgaagaacggtctgtccaggaactcccgagaacgtgtggtcggccttgcggtaagcttgtgcactcggagcattccagggacaccatgggacaa

SEQ ID NO: 218079 - DNA, 122 bp, Homo sapiens
cttttggcttgcaggggacaggcagagcgactcagagaaaagtcacctgaggactagatgcggctaatggccagatgagcagctacatttcttatgagacacttctgtggatcgcctttttc

SEQ ID NO: 218080 - DNA, 122 bp, Homo sapiens
cctccgggctatcctgcctctgggctccccaaggggcatgtggaggctgggtgcatgtcccgcctccacccggagcgggctcggctgaccgggcggggtctccctccccgcagagtgcagtg

SEQ ID NO: 218081 - DNA, 122 bp, Homo sapiens
tttgtctttagtgtttttatctgtaaacatgtgtatttattaggatagattaggttatgccgtggaaacaaatgtttccctttaatgtaactttttaagtggtagcagggcaatgagagaaa

SEQ ID NO: 218082 - DNA, 122 bp, Homo sapiens
agaagtgattcatcccacacaaagcccccaccagaacatgacttcctagaaccatgctcccggaaccaatgctgacagaatctaaggtaacaatcacttgtgagtcatcaacagcactgccc

SEQ ID NO: 218083 - DNA, 122 bp, Homo sapiens
aggcagtcccaccgtgttacttacccttcctccctaacattccatagaggaaaaatctggcgacagctgacatcaaggggagatctaaaagagaagggcagaagccacccccaaaaccccag

SEQ ID NO: 218084 - DNA, 122 bp, Homo sapiens
cctgagcccaggcagccgtctactgtccctgtaggttgctttgggttttctagaattccacgtagatggaatcacacaggatgtgcattcttgttgatctgtcactcggcacgattgttgtg

SEQ ID NO: 218085 - DNA, 122 bp, Homo sapiens
tcccaactttttggagaccattaatgagcccaatctagcagacatctcactgtagcagttcggggtctggctcccttctctgggctttcttccatggccacacagtctgcgagactgagctt

SEQ ID NO: 218086 - DNA, 122 bp, Homo sapiens
ggaggggctgtgggggcctgagctggaaagagtcagcccgactgggggtgtcctgcggtacgtgctgtggagaggggcttcgcggaatcgggcccctaacgggtgggaccccgaggccgcgg

SEQ ID NO: 218087 - DNA, 122 bp, Homo sapiens
gcttctgaagagtacgcatctgggatttcttcgtggttggattcgggcgctgcgttctggcgggaaaaccgctggaatgacactacggacttctgggtgcggcttctcagtgttgggaggcc

SEQ ID NO: 218088 - DNA, 122 bp, Homo sapiens
gagctcagggggttgcaccttcagccccacagccgcaagagggcgccagggacgaggcaacgtctcctcccacagagcagagttcccacgattaatcgcctaattagagctgtgattacaac

SEQ ID NO: 218089 - DNA, 122 bp, Homo sapiens
ctcacatcctctcctggcgccggagccacgccagctgcttccagcaccccacaactcgcgcgcacgccagcccctggtcgcgcccaaactgtgctttgaggcccggcccttcccttcgtgtc

SEQ ID NO: 218090 - DNA, 122 bp, Homo sapiens
aagcatgaatcccaaattcagattgtagccctgttctgccagttactatctaaatgatcccgactgctgggtgtagtggctcacacttgtaatcccagcactttgggaggccaaagtgggag

SEQ ID NO: 218091 - DNA, 122 bp, Homo sapiens
gccatctgcttgttttcatgtctggccggaggtctgaggtgccccctttcctggagttgacgcctctcccctgctgccctgtggggtgggagcgcaggtgccggtttctgtcccagatggag

SEQ ID NO: 218092 - DNA, 122 bp, Homo sapiens
gcatcggagctctggggcggggcggccgggctcagagggcgggcgggagcaggcgggcggcgagggcgggcagcagcagcgggagcaggggcgccccgggcgccggggccgctggggacgaa

SEQ ID NO: 218093 - DNA, 122 bp, Homo sapiens
gcccctccacccttcgactcagccaccgagaatccaggcctcgggttcaccctcttcccccgaactgcacggccaggatgtcttatcaggctctgtagcccagttcccaatacaaacaccct

SEQ ID NO: 218094 - DNA, 122 bp, Homo sapiens
gagtgggtgggtgggtctggagaagctatgtgtaccaaccaggttcacatatttttcttccgtgaagctctgtctccaccctctctggagcttctgcctgccttatttacaccccactctcc

SEQ ID NO: 218095 - DNA, 122 bp, Homo sapiens
caggcagccgggcatgcgctgacacctggccacaggtatttttgccaacacttcacattgcgactccccagtagcaggcgcggaggtggtcctgacacccacttgagactccgattttcacc

SEQ ID NO: 218096 - DNA, 122 bp, Homo sapiens
ggtctgatcggaatcttatgtgcccacctaatccttttcccaaggtgagcactatgacaacgaacttctgtgcaagaggcaggcagccaggaaccagaatgggccttgaacatgtgggagct

SEQ ID NO: 218097 - DNA, 122 bp, Homo sapiens
aactaaaaaaaaaggccgccttgacctattcaccctccacttcccgtctcagaatctaaacgtggtcaccttcgagtagagaggcccgcccgcccaccgtggacagtgccacccgcagatga

SEQ ID NO: 218098 - DNA, 122 bp, Homo sapiens
tcctgggtgcatttcgtctgtgtcagattggctcatttccatcggtctgcccatgtacgccggcaccctctccaccgcgggcttcagcacactgagccaagtgccttctctgtctcacactt

SEQ ID NO: 218099 - DNA, 122 bp, Homo sapiens
aaggtgctgtcccgcagccccatgtcctcctcagcataggtgaggatggttttgagtgaacgtcgcaggtgctcttcactgaagttctgcgtcgtccccaccagggacgagagagacatggt

SEQ ID NO: 218100 - DNA, 122 bp, Homo sapiens
gctccctgggctcaccgccttttaggaccaggggcacaggcgaccatggcaggccgggagcgggtggggcgggtgcactctggctgggggtttgggcagcaggtccccacagtctgctggag

SEQ ID NO: 218101 - DNA, 122 bp, Homo sapiens
cgggcagctgggagagtgacagggaggctgagaaggggccgctggatcccgcagctggcgcgcacatagtgtctgctgccctggaggggaggccaaccagttagaagacgtctggcttcagg

SEQ ID NO: 218102 - DNA, 122 bp, Homo sapiens
ctgtgtttcaggcttaacaggtcactgtcaccaagacaaacaactgagattcctccctcccgcttacgcccaccgcagagatttccaaggggtgaaagacccggcgcgtcacctctgcagct

SEQ ID NO: 218103 - DNA, 122 bp, Homo sapiens
ggtgagagtggctgacaccgacccaacgtccgggttgccggaaggctgcagcgcccggagcggtgtcgggcaaaccgctaccctggtattgctggagcctctcctggggacttttgaacagg

SEQ ID NO: 218104 - DNA, 122 bp, Homo sapiens
ccggcgcggcccgcgggggtcgggacaggtggccgggcctggccgggaacaatggggggccgaggctgccccctggcgctcacctacctccggtgccctccgagttctcgttgaggctgccc

SEQ ID NO: 218105 - DNA, 122 bp, Homo sapiens
tggagggcgagcggaggcgcgcgcgtcctcgcccgcagccgccactcctcccaccccgctcggcttccagctcctctacgcttgtcccgagtgcacctagggcaggaggctgcttttttcct

SEQ ID NO: 218106 - DNA, 122 bp, Homo sapiens
tggtttgccctctagagcgggaatgaagcggtgcacggtggaacagtggctgactccagccggtcgccgagctgaccacgtggtgctgggccggccacgtggtgcagccgcgtttggacacc

SEQ ID NO: 218107 - DNA, 122 bp, Homo sapiens
agcttgcagcgagacgagatcgcaccactgcactccaacctaggtgacagagtgagactccgtctcaaaaaaagaaaaaaagtttctgctggtgtttaatctggataatcaatttaattctt

SEQ ID NO: 218108 - DNA, 122 bp, Homo sapiens
gaatcaccagcactgcggctaaaggggctggtaggctctcctgcaccccgcgtgctcctccgccttctctgtgtcccccggcttttccaggaggaagatggggtgcccatcgcgaatggggc

SEQ ID NO: 218109 - DNA, 122 bp, Homo sapiens
gagcaccgtggccctcccgagcggtctgtgcacgcgtgcacacacccccgctcccagaggcgctcaccctgccctgttgtctctgtcctacagaccgacttcgagaaggacgtggatctggc

SEQ ID NO: 218110 - DNA, 122 bp, Homo sapiens
gggaccacttccacttccggtccgacttctagcacctccccttatggactgttgatattgcgcatgctctaaattaacttggaagccaatttcagcccacagtcaacagggagcacacacat

SEQ ID NO: 218111 - DNA, 122 bp, Homo sapiens
caccctgactggcgcattcttactcattctagcctgggtttcaacttcaaggagcttcagcgcccctcactcccttgccctgaaagctggctaaactacgcaccttttctccccttttgaaa

SEQ ID NO: 218112 - DNA, 122 bp, Homo sapiens
ctcctctccccagcctgggaagatgtctcactgtccacctcccaacgggctaggggagcacggggttggacaggacagtgaccttgggaggaaggggctactccgcccacgtcagggagaga

SEQ ID NO: 218113 - DNA, 122 bp, Homo sapiens
cttgttcctgactttctagtaccaaccgcaatgtaaaactatttgtgctccactgcaagccgagcaccatagattttatgggactgacatactttttttttatttaaaattcttgctttgtg

SEQ ID NO: 218114 - DNA, 122 bp, Homo sapiens
agtgtgtgtggggctgataggagtgaggaaaggaggtcggacagttatgccagcccctatcgagagtcccagcaatacaaagaacagggccagggtttgctccaggatttccccagtggact

SEQ ID NO: 218115 - DNA, 122 bp, Homo sapiens
tttgaagaggacataggttttatactaatgaactatatttcttctactaaacaagtatttcggggctgaatcgatcaaaatacatttattgactataaagccatgcctgtgtaccacctaaa

SEQ ID NO: 218116 - DNA, 122 bp, Homo sapiens
gagactccagaggccggcaacatactgaaatgccctcaggagcctttagtccaccctctccggggaaaacaaggctcagaaagggtgcattaccaccttgagaccacccagggacacccagg

SEQ ID NO: 218117 - DNA, 122 bp, Homo sapiens
ggcctcacccccttcattctctcactctaaaacctcccggacaaaccactaaaaacgatgcggctgtcgtggtggtgggtcatttggttttgggtcgcgtgacctcagtgagtgtgtcccca

SEQ ID NO: 218118 - DNA, 122 bp, Homo sapiens
aggggccgaatctcacgagctcggtcacttaggacaatgtagacgccctttctgggaggccggggctcagttcagagaggtcgaggtggcgcggtgcagcggtgctctcctgcaggaacagg

SEQ ID NO: 218119 - DNA, 122 bp, Homo sapiens
tccctgcatcgccgtcgccatgacaccatgtgagccgcacaggtcacactagagaagctgcgctggtatctttcctggtcgtgtgctgaggttgggacaattttttcctctttgacttcagc

SEQ ID NO: 218120 - DNA, 122 bp, Homo sapiens
tgtatttgtagagtctgcaaagggacatttgggagctcattgaggccaaaggcaaaaaatcgaatgcccaggataaatactagaaggaaactatatgtgaaactgcttagttatgtgtgcat

SEQ ID NO: 218121 - DNA, 122 bp, Homo sapiens
gcgcatgcactagctggccgcaagctcgcaaagacgctggctctaggtagccggttttcgcgagtttgtggcacagtgttggactgaacgagttaaggaacctgttcaaggagggactcgtg

SEQ ID NO: 218122 - DNA, 122 bp, Homo sapiens
gccttttgctggcttggtttgcagggaatgtgttctgggcaggtgatggcgctgcctctccgcacggtgacatcagccagagagaactgctgccggggacgggagggccctgggaatacaga

SEQ ID NO: 218123 - DNA, 122 bp, Homo sapiens
cacaggtgcggcggagggcacgggcgatactcggggtaggaaaggcctttctccgccaggcggcgccctctgtccgactgggcggggcgcgcgtgccgaggggcctggggccgggcccgcct

SEQ ID NO: 218124 - DNA, 122 bp, Homo sapiens
gggtggcacagtcagccgccttggggacacaggacataggggacccaccaccgccactgccgctcccgcagcagctcgtgccgccaccacccacgcctccttgctgcagccagcgtgacgac

SEQ ID NO: 218125 - DNA, 122 bp, Homo sapiens
ctgcgcctgcccaggcggccgcacgctcaggggcgtggcatgggtgggtcgtgagttgggcggggcccacagggcgtgcgcgacgcagcggcgcggcgcgtggcgtaaggggcgtggcgcca

SEQ ID NO: 218126 - DNA, 122 bp, Homo sapiens
tgttcttgctttttctttgagactgggtctcactctcccccaggcaggggtgcagtgatgcgatctctgctcactgcagcctccacctactgtgctcaagcagcgatcctccctcctcagcc

SEQ ID NO: 218127 - DNA, 122 bp, Homo sapiens
tagattttcttagacacagccttacacagccttcatagggcctcccatttgcctggcattcgaggctgcacattacctaacccaaatcacacctttcttctcactactctcgaaaccataca

SEQ ID NO: 218128 - DNA, 122 bp, Homo sapiens
cggaggggccgcacacaggtcgtctggcgtctgtgcaatgctggtgtctgatgaatgtgtcgcgctggtgtctgacgtccatgcggggctggtatctgacaggcagcagtgccgcttgctga

SEQ ID NO: 218129 - DNA, 122 bp, Homo sapiens
gcttccatgcaaccggggcatgaagcagggcgtgggtccaggagggagaagatccaaagtcgaatgttgtaaagatgtgctgatttcccagcgctgtctctggggagctccggcagcgcaag

SEQ ID NO: 218130 - DNA, 122 bp, Homo sapiens
aagcacagaaaggatgaaatgtcgtgtcgtgagaacagaaccacagcgggtgtcttactccgttctggagacctgcatttgggattaaacggcgtatgagacttgccaataagtcagaattt

SEQ ID NO: 218131 - DNA, 122 bp, Homo sapiens
ctccagagcgaaactacaaacctctctctgatgtttctgagaccctagcacaaagctgggcgtggagaaggttttactgcacttttatctgaatggacaaaccaatgagtgagtgagtgatt

SEQ ID NO: 218132 - DNA, 122 bp, Homo sapiens
tccctcggaggtttgggggtggcggcgcccagcctgcctgtcatgagtgctgcttcacagcgccgccggtgcacctgctcctaggcttgctcggttcaggggtatgggccagttccgccccc

SEQ ID NO: 218133 - DNA, 122 bp, Homo sapiens
acactattcccttcacctaccaatcgctgctggcccgggcgccgctggactcctaggtaacgtcgcaggcggaaatgacgtaactcaatccgttctgtcccgccccattgccctcctagccc

SEQ ID NO: 218134 - DNA, 122 bp, Homo sapiens
tcgtggccccgagacgcgtcagaagcggccaatcagaacccgtcagtgggggtggagctccggcgccggagtctgacgagagaagggaggggaacaaggatagagcgctcgccaacggccga

SEQ ID NO: 218135 - DNA, 122 bp, Homo sapiens
ggaggcgggcctcggattgggcctcacgtagtgggctggacagaggatggagcctcttggcgtaagcgcggttgggcggggcattcctggattggcccactccggcgtcgcagaacgcttgg

SEQ ID NO: 218136 - DNA, 122 bp, Homo sapiens
ccagcgaggaaaggccctaacactaattaggtttgaaagactacaggatgaggccagccacggcatgctgagaagaaaggaacctgagcagctgatgctaagttcagactaaactagctgca

SEQ ID NO: 218137 - DNA, 122 bp, Homo sapiens
catgggcgtctggtagacacggatgccatatgggcgtctggtagacacggatgccacatacggcgtctggtagacacggatgccacatgggcgtctggtagacacggatgccacatgggcgt

SEQ ID NO: 218138 - DNA, 122 bp, Homo sapiens
gcagcggctcctcaaggcggcgggcgccggcgtcttcagagcgccatgcgaaccgcggagcgagtgtggcatctctaccaggcggggtaccagcctctatgccaggccatatgggcttggca

SEQ ID NO: 218139 - DNA, 122 bp, Homo sapiens
atgctcaggccagggcctctcaaggcattttgtggagtgagtggcaggctgcacctcaaccggcctaatgaaggccggcttttatatcataacctcatttagaactcagtcacccccacttt

SEQ ID NO: 218140 - DNA, 122 bp, Homo sapiens
ctgcagctgttcaccactgtcggggcaaggttccgtcacactgcttttatagccattcaacgtatttggttcaagcttgatgtcagaggcctccttcagatttgttcttgtcctcactgacc

SEQ ID NO: 218141 - DNA, 122 bp, Homo sapiens
atctatttcataggactcttgggagcatcaaatgagttggcccacctagcaagcaccaaacgcacattagctcttgccagtattactcactcccttatattaattcttcccagttcctcctt

SEQ ID NO: 218142 - DNA, 122 bp, Homo sapiens
gaacttcccttgtggctgggtcggcaaaaccgaggcccacatcccagatagagatcaaatcgccctcccccaccgggggacttccgaaattacctctctggatctggaagcttaattagctg

SEQ ID NO: 218143 - DNA, 122 bp, Homo sapiens
agttgtgcacaaccatgcctagctaatttttttgctttctgtagatacaggaactcactacgttgcctaggctggtcttgaagtcctgggctcaagtgatcctcctgcctcatcctcccaac

SEQ ID NO: 218144 - DNA, 122 bp, Homo sapiens
ggtgatccgatcgcctcggcctcccaaagtgctgggattacagacgtgagccaccgcgcccggccctcatgaacttattctttagcgtttcattttgagagcgggattcacaagggaattgc

SEQ ID NO: 218145 - DNA, 122 bp, Homo sapiens
atcacacttccatagcaacacactctgttttctaagagtcctgtagtggtgagaacagaacgggcaggccagctcaggggagactgctgcttccttcagaccgtgcagcatgaaacagtgat

SEQ ID NO: 218146 - DNA, 122 bp, Homo sapiens
caaatgggcccagccttatctctactctctaacctctcatacagagatttcctctggggacgtctggatgactgtaaaagagaccaagaacagttaagatgatttccagttgctgacatgtg

SEQ ID NO: 218147 - DNA, 122 bp, Homo sapiens
ctcactgtcattcccgactggactcagggcccggtggccacttttagacacgggtcttcccggctgtaggacggacagccggaatgccacacactgtttccacccccgctcaacaccgatcc

SEQ ID NO: 218148 - DNA, 122 bp, Homo sapiens
tctggtgtctacacagaggagggctcctatgatctcactcagcttggggtccacacgccacgaagactttgcttgatccagttctatagaagtgcagggcgtgattgcgaagtcaatgctac

SEQ ID NO: 218149 - DNA, 122 bp, Homo sapiens
aaggtcagttgtgatgtacattgcctgttggcactgtctagggaatgggcctcagctccccgagtcccagagagcttggctgagccctggtgttcccacctcctcagagccatgaggcagga

SEQ ID NO: 218150 - DNA, 122 bp, Homo sapiens
ctctttccagaaaggcttccggaacctttctgcattgccttctgcccggacgtgcggaagcgaaggccggaagtccttagccggtagcttccgggtttcctgggctactacgatggcgatga

SEQ ID NO: 218151 - DNA, 122 bp, Homo sapiens
gaaatgagtcttgcagggttggcatggtgccctcaatgtcagggtccaggcttctttacacggaaccctgttgctccttgcacagtatcttgttactgcaccatcttcagcatgtgacttct

SEQ ID NO: 218152 - DNA, 122 bp, Homo sapiens
aaggacttcccacattccttacattcaaacagtttctcacctgtgtgaatgttcttatggcgattaagcagggtaagaagactaaaggcctttccacattcgttacattcaaaaggtttctc

SEQ ID NO: 218153 - DNA, 122 bp, Homo sapiens
cgtgacggccacttctgcctaaatcgttaggaactatttcagagtccctgcaacctgaaacggggattctccacacacctccacacggccagcagcgcagtaatcgcttttaattaaataaa

SEQ ID NO: 218154 - DNA, 122 bp, Homo sapiens
catgttttccctctgcctaggatatcttctccttcattgctttttcctctgaactgtttccgttttgaagccttttctgcctccttcaggccgactcatgacgttcttcctttctggaccac

SEQ ID NO: 218155 - DNA, 122 bp, Homo sapiens
tgtcttattcaaacccttcacttcctctctaatgaaatgacgctgttgtctaaagtcttccgtgttgtccaccagcagctttaaatcaattcatattacacaattgttgaatttaaaaacaa

SEQ ID NO: 218156 - DNA, 122 bp, Homo sapiens
cattcttccatcaacagcgcaccaccttgatcactgtggttttacgctaagtcttgaggtcggggagtgtcagttttccggtgttgttcactggtgttgtgctggccattgccatcttttgc

SEQ ID NO: 218157 - DNA, 122 bp, Homo sapiens
ccctggcggcccttcctgtgacttttgcgccccgcgcctggggtggggggtgcgaagagacgctacgttcctttccgatggaggaaggcagacctgccgtcacacgtgtgcttgcacgagtg

SEQ ID NO: 218158 - DNA, 122 bp, Homo sapiens
ccacgctcccacccggggcgccagcttggcagcgacctcgccccctgcccaccccaccgccggtgtcggcttccaaacccagggcctaaaatgactttgaagaccttttttttttttttaaa

SEQ ID NO: 218159 - DNA, 122 bp, Homo sapiens
cctaccggctgccggagctggacccaaggggctcggacgaggagaacctggactcggagacgtcggccagcaccgagagcctgctggaggagcgggccgggcggggggcctcggaaggtcag

SEQ ID NO: 218160 - DNA, 122 bp, Homo sapiens
ttcatttcaattgataaaatcccagctttcatttcctatagatgaagaactgccagcatgcgaatgctgaacgtcctactgttgctcggatctcatctgtgcagttccatcccggtgcacag

SEQ ID NO: 218161 - DNA, 122 bp, Homo sapiens
tgaggcagaacccagggctccccgagttccaagtccacgctcccctgcacacgggcccaccgccgccctttccagagagaaaaagaaatttctgtctaaagtcagtcagaacacccccagac

SEQ ID NO: 218162 - DNA, 122 bp, Homo sapiens
attgtggggcgagagggggactggaatgagggcgctaccaaacgtgaggcctgtagagggcgctaccaggcagtgacatgtggtgggggagtgattgatggcgctaccaaatggggagtcct

SEQ ID NO: 218163 - DNA, 122 bp, Homo sapiens
gtaaaacatctctcacctctcaaatgatatgacttttctataatctttaataagaccaaacgaaacactggatacaaaatcacccaaagatacaaaatcaccaaagatcattcaataataaa

SEQ ID NO: 218164 - DNA, 122 bp, Homo sapiens
cgtttcgtggagcgccacgcttagggcaatgtgatgctggggatgcggggtgaggagggccggagatgcaggcccgccctcctgtgaggctgcccctcttatgtgctgtgggccccggggcc

SEQ ID NO: 218165 - DNA, 122 bp, Homo sapiens
ggtgcccgtgacgtacgagctgcccacactgtataggacggaggactattttcctgtggacgccggggaagcacagcaccacccccgcacctgccctcggcctttgtgagctttgtggtctt

SEQ ID NO: 218166 - DNA, 122 bp, Homo sapiens
gctgaacatagccctttccatttctggccactgcaattgaatgcccttggagaaggtctccgcatggtgctaacttggtaacaatcaataaatgtgaaggtctcatcataaacaaagcctcc

SEQ ID NO: 218167 - DNA, 122 bp, Homo sapiens
ggcgcgcctggggccagcctgtagaccccagagtccggcggcaggacccccggcgccacccggacacctggcagcagttctcgcctgccctgcagccgcctctgcatggagaaagagaatga

SEQ ID NO: 218168 - DNA, 122 bp, Homo sapiens
cacgccctcgtcgcgtccgctgcccactctctcctccgtggtatttcctgtgtgaccccacgtggctcctggacagcaccgcatggagcctctgctactgtgtgagaggaagccacgttccc

SEQ ID NO: 218169 - DNA, 122 bp, Homo sapiens
tctgttccccagccattcagatggtgaaaatagaccttactgtcacccagccaccttctccgacagtgggtgcctcaactctgggcctcaggattggagagggagaggtgatagaactggat

SEQ ID NO: 218170 - DNA, 122 bp, Homo sapiens
gtggaggtcagcgtgctgggaaactggtggagggaggaaactgcggggagctggtcttctcgtgttacctctgttaaatcgctgacagcagtttaaggtccaataggctggtactcaaatgg

SEQ ID NO: 218171 - DNA, 122 bp, Homo sapiens
ttcggccagggcggctcgctgcccattctgctggacgatgtgcgctgcgcgggctgggagcggaacctgctggagtgccagcacaacggcgtgggcacccacaactgcgagcacgacgagga

SEQ ID NO: 218172 - DNA, 122 bp, Homo sapiens
tctccagggatggtcctgcctcctgtccttgggccctcccagctgcttcctttgctcctgcgctgaggaaggcttttgccccccagtggggcagcatgggccctccctgttgccggcatcgt

SEQ ID NO: 218173 - DNA, 122 bp, Homo sapiens
caatgggctcttcctgctccttcttcctggacggggacccacaagtgtgtgctgggaattcgagactcactgcccagtggagccatcccctggcctcagagcggtaggggaggcccaggcca

SEQ ID NO: 218174 - DNA, 122 bp, Homo sapiens
aggctcattcccgctccctcctccttctaaagtcacttttccaggatgaactgcaacggacgctcgcagggtcaaccacgtgctggggagaggagcccacggaagcagcggcctcccggggc

SEQ ID NO: 218175 - DNA, 122 bp, Homo sapiens
cccctccgggtggcggcaagggcgccggtggcccaggctcagggcctctgtctggcgccacgtcctgctgcccagagctggggcgctcttctgggctgacttccaaaagtggcttctcctcg

SEQ ID NO: 218176 - DNA, 122 bp, Homo sapiens
atggccgtattccggtcgggtctcctggtgctgacgacgccgctggcctccctagcccctcgcctggcctccatcctgacctcggcggcccggctggtgaatcacacactctatgttcacct

SEQ ID NO: 218177 - DNA, 122 bp, Homo sapiens
tctaaccggactccgacctcaagcgccagggcaggaccgcgacctcgcccctgaaatacccgaaccgcataccggcccccgggacagggaccctggccccccccgacaggctgacgcccacc

SEQ ID NO: 218178 - DNA, 122 bp, Homo sapiens
cgccaactcggcgctgtccaggccgccatcagacgcctccagccgccggagcagcagttccgccacctgaccatccgccatgactccttccagtgtgctcagcgtgtccgggcccgggtggg

SEQ ID NO: 218179 - DNA, 122 bp, Homo sapiens
ctccgagaagaaagagtgtggcccggggcgggcgcattaggaggtgtcgaggccgtggcccggaagtggtcggggccgctgcgggcggaagggcgcctgtgcttcgtccgctcggcggtggc

SEQ ID NO: 218180 - DNA, 122 bp, Homo sapiens
tgttttcaggggggtgtcatagccccgggtttggccgccccagccccgccttccccgccccggggagcccgccccctgccccgcgtccctgccgacaggtgagtccccctcgtgggtgcggc

SEQ ID NO: 218181 - DNA, 122 bp, Homo sapiens
actcaagctctgggactacagcaaggggaagtgcctgaagacatacactggccacaagaacgagaaatactgcatatttgctaatttctctgttactggcgggaagtggattgtgtctggct

SEQ ID NO: 218182 - DNA, 122 bp, Homo sapiens
agagagatttgaatatacattgcttcaaggatgcaaaaaattacaacctggaaaaggcttcgagtaactttaggaaaatgagctgctggactcctcagtcaatctgtcctttctagtcaatg

SEQ ID NO: 218183 - DNA, 122 bp, Homo sapiens
gaggcgggcgtgggggttggggcgccgggatcggggcgctgggatccaggcgcgagggtccggacgcggcggcggctgggccggcttcttcctcagtggcggcggcggcggctcagcgccgc

SEQ ID NO: 218184 - DNA, 122 bp, Homo sapiens
gggagggtagacggggatagagtaggctcaggcatcgggggcctcagtatggagcctgggcgtcccattcccagtagctcctgcccctcccagagttgacaggtgggaagtagcttctctgg

SEQ ID NO: 218185 - DNA, 122 bp, Homo sapiens
tccgacccggatcctcaggccccgcctcccgcccaccctgtcttcggctggcccacccctcgcagcccctggccccgccttatgattggccaggtcccctctggaccccgcccatctcctcc

SEQ ID NO: 218186 - DNA, 122 bp, Homo sapiens
tcttcctgtgtggcctgacactgtgcactgtgaggttaaggaggactcagcggtattcaccgatgagggcaagaccaatctctaattcagatttggaacttaggcagatttcaaaagccctc

SEQ ID NO: 218187 - DNA, 122 bp, Homo sapiens
aagttgccctctctcattgcccactcaccactactagggtcctgtggggtgcgggggtcccgaggaaaagaggtgaaaaggacgacgtggagctggggatagtgttgatggaaataatgctt

SEQ ID NO: 218188 - DNA, 122 bp, Homo sapiens
acgagcttgtgcttcttccagtcctgacgctggtgctccttgcagcagtagaaggagctgcggcagcggctgcagcgcagcaggttctccatcttcccgcacagctcgcagtactgccggtc

SEQ ID NO: 218189 - DNA, 122 bp, Homo sapiens
gcgcagtgcgcctcggaggagctgtgtgtatgtgagagtctgacgggttcaaaatggcggcggctgcttcagcggctcctcctgtgtgagggaaacaacacccctccccggcagcggcggcg

SEQ ID NO: 218190 - DNA, 122 bp, Homo sapiens
ctagagcgtccctcggcttctgggccgagtcccactcagggccattcaaacgcggccgcgcgcgcggcctgccgggatagctgggaaaagtcttaacaagccaattagctcctcagaatgcc

SEQ ID NO: 218191 - DNA, 122 bp, Homo sapiens
ggccgagctgtggcttgaggttcagggccgcttcactgtgtgctgataatcgggttccagcgcttgtctttcagcggtttgtaggcgttcttttacatcctttcttctcattagtacttgaa

SEQ ID NO: 218192 - DNA, 122 bp, Homo sapiens
ggaatataaattggtataaccacattagaaaattcttttgtagtttcttttaatgttaaacgccgtgtaatttcactcccaggcagttgcctcagggaaatgaaaacatatatccacaaaaa

SEQ ID NO: 218193 - DNA, 122 bp, Homo sapiens
gcaggaagctctggtgatgacaccccaggggcgtgtgtgaaacggattcaggctgccaagcgttattcactgtggagagattgtcatcaccagagccgtgtctaaaggatttagccagggct

SEQ ID NO: 218194 - DNA, 122 bp, Homo sapiens
tgcagtgacgtggtagccagccggcgatccactccagcaggcgcttggtgcaggccatgacgtcctccaggaagaacaccatcctgcgagaggcatgggggttagcaggagcgacggggccc

SEQ ID NO: 218195 - DNA, 122 bp, Homo sapiens
ggcctcctctgaagcagggaccagagggagccaggcagctgtgtacagtgagaagggatccggatgggggagctctgtacagagggctggtgattgtaaaaatttcttttgtaaagtagaag

SEQ ID NO: 218196 - DNA, 122 bp, Homo sapiens
catcagccagtgctgctgggaaccggccggaccccacctgtctgttgaagtacaggaagccgcggggacagttgacattgtggaatggagcgaaagagtcgaccgggccgtcgatggccatg

SEQ ID NO: 218197 - DNA, 122 bp, Homo sapiens
actgactgggcagcttctgaagccttttttcctcaagttctgctcagctctgtgctgaagcggaatgctggctgaactggtccccacatccctggttctcctgttatgactcctgtggtgag

SEQ ID NO: 218198 - DNA, 122 bp, Homo sapiens
acctgggggccaggagagtggaggctcagggctctccatctccaccactgcctgactccccgtcttgaggacagggccatcgggcactcaccctccgcatggcgggccggaagctctgtgcc

SEQ ID NO: 218199 - DNA, 122 bp, Homo sapiens
ttattctgaatgctactctcaatagcaggttctttgggatggaacctcataagcatattacgttttgttttgcaaattaagaattatgccctatctaattggaaaaatgaatagattctatc

SEQ ID NO: 218200 - DNA, 122 bp, Homo sapiens
ccagaggcttcaggagctgctgggggtgatccccagtggtccgctgtggtcctttatctccggctctgctctctgctgctgctctttcgcttgctgggtggctgggctggtcctaaggaggc

SEQ ID NO: 218201 - DNA, 122 bp, Homo sapiens
tccccggggttggggcttggtccgcccctcgcaacccggaggacccgtgattgacaggttcgcagtgatgcgccctggccaatcattaccgagcccccgttcggcctggctggaaaaaaaaa

SEQ ID NO: 218202 - DNA, 122 bp, Homo sapiens
ttctgaaaaaaaagggggaaatgtgagctctcttctgattggtgggtgacgattttagtccgcaccaatgagctggcggcctcgtctgtatttatttagtgctctgggggagtttttctctt

SEQ ID NO: 218203 - DNA, 122 bp, Homo sapiens
aagcgcccccaggccggcggcccccacccggctaaggtcgccagcatcccgcatcccgtgcgacctgcgtcccagaaacccagcggggaaattcttcccggtgcgctcttgcgcccgcttgg

SEQ ID NO: 218204 - DNA, 122 bp, Homo sapiens
ctgggaccaggccggagccggcctcgccgggagacttgtagccctcgccctgcggtgacccgtggctggccactggcctcaaatgttgaaaacgggcagatgggcaagtaatacactctcaa

SEQ ID NO: 218205 - DNA, 122 bp, Homo sapiens
acatgtaacaacaaaaacaaaacccttctttggcagaacagccaatcctgatactgagaccggaaggaaatgtttctaagaatccttcagaatcaggatactctgtggcggtgctgcaggac

SEQ ID NO: 218206 - DNA, 122 bp, Homo sapiens
gccgtggaatctggtaagttcttaggaaacccactcacgggcctgagtcccccgtggaagcggcgacttcggcacctggacacccgagtccccagagccccgggcggccgcgcgtccctacc

SEQ ID NO: 218207 - DNA, 122 bp, Homo sapiens
aatctcctgtatggtgaaacactggcacccagacaaaccctcattcacatcagaacaaagcgctagttatgtgtgttgaaattccttaaagaaaatgtcttgcaggctgctggggagtgcgt

SEQ ID NO: 218208 - DNA, 122 bp, Homo sapiens
aaggctcatcaggagagggtaaggaagacagtgatggagtaagggatgttgttagtgtgtcgcagagggaagggtatgtgggaggaaacagtttagactcagcctacagcttggaaaagccc

SEQ ID NO: 218209 - DNA, 122 bp, Homo sapiens
ctgtgggcgaagggtagatactcatgttgtcggtggtgtagtccaggaacttggcccgggcgtagcgctcaatgtcgtgggaatcatagtccccccagcgcaactggatgtcaatccagtat

SEQ ID NO: 218210 - DNA, 122 bp, Homo sapiens
tacaacgatatagaatatgacaagtagggttttaatcgctgcaagctgcaacactgaacacggtctacattgatcctcccccttctccttcagcatcaatgttaataaaccgaggaacttaa

SEQ ID NO: 218211 - DNA, 122 bp, Homo sapiens
gttcaaatggagcagccgtgcgggggcaggacatcccagcacaggggactgtgagagccacgacgtgggccctggaaccctgtggtagatgcagagaaccacaaacatttccgtacggctag

SEQ ID NO: 218212 - DNA, 122 bp, Homo sapiens
gcagcgagtgtagccattggtctagcagagagacgactaatgaggtctcaattgtgtgggcgggacttctggcggcgccctcatggttgcgttagcatggctacctagggatctgttcactg

SEQ ID NO: 218213 - DNA, 122 bp, Homo sapiens
ttgtgcaggatgctggtggtgcagcgggctgtgtccaggtcgctggtattctgcatggtacgcacgacagcggccaccagctggggcgagcccatcagggcccgccgcgacgcctccttctt

SEQ ID NO: 218214 - DNA, 122 bp, Homo sapiens
gtcgtcctggccgctcaggactcgccgcagcttctccatggccctgttacagggccgtagcggccgccactctgttgcctgcccctgacgcccaccaggaaaccccgaacccgaaaccccac

SEQ ID NO: 218215 - DNA, 122 bp, Homo sapiens
cgccgggccggtgaagtctggtgctgccgagcccgcttagaaagcacggccgcgcgctgtcggacgcaggcccacaggcccagccgacccaggcagcaattttcctagccccgccgccgttg

SEQ ID NO: 218216 - DNA, 122 bp, Homo sapiens
acttcctcctcccggcaaccaccgtgggggggctgaaccagctggacaggagctccagctcggccacgcacagccccaggtccccctgcagccggcagctgccccgcacctctcgggtctct

SEQ ID NO: 218217 - DNA, 122 bp, Homo sapiens
gaggccccttgtcctgcctacctgtacctccaaggccgaattgcaactggccagcggggacgcggcggtggggtggggcgggggggggggggcgggtggtgcggggagaaagggaagcagag

SEQ ID NO: 218218 - DNA, 122 bp, Homo sapiens
gcctccccagcacccccgtggtctgcaggctcccccgagcagaggggcagtgtgggaggtcggcgagggcgtctgtccgggggtgccaggcgcccggggagcagagatgaggaacattcatt

SEQ ID NO: 218219 - DNA, 122 bp, Homo sapiens
ataattcacattagtataaatactctaaatagtccttctctgtcctggcagaaatcctcacgtctaaactcggggtcctcttttttttttttttttttttttagtagagaaggggtttcacc

SEQ ID NO: 218220 - DNA, 122 bp, Homo sapiens
cgtcgtcactaaaacccaaaccagaatcacacacacttcatgctcctgcagggctggatccgcgtcttggagggcctgaaatttctacgttttgcaaagacgctcttttaatacaaaagaaa

SEQ ID NO: 218221 - DNA, 122 bp, Homo sapiens
aacacagctcccccccaaccccccccccctttttttttcaagttaagtcttatgtgaaatcgcagtatattaaatagaagcagaattgctttgggactgggttggggaggatctggaaccca

SEQ ID NO: 218222 - DNA, 122 bp, Homo sapiens
tcacccagagggggtcggcacaatatctgtggctgagtttttgccctcaccccactttcacgcgtccttagggcgctgagcgctccctgcagacgcttcttcccggggcttaccgagcagcg

SEQ ID NO: 218223 - DNA, 122 bp, Homo sapiens
ggcgcacgcggcccctttaaggcgcggggcattgtgggtgcggggagtggaattttggaacgaaatgtaacgaagagaagtacagtagtaagagtaacactgtagccgccaccggcaagggg

SEQ ID NO: 218224 - DNA, 122 bp, Homo sapiens
gaagaggcacagaggaagtcaccgtccctgaggccatgtatggctgtgtcttcacgggggcgttcctggagtgggtgaaccgggagcggcgccatgtccccctgcaaacctgcttgctgacc

SEQ ID NO: 218225 - DNA, 122 bp, Homo sapiens
cttttcaaatgacgcttgtggtcagtgcactgtgactgactatgattgtgtaaactgagccgcatagagccccaggatttcttggatttcacaatgttgttggaaaagttactacagtggga

SEQ ID NO: 218226 - DNA, 122 bp, Homo sapiens
actggaaatttgcagagcagctccaccggttgaaagttggctttgtttagtgcccaacttcgcagaagattttcctcggctgagtgggcttggcagagccccggcttgagagggttgcttag

SEQ ID NO: 218227 - DNA, 122 bp, Homo sapiens
gggtctcgagattcccgggtgatgagcccggaggggcgaaggcctataaatgtctcacgacggaagaccaaggtgtgggattggcaaagagagagcagagcttcctcactggcaggggctcc

SEQ ID NO: 218228 - DNA, 122 bp, Homo sapiens
gttccttaaagcctggaaacactttccatttcagctttcacagctcctaggacataatgacgtaactgtgcactacacaaattactaacatcaacattatcatatctgttttggcaactgag

SEQ ID NO: 218229 - DNA, 122 bp, Homo sapiens
cccaaagtctggctcccactctgcgcaggcctgtgggatttttaagattgtggatatttacggggaagggcagcgggggatgactaagatgacaggaactcataggcctggctaacttgatt

SEQ ID NO: 218230 - DNA, 122 bp, Homo sapiens
atcagagtttggcacttttttcttcaaagttacggtgcaggtgactgaggacagctgttgcgagcgctgcttcttggttcccccggaatgggaggcatcacgtgcggcttccaggaggccac

SEQ ID NO: 218231 - DNA, 122 bp, Homo sapiens
ccactacccccggaggtcagcgggccgggcaggggtccgcaggctgcggacatattagcgcgtgcgtgttgttgcggggcgggggtaggggagggacagacctaagacttgtccgcaggccc

SEQ ID NO: 218232 - DNA, 122 bp, Homo sapiens
cccgcttcctcccagcccggactgtccagcttcgagccgcacctgcacctccaacctgagcgtagctctggcgccttggctccggcctggttccgaacccaggcctcggcccatccctcccc

SEQ ID NO: 218233 - DNA, 122 bp, Homo sapiens
aggcggcgtggagatggaaggcggcgtggagatggaaggcggcgtggagatggaaggcggcgtggagctgctgagttgaaggctagggcaaaacggagaagaacctgagcaatgcaccagca

SEQ ID NO: 218234 - DNA, 122 bp, Homo sapiens
agaagcatcccttatgcagcgtgacatactcccggaggaagtcggcggtgagcccctcgtcgccctcaaagaagagtacccccggccgattggtaaccagcaggcgctgggcgtagtagacc

SEQ ID NO: 218235 - DNA, 122 bp, Homo sapiens
caggcaggccctaacttgctggcctccttcaggagggcgatggcaatacgaatccgctgccgcaggaagatgagcatcagcagcaggatggcttcaagcaccgccaacacgatcactgcaga

SEQ ID NO: 218236 - DNA, 122 bp, Homo sapiens
cctcatcccccaacatctaactaatttagtattatatttatttctcctaacaaattacatcgcctaaaattctgtgggccaggcgcagtggctcatgcctgtaatcccagccactttgggag

SEQ ID NO: 218237 - DNA, 122 bp, Homo sapiens
cccggcgagagcaagccaatgggaggccgcgagctgacgataggcgagattgattggaagcggccgtgggctctcgccgcgaggggcgtggcgcccccgccgggctttctgcctgcccattt

SEQ ID NO: 218238 - DNA, 122 bp, Homo sapiens
agacctgcattttcctattgtagtggaccctactgattatgtagctgaatcctgcccccacgtactgggtgtcttgaactggtcagcagggctgagccacgagaggtctgggtacaggcaag

SEQ ID NO: 218239 - DNA, 122 bp, Homo sapiens
ggaggcagaggttgcagtgagccaagattgcaccactgaattccattcagggcaacagagcgagactctgtctcaaaaaaaataaataaaataataaaaacaaaaacgggcagggcgggcgg

SEQ ID NO: 218240 - DNA, 122 bp, Homo sapiens
agaccatacagccaggaggccacatgcaacacacccagcctgcctcgggggtgcctggcccggtcctgggcctgctcacaggtggttttggatgcccacggccctgctgtgttccacaccgt

SEQ ID NO: 218241 - DNA, 122 bp, Homo sapiens
tccgttccaggtccggaggggcctaagtgccaccctcctccctccaagcctggcacccaccgtctcggccctgaaccacgaggctgcccccatccagccacggagggaggcaccatgcaaat

SEQ ID NO: 218242 - DNA, 122 bp, Homo sapiens
atggcaccccatcctccccatttgctcatttggtctcagcagtgaatggaaaaagtgtctcgtcctgaccccctgcttccctttcctacttcctggaaatccacaggatgctgcatttgctc

SEQ ID NO: 218243 - DNA, 122 bp, Homo sapiens
tcctggcagctccttgcatctcccactatgcatggagttacggtaacctgggcagcagggcgtcaccagcactctttctttggtgtcagaggtataatttagtgaagggtgaagttgcagaa

SEQ ID NO: 218244 - DNA, 122 bp, Homo sapiens
ggtgtctccctctctcagtgtgtgtgtctctctgtctgttttcacactctcctccccaatcgagcgaggcccacacctggcgcatcactgccgagccattagctgcgggtttcctttcatct

SEQ ID NO: 218245 - DNA, 122 bp, Homo sapiens
ggcatgagccaccatgcccggccagcagtgtctttaaaaagatattcttacagccaggtgcggtgactcatgcctgtaatcccagcactttgggaggccaaggtgggaggatcatttgagtt

SEQ ID NO: 218246 - DNA, 122 bp, Homo sapiens
cggctttgccggaagccctcctgctcccggcgagccaggccccgactaggccctactgcccggctcagccctttgccctggacaccaggaaacagaagcccaaggagcccgcgtccccaccc

SEQ ID NO: 218247 - DNA, 122 bp, Homo sapiens
aatgcaaaaagaaaatagattagtcagccttcgaagcacgacagtgagttttactagctacgtaatttatgcttcttccttttcagcagtgtccagattatacaagacacaagatctataac

SEQ ID NO: 218248 - DNA, 122 bp, Homo sapiens
cttaaatctgtttttgcttggtaatttccattgattataatgattttctgtgaggcttagcgagggaacattttaggagaggttataaatgcggctaattagtgacatgcaaatcgcttttg

SEQ ID NO: 218249 - DNA, 122 bp, Homo sapiens
agatcaaggtgccagtggattcagtgtctgttgagggcccatgtcttgattcatagatggcggtcttcttgctgtgttctcctagacatggcagaaggggcaagggagctctctggggtctc

SEQ ID NO: 218250 - DNA, 122 bp, Homo sapiens
gctggtgagtcccccgccgccaacactccgggacaggctgcgggcttaccctagggtccgcgggataggtctaaggcacgcagtcttgagttcccccagtagttcgaactttgggtgagagt

SEQ ID NO: 218251 - DNA, 122 bp, Homo sapiens
ggtcacgacgctgccggggcggggataacccctcacgtggagcagatgaaagggccgcggcgcgacggccgggggagccgagctgagcctgcgacccacaaagccgccgccgccgccgccgt

SEQ ID NO: 218252 - DNA, 122 bp, Homo sapiens
agctactcgccggatgtacgtcacacccctccccgggacttccgggcgcgtaatgggccccgccccctcacagcgttacgcctctctgccccggtgccgtcccaccagcgactcgggccgcg

SEQ ID NO: 218253 - DNA, 122 bp, Homo sapiens
ccgactctcaagcctcagctcccaggctaggctgtggccgccggtggcctggggagagtgcggcgccatgcctcgggcttaatgcgcccccccctcttctcccagtcttcagtcttaagtcg

SEQ ID NO: 218254 - DNA, 122 bp, Homo sapiens
ccggaagggaaaggtcaagtccggagcagaggcgtggaccgcggcaggctgctgttggagcgtgctgggctcagaagccgggttctagctaggaaactgcggagtggccaaggagttcctgg

SEQ ID NO: 218255 - DNA, 122 bp, Homo sapiens
gctccgggcccacctgactgggcgtcctctgagtcagggaggtgccagtgctgtggtccccgcgagcccaactgtcccctgacccccgggcttttccgcaccgtggagtcccccgacacgct

SEQ ID NO: 218256 - DNA, 122 bp, Homo sapiens
gacgtcacccagagccaatgggagtgctcggccctgagggttgggggcctcagagtgcaccgcgctgtggcccttgtggggctgcccttgcgcagcgctccaagggacggggatgtttggct

SEQ ID NO: 218257 - DNA, 122 bp, Homo sapiens
cctggtggaagtcacgggtcaccatgcactgaagacactactcagggttactgctctgctcggggcccaccgggctaacccaggggtcaaggaaggaggggagggttgagttaggccctaag

SEQ ID NO: 218258 - DNA, 122 bp, Homo sapiens
ctgtccatgttgtccttcagtgatgtggccatatccatggccacactgcccactgtactccgaaccttctgcctcaatgcccgcaacatcacttttgatgcctgtctaattcagatgtttct

SEQ ID NO: 218259 - DNA, 122 bp, Homo sapiens
gtgacgtcagggtgagaccccagcgagggcgacgtcagggagagaccccagcgagggtgacgtcagggagagaccccagcgagggtgacgtcagggagagaccccagcgagggtgatgtcag

SEQ ID NO: 218260 - DNA, 122 bp, Homo sapiens
cagtatttgccctgcctctgctgaatcagcttcacattcctgctccccagcaggcatgttcgacacaatggcgagtccctcccttccccagtgccacacatgggatgaaccagtgtcactta

SEQ ID NO: 218261 - DNA, 122 bp, Homo sapiens
gggcgggcagctatgtcgtcaggaacggggcggccccgctgcggccgcgtctgcctggcccgtcccctccagcccagctcgggctccagctccagcgccggcgcttcagctgcgaccgcgag

SEQ ID NO: 218262 - DNA, 122 bp, Homo sapiens
cgggtgctagcaacctgcttcttcactgttaaggtctacagcaaaccaatcctcttcctccgttagtacgagttccggccaatgacgttcgccctcttaggtttttttttttagcccgccct

SEQ ID NO: 218263 - DNA, 122 bp, Homo sapiens
ctttcagttttttcagttatttattctggcatttaaaaacacctgtatttcttggccgggcgcggttgctcacgcctgtaatcccagcactttgggaggccaaggcaggcggatcacgaggt

SEQ ID NO: 218264 - DNA, 122 bp, Homo sapiens
cgcctcctgagtgccactcaagggttaagttcagagctgcctctgcctgctgtcaggctgcgcgtgggcaccgctttgggtgggtgagcgtggagcggcatatgggtgatgttctgcaagcc

SEQ ID NO: 218265 - DNA, 122 bp, Homo sapiens
catgacatctacaataatcatccagacgtaggacaatgagcgctgactgaaagcgctcagcgagcctgcctcatctgtgattggttttgacctgcgtggtgggcggggggtgctccttatag

SEQ ID NO: 218266 - DNA, 122 bp, Homo sapiens
cggtacttcgggtcaggcagtgcgctggatgcctaagtcacacactccttcggtggtccccgcccttcgcttgcgccgaccagtctggaaggtccccgggaggccgtacctccgagaggctc

SEQ ID NO: 218267 - DNA, 122 bp, Homo sapiens
ctgtgcctgcaggaactgggctgctctgtggagctagccccggccagggtgccccctccccggaccctcctagcagggacttgatgctgaagccctcactgggtggtggcgggggactgggc

SEQ ID NO: 218268 - DNA, 122 bp, Homo sapiens
ctatgcctccctgtttcagggaaattcttggccaaagatcacaaaatactccttcttgctcggtcctgaataattataatatataataatatttttggaaagcagtgggtgaaatgtttaca

SEQ ID NO: 218269 - DNA, 122 bp, Homo sapiens
tgagccgctgggaaccaaggctggttgctaaggacgctgtgggagtcgctctgagacagacgttgctcttttacggtctcgtgaccagggcttagccaatcaggacttataagtgaatttcc

SEQ ID NO: 218270 - DNA, 122 bp, Homo sapiens
ttctaacttatttttgtcctcatttcactaaccaaccaaagattccactgaaaatggaagcggaggcccctaccacacttgcactccaatcccttatgaaattgacttaccaatcaaagata

SEQ ID NO: 218271 - DNA, 122 bp, Homo sapiens
atcgcttgcattgaagattacagtgggagtccggtttgcaacccggaaggaaggagcttgcgggttggaggcactaagagttttcagaagttgagcatctcaagagagggcaagacttggag

SEQ ID NO: 218272 - DNA, 122 bp, Homo sapiens
accccctaccccaggcccctccaaagcaactggggtaaaccagacgcactgtgaggccagcgcagctgctggacacggtccccggcgccgctccaaccagaccgcgaccgctaagcccctcc

SEQ ID NO: 218273 - DNA, 122 bp, Homo sapiens
ctcacacctgagagggcgggtgggggtgagttgtgttctgggagcaaagagcaataacaccgcccttctccacgcaagtacacaggagaggtctgtcttcccaagggacagctgggggtagg

SEQ ID NO: 218274 - DNA, 122 bp, Homo sapiens
tgggcactttccgcccaggctttcctgcatatgccagaagcaatctcgcacttacagaatcgatcagcgtgtaggggctctccacgtcgctatcagaggaggtgtactgaggcagctccaac

SEQ ID NO: 218275 - DNA, 122 bp, Homo sapiens
tatgagctgtaacactcaccacgaaggtccgcagcttcactcctgaagccagcgagaccacgaacccaccgggaggaatgaacaatgccggacgcgccacctttaagagctgtaacactcac

SEQ ID NO: 218276 - DNA, 122 bp, Homo sapiens
gtcttttgtgtccgggtctggcttggctttgtgtccgcgagtttttgttccgctccgcagcgctcttcccgggcaggagccgtgaggctcggaggcggcagcgcggtccccggccaggagca

SEQ ID NO: 218277 - DNA, 122 bp, Homo sapiens
ccttggctaactgaaccttatcgataggatgagtcgctgcggcagtctgctcggtctgcgcggaaggcagggagcctcgcagagttttaaagatgcagagctcctttttcggaggccacgga

SEQ ID NO: 218278 - DNA, 122 bp, Homo sapiens
ccaacttactggtgacagccaggtaggtggaagtttgcacctcgccggctgcattgcgggcgaagcactggaacatgccggtatcatcgggcaccaggccgctgatctgcaggcccccgtcg

SEQ ID NO: 218279 - DNA, 122 bp, Homo sapiens
tgtcccgcaccccccggcagagcgcagagggtcgaaagatttgcgccgcagaagacgcagcgtccccttgcgctgcgtgtgcggaaccccgctgtgagagtttccctttcactgagactcct

SEQ ID NO: 218280 - DNA, 122 bp, Homo sapiens
atcacccggtaccagccgcctcgctagctcttgccatagcagcagcgtgaacaagcgtcccgccatttagtggctcaaaacaacaaggtgccgtggtttctcccgagcctcgggtgggtcta

SEQ ID NO: 218281 - DNA, 122 bp, Homo sapiens
cctgcctaccctgagacgccttggcaggacctagaagccaagcctggggtagggcctcggcgttgcctgcacgtgtgcccagatggcttcttcggagccctgagtgggcccccgaggctgtg

SEQ ID NO: 218282 - DNA, 122 bp, Homo sapiens
ggcatctaggcggtggtaggtggcccaggacctggccgtgcctctgcctcaggcagcgtccgtatggcagcactcagagccgcaccgtggcgtcagccccggcatcccctttgcctacacga

SEQ ID NO: 218283 - DNA, 122 bp, Homo sapiens
aaaactttagcctaattaaatttaacagtgtttacttgaacaaagaatgattccaccaatcgggcagcctccccagccggagtaggttcagagacacttcagcacagccatgtggtggaaga

SEQ ID NO: 218284 - DNA, 122 bp, Homo sapiens
cgctggagggcggaggatgcctacacaggcctctggagggtgtgtctcgggagtctgtctcgccctctggacccatgggggaccagcaacgccgtcacaccctcctctgtctctgccagccg

SEQ ID NO: 218285 - DNA, 122 bp, Homo sapiens
ctcactcccaaaaataaccaatattctcatcccaaacggtaaggtttcgaactcaacccacgtgggggctgggggagatgaaagagggatggaaacgtgaggcgccaggagggcaggaggtg

SEQ ID NO: 218286 - DNA, 122 bp, Homo sapiens
taaaacccaaaactatcttgttccaaaggccagattctttcatgagatggccccctttctcgtaatcctattgtgatagaatgaccgattttcctcacccattgcttctgactcctatgtgt

SEQ ID NO: 218287 - DNA, 122 bp, Homo sapiens
tgtaaccacaaaagatccaggacttctcgatgactgcagaagtacaggtgctcctacacacgagtacaggcgctcccacagacaatggtaaagattttcacttggggaacaggagtgtgagg

SEQ ID NO: 218288 - DNA, 122 bp, Homo sapiens
tcttgggcaaccattgtccgttaggggcttcagatctcattttaagaccttaacagtcctcgccgttctaattaaggaaaggcaggcgagcctgccagccgagagcggttgggtcagcggct

SEQ ID NO: 218289 - DNA, 122 bp, Homo sapiens
cacggcaaatccccaacttcagcaccgcggacagcatcacctcccgcccagggagaggcgcgcgcctccttgctccgcccccgccccagctgatggaccccggccggtcggctcagtctccc

SEQ ID NO: 218290 - DNA, 122 bp, Homo sapiens
aaccgaggccaccttgttacagggtgatcagatctgtagctggagtctgggtcttccagccgcgcggggaggtgagcccgacgcccgggcccgagtctcctggcgcgcaaaccccagctggt

SEQ ID NO: 218291 - DNA, 122 bp, Homo sapiens
cttcactcctgaaaccagcgagaccacgaacccaccagaaggaacgaacaactgcagacgcgccgccttaagagctgtaacactcaccgcgaaggtcctcagcttcgctcccgagccagcga

SEQ ID NO: 218292 - DNA, 122 bp, Homo sapiens
cctccgctgctccaacatggccgcccgctgcgcgccggaagtgcactgcgcttccgcttccgggacccagcccgccctaccgacccttgacccctgagaccccatttccccacaaagtctgg

SEQ ID NO: 218293 - DNA, 122 bp, Homo sapiens
gcggcagtgccttaccagtgtagatgctggcattggaggctgggataccaaactgtgactcgatgaacttgggaatgaaggtaatgaaagcagttacaatggcactctcagctgtgtatgac

SEQ ID NO: 218294 - DNA, 122 bp, Homo sapiens
cgacccccaggacctcgacatgaagaagcaccgttgtaaatgctgctccatcatgtgagccggcccccgagaccccggcccccaccccacaccacagacacccaccagcccggcccctcccg

SEQ ID NO: 218295 - DNA, 122 bp, Homo sapiens
gccccgacagtccaaggctgattttgctttcccgggttgctctccagcagctcagaaatccgccgcctgccaggacccagggccggagctctcccggcgcaagtaaacactgattcctttac

SEQ ID NO: 218296 - DNA, 122 bp, Homo sapiens
catttaacgacgactcacacgatcacttaaatacaactgtggtgaaccgcacaagagggacgcgcggcggtctgcggggaatgacgaggccgacctcgtctgcgacccagggagggcaaggg

SEQ ID NO: 218297 - DNA, 122 bp, Homo sapiens
gacaaaaggcgccaaagtcggaacgatttccatttagcggacggagtcttgggacatcttcgctgtaggaatcaataactctcattttttttttttgagacggagtctcgctctgtggccca

SEQ ID NO: 218298 - DNA, 122 bp, Homo sapiens
cgctgggaatgcaggttcagcagggactgcgtgcggtggcctgttcgtctgtcaaggccacgacctctgagaagccttctctgatcacatctcccgccatggcccagcctttactatttact

SEQ ID NO: 218299 - DNA, 122 bp, Homo sapiens
cgagggtagggcgtggagagcagccggttacgcggttacacgagggcggagggcgtgtgccgggagcacaatccgggccgaggctcctggtaagggagcagagcgggaagctgatcccccac

SEQ ID NO: 218300 - DNA, 122 bp, Homo sapiens
agcccatggagaaaaataatatttgagagaccccgcctgctggggcgcaggcggcagcggcgtggccatgaagctgaaggtgaagaacgtgtttctcgcctacttcctggtgtcgatcgccg

SEQ ID NO: 218301 - DNA, 122 bp, Homo sapiens
cgggcgccgggaagactgggcggggcgaaggcatcacctttcgatggggccggcgctgtgcgtcctccagtcgaggtggggcgctgtggaagagcggcagcttccggtcggcttttctcttc

SEQ ID NO: 218302 - DNA, 122 bp, Homo sapiens
gtgctctgagagaaatgagaagcacagtagaaaaacaataacggatgggggtgcaaaatgcgtagggagctgcacttaggggaagataaagtctaagctaagatcttaccacctctgaggct

SEQ ID NO: 218303 - DNA, 122 bp, Homo sapiens
cttcccattcagactgtcagagcatctgccacagcccagggagggggctgatcccacatacggagcccccaccccaggcctttggaggaagcctggggatcaggaggccttgtttggagtcc

SEQ ID NO: 218304 - DNA, 122 bp, Homo sapiens
tccctgcctcttcctctctggagctccagagggacccccatttgtcagatgtcccccagtcgtcgcccagatggaccagcttcttcctgccgaggccttcagggcctcccaggacctccctg

SEQ ID NO: 218305 - DNA, 122 bp, Homo sapiens
tcagctacgaggctggaatcctggagaatcccaagaaccaagcgcctccaggtctctacgcgaagacccaggacccggcccccaacacccctgacattctcgagattgagttaaaaaagggg

SEQ ID NO: 218306 - DNA, 122 bp, Homo sapiens
ctgcgttcaccagcatgcctcctttccggaagtggtcgctcatgtgctctaaccagttggcgtccaaaccgctcactgtctggccattcttggagacatggagaggaatggtgacagggtag

SEQ ID NO: 218307 - DNA, 122 bp, Homo sapiens
tatggtctgtacaggggacagagactgagacacttgctgtctggcccacaggctctggcacgttttgggggaggtgcctgcaggacccaacatactcaatgagcttccagcgcaatgtccga

SEQ ID NO: 218308 - DNA, 122 bp, Homo sapiens
actttacagctcctgattctccccctcaagacttctctgtaaaacagttgtctggtgtcacggtgaagttgtcatggcaaccacccctggagccaaatggaattatcctttattacacagtt

SEQ ID NO: 218309 - DNA, 122 bp, Homo sapiens
gagccctcggcggcgggagccgcctcaccctggaagacggagctcgcacagcagcatgtgcgctgcccagacccaaactggaacaggtgtggggaccctgggagagcagcctgagcgcgagc

SEQ ID NO: 218310 - DNA, 122 bp, Homo sapiens
aatcggaagcggtggcaacgtgggcggctgcgtgacagacaggcggcaggacgctgtcgccgcagcttcttccggctagctgggggacgccgaggctgcggagtgcacgcctgggctccgtc

SEQ ID NO: 218311 - DNA, 122 bp, Homo sapiens
gactccctaaaaaggtttccgtttccacttccgtccagggagacttccgggagagcccggcgctccccgccacgcatccagcccctctacctccggcctccggcggactctatggtcgcgag

SEQ ID NO: 218312 - DNA, 122 bp, Homo sapiens
ccagaagatgtcaggccgagggcaccgggaggtgggcctggagccaggctgtctgcagcccggagagacagtcccggccggctgctgccctggcctgccagtctctgggcgagcgcaggcac

SEQ ID NO: 218313 - DNA, 122 bp, Homo sapiens
tattccgcaaaacagatgtcataaattatattagctaatgtagtaacttcacatctcaaccgccaatcacaagttctcagtcatgaaataaacgaactgttttcagaatatttttaaatttg

SEQ ID NO: 218314 - DNA, 122 bp, Homo sapiens
aagttacaggcggcagggtcctttttagtcacctccacgtggttttcccagagtgcgccgcgcgtgacaacctttggcgggaccgacgtggtggagtggacccaaaaatagcgtctaggcgt

SEQ ID NO: 218315 - DNA, 122 bp, Homo sapiens
aattaattcatctcttaatcttgttaggggccaacggctcctattagtgtttgagcgtgacggcgacggtgctgtttatgaagccctagcctatttggaggtgaggaagaggagtctgtggg

SEQ ID NO: 218316 - DNA, 122 bp, Homo sapiens
ctgtgggagccagaaagagatgagctcacagataatgggtttcttccttcctggtagttacgaataaataatagtgtgacagactcaccctctagtggttgttggtagtactgaaacaggaa

SEQ ID NO: 218317 - DNA, 122 bp, Homo sapiens
ccaggtgactgatgggcgctaccgtcagccactccagtcctggaaagttagggcattttacgggagtacgtcacaggagatccatctccctacagggctccggagcctgaccgaccttctcc

SEQ ID NO: 218318 - DNA, 122 bp, Homo sapiens
acttggtcatcttggaccaacccgcacagaggatgtatctggtacagtgctgcccttctccgattaacatgagacttgactagtttccagggcagagtgccaaagcccattacctattcttc

SEQ ID NO: 218319 - DNA, 122 bp, Homo sapiens
aggtggtcacggttggctgacggccacccccggcgctcacgcccgcagattccgggaagtcggactcccaagcccctgcctccgtataccggaagagggtcccagaccccctactcgctgcc

SEQ ID NO: 218320 - DNA, 122 bp, Homo sapiens
accacacttgtcctgccgcactttcttcacatttattcattttcattcttgcccactggccgcctcccccgcaagaccaggaggagccggccttgctcacaggagacagggcaggtgcagga

SEQ ID NO: 218321 - DNA, 122 bp, Homo sapiens
gcacttttacttgggcaccttgtgaccgcgaatcaattaaatgtaaaagtattggctgggcgcggtggctcacgcctgtaaatcccagcactgtgggatgccgaggcgggtggatcacgagg

SEQ ID NO: 218322 - DNA, 122 bp, Homo sapiens
actccttatatattatgtaccaagcactgtttatgtcaacaaaacagacaaggatcctggcgtcagggagcttccgctttagtctgagaagcagataagaagcaagccaaaacaatgttgaa

SEQ ID NO: 218323 - DNA, 122 bp, Homo sapiens
ttgtttcttctctttttgttctttttaagcaatagatatttttaacctccaggttttttccgccatgaaactcctaaagcagcattatgaaagaaaacagttattttgagatgaggactgct

SEQ ID NO: 218324 - DNA, 122 bp, Homo sapiens
caaggctgttggtgataggccccctggggtgccgtgtgttttttcacaggtgctaccaagcgacagccaacatgtcttttgcagctcaggatcagggtggcagcctgacagttgccagggta

SEQ ID NO: 218325 - DNA, 122 bp, Homo sapiens
aatcatgaaatcagatagcgtatgaaatgctaggaataagcgcaggtctagcataccacgcggccagcggtagcgtgacctgacaggaggagtgcgtcttcagagacattgggaaactggcg

SEQ ID NO: 218326 - DNA, 122 bp, Homo sapiens
tgggataggagcttttaagttgattgctggaagagtggatgaaggcatttaggagatgaacgaatatagtcatcaactgtttaaatgttttctgaattgttctatttctgtcttgttatgta

SEQ ID NO: 218327 - DNA, 122 bp, Homo sapiens
aggccacgccctccgcgcacagcccaagctcgcggccacacccccaccgcgcgggcgctacgtcccgccccgcacagggctcgctcccaggcacaccctgagctcgcggccacgccctctac

SEQ ID NO: 218328 - DNA, 122 bp, Homo sapiens
tcccccacctccagcccgtcctgccctcctgttctccgtctcgcttcccgtcggtgcctccgggatctcacagccctcgcacctcttttgtgacccaggctgtttttctgcacccccctctc

SEQ ID NO: 218329 - DNA, 122 bp, Homo sapiens
ggcagaaatggtaggagccagagatgttcaaaatccatctgatgcttggcctgtgctgaacgttctcaaactgtggccttgtcaggcccagaaagtggggtggattcctggccgtttctgct

SEQ ID NO: 218330 - DNA, 122 bp, Homo sapiens
acatgctaaatatctgaaatgagagagcaccgtgagtttggcgagctcgcagggagattacgccaagtggcaggggacgacgaggggctatgtttcagcctgagcctctcggtgggcccgga

SEQ ID NO: 218331 - DNA, 122 bp, Homo sapiens
agccgcttccgcagcttctggttgtttttgtggctcagactaagttcggcgggcggctcccgccagctgcacttcagctcgtccaggatgaccttgatgagacgtagtcgggcctcaggagg

SEQ ID NO: 218332 - DNA, 122 bp, Homo sapiens
cagaaggggacctagatgggcggagatctagccctactcacccactggccacggggtaggcgagggacgctcagcaggggcttcccgcagacccagggtcttcaagccccagaagtcctgat

SEQ ID NO: 218333 - DNA, 122 bp, Homo sapiens
acgcgttacactcggacgttccctgcagcgcaggctgaggtcagaacattgaaatcatcccgcaaagatgcagtgagcgcctgctgggtgcaaggtgctaggctctatgggagatgaaaagg

SEQ ID NO: 218334 - DNA, 122 bp, Homo sapiens
cctgggccaacctcatcccgcctcctgtctgaaacggtgcctcccctgcacgggcccagacgacctcacagagaccctttcaaaaccccccagctggtgagggctcccacgcggttcaaagg

SEQ ID NO: 218335 - DNA, 122 bp, Homo sapiens
ccagggcagcactaatggtgcctgtctagactctgacaggtggagctgctgagctaactacggacctggtgggggaagttttccttggctttcacgtggctttggctggggagccctgagaa

SEQ ID NO: 218336 - DNA, 122 bp, Homo sapiens
agacacctcctggtaaactcaacaggaaaatccacctcccgggacgcatccccttctcctcgctgccctccctgctgggaagaccctgtcctcaggcggtccatgcgccctggttagacgcc

SEQ ID NO: 218337 - DNA, 122 bp, Homo sapiens
gggtgactctagtgacggaactagtcttgggtccctggggcaccactagcctctcggcatcggtggtttctccttactcttcagacgctgccaactccatcccccagggattgtgaaggggg

SEQ ID NO: 218338 - DNA, 122 bp, Homo sapiens
gtactgggatggggggaggtgcatgggttggggtggccaccaggtggtgctgtgccacagcgggcagcccctctggaaatgactggcatcataaaatctgtcttcatacccgaggtagtgtt

SEQ ID NO: 218339 - DNA, 122 bp, Homo sapiens
agttgaataacaaagctgggaaggggagtggtaggcctgtgttctcgggtacctggtttccgtgctgcagtccagatgtgagtcctagggtcttctgggtcaatcaggtgtcatctgtagaa

SEQ ID NO: 218340 - DNA, 122 bp, Homo sapiens
tgagggcagggagagctgctgcccggccgagcctctgctcccacggtctcaggccctccccgccctgatgagtctccgctcccaacacaagggccacgtggtctggagggaccttttgccca

SEQ ID NO: 218341 - DNA, 122 bp, Homo sapiens
ggctgcaccaggacaaaagctggtcaggcgtcaactcaggcaaaagctatcgcccccaagcgattctggagatgcaagagaggcatgaaacaaaacaaagtccaagaaacgcggacaaccgg

SEQ ID NO: 218342 - DNA, 122 bp, Homo sapiens
cgccacccctcctggtgggagcttgggcctagccagggcgcgtgtccccaccctcagtttcgaagaccaagggctccgacccagaccgtgcgccctcaggacagggccctgccttccctggg

SEQ ID NO: 218343 - DNA, 122 bp, Homo sapiens
atgccccgcaacctgccatggggtacctgtcctcaccagtgcgactgaggccagggccctcggccttcaccttactggcgtcatgagagggctccaccttgactcggatggggctggtgggc

SEQ ID NO: 218344 - DNA, 122 bp, Homo sapiens
gcattgtgggttcggggtgaggaatgctggcctcccacggcaggccagggcaggtcgccccgggcctcagctccaccccatgcagcaaacttaataccctggacagcttgcatcagccactt

SEQ ID NO: 218345 - DNA, 122 bp, Homo sapiens
tggacgactttcaggggagagctggaagaaagactgtcaacagctgagtgcgggcgccggcgccgtctacgcagtgcgttccaccgggtccgtatccctcccgattccgccccaccccgccc

SEQ ID NO: 218346 - DNA, 122 bp, Homo sapiens
attttgctgaccctgtccccagcactgtgatgtccagaggatggacccctgtgctgctgccggccagaagttgaatgcagacaaccacaacagggctggtgccagtctcaaatgggcttctg

SEQ ID NO: 218347 - DNA, 122 bp, Homo sapiens
ctcagctcctggtcacagcttgggccattcaatcattaggtcatgctttagcagtgaggacggccattttatagcaaggaacagaatccaagtgcatcccttcacttgcacttctggtaagc

SEQ ID NO: 218348 - DNA, 122 bp, Homo sapiens
tagaattgaaatggagaatacatcatcagaatcctaggtcatccaagcctcttgctggtccgtgtccacggagtggcagatatctttgtgaaatgtaaatgtgtcaggtgcagctccccatt

SEQ ID NO: 218349 - DNA, 122 bp, Homo sapiens
tacggacaggccttgggggcttcatcgtggctccagtgtctgccaggaggcttctgaactcgacagcaagtggggaatggattagtaacttgtttgctgccccacccacatgggggcaggtt

SEQ ID NO: 218350 - DNA, 122 bp, Homo sapiens
aatttgactgctgactgcatttatccactttgggaaatctctagtaataaaagggagacacgctgagtaataagtgtgaagtttagaacacaaaccttgcaagagctttcaagaataaataa

SEQ ID NO: 218351 - DNA, 122 bp, Homo sapiens
cgcctggccgataaattataaaaaaaaaaaatacgttgaagtaaatattatgggtagtaccgccaagatactagaacacatgttaaggcttaaaaaaacagaggccgggcactttgggaggc

SEQ ID NO: 218352 - DNA, 122 bp, Homo sapiens
tcctgggaggcagttcccaggagctgaccagccaagctcctggacctgcaatgccaaggtcgctgctattaccaccctaataaaagatatgtctattctttcttaggggtctttggactgga

SEQ ID NO: 218353 - DNA, 122 bp, Homo sapiens
ttatgctgggataagcaggataatcctgcttacatgccactagattgcataacaggagctcgggctggcctcctaaggagaactgccaactcagtatctccccattcaaagaagccacgtta

SEQ ID NO: 218354 - DNA, 122 bp, Homo sapiens
cgggcagctacttcccctacaagcacagctacatgtggagcctcaggtgggctgagagcccgcgcgtgcggcggctggccgagcccggggctagggaggcgacaagcggagccacgccaggg

SEQ ID NO: 218355 - DNA, 122 bp, Homo sapiens
aggaaccagcgggcgcggaagcctcggcgccccgagccgccagccctcggagctgcgctgcggctccgcctccccattggccccgccccgatcccctccaagaggggcggggtcccccggcc

SEQ ID NO: 218356 - DNA, 122 bp, Homo sapiens
caccgccgcccccgggtagctggggccaggcctggccagccaggcgggcgctgacgggggcgtccccgctctacggcggcggcgggaggaggcggcgcgggctgggccccgggcggctgcca

SEQ ID NO: 218357 - DNA, 122 bp, Homo sapiens
attagcatcctgaggctcctgtaacaaatgaccacagaattaatggctgaaaacaacacacgtttattctctcaccgttctggaggtcaggagtctaaaatgcatgttaaggggctaaaacc

SEQ ID NO: 218358 - DNA, 122 bp, Homo sapiens
gccaggggtggccaatcgcaccggactgcgccgagcacgccccgccccaccgtctcagtccgcccgccccctgccccggaccacgccccaagctcggctccaataggctctctactgacctt

SEQ ID NO: 218359 - DNA, 122 bp, Homo sapiens
cgccgctgctcctccgcctggcctgggccgtctgcccgcagccatgagcgtgctcggccccggtggagcccgcagtcctctagattagtctccaccgccgtccaggacccacttgcagcatg

SEQ ID NO: 218360 - DNA, 122 bp, Homo sapiens
tggtcttgccgtgttgctccttgaggtgccgcctaatggcaggcttgtgggcgaagcgcacgtcgcagtaggagcagcggtagggccgcgctcccgagtgcaggttgaggtggtcgtgaagg

SEQ ID NO: 218361 - DNA, 122 bp, Homo sapiens
acggacggggccgccccgatgggacgccgcgctccggcccctgcgcgccgctgagccgagcgccccccgctgccgagacccccgccgccaccgccagccgctgccccctcgcccccgcccgg

SEQ ID NO: 218362 - DNA, 122 bp, Homo sapiens
ttaaaacaacaacaacaaaaaacacaatatgcaggatcgttcggcttcagcagaacccaccgcaaagatggcggtgggacgaagccccttctcccgccgccgaagcctctcgcctcacattt

SEQ ID NO: 218363 - DNA, 122 bp, Homo sapiens
tagaaaaacaaaacaattctgccaacaaaaagacctctcccggctgggtgcggtggctcacgtctgtaattccaacactttggaaggccgaggcaggcagatcacctgaggttgggagttca

SEQ ID NO: 218364 - DNA, 122 bp, Homo sapiens
tgtgcctcttccatcatccccttctacctctactccagacctctgcatgaaggcagattccgttctaaactcacactggtaaagttaagtattttgtctatatttgccaaaaagcaatgtac

SEQ ID NO: 218365 - DNA, 122 bp, Homo sapiens
ggaggggagccggggaaactcttgcgggggccccagtctttctcccacccgttcaggggacgagtggcggacccgcagacccctccctcccagatatcctcttttctccaccaggctacccg

SEQ ID NO: 218366 - DNA, 122 bp, Homo sapiens
accaaaaccacccactacagggcaggtgaccccacaaagcaaaccaagccatctggtccacgctccccacctcccggagggagatggaaaagtttcgggagtagtccccggccaatcggaaa

SEQ ID NO: 218367 - DNA, 122 bp, Homo sapiens
tgctcagccccgcacgggtggccatccggaaatcccagggcggggcagaggcagggtcaccgccagcgtagaccctgaggccaggctccggacccttccccaccgagacccacgccgatttt

SEQ ID NO: 218368 - DNA, 122 bp, Homo sapiens
ctccagctctccagcccacctctctcccagggcagcagagccacgggcagagagatctggcgggcctagtgggagcagggctgcccagcctgcacctggtcaggctctgctccatgaaaagg

SEQ ID NO: 218369 - DNA, 122 bp, Homo sapiens
ctgcttccacttccctgtccctggtcctacttgagcttcccctcttccattcccatcaggcgctctgcacgatagcctggtattagtaaagtaccatgagtcattttcattgctatcttggt

SEQ ID NO: 218370 - DNA, 122 bp, Homo sapiens
cgcgcacagaagcatctcacttaacacctcattgcgcagaggagagaatggggtcacaggcgggtgggggaccatgcagagagccaggtttaactgctgtttctgtgcttattcccacctca

SEQ ID NO: 218371 - DNA, 122 bp, Homo sapiens
ggtaaaaggtgacaacctgctagctgccctcgctcgctgtcggtgcctcttctgcctcgacgtcctctctcgccgcgcttgaggagccctctagtccgccgctgcactatgggagcccctct

SEQ ID NO: 218372 - DNA, 122 bp, Homo sapiens
gggcccaggacggaggtgccggcaagagcgggcctgggtggacgggcacgagaggaagtgcgagtccaaacagagcccagggctggcctcggctccagcctcccctgccacactgcacctgt

SEQ ID NO: 218373 - DNA, 122 bp, Homo sapiens
ctttactttgcaactgctacacattccccacacaggcatattctatcaagatcacctggccgttgcaccaaatgccaaatcaatcttttgcttttccttttttatttggtggggtgggggtg

SEQ ID NO: 218374 - DNA, 122 bp, Homo sapiens
agctgggttggagaactcgagcttcgggcattcagtggccagctcggctttataaaggaccgtgcccttaacagcagggctcgagttcctatatccagaccaaaacctccaactgcatgagc

SEQ ID NO: 218375 - DNA, 122 bp, Homo sapiens
ggcgacttcggggacttagggagaccgggcggacgatttcccacaccggggctgtctgatcgccgccccgattattatcagcctcagcacttgggctgggaatttagccccaggcccaaaca

SEQ ID NO: 218376 - DNA, 122 bp, Homo sapiens
cagggcaaagacctcaccgggcagcagaatccgggcagaaatcagcaactgggcctcccgcgcagcagaaaaggggaatccagtcgggcccacccttcctgccagcgcagaccgcaagtctg

SEQ ID NO: 218377 - DNA, 122 bp, Homo sapiens
tctgactccttcaaatgttttctacagcagagatggcagtcgagattaatacacacgcctcgtctcactccagaacacaatgactcaaaaccgcacgacgtgtacttttggaaacagctccg

SEQ ID NO: 218378 - DNA, 122 bp, Homo sapiens
caaaactgctagaagctagcaggaaaacaaagggttttgttgtttctgttgtggttgctgcgggtgcagtgtcgttgttcagtagaagtccttaggttttaggaagcagaaatcctgggctg

SEQ ID NO: 218379 - DNA, 122 bp, Homo sapiens
caccacttcccggagcagagcggccttgcgagtcccacctggctccctgtcctacccaggcgcccatttgaggcctgacaaaggctgctaaccccacggagtcactgcggggagctggagct

SEQ ID NO: 218380 - DNA, 122 bp, Homo sapiens
gccccacagcgaccgcgaaggccagcttcttcgaaaggcccatttttctccgtggctgagcgaatgctcctagaataccacgtttataataaatcatgtagggtggaattcctgctggatgt

SEQ ID NO: 218381 - DNA, 122 bp, Homo sapiens
atttttaaaatttactcatgtggcgtccttttccataccacagtgcccttgagatgctgacgtctctggtgctctggcagaaatgcccttgcccaagcctcagccctatttagcccacactt

SEQ ID NO: 218382 - DNA, 122 bp, Homo sapiens
acacgtgcatcgcgacggcccaggcacggagccgcaggaagctggcacctgacgcgcctgcgcccacccaactcgagttggtggcgcgtcaccttcccctgggatcgcccgcagcaggggcg

SEQ ID NO: 218383 - DNA, 122 bp, Homo sapiens
taaaattgactgaattttttttttaagataaggtcttgctctgttgcccaggttggagtgcggtggcttaatcatggctgactgcaacctcgacctgccaggctcagttgatcctctcacct

SEQ ID NO: 218384 - DNA, 122 bp, Homo sapiens
cgtggtctgcccaccttggcctcccaaagtgctgggattacaggtgtgagccaccgcgtccggccaagttctgtcctactcagaagttactgttcctgccaaaagctttgaccataaccttg

SEQ ID NO: 218385 - DNA, 122 bp, Homo sapiens
acgcaaatcatacagacgaaacagtgagaatccacgcctacacctgcaggcaggaacacgcgtaaatcacacacaggaaacagcgagaatccacacctgctggtgggaacatgcataaatca

SEQ ID NO: 218386 - DNA, 122 bp, Homo sapiens
taaacgtggctggcttttctctcccaaccgcacgtctgtggctctgcagatgcgtggctgcgcgtggtttggtgccggagctgtggctcctccgcagcaccagcagtttctgcgtcgctcgc

SEQ ID NO: 218387 - DNA, 122 bp, Homo sapiens
cgccacgccgcggaccaccgccccaggcaggttgggacgcgcgccacatccacacgcacacgcagccacacgctcgtacacactcacacacgccccgccacgtgtagtcaccccgggccagg

SEQ ID NO: 218388 - DNA, 122 bp, Homo sapiens
acacaggtggaaggaggggagaatggatgtgaacatacaagaaatattcaaaagaacacacgagcagttgctggcattccagatagagccacagccttctcagcagatgggagggaatctac

SEQ ID NO: 218389 - DNA, 122 bp, Homo sapiens
gggcgggccgagggcagcgggggcgggacaggacagacgagaatcccgcggaggtgaggccgggggccgccccgcccccgagggcaggccctgagccccggccccgcctcggccggccccgc

SEQ ID NO: 218390 - DNA, 122 bp, Homo sapiens
ctgagcgccgctgttcaccaatcggggagagaaaagcggagatcctgctcgccttgcacgcgcctgaagcacaaagcagatagctaggaatgaaccatccctgggagtatgtggaaacaacg

SEQ ID NO: 218391 - DNA, 122 bp, Homo sapiens
atgctgaccccctcaaggagcggggccagagaatcgctcctttctggcagggactgtggccgctttcggcctgggaatgaagcgacgtagcctgctggggctgtgaggtgagtagctctacc

SEQ ID NO: 218392 - DNA, 122 bp, Homo sapiens
tcactatcggaggtgtcatcgtggtcatcccctcctttcaccttttcagaagaggctggtcgttccttcacagctgtggaagcagactgggggccgcttctggtctcagaagcgctttccac

SEQ ID NO: 218393 - DNA, 122 bp, Homo sapiens
cagagaccgcaggataaagcagacatccaatgtaaatacaacccgtgcaaaaagcagagtcggcagacctggagtgcattcgcagtatctcccgggggtgggggaaagaaatcacctcttca

SEQ ID NO: 218394 - DNA, 122 bp, Homo sapiens
tgccagcccaggctgctggtcacagtggggacgagtccccaaggcccctggtcagaataacgaggagaaggtccgcgattgcctggtgagatcccagctcgggtcactggctacgctggtcg

SEQ ID NO: 218395 - DNA, 122 bp, Homo sapiens
ccggatgcgaatctgtggcggcggaagtggtaacctacgcagctgctccagggagtgggccggagtctgtttgccccgctgggactcagcggcaccagcatcatcgaccatactgggaccag

SEQ ID NO: 218396 - DNA, 122 bp, Homo sapiens
agccgccgccgcgtaaggccgggctgagggctcggcgtcaccagccagggctgcagagagcggcgtggcacccggagttggattatgcgtggctggcgtgagctggaagggagtcactcgcc

SEQ ID NO: 218397 - DNA, 122 bp, Homo sapiens
gtcgctgtccccgggtggaatgcggccgtatgcacgcgcctccctgcacacgcacacacacgcacacttacaataagtgtctgcaggaggagtgtcctgcgcgccagctctgcgtttaagac

SEQ ID NO: 218398 - DNA, 122 bp, Homo sapiens
gaactcctggcctcaagtgatccacctgtctcgggttcccaaagtgctggggattacaggcgtgagccactgtgcccagccctgagattgctcccttactcagcaattctggggcctctttt

SEQ ID NO: 218399 - DNA, 122 bp, Homo sapiens
tctcctggtgcgccgtttttaagcccgttggaaaagcgcagtatttgggtgggagtgacccgattttccaggtgccatctgtcacccctttctttgactaggaaagggaactccctgacccc

SEQ ID NO: 218400 - DNA, 122 bp, Homo sapiens
ccttcttcctgctgcagaactcctctatgatgaagaagaccttgaaatgcatccgctggtcgctgccggaaatggccaggtgggctcttggtgctctgggctcgcagggttgggaaggggct

SEQ ID NO: 218401 - DNA, 122 bp, Homo sapiens
ggtgctgcccacgtccgagtgcggcgagcgcatgaccaggaattcgtggaggtcgccgtgcgaacagtagctgaagatcatgctcaggggctggtccttggtcaccacgcccagcaggcaga

SEQ ID NO: 218402 - DNA, 122 bp, Homo sapiens
gtcaccaggcccggctccagacacctggcctgtgcagactggagctcagggtctgggaggcgtagggctcggccgcgtggaaatccagtccggctgaccgactggagggcagcccaggcccg

SEQ ID NO: 218403 - DNA, 122 bp, Homo sapiens
tgtagcacttaaaatccaattatcattgcaaggaatgacagacccaggtctcgggatgcccgcttccttccctctctcccgcaatgcggggacaaggggaggaaatccagccccatcgcccc

SEQ ID NO: 218404 - DNA, 122 bp, Homo sapiens
cctgctgcagccccggccggacctgaagcccccgccgcacgcccagcaggccccgctggccgcctgcaccctggccctgcaggctaaccacagcgttcccgacgtggcccacccggtgccct

SEQ ID NO: 218405 - DNA, 122 bp, Homo sapiens
gtatgcaaagcatattttatttcttcctggagcagctgctcaggcaggctggagagtaatcgggagtgagttatatggatttgtgagctgccccgcagcactttcaagctccacggcctcga

SEQ ID NO: 218406 - DNA, 122 bp, Homo sapiens
cctctcccctttgctggggcctagccggggatttaggagccacacaccctccacctcacgcgctaccctccacggggcttcccgcagccagggcccgccccttcccggctccccgggagacc

SEQ ID NO: 218407 - DNA, 122 bp, Homo sapiens
cgcagtggttgttacactaaagtgtctccgcctgtcgaatattctcgtggcagcgatggccgagtggttaaggcgttggacttgaaatccaatggggtctccccgcgcaggttcgaaccctg

SEQ ID NO: 218408 - DNA, 122 bp, Homo sapiens
gacggagcacctgctgcacctgtattcagggtggatttttaagcaagatctcgttgtagccgtgtcgctttcctaccaggaggcccatgacatccggctgtctctctggtaatgttcatatc

SEQ ID NO: 218409 - DNA, 122 bp, Homo sapiens
gctcgacggctaagcggcagggaatcctgagttcctagagatctacagaaagcagaagaacgacactagatgagactagacagtgacggcggaaggacggaaccacatggagactgacacac

SEQ ID NO: 218410 - DNA, 122 bp, Homo sapiens
caagcagtgggccgagacactgagccgggcagtcaaacaggagctctctaaggctgctcccgggctgggacctgggtctaggattctcagtaagacctttgaataaaactaacttgaattct

SEQ ID NO: 218411 - DNA, 122 bp, Homo sapiens
aggcgggggacctcggcgaaaagccaccgctacccggacctggcggtacctgtgttctgtcgcaggtgcacacctcccatcgtccccagcgcggacttggagagccggcctcggtctggaca

SEQ ID NO: 218412 - DNA, 122 bp, Homo sapiens
gaaatattccctgctctgcctaaatttatgctggtctgttagagtgtgttaaacttagtacgcaaatgataaagaattgttagtacacaaccgtaaaagaaacactttcattttgaaaatgt

SEQ ID NO: 218413 - DNA, 122 bp, Homo sapiens
aggaaacgcaaatgaaacccagaatgagattctactacacacctgttagaatccgggctgcgcaggtggcgtcagcgctgccccacctccaggaaggaacctgggctgcgtgtggctggcgg

SEQ ID NO: 218414 - DNA, 122 bp, Homo sapiens
agagccaaaggaggagatagttacttttgcttttgcagccttttccgggcggcttttccgcgcaggcgcccctggacctcccaggttgagaggtggagcgggccaaacctcagctgcctttc

SEQ ID NO: 218415 - DNA, 122 bp, Homo sapiens
cagggccacacctccctggtcgatgtccactctgtagcagtcagtctcctccaggctcaacgggcaagcgaagaggcctccagtgcgattcgcctgctgcccaggaagagccagggcctggg

SEQ ID NO: 218416 - DNA, 122 bp, Homo sapiens
tgctatgtgcgctgtgccctgccggggtcccagcggccaaccctctgccttctcctccaccgcccttgctgcagattatgtaaccataggaacaacctaggaatcgtttacagaccgtgatc

SEQ ID NO: 218417 - DNA, 122 bp, Homo sapiens
gacttcttcagcgagcagcggcagcgacgagaaggtcctggcggggttgggctgtcttcccgcccaccggagggccctgaggagaagcctccggccctgagggaggcttggggtgggggggc

SEQ ID NO: 218418 - DNA, 122 bp, Homo sapiens
ccacggccccaccacccaggcctctgttttctccctggtagagcagggatgcagcagccccggcttccagggtccccctgaggaagcccaggccacccagttctgagcaatgggggttgggc

SEQ ID NO: 218419 - DNA, 122 bp, Homo sapiens
ttgtggcctttgtgttgtgtgttttccaggtgtcaacccaggtaggcttggagccttctgcgcaggacagggctcccatcctgtccttgaagagagtgagagatgccctccctctcttctcc

SEQ ID NO: 218420 - DNA, 122 bp, Homo sapiens
tggtactgtcaacaggctggaggtgggggtatgggtgccttctgtgtgcctcagtcacaccggggagttttgcttacctaattctgcttctgaaataagcaacatcaaaacagccaggtgtc

SEQ ID NO: 218421 - DNA, 122 bp, Homo sapiens
tttgaaaaacactgctcagcaatgagatgaggggaatgatatggtcaggtttgcagtggacgaatggctctgtggtcagagcaagaaatctggaatggaattggctagagcctgttctgtgt

SEQ ID NO: 218422 - DNA, 122 bp, Homo sapiens
atcatttccgagagcagctctggtttcctaacatagagaacaccatagtatgcagtgttacgctaaaagagggagctagagtgctatactgagtcccatgaaggcagtatatgttcagtaag

SEQ ID NO: 218423 - DNA, 122 bp, Homo sapiens
gaagagggtgacatcgcgaggctgagacagcgggagcagaagggacaccgagacctgcagcgcagagcttctgaacatcagcggaatctccattccatttaggaagtaaaacacggccttac

SEQ ID NO: 218424 - DNA, 122 bp, Homo sapiens
gggactggaacagcagagtctcccattggtcagtcggtgatatatccggccaatggtgagcgccgttactagaagggctccaggatggaggccgacctgacttctccgcctcggtgggctgg

SEQ ID NO: 218425 - DNA, 122 bp, Homo sapiens
tttcaacccttaacttctcttctgggccttcttgccgctttggggtggcctacgtgtgcccgacaggcaccgtggtgcgaaccagggatgccacgatccctggggtcccatacaggttctgc

SEQ ID NO: 218426 - DNA, 122 bp, Homo sapiens
acatgcattttgacctgccctgtgttttgatatttgaatgagttgctgatgtttacaagccgaagctggccgggcgtggtggctcgcgcctgtaatcccagcactttgggaggtcgaggcag

SEQ ID NO: 218427 - DNA, 122 bp, Homo sapiens
gagcgactgtcctctaaacgattagcccagagaaagagagagagagagagcaagcaaacccgaaaacgggtccagggtagagagctccaggtccttagcatgttcctggcgtattccaaaag

SEQ ID NO: 218428 - DNA, 122 bp, Homo sapiens
tgacccctaagctttcacttttcctttagcttccctttcctccccattcccaccctcagccgggctcaggcaatagtatattataaagaaaatgtctacattaagcaccaggactgcaagag

SEQ ID NO: 218429 - DNA, 122 bp, Homo sapiens
tgctcacagactgtggcgtctgcttcaccagaggataaaccgaggcacggagtgaggaggcggccagaaccggggtccccaccctggtgccttcccctatcttcaccgcggaaggccgaagg

SEQ ID NO: 218430 - DNA, 122 bp, Homo sapiens
tgagtgtggcctcctggcctctttttcctttcctgattccttgtgtatgtgtggctgggccgcccctcttctcggctcagagtcacggagtgccttgaactaggcccacctcgccggggcgg

SEQ ID NO: 218431 - DNA, 122 bp, Homo sapiens
gggtggagtggggtggtgacaatttccttaaagccctgagcgaccctaggtcaagggctgcgtgacagccagaaatggggcagcgacccaagcagaattttggagtgaaatgaacattttaa

SEQ ID NO: 218432 - DNA, 122 bp, Homo sapiens
ggtaacaattcccatggaggaaggctgaagtattttgtctgcacccctcctgcccccttccgaatcacagactccccgcagtcagagatggcgaagcctccaccgggtcacctcggccggcc

SEQ ID NO: 218433 - DNA, 122 bp, Homo sapiens
tggtcgcgggcaggtgggccggggggcgctgggcaggggcggggcagggccagggcaggccggtctgcagccggaggggccggagcggagaagctgcccaccttcccgggctcggagcggcc

SEQ ID NO: 218434 - DNA, 122 bp, Homo sapiens
tggagctcagtctctggattctccctctttctcggccctatgcttcctgacagacctggccgccaaaccctgtaatcgccctcctttaacccaagaaagcaagtctttctgccgtttctgag

SEQ ID NO: 218435 - DNA, 122 bp, Homo sapiens
atcatactcccaggccagtgagaagtgccctctagtgattggatgggttcgcttggcgcccgcctccatgcagacagagcaatgcctgtgtgggtgcttcctgatcaagactgatgagtggg

SEQ ID NO: 218436 - DNA, 122 bp, Homo sapiens
taagtcaagacactgaggttctatcccagctttggcagtaatgtgctgtgtgactttcatcgagtcacatgcctcttctgggcctcagtttcccaatttgtacaacgagggtgacagacaag

SEQ ID NO: 218437 - DNA, 122 bp, Homo sapiens
tgagaaacgacctctggttcccggactcccgcgatggtcaacgtgttatcgcttctcccgcgcaccccagaactctgtccccagaggcaacctgccgaggcagctgggggtggggggcgagg

SEQ ID NO: 218438 - DNA, 122 bp, Homo sapiens
gaaatgttcttgggaactgagaaatactgaccaaagctaggagtgatgtctgcctatcagcgttcaccaagtcactttatcaggtccagtgtggttctctgctctgtgttcaccccctgggt

SEQ ID NO: 218439 - DNA, 122 bp, Homo sapiens
gtgtgctaatcgcaggccaacaagcccagcgcggtacagaggtcccattgtgaccggaggcgagaaaccccgcctcggcaccctgacgcagcgcaggacccgccccgcgcgtgacgccagcg

SEQ ID NO: 218440 - DNA, 122 bp, Homo sapiens
cctgaggggtgagagacatttttctctccatacacctgtaactcatccctgtggggaacacgagctgggaagctctaggctatgtagtctggctccctactcttccagagaaaaacaagaga

SEQ ID NO: 218441 - DNA, 122 bp, Homo sapiens
caaggagcggatggctctgcagactctcctttgctgaagatgatcagagatgccaagaaacgcctgcagccatggccccggcgcacagcccccgcggctccctgggcgcctctgcctcatcc

SEQ ID NO: 218442 - DNA, 122 bp, Homo sapiens
ctcccgtgcctttgctggccctttgtcccaggctctggaaaagtaagttgggccactaaccggctgggcagcatggctttcttccccctaggagctgaccggccgcggactccgagggagga

SEQ ID NO: 218443 - DNA, 122 bp, Homo sapiens
aggtgaaggtggtcatggcaaagctgctgcagaggctggagttccagctggtgcccgggccgcgcttcgggctgcagtagcaggccacgctcaagccactggacccagagctgtgcaccctg

SEQ ID NO: 218444 - DNA, 122 bp, Homo sapiens
cagtacccctgggagcagctcagtgagggaaaagagcactgggtgtggagtcaggagccccgaggtcagacccagtccctctgttttacactttggagactttgggcaaattcccacagccc

SEQ ID NO: 218445 - DNA, 122 bp, Homo sapiens
ctgctattgcttgagcagctcccttaacccagtctggctggttctagacttcccagctgccggagaaagtgatacacttccagggaagcagctttccttgccttgcccgccctgcagctggc

SEQ ID NO: 218446 - DNA, 122 bp, Homo sapiens
accaagctgctaccttggttttgtaaatgcggagggccaggctctacatgggctggggtccgcggggaggcagggcgccttggtcgctgacttcagccgttgagacctggtgggctgcgggc

SEQ ID NO: 218447 - DNA, 122 bp, Homo sapiens
accctgaaccaagttacttaacctcgtccaccaccgtggcacccgtggggtccgtgggcccgtcggtcttccaggagggattctgtgtccctgttattgtgtgtcaacatgtgttagcctga

SEQ ID NO: 218448 - DNA, 122 bp, Homo sapiens
aacctgttttcacttcctctgaaaccgtccccttgacctgctttcttctgcagaggcacacgctgccccactttgccctgtctcttccctgggtgagactggtgctcctggtgcagactgag

SEQ ID NO: 218449 - DNA, 122 bp, Homo sapiens
ttcatttgcacaactcactaggtcacacaccaagaaagaggagacatgagattaaacccacgttttctaactctgggctcattttggtgacgtcaggtgatttgggtgagaatcccagttcc

SEQ ID NO: 218450 - DNA, 122 bp, Homo sapiens
aatcattcaaatgtgcaacaatataccatgcagtacgagagggcgctgggtgagcccccacgtctgtgactgtttgtgtttgagctgcacgatggcagggggttcctggcgctgttctcttt

SEQ ID NO: 218451 - DNA, 122 bp, Homo sapiens
tgttcttttagctcctggggtcactgtgggctaagagaggtggagacaggctttgtgcaacgctgccttgtccccctgctcagaggcagatgtgacttaataggaagaatcctagaggcctt

SEQ ID NO: 218452 - DNA, 122 bp, Homo sapiens
gctcttaacaatcatctcctataatttcctgaaagtattaaagtgtcactttcagctgggcgaggtggctcaagcctgtagtcccagcactttgggaggccgaggagggcggatcacttgaa

SEQ ID NO: 218453 - DNA, 122 bp, Homo sapiens
taccaagcataggattcccaaaattacagcaatgaggcgccaaggaggagatgcagcacacgatcctgaggagccagagggggcagaaatggaataaagaaagagaatgacggatggtgggg

SEQ ID NO: 218454 - DNA, 122 bp, Homo sapiens
ccagccagccggcgctgggccacaccccgccgggggagaccacctggtgtttcatcacctcgagcccttggacttcagccagtcacttcgtttgtcaggcctccgggcagataaaggggtgt

SEQ ID NO: 218455 - DNA, 122 bp, Homo sapiens
tcaccgtacctgaatatgattccatttgcacccctcctcctgtttcctctgtggggagggcgctgtggagaccataaagcctccagggtgtttctctctccctcttcctagagagcagcatc

SEQ ID NO: 218456 - DNA, 122 bp, Homo sapiens
ggctgcctgctgggctcactttgctcctcctggaaccagcgcacaacccctcaccgtagacgcccctgtccccatgttggtgtggcgtctgccgccaactgactctgacaaacacacggttg

SEQ ID NO: 218457 - DNA, 122 bp, Homo sapiens
gcagaaaccgagggacctatgcaaccgctgggccatgccctccaggctgggatgtagcgacggggacacagacccagggagagaaaaggatgtcccagtctccggcagggcagagacgagaa

SEQ ID NO: 218458 - DNA, 122 bp, Homo sapiens
ggcggcgcgccgcggtggcccggcgtcccgtgtgcgtccagtgtgcgccccgcgggggcgcggccagcgccagagtagatacctgtcccgcccgccgcggccagcagcctcggaggaagcca

SEQ ID NO: 218459 - DNA, 122 bp, Homo sapiens
ggccattgcccgagcgatcagtccatataaggctgggctccactcacgaacctggggaggcggggagagggggagaaagagagggagggagggaaagaaagagggagggagggggagcgaga

SEQ ID NO: 218460 - DNA, 122 bp, Homo sapiens
ctgttgaaaagaggcagaatccagtcactgtcctcagggagctcattgtctagaagcctacgtgattccccacagcaatctctccagttgggtttctcatcagttggaaacccacaggacat

SEQ ID NO: 218461 - DNA, 122 bp, Homo sapiens
gtcaggcagttgccctggctgggaatgagctgcaggccacacccctccctagagtcctgccgtcctgctggccctggccttggcagaagtgcaggttgttctggttctgcccagcctccttc

SEQ ID NO: 218462 - DNA, 122 bp, Homo sapiens
gcggggacgtggaggtgacatttctctgacccacaggactgtgggcgccctgccgagcgtcgcgcggtcttggggcgacctgcagtggggcccctgcggcgcagcgcgcggtgggactggcc

SEQ ID NO: 218463 - DNA, 122 bp, Homo sapiens
gttaagtagaaggtgcatttcaaaaatgaaggaggtcagtttgcctcagaccaggaatttcgaagaattgccacagagcggttgaagtctatacttattttctgtgtattttatctcctaat

SEQ ID NO: 218464 - DNA, 122 bp, Homo sapiens
attgataatgcattttacaatcagtgtgctagtttagaatcaaggaaattcaataattaccgtgatttaaaatgcctttccatagaacaactagaaacaaagctaagaggctaagcattgct

SEQ ID NO: 218465 - DNA, 122 bp, Homo sapiens
ccggaggctcggggccaaggccacccttccgcacccaccactctgggaggctccagagcgcggccctgagatagtgccacactcaccccctggaaaggaggcaaggccgccctggacggagg

SEQ ID NO: 218466 - DNA, 122 bp, Homo sapiens
ccttctgccaggctttcagctttggtttctgaagaggcagtctgatctttggtgaaaacacgggcagaaggacccaagtttcattctggctcaaccactcacttcctgcgtaaccttagcct

SEQ ID NO: 218467 - DNA, 122 bp, Homo sapiens
cctggacgcgctcagtctgttgactcagtgcgggtgacccagctgggatctgtgcgagggcgcggccgcgcgcacccgcgcgctcctggcgcaggcagagctggcggcgccgaagtcgcgcc

SEQ ID NO: 218468 - DNA, 122 bp, Homo sapiens
ttgcgcttttaactgcttgtggttgagtggcagcatgagcgagctctgcgtattccaacccggcgttaagaatccttcactagcttttcttcccgacgctgcttatttatctatcggtagca

SEQ ID NO: 218469 - DNA, 122 bp, Homo sapiens
aagagccgcgtctttgctaagtcatgtccctggcacagccgccccacacggcacgtacgccgacatcccttatctaggaggtggagaaacgggcagggagactaaatacctcagaccaaggc

SEQ ID NO: 218470 - DNA, 122 bp, Homo sapiens
gcagagtaacgccccgctgctcagtggcagagggggaatcagaagccagccgtctgcattcgaagtccaagctctgcccagcacactttgtgctgcgtcctaaaagcacgaaatggcaggga

SEQ ID NO: 218471 - DNA, 122 bp, Homo sapiens
gcccggcccgcaggcccgggcacacttacgtggagagtttcctggtccagaagaggcccccgggccacagctcttggagctgcacggcccggcccaggttgcatttgatctgggccagctgc

SEQ ID NO: 218472 - DNA, 122 bp, Homo sapiens
tcctgcgtgactcagggagtttagagcgcaggcgtataactccacttgttatcgcatccacggagccataacatgggaaggccgtcccttggcattaagccactattgtctgtaaaaggtat

SEQ ID NO: 218473 - DNA, 122 bp, Homo sapiens
cttaactctgtgtcaggtcacggcccagtggcaataggtacatttacatggttgtgcaaccgtcaccaccatccaccccaaaacttctctcccaaactgaaattctgcacccatgaaatccc

SEQ ID NO: 218474 - DNA, 122 bp, Homo sapiens
aatcttgtctttccggcaggtctcatatgagaagtatatttggttgggaatgctgaattccgaaatgctgcagaagtagggttcaaatggttttacccatgtcagctggacagagatgcctt

SEQ ID NO: 218475 - DNA, 122 bp, Homo sapiens
cctgagacgctggatgccctgaggctgacagaagacagggagcagactatgagcctcagacgccggggtcccagggaggtcagaggctgcgggcagcgacagctgtcagcggcccagctcca

SEQ ID NO: 218476 - DNA, 122 bp, Homo sapiens
ttcaggaaacaggaagctgtcagccagggccgtgacccctcaggatcaaagaccccgagccgcgcacaatggcctgtgaggaggccggtgggtgggggccgctggtcagagttcaggcccac

SEQ ID NO: 218477 - DNA, 122 bp, Homo sapiens
ctttgggagaggccccgtgtggcaggagggctcatttcacaagccaacaggcctctagctcgccgctccaggtggatgtttggtgacctgaagggcccttcccagtccaagttggctttgca

SEQ ID NO: 218478 - DNA, 122 bp, Homo sapiens
ggggcgagggagggcgcgcggaggctcgcggggaccactggcgcccccggacccgctcagcggtccctgctcacaggcaccgcccccaggagcctcggcaggggcctaggacgccccggtgt

SEQ ID NO: 218479 - DNA, 122 bp, Homo sapiens
ctccgcactttcggtgccagaaaatgcccagaggagcggggcggccccagagcctcctttcggggcgcgaggcccggcgcgtgtgtacggagtccagtccccccagggagtggggtgcccgc

SEQ ID NO: 218480 - DNA, 122 bp, Homo sapiens
gaatcccatcgaagacgatttgatctttcgagtgggtaaggagagggcttctgtgcccgacgcctgagctggcactggttaaggggtaactgggcacgtgtcattgcaaatagcaacactgc

SEQ ID NO: 218481 - DNA, 122 bp, Homo sapiens
gggaaaagaagtaagatttccctcaaaggcctcccttaagtcctttgactccaccaaacacgaagaaaaatcccggggagtgggggtggggagagtgacattttccgatggaaaccgacggg

SEQ ID NO: 218482 - DNA, 122 bp, Homo sapiens
ggctccctctgtccactgtgtacatctgcctctcaggcctcgcaggacaacacgtgtctgcgtggacctgggtggtagatgtcacggtgttcctgaagcacgaggcacacacctgcaccacg

SEQ ID NO: 218483 - DNA, 122 bp, Homo sapiens
gctttgccttaggctgtgcctaattcgaaaccaaagcgcgggacggatgaaagtacgggtcgcgagaggttgttcgcgccttgagagttaagcgaagtgtggtggcttccaaggtaccgaca

SEQ ID NO: 218484 - DNA, 122 bp, Homo sapiens
aaccacgattctgtaaggtggaaattagtactgccttttcctgggacctatgttcccctccgagccacgcgagggcagcaacgcgcgcactctgaggaacacccccttcctcaggactcgtc

SEQ ID NO: 218485 - DNA, 122 bp, Homo sapiens
gtacccagtgcagtcctgatctccagctctccagcggcttagaacagacacagaatgggccgggaccagggacccaccagagacgtctgtagttaatagctggcgctcttccactaataaag

SEQ ID NO: 218486 - DNA, 122 bp, Homo sapiens
accccatcccaatctgatttttgagacgtgcattttcaggtagtcctaaactgtgaacagcgagctttgtgtgttatctagtgggggtggggatgaaaggggaggagactcccactgcccgt

SEQ ID NO: 218487 - DNA, 122 bp, Homo sapiens
gtcaatcagaaggaactggatggataagcagaaagcagataaaggccacgggacagagcccgaggagatgcttggaggcacagcctggaggttttcctgcagggacctccatgcctgctggt

SEQ ID NO: 218488 - DNA, 122 bp, Homo sapiens
ttggaatcaatcagaacagatcccatttcctcacgtgtaaagtgaggaaaacaaaacctacgtaattgaatgatcatgaagagtaaataaatatgtatatgtaaagcatttagaaatgcgtg

SEQ ID NO: 218489 - DNA, 122 bp, Homo sapiens
aaaaaagaatgaacgaaagaaagaaaaaataatttactgtctttgtcagtgaagaaagaacgggcttcggaatataatcatttgctgtgtgatattgactaagtttcttgacctctctgagc

SEQ ID NO: 218490 - DNA, 122 bp, Homo sapiens
acccctggacgctgcgtcctgatttccccagggacgcaggcctggttgggagaaggggtgcgagctccgattccggactctgcttgggtttaaaacccagattgagggctgggcgcggtggc

SEQ ID NO: 218491 - DNA, 122 bp, Homo sapiens
tcacattggtcctggcagccttcccgccacaccaaccaaccaatagacagggcgattctgcgctcccggccctgctgcaggctgtctcgcacttgtcattggtcactgcagccgccccaccc

SEQ ID NO: 218492 - DNA, 122 bp, Homo sapiens
cccgccggttcccgcgcccgctcccagcagaacagcgaccgccgcgcgctcccccacttccgctcacaacatggcgcctaagcgatacctgtctctcaaagcgaggctcggccgccgccacc

SEQ ID NO: 218493 - DNA, 122 bp, Homo sapiens
tgtaaaccaaaaataaaattgtaagcctccccaaccaactgaatgaactgagtctctcaacgccaaagttaatctgaaaaaccagttcagtccctgatgggaagcagggtttggatatgtcc

SEQ ID NO: 218494 - DNA, 122 bp, Homo sapiens
gggatcggcgcgggagcgcgagctgcaggcgcattgtttcctgactgccttatatctcgtcgcgcgcccgggacccagggactggggggcgggccctatgggacaaaccccgccctctccct

SEQ ID NO: 218495 - DNA, 122 bp, Homo sapiens
ccagcctccgtttttctgcccgtgggtatgtgtggttgacctccttaaatcagagccaagcgcgtgacccagaactctgcacaatcacccacgcccacggcaaagcagatgaggctctagag

SEQ ID NO: 218496 - DNA, 122 bp, Homo sapiens
tctcttcctgtcttcttcaggaagatcttcaatatctgtgccatttgagccagcccctttcgctagataaggagcacccagagctagtcacatgatagaaagtgctggcggcttctggaggg

SEQ ID NO: 218497 - DNA, 122 bp, Homo sapiens
ttttctcaatgaacaagaggccgaagcgccaacggcaagtcccttttcctggcagatgagcgaatgggaaaagaaaacggccttacggagaacctaaagccagatcgccaagtggtgcggcc

SEQ ID NO: 218498 - DNA, 122 bp, Homo sapiens
aagagctcgtgagggccagaaacggaatgagagggaggctccccagcaccccagaggcctcgtcgcgtgagtggacaggttttggctcacccaacacagagcatagttagaaacgtctcgag

SEQ ID NO: 218499 - DNA, 122 bp, Homo sapiens
agtgcaaacttttgttttcccaaagagctgaaaagccagatgggttgggagacaatttcccgagcccaggctgcaagctcctgactcatgagtgctttgcctttgcagaatttactcaaccc

SEQ ID NO: 218500 - DNA, 122 bp, Homo sapiens
attttaatcattttgtaatttcagtatggctctttgttctcaaacacatacataccaccacgcacattcttttaaacagctgccacacctcacctccaacagaatgccaaaaatgaaatgtt

SEQ ID NO: 218501 - DNA, 122 bp, Homo sapiens
gctctagcgcacagtggaatatggcggtgcttccggtcccgctgccctcagcgaagatggcggcagtggagaagcggcggcaagcggtaccaccgccggccggtttcacggacagcggccgc

SEQ ID NO: 218502 - DNA, 122 bp, Homo sapiens
tcgccccctgttctccgcgctcctcggccgggtttcatggcctcccctctcggtctgtgtcgcttctaggatggcggaggtaccgcctgggcctagcagcctcctcccaccaccagcacctc

SEQ ID NO: 218503 - DNA, 122 bp, Homo sapiens
ctagcacacacggatcatcatactctgataacctcagaaacatgcattgaccttcaactgcgtgcagtcagggtgaggaggggtgagggcgccaggagactgagggtctggccagagataag

SEQ ID NO: 218504 - DNA, 122 bp, Homo sapiens
gtgtgtagcgtggcggtggcgttggcaatgttggcagctccggggggcgggggctccatacgcggccccaccgccccccaggcctgggttccgaggcggcggtggaggtggtggtggcggtg

SEQ ID NO: 218505 - DNA, 122 bp, Homo sapiens
gtggttatgttggagcccctcctttccacagacagtgtcttttctgttctgcgcttcatgcgagctaactgttcttttcataaaactacccttttatacttagatgcccctgctgcatactt

SEQ ID NO: 218506 - DNA, 122 bp, Homo sapiens
ggacttccggcgtcctcttgccgtggttgatttgattttctctggtgttttcactagttccggcctttggcgctctatgacgtcaccgaagtgacggagcggaaaagcgcgagaagcggctt

SEQ ID NO: 218507 - DNA, 122 bp, Homo sapiens
tgcaggcgcggaagccgtggtgctcggccggcagagcactcggtttcccagagggctgagcgcgccgcacggaggtgcggcgccgaccaagatggagactgccgagcagccttgagccggta

SEQ ID NO: 218508 - DNA, 122 bp, Homo sapiens
ctcacatttcacactggatgttcacaaagactctgatttaagcaggggttgttttacaaacgagaaaattgggattcaaagacacaggtgggtcttggacggcaatctgctgattttttttt

SEQ ID NO: 218509 - DNA, 122 bp, Homo sapiens
tcttcccataccctacagcgtgctcggaagcattcccgagggtttctgcccaacgcctcccggcgctcgggacaacactgtgtagcattgatactggaatgatataaataaagctttggtgt

SEQ ID NO: 218510 - DNA, 122 bp, Homo sapiens
atcagggacaggtatcagccattctcttgctctttgggttctggcagctgagctggggctcgggccttccatgttctctctgaccatcttgggtgtcctctgttttcgcccggctgactgtc

SEQ ID NO: 218511 - DNA, 122 bp, Homo sapiens
taaccagcagcatgcttcccagtgtgaggggctgcctgggatgtctccactgccaagggacgagggagggaacagaacacagctcggatgccaatgctccgctggaggggaggcggctgcca

SEQ ID NO: 218512 - DNA, 122 bp, Homo sapiens
gtgatgtcagcccagggactgtgacatcactcagtggagacagtcagagaagggggctcccggggccctccccagggaactggccctgggcccagaccagatggaggaccccgaaaagaaca

SEQ ID NO: 218513 - DNA, 122 bp, Homo sapiens
gcggttctcaggccgacggcgctgccctggaatccctggcacccactcaactggggagcgcgttcacgcaaccttagcaggcagggctgtcctgtgaggagtcctgagtgctatgttttgaa

SEQ ID NO: 218514 - DNA, 122 bp, Homo sapiens
ctttgttctcgccacctagcggtccggcgtgcccctgcaaggacccggcaactgctcccgcgctaaccagaccagtgatggattcattgcaatgcggaactttccttgactgcaaaagtgat

SEQ ID NO: 218515 - DNA, 122 bp, Homo sapiens
tcacgcgccccccgctcccccggcgccccctcctccacctcccctccccgcgcgcggctccgggctccccgctccgtgcccggccgatcatctttctagcaccctccagccttggcctccat

SEQ ID NO: 218516 - DNA, 122 bp, Homo sapiens
tacctcaaatctccagaaggtctgacatgggggatgctgtcaacagactctgggtggccccgtccccaggtagaaatgaaaggggcaggactggcttctaaagaaagaagaaatttatagac

SEQ ID NO: 218517 - DNA, 122 bp, Homo sapiens
cccgggggcagatctgtgctgaggttttgcagggatcagctggctgtctccgcccctgcacgtcccggctccttctcagctcaccctttcttgttgtgccatgacaggtggctgccacgcac

SEQ ID NO: 218518 - DNA, 122 bp, Homo sapiens
agcctccggaaatgtgggacgcaaggctggggtgtcgcggcagtggctgaagcttcccttcgccgcatctctctgcagcaactcggtgagggctttccctccagcctggcggtgtggacgcg

SEQ ID NO: 218519 - DNA, 122 bp, Homo sapiens
tggtggcagggactagggatgcagcctccagcctggaacatgcctcagtggcagagcccacgggaccagctgatggggaagacagagttgaaggaaaaaaagaaacaagttgccactgacag

SEQ ID NO: 218520 - DNA, 122 bp, Homo sapiens
gagggggctttgcagcttttagagagacacacaccgggagccgaggctccagtctccggccgagtcttctcgcagccgcaacccacctggggccagcccagagctgccagcgccgctcggct

SEQ ID NO: 218521 - DNA, 122 bp, Homo sapiens
cctcatctcccccttcccggcaccctggatctcagcgaactgtgaggccctggcagagaacggaccccgcagctggggctgcgagccacggcagtggggaagaagggcggttcctctccaaa

SEQ ID NO: 218522 - DNA, 122 bp, Homo sapiens
ttgatgcagtcacctttaggataggacgtttgccacatgcagtcgagtcattagaaatcccgtaactctgccactggagagagcgcggatgcaagggcgggggccacgcgggaggggagggc

SEQ ID NO: 218523 - DNA, 122 bp, Homo sapiens
acttcccagatggggcggcggccgggcagaggctgcaatctcgacactttgggaggctaacgcaggcggctgggaggtggaggttgtagctagccgagatcacgccactgcactccagcctg

SEQ ID NO: 218524 - DNA, 122 bp, Homo sapiens
ggcttccggtgctgcgggcccggagacaccgctgacctcgcggggccggcatcctctccgcgccgggacccctggacccccggggactctgatcccatcactccgacctcaggccctcccca

SEQ ID NO: 218525 - DNA, 122 bp, Homo sapiens
gagctgaaatctgagctgtggaaaggagccaaccatgaaatctgggatgagagcaatctacgcagagtaaacaagtgcagagcaccccaagttcaaaggccagacaaaggagaaagtgtgac

SEQ ID NO: 218526 - DNA, 122 bp, Homo sapiens
ggttacatttaaaaaaaagtatggatgttaaaccattggaaatggcactgtaaatgacaccggaaaagatcgcctccaggcactgtgtggaactttgcaaactcgggtcctcacccgaggac

SEQ ID NO: 218527 - DNA, 122 bp, Homo sapiens
tacgtcacggcgagggcagttcccctaaagtcctgtgcacataacgggcagaacgcactgcgaagcggcttcttcagagcacgggctggaactggcaggcaccgcgagcccctagcacccga

SEQ ID NO: 218528 - DNA, 122 bp, Homo sapiens
aattttattttagctgtatttgattggttatcttctcttagtgtgttccattatataaaacgttctgaaataattttagacttaggcaaatgtagtatggagagttaccatactcttcactc

SEQ ID NO: 218529 - DNA, 122 bp, Homo sapiens
gatggggaagtggaccagaggcatatgcgtcattggcagtgtctaagcactcacgataggcgtggatcacaggggctcgctctgtaattaaaaggaaaagggtttttgttgtgttgttgttg

SEQ ID NO: 218530 - DNA, 122 bp, Homo sapiens
ctgagttctaaaatggcttctgaacagtccagaggtaccagcacataggagcagggggaccggagaccgggagagagattgtacatttaaaaaaactacgcagatactattacacttcaatt

SEQ ID NO: 218531 - DNA, 122 bp, Homo sapiens
agtggacaagtccagtaaggcaggcatcatgccacagcagctcctgatcaccctgcctaccgaggccagcacctgggtgaagctgcaacatccaaagaaggccgtggagggggcgcccctgt

SEQ ID NO: 218532 - DNA, 122 bp, Homo sapiens
accagcacccccatcccccatgtggactctagtggactctgccccctttaactgtagggccgcaggtgctcaggccagattccagaaccctgagggcattccaggcggtgggcagctgggcc

SEQ ID NO: 218533 - DNA, 122 bp, Homo sapiens
gaggcttctctttctcctgtagtgagaatcccacagtcttggctaggcctcttacgcacacggccttaccaggtcagatacaatgttctgttccccatccctggctgggagatttcaaggca

SEQ ID NO: 218534 - DNA, 122 bp, Homo sapiens
ttaggcctctgcatgctaatgtttctatgtgttactgagccccaaggagcaagtccaaagcgcatcgcccgggtcccggtctccatggaaacggctctcccgctttgcgcgccagccgcagg

SEQ ID NO: 218535 - DNA, 122 bp, Homo sapiens
cttggacggtggacatccacccctaagcggcaccactgagctccggatccaggtaaccgacgccaatgataatcccccggtattcaaccgagacgtgtacagagtcagccttcgggaaaacg

SEQ ID NO: 218536 - DNA, 122 bp, Homo sapiens
cctgggtagggaagctcgagtaccaccaactggaaagacagggatgcctagtagctgattcggggcccattgtcgtaggctttgtccactttgcaaactggagacagggactcgactcacct

SEQ ID NO: 218537 - DNA, 122 bp, Homo sapiens
ttcaaatatcaagattggtgttgtcataggtgacctgactttgtgaaaggttgaacaactcgtggccaagttccaaataaaatagggagcagaagatttggcaaaatttattgataagacta

SEQ ID NO: 218538 - DNA, 122 bp, Homo sapiens
acagagcaacgggcaggggcaggcgagggggatggcctgggtcacccctgtgcatggccacgcatcccctcaacaccgaagcagccgcaggacatccccgccaggacaccaggagccgcagc

SEQ ID NO: 218539 - DNA, 122 bp, Homo sapiens
atttccctcacaactctcttttttccaatctttcttcatgtctgttgtgttcaaaactctcgttgaattctctatatctcttcttaggcaggtactcacagctctagattagtctagtgagg

SEQ ID NO: 218540 - DNA, 122 bp, Homo sapiens
tgaccgcctgagggactcacgcacgcactaggaaaccgccgccgggaacttctgagcttgcgtgctctatcagtacagggtcacttattttgggctgtcgttttagaaacgcttcttctttt

SEQ ID NO: 218541 - DNA, 122 bp, Homo sapiens
cccactgaaccccaacacccagcctagcagcaaaagtgaagcttccaggagagccacgtgcgtttgccaaagtggagaaataaactgcgggcacctagaattaggtcaggtccaaggaacgg

SEQ ID NO: 218542 - DNA, 122 bp, Homo sapiens
cacttccatgtgtgagtcactgagaaaaatccctctgctactcccactgtaccattgcctcgggcccagaaccactgtattcttgcttccacaacaggaatttaaacaaaagaattgtcttc

SEQ ID NO: 218543 - DNA, 122 bp, Homo sapiens
ctcagcaaggtctaaccagcttaaaatctttactgggatttgtactgacatgcaatataacgatccttacccacttcaagaaatgccatcctgattctttgtactggcttctcctgcagacc

SEQ ID NO: 218544 - DNA, 122 bp, Homo sapiens
tgccaccggaggggttcaagttggccgttctttccccagggaggagggccgggaagcagccgggggccaggctctgttcaccacggcctattggccgcagctatttggaggaaagtttcagc

SEQ ID NO: 218545 - DNA, 122 bp, Homo sapiens
acgcgttctgcagaagttagatgacgatggattgccgtttataggagcaaaactgcagtacggagatccgtattacagctacctcaacctcaacaccggggaaagttttgtgatgtactata

SEQ ID NO: 218546 - DNA, 122 bp, Homo sapiens
ccttccctaaattgctgtctccttataccctccagagtccaagactcacgcgtccaaacacgagctccagcagcctctcggtcaaagccgcccacctctgacagccatagagatgaaacagc

SEQ ID NO: 218547 - DNA, 122 bp, Homo sapiens
ttttaccaaggagtagctggaactgagggggttagggagatgaagtaacttgttcaaggtcgtggaaaataaacggcagagcctggattgaagagagtctggttctaacccagtgtttctca

SEQ ID NO: 218548 - DNA, 122 bp, Homo sapiens
cagatggtgtggttgccgggcggaggggctcctcatttctcagatggggcggctgctgggcggaggggctcctcacttctcagatggggcggttgccaggcggagggtctcctcacttctca

SEQ ID NO: 218549 - DNA, 122 bp, Homo sapiens
agcgtgttgcggcgagccatggggaggtggagcgacttgagcgtcatggcctccatgccccgcaccatgctgttcatcacctccaggctgtggcgcttgttcacagtgccgtggtgcttggt

SEQ ID NO: 218550 - DNA, 122 bp, Homo sapiens
caagcagatccagcaggagctggagcagtgcgacgtccccgaggacgtgcgggttggctgcgtgaccacagacttccccaggcagaatgttctgctgcagatggggctgcacgtgctggcgg

SEQ ID NO: 218551 - DNA, 122 bp, Homo sapiens
aaaggtagttaactatagcccttcccacctttccctctcctgctctatggactgcaggcacgccaagtgatggaaagagagttcaataacctgttggccttgggcacagaccggaagctgga

SEQ ID NO: 218552 - DNA, 122 bp, Homo sapiens
agtttccccatcatcaagatgggagattggctgtcaactctgccagcttcctgcctggagcgcagccctgacacccttcctgcaagatacacgttagcaacgaccgttctctctacgccaag

SEQ ID NO: 218553 - DNA, 122 bp, Homo sapiens
attattttttctgatctctaaatgttgagattgaatggaaaaggctcacatttgcatttacgttgcaacctctacacaaaggttgcacattaggccaggcgcggtggctcacacctgtaatc

SEQ ID NO: 218554 - DNA, 122 bp, Homo sapiens
cttttgtccactctttcaccttgctggatttgtgctgccttccttgctgtaggaagcccacgcttgggaaataacattcccacagaaggtctgagaggctctgacgggccaaggttgtaaac

SEQ ID NO: 218555 - DNA, 122 bp, Homo sapiens
cttggctggggcccgggtcagcgtcctgacaagtcccaggaggtgctgatggaggtacagcgaccacacttggaagatcgctgccttgactcagcacaccagagaatccacgtggtagccac

SEQ ID NO: 218556 - DNA, 122 bp, Homo sapiens
acccacccttaaaattaaggcctgtctcttctgtgtagctattggactatcattagacttcgtttatataaacaaagtcattattcaagttcgagttacattctgactgagttacattctga

SEQ ID NO: 218557 - DNA, 122 bp, Homo sapiens
tgtggggagcgcctctgccccgccgccccgtctgggatgtgaggagcgcctctgcctggccgaccccgtctgggaactgaggagtgtctctgccggaccgccaccctgtctgggaggtgagg

SEQ ID NO: 218558 - DNA, 122 bp, Homo sapiens
gaaccgctgggtatggagcacacctcacctgatggacagttgatttatgctcaccttaaacgctaattgagaagcagcacaaaagaggaactggaaaaaaactgaattttactcctcatctc

SEQ ID NO: 218559 - DNA, 122 bp, Homo sapiens
gaaggcctgccccttccaagtgtctgcaagggctctggtcccaagctttaaaatcctgagcgaaggcactgcgggccgacctctcctctcccagccagtcgtggctggcctttcaaagtgtg

SEQ ID NO: 218560 - DNA, 122 bp, Homo sapiens
gtaggctgctccttccgggggccgttgcctgttcccaccccccacggcccttctctgccgcgctcgttcacgcctcacgcccgtgctgcgctgtcccctgctgtgtggtgccttgtcacgca

SEQ ID NO: 218561 - DNA, 122 bp, Homo sapiens
gactcggaacccggacctatgttctcgcgagagttagcggcctccggtgtgggatggccgcggagccgggcggagctggcttgcggctcccggggccggctctccggccggagacatggccc

SEQ ID NO: 218562 - DNA, 122 bp, Homo sapiens
tccttacggggccctggcaagatggtggggcaactgaggcagcctgggcctggggagggccgggagcccagctccgccgcagactctgctcaccgacccggcgtgcgcccgaggaagcacca

SEQ ID NO: 218563 - DNA, 122 bp, Homo sapiens
gataaatgttccagatatcccattgacaataaggtctgggtcactttaccaagtttgaggcgctctaccatgggtctttcattcctggacaataaactgtctgtatggcttttacaactccc

SEQ ID NO: 218564 - DNA, 122 bp, Homo sapiens
tcccgacaagaactttttctgccttggcttctaattggtggctttcgcctgcaccttccacgggtctggaatggctgcccctttcggtagcacggactctgcgcctcctgattggccaaggg

SEQ ID NO: 218565 - DNA, 122 bp, Homo sapiens
ggaaattgtcattttaaaccacaactgaacagagcaacttctgccttcccgtggagaacacgggggtgggaatggggcataatttatttaattggaggaataaatctcttcactgttccttt

SEQ ID NO: 218566 - DNA, 122 bp, Homo sapiens
gtaatgcaagccaggacgcgcggagactcttaattgaaaattccatttccagccccatcacggctcacagcgccgatgctatcagagatagacgcggccagcacccgcagctcagccccaca

SEQ ID NO: 218567 - DNA, 122 bp, Homo sapiens
ttatcccttgcattttttccttcagccgggaattctccttcactaggcgctcaaaagctgcggatgcctctcctgagggcacgctgcccccagggtcgtagatccggtacggtcctctccct

SEQ ID NO: 218568 - DNA, 122 bp, Homo sapiens
cgaactcctgacctcaggtgatctacccgcctcagcctcccaaagtgctgaaattacaggcgtgagccacctcacctggccatgttctttatggaatactacaatgtgttgtcacaggattt

SEQ ID NO: 218569 - DNA, 122 bp, Homo sapiens
caggtgggagggagagaccgcggagccacggccccttccctcctagcctggcgctgtctacgggaaccaccttcacacctagtttctgaaaggtggatttggcttcagggatttccagggag

SEQ ID NO: 218570 - DNA, 122 bp, Homo sapiens
gcgtaggccccacaaagaagtcccatgttcctgcaagctctggctgccaagcaaccaggccgccagcgccaccagctgtggggccgcgtacagccaaggccagtaggtacggtgctcgctgg

SEQ ID NO: 218571 - DNA, 122 bp, Homo sapiens
catgtggcagaatggtttggtctccctccctctggggcacacaggccagaatgggcctcccgtctccttccaaagtggtgcagcccaaccgccaaaggccacaggtcacctagctggcagca

SEQ ID NO: 218572 - DNA, 122 bp, Homo sapiens
ggggcgagaaggtgggcgcggcctttgagcctgtgaccgacttgtggttggctgcgggggcggagcccgcaatggaaagaggcgtggccagttagaaagctcaagtccttagcaaccgcgcc

SEQ ID NO: 218573 - DNA, 122 bp, Homo sapiens
tttgccatggactgtctctactttccaaacgaccgagcgttacctctctagctttttgtgcggcaagctcagcttgtctctgtcgctcgagttcttcgagcaactgcttttccatgatgcgt

SEQ ID NO: 218574 - DNA, 122 bp, Homo sapiens
agaatcacagtactgggccccatcctcataatttgtgattcagtaggtctggaatggggccgagaatgtgtatttctaacaggttcccaggcaatgctgttagtccagggaacacactgaaa

SEQ ID NO: 218575 - DNA, 122 bp, Homo sapiens
cttccttaatgctctgggttctggagacagaccacgtctgttgggagtcctctgtgcccacgcctggcacagagcctggcaaagagtaagcgctcaaggaagatctgtgaacttgatgcatg

SEQ ID NO: 218576 - DNA, 122 bp, Homo sapiens
cccagggattgcagggggagggggtgttcccagacctcttcctggcccgcgcggaggggtcgcccctgaatccctgggagcgagacctcacctgtccgtctcccaactcctcatgcccagcc

SEQ ID NO: 218577 - DNA, 122 bp, Homo sapiens
accaccagaccatcaacaagctccccaagtttcccccgaactgcctggcgatttcgaagtcgaatgttcatggctcctgactgttcctgcagtgtccggatctcagagctgatggagctgag

SEQ ID NO: 218578 - DNA, 122 bp, Homo sapiens
gtgctgtcaggggaagggggcgtcagggcatccactagcggggtccgggcagagtgacagcgggcagcggggactcgcgggcggggcgagggggtgccccctgaggatgcgggaggagcggg

SEQ ID NO: 218579 - DNA, 122 bp, Homo sapiens
tggtggtggacacccacagctctcctctcctcctcctcccccttcatcagcagctgaactcgaggggagagcagcaagagactgtgcaatggtttttgcataagttcatgccacacacacac

SEQ ID NO: 218580 - DNA, 122 bp, Homo sapiens
ttacagacaaagggccaaatcttggtcttgatctgtgccaatcgacttcaaaagttgtgacgttcttggatcagttctgctagggtgagacccgaatttggatccccaacagttctggagta

SEQ ID NO: 218581 - DNA, 122 bp, Homo sapiens
cgcgccggtgcgtccagcaggtggcagcagcgagcggccgcgccccctgcgctgccaacccgcgagcccgcatcatggatgtcgagctcccctatttcgcattgctagccctggaattcgag

SEQ ID NO: 218582 - DNA, 122 bp, Homo sapiens
ctcttacttccctgaagccgctccagccccacttcccgaaggtcccgcttccgggtggctcgcttcgccacctgcggtcccctgcctcggcttgggaacgccaaggacatcccccacggaag

SEQ ID NO: 218583 - DNA, 122 bp, Homo sapiens
ggtgaagcccgacaggagacataagactttgctggtatgtgtgggtgggagtataacggtcgagatctgtggaaagaaaggtcttaggaaccaggagctgaggcacgtgatgtgctgagaag

SEQ ID NO: 218584 - DNA, 122 bp, Homo sapiens
ccttctctctcgctgttgcccccacctgtttctgtgcacatttatgcatggggccactgacgggcttgtgctaatggataatttggaagctcctcccacacatgctggcatcatgtcccctg

SEQ ID NO: 218585 - DNA, 122 bp, Homo sapiens
gtcaccccactaacagaagtccctccaaatgtacttctgtagtccccagggaattgatttcgcaggatggaattatttccctgaaataaacagacagtcaaaggtcactacaactggggcct

SEQ ID NO: 218586 - DNA, 122 bp, Homo sapiens
aatatcttttcccaaggaatgtctccgagtttacaagatgagcgccaaggtcacgccccccgccctccctcacagccctctgttcacagcagcaccgttctcttgtggccggttttgttgct

SEQ ID NO: 218587 - DNA, 122 bp, Homo sapiens
gtgcgtgtggtgagcggcgggccccgggctggaggggccgggactgggcagcgcctaaagcgccccgtgccgcttaacgcggtctctcatagccgctcgccttcctttcacttcctgttcct

SEQ ID NO: 218588 - DNA, 122 bp, Homo sapiens
gggaccagggaggggcatggaaatccggtcgccaaatcagcaggcagagccgagctggggcggcctccagcgcctcgcctcggtcagcgatcactctggagaccagcgatccccgtggggga

SEQ ID NO: 218589 - DNA, 122 bp, Homo sapiens
gctgggacaacaggcgcctgccaccacgtctgggctaattttttgcgtttgtagtagagacggggtttcaccgtgttagccaggatggtctcgatctcgtgacctcgtgatccacccgcctc

SEQ ID NO: 218590 - DNA, 122 bp, Homo sapiens
aaaaaaagtaacaatcggatcgggctttagtttccaggcaaccgtgttgcatgagtcccacgtggtggcaggtcttccatgcatgagccatatttacggtgaacggcggcaactccatgccc

SEQ ID NO: 218591 - DNA, 122 bp, Homo sapiens
agaagttaaattattgccttacagttccaaaccaattcttcattgccttgctctgtgatacgagactaacctaggctgactacatttctcctttcccagtggagcgagtggctattaggttc

SEQ ID NO: 218592 - DNA, 122 bp, Homo sapiens
tcacttctctgatcccccagtttcttctgctgtaaaatgtggatcgtggtgacagaagcacgggatcattgggaggactaaagaaagtccctaggcacagcggggcccccccaacaagctgc

SEQ ID NO: 218593 - DNA, 122 bp, Homo sapiens
actgaaagcactgggaatctggaggctgtcctggacacgcacatacaaatggcagcagaacgtatgcccaggtcaaaggcactttgaattcattttgtccccgcttccctgtcttagtaggg

SEQ ID NO: 218594 - DNA, 122 bp, Homo sapiens
cagcatctttccatatgactacttctcttcctttccatcttagtttaaaagtcattccctcggggagacatttcctattcccctagacttgggaggctgaggcgggaggatggcttgagtct

SEQ ID NO: 218595 - DNA, 122 bp, Homo sapiens
tgcaggcgcaggcgcaggcgcaggcacaggcgaggggttgggtggcggttgagacagcggcggtactgggatgggtaggtgaggatcccgagactgagtgagcttctgcgcgcggtgctttt

SEQ ID NO: 218596 - DNA, 122 bp, Homo sapiens
aagtgtgagttaaaggatgcttgtgtcagagttggaaatcgtgtcccatcattggaataacgggttgtcatcttttgaatcattgcctccatattcctgttgtttttactgtttttccttca

SEQ ID NO: 218597 - DNA, 122 bp, Homo sapiens
ctactttgccacatctggcccctcacatctcatttgcatctggtctgtttgcagagatctcggctcaccaaattccacaacctgaaggcagtcgtctgcaaggcctgcatgaaggagaacag

SEQ ID NO: 218598 - DNA, 122 bp, Homo sapiens
gcaagaccctgcctctattaaaatttcaaaaaattagcctgggccaggcgtggtggctcacgtccgtaatcccagcactttggaaggccctggcaggtagatcacaaggtcaggagttcaag

SEQ ID NO: 218599 - DNA, 122 bp, Homo sapiens
agaaggctggtttcgctcaaagaggatcctctcgcccatcctggaacttcaggcctgtttcggttggacctgcagagaagccttaggggccacttcgttcggcatcccagggggcaggtgcg

SEQ ID NO: 218600 - DNA, 122 bp, Homo sapiens
gccaccttgaagctctcaaatatcactgttgtgaatacagagagggaaaaccaactgtaacgtgccacccaaatgtaagttttactcatattttgatgttaggatggatagcttggaaaaag

SEQ ID NO: 218601 - DNA, 122 bp, Homo sapiens
ggtgcacagcagtagtctcaggtgtgtgaagggcagctgtgagaaataaacctgaaaagacgggatggagaccttgaacactagactagggaatctgttcttgataatttaagcaaacggaa

SEQ ID NO: 218602 - DNA, 122 bp, Homo sapiens
ttaggcggaaagcgaaacccggaagtgacgctcttaccgggtgtcagcagcgagagggttcgaagatggcggcgcgcaagggtcggcggcgcacgtgtgaaaccggggaacccatggaagcc

SEQ ID NO: 218603 - DNA, 122 bp, Homo sapiens
caacaatctcgtccccaacacccgcttctgcaggtacgacccggacagcgggcacgacagcggtgccgaggatgccacagtggaggcgtcgccacccttcgctttcctaaccattggcatgg

SEQ ID NO: 218604 - DNA, 122 bp, Homo sapiens
ccaggctcagctcaaccttccttggtctcacaatcccagctttgtcctccctggcaaggccgggcccagctgactccatactggcccaaggtccgctggaaaccagagcagctggagcccta

SEQ ID NO: 218605 - DNA, 122 bp, Homo sapiens
ggagctacggaagcgccttaacctagaggagtggatcctggagcagctcacgcgcctctacgactgccaggaagaggagatcccagaactggaaattgacgtggatgagctcctggacatgg

SEQ ID NO: 218606 - DNA, 122 bp, Homo sapiens
gtgggtcccaaactttgctgccaactcaatcacctttggagttttttttttttttttaaacgcagaggcccaggtcacactccacaccaatgacatcagaatgtctaggggtgggagccagg

SEQ ID NO: 218607 - DNA, 122 bp, Homo sapiens
ttgcgaagctcaggaaccagccccctcgcttgcttcctcctccatcgcccggatcgagggcggccgctccgcagccgcggcctcctgccacccgggagcccagccccctctctcttgcacgc

SEQ ID NO: 218608 - DNA, 122 bp, Homo sapiens
tctatacatgggtgagagtgacggctgaaatcctacctttaatctgcctttatctgcccacggggtatcttttttttctctaattcacctgcctaaaatgaactccttttgatttcccacca

SEQ ID NO: 218609 - DNA, 122 bp, Homo sapiens
gggttggaagtgcatgttggggtttggatctcgtgcagcagcgcaactaacctgctgcaacggcgctgtgacacccctgtcccggggcccccactttagcctgttgcttctctggtcgctcc

SEQ ID NO: 218610 - DNA, 122 bp, Homo sapiens
gctcagtgcacagaagcattctgcttacccagctgggactgctgactgcaccatcgagcacgcaggttgcactgttctcagcagctacactggattatatgccgcctttcttactgactgat

SEQ ID NO: 218611 - DNA, 122 bp, Homo sapiens
tctctggcgtccaccctcttatctggaataccgggacagcgaccctcccacagaggaaaacgccgcgtgctggccgggaggacagggcccatctttggcagctctgatcgcccacgccagga

SEQ ID NO: 218612 - DNA, 122 bp, Homo sapiens
atgggagggtgagctggacgactccacaacacacacacagcccgccccgcctcaccttctcgatactctggtctacagccttctggaagacccgggccaccagcagcgtgacgctggtcacc

SEQ ID NO: 218613 - DNA, 122 bp, Homo sapiens
ttgggaggggtgggcaggcacttgaggcaggtagtggaagcttccggcgagtttggaggacgccgaggatggggaggggccagccagcctgacattcttttgtgtgtttgggagtcccagag

SEQ ID NO: 218614 - DNA, 122 bp, Homo sapiens
aatcaccaaaaagagcacaaaaacgcaaaccccgaggctctcgctagacagtaatgagggcgtggtccacctaggaggggaaacggggaggcggagcgtggcctgggctcagggaacgcacg

SEQ ID NO: 218615 - DNA, 122 bp, Homo sapiens
attaccacttctattcagggtaccacacaagggtacctgctgggaagcaatgagcagaaccgctgaatgggggcagcctgggttccaccccagagattctgatcgacttggtctgcagtgca

SEQ ID NO: 218616 - DNA, 122 bp, Homo sapiens
gctgcgcctgaatccagaccgcgcttttccccacactcagaggaccagcctgatggcccccgtccctgagcctgcggcccctgcatagaggctctacgtcccaggcacagggaccctcctcc

SEQ ID NO: 218617 - DNA, 122 bp, Homo sapiens
ctagggggaaaaaaaaaatcaatcttcccacgtcccagattccattggattttgtgtagtcgggtccgtggccctaaagagaatatggccagccccagggatctgggggctccttctccgac

SEQ ID NO: 218618 - DNA, 122 bp, Homo sapiens
tgggctccccagccaccgccgctcagaagctgccaagcacccccggtgctttgggccccacgcacagcactgagtgctgtaaggaaatgcaaagcattggtggccctgccatgggaatacag

SEQ ID NO: 218619 - DNA, 122 bp, Homo sapiens
gccactccgggcgcggtgaggaggtgctgccaggctgggttggagcaggcaggtgttccgcgggatcgagacccgccccggcagcacccccggccccctccccaggtccccagctccatgta

SEQ ID NO: 218620 - DNA, 122 bp, Homo sapiens
tgcgtgtgtgggaatgtgtgcaagtgggcgcctgcccatgtgagtgtgtggtgcgcgtgtcggaatgtgtgcaagtggacgcctgcgcatgtgagtgtgtggtgcgtgtgggaatgtgtgca

SEQ ID NO: 218621 - DNA, 122 bp, Homo sapiens
ttaaatgggacaaaattcatcaacatggcataattctgtaggtattaattaggcggccaacgccttctcccggaagaacgtgtgttctaatattatcttattttttgacgttgcaatgtcct

SEQ ID NO: 218622 - DNA, 122 bp, Homo sapiens
ggggaaaggaggtcaccgcgcctgcgtgttaggaagcgtgacccgggtgggaaaaccctccgcgtccgccattttggctgcctctgtcggtctgttcagttaccacgtgaaccgccgacgga

SEQ ID NO: 218623 - DNA, 122 bp, Homo sapiens
tgtccaccacggtcacctcgtggccgtccatcatgagtttgtcagttagatgggagcccacgaaccctgcgcctcctgttatctgcatccggacagcgtgtgcagagcattcccagaaaaag

SEQ ID NO: 218624 - DNA, 122 bp, Homo sapiens
tgcgggcgccttctcccctgtagaaatggtgacctcaaggcttctaggtcgcatctttcccgagggcaggtacacttcgaagggcctgcactccttctgccccggggcgccccccgccagcc

SEQ ID NO: 218625 - DNA, 122 bp, Homo sapiens
caggcacccgccaccacgcccggctaattctttgtatttttagtagagacggggtttcaccgtgttagccaggatggtctcagtctcctgacatggtgatccgcccaccttggcctcccaga

SEQ ID NO: 218626 - DNA, 122 bp, Homo sapiens
ctcctgttcacagggacccatttcggagccctggctcacgctgggcgggaactgccgtgacgaattccccccaaggtgttgattatccatcccaacccagcctctggcttccctcccacctc

SEQ ID NO: 218627 - DNA, 122 bp, Homo sapiens
acggtgccggggtccttccgatcgcaaaaaccggcgttcctcagccttcaagactgtgagcgctcagggccctcggccgctgcccgccgcagactccacttcccatgatgccaaggggtcgg

SEQ ID NO: 218628 - DNA, 122 bp, Homo sapiens
ggacgagccctgcgttcctgtcaaacaaatgtcggtgggagtctggctgagtgttcaggacgtttgcgaaaagaagcctcgcgcctgtggggaagcagcctttacgcatgactgggactgga

SEQ ID NO: 218629 - DNA, 122 bp, Homo sapiens
gatggggcctcagagtaagttcttaagagctatattcaatttggcaaactctttcatgcacgcctgtggtagccaaatgatcagatacccggggcacacggctgtcagggccttaagcacgt

SEQ ID NO: 218630 - DNA, 122 bp, Homo sapiens
gctgtgcagtggggtccttcgtgctgggatctttgtggtccccgttcttggagagatgcccggggcggcagacaggaagggtggagggcaaagggaggggaggagagagaggcaggccgagg

SEQ ID NO: 218631 - DNA, 122 bp, Homo sapiens
ctgtctccccgaacgtgcctggctgaaggcactcagttcccctccggggctcctttccgccgagtccgcttcctgcagctgctgctagcaccgcagtccagggggagtgtcaaagaaggctg

SEQ ID NO: 218632 - DNA, 122 bp, Homo sapiens
ggggctggggggacagcataggcagctggtgtggtggggatccgtgtccgctccggccgccgggcaccccggtggcttgggggcaggatgggaggtggtcacagccgggatccggggacctt

SEQ ID NO: 218633 - DNA, 122 bp, Homo sapiens
ggggggcacaaagcggcccctctctcccgagttatgacgggcagagcgcaagcgtgtcaccgggagggccctggagaaggccaccatttctgtgcgtcttctgttgctgctgctgaagggtc

SEQ ID NO: 218634 - DNA, 122 bp, Homo sapiens
tccacgcgcactgaccccatgggctcaacccagagtccacagtcagaaaccggccccgggcggcaggagacgctgcagagggagattccatagaagaggtaaattcattaagaaactcatca

SEQ ID NO: 218635 - DNA, 122 bp, Homo sapiens
aagtgattctcctgactcagcctccctggcagcgggattacaggcatgtgccactgtgcccggctaattttgtatttttagaaaagatggggtttctccatgttggtcaggctggtctcgaa

SEQ ID NO: 218636 - DNA, 122 bp, Homo sapiens
caaaattaaaaatctggaaaagcaaacagtcgcattttttactattagctcaaatacacacgttcacattcacctacctacacatacctctgactcagtccacctttttgacaagcaatgat

SEQ ID NO: 218637 - DNA, 122 bp, Homo sapiens
aagatgttcctcctggttctgccaggctgcagggaatcccttcaactaggaagtggatcacgcgttactgccacgcatccacccatcaccaccggcccagcgaccttggtgtaaagtgcatt

SEQ ID NO: 218638 - DNA, 122 bp, Homo sapiens
cctcgaaaaggctccgcgggaggaggagggggacggcagacgacgcggcaaggcgggcggcggtttggaaaaggaaagctgttatgacgcccaccatgtgacaggccccaccctcctccgcc

SEQ ID NO: 218639 - DNA, 122 bp, Homo sapiens
caattaaaagtctcagttttaaattgactaaaataaaagcatgttctaaagatcagtcctcgcgcagtggctcaaggctgtaatctcagcattttgggaggccgagtgagaccttgtcttaa

SEQ ID NO: 218640 - DNA, 122 bp, Homo sapiens
ctgccaggctgcaggtgccctgtgacagcaccgagtcggagatgaaccacctgtacccggcgttcgcccagcctggccaggagtgctacctgcagaaggagcctctgctcttcagctgcgcc

SEQ ID NO: 218641 - DNA, 122 bp, Homo sapiens
cctggggcttggaggaggggttaaaggagcggactgtaggcgtcacatttcccgcctgcgcgcttttcagtctcagtgtccgctggaggtgggggcaggggtaacgtagatatataaagatc

SEQ ID NO: 218642 - DNA, 122 bp, Homo sapiens
cgcgcccgcgcatgctcagtagcaagacgtgctaggcaatgaggagggagatgagttttccgtaacctgaagcaacatcctcctgattcctcattaaagaaaaaggcgggaactagtcaaaa

SEQ ID NO: 218643 - DNA, 122 bp, Homo sapiens
aaagaataaatatctcatacccatggtgaactattttatcaccccaaaatacaaatgatccgtattttacaatgaagaaattcatagcatctaccaccacatcactgtactatgattggact

SEQ ID NO: 218644 - DNA, 122 bp, Homo sapiens
attgcgagagaaaggaccgccgcacggtggtagcgagcgcatctttttcatctgggacctcggaaactgtggtgacccataggtgctgggcttcttggctctcgtcctgagaaagtgctcac

SEQ ID NO: 218645 - DNA, 122 bp, Homo sapiens
tatgtggccatttgtatgcctctccactatggggcttttgtgtcctggggcacctgcatccgtctggcagctgcctgttggctggtaggtttcctcacacccatcttgccaatctacctctt

SEQ ID NO: 218646 - DNA, 122 bp, Homo sapiens
tctggggtgtgcgcgctccaagactgacagtaactcaggtctaggacaggagcgtcctctcggcgatgacttagcgccacctactgaccacttgctcaacagcggccacgttcagcaaccac

SEQ ID NO: 218647 - DNA, 122 bp, Homo sapiens
ctctgcagaagagcccaagccggtggaggccccggcagctaattccgaccaaaccgtaaccgtgaaagagtgacaaggacagcctataggaaaaacaataccacttaaaacaatctcctctc

SEQ ID NO: 218648 - DNA, 122 bp, Homo sapiens
catcccttttacctgggaatggctcttttgaggggatttctgtttcaactccatgcttcacgtgttcatgcaaatccaaacctctattattgttagggtcgatttcagggtccaatgaaccc

SEQ ID NO: 218649 - DNA, 122 bp, Homo sapiens
ccaggccctctgctggctgcctctatggggcctcccatccctcgtggccccctccacagacgcctggctgtgctaggctgacccaggtggtggttttccctcggatctgctgtccagtggct

SEQ ID NO: 218650 - DNA, 122 bp, Homo sapiens
acaggaatgctcatcacaggcttgaaagcctttgccatccacgctctccggagccccgagcgtctccaaagagcctgcccaggcttctccccgacccaggtgcttcctcccctgcagagctg

SEQ ID NO: 218651 - DNA, 122 bp, Homo sapiens
cagggcaaagctgaggaggtggaatattactatcggcgggcactggagatctatgctacacgcctcgggcccgatgaccccaatgtggccaagaccaagaacaacctggtaccttggggctg

SEQ ID NO: 218652 - DNA, 122 bp, Homo sapiens
cctctagagggtatttaaaccccagaaaattccgtaacggggctcttgaggccccatgctcggcccccctcccgccctgtggagtgtactttcattttcaatacatctttgcttttgttact

SEQ ID NO: 218653 - DNA, 122 bp, Homo sapiens
aacggtggctgccaggacctgtgtctgctcactcaccagggccatgtcaactgctcatgccgagggggccgaatcctccaggatgacctcacctgccgaggtgagagaggcgggggggaggg

SEQ ID NO: 218654 - DNA, 122 bp, Homo sapiens
cgttaccttctccaaggatgctggtctctgcaccgccagggagcgggccagtgacaggaccgtgttgaaatagaagccccgcgaggcgctggagccggagccggagcagccgccgccgcctc

SEQ ID NO: 218655 - DNA, 122 bp, Homo sapiens
cgcccacgcactcgtcttcgagggcgggcccggcggccccggagcaaaccgccgtctccccgcggccccaccggtccctggcagcctcggggaatgtctgtagctgaattcgggctctgaaa

SEQ ID NO: 218656 - DNA, 122 bp, Homo sapiens
acccaaacctctgtcatcgtcaagagatggaaagatgaggaaatcatgagcaagaacacacgtctttctagccagtcagatgcctggttctatcagtccctgtgtccttggctgtcagtccc

SEQ ID NO: 218657 - DNA, 122 bp, Homo sapiens
ctctgttgccaggctggagtgcagtggctcgatctcagctcactgcaacctctgcctccacggtcctaatttctaggcaactcttctgtccgtattctatgaatcaagtgaagtgttataga

SEQ ID NO: 218658 - DNA, 122 bp, Homo sapiens
tgatattgaagtcactttattaataacagctgtatctgcaaaacagtcaagagactcggacgttgaaagccagagatgacactgagcatgcttttattgcggcctaccatctttaagtggga

SEQ ID NO: 218659 - DNA, 122 bp, Homo sapiens
ccctttattttgcatgcatcccttcacctctccatcacgcgtgccctggacgcctggcaccggaggagaaagtaaaacaccactcctggatgactccggacaaatcactccttcccggcctc

SEQ ID NO: 218660 - DNA, 122 bp, Homo sapiens
gggacaaaataggcggggacaggatgcgatcttggcctatgaaaggcctcagcttgggagcggcctgtcagcggccatattaacaactggcaaactacggcttgaatccctgagaaacggag

SEQ ID NO: 218661 - DNA, 122 bp, Homo sapiens
acatttgtcccgtgtctccgggaggggagcgcctttaagccgaaaccccgccctctcggtcgtcctggcaacgcctcccccaacccggggctcccacatttcagcaggtgccggagctggag

SEQ ID NO: 218662 - DNA, 122 bp, Homo sapiens
ggaacagctgcccggagctgcaaaggacctgggggtcggagcagttgtggcagctcattgcgaggctgtgcaaggcagctgaggctgctgctcgagtcccatcgacttttcacaggactcac

SEQ ID NO: 218663 - DNA, 122 bp, Homo sapiens
agctatacaaaaaattgtgagaagacattggccaactctttcaaagtctttctttttccacgtgcttcttattttaagcgaaatatattgtttgtttcttcctaactttctgactaccttta

SEQ ID NO: 218664 - DNA, 122 bp, Homo sapiens
gccacctgctggtcggtgagggaaagggctaaggagacgggagtctggctttttagggcccggggagccttgggttggaggcccagatgtctcagtctctaaatctgatcagcttctccctt

SEQ ID NO: 218665 - DNA, 122 bp, Homo sapiens
aaccagggggcagccagagagctccatgctctcggcgtcgacgccggatgagctggaggacgagaagagcccctagggccaggagaatcaccccggccactggggagcacagcacaggccag

SEQ ID NO: 218666 - DNA, 122 bp, Homo sapiens
gccatgtgttattgatggcccatagatgagtaacctggaaatattggttgaatgaataaacgaaaagatgttctagtgacagagtttaacacatgaaggacccttaaggatattctggtctt

SEQ ID NO: 218667 - DNA, 122 bp, Homo sapiens
tgaccagaaactgctgtcccggcgactcctgaccaagaccaacaggatgccccgctgagccgagcgactgtttcctgccaatgttgctcactcggtgtacatcctggaggactctgttgtgg

SEQ ID NO: 218668 - DNA, 122 bp, Homo sapiens
cccctccttttcccgagcaatgcctctcccggagggcggggcatgcagttatccaggttgcggggccggcgggcgggcaggaggcggcggcccgggcctcgggatggagttgcagcgcccag

SEQ ID NO: 218669 - DNA, 122 bp, Homo sapiens
aaatttgattgtgtaatgaccctgctttaaaaattggatgaggccgggcgcggtggctgacgcctgtaatcctaccactttgggaggccgaggcaggtgtattgcctgagctcaggagttct

SEQ ID NO: 218670 - DNA, 122 bp, Homo sapiens
tcccggagtcgaaatttcccgggattatgtttcggaaaggtaggtaagcgccgggcgcggcgcccgctttcccgcagtccggagccggagagccagcgaggcggcgaggcagcccccgcggc

SEQ ID NO: 218671 - DNA, 122 bp, Homo sapiens
cggcccgccgaccccctccccggccgacctggggccccgctggtccggctacaggggctccgaccctcacccgggggccagaacaagtgccctttgggggctgaatggtggacgtgcagtta

SEQ ID NO: 218672 - DNA, 122 bp, Homo sapiens
ctgcaccgttgcaaaacttccttcactcaacgcttctttacaaacatcgcgatagcggagcggtctcttgggcgcaccccgccgcatgttcaaccccacccacttcctgtctgacgatctcc

SEQ ID NO: 218673 - DNA, 122 bp, Homo sapiens
gggacagctgacccaagggccctactgcatgggtcgcacggttcagccagtccttgctggcgggacctgcatccccatcctactggctggcagagtaggactggtttcctgggacatctcca

SEQ ID NO: 218674 - DNA, 122 bp, Homo sapiens
ccccttgcccctcatctcagccttatgagggcaggattattaacaggtccattttacagccgagggaactcagataaattactcaaggttatgtgacacagtgggcagagctgggatttgaa

SEQ ID NO: 218675 - DNA, 122 bp, Homo sapiens
accacatccagggcagtacctcgcagctctcagtagatcggatcttgtctcccggcttagcgccggggaactcaccgcgcactaagagcggaacgtgaacttcagtctcccctcgcgttcct

SEQ ID NO: 218676 - DNA, 122 bp, Homo sapiens
gaagacaatgactaagcagaaatcgtagccgagaaagtgcttcgtaaccgttactcatcccgcggcggggcaggggcggggcgcgaatgggctgcgggacgccggcccgcaagtgactggcc

SEQ ID NO: 218677 - DNA, 122 bp, Homo sapiens
tatacagtcagggtccaatgaaagtggcacactcatggtataagtgacggacgatgacaccgccagctcaagagtaaagactcagtatacagagggacaagaaacacgtcagcactagtcac

SEQ ID NO: 218678 - DNA, 122 bp, Homo sapiens
tgccccccacacacacccggagccgatcccagcagtgccgcctgtgtccctggatccagccgtgcctgaggccacctcacccactgccttttgagtggtggaagttgtgctcttgaacttca

SEQ ID NO: 218679 - DNA, 122 bp, Homo sapiens
ctgacagctgggtgggaacacctcggggtgtcgagtcccgactcaaggggcgggacggggcggggcgagcgcgcggggggcggagcgcgcgcgagccgggacgcgaggagggagcgcgcgag

SEQ ID NO: 218680 - DNA, 122 bp, Homo sapiens
ggagccggcgcctgctgatggcgcagctttggagcacagcgaggaggacggctccatttacgagatggccgacgaccccgacatctgggtgcgcagccggccctgcgcccgcgacgcccacc

SEQ ID NO: 218681 - DNA, 122 bp, Homo sapiens
ccagccctgacgggatttagtctggtgtgggagtttggctaccacttccaggaaggcctccgaacgaaccctacccacatgtaaacacagctctccaggctaaggaacagtgtggtaagggg

SEQ ID NO: 218682 - DNA, 122 bp, Homo sapiens
aagccgagagttgctcacgtgaccgagatctcacatgacgtaggcgctcacgtgattactcgcttacgtgagcagaagtagttctggtcgtcgtctaccgtctcgctatagccgtttgaggg

SEQ ID NO: 218683 - DNA, 122 bp, Homo sapiens
tgactgtggccggctgggagtaggcggcagtgagtttccctgggagggcagcgcgcttggcgcttctcccctccccccgatctgcctccagtctcggacttggttgttgcgcgctccggctc

SEQ ID NO: 218684 - DNA, 122 bp, Homo sapiens
tctgccacacagcagggactgatgagcctctgtgtgaccagaatcgtgcctgcagcagcccggaggggggatctgaggatggaggggtggagggaccagtggcccaagtggcccagggacag

SEQ ID NO: 218685 - DNA, 122 bp, Homo sapiens
ccgaatctccgattcccagccccggtcctcggacccggctcccttcctctgacccgaacccggattcccgccacgcacctgcctccagcctcctcggtggagcccagtctccgcccgcgggg

SEQ ID NO: 218686 - DNA, 122 bp, Homo sapiens
tcgggccgtgggggcggggccgcgaggaaggcttggcctagcccaggccctccgcccatccgactcttccggcccttggaggcctggctcctgtaccttcacctggcgtcttggcgcctttt

SEQ ID NO: 218687 - DNA, 122 bp, Homo sapiens
ttctgggaagacttcagaaacaaggcaaatgaagacttttcactgcctccttcgggctgtcgcttccggaagccgaagtcctagcacgcagagcagcaggagagggttactttcaggcaatt

SEQ ID NO: 218688 - DNA, 122 bp, Homo sapiens
gtttcccaggtaaccatatcctatttgaaaggtgaggtcacaaggacctcacaatgccgacgtactggggttttatgttctatgttccaactttaaaagggaaagaaagcaacaagtctact

SEQ ID NO: 218689 - DNA, 122 bp, Homo sapiens
ccctctgctgccgtctccaggagctgcaccgccgcaagccggggcgtgggaccgacctagcgtcttagggactggcttggccccctggggactgagccccatcccaagcccatcctccagca

SEQ ID NO: 218690 - DNA, 122 bp, Homo sapiens
cgcttccccgcgcagtgactgtgcccctggcctggagcgctctgtgggcagctctgcacccgcagtgccgtgtctctcccagattgtgcagggaccaccggagggtcttcaggggagaatgc

SEQ ID NO: 218691 - DNA, 122 bp, Homo sapiens
gggtctcccacacccctttgcatgaatcgttcttttgtgtacacagctgcagtggcagcacgggtcggaaaggaaatggttagaggaagagctggttttcagacaaggcgagtctgcgaggg

SEQ ID NO: 218692 - DNA, 122 bp, Homo sapiens
tccagggcaccaccggcagtggggagctgtgcagagtgggctgctctccggccccagccacggggtgccggggcagggggtgggggtactcactgcacagctgctcgatggtggcccactgc

SEQ ID NO: 218693 - DNA, 122 bp, Homo sapiens
cgcggggcgggtcggagggcggggcaggccgggggcggggccgggcaggaggcaggacctcgcggctgggggggcaggaggcggggcctggcgggggggggggggggtgtctgtcgggggcg

SEQ ID NO: 218694 - DNA, 122 bp, Homo sapiens
gcgctgcttctgaaaaggttcaaggatgctctctgacttctttgtgattactcagtgcggcgtcttattctgaagaaaaaaactcaggaataattaaaggctgggatcaggcctgggaacac

SEQ ID NO: 218695 - DNA, 122 bp, Homo sapiens
ccccgcgcgagctttggcggcggagcagcacagtgcgcgccgattggccctcagaatgtgcgacgcctggcgccgctccccacggattggccgggccggcagtgcgtgcacggagtaaacaa

SEQ ID NO: 218696 - DNA, 122 bp, Homo sapiens
cctccccttcctccagtggctggtgtatttaggtcaagtgattgacaggtgacagtttaccgagggtattgcaggagtccgcctggcctttctcaagcgccagaggccgacgttttccagcc

SEQ ID NO: 218697 - DNA, 122 bp, Homo sapiens
cctctcgtagcaaccccttacctgtcacttttgcagatcctccactgacttgtggttattcgcccatttggggctttaattcagcaacagctccttaaacttcctctgtccttgcctactgc

SEQ ID NO: 218698 - DNA, 122 bp, Homo sapiens
gacacagaagtggcgatcggaaaaggagagggagatcatctacttctcttctactactaccgttagattgcatgtctcacattccatttcgtccgcggggactggtaattttttccaaagct

SEQ ID NO: 218699 - DNA, 122 bp, Homo sapiens
cgaagcgctcctcttccccattggctgcgcccagggagccgccttgagattggccataagcgccggtggcgggggtcgcgagaggcgtcaggatccctggcgccgcctgagccagcggctgc

SEQ ID NO: 218700 - DNA, 122 bp, Homo sapiens
ggctttcagttctccaaaaaattcatgtcattgcctaaaaattactaatggaaattggtacgcagacagatacaatactgttgttgtttttggttgtggttttacttctactaaagcccaca

SEQ ID NO: 218701 - DNA, 122 bp, Homo sapiens
gacggcttcctgcggcttgctggggccggcttggcgggcaggtatcctgtgtggactgcgcgagcagttggagtgcggatgggagttgggaaaccggaacttgaggacgcagctttcagcat

SEQ ID NO: 218702 - DNA, 122 bp, Homo sapiens
ggtgctttacgtgcattcgtgaagaagcccatcagtatttcttgaataccaggtacgtgccgggcatgtagagtctatgcagagataaactcctgtcctcaagaacccgggtggggatgggg

SEQ ID NO: 218703 - DNA, 122 bp, Homo sapiens
cccccgccccacctccctgcgcaagtgcgaggctgccggcagcgcggcgcacgctccggccgttcccggcttccgcgcaaaacttccatcctgtccacgtgaagttgtcgctgccttagaga

SEQ ID NO: 218704 - DNA, 122 bp, Homo sapiens
ggagtccatctttcctaaggggaccgccagcctgtacacatgatctctgaggcctgggctcgggggattctgtggggcaacatggggcccagcttggaggcaaggtgctgttccactgcccc

SEQ ID NO: 218705 - DNA, 122 bp, Homo sapiens
ggctgcacgcggcggactgggcaggccgggcccgggcactggtgggtgacagtcatacttcgtggagcccagcgagcatcccgggcaagcactaccaggctgtgggtctgcacctctggaag

SEQ ID NO: 218706 - DNA, 122 bp, Homo sapiens
tgtgcatcaaacagaaaaaacctccatttttatattttggggaagctccccacccctttccgggcccatcccaggggacgcgagaccccgaggagcgcggcaagaagagcggcccgggggtc

SEQ ID NO: 218707 - DNA, 122 bp, Homo sapiens
agggacaatttgctacaagttggagataagagacatggcatactgtgaaaccagtgctgacggaagaaggtgactttcttggaaggtcaagacacttgcttgacagcgatgtccaggagggc

SEQ ID NO: 218708 - DNA, 122 bp, Homo sapiens
agttcattaaatcagatgcaatgccaagtcccaacctctaggtgccgctgccggacaacgcggagagagctagctagctagctagggaacaggaaagcaaatggcggctcccccggaacggt

SEQ ID NO: 218709 - DNA, 122 bp, Homo sapiens
aaaaccagccggagagttcccgggcaggcggccagccgagggatgctcgttgtggagtggcgggacaaaaaggggcttgggccgctcttcagaagcacttctgaccaccacctccagaccca

SEQ ID NO: 218710 - DNA, 122 bp, Homo sapiens
ggagctgcacggcccggcccaggttgcatttgatctgggccagctgcaagtcggactcggcgtctagccgctccgcgtagggcagcagcttgttgtagacgatctccttctgcgggacgaag

SEQ ID NO: 218711 - DNA, 122 bp, Homo sapiens
cccctctagttcacagccgtctccacagctcttacccaggtaggcagtaggctctcactacgtactgctgaatgaatggtaaagttttacctagtgccccacattctatttcctgttttctg

SEQ ID NO: 218712 - DNA, 122 bp, Homo sapiens
cccttcatccttccctctcctgaagctgccattcactttctttctgcagccgcatagtcccgtcccagagtagaggacagaccatccagggtccccaaacccacttctctttccttctccgc

SEQ ID NO: 218713 - DNA, 122 bp, Homo sapiens
ctgaaagtaagttacgtgggattctccaccttgacccacctcacggcagggctgggggtgcggggaagagggtgcggcgtgcggggctgtgggaccggactagagaggcctggggcgtggtc

SEQ ID NO: 218714 - DNA, 122 bp, Homo sapiens
gtcacaggtgcgtctcacatgtgtgtctcacaggtgcatctcacgtgtttctcacaggtgcgtctcaggtgcatgtcacaggtgtgtctcacaggtgcatgtcacaggtgcgtctcacatgt

SEQ ID NO: 218715 - DNA, 122 bp, Homo sapiens
ataggctaaacacatcacctaaaactatatcgactagtataataatcagtgctcttttagcgtaactagattctagaacaccacctatcctcaacatttcctttcattaacgttacatatgg

SEQ ID NO: 218716 - DNA, 122 bp, Homo sapiens
ctctggcgcctcctgcaggcgtcccgatcgcaggctgcgtgggagggggtactgcagggtcgggtatgctgctggaggccggttttgggggtgactcaggtgagccgctcgcaggcaagctt

SEQ ID NO: 218717 - DNA, 122 bp, Homo sapiens
cggagctgggggcatttgaaggaggccttaaagacgttgttatgacaggcggagctaagacggaaagggcccgtggtgcagtagtaataataaaaacagctagcatttattcatcaattcac

SEQ ID NO: 218718 - DNA, 122 bp, Homo sapiens
gcgccccggactgcgagctgtgcggtgtggggcgcgggggtctggctcacctggaggtgacgagcaccgccggggactgcatgacggcggcggggactccgggcggggcgcgcagtcacggg

SEQ ID NO: 218719 - DNA, 122 bp, Homo sapiens
tcccacctataggcttctattcatgagctgatgcctctcaccctcttatcacaatttcaacgtcacctcccctaagacctctgtgccaacccccgttccaagtaggttgctcctgcagttct

SEQ ID NO: 218720 - DNA, 122 bp, Homo sapiens
cgggccgaacccgtaccttccgcagcactttccggcagttggtacagagcaggtagttggcggcggccgacgggctgccgccgccccggttcatcgtggctgcgggcgccgaggcgagagcg

SEQ ID NO: 218721 - DNA, 122 bp, Homo sapiens
tggagacaagaagggttttccaccctggaatcaagatgtcagactggctggctgcagtgacgtgcacctgtactcaggaggctgaggggaggatcactggagcccaggagtttgaggctgca

SEQ ID NO: 218722 - DNA, 122 bp, Homo sapiens
aacggcaagcagtggcgccggctgtgctcacgagatggctgcatgaaggagtcacagcggcgaggctactgctcacgccacctgtccatgcgaaccaaagagatggaaggcctggcagacag

SEQ ID NO: 218723 - DNA, 122 bp, Homo sapiens
agggagcccatgcccaggaggtgaagttctttctcactcttttctcacctagatccagggcgccagccagacacatctcacagctggcttctctggcctcccagatgcccatggctgctttt

SEQ ID NO: 218724 - DNA, 122 bp, Homo sapiens
gagcccccaccccaggcctcaccggcccagcgcgaggctgcctcaccggaaacacgaggccgaattccaagctattgtcctgcttcgccgggggtcgcgcactccaagcggcagcccactgg

SEQ ID NO: 218725 - DNA, 122 bp, Homo sapiens
tgcaaaaatcaaacccgggagtaccctcatccaaagccaggtctgtctgcacagtgcaggcgcagcgggcgctgcgaatcggctcctggcccaatgcacccctccacacccgttggccggga

SEQ ID NO: 218726 - DNA, 122 bp, Homo sapiens
gaaactgaggcacaggaaagttaggcaaggtgcctattaaactcaaacagggccaggcgccggggctcatgcctgtaatcctaacactttgggaggccaaggcagaaggatcgcttgagccc

SEQ ID NO: 218727 - DNA, 122 bp, Homo sapiens
agagcaagggccggctgagccgatcccacctggagttgcttccgggggcctcaggcccgacgccctggggcccaccacggcccaccacggcccacgccacccgcccaagcccccacgaagca

SEQ ID NO: 218728 - DNA, 122 bp, Homo sapiens
gggcagcgcgtagcagacgttgtcctccaggaaccgcacaaaggcgtacatggtgggcgccgggggcgggccccggtcgggcagctcagcccgcggggcgggcgcggaggtggggatccggc

SEQ ID NO: 218729 - DNA, 122 bp, Homo sapiens
aaatatattaatcagaaaggaaagtaaaacttagaagtatgctaattgtcttgtgctttgcgaaatagatggaatgagaccacttagaatagaatgaggctttgttcttaattgctgtcagg

SEQ ID NO: 218730 - DNA, 122 bp, Homo sapiens
ctgagagaccacatttcctaggatgccgtgcggtgcgtctagctgcacttcctccttaggcggaggggaggattcagggaagcttggttaaaaacagttatggcagtgggagtcgaagcgag

SEQ ID NO: 218731 - DNA, 122 bp, Homo sapiens
aacagcccctgtgccatggaagtttctatccacgtgaccgagtaaaggcagagaaaaccacgctggggcatttttcaattttgccttgttatttcaaagtaatggcagcctgggcaacatgg

SEQ ID NO: 218732 - DNA, 122 bp, Homo sapiens
tgactgaacactacagcgccctgtggttccgggcttcgcacagctgtcccagggatggatcgcctgtgctgccttcgcccgccgccacaccgggaccctgcacggctgcttctggcctcgac

SEQ ID NO: 218733 - DNA, 122 bp, Homo sapiens
cccccagctccaggtatcatgagacgttcccacccatggctgcaactccttggaacagggcgcgtctctaaatctgaaccaaccagacttcctctggggttatccatgtaggaaagcagagg

SEQ ID NO: 218734 - DNA, 122 bp, Homo sapiens
tggccccatcctcatcctctggtccctgcccccagccaggccccttccagagtccatgaccgttacccctggggttctgtcccagaggcacatctgccaactgccctgctgtggtcaggatc

SEQ ID NO: 218735 - DNA, 122 bp, Homo sapiens
ggtccctgggggccctgggaccgccgaggggcccgcagccagggcaaaggtcgccgggcccggcccacctcccctgagctcggtaaggcctcagggagggctgacaaggtgcctgaaccccc

SEQ ID NO: 218736 - DNA, 122 bp, Homo sapiens
aggggtaggcgcgcagaggcggttggaggcgggcggccggcccctgacctcggagagctgcgccgagcagggcggaaaatttatggtctgtgtacactttctggctccagagccccgcgcac

SEQ ID NO: 218737 - DNA, 122 bp, Homo sapiens
aaaattgtaggcagggacacaacagaacgctcgggagactgcaagccccaggatgccgcgcggccacctgcacctgccgccactagcactaagagggatgcgcaaagcaggcggggcgttgg

SEQ ID NO: 218738 - DNA, 122 bp, Homo sapiens
aaccgagagagttatagagaaacaccacactccgagactacttcaggagtcctttattgccggcgaccgagagacagctagaactaaaaaattctctcggccctgaagaaggggctagattt

SEQ ID NO: 218739 - DNA, 122 bp, Homo sapiens
cgcggcggccggccgggaggggggagcgggcgggggggccgtttagccgtgatagatccgcgcgccgcttgtctcttaatctccagagcgaccgatcgattcgctatttccctttgttgcca

SEQ ID NO: 218740 - DNA, 122 bp, Homo sapiens
gtggctgcacctcatcctgtgtgtagcctgggggccttgtggctgagctgggaggccgtacgtccacccgcagagggagcggtcagggcagcccgcttggccgggcgagtggagttcatggg

SEQ ID NO: 218741 - DNA, 122 bp, Homo sapiens
acctcccatcccccatccgggcgtgacacttgaccgcgtctgccggcccctccccttgtccgtcccctccgcgccgctggcgcgcgccttctgaatgccaagcattgccataaactccgggg

SEQ ID NO: 218742 - DNA, 122 bp, Homo sapiens
cgtgtatgtgtgaactcggaatttcatagacggccttggctcacgatcggtttggcacttcgcgttcctaggccacaggacgtcgaacctcgggcgacagcagcctcccgctagggggctcc

SEQ ID NO: 218743 - DNA, 122 bp, Homo sapiens
agcagctccagaaacaggggccgcatttgccagtagcgctggggcaggcggggcaacctgcggggagtccctggcatccagggcctggaacccagaaagatggtctccacgagcctccgagc

SEQ ID NO: 218744 - DNA, 122 bp, Homo sapiens
ctcaggatgtcggacacggagaagggcgtcgtgtgctttgggctcaacgacatggctcggcgggcagccaggtaggggggcctggggcgcgcgccggcaggacgcggcggccgctcgtcgcc

SEQ ID NO: 218745 - DNA, 122 bp, Homo sapiens
gcagcctcctcctgtggcccaggcgcaccaaggcgagcgcggccacgagttccggcccagcgccacccagactctttgatgtgggtttgtgtgtgggagagtaaaagatgcacacaccctcc

SEQ ID NO: 218746 - DNA, 122 bp, Homo sapiens
cggcgggagttgcaccgccacagcccgggagaccaaagagtctccactccccgctcccggcgcctcctcgccgaccggagccccgagcccagtgagcccagccggtcccacgtcgagaggcg

SEQ ID NO: 218747 - DNA, 122 bp, Homo sapiens
gcaattattctcaggcaaatgtaataggtggtcaccaatgcccacttcctgcctttctttcgctcggttttgaaagttgctctctttcctattccgtttctccttccttttcgctcctccta

SEQ ID NO: 218748 - DNA, 122 bp, Homo sapiens
aggctctacttacaagtgttattgctggtttgccatgcacaggaacgctgagaacaccatcgccctggcctcatcgaacgactccagagaggggcccacatctgctcaaccaagaaggagaa

SEQ ID NO: 218749 - DNA, 122 bp, Homo sapiens
agggggctcaaggatactagaaacctgtccccttggcggagacacgtagtcgcctctggccgccgcggccgactgatcttgcggagtggagctccccccaccccgcccgcgtttcgctgggg

SEQ ID NO: 218750 - DNA, 122 bp, Homo sapiens
ttcttcttggaactgaatctaagtgatctgactcaatattcgtcactaccactgagacaacgatgaatcaactatatgtttctttctggataaaatactaccctgaggctgggcgtgatggc

SEQ ID NO: 218751 - DNA, 122 bp, Homo sapiens
tcctcgcccatgtggcttgaatcactcagactctctcagtcgaagcgaccggattgacgccgtcacaccaacactggggagcagcaataaccagctcaattcttcgctcctccaagtctaca

SEQ ID NO: 218752 - DNA, 122 bp, Homo sapiens
gggaggtgcggtttgaaatggggcagtcagggaggacctctctgagaaggtgctgtcctgcggagcacaggatcagaatggggatggagattcagggcctgggacgtctttgtcatgactgt

SEQ ID NO: 218753 - DNA, 122 bp, Homo sapiens
ggggtgccgttcgggcttctctcctcaccgtgggtggcgaaaggcgggacggaaaagcgccgtctggacaggcgcgcccccctcagggatgcagggccgggcgggggacccggcggcggccc

SEQ ID NO: 218754 - DNA, 122 bp, Homo sapiens
cacgttgccgctcaaggtgcccagccctggggccccagggttgagtttgaccgacctggacgccaggctctgtgcggagttcctcctttcgttcaagtattgaccgagcgcctatttctatt

SEQ ID NO: 218755 - DNA, 122 bp, Homo sapiens
ctgcttccgttggcactgaaagcaaacgcttgttgattcagaacctgcagccccgtgccccggcgctgaccaggtgatgggtgcctgcttccgttggcactgaaagcaaacgcttgttgcgt

SEQ ID NO: 218756 - DNA, 122 bp, Homo sapiens
accctgggagaccctgggggacccatgttcagatctatctttggtccagggcgataaacccgcatcccccttgaagatgttaatatgcagcgcccctagtggccacagctgggaaggagccc

SEQ ID NO: 218757 - DNA, 122 bp, Homo sapiens
gatcccaggtcttagtgagccaccggcggggctgggattcgaacccagtggaatcagaaccgtgcaggtcccataacccacctagaccctagcaactccaggctagagggtcaccgcgtcta

SEQ ID NO: 218758 - DNA, 122 bp, Homo sapiens
ttcaagcaattctcctgtctcagcctccccaatagctggactacaggcatgtgccacacacgcccaggtaaattttgtatttttaacagcgatggagtttcaccatgttggccaggctggtc

SEQ ID NO: 218759 - DNA, 122 bp, Homo sapiens
gctttggccacagcaccgcagtgctctctaaggacttctgtaagctgcacagtttgctcccgacgcatgcattaaaggattgacattggtctggaaagacccctggtgtggagtgccacaag

SEQ ID NO: 218760 - DNA, 122 bp, Homo sapiens
agcggagtcgggtggctgtgttcgaggcccgtctctggataagctgctttctctgaggctcggctttctcattgtgtctgtaacgtgagaggtcggcccgtggccgcacggaccctgctccc

SEQ ID NO: 218761 - DNA, 122 bp, Homo sapiens
tgtgcgtccggcctcagcagccccgccgctcggcggacacgcagaccccgccggcccgggcgcgaacactcagcgcacccccgttccacttggtcccgccgcgccttccggtgcgccttccg

SEQ ID NO: 218762 - DNA, 122 bp, Homo sapiens
ttaaaatgcacactgagaaggaatgaagcgcagatttaatccaaggtttgggtcatgcgtcggggctttgggacggcagcactgccaaagtgccttcagataaacagacgctgtgtctgaaa

SEQ ID NO: 218763 - DNA, 122 bp, Homo sapiens
tggccaggatgcagtggaagcctggctccactaccattcacctacagccagcaccctcctcggtgcctggggctcaggtctgttcaaactcctgctcacagaagcctacattgaggggttgg

SEQ ID NO: 218764 - DNA, 122 bp, Homo sapiens
ctacaaaaaagtctcgtggtgtttggaatgaaattgtgttgaatctatagatgatcaatacgtgaataattatcttcctgatgatattgagtgttttgatccacaagtacgatttttctatg

SEQ ID NO: 218765 - DNA, 122 bp, Homo sapiens
tgtttctccgcgactacagacctcgggagaggagcggtgggcaacgtgtctgtgctcggtcgaatgcgcacactccagttaggccgctggctcggacctagaaatgtttccgctttccttag

SEQ ID NO: 218766 - DNA, 122 bp, Homo sapiens
cagcgcgcggcccggctcgtaactcctcctgctgcagcaggcgtatcgttggcctcgcctcgaccccggaagtgacttctggaagtgacccaggaagtgacagtgagctgcctctctgcgat

SEQ ID NO: 218767 - DNA, 122 bp, Homo sapiens
ctacaggcagcccgcaaacagcccagcacagggtggatgagcctgggagcagtgtgtgcccggcgacccccggggtggcccgtgcgcctggatggggtgcgtggagtgactgaacatctggg

SEQ ID NO: 218768 - DNA, 122 bp, Homo sapiens
caagaggcaagttaggctcagttaatggtatcttggaacctcctcagtagaattttcctccgtttctgcccacgtctgagtgtcttcatatgtctcctctcgagtctggcttctcgtgtcac

SEQ ID NO: 218769 - DNA, 122 bp, Homo sapiens
tctcagagttttaatgcggctgggtccacctggagggtatttaaaggggacgaaggcaaacgaagtgtctagttcctcgtctgcttactcattccacaagtgtttgttgggcacagttctag

SEQ ID NO: 218770 - DNA, 122 bp, Homo sapiens
agacagaagggctaaggaggagggcctttcaaggcagaagtcgctcacagtgtgaaggaacgcaaaccaagtcagacaagggctaaaaggcctagacttaggtaaccacaaagggcctaagg

SEQ ID NO: 218771 - DNA, 122 bp, Homo sapiens
aggggccacagctgaggagccggtggcctctggaagctggaaaagacgggaagcgaagcccggacagcctgcagaggaaccagccttgcggaccccttgatgttagcccggggaggccatgt

SEQ ID NO: 218772 - DNA, 122 bp, Homo sapiens
cctgcctgccctgccggcccgcacccgccaccttctgctggccaacaacagccttcagtccgtgcccccgggagcctttgaccacctgccccagctgcagaccctcgatgtgacgcagaacc

SEQ ID NO: 218773 - DNA, 122 bp, Homo sapiens
cactcctaactagtgtggtgattaagagcgggagtgggcttggaattggacttcaggtttcgaaccctgacactatcacttaatagctgtatggtctcgaacaagttgcttaaccatgccgt

SEQ ID NO: 218774 - DNA, 122 bp, Homo sapiens
cggccgagcaaagccggagccggagcggggccgcaggagacgggccgggtccggacgggccgagatgccctataaactgaaaaaggagaaggtgagcgtggccctttttcccccaccgccgc

SEQ ID NO: 218775 - DNA, 122 bp, Homo sapiens
caccggtggtcctgccggaggcgtagagggacagcacggcctggatggccacgtacatggcgggcacgttgaaggtctcaaacatgatctgggtcatcttctcgcggttggccttgggattg

SEQ ID NO: 218776 - DNA, 122 bp, Homo sapiens
cttcaagcagtcctcgcacctggtccagcacatgctggtgcactcgggggagaggccctacgaatgcggcgtctgcggccgcacctacaaccacgtgtccagcctcatccgccaccgccgct

SEQ ID NO: 218777 - DNA, 122 bp, Homo sapiens
agtgtccccacaaatcccagcagccctcttagctttagcagcccccacagccctcccagccgcagggtcccctccagccatagtcctggcagcccttgaggaagcaaagtccccagagggcc

SEQ ID NO: 218778 - DNA, 122 bp, Homo sapiens
tcgtggcatctgagggaggcgcccccgccgtgacacacaagaacgaactttcccttcagacgtcatccccgctgctgtcttcatgctcacccagaccagccacgcgggctccttccctgttc

SEQ ID NO: 218779 - DNA, 122 bp, Homo sapiens
gcccctgctcacacgggtttaaaaggaactcagtgaccacagacggatgagaacagcggacgcagctgcctcccaggcactcaaaggctcaactccccacaggcgtgtgttgccaggggcag

SEQ ID NO: 218780 - DNA, 122 bp, Homo sapiens
ttctccttcttaaaaggcttcttgcagagtgggcagacggggcggctccctgagatggggcggacgtctgtggtgcagctgcggcagaagacgtggccacagtcaatggtcacagggtcccg

SEQ ID NO: 218781 - DNA, 122 bp, Homo sapiens
tctgccaggtagagctttcttcttttccactgtgcaacccacttcagtgccagcagcctacgggcacagaggccaggcaatggttcggggacacagtttgctctggcatggggtactatgac

SEQ ID NO: 218782 - DNA, 122 bp, Homo sapiens
cttctagcctttcatttttaaaaaagtttccccccgtgtgtgtgcgtgcgtgcgcgcgcgcgcgccgttctggcacaagccagccttgaccgttgcaataaatgagcaaactgtccgagttg

SEQ ID NO: 218783 - DNA, 122 bp, Homo sapiens
accatttattcattcaggggttacaaatttacccaaccaaggtggacaaaattaccatttcgaacctgctatagagttttgggggtggagatttaggactgggtcaataactttgaggctta

SEQ ID NO: 218784 - DNA, 122 bp, Homo sapiens
cgggacggaggccacggtgaggcctgttggctgtcctgccaggtgaagtccagctgggaacggcgggggtgctgcgtgagcacagctgcccagggtggccgggtcagagcccgtctcccaca

SEQ ID NO: 218785 - DNA, 122 bp, Homo sapiens
ctagcagtttggatgtttggcaagattattctctgtccgcagaaagggacagcacagatacgtttcccctccacccccatgcccacccaagtttcaaacttaagcataccactgtatttcaa

SEQ ID NO: 218786 - DNA, 122 bp, Homo sapiens
ggcctcgcgccgccattctctaaaaaacatgtgtgttgaacgaatggtgactaaacagaccgcgggagcaggggaccaaacttcgggtcggagatggggttgcgtaataattgcacttgggc

SEQ ID NO: 218787 - DNA, 122 bp, Homo sapiens
ccaccttcttgaagctctgcgggcaccttcctgcgggtggacaatgagcgcctgggaggccgttgtccttggttggggagcgctcgtctggatccagcctagcaaagaggctgctccggatg

SEQ ID NO: 218788 - DNA, 122 bp, Homo sapiens
gcgtgacgtgggcaacccctagcccaaggccagctccttctccccctcccccctcccccacgtgggcctcggccacaactgccccccgatactcacgctttgtccaccagctcgcgcacctt

SEQ ID NO: 218789 - DNA, 122 bp, Homo sapiens
tgattactattcagggctgtaggaaaactgcttaagcctagtttatgaggtcagggcacccgggcctgtgcgcccagccccacccacgtcactgcggggcctttgacctgagacagggcagc

SEQ ID NO: 218790 - DNA, 122 bp, Homo sapiens
acaggcatgcgccactacatctggctattttttgtatttttagtagagatggggtttcaccgtgttagccaggctggtctcgaactcctgtcctcaggcaatctgcccgcctcagcctccca

SEQ ID NO: 218791 - DNA, 122 bp, Homo sapiens
gttgcttttgagaattttaaacataccctcttatttcgaggcagcgaacctcagcagttccggctttgctgttagctcttttgtctttgttcccgggactcaggggctgtgttgctgctggc

SEQ ID NO: 218792 - DNA, 122 bp, Homo sapiens
tcctggcctggctgttacagggcctcgaactcgtcgatgcgctgcttggtgttgccctgccggatctgccgcagcgtcttgtacttgtcccggccttgcctcatgttctcgttgtggatgat

SEQ ID NO: 218793 - DNA, 122 bp, Homo sapiens
gcaggctgaggcaggagaattgcttgaacccaggaggcagaggtttcagtgagtcgagatcgcaccactgaggtccagcctgggtgacagagcaagactccatctaaataaataatgtatat

SEQ ID NO: 218794 - DNA, 122 bp, Homo sapiens
tattcaactatgaccgctcccttgtattccagttccacgtttccaatgggctactggacacgcgccaccggtatgtcctgccaacattttaaacaaatacaggaaaatgcaaatagaactca

SEQ ID NO: 218795 - DNA, 122 bp, Homo sapiens
caatagttcaatgacatttgtatgtagggaggattgcctgaccctcctacaatggctgttcgggaggtgggattattccttttctttatctgagcagatatacatctgaaaggccctggaag

SEQ ID NO: 218796 - DNA, 122 bp, Homo sapiens
ccataaatccaacctaagaggaaaatgtgcagtaaaaatgaattgcttgatcttgatgcacgtcagtcatggaagtaaaaaactgtgatacctgcctgatttgtcaagaaaaattaaataac

SEQ ID NO: 218797 - DNA, 122 bp, Homo sapiens
ttcgcctccttccgtgctgcgtggccacatggatggtggatgcaggggtgcaaggatgcacggtgcctgtggtaccctggctctaagagggatgcattagactaaacgggatcgcaacttgc

SEQ ID NO: 218798 - DNA, 122 bp, Homo sapiens
gtgcaaagtttttcgaggagagacggaccctcacctacccccaacaacgctgggcagtggcggctcctccctggccgacttgggtccttgtggagagggatggcagcctctaaggcagtgcg

SEQ ID NO: 218799 - DNA, 122 bp, Homo sapiens
gggacgatgatatacatcctgcacatgctaccaagtacaagggcacgggggtttcaggggcgtctggggatgcagcaacacatgcagcaccttctccagaattcactttcccactgtcatgg

SEQ ID NO: 218800 - DNA, 122 bp, Homo sapiens
caccgccgcagccccagcccccgccgcctcctccacccgcgtcccagcagccaccacccccgccacccccacaggcgcccgtccgcctgccccctggtggccccctgttgcccagcgccagc

SEQ ID NO: 218801 - DNA, 122 bp, Homo sapiens
gacagggcactggagacccaggaggcagggagactccacagtcagagacagaaacagagacgtagaccagaaggcttgtgagaagagaaccccaggaatcaaggcagagagccaggttccag

SEQ ID NO: 218802 - DNA, 122 bp, Homo sapiens
gtctgtcctgcttactagtcgctagtggggccactggccttctcgccaaacctctgggctcggtgcttaccgaagccctggcacttgtgagggacagctgacttcttccagacttttctaaa

SEQ ID NO: 218803 - DNA, 122 bp, Homo sapiens
cgctgcaaggtagaagcaaagaagagacaaacgaaatctaatgtgatgggatttaggagacggatgggattatttctagttggaaggactaggaaagtctttatggacgaggtgtcacttga

SEQ ID NO: 218804 - DNA, 122 bp, Homo sapiens
ttgtcctaggcctctcagatgaccagggccagggtcagagtgaggccccgagtccggagccgtggacggggccctaggcgacaccagggcgccctgactgcggcctcccactccgagacgcg

SEQ ID NO: 218805 - DNA, 122 bp, Homo sapiens
gagatggtgttctccctcggtcataatcagatctgtaccggctgtcttgtcttctcctgtcgggactgcggcctcgctcccgccgatccagggaccgatgcctctcacctcgcccatgactg

SEQ ID NO: 218806 - DNA, 122 bp, Homo sapiens
gaagggactgcactgattagctcaactgcctccttttcagagaaacgaaagctcacgggccgatttagcaaagagggtgtattcttatccgtgctgtcttatttttcaagattccagactag

SEQ ID NO: 218807 - DNA, 122 bp, Homo sapiens
tgtaagttgagaatgttcgaattaagacaaaacttccacttccagcttcccacccgtgcacgctcagagaatgaatcaaaatcactgcaggacagagagaacgcaaggagagcctagcccgc

SEQ ID NO: 218808 - DNA, 122 bp, Homo sapiens
cgggaccgccccggccgccggcccgccccccgcccctgcccccacccggctcgcccggcccgcccccgcgcgccccacctgcggctgccacccgcacccgcagctggactggccccaaggca

SEQ ID NO: 218809 - DNA, 122 bp, Homo sapiens
ggctttagcaagctgatcctgagtgcagttggtggatggcgacaggccggatgaagacagcgatggcagtgacgtgacgtcgcggaaccagaggttgtgccccattgcagtggccattgcca

SEQ ID NO: 218810 - DNA, 122 bp, Homo sapiens
gtgaggaggcgggcgcgggtgggaggagcagccagcaagcctaggagtccagagagccaacgccggggaggcagcgaggaggcaggcgggcgggcgagcgctccttcttcccgctcctctgg

SEQ ID NO: 218811 - DNA, 122 bp, Homo sapiens
caaaacaccccgtgctcccttagtgcctccgccagactccgctggagcttttgttcctgacgtccgtgctcagctctctccgctctcccctccctccccaaccccctcctcccgtcttatcc

SEQ ID NO: 218812 - DNA, 122 bp, Homo sapiens
aagcaggatctcctgcctggcgcagattggggtgccaggatggcttctcagagggatcagcgctgcaactcggtcgccgcggggccctggtgacaggcgcacgccccgccctttctcctccc

SEQ ID NO: 218813 - DNA, 122 bp, Homo sapiens
cacctcgcctgtggagctgacacagcaccagctgcagctcattttactccccgccagaaacgagggtgttatcatgtgatatttttgcctctttttataaataattcatccttttttgcaca

SEQ ID NO: 218814 - DNA, 122 bp, Homo sapiens
cacacgcatctgtgtacaccacatgcatacttgcttgtgccactgagatcgttacatacacgtgtgctcgagttctcacaggttcatacctggccacatctagcccaggccgaggagccgta

SEQ ID NO: 218815 - DNA, 122 bp, Homo sapiens
aagggccgggccccggagtgcaggcgcaggtgggtcttgaggttactggagctgctgaagcgcttgtggcacacctgacgggaacgagcactggcatcagctttgtcctctgggctggctca

SEQ ID NO: 218816 - DNA, 122 bp, Homo sapiens
ctgggggaacaaaggcaggcaccctcgatgtagatacggggggtggaggcgggcgcccagcgcagggggacaggagcacgtccagcccagcccagtcacacaaccaccctgccatgccagtg

SEQ ID NO: 218817 - DNA, 122 bp, Homo sapiens
acagtgccagggacaccatgcattaggtacaacataatgaccctgtgagtcatggtgctacgccatgactataataataaagataatagggatatagatataataataaggataataatagg

SEQ ID NO: 218818 - DNA, 122 bp, Homo sapiens
caaaagcaacaaagcaaactaaatataatgctcttcacaatttcaatcctgcactcacaacgccagcttcacaaactcatcaaaggtcacagaggagctaatttcctgttttgttacttaaa

SEQ ID NO: 218819 - DNA, 122 bp, Homo sapiens
actgttacgctacgaaggtgagactccttttggagaaacatacaatgacaccaatcgtatcgtaaacacttggaaggcactccaaattaagttgggcaagtcaaggtgagaaaaatccaact

SEQ ID NO: 218820 - DNA, 122 bp, Homo sapiens
tagagatcaagcaacgatggctaatgaattttacacaaagcatgctaataatggggcctgcggaacagaaggataatcacagcaggaattagttttctacttaaacatccttcctttgcacc

SEQ ID NO: 218821 - DNA, 122 bp, Homo sapiens
ggttgctcgggaagccaatctggggcacagtgtgagcctcctttctcagggtttcgcttccggacgtccccgggaacccctctgcagcagcttggccccacggtgccggcatgtgacccgcc

SEQ ID NO: 218822 - DNA, 122 bp, Homo sapiens
caaagtgctgggattacaggcgtgagccaccacgcccggcctagcagtggttttctcaaacgagtctggatcagattcacctgaagggcttgttaaaacagattgcctaacattttaaattc

SEQ ID NO: 218823 - DNA, 122 bp, Homo sapiens
ccctggctgctacagatggggctggatgcagaagagaactccagctggtccttagggacacggcggccttggcgctgaaggccactcgctcccaccttgtcctcacggtccagttttcccag

SEQ ID NO: 218824 - DNA, 122 bp, Homo sapiens
aagtgtcctttttacagatgctgtttgccttccaactctaagatgttactcatggtcaaacgagctctcattccctacaattaccagggggtgtccacggggaggattaacctggctggaaa

SEQ ID NO: 218825 - DNA, 122 bp, Homo sapiens
ttaattattcagaaactcccttacctctcagtggcttcccttctgcagcagttttctattcgaaccttttccccgcctttccgtggtagggcctgtatattgatccctctgacctttggcac

SEQ ID NO: 218826 - DNA, 122 bp, Homo sapiens
aagcactggaggacataggaggaagttggtcatgtgattaggtcatttatgtttgtcagtcggtgcttattgaagttaagctcctaccacctcccacagagtctgggggataggagtgctaa

SEQ ID NO: 218827 - DNA, 122 bp, Homo sapiens
ttcttcatggtcttcggcatcatgctgcacctgtacgtgcgcatctgccaggtggtctggcgccacgcgcaccagatcgcgctgcagcagcactgcctggcgccaccccatctcgctgccac

SEQ ID NO: 218828 - DNA, 122 bp, Homo sapiens
ctcccactctccagtaaggctgtcagggctgcaagctcaccgcgggatcggggggatggtcgaccctcagatacgggagggattgagcgatgcccaaggagagcaggagaacactgcgcttg

SEQ ID NO: 218829 - DNA, 122 bp, Homo sapiens
tgtggaaggacccagccacggccattggaagagcagtttcctgcaatgtaatgctgtttgcgaccagcataagctttagctctctcccaggacgagccacatccgccccattcacggtcctt

SEQ ID NO: 218830 - DNA, 122 bp, Homo sapiens
caggccacagcctgggctcaacctctcccagacttcctggactccagtggagccttgggccgggggcggggcgtccctggcccctccccgtcgtcccgcctgcccggaaaggagtgagcggc

SEQ ID NO: 218831 - DNA, 122 bp, Homo sapiens
cacagtgtcttatatcctgcctacaaacttgccttagctatggcctgctgatggctctgacgggtagaaaaggctgcttttcatccctaaatccccactcagaccctagcccagtttcctcc

SEQ ID NO: 218832 - DNA, 122 bp, Homo sapiens
ctcttacacttagtcttctgggctgggtgggatctgcatggccacagtccgggccaccgccgccggcctagcggctaggcagatagacgcctgccccaagttgcatgagtcatgccccttcg

SEQ ID NO: 218833 - DNA, 122 bp, Homo sapiens
gcccggagcagcccaccggccaccccaccgcccacccggctcccggtgtctcctcccggccgctctacccagcaactttccgtgctttgttccccgactggaaatgctttacggaagcgtct

SEQ ID NO: 218834 - DNA, 122 bp, Homo sapiens
ggtgcacgcggcccacggggaactgcagccccgcgcgcgacgagcgcgacttagccttggcgcgcgccttgccaccctgcttaccacgaccggacatttccgagtcaaggaaaaaagacaac

SEQ ID NO: 218835 - DNA, 122 bp, Homo sapiens
gggggcgggggaagttgtggtgccgagggatggcaaggcaaccttacagacgacaggaggcgctctcaagtgggctcctctgcggatcccagcgtctcagggacggctccgcgatcccacaa

SEQ ID NO: 218836 - DNA, 122 bp, Homo sapiens
acagcaagacgcgcgagttctggcgcacagcgccaaggtgcactcggtggcctggagttgcgacgggcgtcgcctagcctcggggtccttcgacaagacggccagcgtcttcttgctggaga

SEQ ID NO: 218837 - DNA, 122 bp, Homo sapiens
agtccgcgtaggaggggtcggaggtcttacccaacagattgacgcggcgttagtattggccgtgtacccgaaaaactgattgactgggctggcgttaactgtgcggaggcaggtatgtgagg

SEQ ID NO: 218838 - DNA, 122 bp, Homo sapiens
ccctcttaaactttgagaagcactgtgctaaatcactccactacgaagacttggctttaacgaacgctgggggagacatggacaatctttcccctgagtagcaatgtgtagggcacaggagg

SEQ ID NO: 218839 - DNA, 122 bp, Homo sapiens
ggatgctgcctctgcctccacggctgcctccaccaactcacagctcatgatacaggttctcgtctcccccacggaacacaaggctgacgtctcaacacggagccaagaaccaaatgacacgg

SEQ ID NO: 218840 - DNA, 122 bp, Homo sapiens
gaggtcagacctcgctttttttggctaaaacgcttaatcaaacacacctaatacttctgccggggtgcggggaggttgagagcgcggcggccgctgccagcaatcgaggagccagcggcgcg

SEQ ID NO: 218841 - DNA, 122 bp, Homo sapiens
gatatccccaccctccccgagctctaaaagccggatttgactcctctcgggcaagggtggcgggggggacggcgggcaaggggggacgggggactcgcgcgtcccgcggtcgtctgcggccc

SEQ ID NO: 218842 - DNA, 122 bp, Homo sapiens
ttaagtgctgtgacttcagctaatgatcttttcttcagccccaccccctccccactagctcgatctagtatattggggaatgcaggtggggggtgtcaccatattttttctgagctggcctt

SEQ ID NO: 218843 - DNA, 122 bp, Homo sapiens
tctccccaaacatgcctgtgatacttcactgagaacagacattatatcctgagcaactagcgttgtacttgacccagagtagaatgtgaatgaataatggaagaggcttccctttgccaaga

SEQ ID NO: 218844 - DNA, 122 bp, Homo sapiens
tgcagatgaggaaggacacgtcacctgcctgaacagtcaaactgaatatttcatccccaccggaggactgtgggctcctgtcgccctgctggcaggcacaatcagagtgtcaatttctggga

SEQ ID NO: 218845 - DNA, 122 bp, Homo sapiens
ctgggagtgcccatccacactaagaggggcccacaggacaggcgagggtggctgtcctgacggcctggcagtggggccagacagacctctgtggaatcccatctctgcccctcattacccaa

SEQ ID NO: 218846 - DNA, 122 bp, Homo sapiens
gctcgcagtccagctgcttgaacccagaatatctcttggcctgtccctttccctctttttcgtctgtccctacctcctttccaggcggggaaggaatcgtttctctcctagtcttcctgccg

SEQ ID NO: 218847 - DNA, 122 bp, Homo sapiens
cctttcctgggcagctggctcgcctgccttcagggcaacagcgagccgtcacacggccagcgacaactaccagactgcaactaggaggagggactaatccacgcattggctctgggtctcct

SEQ ID NO: 218848 - DNA, 122 bp, Homo sapiens
gtttcatctgcatagagattccggctgacgcctctatttggaagaatgcaatagtatttgcgtatttgaacccacagccagtccttgggccagaaactgaggctgaactgcctcttgattta

SEQ ID NO: 218849 - DNA, 122 bp, Homo sapiens
cctgctccgggattggaacaaccccctagtctggggtttctcctccacctcaatccggagcgttctgggaaaggcctgggtgtcctgggttctgaagaccccagggacgcaccccgctgcgg

SEQ ID NO: 218850 - DNA, 122 bp, Homo sapiens
cctagattccggaatccagctgtgcgccggggaggagccgggcgggccttctcgccagctcggacccctcccagctggcctccctgtccgctcagagggactcctgccctctcgcttgaacg

SEQ ID NO: 218851 - DNA, 122 bp, Homo sapiens
cccgccccgggctggctgcgaaaaccgccggccttaaagagcccgcgacgcgggggcgggcggccccggcccggagccacgcatttccggtctcccggcacccagcctccggcaggtgcccc

SEQ ID NO: 218852 - DNA, 122 bp, Homo sapiens
ggtctaacaggcgtcggggagagccaatggtgtggcttcatggctccacccccttccattcgattggccggcgccgaaaagccgggcgtgagcggccgcagtttctggagggagccgctgcg

SEQ ID NO: 218853 - DNA, 122 bp, Homo sapiens
cgccccgccacgtgtagtcaccccgggccaggggctcggcggctgccgagttgagaagggcggtgccgacgtccccgcctccaggcgccgcggaaggggaggcagcccaccctgcagccgag

SEQ ID NO: 218854 - DNA, 122 bp, Homo sapiens
actgcttttatgagctgtaacactcaccgcgaaggtctgcagcttcactcctgaagccagcgagaccatgagcccaccgggaagaatgaacaactccagaagcgccaccttaagagctgtaa

SEQ ID NO: 218855 - DNA, 122 bp, Homo sapiens
ggagcctccgaggccctagtccaggtccgggagaagcctggatctagggaggggcagggccggcctcaccagccccagcagttctgccaaatggattggggaggcagctctggtggggagga

SEQ ID NO: 218856 - DNA, 122 bp, Homo sapiens
ggccgcccagtcgtgcccgacggagccctagagggtaggagagagcggtcaggagccccgcggtgggtcccaggaggccagtccccagctccctgctcccgcgggtccccagcccggcgcgc

SEQ ID NO: 218857 - DNA, 122 bp, Homo sapiens
tgtggagcttgctgagcggcttgccgtccaggaggtaggagcccgtgtaggtgacgtactcggcgtagcactggggcgcctgcggcgtgatacagcacaggatcttgcgcttctcctcgatc

SEQ ID NO: 218858 - DNA, 122 bp, Homo sapiens
acgcttgcggggctggtgcccagatgtttgcccatcgtcatcagggggcactaaggaccccgaggagcacggggatgtctgccgggtccttctcatggtgcggtgggaagctgccgaagaca

SEQ ID NO: 218859 - DNA, 122 bp, Homo sapiens
gggaacgtgccctgcattggccgtgggccaatcacgggccatcccttcatctgcatagggcgccagttcacctcagtctttagccacagaccgaacccttcatccagatacggggtagctga

SEQ ID NO: 218860 - DNA, 122 bp, Homo sapiens
gacagaaagagcccccctggcggccggcgcagactggctgcgggggcgaccttcatcccacgtcccaccctttgaaaccaggccagggacacggcggctctgaaaacaggctgtgatgcgca

SEQ ID NO: 218861 - DNA, 122 bp, Homo sapiens
ccgggcgggcgcgcagcaagacgtggctggagttggggtccctccggggcctcggggtcccgccccgggtggcgggggctgagccggccgctcgcggtctccccccctccctggagtggctc

SEQ ID NO: 218862 - DNA, 122 bp, Homo sapiens
ccctccaggtgcaacacctgacaacatccatcggcaacttcgtccatgaacacatcacgccggggactcaagcacgttaaactgctccaattggtagctaaacgagagattgcaaaacatgc

SEQ ID NO: 218863 - DNA, 122 bp, Homo sapiens
tcagaagccgcagctgcgagctccgtggcagccgctgcactccttccggccctgccgcggcgtcacctcgcgcctgcgcacagcgccccctcccgactaaggacaggaagaaccatagaggc

SEQ ID NO: 218864 - DNA, 122 bp, Homo sapiens
tcagggctcttttgcctcccggaagtacaaggcgcctccatcttcacagcatgaagggtgcgggatggggcaggagaccggagggagttgaggttttgcacccgataaggagacgcataaag

SEQ ID NO: 218865 - DNA, 122 bp, Homo sapiens
tctgcaagagtcatacaagaaggcttacgttttaaaaataccaccggcatgctagcttggcgtctgtaagcacaaaaagtaggagagcaaggaagggctccagaggcaggtggaccgggccg

SEQ ID NO: 218866 - DNA, 122 bp, Homo sapiens
gatttgtcacattcggtttttctgtccattcttgatggacacttgggttgtatccactttcgggctattacaaacaatactaccgtgaacattcacgtacacgtttttgcgtgcacgcgttt

SEQ ID NO: 218867 - DNA, 122 bp, Homo sapiens
tctcggggccgcccaccccgcggtcccagcccggaccccgcccaccccacggacccagcccggaccccgcccaccccgcggtcccagcccggaccccgcccaccccacggacccagcccgga

SEQ ID NO: 218868 - DNA, 122 bp, Homo sapiens
gatccgtttggaaaaggcagaccaaatttaaaaatttcatcaaagaagaaaatacagatacgtaatattggttttggccaataaatgtaacctgttgagaacagaggagaaaagttgatgag

SEQ ID NO: 218869 - DNA, 122 bp, Homo sapiens
gtcgcggcgtcatgcgagaggggctctgacctccctgtgatcgcggaccagggtaatgtacgtcctgcagggctttgcacaccatggtgcctgatgagataatcaactgagttttagagcca

SEQ ID NO: 218870 - DNA, 122 bp, Homo sapiens
cggccgcaccccgcgcagccagagcaagcactggagccccgccccttcccgcaccccacccgcctccggccccgcctggcccacccctggaccgcccccgccccgccccgcccctacccgct

SEQ ID NO: 218871 - DNA, 122 bp, Homo sapiens
tcacacccttctaaaggtactgattctttgtcctcagtttcccttaagcctgtcactagccggtaactggaaaaaataataactttacagcagttgatgtacgaatgatctaaaggtatcag

SEQ ID NO: 218872 - DNA, 122 bp, Homo sapiens
ttgccagcatgacaaaaccccatctctactaaaaatactaacattaccagggcatggtggcgtgcccctgtaatcccagctactcaggaggctgaggcacaagaatcacttgaactctggag

SEQ ID NO: 218873 - DNA, 122 bp, Homo sapiens
ttggagttgagactgaataataaccagccacacaaacctgggttctaccacagagttcatcgttaacaaaccgcgtgcccttgggctggtaacttctttctcagttaaagtacccatctgtt

SEQ ID NO: 218874 - DNA, 122 bp, Homo sapiens
agaggggcggcgggcggcggcggcggcggctacaggagggactgacaaagccccacggcacgccgctccctacttatagcaccggcgggtcgccatggagacgcaccagctcaaaccagcca

SEQ ID NO: 218875 - DNA, 122 bp, Homo sapiens
accagatccctcctgtgagattgcaccgactgcaatgcaactttcgacctttaatggtaacgactagcagtggaaagaagaggagggggagggaagagaacttagacccgactttaagaagc

SEQ ID NO: 218876 - DNA, 122 bp, Homo sapiens
tgtattaatttattcggcaaacatgcatgggactacgccaggcgtggctctaggtgctgccgacactgggatgaaacagccgggatccctgcccctgtggaacttgcattccagcaatggga

SEQ ID NO: 218877 - DNA, 122 bp, Homo sapiens
tcgcgtctttctcatctttgtgtcccccagcctatcacagggtagtgcaggacaaacttccggtaatgacagcagaaatggggtgcaggcaggattagggaggaaaacaggagctacacaga

SEQ ID NO: 218878 - DNA, 122 bp, Homo sapiens
cagtccaggttggcttccaggtactccatgcagtagagcaggccgccgttgggccccaggcgcagcgcgtccatcacgtcgcccagccccaccagctcgcccacgtccacggcacactcgta

SEQ ID NO: 218879 - DNA, 122 bp, Homo sapiens
acattgtagctcgacattttggcaccagcccctaaagcattcccaccaccacccccgctgcgacaaagccctgcgctccttacgacagcgtacgacgccgagcctgacaggaacgcctcgtg

SEQ ID NO: 218880 - DNA, 122 bp, Homo sapiens
cagtgaagtgacttggcagcccaggtcgccaacgcccgtttctgtagcgcgatcggttagcgccttcggctgttaaacgaaaggttggtggttcgttcccaccccgggacagaagtcccact

SEQ ID NO: 218881 - DNA, 122 bp, Homo sapiens
gactcagtgtccagggctggggttccaaaggacgaatcccgggccccaggcctaggaccccggacatgaacacttggcagagctgtggggagtggccccaggattccagctctccatcaagc

SEQ ID NO: 218882 - DNA, 122 bp, Homo sapiens
ctatgctgagaattctgttctgtttgctgctgatagctcccaaataatgaatggtcaggtcgtgggatgacttcagaaatggcaaccactgaatggcaaagaaagtccttccaagtgtgttt

SEQ ID NO: 218883 - DNA, 122 bp, Homo sapiens
acgcgctcgtcagagcaccccgccccctttctcctgcgctggcttcatgagtctcttctgcgcaagttcacactgttaaaaacttgctgaggatacagtggagtctcgcgatagctctgccc

SEQ ID NO: 218884 - DNA, 122 bp, Homo sapiens
ttggtagcaaatttagccaagctgcttagcctgagagtgatttctgtcctctgactgctacgttggctttgcttgcttacatttggtcttccaaatcagtgccattcctttctacctccatg

SEQ ID NO: 218885 - DNA, 122 bp, Homo sapiens
acttgttcctcgaattctataatctgggcccaaactccctctaggtttctatattcctcacgcttgggccaagggtgccacaatctccacacaggtccccttctaggtcagttagaaaagcc

SEQ ID NO: 218886 - DNA, 122 bp, Homo sapiens
ggaccagccgccgacctcacctgttttgttttcttggaggaaattcctccgctggggggccgaggtggcaccgcccgctcgccccccgcaagacccagccggtccgcgcccgcttacctgct

SEQ ID NO: 218887 - DNA, 122 bp, Homo sapiens
tgagagtgccttgtagcctggcccggagtgaagaggggggctggggatcagcctggcagacgttcttatcaagcattgaggtccccggagccccgtgcccacccttagccatggctctttgg

SEQ ID NO: 218888 - DNA, 122 bp, Homo sapiens
gtgaagcaggcagaggacagattctagcttttcaaggaaaaatgctgcttctcctcccagcgtgtgtatccgactctaagctgtgtgcaggtgtatggtgtccagatttttgttgtttgaaa

SEQ ID NO: 218889 - DNA, 122 bp, Homo sapiens
cgcccggctaattttgaatttttaggtttctccacgttagtcaggctggtctcgaatttccgacctcaggtgatccacctgccttggcctcccaaagtgctgggattacaggagtgagccac

SEQ ID NO: 218890 - DNA, 122 bp, Homo sapiens
aggctgcaatctcggcactttggtaggccaaggcaggcagctggtaggtggaggttgtagcgaactgagatcacgccactgcactccagcctgggcaacattgagcactgagtgagcgagac

SEQ ID NO: 218891 - DNA, 122 bp, Homo sapiens
ctcgaactcctgaccttctgatctgcccacctcagcctcccaaagtgctgggattacaggcgtgagccaccacgcccggccctccagggtcttaatacaaaaccgggtggctggtggcgatg

SEQ ID NO: 218892 - DNA, 122 bp, Homo sapiens
tttgaagaggaaggtgcatacctggtctgcttggtcggccgtccttcctggagaaggtggcgctgccatgtttgagtctcaggctcccaacggccgtggcgtgcgtcacccttgcgtcgccc

SEQ ID NO: 218893 - DNA, 122 bp, Homo sapiens
cgggcggccgggccagagtggcgggcgcggggggtggcgggggcggggcggcggcgggggcggcgggcgcgggggcggcggggggcgagggcgcggcgggcgcggggggcgcggcggcgccc

SEQ ID NO: 218894 - DNA, 122 bp, Homo sapiens
gaatatcttgatggcgaacactaagtttgatgcatttctgaagcaatctctcccatcttacgacttgcagaaggtcatggcggccattaaacagcaggtgagctgtggggcataagtgggtc

SEQ ID NO: 218895 - DNA, 122 bp, Homo sapiens
ctgcgccaacagaacgattccgagagccgggcctagtaacacaggggcttttcttcagaacggtgtccagaccggagcttgcgccgaatgtaggggctcctattggccacgcgccgtagggg

SEQ ID NO: 218896 - DNA, 122 bp, Homo sapiens
ccgccaacccccagccccggcccggctgccgtcggggcgatgaggtcacccgcccttgcacgatatctgttgatttggggatttgttcctactgactataggagtcaattttcttgggtttt

SEQ ID NO: 218897 - DNA, 122 bp, Homo sapiens
ttatacgtctatgccactgttggggttaaagccctaggcacgcaggtcttgcctcaactgcgcctgcgcgagtcaggacgagcgcttgccccagatcttgacgtttcaggcggcccctccta

SEQ ID NO: 218898 - DNA, 122 bp, Homo sapiens
acatcatgccagtaaactggcccacggtggggtggcagagggagagggcccaggtcggggcggacacccttgcctgcacgggtgatgtggaaccagaaagctgactctggatgcaggaaaaa

SEQ ID NO: 218899 - DNA, 122 bp, Homo sapiens
acagattgaaataacaggcagtgaaagagcttggcaaatagcattgcactgtatacattccgagttattctccagcttctttgatggacacagaaactggggccctgggaaggggcctaccc

SEQ ID NO: 218900 - DNA, 122 bp, Homo sapiens
agctggggtatgtgctctgcaggggctgcaggaggccaagctcttcccgagccacctcggcgagtattcttgccgcttggccacgctggtctgccctggtccggtcccctcaccccgactgg

SEQ ID NO: 218901 - DNA, 122 bp, Homo sapiens
ccaagactgacctcaaaacccacatcattttcattacaccatatgggctttctatgttgccgtcttttagcgaagtggaacttgttagaaatgcaaattttggggccccatccagacctact

SEQ ID NO: 218902 - DNA, 122 bp, Homo sapiens
agagtctaggagaaaactacgtctgggactcgggaacgagtccagggagtttagagcctgcgagatggggcaggggtttgggcggcgactgaacggaagccacgagaaggattcggactaaa

SEQ ID NO: 218903 - DNA, 122 bp, Homo sapiens
cttgggacagataaatctttattctagaaaagtgtctccggaagcctgagttgctctcagcggtgaccacagagcctcagtcaggtccccagggcttctcggtaggccaggcctctcacggc

SEQ ID NO: 218904 - DNA, 122 bp, Homo sapiens
ccccaaaacaccgctttttttgaggttgcctgcagttccaaggtttcccggaaggtggagcgctgcagtctgaacccgaagccagacgccccccaacccggccccagggcccatccagccgt

SEQ ID NO: 218905 - DNA, 122 bp, Homo sapiens
ctgttagacacagggccgatacctgtcattgctgttagactcagggccgatatccatcatcgctgttagacttgtggccaacatctgtcatcgctgttagatttcgggtcaatatccatcat

SEQ ID NO: 218906 - DNA, 122 bp, Homo sapiens
agaagggacgctttctccgggaggaggccttgggagagccggcctttgtagtgaaatgggcgtcttggagaggaatgggcggttctgggatgaagcaggtggtctgagaggaggggcatttt

SEQ ID NO: 218907 - DNA, 122 bp, Homo sapiens
gggtaatgcagattcagatgtgcacacacacatgcatgaacacacctcacacgcacatgacggcaggtcacacagacacatgagcacggcacttgcacacagtgggctcatatagagacacg

SEQ ID NO: 218908 - DNA, 122 bp, Homo sapiens
ttagaaagttactgcagaaatccaggaataagatgaagctcatgcagaataggtaatacccgtgggactggagggaagaaagtaactttgggaactttcaggaggcaaacaggacttgaaga

SEQ ID NO: 218909 - DNA, 122 bp, Homo sapiens
ataattgagccgatcacagaggagcgagcctctcgaactctgtaccgcattgagctgctacggaagatccgcgagcaggttctccatcacccccagctgggagagaggcttaagctctgcca

SEQ ID NO: 218910 - DNA, 122 bp, Homo sapiens
aaattatctgcaaactaacgaagcctatttttaaagatccctgttcctcgcagctctaggcgatgacatcagagaacccggagttctacctccgagccaagcccagtggtggtcaaaaacta

SEQ ID NO: 218911 - DNA, 122 bp, Homo sapiens
accttggtgcctggaccgtggtacttccctgtttttaactagttggactgtggagataaccgaattaaagtagctatcaattgaatgcctgctgtatgcctaggtaccatgcaggaggaacc

SEQ ID NO: 218912 - DNA, 122 bp, Homo sapiens
ctggctagcccagtcctggactctcctgacccccatctcttgctggtctgagtctgctcccgcatccacccgtcctgcccccagaccctgcagctttctgagtgttctggcaggaaagcctg

SEQ ID NO: 218913 - DNA, 122 bp, Homo sapiens
ggagctgctctacggctcaccggccaccaccgcttattacccgctcaaattgcacttcggcgggctgctgaagtatccggagtccatctcctacttcagcgggcctgcagcggccgccctaa

SEQ ID NO: 218914 - DNA, 122 bp, Homo sapiens
ctccctctgtcccccagaatggaacagtcatggatcctgactcactgccaccttgacttccgggactcaaggaatccccccacctctgcctcctaaagtgctgggattacaggccaggcatg

SEQ ID NO: 218915 - DNA, 122 bp, Homo sapiens
aggtcaagggaagacctccatattatttttctcttcctcatacatttatttatttagagacggagtctccctctgtcgcctaggttggagtgcagtggcgcgatctcggctcactgcagcct

SEQ ID NO: 218916 - DNA, 122 bp, Homo sapiens
ttataacgatatttagtaaaaaggacaaacttgaatttctgttcatcccgtcacacctctcgattagagctaggtgagttacatgtagttataaactaaagggactagaccccaaagctatg

SEQ ID NO: 218917 - DNA, 122 bp, Homo sapiens
gctgataagagaattccaaacctgcctgagagctcggcagccctcctgctgttcacaggccgggtcccaacagcaaatgactccccagccccggctgtgccactgccaggaagttgccgaga

SEQ ID NO: 218918 - DNA, 122 bp, Homo sapiens
acccgcagtgcccggccgccgcgagctcgcggggtgtatgcccgccccgaggctccaccgcgcctgtgtgccgggaagcctggctccacaggaccctcaggcactgggcgcgccgtcgctgc

SEQ ID NO: 218919 - DNA, 122 bp, Homo sapiens
agtcttgctctgttgcccaggctggagtacatttgcctgatgtcagctccctgcaacctccgcctcctgggttcaagcgattctcctgcctcagcctcctgagtagctgggattacaggtgt

SEQ ID NO: 218920 - DNA, 122 bp, Homo sapiens
gatggcatttaaggacttcaaggcccactttgataaagtggagatctgcaacctcactcccgatgccctggaggaagacgcgatccacaaatgggaggtgacggtccatcagggaagctggg

SEQ ID NO: 218921 - DNA, 122 bp, Homo sapiens
gtgcatttactgaaaagcttttccgagaaacggcacaagaatggatttgcttatgtgctgcgaccacacagaactgtatataggctgacgtcaccggatgacgtgtcttttgtttgggtttt

SEQ ID NO: 218922 - DNA, 122 bp, Homo sapiens
cgtgggaaaaaaaaaaaaaaaaaaactggccagcaacatagcttaaaggatcctcacatacggcagccacaactctgtgcacagaccaaggaaggagaagccgcaagagctggtaaagtatt

SEQ ID NO: 218923 - DNA, 122 bp, Homo sapiens
cgcccccttcgtcaaaggtgagcgcttcatgacgtcacgggcagacctgggggctggtgacgttgttcagcagaaaccctctcccgatcccccgccttgctgcaacagaaaagcgtggcgcc

SEQ ID NO: 218924 - DNA, 122 bp, Homo sapiens
cggccctggcagacctcgtccctggaccctggctccaggcagacctcccagttccagcctcgtttcaggtaccagccttgttttgaccgagtaggagctgctgtttacaactggccagccat

SEQ ID NO: 218925 - DNA, 122 bp, Homo sapiens
tactcctggacgtccaggggaggagctgagagtggaacgtccatcgcccgtggggccatccggggatctcggctttggaacgtgctcatccacctgcatgtttactcctgaaagtccaggga

SEQ ID NO: 218926 - DNA, 122 bp, Homo sapiens
ccgtctcgccattcccaagggcagtgcagagcatggcacccagcacccgacaggcgaggacggcccaggacaaagcggcagctctagctgtcctcagattttgggagggggctcccaacacg

SEQ ID NO: 218927 - DNA, 122 bp, Homo sapiens
gcaggaccctcaggtctctccgcaggatggcagcgggggagtgaggcagccaggtgagcccgggcggcgggagggacacggacgccggtggtccccagccggggctgcgcggccaggcaggg

SEQ ID NO: 218928 - DNA, 122 bp, Homo sapiens
gtagaaggccctgctccctatcctgtcccacagccctgcctggatttgtatccttggcttcgtgccagttcctccaagtctatggcacctccctccctctcaaccacttgagcaaactccaa

SEQ ID NO: 218929 - DNA, 122 bp, Homo sapiens
gtcctgaagtcgccctctccaggcccagctccggcctcccggcggcctctccaggcgcaacgcatcgtcaacgagggcccctccggggccagctcctgcctctcgtcagcctctagagaccc

SEQ ID NO: 218930 - DNA, 122 bp, Homo sapiens
gccgcggactacacttcccgaagtgccgcgcgaggtattctcggcggtgattggggcaaacggccacggactacacttacttacatgccgcgcgaggcgcctccgccgccggggcaaacggc

SEQ ID NO: 218931 - DNA, 122 bp, Homo sapiens
tgcccgcagaggcacgtggtgacgtcataaagcgatgcccgcaggcggcagggggtggggcgagggcagccggggagactggagaagcctactctgtgcggtggagcgaccctggataacag

SEQ ID NO: 218932 - DNA, 122 bp, Homo sapiens
agaaaacatttctgcctatattcattctacccgtgcccttttcctgctgacatttttacacgataaaatgctatctttttaaataataaaatctgaaccagatggaaaaagtgaattgtctc

SEQ ID NO: 218933 - DNA, 122 bp, Homo sapiens
agagagttcagagatgtttagataaaaataaaacaatctagatttgcataatttcctgaacgggaagaggtattctcacctagaatcctggatctgttagaagtaggatttctcagattgga

SEQ ID NO: 218934 - DNA, 122 bp, Homo sapiens
ctgaatcaagaatagacagaatgacaaggagaaaagcagttcttcagtgacagggagactcggtgccctacttctaaccacggagagaaccgccggacagacgatcagtgaggaaagacacg

SEQ ID NO: 218935 - DNA, 122 bp, Homo sapiens
caagatctcagccctgcttaccagctgcatgaatataaactctgtgctgttagtgggacacggtgggagtgagactggccttgctggctgcgttgtgagctgagtgaggcctttcactgctg

SEQ ID NO: 218936 - DNA, 122 bp, Homo sapiens
acacagatacataatatattcatttttatctttggtaaaatataaatggaattgtcagcgcgctcctgtctgtttgtttgtctaaggctatcaaaagaagtcaagagaggaggctgtggtcc

SEQ ID NO: 218937 - DNA, 122 bp, Homo sapiens
gaggcagggcgactttcagggggtggggctaagacttagatggggcggagccatcctatccgggtccctgccccgatttcaacctctttattcctggaatttttgtttgtttgtttgagatg

SEQ ID NO: 218938 - DNA, 122 bp, Homo sapiens
tctgtcttattcgccgcaatagctgatcaggagaaatcccgctggctgccaggaaaggggcgcggagatgcggatgctccgccccaacaccacgccttcctctgctgaccatccccaaagtc

SEQ ID NO: 218939 - DNA, 122 bp, Homo sapiens
gtctgggcccagggtctgactcctgagctcctaggagatggatgaatattcttcctgcaccgccagctgcctcgcttaaacgtggggaggctgaagagggtgcaaagctgggtgaacatgag

SEQ ID NO: 218940 - DNA, 122 bp, Homo sapiens
gccgggcgctccccgcagctgccggcaggtggcccagggcaaccgcttgcctcccgcggacgtgcatctaccaggcgaagtcaggaaagaggcagcggaagctacaagaaagatatggtctc

SEQ ID NO: 218941 - DNA, 122 bp, Homo sapiens
ccgaccaaaatttgtttctaatgagtaacaataaaaagcacggcccctctgagatccatccgctaaaaaaatagtcccagtttagatctatttgtaattggctttggtacgcacaccaatga

SEQ ID NO: 218942 - DNA, 122 bp, Homo sapiens
agattaggaaggaagcacgagaccagagactagtgtcatcaccggtcacggcaggacaagcgccccagaggtcggaaaatcctgggacaacgcgaaagcggtggtcgccccacactctgcgg

SEQ ID NO: 218943 - DNA, 122 bp, Homo sapiens
tttacaaagaagaatggataattgtggaagtaggtaggtcaaaaaaaaaaaggaaagcctcgcccgccccccagtaatttgtcaaaagcaagtgggaaaaatctctggtagtgcagtactgc

SEQ ID NO: 218944 - DNA, 122 bp, Homo sapiens
taagaagagaaacctcccagatacagaaatggtcacatcaggggccccctcctgtggtcacggagcccgcagagggggccaggccggaggctgcaaagccacgtggaagaggcggcgcccct

SEQ ID NO: 218945 - DNA, 122 bp, Homo sapiens
aaactgtcatgacagagaggttaagactctagtccaaggtctgtgctaaagccagcccagcggactgtcggcagaatgaaccaacgggaaagaggtcagaaggagccagatccgccagtgcc

SEQ ID NO: 218946 - DNA, 122 bp, Homo sapiens
aaagctttttcttcctgtcagctgattttgcaaagggtataaggagccaaagagctgccacgttggtacagaagttggaaaacaccatacgcttcaactgctggttaatttttgctctaaaa

SEQ ID NO: 218947 - DNA, 122 bp, Homo sapiens
ggccttgccttatggacatcaaggacaaggcccatcagcatccttgcaggctgttcagctcgtcatccacagacagagatcttgctcacaagctgcagatggattttatgcctccacacgaa

SEQ ID NO: 218948 - DNA, 122 bp, Homo sapiens
ggagtagacactcgcagtgtttccatggatacgggaggggcggggcgggaagagagagcgcgggaaaacgtgactcctgattggccagaagtatcccgcgcctcccgacctttggccgctgg

SEQ ID NO: 218949 - DNA, 122 bp, Homo sapiens
cttgtaagagccaatggatgacccttttggcagctttacctggttggattctacaagtagcgtggcaccaggaagagaaaaaaaacaagatgcagggaatggagattgtatcaagagtctga

SEQ ID NO: 218950 - DNA, 122 bp, Homo sapiens
catcagagaggcccattcccggtgtcattctccagcgcacgggcttcctctctattcccccgggtctcccacacagagccggagtatatgcttcgcctactttcacctgcctgcgctgccag

SEQ ID NO: 218951 - DNA, 122 bp, Homo sapiens
caggatgataagggggaagatgggaagaaacagacgggagacgcccgcccagaaagactgcgggaagaaagaaattcgagaggaaactgcacgccactgagcgcctcccaaaagccttggaa

SEQ ID NO: 218952 - DNA, 122 bp, Homo sapiens
tttttgaatttgttactgttctcagcatattgtctcgtttgagaagggtatggcacgcagcgttgttgaaggagcgcctcagcttgggaggctgaaagttttatctctgtactgtcgacaaa

SEQ ID NO: 218953 - DNA, 122 bp, Homo sapiens
cccctttcgggcagaatccgctcccggtccggtcccgattggcagaaaacgatacgagggcggtatacactcaacacgcgcatgaacgattcatcaagccctccgtgtgccgggtctggctc

SEQ ID NO: 218954 - DNA, 122 bp, Homo sapiens
cgtgcccgagtacagctccggactcttcccccccagcagcctgctgggcggctcccccaccggcttcggatgcaagtccaggcccaaggcccggtccagcacaggtaggagccagctcttcc

SEQ ID NO: 218955 - DNA, 122 bp, Homo sapiens
gctcacagccaatcctctcactgaagtgaaacaccaattctccaggcatacacacacatacgcacatcttattttcactgctctacacagggacctgagaatccttaattttaaagttggga

SEQ ID NO: 218956 - DNA, 122 bp, Homo sapiens
gagtcagccttcgaacacgattccaagaagtctccctgcccaaaaagagcaggcgctggccgcaagtgacaagagacgagaattttgaagccatcttagagttatgggaaagtttgaatacc

SEQ ID NO: 218957 - DNA, 122 bp, Homo sapiens
tcgttgttttaaactttagaatctgaaaaccagaaagaagtcttgtcattgcagcagcatcgattccggtgatagagtttgtatcactcaacatcaggggatgcctgaggagtgcgagctcc

SEQ ID NO: 218958 - DNA, 122 bp, Homo sapiens
agtggagtctagccaaggggtaggggaaggagcagggagttgaggcagaaagaaagagtgcgaggcattctgggacctctgtcggttctcccttggggcctcttgccctttctccacagagg

SEQ ID NO: 218959 - DNA, 122 bp, Homo sapiens
gattttaaaaatacagtatgggcaggcaacgcgctgagggactaggcagagccgtggaaccgccgccaggtcgctgtcggtccacgccgcccgtcgcgctgcccgcccgctcggcgtcggcc

SEQ ID NO: 218960 - DNA, 122 bp, Homo sapiens
agggctggatggactcgtggagcctcagggctgggtagggaagctggcgaggccgagccccgccttgggcttctgggcgccctgacttcgctcccggaaccctcgggcctgggaggcgggag

SEQ ID NO: 218961 - DNA, 122 bp, Homo sapiens
gatttaaagccaagggggcgtcaggtcaagtggatggaaacttactgatagggaacatcacgggtgggagggttctgattaagcaggcctaataggattcttgctgaagccaggccagggtg

SEQ ID NO: 218962 - DNA, 122 bp, Homo sapiens
atccatttcctccccggacgccgcgccgctggccgggccacttgcccggcccccagcgggcggcagccccgcccaagtgggtggagtcacctcccagataaagtttcccggtctggcacgcc

SEQ ID NO: 218963 - DNA, 122 bp, Homo sapiens
tttactttctgtacatagtcctgcctgtcgggatgcaaaacagcaggcccagtccttttccgcaagacagcattccagataccgggaagcagacactccgtcccagtgctagtcggctgcgt

SEQ ID NO: 218964 - DNA, 122 bp, Homo sapiens
ctcaaaatggattaaagacttaaacataagacctcagaccgtcaaactgctggaggaaaacgtaggggaaaagcttcttggcactggtcttgacgataattttttggatatgacaccaaaag

SEQ ID NO: 218965 - DNA, 122 bp, Homo sapiens
tgcaggaattgtctaaccctgggaagtgcggtcctttctagagttagcaaagccccaagacgtcaaaacatcagaataaacagacatcttcatacaaaaatttgtgtcatctcagagtccat

SEQ ID NO: 218966 - DNA, 122 bp, Homo sapiens
ctcaactctcgacccagccccctacttctctaggcctgcaaccgcgcagccctcacccctcgtacccggggcctaagcccaccccagattctgggtcattcggagccccagtgcagcagaag

SEQ ID NO: 218967 - DNA, 122 bp, Homo sapiens
cgaaaacggccacagtcccacaagtcccagagtcccagagtccctgttatcactcaggcccgccctctaacctccagcagcctataggaataagtcatcactgggggaaaaaaaaaaaaaag

SEQ ID NO: 218968 - DNA, 122 bp, Homo sapiens
ctatggggaaccagctccttgcagggactgcctgagtttttgtttggtccaactgagtgacgaacatataaggatgtggggctgggcgtgaaaatgagtcaccaaggtggaactcccttctg

SEQ ID NO: 218969 - DNA, 122 bp, Homo sapiens
aggcctgggccccacctagggaggacgacaaggtgaacccacctcttctgagcccatctgcgctgccccaccctcagctctttcactgtctcctccgctctaggtcctgttgccaccaggaa

SEQ ID NO: 218970 - DNA, 122 bp, Homo sapiens
tcctctgagcccagcaccagctgggctgggatcctagaggggtggctggttgtgtggtctcggcagttggccctgagaagtgtccccagcacctgctttaaaaggtgtttgatctgctcctc

SEQ ID NO: 218971 - DNA, 122 bp, Homo sapiens
gaacctggcacgctacgtttcgcgggctctgagactcgggtggtgagagtcgccgagatgcgcactgggaagagaaaagagccaggacgcacctgcatttatggcgccatcgcccgggcgga

SEQ ID NO: 218972 - DNA, 122 bp, Homo sapiens
cccctaaccccaccccaccctagccacacaaaaagtcgcgggatcacccacgcatgacctcgctcgtgcccacgaccacagacggaatctcgctgttgctcctgcacgctccccctcccctg

SEQ ID NO: 218973 - DNA, 122 bp, Homo sapiens
gggggtgcttgtgactgtctttgtgactccagctctccctgtgaggtcaggacagattctcgagaggagagacctcacccctctgataccaagaatgctcatgacagcctacacttctctgt

SEQ ID NO: 218974 - DNA, 122 bp, Homo sapiens
tgacgaagttgacgagggtgtcggcatgagggggtggagcaaggagcgcgtggcgcggtgcgcagtgggtggctccacctcgactgcgaattactgtttatgaggtgactcgctggttctat

SEQ ID NO: 218975 - DNA, 122 bp, Homo sapiens
gataattgttctagctacttctataggttaccaagttatcatatgcaagtttcctgattccggcaatggattcaatacaattgcttcgactaaaggaaacgtttagattttagagggaattg

SEQ ID NO: 218976 - DNA, 122 bp, Homo sapiens
gaatggttatggtccgttgaacaaatccttatttaggcttttctttctgaagaatgtccccgttggagttgactaacttctttgaagctgccttggtttattggttaaatatttactcatta

SEQ ID NO: 218977 - DNA, 122 bp, Homo sapiens
ggacctcaagccgtcccgtttggactggtaatccggagactcacagcggtgacctgtcagcggacgcggagccgggacggagccacggccgctcagattagcaggatctgattgacagcatc

SEQ ID NO: 218978 - DNA, 122 bp, Homo sapiens
gagcagtctgggcagagggaatagttggtacaaaggccaggagtgggaggatgcttgatgcgttcaaagcacagcaaaaaggccagtgtgactgaggcagagagaatggcaaagtggtggga

SEQ ID NO: 218979 - DNA, 122 bp, Homo sapiens
tcctgtgaagggcggcggccgaaggcagcaagcctggccaggggagagaggacccactcacgttctcgaagcctgttcttgaagttggggtcacttcgtcttttgcggtcgaagtagatgca

SEQ ID NO: 218980 - DNA, 122 bp, Homo sapiens
agcaatgcaaagtcattttgcatatgatctattattcgctggaaggaacagttggctttgcgattcactgtttgttaaaacattagtttaatatagcatatttgactaatgagaatgtgtca

SEQ ID NO: 218981 - DNA, 122 bp, Homo sapiens
tcaccgcactgtcctccgccggggaaggcaccgtgtcacagctcccgcacagccggtccccgcactgtcctccaccggggaaggcaccgtgtcacagctcccgcacagccggtcaccgcact

SEQ ID NO: 218982 - DNA, 122 bp, Homo sapiens
ccgccgccctggaggacccgtccccagcatctgactgtccactcccgcccgctgtccagacgcccctcctggatggagagcgcaaggggccaagcctgagttcagggaaaggctgagccagg

SEQ ID NO: 218983 - DNA, 122 bp, Homo sapiens
acagcatcaattagagacatgtgtgtcttccacgtgttgggcactgtgctgggtgccctgcggttgactctgttaatatttcaagtagaatgaaataatttgcgtcctttgctttttgggcc

SEQ ID NO: 218984 - DNA, 122 bp, Homo sapiens
caggctgcctctctcacacagcaagaagacactgactccctgctgaggtcagagcactggcgtacccacacctgtgtcatcaaatgagggaagctattactagacctttcctccctatacaa

SEQ ID NO: 218985 - DNA, 122 bp, Homo sapiens
gcagcagggcgcctgccactctcacccagggtcacgagaaagcgctcggaaggagccctgcgacctaatgggagcacagcctggaacctgttgccctcatgccccatccccaatccgccacg

SEQ ID NO: 218986 - DNA, 122 bp, Homo sapiens
gcctttgcttcagatctcactattcacagacacatgaaccccgggcaggcgagtgggaggcggacaggggagcggttcttccggcccccacccgtggcgatcccagcctccaggttcccggc

SEQ ID NO: 218987 - DNA, 122 bp, Homo sapiens
cccacatgccggggacgtcgacttactccctcccgctggtcacgctgctccttggacgaacgagcatagcgccccttaggggctgggcacggcatgtccaattcttaagtggttgcattcaa

SEQ ID NO: 218988 - DNA, 122 bp, Homo sapiens
ccgaggcctggccatagtgggtgctgacaaaccgcttactgcctgcagggaccgagctcccggccgagggaggagggccgagcagggattcagattcttccgggccgatccctttctcagct

SEQ ID NO: 218989 - DNA, 122 bp, Homo sapiens
ttggacaaggatctccccggatggtaagagtacagggagaaacttctctagtttccctcccggccatctgtggggaggttgctctttagtgatcttccccatttgacctgttttctgggaga

SEQ ID NO: 218990 - DNA, 122 bp, Homo sapiens
cgaacgaacacctggcggttgggcgtgcctcagtttcccggaggcggggcattcctccgtcgccgccccccacctcccctttttcctcttcctcttggggcatctgctgccgcgcctgtagc

SEQ ID NO: 218991 - DNA, 122 bp, Homo sapiens
ccacacggaccacagctccaggaagccgagcaagaaacgaatcgccggaataccaggccgcggccaagcaataaccttaagtctcaggcgactgccgcgagagctgcgatccggaaggcgcg

SEQ ID NO: 218992 - DNA, 122 bp, Homo sapiens
ctctggaggagtagtgtcagctatgttttgtgggagacagaatcctggctgctctctggccggttcaaagggtgtttgtctgcatgttcttcatttctatactctgctaacacagagggctc

SEQ ID NO: 218993 - DNA, 122 bp, Homo sapiens
ataaaggaagaccagtgagaaatgagtggagcaaagacattttgtttagcaggacttcaacggcaagagcgccagccaccaggacttgcgtgtggcagagacccacaggctggcagaggagc

SEQ ID NO: 218994 - DNA, 122 bp, Homo sapiens
tgcctactctgcaggactgaggagtttgctctgtggtgtgaaaacctaaggaatggggggcgggtgtcttgccacttgtgtgacaggcttaacctttttgtatgaagttcgtttgccttatc

SEQ ID NO: 218995 - DNA, 122 bp, Homo sapiens
ggcaatccgctcgtcttggcctcccaaagtgatgggattacaggtgtgagccacggcgcccggccagctgctggatattttgaccacctcaagtacgctgagcacgaaatcagtgcatctgg

SEQ ID NO: 218996 - DNA, 122 bp, Homo sapiens
gtgcccccgaagttgaagctcaggctgcggtgtcgggtgccctttttgtatccttggctacgtgaaaatgataaatcacagcagctacgtggaaatgggacatcagcttctgcttctgtctg

SEQ ID NO: 218997 - DNA, 122 bp, Homo sapiens
ctcatccacacccgcagcgctgccagaaggcgctgctctgcctgtggtcagccctcgacccgtgtgcttggtgggagctgcatccccgcacaggcagccccactgctccccaatctcgcgtc

SEQ ID NO: 218998 - DNA, 122 bp, Homo sapiens
caacacaaggagaccttgtctctatattgcctaggctggtcttgaactcttggccttaaacgatccttttgtttaaaaaataagaacattagctgggcattgtggtgtgtgcttatagtcct

SEQ ID NO: 218999 - DNA, 122 bp, Homo sapiens
aggttcaagtccctacttgtttagtgaatttgggataaattggtttctgcatttgcaaaacgagggtgctagactctgatttatgacttcataactgcaatgacatttattctcaactttcc

SEQ ID NO: 219000 - DNA, 122 bp, Homo sapiens
ctttccttgtttttcctgatcccgccctgggtctgcagtcacacatttctggaaacttctcgagggtccaagactaggaggttcctctaggacctcatggccctgccacctttctggcctct

SEQ ID NO: 219001 - DNA, 122 bp, Homo sapiens
tccgcgagtctggaggagttagctgtggggagcctggctttgcacaggtgtggggcagggcgtggggcgctgggctcccgcgtggctgggacaccatttgtgtgtcggcaagcagcagcagt

SEQ ID NO: 219002 - DNA, 122 bp, Homo sapiens
ttccatcaatttcttatgctttggcctcatgtaaatagtaaaccatgcttctggaatctccgctcctttgttaacaagtcttccaaataaatgggctgtgggagttcattattttaatgggc

SEQ ID NO: 219003 - DNA, 122 bp, Homo sapiens
tgagagggtggagccgggccggagcggcagtgggcgtggctaggtggggcgggacggagccgcggcggaggatggggcggggtttcatggggtaagcggggccgaaatagagcctgttattt

SEQ ID NO: 219004 - DNA, 122 bp, Homo sapiens
aaactcttgataagcaagtttctttccaggggggagggaagataatataattattattgccgtgatatcccaatgtttacatcaatgggctcaaactagccatgccaacccttctgggggct

SEQ ID NO: 219005 - DNA, 122 bp, Homo sapiens
tacacgcatcttggcatttcctttccgccagccttggcccttcccacccacccaaaggtgcgggccacagccaccctctgtggggtctgatgcagggtgaagggcgtcactgggtcctggct

SEQ ID NO: 219006 - DNA, 122 bp, Homo sapiens
tatcccccagatcaagctcagctctgcagataactccttctggtgaaccttaaccccaagcgcaactctgagatgtccctggggacactcacaatccccctattctccagactccacccttc

SEQ ID NO: 219007 - DNA, 122 bp, Homo sapiens
tcagctgcaacggtggtgctgaggtgctgtttgcctctcaccataagctgagtgtgtgtccgcttgccccctgctcactgggcccaaaggctgcccttgaatctcttgcccagatgcaccct

SEQ ID NO: 219008 - DNA, 122 bp, Homo sapiens
gaaccgcatccagggtgcgaccagggcgtgaccatcgtcattgctcctggagcagaggcgcgaggacgagcccaagtttccaggagcgttgacctcctcgcccagactccgccacgcggctg

SEQ ID NO: 219009 - DNA, 122 bp, Homo sapiens
ttgtcatcagtgtgtggctgtgtacactcctatgcatatttcaggaaaagagtgctcccacgccccactgggggactgtgggaatgggacctccctaggtgaggccaccaggccagcggtcc

SEQ ID NO: 219010 - DNA, 122 bp, Homo sapiens
aggaacacgtctggtgggaggggccgagggcaggcccagttcggaaccccgtccccagcacgtcccaccccttgcctgcttgacggtctccaatacgaccgcgggtgaagacacggaaaacg

SEQ ID NO: 219011 - DNA, 122 bp, Homo sapiens
cagctatctccatcagaggaggtgcaaatgagggcccacaccttactccattttggcagccgccctaggaagctctgcctttatttcttcatcttcaagcttatcacaatttgaagtttatc

SEQ ID NO: 219012 - DNA, 122 bp, Homo sapiens
ctccactctccagatcagcctggaaaccagagcttccctcgtcttagacaaacagatggccgtgggcgatgcagagccctgaactgctgagggtgctccttccattctcgcccttccccaaa

SEQ ID NO: 219013 - DNA, 122 bp, Homo sapiens
aaatggagcctgtcccgtgcactttcgggcatttcgagcatcttgtgggctctcccaagtcgcggcccctcctctgagagccacagtcaggtctgtcctcaggggtcgaggcggctgcgctg

SEQ ID NO: 219014 - DNA, 122 bp, Homo sapiens
ctgagatggggaaactgaggcccggagaggggagggtcatcatcactgccccgtgtgacgcgctgacgatctgtccccaccgccacagctcaacgggtcggccaccatcaacgccaacgtgc

SEQ ID NO: 219015 - DNA, 122 bp, Homo sapiens
gggaggagtgaagttgccggagcacagcccagcgctccgcacacccctcccgcagggcggcgggttcaggtcgctgccggggccgacccaagcaacttggattccctctcatgtgttgcatc

SEQ ID NO: 219016 - DNA, 122 bp, Homo sapiens
gccaataagacccgacaactgccaggcccggagaggagaagccaatccccaagctgggggcgggcctacctcgctgtcagagctgtttgaaacttgaggacattccagggaatcttggagcg

SEQ ID NO: 219017 - DNA, 122 bp, Homo sapiens
agtcctcacccaactatgccggtttaggggaatggtcatctccatggcagtgacgttccacggtgcgaatgggcagagagagccagtggcttccggccttacataaccttctcacctggtag

SEQ ID NO: 219018 - DNA, 122 bp, Homo sapiens
cggagtccccgggttaggaaaggccgcgcatccggaggccacgcagagcctcggggcttgcgcagaggggctgcggtgagtcctgaccctgagtgggggtcacggggctcgttgctcgctga

SEQ ID NO: 219019 - DNA, 122 bp, Homo sapiens
ccccactcagcggctgctgggctgttcggaagggcagagtcgccggctcagcgggacacacgctctgaagcacaggcctctggggggaccggccctgcctggcgctcgccaaggctctggag

SEQ ID NO: 219020 - DNA, 122 bp, Homo sapiens
atagtcctgcccctgcggggtctgtacgacgcagtcctgtggggtgcagggtgaggactccggtgagcgcagggagctcgcaccggctccaagacccaccctccacctcgcgggctacgggc

SEQ ID NO: 219021 - DNA, 122 bp, Homo sapiens
gcgcgggatgctcgggcggggccccgcgcgggggtgcgcacattcccgccagccccgccccgcgcccggacgccccgcccccagacctcagccggttccgcccccacccgcaactcccgtgg

SEQ ID NO: 219022 - DNA, 122 bp, Homo sapiens
cttggcaggatggggcctgagccctggtggtacttgggatggacaacagagcgagtggtccggcggagctgctctccctgaagaagcagcaggtggtcatcccctactcgagcccacagtgg

SEQ ID NO: 219023 - DNA, 122 bp, Homo sapiens
tgtcggaagcgacggggatatggtctggaaacatctggttttgaacatctggtattgaagcgctgggaggcaaaacgtctgccccgcgcgcccatgcggcgagtgtcggtccgtgcccctgc

SEQ ID NO: 219024 - DNA, 122 bp, Homo sapiens
gccactctgggctgtctgttgacctgtcccacttccatcaggaaatgtgaaggcagccagcggttcccaaaaaaaatccagcttcagtcaagcagtcaaccgactcctaggcaattaatctc

SEQ ID NO: 219025 - DNA, 122 bp, Homo sapiens
ggttggccccatgaagtgggtgccccactcacttctctgagatcgaacggactgtgaatccgctctttgtcggaagctgagcaagctgtggcttttttccaactccgtgtgacgtttctgag

SEQ ID NO: 219026 - DNA, 122 bp, Homo sapiens
gggccgcagggcctggcaggcctggttcctggctttctctccgcgtttcctgagcaggaccggccgggggatgggacccagcgcaaacctcctaccccgggagcgcagccaggaaatcgcgt

SEQ ID NO: 219027 - DNA, 122 bp, Homo sapiens
aagcagtcagtccagtctttccgattccagaacctgggctgttgacactgcctgccagctcggcatcagcctccagttgcttcactattattttttaaaatcctatgtgtctaaatctggcc

SEQ ID NO: 219028 - DNA, 122 bp, Homo sapiens
gtcccaacacccccggcatcttgcaaagcgcctgatgtggtccttggaggagcccacccccgtccacagggacccttcctgctcaagaccacagcccaggccagctcacagggaacgtccgc

SEQ ID NO: 219029 - DNA, 122 bp, Homo sapiens
tttgggaactcttcctctgcaggctgggggcgggatggccacagggagatgcaccatacgcggaaacactacgtgcagccgacctggcctttggggaggcgggcaggcgcagagggacagag

SEQ ID NO: 219030 - DNA, 122 bp, Homo sapiens
tggagcgaaagtgatgtgggcggggcaaaggcggcgggaagaggagagcactgaagctggcgcgggaacttggtttcctggtggcctcccatccaatccccacgaaccagctttcctcttaa

SEQ ID NO: 219031 - DNA, 122 bp, Homo sapiens
tattcttagatctggagataggcggctttcatttttcctgctcccagttcccagaccttccgtggggccgcaggatccccggctggcgggtcgcggagggtggccggccgggctgcgcactg

SEQ ID NO: 219032 - DNA, 122 bp, Homo sapiens
ttgggttgccacccgccgctcgaagctggaggggccgccggagcctgcgattggctgcttcgggcacatcgtcccgccccgacctgtagctcctcccaggtttccgttgtcaaggacgcgcc

SEQ ID NO: 219033 - DNA, 122 bp, Homo sapiens
aaatcatcagtgaggattatacatgggcaatgtccagaaatcacattattgctcatagaccgtgtagtcttgatctaacggataactgtacattgtcttcactaagaagctagggtggttgt

SEQ ID NO: 219034 - DNA, 122 bp, Homo sapiens
ttttgaagcaaactaatacttgaaaaaaagcagctttaattagacaatgatacaaaagtacgtattctttttgggactagttctgaatgagacttttggggtcttcaagggtttcacaggct

SEQ ID NO: 219035 - DNA, 122 bp, Homo sapiens
accggaattcaagatgacctggagtttgttgggctgctgcgctttctggtggtgttgtgacgggcagttcttggagcctgaagaagggctggggcgttcgtggaggcatggggtcctgcagt

SEQ ID NO: 219036 - DNA, 122 bp, Homo sapiens
aggacagggaggatctgtaggtagagaaggagtggaagagagttacagcctctgccagtccgggcatgggtccagcagcttctgagccctggaagaacagatctcagcttgcttgctcagtg

SEQ ID NO: 219037 - DNA, 122 bp, Homo sapiens
ccactcaactccgcttacggaggcattgggactaagggttacggtcctacagcggggtgtcggcccagcgagaggaagagggccgaacggacccctcgggctcccgtccctagggaaatgtg

SEQ ID NO: 219038 - DNA, 122 bp, Homo sapiens
tcctcctgccccccagttttaaccgccttgccccctttgaagtcttatatcttgcctgggcgctccaaaacattacataaaaacggtgagagcaggggcattcgcatccagctcgactttca

SEQ ID NO: 219039 - DNA, 122 bp, Homo sapiens
cattttgccctccttggctcctcagtgagccacccccagctgtgtccccgtgagctcctccgggcaaggtcacctgaagtcagtggcctgcatgcaagtccatctgccaggcagcgcctggc

SEQ ID NO: 219040 - DNA, 122 bp, Homo sapiens
aatgactaaactggccaaaaataaaagcccccataaatctcctattttcctataagctgtcgggtacacagagtgtgctgggattattgatagaaaactttatggatgggctgcatcttaaa

SEQ ID NO: 219041 - DNA, 122 bp, Homo sapiens
gcccgggagttggcaagtgctgagcactgtgtccccttgcacggccactcggggcctccacgcacctaaaggacagctcctgaagcatcctggccctgcactcacggtggcacgcgggcgcc

SEQ ID NO: 219042 - DNA, 122 bp, Homo sapiens
acaccaccaggacggctccccaaccctgacaggcacccattaatagcaaagcgacgcgtgcgacaggcaggaactgagcgtgacacatgcgggaagctcaaagtgccccagaggctgcttct

SEQ ID NO: 219043 - DNA, 122 bp, Homo sapiens
tagccctttgcctttggcaaggctgaggggaagagtgtgttgagtagtctgagttgaatccgggcaccaggccctggctcatgtcccaaccagccattgactgttaccttgataggtcctca

SEQ ID NO: 219044 - DNA, 122 bp, Homo sapiens
gagcagggccaagaagagtggtgtgtcaagaaggtagacagcttcctggccccggagtcacgcagtttgagatgcctggattctgccgcctccctatacatctcttcccttgtctgagcctt

SEQ ID NO: 219045 - DNA, 122 bp, Homo sapiens
ccaggtacccgggagggaggcttgggggaccggggctcggagcgagtgggactgcgcccccggtctggggcggcgccgcggtcaccaggtcaacggccgcccccggccacagcccccaggtc

SEQ ID NO: 219046 - DNA, 122 bp, Homo sapiens
ccccatcaccccgcctctgccccacaagcctcccaaccacagccgccgcctcttcctcttcgcagggccacctcagcctttggactggcacctccttgggaacttttggccaagatatgggc

SEQ ID NO: 219047 - DNA, 122 bp, Homo sapiens
ccgccgccatgatgtgcgaggtgatgcccaccatcagcgaggatggccggcggggctcggcgctgggcccggacgaggcgggcggggagctggagcgcctcatggtcacgatgctcacggag

SEQ ID NO: 219048 - DNA, 122 bp, Homo sapiens
aagctgtaacactcatcgtgaaggtctgcagcttcactcctgagccatcgagaccacagacgcagtgggaagaatgaataactccagacgcgaaaccttaagagctgttaagactcaccacg

SEQ ID NO: 219049 - DNA, 122 bp, Homo sapiens
ttctataatgtattgcatgccgaagaaaaatgaaaggacaaaaacaaaacaaacaaaaaacggtggacctaaaattatatttccagctctaatatcagtagggtatgacctaaatcatgcta

SEQ ID NO: 219050 - DNA, 122 bp, Homo sapiens
gcgagcgtcccctcctctccttccctctgattagctgagctgcatcgatcaaggaccatccggcccgggcggcgggatagggagggcctgggcgagtccctcccggagccttggagtccgca

SEQ ID NO: 219051 - DNA, 122 bp, Homo sapiens
cccggccgctctcaatcgatcgcagctcccttcgctcccaagcttcgctttcgctgggtccgggatccaaatcccaacccaagagccaaaggccagaaaaggccctggcgttgccagctgct

SEQ ID NO: 219052 - DNA, 122 bp, Homo sapiens
acgagccccgtgacacccagccgggagcccgaggggtccagaggctcggacccgggcgtccggaatttctgcaccgcatcctgagagaccccgaggtccagaccccggcgcccaggctggag

SEQ ID NO: 219053 - DNA, 122 bp, Homo sapiens
gggtgggcgcgggttccgggtgggcgtgggttccgggtgggcgcgggctccaggtgggcgcgggcccggcaggcccgtactccgcggggacggccagcgcctgctgggcttgatcgggggac

SEQ ID NO: 219054 - DNA, 122 bp, Homo sapiens
ctgcttcccggccagtgtcagtggccctctctctctctgctatgggcatgactttctcttcgctggcttaacttttccactgggtggttcactttgcctcctgctgcttctgtgccctgtta

SEQ ID NO: 219055 - DNA, 122 bp, Homo sapiens
cagcagctgcgtggccagggtcgagcaggtcctcagtgggtgcagactctcctgggatcacggggccgtctgccaagcatccccagtgggcgccgcctctccggaggtcgcggggccgtctg

SEQ ID NO: 219056 - DNA, 122 bp, Homo sapiens
atgggtggtctgcttagaactatcttttccacctcatgagtatagaaatatttttttccacgttgactagaacttggatttatgtcgaacttatattttcttcatgttgaactgaaaagtgc

SEQ ID NO: 219057 - DNA, 122 bp, Homo sapiens
actcgggaagcgcagggggtcagggagttccctttcctagtcaaagaaaggggtgacagacggcacctggaagatagggtcgctcctacctgactactgcacttttccgacgggcttaaaaa

SEQ ID NO: 219058 - DNA, 122 bp, Homo sapiens
cgcaacctgactgatcagattcctcccttgggcaagaggaccccacagaacccttaaaaacggggtacctcaccatgatgggatggtagcgtcacatgcctcattacagcccctcccttttg

SEQ ID NO: 219059 - DNA, 122 bp, Homo sapiens
ctaatatctatgtcaggtctataattctatgtttatgacatacctgaggagaagatacagcgtctctactagaacatacaggagattctgaacggctggtgcctgcagcattctgagacgga

SEQ ID NO: 219060 - DNA, 122 bp, Homo sapiens
ctctctgctgtggggatttcatttgaactgctatcgaagaatattccaagaacctctctccgcacccttctccccctctctcccccagcctcagactttctcctagagttgatcttaccgga

SEQ ID NO: 219061 - DNA, 122 bp, Homo sapiens
ccttcgtgtgtacgtgcgcgcgcggcgcgatgacgttcctctgtgatcatgggcgaggggcgggccctgaacgtctccatggtaacctggggacacgactcgacatcgcctgggtaacccgg

SEQ ID NO: 219062 - DNA, 122 bp, Homo sapiens
aggctgtagtttcctagtgctgactctgggcgccgctgttggccaaagtgcagagcttggcgctccagatctcctcgcgcagccgcagcgcgctttccagggcagccccagctcagactccc

SEQ ID NO: 219063 - DNA, 122 bp, Homo sapiens
ctggcctccgcctcctggaagctagttaatatcgctgcagagccagtagctcttcctttccgagggcgcccttctgcgggtctgtggggaaacaccgccctctggtggccagatgatgaagt

SEQ ID NO: 219064 - DNA, 122 bp, Homo sapiens
ccccgcccggcacacgtactgctgtagagggtgtcgatccaggacaggcgcggcaggccccggtggctgagcggctccatcccgcggcggcggctcggtcagatccgaaacccgaccctcat

SEQ ID NO: 219065 - DNA, 122 bp, Homo sapiens
gcgccatcagtctgcgctccaataaactcctggatgtgtcgtatatttaatatcccagtccggataagaaagtgatctaggctgaagattccttttttttttttccaaaccaaagagacttc

SEQ ID NO: 219066 - DNA, 122 bp, Homo sapiens
actcggccgccaccttccttacacggcttctcaggaaagcagcaggcagctgtggcccagcgtgagccggcaaagcacttccctcccagagccccgtttcctcatcagcaacaaacacaaca

SEQ ID NO: 219067 - DNA, 122 bp, Homo sapiens
catgcgtgggtgggcagaggtgaccgggcatgcgtgcgtgggcgggcagaggtgaccgggcgtgcgtgggtggacagaggtgactaggcattgcttgcgtgggtgggcagaggtgaccgggc

SEQ ID NO: 219068 - DNA, 122 bp, Homo sapiens
cagcacgctctcgtctgcctccggtgacaggttgtacacgaagatgcaccagccggcgcccgccgcgccccccgacaggcccacgcccgccaggccgctcataccatcgatggcgatcggcg

SEQ ID NO: 219069 - DNA, 122 bp, Homo sapiens
gcgccgccacgccaacttccacccgggaatgctgcagcggcgcggcgggggctcgcggaccggctccctcagcgactacagccgctccgacgccagcagccccaccatcagcccggccagct

SEQ ID NO: 219070 - DNA, 122 bp, Homo sapiens
tatacgccgtacgctccagggtagtcaggaatgtcgcggggctccccagtgaggcgggagcgaaaagagtgcaggcccactcttctggatcctcttggccctgttgacaccaaagccatctt

SEQ ID NO: 219071 - DNA, 122 bp, Homo sapiens
gtgcggagcgttttgggggtgtaggtggccggtggcgcccacgggccctcttgagtaaggcggctccgcccaggccgtcccggggcctcggctcggctcggctcgggaagccgcagagcctg

SEQ ID NO: 219072 - DNA, 122 bp, Homo sapiens
gtctcactcccagacccgacccctctgagctgcccctctccgaggccccgcgaccgcatgcgtgtgtgctcccactgccccagcctgagtcccggatactggtgcccctgtctcgggtcgct

SEQ ID NO: 219073 - DNA, 122 bp, Homo sapiens
ccgcagcccgggccccgcccccgcccccgccgtgccccgcccccacttcctcccgcccctcgctgggcggctattaaaagctgctgacgtcaaaacggacggccatctttgatgagggcaga

SEQ ID NO: 219074 - DNA, 122 bp, Homo sapiens
ttcaatgctgagcatctccgcacgtgcttctccgtcacccgcgtgtctgctttggtgaggcgcctgttcagagctcacccattttttaattgggtggtctgtttccttaccactgagtttga

SEQ ID NO: 219075 - DNA, 122 bp, Homo sapiens
cgtggcgaggcggagaaaacgccgctctcgtgccctcggcgcccagtcggtggagaggagcgctaggttccacagcggggcgccaggtttatcaagtatgcaagacgtctacttaatttgaa

SEQ ID NO: 219076 - DNA, 122 bp, Homo sapiens
gggatggagggagaggggtggtcagatctctgagcaggtgaaaggacgctgcggtcttctcgaagccatttgacagatatccaggggatgccttgaacttgcagggtatatggcctgactgt

SEQ ID NO: 219077 - DNA, 122 bp, Homo sapiens
gtcaaagtctctactttccaggatgctgaacttcaccaaacggaagcttactctcttccacgtttgggcttttctctatttatccctgtcccctcaattttcgagtttcctcaccccacttc

SEQ ID NO: 219078 - DNA, 122 bp, Homo sapiens
ggtggcacagacctgtagtccaagctccccgggtgctgaggcgagaggattgcttgagcccgggaaatcaaggctacggcgaactatgaatgagccactggactccagcctgggtgacagag

SEQ ID NO: 219079 - DNA, 122 bp, Homo sapiens
gagcagaggttctgaccgagaggctgagccaggccggggtctgggcccttcagggagccgcggatttttatgttcagaaagtgatcctggtttctaggtctttgctctgcaggatcgggatc

SEQ ID NO: 219080 - DNA, 122 bp, Homo sapiens
gccgcgcctgctgaatgtcctgcagaggcaggaactgggcgacggcctggatgatgagatcgccgtgtaggtgccgagggcgaggagatggaggcggcggcgtggctggaggggccgtgtct

SEQ ID NO: 219081 - DNA, 122 bp, Homo sapiens
cccagttacccctttggcctatcccggaacctctcaaccgcaaggctcctatgcttactgcggtccagaatccagctctgcctagcagaacttctgcagtgattgaaatgttctatatctac

SEQ ID NO: 219082 - DNA, 122 bp, Homo sapiens
accccaagtgagatcttccaaccacaaagcacctgctcccaaccacacctgccgggggcacgctttcgaagaggaatgagactgagacctgtgctcagacgccatcccaaggagcctctgca

SEQ ID NO: 219083 - DNA, 122 bp, Homo sapiens
acgtcagaggagtccagacctattcacaattcaaagccctaaaaacactgaggggttggccgttggtttccagttgtccaagcctgtgagtggctatgcgtcctggttgggtgctcaaagca

SEQ ID NO: 219084 - DNA, 122 bp, Homo sapiens
ggtgaccgagctgctgggaggagacatggtgaaccagagtttcatctgcgacccggacgacgagaccttcatcaaaaacatcatcatccaggactgtatgtggagcggcttctcggccgccg

SEQ ID NO: 219085 - DNA, 122 bp, Homo sapiens
ataaacatatatgtatatgaatgaatcaccttgtgagggaggtattatcactttttttttcggagaagaggtagccaaggctctgagaggtcacgacacatgcatgagatcacacagcgcgt

SEQ ID NO: 219086 - DNA, 122 bp, Homo sapiens
tttcttttccatcactccctcccccacagaaatcctacatagcaggacatgaaaagtcaacgcctgccacccctgggtcgtgctgtcatttcaatcacagtacctgagatgcataggtgcac

SEQ ID NO: 219087 - DNA, 122 bp, Homo sapiens
agggcaaaagagtaaaagctaagagaaaaaactaaagccagtggactgactgagccaggacggttgagagctggttgctgataagagccttcacattctactgggctattactatgtaaagt

SEQ ID NO: 219088 - DNA, 122 bp, Homo sapiens
acacacacacacacctcacagggcagatgcgtgctgcaatgcacacaacaggcacataggcggaaagccatgtgaatttgtggctcaggagcagaggcaaattctgtgcacataggtgccac

SEQ ID NO: 219089 - DNA, 122 bp, Homo sapiens
gacagctttctgtaatatcacttgacccacagaaagcgcatgcatcctcgccgtgccaaacggtgagaaataggccgcctccgatacttctgtttccgtctgccatctgtctccttctcaga

SEQ ID NO: 219090 - DNA, 122 bp, Homo sapiens
acggcatagccaggctccagcacgagatacacattgcatgggtgcagagtgaaacacaaacgcaatgacgaggggggctgcagctgcagcctggcagggctctgggtctcgaagcgcagtag

SEQ ID NO: 219091 - DNA, 122 bp, Homo sapiens
aggggaggaaacgggactaggaagctttcctgtttctagagcacggcttggtggggtgggcggctcctaacccggggtccagcccctcctcccccaccccggcgcgcggtccaggtatgtgc

SEQ ID NO: 219092 - DNA, 122 bp, Homo sapiens
actgtctgaaaatgctcacaccccacaggcaggtgggaggggaggggttaacgagacaagcgcactttgtgtgtggctctcctggaatgtattggaaaaggtacatggagcctactgaaagc

SEQ ID NO: 219093 - DNA, 122 bp, Homo sapiens
ggcccgccctcttcccgccccttccgcccggcgcaccccccgtggccccgcccctccccgcggcctgtcctcgtcgctccgctgctcccggcgcgtcctcttagccccgcccccccgcgggc

SEQ ID NO: 219094 - DNA, 122 bp, Homo sapiens
gaagtcggatggggctaaacgtggagagcaacaagcagggagacgcgacgaataccaggccgagggatctccaaacgcagccaactcctcccggggacacagaccccgcgggggcacggtct

SEQ ID NO: 219095 - DNA, 122 bp, Homo sapiens
agagtccctatccccttcagctatggctaagaagtggacaaacctctgcatctgttaggacggaggaggggcagttacccagtagaaaggagtagagagcatgcatataagaagtactacta

SEQ ID NO: 219096 - DNA, 122 bp, Homo sapiens
gcccaggcatcgcgggagcgcgggttagaggctgcctgttgggggctgcgagcccgagcgcgggctttacagggacctctgccaccttgttgaggcgctgctgcctcgggggtccgctatct

SEQ ID NO: 219097 - DNA, 122 bp, Homo sapiens
atgggaacgtggggtaccggcgagacggaaggcggcagagagatgtcggtgtgtcacacacgcacacacacgcccgggctggggacggcgaatggctccaagtgtgagcgggcgtgcgcggc

SEQ ID NO: 219098 - DNA, 122 bp, Homo sapiens
gcattctacccggtccacgcaaggcctccagttcttttaaaacctcgcgccccctccccacggccccccgggatagaatgggcaacctgattggaggggcttgaggaaaaggaaaaatggtc

SEQ ID NO: 219099 - DNA, 122 bp, Homo sapiens
gcccgccgccgccgccgcctgcgcgcccgcccgcctttcgcggccgctctcccccctccccgacacacactcacaggccgggcattgatggtaatgtatgcgaggaaacagcagagactcag

SEQ ID NO: 219100 - DNA, 122 bp, Homo sapiens
gcccacagctcgaggacgtgagacctcactgtcttttctagcttagaaaacagctcctgccgaaaatcgcagaaaaccctcctttctgaggttccaatgtgttttctgaggagtgtgtttat

SEQ ID NO: 219101 - DNA, 122 bp, Homo sapiens
tcttcctcactccctcaattagtggtaccctgggcttctctcaacatcagcaccactgctcgctcttgccatgacatcacctccaagctctgtgattggccagcagtgggttgcttggcaat

SEQ ID NO: 219102 - DNA, 122 bp, Homo sapiens
ggccatgtcaaaagtagcccagagatgtgtaaggtgaagaaagtgtatgtttggatttagcgacatgttaatgatggtcacctggacaaacagttaccagtgaagtggtgaagaggaaagcc

SEQ ID NO: 219103 - DNA, 122 bp, Homo sapiens
gtgctatatgttccgcatggatgactttgatgtagtggacgccacgatgcatggcaatgccgcccgcttcatcaaccactcctgtgagcccaactgcttctctcgggtcatccacgtggagg

SEQ ID NO: 219104 - DNA, 122 bp, Homo sapiens
gccccgcggcccccgggctattttcagccacgccgagccctgttttaggagcttgcacagcggctccgcggagaccgggactgcgtgggggaggatcgcggcgggggccgtcgccgagcaag

SEQ ID NO: 219105 - DNA, 122 bp, Homo sapiens
tgtcggtctgcgcgccgcctcgctcctcgctcctcgctctccccctctttctccccctctcgcctctccgtgtctctggctctctgcctggctcccttgggtctgtttctctctcctgccgc

SEQ ID NO: 219106 - DNA, 122 bp, Homo sapiens
gcgcccggctgaacccagctaaacagttttgctgctgacagaggtatccatgctcagcaccgttgatggaaatttttggagaaaagctttgagaagcccatcctccagggctgctcacacag

SEQ ID NO: 219107 - DNA, 122 bp, Homo sapiens
aacatggtgaaaccgcgtcgctaccaaaaatataaaaaattagccgagtgtggttgtgcacgcccgtaatcccagctacttgggagactgaggcaggataatcgcttgaacccgagggggcg

SEQ ID NO: 219108 - DNA, 122 bp, Homo sapiens
acttgctctcgaagggccccgagtggccgtgctggtgcagcgccagcagcgtgtcgcgcacggtcttgggcctgttgacccagtcctgctctccagacccgcggctcttgcccgcaccttcc

SEQ ID NO: 219109 - DNA, 122 bp, Homo sapiens
tttccacgtattacttccattatcctactaatgttagaaacaggcaactaaccacatcctcgaccccaaccatatttcaggagaggctggctgaattttgcaatatgattccaaaagggagt

SEQ ID NO: 219110 - DNA, 122 bp, Homo sapiens
gtggtagttggaaacaaatcataatgtattatttaaatgtttaacatcattgcataacagcgtttattatacagtggcagatttctttagctgccacagtaatactcattccttgtgtgtgt

SEQ ID NO: 219111 - DNA, 122 bp, Homo sapiens
ctatcccagctgtccaccacagccaggaggccaggcagccatgggtaatctcgccctgcccggtgcactggccatacggggtaagaggcctggcctcaggtcccctgcagccagcttgacag

SEQ ID NO: 219112 - DNA, 122 bp, Homo sapiens
caaaaatatctatgttaacacagtgtatgtaatcccagtgctttgggaggctgaagtgggcgaatgacttgagctcaggaggtcaagaccagcctggacaatgtggcaaaaaaaaccccatc

SEQ ID NO: 219113 - DNA, 122 bp, Homo sapiens
aggagggagggagggagggagggagggatcagaaatcatagccagtgaaacccagaaaaccgttaggcaggaattaggacaataccttactcaggtttgcattcccagcatttagcaccata

SEQ ID NO: 219114 - DNA, 122 bp, Homo sapiens
ccgggtcccctgcgttgaccaaagaaggagcgggttggcccggtcccaggtaacgcgggccgggccgtatatggagtgtctccctagcgggtttgcccctcctgacccgacccagttgcccg

SEQ ID NO: 219115 - DNA, 122 bp, Homo sapiens
tactgaattctttttcttccaatctggtttgtaaggccacatcagctttctcccttcctgcgtctttcctaactctgaaacttctagaaggaagctctcttccttttcctttgctcacctct

SEQ ID NO: 219116 - DNA, 122 bp, Homo sapiens
accaatgaggccaactaaccaggaaccgaggtagagaggccgcacagctgagtctcaggccggtgccatcttaagtgtgggcgccgcgacgataccgagtttcactcactgccccagtggtc

SEQ ID NO: 219117 - DNA, 122 bp, Homo sapiens
tgggagaggggcttggaggggcctcagcctcgactgggaaacaaagcagctggggcgactcggcggccctcctcagccatgtggggaagcgacaggccgtgctccaggctctgagaggaatg

SEQ ID NO: 219118 - DNA, 122 bp, Homo sapiens
accccgcgaccgccgccccatagcccacgcggccgcgcacgcagcacgcagaaaccggcccgccacggccagaactctagccctacacctcccgggacttccggccggaaaccaaggcccca

SEQ ID NO: 219119 - DNA, 122 bp, Homo sapiens
gcgtcgcttcgagtaaagcccctgagcctggattgccaaagagcagccccaggaagaggccgggggtccgcttgcgattccccagccaggatgcccccaggagccttgccgtttggtgtgag

SEQ ID NO: 219120 - DNA, 122 bp, Homo sapiens
gtcaattgggccgaaactgcaaatgagagagttgttatcagcggtggagtctttcgaaagcgctggtttccgttaagctcttagccaagaaaacctaatggtagttagccaagggttggcct

SEQ ID NO: 219121 - DNA, 122 bp, Homo sapiens
atccacaagagactctttcactctggctgatgaattccacaccaaaaacagggtgagggccgttcagcaacttttcagttctgttgttctctgaggacatctgtggatgttttcagtggaag

SEQ ID NO: 219122 - DNA, 122 bp, Homo sapiens
agatgaagcgcagctgtataaagaagagcacctgaggaatcggcagcaccctcactgctacgttcagtacatgatcgccatcatcaacaactgccagaccttcaagtgagtgtggccgggcg

SEQ ID NO: 219123 - DNA, 122 bp, Homo sapiens
cttctgttcataccatgacttaaataatgcttactcaggcacagtactatcagctgacaacgtacagaaggctccagaaatgtcactcccatcccttaaaggttggtatatggtcctggtac

SEQ ID NO: 219124 - DNA, 122 bp, Homo sapiens
gaatatagggagaggagagaagagtggtacggaaaagaaggcttgcctatccactaaaaacgggtaaactctgttagctaggaagccaaggagaaaaaaatacaaaactaggagtcagaaaa

SEQ ID NO: 219125 - DNA, 122 bp, Homo sapiens
tgtaaattttcgtgagctcaggctgctttgccagaagtctgcaatgtgtctggacatgaacggttgttcccttttgtgaggccaggcctgagcaccaggaagttctagaagcagcacatgga

SEQ ID NO: 219126 - DNA, 122 bp, Homo sapiens
atccctcttcccagtgaaatccggcctggccctcacccggcagctgcgaaccaccctgggcgagtcaagactctgtgtcatctgcctgcccccgaggctcggccaagacaggaaggaaccag

SEQ ID NO: 219127 - DNA, 122 bp, Homo sapiens
accgagttgatacggatagtccccgttcccctgagggccgaccccgtgactcccgatgagcgtccagttgcgccgggcatcctggcctcccagcgtctttcccggaggttcatcgccgcacg

SEQ ID NO: 219128 - DNA, 122 bp, Homo sapiens
tgatcccagcacagagcgcgacgggcatctgagagtgcaggaagaactaactcagggactcggccagagaaatgggccgaaattactgccagacacatccgaccttagtaaaggcccctcat

SEQ ID NO: 219129 - DNA, 122 bp, Homo sapiens
gtcactgctgacgggggcatctcaggtagcaaagtgctccctgcagtctggggatggaggcgaagattatgatgtcactggcagaggccatggggcagggggcctgcagtccagggagtgac

SEQ ID NO: 219130 - DNA, 122 bp, Homo sapiens
ttatttaggcctgccttgcctcagcgattaaaacgatgtcagccaggtcggctgctttgccgcagcgtccccttgcggccctatcaggaccggaaggaacacgcagaagccgcagaggctgt

SEQ ID NO: 219131 - DNA, 122 bp, Homo sapiens
gccgtcctcacccgcctgctgtctcggagctcccaactgagcaattccctggcaccgccacgagaaagtctttcataaaagttacaaattcaggaaccaggccattttctccctggatttca

SEQ ID NO: 219132 - DNA, 122 bp, Homo sapiens
tattaattattagaagtggctaaaatgtgttcctttaattactatttaaatattgtcaaacggaaagtgtcctcacagggttaacaaggatcatatgccaggttctgggcagaaatatagtt

SEQ ID NO: 219133 - DNA, 122 bp, Homo sapiens
gtacttaagctcccagggcgcgctttgcttggaaaggcacaggtaggaagcgcgggctgccgggtgcacgctcgccgccctgggaggagtctccctcccttggctctcctttctgggaactg

SEQ ID NO: 219134 - DNA, 122 bp, Homo sapiens
tggaaagaaaaagaggcacccccatcaaacaagctgggagctaagaagcccgctgggagacgacaagggcgagcttcttgcgaggtttctgaaatgacaagaccggaagaatggagttggat

SEQ ID NO: 219135 - DNA, 122 bp, Homo sapiens
gcggctctgacagacagaaagcaaacagctcagaggggtggcaggctgcattttattcatcgttaatttaaacacccttcaagtcctctcttggaatgctgctcagaaaaatagatgtattg

SEQ ID NO: 219136 - DNA, 122 bp, Homo sapiens
gctcagggcgcatgcgcaagatgggccccgcccccacccaccccttccggctccgcccgccgcgtcgccccaaagaagcacctgccagtctctttaaaaggtttattgatcatatacaaaat

SEQ ID NO: 219137 - DNA, 122 bp, Homo sapiens
gctctgaggccagcctcccactgtcagcctccacgcactcggcctcccgccgcagagtctcgatgtagccagcaaacaggggctccaggttactctggcagcactcgcggttttggtagaac

SEQ ID NO: 219138 - DNA, 122 bp, Homo sapiens
agaggccggcgggagccgggtctgctgcccggcgtgacccccaaactcccggccctcccccgaatcttgtcccacttcttaataggacctggggcccccagccgctcggctgatggaaccac

SEQ ID NO: 219139 - DNA, 122 bp, Homo sapiens
tactaacacatctgtgcattttgggttttatatcttgtgcacattaaattttaaacagggcgatcacagaaggtatatcagctattgccacagagtgctaagtaaaaacaacacagtaacat

SEQ ID NO: 219140 - DNA, 122 bp, Homo sapiens
aaaaggagcgggagagggataagaaaatgcctgtttctagaaaaccgcgagatgcttccacgtgcagcttgatgctgttacctgcagaacagacacgcttgaaaacgcgacgtagtgtccgt

SEQ ID NO: 219141 - DNA, 122 bp, Homo sapiens
atatttggaccaataatatattattagatgtataagacagatggagacagagaaaaagggcgatagcaagagagagcaatttgctattatattttactgaagaaggaattaagagaggaaag

SEQ ID NO: 219142 - DNA, 122 bp, Homo sapiens
tttatggtggtggctgagcataccaaatccagtggacggctgggcgtggtgggaggaggccgccgctgcggcagccacccggcggcgcgtggtgtcgggtctgaaaaccctacgcgactccg

SEQ ID NO: 219143 - DNA, 122 bp, Homo sapiens
tcccagtcccaggagcgaccaggaatacagttagccctcccttataggacagtggagagacggttcagaaggccacgggttgagggctgctacaaattcctatcgtcataataatgattcta

SEQ ID NO: 219144 - DNA, 122 bp, Homo sapiens
agcactttcagacccaaagtgaggtccactggtgtttttgcatgttatataatacttacacgcacatatatgtgtatgtatatgtgtatatatatatatctgtgtgtacatatatatatatg

SEQ ID NO: 219145 - DNA, 122 bp, Homo sapiens
aaggcagcctggagagtcggcacctggtttcctgggcagagcccactgggaggagagctacgggatgatgctcagtccagctcctcagggaccagttaaatcaagtgacaagcttgtctgtc

SEQ ID NO: 219146 - DNA, 122 bp, Homo sapiens
caccccttttagatttgtgaaactcaaggttttcacacatgatctcatttgatctccccccgccccaaattttgaggtgggtaggagaggcctcagaggattatttataggcagtagcccaa

SEQ ID NO: 219147 - DNA, 122 bp, Homo sapiens
cgtgccaaacagcagctggtggtgcttgctcaccttggacaccagcacctcggtctcctgcgggcagaagttgggcttcctcttcttggcccgggtagtgctgggccccgccatccggccat

SEQ ID NO: 219148 - DNA, 122 bp, Homo sapiens
cccacctcaccccctaaggccccagctctccctgaacttccctaagctgctacaaataatcgcgtggaagacggccaagaataaccagaaaataaacacagctcccccggccctctgaacgc

SEQ ID NO: 219149 - DNA, 122 bp, Homo sapiens
gttaccatggggaggggggcggctccctgtcagggcccagcccagggacctggggaacggcggctttgaatccccggccacgggcactagaaggtggagaaggagagcgggaagtccagttg

SEQ ID NO: 219150 - DNA, 122 bp, Homo sapiens
gggacagtccccgggactctccgccaggcgcccagaccggcaggtcccgcaggcggcgcgcggtgtgtttgcactttccaaagttcttgaaccatctcaagaactccttctgcatcttggcg

SEQ ID NO: 219151 - DNA, 122 bp, Homo sapiens
cggggcctcgcgcccacgtgactcccccggccctcggggaggcgtggcgcgcccacggcacgtgacccggcgccgcaggggtcccccagattcaattctagctctcgggctggtggggcggt

SEQ ID NO: 219152 - DNA, 122 bp, Homo sapiens
gactcctaaccagatctttctttcatgcgggatcattttctcaaactatttatttctgtgcggtggtggtgggaacattgacgacaaaatggcaccttcttactcaattttgctgctccctg

SEQ ID NO: 219153 - DNA, 122 bp, Homo sapiens
tgggaaaaagagggggagcagttatcccaggtctagcaagaatgtctcctctctcccaagcgtgcctggagagtgtccttccacccagagtaaactcttacaggaacttcctctctttgtca

SEQ ID NO: 219154 - DNA, 122 bp, Homo sapiens
ctgtaaagattaggcatctgtgatgcttttgcgctcacattggcggcccagatgagagggcgtggagaaccagatgggaaactttttgtcccgtgagaacaaagtacaagttatatcagagt

SEQ ID NO: 219155 - DNA, 122 bp, Homo sapiens
cagggctcgctaactcctcacggcctgggatttcaaggcgacgccaaccagctgtggccacggatacacagccacaggtatgagctgcgagcactcacgaaactctgcagggccgaaaagga

SEQ ID NO: 219156 - DNA, 122 bp, Homo sapiens
ctgcagcgccgcccggaggcgctctagctcctcgcagccgtcgctgctgccgcagttcgccggtagcacaaacagatccgcagctcctaaccccgcgctgttcagcagagctgctgtctgat

SEQ ID NO: 219157 - DNA, 122 bp, Homo sapiens
gtcccctgtacctttctcccccaacaggatcagacccagaggcagctggttggggtttgtcgagaagaaggattatccagatcagtcctttctaatctcagctcctgcctgtaccctcccat

SEQ ID NO: 219158 - DNA, 122 bp, Homo sapiens
gccaactcccacgccggactgcgtcacggacatccccacgccaactcccacgccggactgcgtcacggacatccccacgccaactcccacgccaggttcctgcaccccacacccggctcctc

SEQ ID NO: 219159 - DNA, 122 bp, Homo sapiens
gaagaaactaaactctaatttgaaatgttgtacagtacgtattgaatattaatgggagcacggcattgttcactgtgtgatcgtttacttttaaaatgatgtcacagccccctggtacacac

SEQ ID NO: 219160 - DNA, 122 bp, Homo sapiens
gtgggggagggcaggcaaggcgcggtggcgcacagcggagtcctcttcagctttatcacccgctggggtgtaggcttcttgtcggagagtagcaccttagctggaggtaagtgcgtgcctcc

SEQ ID NO: 219161 - DNA, 122 bp, Homo sapiens
gagaggcacatgttaaaacttcatgtagattctgatatttctgtgctaaaaaccagggatcgaacttctgcttccgggcaattggagtagacacatttttccctattcctcacacaaagcac

SEQ ID NO: 219162 - DNA, 122 bp, Homo sapiens
aacatccaatttggcttggcgtaataaaatcagccggagctcccttaaacggagccattccggtgaattaagttgtgaaatctaatctattatatccataaaggagaatgctttcattgtaa

SEQ ID NO: 219163 - DNA, 122 bp, Homo sapiens
gtgggtgtgggtggtagaggacaggcgagtcacctagctcctggataaactcagtgtgtgcgcagtggaaagcagtttgttgtgtttgcatatttgtgtcagagctttcatttaaagcaaca

SEQ ID NO: 219164 - DNA, 122 bp, Homo sapiens
ctttctgaggctggtgacctcattaactggccagggaatttgcaagaccaggaataatcacgtttcccagttcttctttcctacattgcttttctcctctgtcttcaacgttagggttttgt

SEQ ID NO: 219165 - DNA, 122 bp, Homo sapiens
aaggattcagaacttaacgagtttaaaacaacacatgagagacgctgaggcaggtgtgagcgaatgtttccaccggggcctgactttcaggccgcttctcctcggcagctgcctctgcccca

SEQ ID NO: 219166 - DNA, 122 bp, Homo sapiens
cgcagtagaatgacagaggcgccggtcacgtgatcggaggcacgtgactgctgcggaaggcggaagccgggagactccaaagcagcaagaggaggggcgggcgctgcggcggggcttgttcg

SEQ ID NO: 219167 - DNA, 122 bp, Homo sapiens
gggaagacagggaacttccttactctcggatcttcagttcccgcgccatctggcagagggcgcagggcagacaaaaggtgagggccgcccagtcgtgcccgacggagccctagagggtagga

SEQ ID NO: 219168 - DNA, 122 bp, Homo sapiens
atccagcccctttctgggccatgactatggtgttgactcaaccaaagcctcagttgagttcgtctgagctcaacagggttcacaaatgattggaatcattttctttagcataagtgggtagg

SEQ ID NO: 219169 - DNA, 122 bp, Homo sapiens
cccggcccctgaaggaaaatctaaaggaagaggaaggtgtgcaaatgtgtgcgccttaggcgtaatggatggtggtgcagcagtgggttaaagttaacacgagacagtgatgcaatcacaga

SEQ ID NO: 219170 - DNA, 122 bp, Homo sapiens
tcgggggcaggtgctgcaggcattcgtggaatgaacacacgatctcgagtgggcgagcggcgtgtgtggagaggaagatgaggaaggacgcgctgtctgcatccagcggcgggggaggccag

SEQ ID NO: 219171 - DNA, 122 bp, Homo sapiens
gtagacccgccaggctgctgtgggttcagccactgggggagacggatcggggcatagacccgccaggctgatgtgggttcagccactggaggagacggatccgggcatagacccgccaggct

SEQ ID NO: 219172 - DNA, 122 bp, Homo sapiens
aaaggcaaagccttatggaagcggtttgggaggctcagcaggtcgtccgagcctagcggacgccctgagccagctctctccgccgccgccgccgccgccgtgggccgggcccagctcttata

SEQ ID NO: 219173 - DNA, 122 bp, Homo sapiens
caatttacagctagagaattgtgacttcctttctctctccccccacaaaaaagcagaaagcgagtgggacatcaaaagcctctttaaaaccaacattttgatgacttaagagtaaatgaatg

SEQ ID NO: 219174 - DNA, 122 bp, Homo sapiens
cattctataggctctcatgagtctcttcccgtcttgattctctcgctcagcgttccaggtcgccatcttggaccatgagtcaagatggcgccccctggtcccaggggcacagcccaggcacg

SEQ ID NO: 219175 - DNA, 122 bp, Homo sapiens
cattttaccttcagggtgacattcagtgccaactgctcccttttgaccgtcaccaatccccgcctgggcaaaataaatttgaaaaacgtggggggaggggaaggaagagccccctcagcccg

SEQ ID NO: 219176 - DNA, 122 bp, Homo sapiens
cgtggccagttgcccgcctgccccggagagccaggcgctaaccagccgctctgcgccccgcgccctgcttgcccccattatccagccttgccccggcgccctgacctgacgccctggcctga

SEQ ID NO: 219177 - DNA, 122 bp, Homo sapiens
cggagtgtgcgaacgaccccaccgctgctttctcctcccccagatcacgcaccccagctccggaagatggggaactgcctcaaatcccccacctcggatgacatctccctgcttcacgagtc

SEQ ID NO: 219178 - DNA, 122 bp, Homo sapiens
tcaggtcgggatttgaccatctctgcactgaacctgcaattgcaacttttaaaattgaaacgctgcttctcacctctcctccctagactctatttcacagaggaaaccatcacagggaaagc

SEQ ID NO: 219179 - DNA, 122 bp, Homo sapiens
tggtccaggccaattgtccccgcgggagggcggtgccacggtgggtgacagggctgggggcggggtaggggtcgacttaagataatctggtccaggggttctgctctgggctgggtcgaccc

SEQ ID NO: 219180 - DNA, 122 bp, Homo sapiens
tatcaatagcaagtttggctgaaatgcaaatatccaataaccagagtgcaggaaggagctcgcccttggaaaagctgtggtcagaatccgtctgtctggctctgcagggcccgatacccagg

SEQ ID NO: 219181 - DNA, 122 bp, Homo sapiens
tagagtcaggaaaggtaaaaaatcaccttaaggaaactctatgcctcagcactttctaaacgcccctgtcttctaggcaactctgctcttgtctccttgttcttttatctcaatcttgacgg

SEQ ID NO: 219182 - DNA, 122 bp, Homo sapiens
cccctttggcagcaccgcctcttaacacagtcaactacaactcccggagtgctccgcgcgcgcctgcctggtagagcccagcttgcgctgggcagcatcctggccgctgggtggcgtccgca

SEQ ID NO: 219183 - DNA, 122 bp, Homo sapiens
agactccggcctttgagtccgcttctgcgcagggccggggctggaggcggggcgaaggggcggggccgcaggcgaacgcaagtcccgcttcgctctcgggggcggactcagcggcggaagtg

SEQ ID NO: 219184 - DNA, 122 bp, Homo sapiens
ccaggagagaagtggcaggtctgcattgtttcaaaggtgcttctccccaacccctagttgcgagctaacctttggtcaagtctcctgcatctttgaacttcatctgaagaataggaagaata

SEQ ID NO: 219185 - DNA, 122 bp, Homo sapiens
tgttacaacaggccccgacagccacaggctgagggataaccgggaagtgcctgccccacccgatgtgcccaccttgctgccctcccagaccatactggcctgccaatgcctctgagatggca

SEQ ID NO: 219186 - DNA, 122 bp, Homo sapiens
ccctggacgagctcgccagcctcttcaactcggggaggagtgtgcttcggaaatccgcggcgggaagaaaaatcagggaagcagaaggtaagcggagcagacatccccccactccttttgca

SEQ ID NO: 219187 - DNA, 122 bp, Homo sapiens
aaaaaaagttaagaagtggctttagccagcatgtctctgtggctgccactccctcctccccgcatttcttgcaaagtacctaggaccaggaatgtagggatcagtggagggaggtgggtggg

SEQ ID NO: 219188 - DNA, 122 bp, Homo sapiens
atgtggaatacatacaccatggaatattattcagccataaaaaaaagtataaaatcctgtcgtttgcagcaacatggatggaactggaggccatgaggttaagtgaaatcaattaggcacag

SEQ ID NO: 219189 - DNA, 122 bp, Homo sapiens
ttctttcttctcgctggaagactggaggaccagcgaggggctgtttgtggagccggcgggcgggccgtttgtctctccttcctgcgcctctttggtgctgggaggcgggccgcagggtagct

SEQ ID NO: 219190 - DNA, 122 bp, Homo sapiens
ccaaagccttcttccagactccgttaggacccagaagagtgcgtttctcttctagaggctcgggagaagttaggagtgaagagtagttctgagaagttgctgttgtccacctgaactcccaa

SEQ ID NO: 219191 - DNA, 122 bp, Homo sapiens
cccttgcttgcccaacgtccaggggccactaggaccccagtccttttcaggaggcagcctcggggaatcttcaaggcccatgactaagtgggagaacccagaccaggtccatgaaagtctga

SEQ ID NO: 219192 - DNA, 122 bp, Homo sapiens
tcaatatggctttggcgagtctgcttcttgacttcttcacccttattgtttcaaagacttcgtgtgtccttggcctttaaacttcctcttgacaatttcatcttttctcccgccacggagct

SEQ ID NO: 219193 - DNA, 122 bp, Homo sapiens
cggagtcaggatggcaacctctagtttgtcctggtttcagaacaagagccaatcaaaaatcgccttacagaattttactgaatagtcatacatatagctcaaaatgtttccaaatttcaaaa

SEQ ID NO: 219194 - DNA, 122 bp, Homo sapiens
aaatgcactgataccatggcacattttttcttccacagctatagcccattccctgcatatcgctgacaactcggatctctcttcatctctgtcccagagtcagtgccatttaatgtatctca

SEQ ID NO: 219195 - DNA, 122 bp, Homo sapiens
agcatttattgccttctttttgtcctttccaacttggagagggtccgggtgtggagcgcgcgtggatcggacgccttggtctgcgcggccctattcattcgctccccgggcagccgcgtcgc

SEQ ID NO: 219196 - DNA, 122 bp, Homo sapiens
ggcggggaggggccggcctggaaaggcggaagcctccagtctaggggtggctgcagaacccggatctcggagttacacgttctacggagcggggcgccgggagacggcgggcgagaaaaccc

SEQ ID NO: 219197 - DNA, 122 bp, Homo sapiens
ggggcgggggcgggggggcgatgctccacaaatcagcctcccagttagggctttgacgcacgccagacctcggaagccgacgttgtcgcggagtagggggcgggcggggagggggcgagcgc

SEQ ID NO: 219198 - DNA, 122 bp, Homo sapiens
gacagccccagacttggctttgccaaccctccaggtctctcctgcatggctaggacccaacgcctaggtcatccagcactcaccccaaccaaagccatgggaattgctgggacccggaaggt

SEQ ID NO: 219199 - DNA, 122 bp, Homo sapiens
tcagagtgccctgcagagtgccacggggaagggagatggggagctggagcaagagaggtgcgggtgtgaggagcccagagccaaagagttcatgaaagcagggctctcacactcggacgtgc

SEQ ID NO: 219200 - DNA, 122 bp, Homo sapiens
gcgcctgttggggctgcacctcggaccagggcttctgctgcatctgcagccatgtcgggccgctcagtgccacatgcccacccggccaccgccgagtacgaatttgccaacccgagccgcct

SEQ ID NO: 219201 - DNA, 122 bp, Homo sapiens
ctcaccgcctcttgcctcctccttcgccgccgcccgggttaccacagacgcggcgagccgcgccccgcccactgggtgctgggcagatgattggtggagactcagcttcttagcaactagac

SEQ ID NO: 219202 - DNA, 122 bp, Homo sapiens
gccgccgtggaaggtgagatcagaccctgcccaatacagtcgtgtggtctacttgtgggccgcccagcctttgaggcctggacccggcttggaggacagggaaggacgagtccagcccgctg

SEQ ID NO: 219203 - DNA, 122 bp, Homo sapiens
tcagcgagcacccggggagagctgtcctaggagagtctgtagagtccctcgattaccggtcgcaaacgcctttgggagcgcagtctgctgcgagcgccgaagggtgagacgcacggcgttcc

SEQ ID NO: 219204 - DNA, 122 bp, Homo sapiens
ttggccctgaaacaaaaacaaatggaaaacactgccctacagagagaggttcaatgtttacgtgactaagaatttcagtcaaaccagaagctagagagactgcgtaatcatcttttagaatc

SEQ ID NO: 219205 - DNA, 122 bp, Homo sapiens
acatttcccagaattcctagaaaaactctccacttatctgcctgcctaggacgcaagtaccgggtgccaagctgagagcctggatgatatttcacatgtgccggtcccaaaggaattcctta

SEQ ID NO: 219206 - DNA, 122 bp, Homo sapiens
tctccatccagattatctggagacgccaatttcaaagagacatcttaatagtgatgtcaacgaattaattagatgtgttaatgagctaaaagcaacccaaattaaattaatgcagtaataag

SEQ ID NO: 219207 - DNA, 122 bp, Homo sapiens
aaggcgacccttagactttttaggtctgatggcgggcctatgctggtgtgggaataacaccgccggtctcagctggaggtcgccagccctttgcaagagcctgccggtccccgcgggctgca

SEQ ID NO: 219208 - DNA, 122 bp, Homo sapiens
gacagcggcggacatgaggaaaggccagaggcagcagccagcccatctcaggcccgtcaccgtggaagcagcggccggaggagccacagaaagcaaaactcccaaagccgcccacgtacttc

SEQ ID NO: 219209 - DNA, 122 bp, Homo sapiens
tcccgttcgccggggaacttagggtatccgggcttccctaaattgacaagcgggggccggcgccttcgcccgccttcgctggccgccgcttggtttgttcttcttctccttcggggacttct

SEQ ID NO: 219210 - DNA, 122 bp, Homo sapiens
ttaatagaaatgaggttttatgttgccgaagctggtctccaattcctgagtcattagccacgcccggctaatttttgtatttttagtggagacggggtttcaccacgttggccaggctggtc

SEQ ID NO: 219211 - DNA, 122 bp, Homo sapiens
ccacccgtgctgcacttgaattttcaccaggcctcagccacctccccacggggcagagctcgtgacctgcagcctgccatgcccgagccatacccgagccctgcccccccgcccccccaccc

SEQ ID NO: 219212 - DNA, 122 bp, Homo sapiens
agtcacaggaggatgctgagtgaacgcagcgcccaggcagggtcatctggggacctggtgcgtgtgagaacatatttcttctcctggcgccctccaggctcactgtggctggagccggtgac

SEQ ID NO: 219213 - DNA, 122 bp, Homo sapiens
cccaactcgggctgctgccaatcggggaagactgtagttgctgcggcgtcttcatcagggcgggtacctggtgttctcccagtcattcctcccaagagggcttgcaaggctctttctgtggt

SEQ ID NO: 219214 - DNA, 122 bp, Homo sapiens
gccccattcagtccttgtcgctgaccctccccaggcagctgggggctgaacgaggaggagcggctgatccggcacctgtttcaagagaagggctacaacaaggagctccggcccgtggcaca

SEQ ID NO: 219215 - DNA, 122 bp, Homo sapiens
tttcgttgaatcgtgactctactacttcccagatgcatggctttgtacctccttgagcctcggctttctcatctgtaagcagggttccatgacactcattcatgctgttaaaattgaatgtg

SEQ ID NO: 219216 - DNA, 122 bp, Homo sapiens
gggtccgagcgcgccccgggtcctagcgccctgtcggttcaccggcccgggcagcccccgcgagtggagaggaactacatgccttcgccaaaccccagatgaaaccaaacccaaacatccat

SEQ ID NO: 219217 - DNA, 122 bp, Homo sapiens
gtccgagggtaggttgttaccctaccacatcagccctcaccgggaacctggtctgttttccgtcattagagtctttgcgatgtcagatgacttgaaacctccggccacctttgagaggcttc

SEQ ID NO: 219218 - DNA, 122 bp, Homo sapiens
ccccgggtctggtcgcctgacctccaaggaagttcaggtcctacagcccgccccgccctccgggtcccatggaggaggcctggcttcctgtctctagcaaaccggaactagagggagttggt

SEQ ID NO: 219219 - DNA, 122 bp, Homo sapiens
gtgttacagctcttaaggtggcgcatccggagtctgtcccttctgatgttcagatgtgttcggagtttcttccttctggtgggttcgtggtctcgctggctcaggagtgaagctgcagacct

SEQ ID NO: 219220 - DNA, 122 bp, Homo sapiens
ggtttatccagtcatctgtactattaattgaatttagctctctactagctaagtgctacacggctccatggtgattatcaaggtagtcaggatttcaaatggtgctgataactaagtgtaat

SEQ ID NO: 219221 - DNA, 122 bp, Homo sapiens
aatgtatcagaatctaacgtgtcgttaatagaaagaagaacaggcaagaagtggtccagccggcgaaggttggtgtgtgcttgtgttgtgcctgtgtgttagtctttttcttaaaaatctta

SEQ ID NO: 219222 - DNA, 122 bp, Homo sapiens
gtaacaatggcagccaaaacctcattacttccaaagcctatcacaaagagtttcaaactacgggtcaatcggctgcctacacctctgactgcctctttgtttctctctcctagcttcaactg

SEQ ID NO: 219223 - DNA, 122 bp, Homo sapiens
ggactgcagtcagctatttaaacctcccgcccaccttttctttagacccgcgtctcaccccgggccggaagggctcctgcgcaggcgtttgtagccacttttaagttttatcagctagttca

SEQ ID NO: 219224 - DNA, 122 bp, Homo sapiens
gaagatccagaagctagtggcacatctagcaacagagccagatcagaacccaggtaagctcggtctcaggccaggattccttttccatctcctctctttctcaggagccagtcttcctgcac

SEQ ID NO: 219225 - DNA, 122 bp, Homo sapiens
ctttctcctgttctatgacatcaactgcacccccagacctggatagttgtcttgcaaatgcgtgaggcctggtaatcccattctcagtaggagaaatacagttgaaaacttcagtcttcatg

SEQ ID NO: 219226 - DNA, 122 bp, Homo sapiens
tgggggcttctgctcggccccctgtgccgtgggggcccagactggggaagggagagccggcgactctgcgaccctcgcccccgttccacgctggccgcgcccactccgccgcggggtctcgc

SEQ ID NO: 219227 - DNA, 122 bp, Homo sapiens
cgcgagatggacctgcaggtgcagagtaagtcggcgcgtctactactcctgttcgctgcgcgcgttcagtgccagacttgcttgtcatcactgctagcgcctagtgctctttcactgtcctc

SEQ ID NO: 219228 - DNA, 122 bp, Homo sapiens
cccagtcacaaaaacagaaaccaggctaggtattttaaccagagagggatttaataaaagcgttaggatttgagctgttttggaagagctgaagaagaaggagaggacaggggtcaggaagg

SEQ ID NO: 219229 - DNA, 122 bp, Homo sapiens
gcacttcggggtctatcagaggaaatttttgctaaccttccgagttgtctcagagccaaacgtagtaagctacctgtcaccggatgtgcttgagctaagggcgctgaaccacctctgtcaga

SEQ ID NO: 219230 - DNA, 122 bp, Homo sapiens
gtgtttcaggcaactgaacaacaactgatttacacatctgctaaggttggcagctaaaagcgtttgagaaagttcccgatttgatttcccactccagaggttgaacctacatcagagcacca

SEQ ID NO: 219231 - DNA, 122 bp, Homo sapiens
ctctcgaagtttatctgggagtctcagcacgctcaggggcgaagggcgactttgccggaccggagtggggaaactgaggcacagggttgcgaatgaggcgggcagaaggaatcctggggcca

SEQ ID NO: 219232 - DNA, 122 bp, Homo sapiens
taacatggacatctatgatctttctgcctttagagggctagttttcaccaagtttccacccgcactgcaacccaatgacaatgtttaaatattctgggtgagtcatttgctaggatttctgc

SEQ ID NO: 219233 - DNA, 122 bp, Homo sapiens
aagacaaagacaggaggacagacgcacagtcacctcctctgggccgggccggagaagcggcgcccaccctgcagaggggagaccctgacagctccacgcggagacaaagacacctcgacagc

SEQ ID NO: 219234 - DNA, 122 bp, Homo sapiens
acgcttcccagtgttctgcgtctgtcctcacaatggccctcaaggtcaggcagcactgaccgcattctaccattgaggaaacaggtgcagtaatgctctgggagagagacccatgacaagtg

SEQ ID NO: 219235 - DNA, 122 bp, Homo sapiens
gccgggctccgtggcagcccggcccagccccgccccgccccaccctccggccctcccctccgcttagccgtgctctcccgccgagctccgccgccagctccgtgctctgcccggcccgtacg

SEQ ID NO: 219236 - DNA, 122 bp, Homo sapiens
caaactccgacctcggtttcgcccttgcaactcccagctttcctatatgtccaagggcggcgagggctcaaaagtcctggataatccgcagatagaacacacacacccttttccgaattctg

SEQ ID NO: 219237 - DNA, 122 bp, Homo sapiens
ccctggtggggaagaggccaccaacatctggacggcaggtaagttccgacgcttctgcagcgagcgcgggaggagggacctgaggcaccgctaacactcagagaaaactaccggctgagggt

SEQ ID NO: 219238 - DNA, 122 bp, Homo sapiens
tgatgcctggtcataaaagggtgtgatgggtataagtctactttcctcttctgcacttctcgcagtagcacttaaaaaaaaaaatctcctttatgatgctaattgatcagcaagccagaaaa

SEQ ID NO: 219239 - DNA, 122 bp, Homo sapiens
gcatttactgtgctccacttcccaactgccagggcctcacaagaggtaacttcagggctgcgctgcaaggctgtatgggttctgtttgcataagggtacccagctgagaggatgagactgac

SEQ ID NO: 219240 - DNA, 122 bp, Homo sapiens
cgcccgcctcggctcgcctagtctcctcagcccgtagcgcctgggccgagagcgagggcccgcctccagctcctcagccgccgcccgcgcacgcagctcccagccccggtcacctgcggcgc

SEQ ID NO: 219241 - DNA, 122 bp, Homo sapiens
tgagcatcttccactggtaggactttagcagctcgttgtatttcctggtcaacctctcagcgacctggagggattcgtcgagctcccgccgcagcttagcctgggaggggttgttggtggaa

SEQ ID NO: 219242 - DNA, 122 bp, Homo sapiens
agaagcaacagataacggcaaacccttgcgtgcagcgaccacatgaagaccgcagctgcgcgggctgtagtttcttaccctctgtcagcacgcacggctctccaacagatgggcgatttcaa

SEQ ID NO: 219243 - DNA, 122 bp, Homo sapiens
cggaccaaggaggcaccgggcgcggcgaacacccccggggcccctccccgagcggggccccgcgtcccaccgcaaaccaggggagcttgggcaccacctggctggcaccgccgggcccggcc

SEQ ID NO: 219244 - DNA, 122 bp, Homo sapiens
ggtttgtttgggcattcgttcattcaacaagtatctatccaacacctgctacaggccagacgctgtgtctgctgcttgggatatgatgcagaagaaactgtaccttgacttcatggaaatta

SEQ ID NO: 219245 - DNA, 122 bp, Homo sapiens
gaagccaggctccttcctccttattagcagccgggagccatctcagacacgctagagctccgccagttcccaatcagaaaaaacagggcagacttggactgggaccaaggccgatgcagggt

SEQ ID NO: 219246 - DNA, 122 bp, Homo sapiens
accacactttgagaacactgatctggcagaaccagtgggaattggagggtctgtggcagacggagatgttgtaggcagcgcagaaaataacagttgaataagagctgaacgctctcctgaaa

SEQ ID NO: 219247 - DNA, 122 bp, Homo sapiens
tatccagtgcagttgcgcgtgggcgcagcagcaattttatccccgaagtctgcaatgaaacgcgaagaccgcagacgcttgccgcaagtttcctcgctctgcgtttacttctgggcccgaag

SEQ ID NO: 219248 - DNA, 122 bp, Homo sapiens
tgtcccaggaatgtggccactttgtaatccaccctccaggcccccctgacagcctgggagcgaagtgggaagtgggcccaagaagccgacagagcacggtcctccatgtgcaggcacactca

SEQ ID NO: 219249 - DNA, 122 bp, Homo sapiens
gaaaaatccaacatgagtcttgagttaacttcagaaaataaatggaagacaaggtgtgcacgcatcccagaagggcgggaagagagacgcccgcactccacctgtctcagcagcaccgtctc

SEQ ID NO: 219250 - DNA, 122 bp, Homo sapiens
gggttcccacggcgcccgcccccgcgcgcccggcgcctccctcacgcccgccctccttgccgcccagccggtccaggcctctggcgaacatggcgcttgtcccctgccaggtgctgcggatg

SEQ ID NO: 219251 - DNA, 122 bp, Homo sapiens
gtggatattgcccagctctgcctcccttgctgcaggtgccctgtggatgctgagcttccacggaggggctgctgccccctctgcccccacagctcagctcgagttcaccagtggggaaggcc

SEQ ID NO: 219252 - DNA, 122 bp, Homo sapiens
gacctgcttgcatcaaacctgcacacatcacgaacaggcgccctccatcacacccaattacgcgtgacctcaacagctctcacatcccgcagaaccgggtttcagttccactgtgcctgagc

SEQ ID NO: 219253 - DNA, 122 bp, Homo sapiens
ccatgcctccatgtatgcatggattccagaattgcacagcaagagcaacctagccagacccggtacatcctggtaaaatcattccagaaatgagacctctttctgcttgtagatgctatccc

SEQ ID NO: 219254 - DNA, 122 bp, Homo sapiens
ctccggtctcagaaaccctccgcccagaaagtaccctggttttctgtggcccgtggcccacgtgtagttacgttctcgaccacagtgtccactacagagtgctcagggctgacccacacatt

SEQ ID NO: 219255 - DNA, 122 bp, Homo sapiens
tacaaaccttcagctagacagaaacgttcttcaggtcctcacctgacccagaagcctagccggcttcacttctcaatggcagtcgctataggactttgcagcacctagcccaggcactctgg

SEQ ID NO: 219256 - DNA, 122 bp, Homo sapiens
tttctggggctacaccaactgaaaatgggccggaccgagatccgggagagcgttttcctgcgctagacacggcgttcagcctccgggttccgggtctagctgagtcagggcggcgttccagc

SEQ ID NO: 219257 - DNA, 122 bp, Homo sapiens
gcagacatcgccctgcctggctgctagacgggggagtgctgtcctcccctgtgaccagaccggctgccatcagagacctggctgctgcccctgctggaccaggtgggcatgggctgaaggaa

SEQ ID NO: 219258 - DNA, 122 bp, Homo sapiens
atacctccttcctggcagcctttggcacatggacttagaaaccagaagctgagatggagccggctgggttcagaaattgccactagtttataagagctgtaagtcagccaacactggaaaga

SEQ ID NO: 219259 - DNA, 122 bp, Homo sapiens
acaaagcaggggtgatggctttcaggtcatgggtggattcaaagattttctgattgcagtcgtttgaaagagttattgtcctgtaatcaatagaaaggagtatcttggataagataaggagt

SEQ ID NO: 219260 - DNA, 122 bp, Homo sapiens
gggacatgaactagggtagcagaactaaccaaaaagacaagtgaaactatcacatgggagcgtggcgcgtctttcccgggcttctcaccgtgtggcggcgggtgtcgtaggagtggttaact

SEQ ID NO: 219261 - DNA, 122 bp, Homo sapiens
gccacaatcaaggctcctcctcgggctcccccgtgctgccccgggcgcgcgccatccacccggctgacaaaaagcaccaggacatgacccagtaccctttgatttctgtccagaggtggcgg

SEQ ID NO: 219262 - DNA, 122 bp, Homo sapiens
gagcggcttccaggagttctcgcggttgctgcgggcggtgcaccagatcccgggcctggacgtgctacttggctatacggatgctcatggcgacctgctgcccctcaccaacgacgacagcc

SEQ ID NO: 219263 - DNA, 122 bp, Homo sapiens
aagaggcaagcaggggccactggccaggccagggattgaggggccaagagaagtctgggtcggagaatagacaagacaaaccaactgcaagtagccttgctaagacgtttagaaatagcagc

SEQ ID NO: 219264 - DNA, 122 bp, Homo sapiens
aaaccccaccagaagggcccctggagccctctcccctgggtaggggccacttctcagggccgcatgcatgctgggctatggctggtcatcactgacatcaccaggcaccaagcagcccacct

SEQ ID NO: 219265 - DNA, 122 bp, Homo sapiens
tgcccgttgccaacacggagggaacgggccgagactgcgggcaacacgtggcagagccggcgtgagtctggtgggtctgatcccagagcctcaggttgacgccccttccttggcacgggaca

SEQ ID NO: 219266 - DNA, 122 bp, Homo sapiens
ctcaaactcctgacctcatgatttgcccacctcggcctcccaaagtgctgggattacaggcgtgagccaccacgcccagccagtagaaggcttttgcaggattcaagttacagtagtagaca

SEQ ID NO: 219267 - DNA, 122 bp, Homo sapiens
cgggggaggctgtaacttgcgcaagcgcactcaggcagtctccgagcccgcgggcgcaggcgcgcttacagccgacagagcgcttcagccgcttccctcgagcctgcagtgcgcaagcgcgg

SEQ ID NO: 219268 - DNA, 122 bp, Homo sapiens
ctgactcaggagaaataagaccccggtagagttcaaactctgggcttgggagccttcttccggcaggttttatcctgaggcctgagtttctccccgcttgccctctggcccaagcactggta

SEQ ID NO: 219269 - DNA, 122 bp, Homo sapiens
gggactcctccacagacttctgtcattaagtcaaccagtcagcagagatttccttctccgcgttcctttccttccctccccttttcttgcccttcctccctctcctcttccacgcccccttc

SEQ ID NO: 219270 - DNA, 122 bp, Homo sapiens
tcttggagtctaaaagacatctgatgtgctgatacctgttcagtcttctgcagtcatgggcgtaaactctcaaagagcaccactgggtcttagtccgtggcataaacattattctcaatgta

SEQ ID NO: 219271 - DNA, 122 bp, Homo sapiens
gaaccgggacaaccggaggcttcagctcacctcggattgtaaatgctaacacgggtcctccggccggctgatccagaacttaggtcgccgggacgtgtggcttctgcttctcagacgctcgg

SEQ ID NO: 219272 - DNA, 122 bp, Homo sapiens
ctccgagcgtcacccacagaggggctgctggagtctcactcagcaagaggctctgaggcccggccaggtgtcctctgccggcgttgctgctgctccctttggcccagcatcgcagcggggag

SEQ ID NO: 219273 - DNA, 122 bp, Homo sapiens
gccagcggagtcctgggagctgggagctgagtggagcgagcgcggctctgctcctgggcgcgggccggctccgggtgtccgcgcacttaactccgggggcggggcaggcgcagacccgcgcg

SEQ ID NO: 219274 - DNA, 122 bp, Homo sapiens
ctacgaaccaggagtcaggcgagccgatctggggctgcaggtgttacctctgatctaggccgggggcttcagggatccgagccgagggagaaagccttgggggcttcatcacacttatttgg

SEQ ID NO: 219275 - DNA, 122 bp, Homo sapiens
ctcgagccccctggaaaggcgccggctgttgggaggcgggaccccgggggcagccagcaccgggcgctgaggtgatgctccgatgctggccccgcctggagggccctcggtttggagtctta

SEQ ID NO: 219276 - DNA, 122 bp, Homo sapiens
cataagctgtggggagggacagggggtgtcatttgagctgtggatctagtggaagggtggcgtgaccccaaggccaaggggtaacagaagagctgacaggtctgaaggggggagactcagtt

SEQ ID NO: 219277 - DNA, 122 bp, Homo sapiens
gcagaaagggccgcgtccgatcggcgcaaacgttcggttcgtagcaggagcttctccaggcggccaccgaacccaggtccaggactcggcactcctggagccctcctccccacgcagaccgc

SEQ ID NO: 219278 - DNA, 122 bp, Homo sapiens
ggaggaacgtatcccttctggaggctgtctcagggggcagagggaccggaccggaagtgacgtgagcgggttccggttgtctggagcccagcggcgggtgtgagagtccgtaaggagcagct

SEQ ID NO: 219279 - DNA, 122 bp, Homo sapiens
ctttagagagagcagatttgaaacactcttgctgtggcattttcaggtggagatttcaagcgatttgaggacaattgcagaaaaggaaatatcttcgtataataaccagacagaatcattct

SEQ ID NO: 219280 - DNA, 122 bp, Homo sapiens
gccctggtaccggggattcaccctccccggggtgttcctgggccttgggtcgcctgggtccgctccggcgcctggggaggggtctgcggcttcggaaactcgcgggtctcccctgcccctcc

SEQ ID NO: 219281 - DNA, 122 bp, Homo sapiens
gtcggcgtccaccaacacctcgatctccatggacttattgctcgtgaaggtcatgcgtcccgagatggtgatgacgcagcctgtggagaagggagggcgggggtcagggcggcctccacccc

SEQ ID NO: 219282 - DNA, 122 bp, Homo sapiens
ctcgggctcccaaggcaggtcacacgggcaacggcagctgatttcaggggtcttcaggctcgctgcccccgacccggcctgtgtggccctttccccattgtctccctcctttgctgccccag

SEQ ID NO: 219283 - DNA, 122 bp, Homo sapiens
gggaaggggctcttgaggctccggggccttctggctgtagtgtctcacttggagcaatggcgggatccccagatccatcccctggcccgtctgcctcccgccctcatagccctgtagcctag

SEQ ID NO: 219284 - DNA, 122 bp, Homo sapiens
ttcccataggaacattttccgaggccttccatacacgtctctgggtgctcactctgcttccggtcttggccttcccagcagtgtctctgcgctgccaccgggctcatccttgcacagctccc

SEQ ID NO: 219285 - DNA, 122 bp, Homo sapiens
atgaaaagcaacacgcctttcactgctgcttctaacgtggatgagcatacattggggtagcgaatcactgtagacaggccccacgtttgctgtctgctctcatcatacctagagagtgccag

SEQ ID NO: 219286 - DNA, 122 bp, Homo sapiens
cctcccgggcggccagacgcccgcctggccttccctccggcctcggtttcccctccgcggcgctccaatggcccccgccctccgcgcagggccacgactgcttcccggtgctgttcacctat

SEQ ID NO: 219287 - DNA, 122 bp, Homo sapiens
cctacagcaattagagtgtaattttaagttttcctcaatccacacgatcacgcgagacttcggcacaatctaaactccatgaattattcagggcgtggtgtttggaagcacatctgtttagc

SEQ ID NO: 219288 - DNA, 122 bp, Homo sapiens
ctggcgggagggaagctgtcaaatggaagccggtagaaatgagacagacgcccggagaagcggggagccccgcccctccgccatagcagcctcgggcgccgcctcttcctttccagcctccc

SEQ ID NO: 219289 - DNA, 122 bp, Homo sapiens
cttcccagcccaggccgccctctgcaccggctcaggtgagtgtggctacctgcatgtgtgcgcgcccggagccggcactgggtgtgcatgtccagccgcggctgtgtgtgtatatctggggg

SEQ ID NO: 219290 - DNA, 122 bp, Homo sapiens
gcctactttctcactggtagacttggaatggactcattacagagatgccctgtgattggccgaagacacccagcatagcccatttcccaccgtgattggctcagagatgggcacatgaccca

SEQ ID NO: 219291 - DNA, 122 bp, Homo sapiens
gggactcagcggcaggaacacctgcccaatcagagctgggcctgggcgcggggattttcacggcctctctctaccagtctaggtgacggtcattcaggagccactgtgtatgtccaacaagc

SEQ ID NO: 219292 - DNA, 122 bp, Homo sapiens
ctgcggcccccaggagagacgagagttcacggagccctgcacggcgggggcctggccggccgaggaagcgcaaacactcaagctcgctgcctgccccacgtcccacggggccgctccccagg

SEQ ID NO: 219293 - DNA, 122 bp, Homo sapiens
aaggctggcggctggtcgcgttgcaggtgaggttgtgacgcgcggtgtggagccgcggcccgggtgcgtccctgtctggttcctgggcggggttcctggagagggcgtgtcgcgagccaaag

SEQ ID NO: 219294 - DNA, 122 bp, Homo sapiens
ctgacccccagtccaggagatgagccttgcaggaggaaaggcagcacacatctgccttctcggagccagggcaggctgcacaaagaggacaactgccattgatcttgaacaaagggggtggg

SEQ ID NO: 219295 - DNA, 122 bp, Homo sapiens
tgaaggtgtctccttgctttgttggctgggtagtaattctgtcccacttcccatgatcttcgaggctctacatggcctcgcccgcgttcctcgcccactcactcgcccgctgtgaagcccca

SEQ ID NO: 219296 - DNA, 122 bp, Homo sapiens
gcagagcccatgagagggagaagcggcagcgtctaccctgaggtaaatctggcctttcggcgtggcggagaggtcttgctgcagagccgatggccctgcatgtgcctccctccctgggaggc

SEQ ID NO: 219297 - DNA, 122 bp, Homo sapiens
cggaggcgggggtgctgcgcgcttgggagcacgtgggggaacacgcagggactgccggcgcgaatggcttcgaacgcatgcgccccacccgacatttcacagtcgccatgacgaccggtagg

SEQ ID NO: 219298 - DNA, 122 bp, Homo sapiens
tggtgagggggggttcaatctgtgcagctgttgcaggcagcacactataggattctctgacgaacaaggactagagtgtggggaagccgagagcccgtgactccagaatcctattgtggaca

SEQ ID NO: 219299 - DNA, 122 bp, Homo sapiens
ggggtgctggggagaggttccccaaggtttcatacccggtggctcaacctgctttagaagcgattgcgggccgcgtttggaaaatgagagttaggaaagctaaggttgtgtcggagcgctta

SEQ ID NO: 219300 - DNA, 122 bp, Homo sapiens
cggcgcctgcgcgccgcgtccgctgtccgcgcctgcgcgcctctctccccgcccaacccacgacgcgggcgctcctcactctcgcaacggtcacgcagaccccgcctctgcgaacccggcca

SEQ ID NO: 219301 - DNA, 122 bp, Homo sapiens
ggggctaggcaggaatgcaaagagttggctctggcctcagacacctgatcctggcctgtccggagggccgtcctgttggcagccagccccagtgctccccagagccagctgcgtggcagcat

SEQ ID NO: 219302 - DNA, 122 bp, Homo sapiens
gtggcacctgctgggatgtcacaggcgtctctccagtggcccactctgtgtgtgggtgtgcgaagacgtacagaacacaaactttcccatttcaaccatttgtaaaggtacagctcagtagc

SEQ ID NO: 219303 - DNA, 122 bp, Homo sapiens
acaacactgcacgcgatgccactgaattgtatgcttaaaaatgcctaaatgcgccaggtgcggtggctcacgcctgtcatcccagcactttgggaggctgaggcgggaggatcacctgaggt

SEQ ID NO: 219304 - DNA, 122 bp, Homo sapiens
cacatctcccgtcactcagggcccgaaggggcggggccttaaacgttatccaatcaggaacgctgggctgggaaccatccaatcaggcacgcaactggagcggacagcacagcttccgggat

SEQ ID NO: 219305 - DNA, 122 bp, Homo sapiens
cgccgcgcgtcctcctagcagcccgcggagcccggcactgtgatggtcccgcttcccacacgaggccacgggccacagagtgggcaaggaactcgccccaagccacacagcgggtaagttga

SEQ ID NO: 219306 - DNA, 122 bp, Homo sapiens
tccgggtccccgcccggcgcgtccagccccgccagcctctatgggcatgcaacccagccgcgtgcctccctccggctgcaaacacggaccaatcgtctccgacaccttgagacgcacagcca

SEQ ID NO: 219307 - DNA, 122 bp, Homo sapiens
gagggaagaccgcggcgggttacaacttgggggctatttccaccttccgtgcgactgatgcgaaccccgaagccggactctgtctgctacagtcctggcgtccaagttctctttagctcatg

SEQ ID NO: 219308 - DNA, 122 bp, Homo sapiens
tctaccatgctgcctctagaaaatctatggaagaagggttgtattaaaaggacagtgtaacgtcttgaattgtatagattagagttcttgttaagatgactaatgttaaaagagtgcaagca

SEQ ID NO: 219309 - DNA, 122 bp, Homo sapiens
ggtgaatttctgtccggttctgcaggtgttctttcctttcagcattcagttgtaccctaacgagtttccaggtagtgaccctagagattgtcccagagacctgccgaagaatgccgctttga

SEQ ID NO: 219310 - DNA, 122 bp, Homo sapiens
cattttcactgaacaaatcattttctgtgtgtgccatgacataaaagaggttggcaggcccgtagaggtggctcatgcctgtaatcccagcattttggaagactgaggcaggaggattgctt

SEQ ID NO: 219311 - DNA, 122 bp, Homo sapiens
tccacccagaagcccagccggtttcacgtctcaccggggctctgcggcacccagccccggcgctcaggcagcccagagggagctagtccctgatcaagtccagcaggcgccggctggccgag

SEQ ID NO: 219312 - DNA, 122 bp, Homo sapiens
tgcggggccgcgcttagggtcggagttcgctagtccagggaaaggggtgggaggggccctcggaggggcccctacaagggatcccagtccgcagaattaaaaattcgttcgcaagggagcgc

SEQ ID NO: 219313 - DNA, 122 bp, Homo sapiens
gactcggtcctcagatcctcggaaggctcagctctgggcggggcaagggaccttgcaagtcgggggggcctcgggaacttctctccgccagctgcgactggaggctgggaacaggggagacg

SEQ ID NO: 219314 - DNA, 122 bp, Homo sapiens
ctgggggattcctagaagcccttcccagacagaccctcagtctggagcctagatccactacgcactaaccatgccctgtgaagatggtcttcggggacagagggaggtttggtgctggagtt

SEQ ID NO: 219315 - DNA, 122 bp, Homo sapiens
ctgcctaccgatacagagccttcgagtcgtccggggccgccattacaatccacctccatccgcttggaaatggccttcgtcccggcctatgactggtcccagcgggcagtacagacccccta

SEQ ID NO: 219316 - DNA, 122 bp, Homo sapiens
acggatgtaccggtgaagtggctggccaggcctcaccacctgttggtggttgatctgagacgagagcccaggtctcctgcctctctgccagcccatccgtccatccaacaaatgtttgggcc

SEQ ID NO: 219317 - DNA, 122 bp, Homo sapiens
tgatcaaacaaagaaacaggtgatgaggatgtgggagttgaaagaaagtggtgtatcaagcgaatgaactacagctgtgagggtttagcattttctttgaaacatatggctacttgagataa

SEQ ID NO: 219318 - DNA, 122 bp, Homo sapiens
agaggcccgaaaccagtgcccgctgtgcgcggggttggggaagctgcagtgggtggccggcgagccgggaacaatgcccaaattttggggaacgcaaggcagagttctttctgccttgcggg

SEQ ID NO: 219319 - DNA, 122 bp, Homo sapiens
ctcagaggcgtcagcggcgtgcgcggtttccaaggaaaccgtccgtcctagccaccccagcggctctggaatggtagagcaagaggctccgcccacgcaccgccgagaccaataacggaccg

SEQ ID NO: 219320 - DNA, 122 bp, Homo sapiens
ccggacataccagggaaggagttggctctgccgctctttctgccccaacatgcacagactcgggaagttcttcctggggttttatctcaaagcctctcccttacaatttctgtctctctttt

SEQ ID NO: 219321 - DNA, 122 bp, Homo sapiens
ggaaaagtgcagtttgggactcagaaaggacacgttccagttttgaatcgtgatttcccccgccctcagtttgaacaagaagcttttcctcctgaggtcaggctggtgatttacgatgtggg

SEQ ID NO: 219322 - DNA, 122 bp, Homo sapiens
cacgcaggagccaatcctgagcaggctaggagacgaacccggaagtgagatgcaaggcggcgattttcccttctgtcaggtgggttgttattccctgtcccggacctcgctttttgatggac

SEQ ID NO: 219323 - DNA, 122 bp, Homo sapiens
cccgggtcgaaggcccacatcctcaatcccacgcaatagttcaggccctgtgagagggttcgctgtctgctcccagccagggctgagctgttcagaggccctacctgttcagaggcagctgg

SEQ ID NO: 219324 - DNA, 122 bp, Homo sapiens
acagtgcaatgaaagttgacaacagctgcgctggacacagctacttagagactcaatcaccgtgagtttagttctaaattcatggaattcaggggttaagagcatggattctgaaactaaac

SEQ ID NO: 219325 - DNA, 122 bp, Homo sapiens
gaattaagagctgtgcgggactgattaaaaaggtgtcattgtattaagaaatgaaagcctcgtgtttcaataagcatctctgataagaagaaaattgctagttagtacacatgaaatcaaca

SEQ ID NO: 219326 - DNA, 122 bp, Homo sapiens
ctcctcccaccccagtgactcggcagcgcggcagccgacgactgcgcagacgcagggcggcggccgcgcctctccaacgccccgcacccgcccccctcagaagcacgtgcgccttacgtaat

SEQ ID NO: 219327 - DNA, 122 bp, Homo sapiens
gaaagcccaaagcttacctatggttcccagagacaggcgaaggcgaggttttttacgggacgccctggtaggtgctgaaccgcgcgctcacgagtcccgctcagctcttggcatcacctgct

SEQ ID NO: 219328 - DNA, 122 bp, Homo sapiens
cactcccgcctccaagacagtgggtcctgcagcctccactcttctggtgtgagatgggaccggagggcggagaggggacgcggaagctcctatctctccagccacaatcggcacccagggtt

SEQ ID NO: 219329 - DNA, 122 bp, Homo sapiens
taggcactgtatggtgcagctcctttaaaaatggtaaatgaaagtatgcaaatgagcgtacgttcttggaggctggaaggcagaggcgttagccaaacagcttaatacaaaactggggagac

SEQ ID NO: 219330 - DNA, 122 bp, Homo sapiens
cacgtgtggcctgatggtgctccctggggatcctgctgctttcctggagacactgggacccggggctggagtctcccatgcgtgaatctctaaagcttggctcccgggcagcagccaggacg

SEQ ID NO: 219331 - DNA, 122 bp, Homo sapiens
cgcactcacgcccccgtctcccctttttccttctctgtccagccatcgggggttcctgggcggttaagcatctccccggagtcgctgcccagaaccacagctttccttccgacactcaggat

SEQ ID NO: 219332 - DNA, 122 bp, Homo sapiens
acaagacccatctggttccagaagccagcagtgccaaggcaaggaagccctggccagtagcggacacagcagatgcgggcctggggggtggcgcagacaccatggacagggaggaggggcgg

SEQ ID NO: 219333 - DNA, 122 bp, Homo sapiens
gcgcaaggccgaggcgcaggcggagcgggctggagcatgtccggccctttgttctgcgctcgtgcgtgtgtccgggtacttgagctccctagcggtccgcctgtccgtctgtctggctgccg

SEQ ID NO: 219334 - DNA, 122 bp, Homo sapiens
tgttggattttgaaccgggtactgctgccatctggtgtctaggttggaaaataaacactgcgcccggccaggggtttttgggggctgggaggatcatgcctgctcactccagatgagacctg

SEQ ID NO: 219335 - DNA, 122 bp, Homo sapiens
agcttctgcaagcagtccaggtgtatcctggggtcactggagggcagagcctgctcagagcgagtacagaagcagcccaggtcttcccagcaccaggttcactggaagtgccaggtgtggga

SEQ ID NO: 219336 - DNA, 122 bp, Homo sapiens
gggccgatcccgagaaaggacgaggcggcaccctccgccccgcacccctaggcccattaccggccccgccgcagctgcctcctcccgtgatggtctctgccgcccccgctgccgccgccgcc

SEQ ID NO: 219337 - DNA, 122 bp, Homo sapiens
tagggaaaatgcggaagaacacagttgtaatcaacggtagcgtggccgagcggtctaaggcgctggattaaggctccagtctcttcgggggcgtgggttcaaatcccaccgctgccaagtac

SEQ ID NO: 219338 - DNA, 122 bp, Homo sapiens
agccccgcccggtcttggcgcggccctcgccagggggcgccgcgcagcccgcccgccgcccgccagtctagcacacaccccctccgccccgcgcgccggcgattccgagcctacgacgcctc

SEQ ID NO: 219339 - DNA, 122 bp, Homo sapiens
gtgaaaaggtgtgcaacacataaagggccggcggagtgcactgatgagagccccggcttccgtggtttaggagagaaaaaagctgggcacagaagggttggtgtacgacgtcccctctttta

SEQ ID NO: 219340 - DNA, 122 bp, Homo sapiens
ttccggcaggcttcaagttgcaagctgccctcatggctgtccgtcgatgcagggccaggccgggcccgcttggaagggccccccagatctcccgtcagaggggggctccggagtccatttac

SEQ ID NO: 219341 - DNA, 122 bp, Homo sapiens
aagtctaggaaaaagctgcatcagactgcattagtgggcacttgtaaaaaatgaagattacggagacccactcacgaccttctaatagagaacatctggaaatgaaatctggtcatctcctt

SEQ ID NO: 219342 - DNA, 122 bp, Homo sapiens
gcagaggcccggacagaacagtgaccgctcaaggtcacgcagcaaagcctgggcccccagcgctggtttggtagaccccatccccaccccgccaccccgtcaccccacacccagaaccacac

SEQ ID NO: 219343 - DNA, 122 bp, Homo sapiens
tcctggcatcctggtcctgggtcccaggcagatactggccctcatcgttccccgaaagtacgggctctgtcttgcctcttggcctctgcatgtgcggttcccttacctgcttttgcacccaa

SEQ ID NO: 219344 - DNA, 122 bp, Homo sapiens
acagtggggaccagtgctgggatggggcgtggccacgcttgggggcggttacagcgcagtcgagcgtgggggtggggccagggagtcgggtgtagggttggggtgcgattacgctgctagca

SEQ ID NO: 219345 - DNA, 122 bp, Homo sapiens
aatactttcacttctcttttccccatttgggcggagccctttctgagtcagtctgtcggccgacttcctgcttggggcctgggcagccacactgcacgcaggctgggccgactgaggggctc

SEQ ID NO: 219346 - DNA, 122 bp, Homo sapiens
ggccggcaagccctcacccagggcccacacaaacgttccgggaggaatcaaaaggcgcttcgcgtgtggctcggtccctgtgccgtgcctgccagcccctctagaaccgaaccttccgtcag

SEQ ID NO: 219347 - DNA, 122 bp, Homo sapiens
ggatgatgcgggtcttcttgttgtcgcgggccgcgttgccagccagttccaggatctcggcggttaggtactccaacaccgccgccaggtacaccggcgctccggcaccgacccgctcagcg

SEQ ID NO: 219348 - DNA, 122 bp, Homo sapiens
cgcgtccctgccccatatcaggcggccctgggagtgaccgcatccctcctgcgtatcagacgaccctgggagtgaccgcacccctgcctcgtatcagacgcaggtgttttcagcagcaggtt

SEQ ID NO: 219349 - DNA, 122 bp, Homo sapiens
cgcggcgcgcagtccatggagcctcagagccgagcctgggagtcgcagccggcggatggacgcaaacaaagccgggaggctccgcgcagcggctacgaaggtgacggaagtggccgcggctg

SEQ ID NO: 219350 - DNA, 122 bp, Homo sapiens
cagcctggtgtgacagctgcacgctacatgtttgaaagcagcaacaaggctgtctttgtacggcaggggtggtgctggcagctctgtggcggtgccgggctgcagagtacggcaggggtggt

SEQ ID NO: 219351 - DNA, 122 bp, Homo sapiens
gggctgcccgttgcaggagaggagccagcagcccctctccgcagagggcccccacctctccgtgcctgcctcggtcatagtcagcgccccgcctcccgcccaagacccagccccagccaccc

SEQ ID NO: 219352 - DNA, 122 bp, Homo sapiens
gggacagactgctctctggaaggctggccagacacgggaagatatgtaggcctagtcaggcgactgccagggcagatctctcaaactctgatctggcaggcactccaggtagccccgaggga

SEQ ID NO: 219353 - DNA, 122 bp, Homo sapiens
cttttcctgtctggtccccagttttgtgtctgtctccttggtggtatgaggtgtacacagcgttcctttccagcgacactatcctgggagacatcccaggttgttacctgaactcacctgga

SEQ ID NO: 219354 - DNA, 122 bp, Homo sapiens
agggctcacccggcctggccacactgtctcactgtgtgtttgagtgtcgcttgacctgctcgacggccagggtggggtgtcactgtctttgctctgccttcagcccagggcctggtatacag

SEQ ID NO: 219355 - DNA, 122 bp, Homo sapiens
tctgtggtggtgggcttgacctgaggctcatccttgtcacctgctcggtggcagtgcctgcgtgcagacccctcgcagcactcaggtgtggcccgtggacttgtggtttcgctgctggctgg

SEQ ID NO: 219356 - DNA, 122 bp, Homo sapiens
actctatcccatgccaatgtaaggataagctggtcaaatgcagatgcattagtacctaatcgaataaagaaaatagttgacaggttcaattaatttatctccattaaaaggtgaacactttt

SEQ ID NO: 219357 - DNA, 122 bp, Homo sapiens
ctaagtccggggtaggggttgccggcgagcagctggaaacctcaggttcagggtcagggccggctcggatggccgggcaggagccacgccggccccggtgctcccagctgcgggtatcactg

SEQ ID NO: 219358 - DNA, 122 bp, Homo sapiens
tgctgacctaaatgcaatgacccagagattaacaaacaaatagagtcctctggataaatacgtcctccacagactactgccttcttttacctttcaaagtcagacacaaactctcagatttt

SEQ ID NO: 219359 - DNA, 122 bp, Homo sapiens
ttctgcccctgcatgttcttaggcgtgaaacttcaagaaggcttctcagttctttctacccgtcagggctggccttactagcttgacttaagggagcccacagttctcctgtctccttgtgt

SEQ ID NO: 219360 - DNA, 122 bp, Homo sapiens
ccagcctcccctgtccagatgctccctccgccaggaacacctggcagtcgctggggtcagcgggcgcggcccgtggaactgggctcaagcctaaagacctctatgctgattccgcttcctct

SEQ ID NO: 219361 - DNA, 122 bp, Homo sapiens
tgagtctgaatggagtctggagagagcaatgtctccatggagcgggtgcctggctgtggtcgcttaggcaggagcttcctcctcagtgctgacaacagagaagaacattctgttgtggccag

SEQ ID NO: 219362 - DNA, 122 bp, Homo sapiens
aggccatccattcacctggttaaaggtgatgcaccaactgccaacttggacccctcagggcggcaccgcgtccacctgcacatcccatggccacagctacacggacgcggtcttccagctcg

SEQ ID NO: 219363 - DNA, 122 bp, Homo sapiens
gtactaggcatgatctctgactttctttcactctcccaaggttaattaagttcccttccacgaactgagctccgtgcctattcattattctctccctctgacctagggcgttaatatgatca

SEQ ID NO: 219364 - DNA, 122 bp, Homo sapiens
aattggcgcgcttaggcaccgggctaattgaggtcaggctgcagattgcagtggctgcttcgcagaggcggtgggcgtgggggctgcgcgcgctccctccccctgcagggcctggtgtgagg

SEQ ID NO: 219365 - DNA, 122 bp, Homo sapiens
tccacgttcaaggacaaacttttacatgtatcgtctgacaaataccagtttggggccgagcgtacttttcccgggatacagaagaactgctcagaaggcgaaactggaccaacaaaactcct

SEQ ID NO: 219366 - DNA, 122 bp, Homo sapiens
ctgccaggagctttctggacgacccaaagccccgcgcggagggcaggtcatgctggttggcgccactgcagcagacaccttggggagaagtccgcgaaatgaagaacgggccaagataagcc

SEQ ID NO: 219367 - DNA, 122 bp, Homo sapiens
agtctgcctcagcacctagaacaggccctggataccgatgtggggtcctacaggaagcttcgaagtagcttgtggtcccagctccaaaggcccctgcggccagaacagccctgtgctccccc

SEQ ID NO: 219368 - DNA, 122 bp, Homo sapiens
ccctgaacctttcccagctgggcttacttggccctgcctgcaattcctcctgcccaccgacggccactcccacctgcattccagttccctgcaggctccaggacgaggggcccaccttgctc

SEQ ID NO: 219369 - DNA, 122 bp, Homo sapiens
cagaataagccaatgccattcctcatttggcctgagcagctcagagtcaggaagtcagagcgcaggtgagtgtgtgtgctcttacctgtgtatgttacctgtctgtgtgccttggggaggag

SEQ ID NO: 219370 - DNA, 122 bp, Homo sapiens
gctgttggttcccagaacagttgttgagaacatgtgaaaaccatctcatgtgtgacttgacgcagagtcggttcacaacaaatgacattattatgtaaactaatgaacaaagatagttttgt

SEQ ID NO: 219371 - DNA, 122 bp, Homo sapiens
ctacacaagtgctggccagcaacgactgcaagcctcagagcgttattttgccgcagcctacgcaggcgcagtcagtctttgcattgtggtggccacgccccactcctcgtcttccatgcttt

SEQ ID NO: 219372 - DNA, 122 bp, Homo sapiens
gacagttcacggacctgggcagggggatgggagggaagacctccaaagggcccttctgcacgatggaatctgcaactccaagatgcacagaagtaaaacaagttcattaataccatggaccc

SEQ ID NO: 219373 - DNA, 122 bp, Homo sapiens
cagagcggtactggcttttaaagggaaaggccttcatttcttcgtttatccccccagcagcgctggagagcgaggtggcttcaataagcctggtggtaagtttttgagtattaccatagata

SEQ ID NO: 219374 - DNA, 122 bp, Homo sapiens
agagagggtggggaggggggcagcgggagaatgcaccatgaaaggcctctcgctgcccagcgaccagccggagacacaagaggcccatgagtggctgggggaggggaggggaggggagggga

SEQ ID NO: 219375 - DNA, 122 bp, Homo sapiens
tcaggtcaggatctggcagaggaggtttctcagccggttatgttggggcctgcttaagggcgggggtgagaaaggtccccaggctactgtggatcctgtgtctgacttcagatccccttttc

SEQ ID NO: 219376 - DNA, 122 bp, Homo sapiens
gctgtgtatgacagggacacactaaatacaaatttatacctaaagataacaatagaagaacgggcacagtgggatacaaaagaaaaaaagggagagagaaaaaggaaggagagaggtaagaa

SEQ ID NO: 219377 - DNA, 122 bp, Homo sapiens
catgatgacgctcttacccatctcaatgcccacctctcccacggggcaggacggtggtgtcgctgaacttccacgatccgcggcttctgctggaactccacagaacctgacccaggagatcc

SEQ ID NO: 219378 - DNA, 122 bp, Homo sapiens
taatggttatgtcagtagccccagtgacataatttatcgtgtctatattcggtcactgttcgggacagttcccactactggggaatggttcccactggatggatcatagcctgagtggagag

SEQ ID NO: 219379 - DNA, 122 bp, Homo sapiens
ggtcagtacctggaagattccataaagtcggggtgcttgagggcgtagggccgagaccgtcgcgggtactgaggcgcctccgtcgtctctcccactcgccgcccgctttccaagacatatgt

SEQ ID NO: 219380 - DNA, 122 bp, Homo sapiens
gtgcgcccctaccgccctggggcagtgggtcccatctactaattgcaaggacggcgacctcgaaaggatgatcttgctgatccgacacttggaagcccccgcggggcccggctctcggtgtg

SEQ ID NO: 219381 - DNA, 122 bp, Homo sapiens
cgggtaaacaaatgaactgggtgactgaggctggataactggccacggcctcccgctgaccgtggcctgttggactgttcttttcggcagttccgggtgctcttcgccaacctggcagctct

SEQ ID NO: 219382 - DNA, 122 bp, Homo sapiens
caacgtcacataggagattgcggctctgagaactcccgaggccccgaccaccctctgcgccgagcatctactgcgcgccgtgctctgtatgatcctgccaggaaggtgctcacaggagccca

SEQ ID NO: 219383 - DNA, 122 bp, Homo sapiens
tcccagctggggtccaggcagttctgagtacccccgaccccagcatcagttgaaaagggccgcggcctgggctctggcctaagcgcgcagcctctgtccgctgctctttcagagccaggccc

SEQ ID NO: 219384 - DNA, 122 bp, Homo sapiens
ccacccaagcccgcgcgggtcaggggcgcggctcggtctcctgccttcgccgctgggtcacgccccagtggtccctgtcttagagggttggggggcttcttgtaggttagagttgaagactc

SEQ ID NO: 219385 - DNA, 122 bp, Homo sapiens
aactgtcagacagcgctgctccgaatcccatcacagtgctccagcagggggcgtcctcaccggccgcggccacagccacggctcaacccggcctagctcccagacaccctccttccaccgcc

SEQ ID NO: 219386 - DNA, 122 bp, Homo sapiens
cctctgtggtgactctgagcctacaggtcttgctgctgctgccactcctgggctgtcaggcgacgcctgagccctggagcctgtgactcttgccagcctgagcagtgcttgctccctgcggc

SEQ ID NO: 219387 - DNA, 122 bp, Homo sapiens
ctgcaaaactccggaaaattaacaatcaagtcttgtgagatgatgcaaacagaaactactcgaagcccatatgtcattgctgtaggaaaagcaggcagattttcacctgcaagcatttccct

SEQ ID NO: 219388 - DNA, 122 bp, Homo sapiens
cctggcggaggggatgggggcgctgtgagctggaggcggtacaggtgttagcggctgtcacgtggagccgggcagccgggaaaaggattgaagaatccactcctgaggaatgctgccttcac

SEQ ID NO: 219389 - DNA, 122 bp, Homo sapiens
ttcttcagctattacatctggtttgtttgtggcagacagggggaaccgagtggggaagcgcgtgttatactccggccgaaagctgtggggcgctcagtcctgcgtccagtggttaaattggt

SEQ ID NO: 219390 - DNA, 122 bp, Homo sapiens
ctgtgcgcccaggtccagatccttgggggacggggcgggccccggcgggtacggggttggcgcggagggcagcaggtctctggggcccgccttccggacccgccgccagcggcgcttccgtc

SEQ ID NO: 219391 - DNA, 122 bp, Homo sapiens
ggcgcgaagatcgcttgagccgaggagttagagaccaacttgggcaacgtaggagacctccgtctccacaagtaaaattaattagccggctgtggtggcgcgcacctgtggtcccagctact

SEQ ID NO: 219392 - DNA, 122 bp, Homo sapiens
agagcgtgaagcaccacaagagacctggcccaggatgcgtagggccatgggtccgcaccccgcccactctgcccacccccagctcaatcttggcactgcctgcgaggaccctgccttgctcc

SEQ ID NO: 219393 - DNA, 122 bp, Homo sapiens
cattcattcgcacgctcattccactcctccccacctccacccaagcgtccagcccgcgcgcgccgctcccccgcaggctgatcagacttgcctgcccagtccgcccccgcccaaaccccgcc

SEQ ID NO: 219394 - DNA, 122 bp, Homo sapiens
ccctcctgaggccatcggataaacatggacagactggggattagggaggggagtcccagccgcagcactcagaggcttattgctttctgaatcactcagtcctgagggtaggggcgggggac

SEQ ID NO: 219395 - DNA, 122 bp, Homo sapiens
gctctgggcaggccccaggcggtgccggtatgggagatgtccatttagtcacgcccccaccggcgcctgcctgcccctgtcccgcctggcccccaccggccccattcgatgttcaccgcgcc

SEQ ID NO: 219396 - DNA, 122 bp, Homo sapiens
gcatgtgggaaaatgcaagaacacagaaggcagagtgtggaaactgacggtcacggccaccgttcccgcctcccagccctgcccagagcagcggcttagggtcacggccaccattcctgcct

SEQ ID NO: 219397 - DNA, 122 bp, Homo sapiens
tagtacattcacaatccccccaccccgcctttttttttctgagatggagtcttgctctgtcgcacatgctggggtggaattgcatgatcttggctcactgcaaactccgcttcctgggttca

SEQ ID NO: 219398 - DNA, 122 bp, Homo sapiens
gaacgtacgaccggaagtgacggggtccagaaatttccgctttctttctgcagcaggaaccgcggctgctggacaagaggggtgcggtggatactgacctttgctccggcctcgtgtaggtg

SEQ ID NO: 219399 - DNA, 122 bp, Homo sapiens
gggttcagtgggcgagcgtgtgggcgggtgtcccagaagcggtgtgaggagcgttttacccggtggtggggtgggaggtgcgtccgggtaactaatggcaaccgggcggggtgagcccgctc

SEQ ID NO: 219400 - DNA, 122 bp, Homo sapiens
tgttattccccaatcaaaacaacaacaaagagttttggggtttggggttttgtttttgttcgtaaaattggaaggtattgttacaaggagcagactagatagtgtgaaggctagtcaccttg

SEQ ID NO: 219401 - DNA, 122 bp, Homo sapiens
gagaggccgggtctgaactcaggccctgctcttagccggctactatctcgtctccatcggcgactcaggctcctggcgctttcaacacaatggtattccaagacttctcgcagcagttcttc

SEQ ID NO: 219402 - DNA, 122 bp, Homo sapiens
gcttgcagggcttgctttcgagggacgcgacacacgaccgtgggctctcgctcccgggcacggaggcaccaagctgcctggctcacctgggtccatctccaccaaggccttccacgcctcca

SEQ ID NO: 219403 - DNA, 122 bp, Homo sapiens
agttccctttcaaggcactgatcttctgccttccaccctatattcattttgcaggcctcacgggggttgtgctgctcctgatcctggccatcatgtatgtctttgcctcccaccacttccgc

SEQ ID NO: 219404 - DNA, 122 bp, Homo sapiens
tactaggaccttgaggccaacactgactagggggcctcatgcctgcccaggttccagccccggagagcaatgtgagcaaagcttgctgtctttgcaaagccaaccactgtggcatcaactcc

SEQ ID NO: 219405 - DNA, 122 bp, Homo sapiens
cttttggtttcacagtgtaataatccgatgaccaaagagccgaaactggaagcagctgtgcggattgtcccggagtggcaggactacgaccaagagatcaaacagctacagatccgctttca

SEQ ID NO: 219406 - DNA, 122 bp, Homo sapiens
agcctcagtttccttctgtgtaaatggagtaattagcaggtttcacagagggtgtgaatacgttttagtaccgtgcctgacacctagttctgaataaagaaaaacttgatcgtaatttaact

SEQ ID NO: 219407 - DNA, 122 bp, Homo sapiens
cacttccgtgtcccggaagtatacctctgaggtcacggggcgaggtcgggttccggaagacgccggcattattcctcccaaagagtttaagactcgtcataaggaaagacggtttattactt

SEQ ID NO: 219408 - DNA, 122 bp, Homo sapiens
tgtccgttttgacagaaacctttgcgcaggcgcagaaaggcacaggactcgctaagtgttcgctacgcggggctaccggatcggtcggaaatggtgagcgtgcgccggggtcttgtggctgg

SEQ ID NO: 219409 - DNA, 122 bp, Homo sapiens
attcactgtctatgccccaaagcccattaggtaggcagtgccgctatgctgagcacagtgcgacttctcagcaaatccttgttgacaaactgacataggctgtgctaaggtcccctcctact

SEQ ID NO: 219410 - DNA, 122 bp, Homo sapiens
agcaccgcggacagcgcccagatggccagcacagcgtaggcgctgaggcgcagcgagatgcgccgcctcagcgggtgcaccagcacgacgtagcggtccactgcgatggtggtgagcgtgaa

SEQ ID NO: 219411 - DNA, 122 bp, Homo sapiens
ctggcagcggcggggctgattgatgggcgcccggcgcaatgaggggggcccgggcgggggcggggcggggccggctctgggctgagccagtcgcgggggcggcggggggggggcggaggctc

SEQ ID NO: 219412 - DNA, 122 bp, Homo sapiens
gaagtgggaaggaaaattccccgtccttgtgtggctcaggcttccaggctcagggtgcagcgtgggagctgggattcgttttagagacaggcctgatggtgggtccgagcctgagacaggga

SEQ ID NO: 219413 - DNA, 122 bp, Homo sapiens
tgagctgcgctcaaaggaccagcctggactgctatgctgtctcactcccaacccaagctccgcccaactgtgggtccttgcactttggcacctttgagcgcggactcaaaacaggccagaag

SEQ ID NO: 219414 - DNA, 122 bp, Homo sapiens
gaagctcagatgccctcttgtggccgcggccccctcgcacgtcgccctgcgcccggggaccggaatccccgacaaggggtggtcagctcagcggcagcactggaccctctacctgcccccgc

SEQ ID NO: 219415 - DNA, 122 bp, Homo sapiens
agatgctaatcctacaggaaacttccagagacaagcagaaaagtaactgactcacctggtcgtgtactgtgctgtgaggatgcttatttctaaaatgcagattgcaactgcaaagctccggc

SEQ ID NO: 219416 - DNA, 122 bp, Homo sapiens
ccccatttgtggagggatattacattgcctgaggaccccaggcagcctccctgacggccacgcattggggctgcatcaggcatttcaggacgtgggcgattgtccagttaacgttttgtttt

SEQ ID NO: 219417 - DNA, 122 bp, Homo sapiens
cctaaccagtcctgccctggtcataccaagctctgtctcctgagtcccctgcggcttaagcggtgggggactgggggtggcccagcctaaggagtcctgccctggatggtccagagctagca

SEQ ID NO: 219418 - DNA, 122 bp, Homo sapiens
caaggaggaaagggaggaacccacaaatgtaatttcagcaacagttcccttaacaacgcccgcagatggatgaatttccgcacagtctggttctctgttccttttctgttcctgaagagaaa

SEQ ID NO: 219419 - DNA, 122 bp, Homo sapiens
ggcccgccctgcagtgggctgcgggagctggtgtctctgagacaggcacagccctgccaccgagaggaggacaggagagcagcgccgtcccgggcccatcctagatgggacggatgggactg

SEQ ID NO: 219420 - DNA, 122 bp, Homo sapiens
tcctcctggagagtgccaactcattctccaagtaaaaaaagccagatttgtggctcacttcgtggggaaatgtgtccagcgcaccaacgcaggcgagggactgggggaggagggaagtgccc

SEQ ID NO: 219421 - DNA, 122 bp, Homo sapiens
cgcctgctctgcctgccgggtgttcagctcttccctgggccagcggcatagccagccgcgcggggtgaccgttcattccatgagcagtgacgctcacgtgtgcagggcactctgggcagaca

SEQ ID NO: 219422 - DNA, 122 bp, Homo sapiens
aatgttaaatgcgcacatttgttaggaaaatgggctgggtgggagacggaaggctttggccgccatcctagggcattcctgtgcattgcgatggtcagcatttctgtatctaaacatcgaaa

SEQ ID NO: 219423 - DNA, 122 bp, Homo sapiens
tgagcccggagggcgtgggtagggggcgttgcaccagtgcccggcagacatgcctttgggcgggattttggctaaaagataggagacaggtgcgccgggggtgcggggagcggtcccagggg

SEQ ID NO: 219424 - DNA, 122 bp, Homo sapiens
ctgtgtgacctcaggaggggtgctacctctctgtgcctcagctccctcctcggggtggctcggggctgggtttctaaggtgccctcagccctcccgcgccggccgcagagtcagtcccggtg

SEQ ID NO: 219425 - DNA, 122 bp, Homo sapiens
tgtggaccagtgcgatgctgcttgccagatactgacgcccccgctcgccatggcgcatggcgatggtcagagcagggctgctactcacagaagcaaaagaaggaacccttttgctttgctac

SEQ ID NO: 219426 - DNA, 122 bp, Homo sapiens
cagaggcttctgccaaggagaccccacctccagaacctgggccaggcctttggctgggagcgctggtgctgttcttcatccgagaggaaaggctagagattccctccctactccacacgagg

SEQ ID NO: 219427 - DNA, 122 bp, Homo sapiens
tccttgtcctgccaccaaatggcagcttctccatttccgtgcctcagaagtaagtcagcacgccagccagtaagcaccccatctcgtccacagtttgggatactcgtgagaacaagcgtgta

SEQ ID NO: 219428 - DNA, 122 bp, Homo sapiens
gaacatttctcagtttcagagtgctggccacaccaaagcatcagccctggctctaaactccgttacagtaaggaattacaaatcctgtgtttgtactccaggaagtctgcattatcacgagg

SEQ ID NO: 219429 - DNA, 122 bp, Homo sapiens
ccaaactcgcgtggccggcagtcaaaaccccgggtaggtgcagaatctcgagtaggtgcacgtggtacctacctcgagacccgccccctcatcacggaattgcctgagaaagccagtcctgg

SEQ ID NO: 219430 - DNA, 122 bp, Homo sapiens
cacgtacatcccggagggaggcagatgacgcctgtttgcaaacaagctttggcttccacgcgtcccataccgagtccctcagaatcccggttgtggcggggaaagggggaggagaggaaggc

SEQ ID NO: 219431 - DNA, 122 bp, Homo sapiens
tactcaacaaaagataactgttggcactgtgttagggacgctttgagtcctctgtctcctcggccagatctggaaagtccagaaagtcttcccccaggtggcttctctagcccagggccagg

SEQ ID NO: 219432 - DNA, 122 bp, Homo sapiens
ccccaaaaccaggcccccttggcacatgtgggcccgagtgagtccagcatgaggaggtgccgcttctgagcagagctcaggttgtctctgggaggaggagcgagcgttgggtgcggtggccg

SEQ ID NO: 219433 - DNA, 122 bp, Homo sapiens
ttataaatccatatccatttctgacgttgaaccatttgacagtgccaaggactttggtggcgagaacttttttctccgcgtcttcgctgtcggcggcggtggctaaagaggcggcggccgcg

SEQ ID NO: 219434 - DNA, 122 bp, Homo sapiens
tcagtaagacacagagtctctaaagaccttccttggtagaccacatttgtcgtcacagctcgttgctggaggaattaagcatgccctatatgactccgctgggagaggattcttggaagctt

SEQ ID NO: 219435 - DNA, 122 bp, Homo sapiens
gccaccgggccggccaaaatcccttcttgaccaatgatgacactaagatgtgggaggccacgcccatgttgagccctggggtttgcttattgagggtccaggtaaatcaaccatctcaaacc

SEQ ID NO: 219436 - DNA, 122 bp, Homo sapiens
atgggatgtgagcaactcgctgcacatttctctgattctccaggtcttggtcggctgacacgcattcgatcaagtttaaaggaatgcgcataaatcagcaagcccctagcgtctccttggga

SEQ ID NO: 219437 - DNA, 122 bp, Homo sapiens
agcaaagggtcaatgccctgcagatcgtgatgagctggcaggcagaggcagacagagcgccgagggcgagccttctgaatgggtaaggcaaagagagccgcctgctgaggggaagggggagg

SEQ ID NO: 219438 - DNA, 122 bp, Homo sapiens
caggcccttgtgcactgctgtatcacttaatcctccttcaccaggaggcagagagggtagcgtttgcagatggggacacaagctctggagaggttaatgacttgccggagatgggagttcca

SEQ ID NO: 219439 - DNA, 122 bp, Homo sapiens
gtgtcctccagaggctgaggagcggagcagcaccggacggctcggaccctgggaaacgaacgccagactgagcgtgggggtgaggagagccccgtgccaggagtgagggcaacacggacctg

SEQ ID NO: 219440 - DNA, 122 bp, Homo sapiens
gccagcctcacaataaccaggggaggtaggtgttctgaccatggcggacacagtgcgtcccggctggagctactcggcgctgtggacgcgctggtgctgaatgagcttggtgctctggtgga

SEQ ID NO: 219441 - DNA, 122 bp, Homo sapiens
agtgtttgtcagtttccgtggtgtaaatactcccaccacggctgacttcaagctagcaaccggaggtcactgaactaagagttgggaagagatagggcacaatatatgcttacgagttggta

SEQ ID NO: 219442 - DNA, 122 bp, Homo sapiens
agtttgtgggctccgcccccacccgccggaccaagcgcacacggcggccccagcccctcacgtagtctgggaggcagggggcagcagcccctgggccgcctccccacccctttcccttctta

SEQ ID NO: 219443 - DNA, 122 bp, Homo sapiens
tccctctgatgcagatggctccgaagtttgcatcctattaggttggtgcaaaagtaattgcggattttgccattaaaagtaatggcaaaaacagcaattatttttgtagcagcctagtatct

SEQ ID NO: 219444 - DNA, 122 bp, Homo sapiens
tacccctgcccaccggcgcggctcgtacgtagatgatgtgccggctggagttctggtcgtcgttccagatgaagaggtcgatgaggacgcgcctgttgaactgtgagttcatcagcgccagc

SEQ ID NO: 219445 - DNA, 122 bp, Homo sapiens
agcatcccttgcacggcgggcgcgtgcacccaggccaccggggccctgagcgtccgttcccgcaagtgctgtatcaggaactgatcttagagacaggatggacaggcaggaaggggcacggg

SEQ ID NO: 219446 - DNA, 122 bp, Homo sapiens
aacagtacccagacagggaagtgaacaaccctatagtatagtgaccggatttagcagggccggatcgccaccatctttaggaaagtcaggttaaaggaacataggagcggtgaagtctcgtg

SEQ ID NO: 219447 - DNA, 122 bp, Homo sapiens
caccaactagatgggtttctctagacgcctttcaccaggtgctctctccttactggacagcggggtggactctggagagtggacctgcccccacctggattctccctagtatcctccgaccg

SEQ ID NO: 219448 - DNA, 122 bp, Homo sapiens
ccaggtgcgccggagacgcaggcttgctcatttccgtcctgacacagctcgctgttcctgcggtggtcagagtccccctgtgctgtgtcagctcctggacactactagtctttcacatgata

SEQ ID NO: 219449 - DNA, 122 bp, Homo sapiens
gcctgtggcctggagcgctgacagcgcctgcccctctgctctctctgcagcctggagcaccgtcgtgggtctgctgtaccacagcatgcactactacctgaacaacatctggcccgcccaca

SEQ ID NO: 219450 - DNA, 122 bp, Homo sapiens
gaaatctctgtttctagagatttgcttactctggacatttcaaataaatcatactatatgcggcctttatatggcctctttcatttagcataatgtctttaacttttgtcttttttatggct

SEQ ID NO: 219451 - DNA, 122 bp, Homo sapiens
atgtggccgtgatggtcgtatctgaagtgtgaatacttccccgcgctatcttctaacctgcgctgtctcagcttagtgtgaacgtacggaccgttctcaaatcctggtgaagtcactggcag

SEQ ID NO: 219452 - DNA, 122 bp, Homo sapiens
taagccatagggaagcctcaggtcactgcctgctgggaaaaaacaatggaagcaggaggacgatttgtaggactttacagtgctggtcttgcagaggcatcacttccaaggtcaaggaaggc

SEQ ID NO: 219453 - DNA, 122 bp, Homo sapiens
ggcagaggatccaggttggggggttggccgccagatggcgctcctcggccaggctggaaccggaggcccttgagaactcgcgttggagagggacctggaccctcccccgttacccatctgtg

SEQ ID NO: 219454 - DNA, 122 bp, Homo sapiens
tgccgcgctcgggcagacgcagctggaagcgcagcgcagggctggcttatactcccgcagcgcgcggcgggggttggcagaacggccagggcatagactcagtgggtgaataagggtcttaa

SEQ ID NO: 219455 - DNA, 122 bp, Homo sapiens
gctgagtcagtgcccctgccgagagcccagaagcttcattactgtatctggcaggtggttcggagacaggtggtggctgcacgtagggaggagcccgttggggaggaaaaatggccccgact

SEQ ID NO: 219456 - DNA, 122 bp, Homo sapiens
ctctaagttctcctctcctcccctccccggggccccgcccaccacctgctctttcctcaccgtcccattggtggatctacataagagactcacgaagacgttcacactgcagtgttaactgc

SEQ ID NO: 219457 - DNA, 122 bp, Homo sapiens
tcttgctgatatcattcgtgctattataaatcaaacagcaacagggcatgattaaacacacggagcctgaccacacgtgggcacaatcaaggtctcttattccctccgtgacattcatgtcc

SEQ ID NO: 219458 - DNA, 122 bp, Homo sapiens
tctgagcttttgggggaaacctgtagctccccgaatgccatccacagagcccccctcagtcggcctcccctgaggcaccaaggctggcggaagcagtcacctgtccatctcccccacttctc

SEQ ID NO: 219459 - DNA, 122 bp, Homo sapiens
gtttttgtcttcttggagctggtcctgtcagcctcctccgtatcagaggccaccttctcccgctggcgtttgttactcttaagaggggaagaggcttcctccttcaccttctgcaggggaaa

SEQ ID NO: 219460 - DNA, 122 bp, Homo sapiens
cgcggggcccgggaacgccgagtgcgcgccgtcggggaggcgggaacgcgggcccgcgcgcggactttgcactttgaatccagaggaagatgaatttttaaaatctccatcaaacgtgcctt

SEQ ID NO: 219461 - DNA, 122 bp, Homo sapiens
accccagtgtgacctctgcagggagacaccgcgagggctcctccgtggcactggatgaggcgacaggctcagctccaccgacacgcccattcaggcgtgtgttttctgctgataacctaggg

SEQ ID NO: 219462 - DNA, 122 bp, Homo sapiens
gcatgcggagttctttatcttcagtgagaatgtgcctgcccgcctgagagccagcttccgcgttggaggcacgtgttcagagagctgctgagcgccaccctctacccggctgacagacaaca

SEQ ID NO: 219463 - DNA, 122 bp, Homo sapiens
ccctggcagaggatggccaacagagactcagcaagtcctcactcccctcccagaaggagacgctgcctgggaggacccactgttctccccttgaggaaaatccatgcagggtgctatgggcc

SEQ ID NO: 219464 - DNA, 122 bp, Homo sapiens
tcttggctcatagatgtgtcaccttgatctttgccttcatgtcacatggtgtcctctctccgtgtgtgtgttcacgtatccaaatttcccctttcaataaggatgccagtcatattgggctg

SEQ ID NO: 219465 - DNA, 122 bp, Homo sapiens
tgtgaccttgcatctgcttcagcctgaaggtcctggggcagctggggagcaaggtgctggcgtgacgctcctgagagctgatgcagctgccttgcatagtaagaactcatgcatactctggg

SEQ ID NO: 219466 - DNA, 122 bp, Homo sapiens
gcgagactctgtctcaaaaaaaaaaaaaaaaaaagttcaggtttctcatgtgttggagcacggagcccttgaccagtgaagaggcaaggccagggctgagcctaagtcacaggcagaaaaaa

SEQ ID NO: 219467 - DNA, 122 bp, Homo sapiens
tgccgggaggcagaaaaagtgaaaagtgtcaagtatccagggacaacagtgcagccgccccgggttagccactccaaggaggtccacccgtgcattctgccagccgtggcctcggcctcctc

SEQ ID NO: 219468 - DNA, 122 bp, Homo sapiens
ttctgaccctcagatgcaaggtgcccgcagcagtcctcacgtcaacaccaacgactgccccgtaccgccccggtctgttcctcacatcaacaccaacgaccaccccggaccgccccagtctg

SEQ ID NO: 219469 - DNA, 122 bp, Homo sapiens
gggcggggcgagtggagggcgtggcctgccgaggggcgaggcgagtggagggcggggccgcgctgcccgccccgccccggccccggccccggctccggcgctgctcccaccgccgcggcaac

SEQ ID NO: 219470 - DNA, 122 bp, Homo sapiens
gatggcgtcaggcagtgagcagccacgagggcaggaggcatcgttagcgctgccccttcacgtcaccctggaacccaggccctgcagcaggggaccccaaggcccactcgggcgcatgacag

SEQ ID NO: 219471 - DNA, 122 bp, Homo sapiens
ccctctgggttatcattgagcacgtagtccttgcacaggtaacagaacacgtagagatcccggacttccatggctagcgggtgtcccgtctcctcaaagtgtttcagggcgtggtcctcaat

SEQ ID NO: 219472 - DNA, 122 bp, Homo sapiens
tgaggctctcgcagcgcagggctgcgtggtagtttgtgtggacagcacggcccatgccctcgatgaccaccagatccgcgccacgctcccgcaccagtgcggccagccccttatccaggcgg

SEQ ID NO: 219473 - DNA, 122 bp, Homo sapiens
agtgaacattcttgaaccaaagtatttgaacacgtctgcaagaatgtctattggataggccgggcgcggtagctcaagcctgtaatcccagcaagttgggaggccgacgcgggcggatcatg

SEQ ID NO: 219474 - DNA, 122 bp, Homo sapiens
cacttcctctggcgagcgcagccgggcggaagtgcgtcagttgttatctgttcggggcgccgccgccgcctcacgagcccggtgcccaggagcccggccgcctcccgcctgccgcctgccgc

SEQ ID NO: 219475 - DNA, 122 bp, Homo sapiens
ggcaacagcagcagctgccgctcccaggccagccacacagtcatgagggtgaaccgcccgcgctctgcagcgcactgtgtggccagacggtgttgcctgactgtaagatttccgaggacatc

SEQ ID NO: 219476 - DNA, 122 bp, Homo sapiens
gctcttctttaaaccctcccaacaaactaatgcgggatgggagtgtaaatgcagttttgccgaagaggggacccagacctggttcaggcttgcccaaggtctcacggaagcactgggatctt

SEQ ID NO: 219477 - DNA, 122 bp, Homo sapiens
cctccaattacccattcccggtcctctaagccggtcactgagcagctccataagaaagtacgggaacctggaagggcctgccttcccttcgggagcattcatatactgaggttatatatata

SEQ ID NO: 219478 - DNA, 122 bp, Homo sapiens
agcactcggacagagcagtgccccttctagtgcgccacccacatgggtgcctaagacgcccgagcccctgtgacagcacaatgccactccacgcccctgcagggccccctgcccccggcacc

SEQ ID NO: 219479 - DNA, 122 bp, Homo sapiens
gcaagaatcgggaggaaactgggtgaaaggctgcgaggcttgaggcgggtcccggacgaacgcggccctgcccctcgccggagcctctcgggagaagtgcgacaccgccgctgattgagagg

SEQ ID NO: 219480 - DNA, 122 bp, Homo sapiens
tgtctgtgggtagggcctggctgtaagtgtctaacgagctcctcgggtgatcgtgttctgcggctggacctggcaggccctgagaatgagagagagagagagagagagagagagagagagac

SEQ ID NO: 219481 - DNA, 122 bp, Homo sapiens
ggagctccttaaatgcaggcactgtgcccaactcacctttgtagccgtcagagtgcccagcgcagttctctacacaaaaaagatgtttatcaagtgtctaggaaaatgtttaaataaagccc

SEQ ID NO: 219482 - DNA, 122 bp, Homo sapiens
atgagtgaagtgaaaaggaaagggggtggtatttccgttataaaatgagaaaactaaggccgagagtggaagagactgggtcccaccactcaatgagtgcttctcaactcgggaccctaacc

SEQ ID NO: 219483 - DNA, 122 bp, Homo sapiens
gactctgcctgagcggaacagggctgggcaggttctgcccagaacacaaacactgtgaagcggctagaattccaggtgctggctggggcgcccatggggggtggggcctgagagccgactga

SEQ ID NO: 219484 - DNA, 122 bp, Homo sapiens
gagtgggcgccattgccggatccggaacccgcctgagggtcttcacggggtctgagtgggcgccattgccggatccggaaccccgcctgagggtcttcacagcatctgagtgggcgccattg

SEQ ID NO: 219485 - DNA, 122 bp, Homo sapiens
tgcctcctccgcgggctgtgggtttgccgtggggtggctgctgctggatccccgagggtccgcatctgaaatgaagctgctgtgaaatagccagcaaggtgaaggagccttgtgtcctttca

SEQ ID NO: 219486 - DNA, 122 bp, Homo sapiens
ctctgccactgtcttcgaggacctgcaggtccagcccctccttgcaggtatacagacagtcgatcaccttcttatccgcgagtttcccggaacggagagttaagccagccagattgcctcgg

SEQ ID NO: 219487 - DNA, 122 bp, Homo sapiens
tgcacccaggtctcctctctgccctacctttagtgcgtgcctgtgtgcgctggtccccgtcggcctctgaagggcaggtccagccagcacggcgcgtggacaccactctctgtgtcctgggt

SEQ ID NO: 219488 - DNA, 122 bp, Homo sapiens
accctgccccaaggagaagacgccttagaacgctaccagagttaaaaatgttttctcctgcgcttcagagcacttgggatgaggttcctgatgggtcttgggagtgaactaagatgtcactc

SEQ ID NO: 219489 - DNA, 122 bp, Homo sapiens
ctgaggggacaccctccccacagctgtggtcctcacctctgctcctcgccctccagcaggcgcctgtaggtggcgatctcaaagtccaggccagcttggagttcatcacctcctggtactcc

SEQ ID NO: 219490 - DNA, 122 bp, Homo sapiens
gtctcctataaaatccgtacgtttctttttatctggctgtgttcctgcgtgcaggcacggcgcgagggatcaactacccccggccctgacggcaaaggcgctgcagagccagtttactaaaa

SEQ ID NO: 219491 - DNA, 122 bp, Homo sapiens
tgtccccgccctcaggccaccgctacgcgaccctgagtgcaccttcaagaaggccgggcacgtttctgggcgggcgtggggggtgcctgatatctccgctctattttacagttactcccctg

SEQ ID NO: 219492 - DNA, 122 bp, Homo sapiens
tattggttggtaaattctttattgcatttaaaccccacaacaaacctacaatgtggatatcgttatccccattctgcagccaaagaaactgatgttcagagagattaagtgacaagcccaca

SEQ ID NO: 219493 - DNA, 122 bp, Homo sapiens
tttccttctggaggctctaggggagcacgcgcttcctcaccttttccggtttctagaggccgggcatccttggctgtggccccttcctcctgcacatcgcgtctctggctctccatctctct

SEQ ID NO: 219494 - DNA, 122 bp, Homo sapiens
cgtttgcgtttagaatggctgagccccgcgcgcactgcctcagcctggcctgccagcccccgagcctgggcccagcttgacgctgcagcgctattcatcgactccccggcagggggagccgc

SEQ ID NO: 219495 - DNA, 122 bp, Homo sapiens
gaaatggccttgaggcaatggcttaaatgattttttaaatctgtttttctctcatgtgagcgtctagaccgggaggcggccagaagtggccggcagctgtagagagagttttcctgggacac

SEQ ID NO: 219496 - DNA, 122 bp, Homo sapiens
tgattcccagcctctatttacctctccagtcactccatgacttaaatatttatagaacttcgtgttctaagtcaacagtcacctgatcattccacttttaagaccatttcctctattttggc

SEQ ID NO: 219497 - DNA, 122 bp, Homo sapiens
ggccgcctcggggtctgggcccagccgcagcctcttctaccgcggccggttgggagtcgccgcgagatgcagcctccgggcccgcccccggcctatgcccccactaacggggacttcacctt

SEQ ID NO: 219498 - DNA, 122 bp, Homo sapiens
gggcgcagactgcttgggtcagtgaggcaacaccttgctgggcgttgttagtttctgcctcgcgcccgcagggttagacggggcttggggtgggtttcgtaagcatcccgccacctcccatt

SEQ ID NO: 219499 - DNA, 122 bp, Homo sapiens
ccccacagggttagcaaagacgcaagagggcgtgaagccacgcggtcgcacacctggtaccgcgcacagtgagaaaggagggcaagtgcgctgagacccaggagggagggcagccctcccct

SEQ ID NO: 219500 - DNA, 122 bp, Homo sapiens
aaagccttttggcagcatgttgcctgggcagagctgaagcctgaaagagctccagaaagacgacagggacgaggctgcagatgggaagggagtgctagcggacaccttaggcttgggtccac

SEQ ID NO: 219501 - DNA, 122 bp, Homo sapiens
caaaggactgaaggcttcgagcaaagtttagctggttaacaccatgatggacaggcttgccgtaagttacacccttcggaactggacgttttcagccaccacggcgaacacgaatcctacaa

SEQ ID NO: 219502 - DNA, 122 bp, Homo sapiens
gggtaactcaagtccttgagataatcacaatctagactttgtcggcgaggagcacccatccggaggagacgcagtaggtcctggcatgtggaaggcaaaaaataaatgtttgttcaatgcct

SEQ ID NO: 219503 - DNA, 122 bp, Homo sapiens
cgactgccgttcagcacctgcgtaagcacctctcggccagggtgaggccaatggagtaggcggggcattttgcgtgctacattctaagaagtattggttgtgatgtgatgggaagaacacag

SEQ ID NO: 219504 - DNA, 122 bp, Homo sapiens
gagcagagaagtttgagtaagagataaggaagagaggtgcccgagccgcgccgagtctgccgccgccgcagcgcctccgctccgccaactccgccggcttaaattggactcctagatccgcg

SEQ ID NO: 219505 - DNA, 122 bp, Homo sapiens
tagttctctggcctttacaaattcttaactaccacctttccgcagaagcaactgcaaaagcgccggctccgtgcagagaaaaggcccacgccgccggcctcacctacggtgccgcaaaatgc

SEQ ID NO: 219506 - DNA, 122 bp, Homo sapiens
ctgcactggagtcgacggtggagaagttacagacacgcagtgtgtgtgtcacctgcgggccgctaattagagcgccgctgacagcccagagatggggagctggagaggctgggcgcgggaga

SEQ ID NO: 219507 - DNA, 122 bp, Homo sapiens
ctctcacaacaggctcggaggctgaatccatttcagctcattttctagatcatctggtcccgcacccaaagcgtggaaaatacggtctttatcattcaccaactttatcttttttgtcactc

SEQ ID NO: 219508 - DNA, 122 bp, Homo sapiens
cagtggtgccggctgaactggggcctgcggcggaagcagcactctctgctgaagcgcctgcgcaaggccaagacggcggtgccgcccatggagaagccggaagtggtgaagactcacctgcg

SEQ ID NO: 219509 - DNA, 122 bp, Homo sapiens
gtacaaatgactgggaggcggggatgctgcctgtgtcctggtgaaccttaatgaaggggccgtcttaggcacagtgcaaaacaagcatttgtcctgtactgttagagccaaaattgtgatga

SEQ ID NO: 219510 - DNA, 122 bp, Homo sapiens
gaactaataagtcttggagcaagcaacactgatgcccctgcatcagaattgagaattccccgagcactatggcctgtggagtctgcctattgaagttgttttatctcctggtatatctctca

SEQ ID NO: 219511 - DNA, 122 bp, Homo sapiens
ccgcctgaaacgaacgcggtgccctaaagtgcgggctgcaggctctgccgcttgacgcggcgatgattgaaggtgctgcttttaggagagaatagaaagggccttctttcctttcccccggt

SEQ ID NO: 219512 - DNA, 122 bp, Homo sapiens
gccttgtctctgaacacacctgtgttgtccccgagcccctcaccaaccccctctgcaacccggcccacgcatttcccatcctgaagggtccagctcataggccggcccatgtgttcccttta

SEQ ID NO: 219513 - DNA, 122 bp, Homo sapiens
gggccccacgaggacgcaccaggaagtaatgaagtcacccgtgcctgtcaagaggcacggcgctaacagaaggctcccaggagcttaaccggatgctcatctggcaacaacggcaagaatca

SEQ ID NO: 219514 - DNA, 122 bp, Homo sapiens
caccgcgagtgtcgctgtcctccgagatgtcctcgtcttcatcaaagtgctggatgcggtcgctgcagcaggcctcagagctgcgctgggctgcagagtaaaacgccaaggtcagtttccag

SEQ ID NO: 219515 - DNA, 122 bp, Homo sapiens
gcgccaccaacagcgaccgcggtagtccagctcgcgccgcgtcccggccccagcccggcccggcccagccccgccccgcgcccagccccgccccgccccgcgcccagcccagcccccgcggc

SEQ ID NO: 219516 - DNA, 122 bp, Homo sapiens
ccatgttgtcgtgcatggaatgaaactggccacacataacagatatggtggcgctctggtcggatctaggggagtctgtcctacaggatgaggcttgaactgtcctgagtgaccagacaccc

SEQ ID NO: 219517 - DNA, 122 bp, Homo sapiens
tctgaaatgccttatcagtctctccacgatcatcctgctcggtctgatcatcgtgtaccacgccagggaaatacaggtaacttaggtcctgctgtttatgaatgacccaaagccctacagtc

SEQ ID NO: 219518 - DNA, 122 bp, Homo sapiens
tcccttcttatttggtgagaatcagatctactcggtaaacctcagccctagtcatacttgcgttactttcctgagctaatttccaactcctgattagctctgggtttatttccatgctaaat

SEQ ID NO: 219519 - DNA, 122 bp, Homo sapiens
cgccgggcaagcgtttgtaggcggcgctgccgtaaatcaggcggtctgcttgccgcatcacgcaagatggcggccgcggcggtgaacggggcggcaggcttctcgagctccgggcccgcggc

SEQ ID NO: 219520 - DNA, 122 bp, Homo sapiens
ggtaacagacttctctacatacccagggcacccagttcccctcggtaccctgggtcacaccgtcctgccatggatcctgggacatctttcacggcaggagcagtgttggactcacctctatg

SEQ ID NO: 219521 - DNA, 122 bp, Homo sapiens
ccggcggcgcgctcggagccagcagggcgggtaattggcggccggaggaggcgaacggcccggcccggcctccgctaatgagcgggcggagccgcggggagggcgcggcagggctccggcgc

SEQ ID NO: 219522 - DNA, 122 bp, Homo sapiens
cggaggagaggggagagaggagaacgcagaaattgggtgatcacggggagctcacctgagcgctcccgaggcttgggctctggtccctgctaatccccagagccgataaaaactggtcatag

SEQ ID NO: 219523 - DNA, 122 bp, Homo sapiens
ttctttccctttttcaaaattcaaatccctccagcagagcccttatattttggattcttacgagctaacccgggcttccaccctgactctcatcactaccacacccatgtgtctttcctctc

SEQ ID NO: 219524 - DNA, 122 bp, Homo sapiens
aacttcttggttctctgtcatgatgtagtccacagagaccttgattatcttgacctagcacgtaacaaagaagtagaaagtacttttagatgccttaataaaacatgaaataaaggatggga

SEQ ID NO: 219525 - DNA, 122 bp, Homo sapiens
gaaacggaacccgactctgcggtgctgggcccaaggcagccacagctccaaaggggcccccggccgtggccgtgacttgacagagcctccggtctaacttctgatcaattccactgctctcc

SEQ ID NO: 219526 - DNA, 122 bp, Homo sapiens
aggctcagggagggcgctcgccctcatggcttcatgttcacctgcaggaaaaagaaaaaccgtcaggcccttggccttcatggatggtagcctgactccctgagccctgggccaggctccca

SEQ ID NO: 219527 - DNA, 122 bp, Homo sapiens
ttgcgtgttagctggggctccggcccggagtggccccaaccccgaatccccgaacccgcacgccctgggtccgacacagcttccaccagccacgttacctgtagggtccaatggcccctggg

SEQ ID NO: 219528 - DNA, 122 bp, Homo sapiens
atacatcagttattaagtgtcctgttggctactacaggtcctggccaatgctcagagttgcgtgtggcctatgagcctcacgttgcggcgggcgcgcgtccccgcacatctgcaggacggcg

SEQ ID NO: 219529 - DNA, 122 bp, Homo sapiens
tgaaccaccgcaccctacccttcaacattgtttttcttttccaatattttggctatctgacgccccttgcgattccctatcaatttgaggatccgtttttctatttctgcaagaggaatgga

SEQ ID NO: 219530 - DNA, 122 bp, Homo sapiens
tcagcctgggcttagggccagtgactggggactctgccctgaagcaaggcagcctgaccccggtgtcactcctgtccccagaactggtagggaggttggccttcctcccctcctgctgcact

SEQ ID NO: 219531 - DNA, 122 bp, Homo sapiens
cgggagcccacgtgagggtcttcgaggaggtctgcgccacccgggtgcaacccgaggctacggttcatccaaacacacctcgccccatccggctggggaaggacttcctgcaagccctgagt

SEQ ID NO: 219532 - DNA, 122 bp, Homo sapiens
ctgcaacccgagcggctatgagacatctccctcgtggcaggtgcccgagctgtagccacgcggcctctggaaagagatgtgctaagtcccaggacttcagaagagctctgtgaccttggcca

SEQ ID NO: 219533 - DNA, 122 bp, Homo sapiens
aggttctctgccgggcaaggaagatcccatgggtttctggcaccttctgtgcagtgcccccgccatggggccgcccactccccggcaggtgccactggtggccggaggggaagggtcacagc

SEQ ID NO: 219534 - DNA, 122 bp, Homo sapiens
cacctgcccaggccagagaccgctctccgcgctagaagccacagcaaccccggctttcctcgcatggagcacagcagagctgctctggaaatgtggggtcacaccttcactgtcttctcggg

SEQ ID NO: 219535 - DNA, 122 bp, Homo sapiens
acctgcctcaggttaagtaggcagaccccgcgggcgggatggtcaaagatatttagttcccggtaccggagggctaggtgccaggggcaatggggaaacagccaaatggcgtgggttgagtg

SEQ ID NO: 219536 - DNA, 122 bp, Homo sapiens
tcccacctttctggtgtgagaatcaggacttgagtgagcctctgttactgatgtgtgtgtcgaatttctcaggtgccccaggaagtaaaatagttgggaatcactggcccagcatgtagtag

SEQ ID NO: 219537 - DNA, 122 bp, Homo sapiens
agttgtttcataacacacaaaataggctttttgagggcactgacataaattctcattgatcgtcacccccacgcggtgaaaaccacacgttacctggcatgttttccggtagttatttttag

SEQ ID NO: 219538 - DNA, 122 bp, Homo sapiens
tcttttccccatctccagctcccctcgacagtttggggaggggtctcgtctatcgcacctcgggaaacagccctttttgactccgtatgtgctacctccggcaggcgtcggtactgcttacc

SEQ ID NO: 219539 - DNA, 122 bp, Homo sapiens
ctgcctccaggagatacagtcttctgttctttttgtcatagttgtttatttttcatgaatcgctgtttttgagcatagggcacttacctctttctgtgtccccagccctaccacagtgccag

SEQ ID NO: 219540 - DNA, 122 bp, Homo sapiens
ggcgcacacatctatactctcacacaagaagacaaacctctccctcctctcctgctccagcgccaaccttgcccagccagcgctgtataaataacaccagccctgcggcaaacggctacatt

SEQ ID NO: 219541 - DNA, 122 bp, Homo sapiens
cctagaaaatggagctgtggggacggattcgtgagcttcaggcacacagtgaacactcagcgtccctgctgctgccgctgccgcaggcccccacacccccggctatttcacacacgctcatc

SEQ ID NO: 219542 - DNA, 122 bp, Homo sapiens
acatgttcacctcccttctcactcctaaaaacatgcctcatttttactacctttatttcccgtcccttctgtaaagaccaaagctgggaaaggaagcttaataatataagagaatcagagct

SEQ ID NO: 219543 - DNA, 122 bp, Homo sapiens
ttcccggcagctttccccagctttggcacctgtgggattggggaggagggtacaggatgacgggcaattcacaaaacatagacaggagagacacctgtttgagtctacattttagtccattt

SEQ ID NO: 219544 - DNA, 122 bp, Homo sapiens
acatgcgtctggatatggctggccccttgcaagctgagtgtgcacatacgggccaagtggcgattcataggacacaggtgtgagcgtgcctacagctgaccggatcccagctgtaaatgcct

SEQ ID NO: 219545 - DNA, 122 bp, Homo sapiens
gcaatgtcggcaaggccagctttggtggcaggagggaccgagatctgacccgcagcccctcgccggggagatgacagttccctaacaccggctagcagccaggcctcagggcccctgccagg

SEQ ID NO: 219546 - DNA, 122 bp, Homo sapiens
ctgttgcgcgggggcgagcaccaggcgctgggtgcacgggggcccgtgcgtgcctgtgtacgtgcgtgggtgtgcgcgcacgtgtgctcaggccgcgcgtgcaggggccgtgcgtgcgtttg

SEQ ID NO: 219547 - DNA, 122 bp, Homo sapiens
gtcaaccatttttacataagaccaaacacttacaacaatctactatgtcataaacacatacggtattttatctcacaaagcattaattttggcctttaaaaaactgatactaaagtaatgtg

SEQ ID NO: 219548 - DNA, 122 bp, Homo sapiens
tgaagcaaatgatagccgaagttgacttctcacacaagacctctggactaggccagtatacgattaggatccctgacatacttggtctcttacatgttgcttttgctatagtcttgttttac

SEQ ID NO: 219549 - DNA, 122 bp, Homo sapiens
gggtctaggatgagaataaaagcgaaaataattaattgcatagagcaagcttgtccaacccgaggcctgtggttgcatgcagcccaggagggctttgaatacggcccaacacaaatgcataa

SEQ ID NO: 219550 - DNA, 122 bp, Homo sapiens
caggtggctgtgcccacacacgcgaactacactttacagtttgccaagagttttccattgcgataccccgactgtgctcaaggtacactccagggtacaaggccaggctttccctatgatag

SEQ ID NO: 219551 - DNA, 122 bp, Homo sapiens
ggagataacctttctcggggaaacacttagaacggtccaaaaaccaagcgtttggccttgcgacagcgaaggctcccagtccctgcaggtgttgaggcagcaggatcagaggcgggagcaga

SEQ ID NO: 219552 - DNA, 122 bp, Homo sapiens
aattagagacacttccccaatgccccaatccctctttatgcatctgtgcaacctgctcagcgtctcctcactgtgacctttttagcttccagacaggcctgcgacacaggcctcttaacaga

SEQ ID NO: 219553 - DNA, 122 bp, Homo sapiens
tgcggtctcagtctggaggtgattatcacagacccggtctggaggtgattatcgcggtcccggtctggaggtgattatcgcagtccaggtctggaggtgattttcgcggtccaggtctggag

SEQ ID NO: 219554 - DNA, 122 bp, Homo sapiens
cccgcgcctccggctcccagcggcaacggaaaagtctcaaaagtttttttcctcttctcccgaccagctcgtccctcctcccgctcctcctccccctcctccccgcagtggcgggggcggcg

SEQ ID NO: 219555 - DNA, 122 bp, Homo sapiens
ccaggctgaggaggaaacacgttaaatggtgacaaataggacaagccaaatgcaggctctcggcctggcgggtgctgcacccttgttggagccgtgtctcaaaggttctgtgggattcggac

SEQ ID NO: 219556 - DNA, 122 bp, Homo sapiens
cctagagtaacgtgcattgccgcgcagagtgaattggttttgctgtaaatctcatgaagccgttttcctgcatgaaacacagtaaaaaaaaaaaaaaactggagtggtattgacgaccttta

SEQ ID NO: 219557 - DNA, 122 bp, Homo sapiens
ttatgtgtacaaaattaattggcttcctgaaacagcctgtagcactagggagttccccttcgtctttagaacaagctgaaagagaaaaattcagatcatcatagctatgttctgctacaagt

SEQ ID NO: 219558 - DNA, 122 bp, Homo sapiens
agcgtggtctctcggtagcgggggtggcagctgacatgctctgccatgcgctgcactcgccgccgcacgtagaagaaaatgcgggtgtacacagccaccatgagcaggaagacaagcaggct

SEQ ID NO: 219559 - DNA, 122 bp, Homo sapiens
ggaggcattcactggacacccaagaggagcgataaaggggagcgggaggagttcactagacgcccaagcagagaggcaaaagggctgggtctgagtccacagtgctggagagaggttgcttt

SEQ ID NO: 219560 - DNA, 122 bp, Homo sapiens
cccctgactattggcttcctctttagagcccacgttgtgggccaggggctgcttttgtttcgccatgaggtacgaggagctaagtgcatactgtgagtggtgggtattactaacggcagtca

SEQ ID NO: 219561 - DNA, 122 bp, Homo sapiens
tagatctagaggccagaagcccagaagccggggtggcaagaccagctccctccaaagctgcgtgaggatccctgcctctgccagcaccggctgcctctgggggctcctctccgtggccacat

SEQ ID NO: 219562 - DNA, 122 bp, Homo sapiens
ccccatccaagtctgccctaggcaggagtgcctagtgcacgggtacatacataccccgtgcgtctccacacctgtgcgctcccacagatatgctcgcaatgcaggtgtaaggtccccctcac

SEQ ID NO: 219563 - DNA, 122 bp, Homo sapiens
tggaaggaggacaaccttatgctccagtagaattccaaattctggggtgcagggacatttcgtgtgtgtatgtggaggggggggtgtcctaatgccctgtaagccacactttataatgctgt

SEQ ID NO: 219564 - DNA, 122 bp, Homo sapiens
aagaatgcggcggaggagcagaagctcaagctggagcggctcatgaagaacccggtgagacgaggcccaggctccacggcccgtccgaggcccacccccttcctctgcagcgcttcagggtt

SEQ ID NO: 219565 - DNA, 122 bp, Homo sapiens
tatattaaattgtcctttccctccttttaaaatatgggaatctattaatagctgcattcccggtataggggactcaagtcttcagttaaaaaaaagtccccagcttcttaatattgtaagct

SEQ ID NO: 219566 - DNA, 122 bp, Homo sapiens
tgggctgagttagcattcagcaagagccaaggctgcagccggggctcaagtcagcgtcatcgtcagagctgagactccagtaggtttgattgcagatccctgaacacctcctctctacgggg

SEQ ID NO: 219567 - DNA, 122 bp, Homo sapiens
cggacagggcggtggcgtgcagggggcgggcagagcagcagcaaagggctggatgggggccgggggcggagtttgagttaaggtggactgggagagataggggcaggagaaaggggggggag

SEQ ID NO: 219568 - DNA, 122 bp, Homo sapiens
atcttctgcaacacctgctccagcaacgagctggccctgccctcctaccccaagccggtgcgagtgtgcgacagctgccacaccctgctcctgcagcgctgctcctccacggcctcctgaac

SEQ ID NO: 219569 - DNA, 122 bp, Homo sapiens
atgttccggggaatgtttccgaagtccagggctccgtccttcggcgggattgctggcattcgggcaaggcgagtcgcggtggcctctgaggctcgcagccagcacagcggggctcgttaaag

SEQ ID NO: 219570 - DNA, 122 bp, Homo sapiens
tccgtgggacccgctttggcctgcaccccacctggaggcctggggctaccatcttggtggcgtgggtgaaagaagccacctggatcccggccggggaacttggcccaaggggacttgggctc

SEQ ID NO: 219571 - DNA, 122 bp, Homo sapiens
cttatcccgtccagagccatggctccttcctgcgagcgcggaggaaatggctctcgtaagcgtcactcccccaaagaaaggcgaatcccaccgaattcgcagcgccggccacgggctgggag

SEQ ID NO: 219572 - DNA, 122 bp, Homo sapiens
actgtaaaacttcccgcaaattgcacacacagagagagaggacaggagacatagtgaccacggatacaaaggaaaggaaaattttgcaacgggttagctggagatccattaccaacacctgg

SEQ ID NO: 219573 - DNA, 122 bp, Homo sapiens
ccgtacacctatatgcgtgggtagagaaatgggtacctgactgcaacagtcccactgtggcgcttggcaggtcagggctcaatacatatttttgaggggatgaataaacccaaatgttcatg

SEQ ID NO: 219574 - DNA, 122 bp, Homo sapiens
gagccaaggcgcgccccgccgaggccccaccgccccggcccccgcccgcccgcgcgcgcgcgcgcctcgcgaccctcccggccctccccgcccgtgctcccggcactcactgaacatcccag

SEQ ID NO: 219575 - DNA, 122 bp, Homo sapiens
agctggggcacggtgcaaggaagagcgtggtctagggaggacggacgggggtgaaggggacgaccaaaggtcgtcattataagcaaacaaccagggtctcagtgggattattattactattt

SEQ ID NO: 219576 - DNA, 122 bp, Homo sapiens
ggatgatgtggtggctggtggtcaaccgtccgccgcagggggtggccatgaagatggagtcgccggtgcggggtgggtgctgcgggcgctgctgttccgatggtgtctttgatgttgggctg

SEQ ID NO: 219577 - DNA, 122 bp, Homo sapiens
cctcttaattggacttacagttccacattgctggggaggcctcagaatcacggtgggaggcgaaaggctttctcacatggcagtggcaagagaaaataaggaagatgcaaaagcggagcccc

SEQ ID NO: 219578 - DNA, 122 bp, Homo sapiens
ggtgtgcatatcggtgtctgtgggtgtgcacagtgtcttgggtgagcatagtggtgggcacgctgcatagggtgggtgtgcgcagtggtggtgggtgtgcacggtggtgggcgtgcacggtg

SEQ ID NO: 219579 - DNA, 122 bp, Homo sapiens
tctctcccggagtcggccagcccgaggcaggaagccctgcggtttctggcttctcccaggcggcctccggatctggcccccgccccccggccaacagcccaaatattattccgcgggaggag

SEQ ID NO: 219580 - DNA, 122 bp, Homo sapiens
cctctgcagaggcgcaggctggaagcggtggcctttgaggggggcggcaggagagagtaccgacctccctcgaactcctggcagaggtgggggtcgcagcaaaagcactggggtggagggcg

SEQ ID NO: 219581 - DNA, 122 bp, Homo sapiens
accaccattggcgagagcccacaagcctgctgctaccaccacagctggcaacctcctgcacgcgccaactggtggtctggagactggcccacccagcctgttgtagccactgccaacacccg

SEQ ID NO: 219582 - DNA, 122 bp, Homo sapiens
cagggcaacgtcagagcacctctgactccagggaggtggaagcggcttccggggtgaatgcggttggatcgtgcgaggccgccaccactgccaagaaaagaaacacaccaccgcacaccttg

SEQ ID NO: 219583 - DNA, 122 bp, Homo sapiens
ggaggccgctcggggcccagcgtgccagccccggagttcagcctcccgagctgcggcgcccgcagcggaggaggttttcagtggctgattgaaactcactgcaaaatcaccacgactctttc

SEQ ID NO: 219584 - DNA, 122 bp, Homo sapiens
ccccggctggaccaccaggtcttcctgaagagcgacagcctgtgtctgatggaagggcggcgcttccgggcgcagcccaccctgccctcggcccacctcctggccatgcacatccagcagct

SEQ ID NO: 219585 - DNA, 122 bp, Homo sapiens
aaataaattagaggtcggtgatgcacagagggagggggtcattgctgtgaataagagcagcgaatgacagggaagacgtcctggtggaagtgacagctgatttgggttgagaagtgaaagag

SEQ ID NO: 219586 - DNA, 122 bp, Homo sapiens
gctgagccctcctgtgcgccccgggcccaggccctcccgcttctgcggttggggacactgcggacagtttgtaatggagccatggcttcaggacaccgaagatcagcctccagttcagaact

SEQ ID NO: 219587 - DNA, 122 bp, Homo sapiens
gaagccatccgcgccatcttggttgaggacgagtgccaggcctggaggggcggggccgggcgctgcccggtagggcttgtggctggaaccccaggctaggcctttggggaaacgggaccctc

SEQ ID NO: 219588 - DNA, 122 bp, Homo sapiens
cccgaagccccttctggaacctcctggggacaattcccttttcctttcttcagcctaacccgcggtggccctcgcggagtccggtcagccccggggagcgcagccgggaggggcgtccaagg

SEQ ID NO: 219589 - DNA, 122 bp, Homo sapiens
gcgaacccccctccccactcgctcagggctctccaatccgcagctctgcgtgcgggggcgcgcgcatccccccgccgtccgtccgtcagctgtctgtctgggtgtctatgcgggcgcagcag

SEQ ID NO: 219590 - DNA, 122 bp, Homo sapiens
cactaatattggataatagttgtctgcctacctcagcctccggagtagctgggactatagcgtcttactagccagcttcagggctagaatagcctttctgtgcaagtggaaaaaacctcagg

SEQ ID NO: 219591 - DNA, 122 bp, Homo sapiens
cagccgccctaaggtgaccgtcagggaagatgctgccatggccgcagcctcggccggaaacggaaacgacgcgaaccgcgtgcgtaacgcacgggcccggcggggaacaccggtccgctgta

SEQ ID NO: 219592 - DNA, 122 bp, Homo sapiens
tgggaattttttcacatacacgggtagtggtggtcgagatctttccggcaacaagaggaccgcggaacagtcttgtgatcagaaactcaccaacaccaacaggtttgtggaatcagccttct

SEQ ID NO: 219593 - DNA, 122 bp, Homo sapiens
cctggctgcgctggaggaactgagccaagagcagctgaagcgcttccgccacaagctgcgcgacgtgggcccggacggacgcagcatcccgtgggggcggctggagcgcgcggacgccgtgg

SEQ ID NO: 219594 - DNA, 122 bp, Homo sapiens
tgttcgggccccaaaccggttctcccggtcccaccgcctctggccctaaggcctccaacccgcggcctgacaagccctcacatgaagcagctggagagaaagaaagaatcgagagaatggca

SEQ ID NO: 219595 - DNA, 122 bp, Homo sapiens
ggcggggcacggggactgggtcaggagaagccccagggggacgtggaaccgagagattttcgggatggaacctgatggaaacgtccgtggtcaggaggaggctgcaggatggtggcgccggg

SEQ ID NO: 219596 - DNA, 122 bp, Homo sapiens
gagtcctgcgcctttaactgtccacagcacgtgcagcacgtaccagaagtaacatctggacggcagccaccactggttaaagagacaggccccctttctccatgaagcttgggcagggttca

SEQ ID NO: 219597 - DNA, 122 bp, Homo sapiens
cacggctcagctgggagaatcacacgggaggggcccatgaacgggcactggggccacagccggggattcaactgcaccgaaatcccagccctcaacacggcccacggctgtgtcatcccgga

SEQ ID NO: 219598 - DNA, 122 bp, Homo sapiens
agcgaattgcagcgctttaagaactgaagggggggctgagggcggagagagcataagaggcgtggcctagaagattgaaagccggacatctttgtgatttggttggttcaaaatttacccag

SEQ ID NO: 219599 - DNA, 122 bp, Homo sapiens
ctcgaggagcctattgaagacttaggggggaagggacttccccaccgtcaccgggcaccacgacccaactcctcggccaggcctgggaccggcatcttagcacggggcccgcggctcggcta

SEQ ID NO: 219600 - DNA, 122 bp, Homo sapiens
taccgttcgcctgctccacacgcctgctcggggcatcctctggctttttgctttgcgggacgcggaagacccgtccagcacgggtagggatgtggccaggacgtccccaggcctgggcgcgc

SEQ ID NO: 219601 - DNA, 122 bp, Homo sapiens
gcatccagaattacacccccaaggtgggcgagtatgccacatacgaggccattcgcaaggcgttccgcgtgtgggagagtgccacaccactgcgcttccgcgaggtgccctatgcctacatc

SEQ ID NO: 219602 - DNA, 122 bp, Homo sapiens
tctctggccctgttcttgccccagcatgacttttatcgggacgccgttgtggaagcctcacgcaggagccctgcccccgtggagaagatcccactggtgactccaaccctaccaccatgaat

SEQ ID NO: 219603 - DNA, 122 bp, Homo sapiens
ccccagaggtccctaccgggtggcacgatctattatctaggaagccaatcgatgtatgaccgcccggtgtaggtcaggagagaggcgggagacggcaggggatggaagactctttaggtgcc

SEQ ID NO: 219604 - DNA, 122 bp, Homo sapiens
agggcggcagtcacttcgctctcaaagcagaccatgcaatcccgcccgccgccggggctccgcaggccgcccccaccaagtttagagaagccctggagcggctctcccggggggcgcctcgg

SEQ ID NO: 219605 - DNA, 122 bp, Homo sapiens
gcaagcggcgcgcccgggtctggagctgcagcagctgcggcagcggcgggggtggtgcggcgcggggcggggcggggcggggcggggcggggcggggcggcacgggggcgggcccggggcga

SEQ ID NO: 219606 - DNA, 122 bp, Homo sapiens
tgcctctgctcctggatgcaagcgtgcttgtctgagttccccactagactgcagcaagggcggggccccgccccatcctcctttgcctcccatccccctcctcctccaggcactgagctcag

SEQ ID NO: 219607 - DNA, 122 bp, Homo sapiens
ctttgccctcgtgaagtgtcttgcccctaatgtgtgcccagctcatggcgccccgaggcgcgagggcgtcctaagcagtgggacttgggtagttgaaagaaagctgaaaaacagccattttg

SEQ ID NO: 219608 - DNA, 122 bp, Homo sapiens
taggaccaccagctttttattttgcaaagtaaaacattaatgataatgactatctattatcgcaatcattttgcaaaagaaaggacattttaacattcctgaagtaagaaagacatactcag

SEQ ID NO: 219609 - DNA, 122 bp, Homo sapiens
tgattcagctgttgataatgtgaaattctagggaagttccaaacaggaggattgaaggagcgcagggaacttggccccaaaatatggctccctggtatgagtattttcaattaaagtccctc

SEQ ID NO: 219610 - DNA, 122 bp, Homo sapiens
aggagttttgcaaatactaatattaacaggcatagcagaaaagcagtagtaacatgtctgcgtcacttattataggcacagtcatcaagcattagcatttactctacacatacttttttaaa

SEQ ID NO: 219611 - DNA, 122 bp, Homo sapiens
ggaggtaggaactttccgattcttttggagtagactaaggtgacttaagtaggaaaagaacgcatagccagtaactctcccaacagaactggattcgtgcctggggtgattcaggatgtcca

SEQ ID NO: 219612 - DNA, 122 bp, Homo sapiens
tctaaaacctgttccacctgcagccctctctatttcacttgatggcagttttatccttctcgttattcaggataaaaacctgagactcattcttgtttttcctctttctcttatatcccaca

SEQ ID NO: 219613 - DNA, 122 bp, Homo sapiens
ctgaaggaaatgggggaaggggcagattttaaaagtgcgtagttgctgaggggaggggggcggggggaacgataacgaggctcttccaatttcatgtgagcacatcctgctcagcgcctgcg

SEQ ID NO: 219614 - DNA, 122 bp, Homo sapiens
cagtggctgcgcaagctgggaagcgaagaggtcacgtgttggcggaaagtaacttggaggcgaaaggatgaactttgagaagaggaaaaaaagcacaatgaaacaaactacccccttggagt

SEQ ID NO: 219615 - DNA, 122 bp, Homo sapiens
cgctgcgattggccgtggtgggtgccggtaacccgtgctagcgtctttggctccccgcaccgtagatgtcaaaggctgaagctgctccctttgccacattataactagtaggggatcctcac

SEQ ID NO: 219616 - DNA, 122 bp, Homo sapiens
cctgccctcccggagaggggtcagcgaccctccggtcccccactggggcagcggcgcccccgggagctcctgaaggaaccccatgcagcctcctgtggaatccgctgcatccccgggtcccc

SEQ ID NO: 219617 - DNA, 122 bp, Homo sapiens
agggagaacaatggggcgtcctggggagtggggttcaggtgcggtgtgccccggcggcggcgggggaggaggggcccgggacgctgtgggcctccctgcgcgtgcagctgcgctcgcctcct

SEQ ID NO: 219618 - DNA, 122 bp, Homo sapiens
ataaacagctcgactttgtcaagggaaccgtgtatttttactagaagtcagattcacgtccggcctccaggccagaatgcaggaaatgccagacactggcgtctcaaaagcagctttcaaag

SEQ ID NO: 219619 - DNA, 122 bp, Homo sapiens
tgtccgagggaggaaggattttcccatcgtgctcagaggcggctgctcagaggttgcttccgaggctcctcccaacgcccgcccagtccctccttagccttcgctgggggccagaaggattt

SEQ ID NO: 219620 - DNA, 122 bp, Homo sapiens
tcactgctgtgtgcccagggcccacgacagtgcccgatacagcaggcgctcaataagtggcgaatgaaagacagggcaaggcggagagagaagaaacagaaagggaaagagaaagcccgggc

SEQ ID NO: 219621 - DNA, 122 bp, Homo sapiens
agagcggcctgctaatttggcacagctatcccaggatgacgatctttcttttaaaagaggcgggataatcacttgttccttgcagctctggactcccgggaagaagcggccactcccggtca

SEQ ID NO: 219622 - DNA, 122 bp, Homo sapiens
ctcccagaccccgatcacccgcagctacgagagttgccgccgccagtgtgtgccgggcgacgtcgcccacgcccctgccagccatcctcacagcagcagcagccctggtagaaattgatgtg

SEQ ID NO: 219623 - DNA, 122 bp, Homo sapiens
tcgccaggcgtggagtccggaggccgaatccatcagtccccagccccctccccaagcctccggtgccaagtgctgggtcctgtgagcccctggcccgccccccacctccgccagcggggcga

SEQ ID NO: 219624 - DNA, 122 bp, Homo sapiens
cgaggtgccagcctggagttctgggggtcaaattcctcatcgggaatgacctcctcgcagcgggctccacggaaaccagagcggcagacacagagctgcgggcggctgcaggagccccggtt

SEQ ID NO: 219625 - DNA, 122 bp, Homo sapiens
atggccgggtccggggagacttgtctttcctgaccctcgcaggcttgactctgtctgagacgcaccaagcagagagaagctgccacaagcaacatcggccaatcccagagaaaataaacaaa

SEQ ID NO: 219626 - DNA, 122 bp, Homo sapiens
gcttctgctgccggcctctcccggaaggccgctgcatgtcggtaccactgcagagggctgcgaattgcttttggtggcctgcgcctgctgagcgacctgtcacaaacatgcaaagctatcaa

SEQ ID NO: 219627 - DNA, 122 bp, Homo sapiens
ggcctccaggtcctggggtgtgtgtgggctgctggagggcaggcccgagacccaaaggcgcgtctccctcacccgcctcgccgacaccagggggcgctggagctcagcaaagggcccggagg

SEQ ID NO: 219628 - DNA, 122 bp, Homo sapiens
acccttcagtggactaaccatccctgccaggctaaccctttcttcgcaaaccatcttccccgacgccttccacataagatgccctcctgcgggccctcaccttttgacactgcctcccaccg

SEQ ID NO: 219629 - DNA, 122 bp, Homo sapiens
gcccgcggaggggccctggggggcggcgccgagcgtctggcctgtgttggctgtaggcaacgaaaggagccctcccggtctgcgccggatggccccgggcggtgactcggtccggagccctg

SEQ ID NO: 219630 - DNA, 122 bp, Homo sapiens
ggaactcctgacctcaggtgatctgcccacttcgacctcccaaagtgctgggattacgggcgtgagccaccgcgcccagctgcagatttttcgaagtaccagttttggttagtattgtggca

SEQ ID NO: 219631 - DNA, 122 bp, Homo sapiens
aaagcagacacctgccccagaaaggtgggggagaagtatgagctgcttagcacttggacgcggcccttccccagggctggattcttctgtccgtgggagctctgagctccaggtccgcgaaa

SEQ ID NO: 219632 - DNA, 122 bp, Homo sapiens
tgcaagggagtgtgattggatagcatgtcctactgttcccaccagagagattcatgtcttcgtggacagcttttgttatcctcccttagtggacgtaagtagagggacagtttttacaaggg

SEQ ID NO: 219633 - DNA, 122 bp, Homo sapiens
atagagactctaaagggccacaatacaaattccagacttttgtttttgaaataagagttgcgacatgcccttgcttcatttctgtgcactcatgtgtaaatgtgggtaatagttaagaacct

SEQ ID NO: 219634 - DNA, 122 bp, Homo sapiens
tcaaaaccaagtagctgcagaatccctggcccggagtgcccaggagacctcgaccctccccgcagttctgcattcacgtcttatgtggagcacgccctttaaaatccaggaacctccacttt

SEQ ID NO: 219635 - DNA, 122 bp, Homo sapiens
gaccctccccacccagaagaatgcagacacaggttgttgctgagatatgctttgtgacctcgagcaggtcacactgtgtgtgccccagtttccccatccataaaatgggatcatacccctaa

SEQ ID NO: 219636 - DNA, 122 bp, Homo sapiens
agagtgaaacttcgtctcaaaaaaaaaaaaaagaaaagaaaagggctgtgaggccgggcgcggtggctcctggcagtaatcccaggcacatcatgcctgtaatgcagcactcaggcgggcgc

SEQ ID NO: 219637 - DNA, 122 bp, Homo sapiens
ccactgagatgaggggagagggctacagagatgaagagaaatgaagagaagagagacagccgtcaagactgtccagagaagtgggctgaggcccacaaaccccacaaggacaaggacaggaa

SEQ ID NO: 219638 - DNA, 122 bp, Homo sapiens
agttatcagctacaaaaaccacacggtgaacaggcgctcagcggcgctggctatgagaggcggacacttgccagttggatataattaccaaaatgagcacaaattggaccatcgtcttggaa

SEQ ID NO: 219639 - DNA, 122 bp, Homo sapiens
tcgtcgacgtgcaggctgggcgagcacttgatggccagccaggtcttccagtggacatggcgcaccttgtacacctgcccgaagccgcccgagcccaccttctcccagcccgtgaactcgcc

SEQ ID NO: 219640 - DNA, 122 bp, Homo sapiens
gggcgttccctaggcaaaatatcaaagatacagggagatgccttttaggccgctttattacgttccttactcagtcccgttccccgagaaggggtacaaaatacaaaagcttcccggggaca

SEQ ID NO: 219641 - DNA, 122 bp, Homo sapiens
caaatgcactggaccgcttcggaattaaaatgaattgctaaaaccacggaccgctctgtccggggcccagacctgtctcaactcgtggtatttacattcctagagcccgtgcggaggaacac

SEQ ID NO: 219642 - DNA, 122 bp, Homo sapiens
gtgcagtttcccggctctccgcgcggccggggaaggtcagcgccgtaatggcgttcttggcgtcgggaccctacctgacccatcagcaaaaggtgttgcggctttataagcgggcgctacgc

SEQ ID NO: 219643 - DNA, 122 bp, Homo sapiens
cggagggggcggccccacggtgccaccgcaccaagaggccgcctctggggagctccgcggcgggacggagcgtggtccgggtcgttgcgcgccatctgcggggtccccagccgctgcggtcg

SEQ ID NO: 219644 - DNA, 122 bp, Homo sapiens
ccgataatggagttcagagatctcttctggttgccaaggcttcataaagacactgggtttcggaggttaaaaggcataactggaaggtgtgaggagaatccagacagccaaaaagaatttca

SEQ ID NO: 219645 - DNA, 122 bp, Homo sapiens
taccttttgcttcctagcgcctcaaattctaattctctcaagtagggcgtgctgttcccccgtttctcatccctaggatctcagttgaggattcaggacaggaaaaacagggccaaaaactg

SEQ ID NO: 219646 - DNA, 122 bp, Homo sapiens
gttcctccagagcaggtgggagctacacctccatgggcttgattgccttggcagtcctggcgtgcttgctgttcctcctcattgtgggctttacctcccggtttaagaggcaaacgtaagtc

SEQ ID NO: 219647 - DNA, 122 bp, Homo sapiens
agcctggaagctggccctcgcgaggcggcgcggggagggtgggtgaagagcgcctgtgcgcgctaggcggagcctcacccgccgccctcctctgcggcaccgccccttccatggcagggctg

SEQ ID NO: 219648 - DNA, 122 bp, Homo sapiens
aagctgccctctgatggatgggaacacattggtgccaagcacagaacagcctttgtgctccgccaccagcggcaatccatcagctccaacctgacagcagggcgtccggccctaatccccat

SEQ ID NO: 219649 - DNA, 122 bp, Homo sapiens
gcgcctttccctcctgccgctggggactgcaggctaaggccatgtcccgaaagcaggcggcgaagagccggccgggcagcggcagccggaaagccgaggccgagcgcaagcgggacgagcgg

SEQ ID NO: 219650 - DNA, 122 bp, Homo sapiens
gagcagctggaaacctcaggttcagggtcagggccggctcggatggccgggcaggagccacgccggccccggtgctcccagctgcgggtatcactggacgccaccccggggcggccccgcct

SEQ ID NO: 219651 - DNA, 122 bp, Homo sapiens
agcagatgcggaagccagaaggagatggttttcccttggagtcaggccgctcagtgaccccgctcttctctgatggctccggtcaaactgtggttagggtcaaactctgcatcattccacca

SEQ ID NO: 219652 - DNA, 122 bp, Homo sapiens
cacttccgcatcccggcaccctgcacagaacttgcgtagagtagtaagtactcggaattacggttgcatgggccaaagagagtgtgcgcagctgtggggtctctgcatctccctcactggct

SEQ ID NO: 219653 - DNA, 122 bp, Homo sapiens
aaataatcaaaagggtcagaatctagtttaaagagtttatttgagtgcaaaggttgaggacggactccaaagaatggaaatcactgtttccagttgtagaagtttggggatcactcgaatag

SEQ ID NO: 219654 - DNA, 122 bp, Homo sapiens
gacctccatctgctctaggacaatccagacagcagcgtggcaccaggcccaggtaaggcccgaccctcctccagcaaggacccgctaaggctatgcctccctctaattagcagggcctggct

SEQ ID NO: 219655 - DNA, 122 bp, Homo sapiens
cgccctgctgggacttgtagtccactcccgagtcccattcccgatccgcgcagactcacacggcctctatctgcccttcggtcttgctgaagcccagcccagtattcaatgctccccatccc

SEQ ID NO: 219656 - DNA, 122 bp, Homo sapiens
ttcctgaaattgtaatccccaccttacacttgtatcacttgttttctaaatattaatatacggtaaaaatcaggtggctgtgtgctatgggaaaatctggaggaaaagataattttaaaaat

SEQ ID NO: 219657 - DNA, 122 bp, Homo sapiens
acagtgaaaaccccaaacctgctctctcaagctattttcagatctatctgggaactcccccgctttccctagaaagtttcattatgtgactcataaaacttttcataccctccaggtgtgtg

SEQ ID NO: 219658 - DNA, 122 bp, Homo sapiens
tgagttcctggatttaagcgatcctcctacttcaaccttctgagtagctgagactacaggcgcatgccactgccctgggtatgaagcagtgaaaaattttcagccaggtgcagtgactcaca

SEQ ID NO: 219659 - DNA, 122 bp, Homo sapiens
atttcgctgtcccagcaactacttgtcgcgcgagcaacgcccgcctcacgtcgccggctccggctacgccagtcaaaacagccgttagagcttcaccaatcaccggccttcctcgttccctt

SEQ ID NO: 219660 - DNA, 122 bp, Homo sapiens
caccttcttgaagctctgcgggcacccttcctgcgggtggacaatgagcgcctgggaggccgttgtccttggttggggagcgctcgtctggatccagcctagcaaagaggctgctccggatg

SEQ ID NO: 219661 - DNA, 122 bp, Homo sapiens
gggctgcggccgaggaggcgaggacccagacgcccagagctggcgcttcctgtctctctgcgccagcctcggcctgcggcggggtagagcgccggaaacggctttagcggctttgggaattg

SEQ ID NO: 219662 - DNA, 122 bp, Homo sapiens
caacagaaactagagctgcatcaattctctcacactgccaagcctttcttctggcagaagcgctggggatattacactggggataattcatcaagcttgctttgggtgttccaaatttgcaa

SEQ ID NO: 219663 - DNA, 122 bp, Homo sapiens
tgtgcccacaagacaggtgtgataagtttccataaaaactgatgcttcagaagaagggagcgtgaaagactcaaaggcaatgacagagtaatcttgtgtgtagcagagatgcaatgtggctt

SEQ ID NO: 219664 - DNA, 122 bp, Homo sapiens
gcgcctcagggaccgcctgacccgcggctgcaacccggccgagcgtcccaggcccttcttcggccatttctagcgaggatggaaagttctctatctgccactggccgcgtgtggctcagaac

SEQ ID NO: 219665 - DNA, 122 bp, Homo sapiens
tgtgaagggcggaggcagtgggaggagctgctgggctggcgtggggtgcctgccgggtagcggaggccgcgcggggtggaggctggaagggggcggaggggagaagggggtagcggagctgc

SEQ ID NO: 219666 - DNA, 122 bp, Homo sapiens
aggcctataaagcctaaaatatttactctctggccctttatagaaaaagttggccagacgcggtggctcatgcctgcaatcccagcactttgggaggccgaggcgggcggatcacgaggtca

SEQ ID NO: 219667 - DNA, 122 bp, Homo sapiens
acacatcgatgggaagatgcaaccacggggatgcataggccaggttccttcaggggccaccgcagctcttcacacatcatgcccgggatatcaggtcccagagggtgagtttttttctcttt

SEQ ID NO: 219668 - DNA, 122 bp, Homo sapiens
cgcctggcggttacgaggaggccgcctcctgcttgccggcctggcggtcctactcaacaccgcaagatttcaaaagggaaattcctccagggctgagtcacagggaagaaagcgatttcctc

SEQ ID NO: 219669 - DNA, 122 bp, Homo sapiens
aagacagggagcgcatccgggcgggaggagcacccggtccggggcagacgcctggccgcccgggcgaatctgcctctgccaatgggtgacacgccgattttgccccctggaaacgccaagag

SEQ ID NO: 219670 - DNA, 122 bp, Homo sapiens
ccccagccccgtcccaggtggtggtgatccgtcaagagcgggcggggcagaccagcgtctcgctgctgtggcaggagcccgagcagccgaacggcatcatcctggagtatgagatcaagtac

SEQ ID NO: 219671 - DNA, 122 bp, Homo sapiens
ctttctccctccttccatttcttttctttgttttccctcttcttcctcttcctgctgaagcgttttccaaagaagaaaatggagaattatatgattggaaaaaaggtcaaatctaatgccaa

SEQ ID NO: 219672 - DNA, 122 bp, Homo sapiens
gtctaccccatcctgaatagttccaggtttcttgttccactctgggcctctggctcaactcgggaggctctgtgttctcatctaacatttgctttttatcaatctctgatctctgattctca

SEQ ID NO: 219673 - DNA, 122 bp, Homo sapiens
gtctctttcccctgcaggcgtcagcagctcccgcggtggcgttgtctgtggcgatctctgcgcctccactactgcccctgttgtctccaccagagtcagtagcgtccccagcaacagcaacg

SEQ ID NO: 219674 - DNA, 122 bp, Homo sapiens
gcaaaaattaccaaaaaagaaaacaaaagtagacaattataataataacagtaacacactcgtcagcaactgacagcaaggaggaaaaacaaatttaataatattaactggctgggtctggt

SEQ ID NO: 219675 - DNA, 122 bp, Homo sapiens
tgcagagaatattacagagaatgttctgctgctttgtggaggaaccataggaactgtgcacgatctttcttaccacagagtcacaaggagaaaattggcagcttaggagaccagccagctaa

SEQ ID NO: 219676 - DNA, 122 bp, Homo sapiens
ctccggccgtagccgccaggggaagggcggctagaggcgcgcgccacgcggagacagttgcgaagacccgctcccactgagcagcagcaccacggcgactgtattttagcttctacatttag

SEQ ID NO: 219677 - DNA, 122 bp, Homo sapiens
acgtcctccctgtgcagcttggccagctcctccagctcctccagcttcctcagcagcttccgcaggcagcacctctccaggtgggcctcctcgatgccccagtaggccagctcctcctggaa

SEQ ID NO: 219678 - DNA, 122 bp, Homo sapiens
acatccgtggattcaaccaaccacagattgaaaatattcagaaaaaaaaaaaattcacaacgttccaaaaaggaaaacttgaatttgctgtgtgccagtactatgtggaatccatgtgaatg

SEQ ID NO: 219679 - DNA, 122 bp, Homo sapiens
ggcccacagcctctcgcagggcctcagtcaggaacacgccccgcagggcctgcagcagggcgccactcaggtagtcgccccagaaggcgtccagataggagagctctgagaacttgatgtca

SEQ ID NO: 219680 - DNA, 122 bp, Homo sapiens
catgttggccagcctggtctcaaactcctgacctcaggtgatctgcctgcctcggcctcccgaagtgctgggattagagacatgagcctctgtgcctggcctagaaaaagagtttttatgcc

SEQ ID NO: 219681 - DNA, 122 bp, Homo sapiens
ctcgatttaagaactctacccctatggtgtgaaaagcctgggagtcaaatttgttggttacgtaacggttcataagcgaacttttcccaactccaccatcacccaagagaatgacctttaag

SEQ ID NO: 219682 - DNA, 122 bp, Homo sapiens
gtaggtgaccaggggctgactctagctcgggctgacctgtgatgtgtgtgtgcatagcctcgcccccactgcctgctccagggctacagaagctggtccatgaccaaccatgttctgaccac

SEQ ID NO: 219683 - DNA, 122 bp, Homo sapiens
aggggactccccagcagctgaggcggggggcggctcagccaggccagaaacccacagctccgttctgctgcctcccccaggcctcactgcaagcctggccggccaccctgggccgtgtgtgg

SEQ ID NO: 219684 - DNA, 122 bp, Homo sapiens
tacttttaaagacgtcaaatcccaaagtaagcagcttttacttcaaaaataagcccacttcgatgggagatcaaagggatggaactttccaagttgcagttgaatttaacattccaagagtc

SEQ ID NO: 219685 - DNA, 122 bp, Homo sapiens
ttaagtgggctgagcttctcctccttttgactctgaaagatacagtgtagaggccaaaaacgggaaactttgcttccaaacagctcttctgacagttagggcatggtttccttattagagaa

SEQ ID NO: 219686 - DNA, 122 bp, Homo sapiens
gtcgccgtcgttgcccgggccatggcgacctgcatttggctgcggagctgtggggcccggcgcctcgggtcgacgtttccaggctgccgcctccgcccccgcgccggcggcctggtccctgc

SEQ ID NO: 219687 - DNA, 122 bp, Homo sapiens
ccatggcgcagggagcggatcgggcgggcgagcggcggatctagtgtgtggaggcggccgcgggcgcggggggctgttttcgggcggggtgggcgcccatgctgtggccgggggcagtgagg

SEQ ID NO: 219688 - DNA, 122 bp, Homo sapiens
cgcccaaaccgcgggccgccccctgccccccgctgggctgtaacctgaaccgcccgcccccggagcccgcctgggccctgccagtgcccgcacctgcccaagccggacccccctctctggga

SEQ ID NO: 219689 - DNA, 122 bp, Homo sapiens
gaggcgctgtgtgtagatggcgacagcctcctacacgccagggctccacccggatcctggcgccactgcgggagggcctgcccttggctcagcgtcagagtttgtcctctggggcccaacgc

SEQ ID NO: 219690 - DNA, 122 bp, Homo sapiens
ctgaaacccgcgctagccccgcgcgcggagtgggcaagatgtgggcctccggaaggtagacgtccagggtcgaggagaggtgggatcggccggaacacaaaaaggagaagcccggatgtttg

SEQ ID NO: 219691 - DNA, 122 bp, Homo sapiens
gagttgggttggggagcgggtggcggtgtttggatggagacagcagcctcctccggaagccggcccagggcacaattagcagggagcggagacgcccgcgaaggctgatttaattaggtgac

SEQ ID NO: 219692 - DNA, 122 bp, Homo sapiens
cggtttcattttcagtttaggccaaaaatccccccgggttggtcggggctgggcggggctcgggggactgggctgaccgcggggtcggggccaggttctcacaccatccagataatgtatgg

SEQ ID NO: 219693 - DNA, 122 bp, Homo sapiens
atgggtgtctcaatgacagtaacgttcccgaaccccggaccttagctgtcatttcacctgcgtcgtcccggacgccatttggctgttgacgtggttccgagccagcaaataacgccagcagc

SEQ ID NO: 219694 - DNA, 122 bp, Homo sapiens
gaatgtcacacgtttgcaccagtttgcacagttgccagggccccttgcagctcctctgtacgctgtaccccctttgtctctcctcagcctccagaggcaccttcacaggtgagtttgtcagg

SEQ ID NO: 219695 - DNA, 122 bp, Homo sapiens
agcctggctgaaagcagcgcggcttgcgaccgcagccgcccttcccggatcgcgcccggccggcccagaaggaaatgctctcagtccgagccaaacttcctgggcgactccgggctttctgg

SEQ ID NO: 219696 - DNA, 122 bp, Homo sapiens
caagatgctgatgtaacatccaggatttgatgttttactctccaattctgcaaatccagacgcaggaggttttaagaggccgttgcaccctgcaataaagtgcgggacacaggaatcttggt

SEQ ID NO: 219697 - DNA, 122 bp, Homo sapiens
ccttgtgtacacaaggtagctttgctttggaactgttttcaagggaatataacacaaaagcggggcaggtgaattcttccaactttatctggaaatgcagttcaactttcacaaaagggcaa

SEQ ID NO: 219698 - DNA, 122 bp, Homo sapiens
aagcatgccttattatcaaacaggtgcatggtccccttgtgggggggtgcccgtcacctgcgtccccgtgcgtcacggcgttgccgcacaccattaacacatcaaaacggaaaaggaaatgt

SEQ ID NO: 219699 - DNA, 122 bp, Homo sapiens
cagagcgcacagcttcatgcccttgaagggcgcagtgtgtcccgtggtgcccggtgggcccggacagagaccccagaggctctgtctgaaggaagctgcacccacagactccatccaggcag

SEQ ID NO: 219700 - DNA, 122 bp, Homo sapiens
ccacggggcagcatccggcggcagcggagcctgtggctccccctgcgggctgctcagcggcgtgcacagtcctgccggctggcttgggtgggtggtgggctgcgggtaggggaggggatgga

SEQ ID NO: 219701 - DNA, 122 bp, Homo sapiens
ctcaggcttgcctgcccgggagcaacttcacttctgaaaccggattggacccagaggacgcggagaggccactccttgttatttctcaagttttatcatcgccggcgcggctgaggagctgc

SEQ ID NO: 219702 - DNA, 122 bp, Homo sapiens
aatcccatctgtggcccaaagttacacagtgtctttgattatgtctctttattatcttgccgtctttcatatttcatttcattaattttcaggagagtccacggtagttgatttgtagaatg

SEQ ID NO: 219703 - DNA, 122 bp, Homo sapiens
cactgtgcatccctccaggatcacccccgcccacccccgcccccacgtcagtgagctgggcgctctccaagtcctgcttcagtccctgtctcgtggctttgactgatacgataagtagagcg

SEQ ID NO: 219704 - DNA, 122 bp, Homo sapiens
tttttaagccggtctgaaaagccaaatattcggttgggagtgaccagattttccaggtgccgtcagtcacccctttctttgactcggaaagggaactccctgaccccttgcgcttcccaagt

SEQ ID NO: 219705 - DNA, 122 bp, Homo sapiens
cgagatctgatgcgtttatcaggggtttccgtttttgcttctgcctcatttttctctggccgccgccatataagacgtgactttggcctcccgttatgattctgagacctccccagccatgg

SEQ ID NO: 219706 - DNA, 122 bp, Homo sapiens
gtctgagtttcaaaagattccctagcaggaagaccatttaacagatagaccattttacaacgcaaacactgaaaattccgcaggagaaaagaggcactggtttttgaaaaccgtgctctgtc

SEQ ID NO: 219707 - DNA, 122 bp, Homo sapiens
tccccacagggcttcctcctccttgggctccgttttgttgtaaatccaggacacgtttgacgtcagggctggttgtgtttctcatggcaaatgaaacagctcctttccaaagctgctgttca

SEQ ID NO: 219708 - DNA, 122 bp, Homo sapiens
cctggagcacgctctcgggcaggtgctccagggtcacgtcctcctgggcctccagatcatcgtcaccactgatcagatccaagatgagcacgggcgagacgaccttactgtgccgcgtcatc

SEQ ID NO: 219709 - DNA, 122 bp, Homo sapiens
cgaagcggagtgggtgggccacagccaggtagcggtccaccgagatgcagcacaggaaggcgatgctgatgtagatattggtgtagaagatgaacccaaagagcttgcaggacccggggccg

SEQ ID NO: 219710 - DNA, 122 bp, Homo sapiens
agatgaagagcttccactcggcgaggctctggttgagggactccttcttcatcgtgtgcgcgcggacgacgaggggagcggcggccgcggggacggaggcggcgagggcagcggggacgggg

SEQ ID NO: 219711 - DNA, 122 bp, Homo sapiens
acaggcatgagccaccgcggccggccaagacataattttaaaaattatcttccagctggccgggcgcggtggctcacgcctgtaatcccagcactttgggaggccgaggtgggcggatcaca

SEQ ID NO: 219712 - DNA, 122 bp, Homo sapiens
gcccaggccatggagtgggggcacccgcgtgggactgaaggggtttgcgctgggaaagagcgggctgacacttgagctgctctgctgtgaaggaatggagaaacgagtctgcagctggacag

SEQ ID NO: 219713 - DNA, 122 bp, Homo sapiens
ttgaggggccgcaggagccacaggtggcagagctccatagaggagacactaagggcatggcgggtcagaagcagtcagtgaagtgccgagccctgtgacatcctctcaccacctttcacagc

SEQ ID NO: 219714 - DNA, 122 bp, Homo sapiens
cacagagcccgagcggggggtcggctgagagcctccttaacggagccccatgatgtcagccggcccgcacgcccctcgccctccgactgcgaccccggcccgggctcgcgcgccccgtcccc

SEQ ID NO: 219715 - DNA, 122 bp, Homo sapiens
tctgcagaaggggaccagtagacggggtggattcgaggtggggacatgggacgcagcggtcggagccgcctggaggggtacccggtggtcccgatggagctatcatctttgaggtattgatg

SEQ ID NO: 219716 - DNA, 122 bp, Homo sapiens
tggaagtttcccttcaggaagcagaaagagcctaagagaagaagggagaaaagaaccattcgagtaatagatcaggccacccttcatagtatcaccacagcagaccttgtttggattcaata

SEQ ID NO: 219717 - DNA, 122 bp, Homo sapiens
gcagggacatgcccttcagccgctccacgtagccagacgacacatgcccggtgccccggtcgtcccactgccggtcctcgttgagcgtgtacaccttcacccgccgccgggtgtcggtcatc

SEQ ID NO: 219718 - DNA, 122 bp, Homo sapiens
agccgctcgcgggcctggcccagcgacgtctccatgtgtgccacgcgctcctggtagccgcgcactgccccgcgccacgcctcgcccagtcgccttgccagctcctctacctccggggccgg

SEQ ID NO: 219719 - DNA, 122 bp, Homo sapiens
cttctaactgacgtctcccgcgagcgactgctctgcccccacttgggaagtccagggaggcgcaaggcggccacctccgccgctccccccagcagcaggagcagccgcagctccgccgcacg

SEQ ID NO: 219720 - DNA, 122 bp, Homo sapiens
cagccaaaaacgaacgaagactgagagtatccacgtcccctcccactccacgccccagcgcgctagcccatccatcagcccgccggccgcggttctcccatcccacagccggcggggggccg

SEQ ID NO: 219721 - DNA, 122 bp, Homo sapiens
ggctcggcggctagtaccagtgcagaaacatccctcctgccgcagctttgtggtaccacccgctgcccgctgattggctgccggggtcccgcagtccgcctcagcccgccgcgccgccctca

SEQ ID NO: 219722 - DNA, 122 bp, Homo sapiens
gggagacacacaaggctctggggcaggagctcctcaggacaacatgtcaggaggaccagccgggacctgagggggcctgtgggagaggatgacgctgcccagcaggggcgagctgacgaata

SEQ ID NO: 219723 - DNA, 122 bp, Homo sapiens
aaagcccttgatggctgcactgtatgatccacatataatgaaacttacactatgccaagacgcggcctgccattttgagatttaagagtagacaaaagtgagtggctgtaactcactaagga

SEQ ID NO: 219724 - DNA, 122 bp, Homo sapiens
gtgttctgtgtgagttacactggaagtatccattggttcttcctcttcttttaactgtaccgcattaccattcacctgattagccattttattatgctgctggaaaaaattcaggagctata

SEQ ID NO: 219725 - DNA, 122 bp, Homo sapiens
aactctcctgtgtaggctgctgggccagacactagtttctaagtggaaccccacagttcccgagatcccaacactgtctgcacagcacgtggtcttggggggcgctgaccttaacaaaggag

SEQ ID NO: 219726 - DNA, 122 bp, Homo sapiens
agcagggaggggagaatagcacacctggttcccagagcctaggaggcggtcactagagggcgctctggggcggggtagccctgtgtggggagggtagccccctgtgaccccccgaagagccc

SEQ ID NO: 219727 - DNA, 122 bp, Homo sapiens
tgtcgtcactcggttctccgcccatccccgtgcgcacgtgttcgctgtgctagccccgtgcgagctgagctgccgttagagtcggtagattacagcgaagctgcagtcagcagctcgtctgc

SEQ ID NO: 219728 - DNA, 122 bp, Homo sapiens
aaactcctggcgtcaagtgatccgcccgcctcggcctcccaaagtgctggttattacaggcgtgagccactgcgcggtgcagagagacagacatttagtcattcttctgtcaatgcttagtg

SEQ ID NO: 219729 - DNA, 122 bp, Homo sapiens
gctaagtgtttttatatgtgttccctcattgtattttcggggacacttaatactcaggatcgtgggcacttaatgtcttatataagtgctgcatggggtttaccttctgttaagcctcaaga

SEQ ID NO: 219730 - DNA, 122 bp, Homo sapiens
accttgtgatccacccgcctcaggctcccaaagtgctaggattacaagcatgagccaccgcgcccgaccaacgcttggctaattttttgtagagatgggggtgtgttagtccattttcacgc

SEQ ID NO: 219731 - DNA, 122 bp, Homo sapiens
gctactattataaaaacgcttcttcaaaacctaccacttagtgtcccacatcctcggtgacgacactccttcctacataagagaaacctaaatattttacttttctcagtcaactctgtatt

SEQ ID NO: 219732 - DNA, 122 bp, Homo sapiens
ccctgttatttattgccacagcagagtctaatttatatgccacggacactccttagagcccggattcggaccacttggggatcccagaacctccctgacgatatcctggaaggactgaggaa

SEQ ID NO: 219733 - DNA, 122 bp, Homo sapiens
aggtgaaatcatagcacttacaaatacaaaaacttaagagtttgccactggtagaccctccggagggagattccaaagctggaacttcaggcaggaaaaagatgatcccagacggaggtctg

SEQ ID NO: 219734 - DNA, 122 bp, Homo sapiens
tattctgtgaatacaaaagaatgccaaatagagagcaacgtgaagaagaagacgcgagaacgaaccccggactgaccaaagcctgcatgccactgcatcctgtgccaagtgcttacctcctg

SEQ ID NO: 219735 - DNA, 122 bp, Homo sapiens
ggccggtggatcacctgagatcaggagttcaagaccagcctggccaacatggtgaaaccccgtgtctactaataactcacaaaaagttagctggacatggtgacacatgcctgtagtcccag

SEQ ID NO: 219736 - DNA, 122 bp, Homo sapiens
cggtcactggctcgcctgcccttctgctggggcactcaccccgcccgctgtcgcccatcccgtcccgtccagcctcccctggctccggctccggggtttgttgttctccgcctgccaccgcc

SEQ ID NO: 219737 - DNA, 122 bp, Homo sapiens
accggtgacgtcccgcgggtcaacagggcgaggccgagtctgggtgaaatttgagcacagcgcgtgcacggaaggatggcggccactaaagcccagtgggaatgccagccaggatctgggtg

SEQ ID NO: 219738 - DNA, 122 bp, Homo sapiens
cagcccgcccagcagccgagtgacctcccgagtgactcctcctcaggccagaaaaggccgcgctccaccctgccctcgccacctcaggcagagtaggactggcgacagtccagggaagccag

SEQ ID NO: 219739 - DNA, 122 bp, Homo sapiens
cccacgcaggctggaggctgtggacgggggccagagtggagtgccgcgcggcgggcctctcgggaggctgtggaaaaggagctgggagctctacagcagtgctgggagcgagacggtggccc

SEQ ID NO: 219740 - DNA, 122 bp, Homo sapiens
ttccaggctcgaatacggatggtcctcgcctatctgtttgctcagttgagcctctggtctcggggtgtccacggtgggctcctcgtgctgggatccgccaacgtggatgagaggtgagtgtg

SEQ ID NO: 219741 - DNA, 122 bp, Homo sapiens
ctctctctaaaccctctttattcttggcttctaaaacaaagaagaggtaaagaaaatccacggggccagggctctgtcaaagaacacccaggctgcacttaattaagatgaataatttaaag

SEQ ID NO: 219742 - DNA, 122 bp, Homo sapiens
atcatcaaactgtaagtgctttgatcttttttatgcttctgtacataagaaaaccaaacacgcccaattcctatgctgtgttgtcataagaattagaaactcttggcacacagctgtcagta

SEQ ID NO: 219743 - DNA, 122 bp, Homo sapiens
tgggtgcccatccacatccctgccactgtcaatttagatcggcattcccaacctcatctgcgtcaggaacactggagagagttttctggaatccaagcatttgtctaggcatctttactcca

SEQ ID NO: 219744 - DNA, 122 bp, Homo sapiens
tgggaagtcatgtctggacgtggtaagggcgggaagggtttgggtaaggggggtgccaagcgccaccgcaaggtgttgcgtgacaacatccagggcatcaccaagccggccatccggcgtct

SEQ ID NO: 219745 - DNA, 122 bp, Homo sapiens
ggaaaggataggtaaccattggtaaaagacctcaaaggtattagaagggattgagatgctcgtccaagtgtatgggctggccttaggctgaagcaagactgcttcaagagatacaaaagcaa

SEQ ID NO: 219746 - DNA, 122 bp, Homo sapiens
cctcacagccctaagagagacacgtttgacagatggagaaactgctccgggatactccgtcggggaatggcaggagctggccccacagcccggcctggcgccaccgcgcactgcctgggccc

SEQ ID NO: 219747 - DNA, 122 bp, Homo sapiens
atccttcccaaggagaatgagaacagattagaaagaaaggagctaggtgggagtggccagcgtcaggcctgagctgatcccagtcaccccactggaccttggcaccattctctggggcccac

SEQ ID NO: 219748 - DNA, 122 bp, Homo sapiens
tctgatctaatcacttgctaagttaggccccactttccaattttctttctagctgattgtcgtcttctggagtcttccagctaatactgtgattccattcctgtctctaccatctctaacat

SEQ ID NO: 219749 - DNA, 122 bp, Homo sapiens
agcgactggagagccacagcccttgtctcagtactggatcacactggtagctgtgttctccgcgcaggtagacagggagagactggtggagaaatcagtgaacagaggctttcgctctgttc

SEQ ID NO: 219750 - DNA, 122 bp, Homo sapiens
aaacttatctgttgtgtgcaccatctttgctgggcacagttagacagccggcttgctacccgaatcaacatgagctaaggagctaggattcactggcttcccattccagctccagttcccat

SEQ ID NO: 219751 - DNA, 122 bp, Homo sapiens
aacgtctaaactgtcccagagaacgcccatttcccccactatttgtgagcgcagggtgctcgcaaagaagaggaggaaggaggaaggcaggggagggagaacggcaaggagagctccgcagg

SEQ ID NO: 219752 - DNA, 122 bp, Homo sapiens
gtccacagccccggcttctctgtgtgcggaggggcggccagagcgagcagcggtcagacacgcgggccggcacgcaggggcctgaatcgagcgcagggctgggcgggggccgcactcaccgc

SEQ ID NO: 219753 - DNA, 122 bp, Homo sapiens
aaggaggccgcgtcctctgtctggtcctgggatcctgcagaccccacccttgtcttaaggcgccgtggcgccgccgcctccctccttttgcgggccctactgctccccaggttcgcctccac

SEQ ID NO: 219754 - DNA, 122 bp, Homo sapiens
gaagttcatgtgggcttctgagtaaactttccaagatctaaaacccgtaaggaaaccatacgtgtaacttagcaaagataaaagactgacagtgtccaaacaagtaagaatcaaccaggtta

SEQ ID NO: 219755 - DNA, 122 bp, Homo sapiens
agattccatgacacccccaccttctaattctgttttgcaactgcagacggttacctggcacgctggccacaatctacctcactcttatcagagtctgcgctactgacagtgctttcagctct

SEQ ID NO: 219756 - DNA, 122 bp, Homo sapiens
aacggcagccaagcaggagctcagctcagaccgctggcgggcaacggcccagcgggaaggcgcctctcctcccactcaggaagttccagcgccacggggatctgtgcggtcggacgtgcaac

SEQ ID NO: 219757 - DNA, 122 bp, Homo sapiens
gcccgacctgggcacaggcacagatggccctgccggctccgacaccagccccttccgcagcggcacgcccatgaaggaggccgtgggccacaccggctacctgaccttcgccaccaagaccc

SEQ ID NO: 219758 - DNA, 122 bp, Homo sapiens
tgtgggtctggaaatgtcagcgcttcacctggaaaagcgaggaagcgtacagcagcgtcccgtctccccccaggcagatgatgaagtctatctgattggaaatgtcatcataatctaggaaa

SEQ ID NO: 219759 - DNA, 122 bp, Homo sapiens
catttccagagaacaaaatcaccctggactcagaggatgttatggccagtaggaaaggaacgaagtgagtgagtctttgtgaaaatgccttttctatttagagagtgaacaaagcttgaatg

SEQ ID NO: 219760 - DNA, 122 bp, Homo sapiens
cctgcgaggttctggccagctcttgctggccatccctggagggtcaggcctcctctggtccggccagaggtgacccaatggcaggtgtgggtgaggatgctgcggcccgtctgccgccgggc

SEQ ID NO: 219761 - DNA, 122 bp, Homo sapiens
cctcagaaaataaaattcaccccttcctgacacctattgttccatgatcctgtgagccttcggacttgagggtggggcacttggaatcagtttgcgtcttgcataaaaaccatttcaataaa

SEQ ID NO: 219762 - DNA, 122 bp, Homo sapiens
gaagtaacccctcaccagacggaaaaccagcctccgccacgcgcgcaccttcactgggggcggggctgtagcagactccgccctttatcagacaagaagagttgggcgtgtccggccccggc

SEQ ID NO: 219763 - DNA, 122 bp, Homo sapiens
aaacatagagttcatgtgagcaaacggggactcattaatgggacagcgccgaccatggctcgtggtttgggggctgctggcgggtcttaaaggaaaggcttttgtgaggtgtgtgaggaagc

SEQ ID NO: 219764 - DNA, 122 bp, Homo sapiens
gcgcaagccgcgccccctctgcgctcgctcggccgcccagctcccacctgcgcctctccgcggcccctctccaccggccgctgggcccggatcccttcggcgcccctctgcacccaccccca

SEQ ID NO: 219765 - DNA, 122 bp, Homo sapiens
tgcccactgccctcagggtcagctcagaccctctgtgcagccgtttgggtggacaccccacgcctgcccccagccggctctcaggcctcaggctaccagggtccctgtgtctccgcacacga

SEQ ID NO: 219766 - DNA, 122 bp, Homo sapiens
tgttcacgtggcaagccggagccaggctggagctgaggcctccactcaccacccagggtgcgctccgctcactgccgccccctgcaggctacccctgccaccgaatccccccacgtcatgga

SEQ ID NO: 219767 - DNA, 122 bp, Homo sapiens
gagcgcgcacccacccaggcggcaaagttgtgactacttgggcgcgggtgactggcgccccgctcgctccgcgcccggcgcagacaacttcccgcggctcggccccgccgcgtcccgggctc

SEQ ID NO: 219768 - DNA, 122 bp, Homo sapiens
gggctgaggcgccgccacgccggtacttacggcccgggaggcggtcccgcgtggagcgcgcgctccgctttccccgccccgggctggctgcgaaaaccgccggccttaaagagcccgcgacg

SEQ ID NO: 219769 - DNA, 122 bp, Homo sapiens
tctatgtttaaatccttagtgcaggaattgacaagccatcataatattttagcttaggagcgaaaaggtcaggcttaaatgtgagagctgggactccaatggcaggagagcagaaggactgt

SEQ ID NO: 219770 - DNA, 122 bp, Homo sapiens
gctcacatctcaaggcagtcagtctgggaaatggccttggtcccctgccctaccctggcacggttctcctgagtctccctttagctgggatgtgggactcccagtggctctcactccctcat

SEQ ID NO: 219771 - DNA, 122 bp, Homo sapiens
gtcatgtcattgaaattaatcttcttcaactggaatagcacaaggtgagcaacacagcaacggttgacctttttactaggacttaggaagaaagccattttcttcccagaaatatagtgttg

SEQ ID NO: 219772 - DNA, 122 bp, Homo sapiens
ctggtgggaccctgccctgctgtgcagtggggtccttcgtgctgggatctttgtggtccccgttcttggagagatgcccggggcggcagacaggaagggtggagggcaaagggaggggagga

SEQ ID NO: 219773 - DNA, 122 bp, Homo sapiens
tgcaggaggaccccggcctctcgagggctggatcagcagccgcctgccctgaggctgccccggtgaatgttattggaattcatccctcgtgcacatcctgttgtgtttaagtcaccagatat

SEQ ID NO: 219774 - DNA, 122 bp, Homo sapiens
ccgtggacagacagtgcagggaagctcgggccacgggacagacagaccgaggggagactccgatcctgaggcaggcagacggcgggtggtgagtcagagggaggaggcgcccgggtcgcgga

SEQ ID NO: 219775 - DNA, 122 bp, Homo sapiens
ttacagcagctcggtcatcggtgggtgtttgctaagtccagactaaatcctgtggcgtagcgctgtcaaatctgaacaggtggaaagaaaagttctttactcatcaaggcagtgtaaggtgc

SEQ ID NO: 219776 - DNA, 122 bp, Homo sapiens
gattttattccttgttctagacctttccttctgccaggaaggtggctctgcctcggtttacgcctttggtttgctcacctggggaagtggttgggggattgcgggaaaactgagactcccag

SEQ ID NO: 219777 - DNA, 122 bp, Homo sapiens
caggtactaaccatgcccaactctgcttagctcctgaggtcagacaagatagggtgcattcggagtggtgtgaccatagaagagataactgtacttcaatgtttattgcagaattattcaca

SEQ ID NO: 219778 - DNA, 122 bp, Homo sapiens
gttcttagtcgtcctttcctctttcctttccgacaggagcaccccaggcaaaaaatgtctcgcgggtcattggcgccaggctttcaggggacagtggggcggggcggggtgggcacaggacg

SEQ ID NO: 219779 - DNA, 122 bp, Homo sapiens
cgtgtccagtacctcgcagacctgaggaatgtagttctccttgaagtagttcttcagcctcgggttggcattgcgtagcgaggccatggcccaaggcctgacggagaagctgcgatagtacc

SEQ ID NO: 219780 - DNA, 122 bp, Homo sapiens
gggacggtggaggagatcctcaacgtggacccggtgcagcacacgtactcctgcaaggtgcgcccacccggaccccggcctcccctcgcgacgcctgccgccccgccgggacccccgcccca

SEQ ID NO: 219781 - DNA, 122 bp, Homo sapiens
tgctgcggtatcccatcccccgcctgtttaagagaaattgatcacgttaagcgggccctgcgtcgctgcgcagtgcccggactaccgcttggatggattgacaagggaaggacgcaggacac

SEQ ID NO: 219782 - DNA, 122 bp, Homo sapiens
agtgccagagaggaaatctcatgaatttatagctacaaggtaacaacttaattggaaccccgggaaggaacagctcagaaaagggcagtgccagggtggatgaatgaccgaccagccaaaag

SEQ ID NO: 219783 - DNA, 122 bp, Homo sapiens
tgtccgcctgagccttggtctcaatgcaggaccccagtgtgcgagccccccacattacgccgaagagtggggtgtcagttctctagaatgccttagccacctcccttaatcagccacccgag

SEQ ID NO: 219784 - DNA, 122 bp, Homo sapiens
agaaaatctccacagcgttgtttgaagtgtctctcaccagagccaccagaaataaaatggcgtggctccgaggcctgcaaacctacttggtgcacacagatgcagctcatcacagcgcggtc

SEQ ID NO: 219785 - DNA, 122 bp, Homo sapiens
gcctagcgcccagtgggttgcaggaaaaacccggagctgaacacactgcccgacccgggccgctgcgctcgggagcctgcgcagaagccgtcggaggcgcatgctctgtagcggtctccgca

SEQ ID NO: 219786 - DNA, 122 bp, Homo sapiens
gtattatcagaaaaaagacacaaacacaatgaatacagaatgattttgagtgtgggatagcgagttgcatggagaagcagacccgttcactgattcactgcacatgtaagcacgtgctacac

SEQ ID NO: 219787 - DNA, 122 bp, Homo sapiens
gccgtcgtggtagacgggcaagggccctgaagctcacaccacgcatcccgacagactcagcggtgcctgtctgaggcacttgaagctggaagacacagctctgggaggctctcgagctctca

SEQ ID NO: 219788 - DNA, 122 bp, Homo sapiens
gaaggcaccaccagaccatcaacaagctccccaagtttcccccgaactgcctggcgatttcgaagtcgaatgttcatggctcctgactgttcctgcagtgtccggatctcagagctgatgga

SEQ ID NO: 219789 - DNA, 122 bp, Homo sapiens
cccgctcagaagcgacacctgtcgcagagcaggaaggagccgccgccaccagccctcggtcgttaaaggtgaagatggaggccaaagccctcgggagcaagactggaattttaaatgagcgc

SEQ ID NO: 219790 - DNA, 122 bp, Homo sapiens
tccttcctcacctgctccgtggctccgtctcctgacatggcctcagctgattacaacgtgcgcactgaccgtcgatgggaagctagaaaagaaaaattaaactaaaaaccacccccaaatca

SEQ ID NO: 219791 - DNA, 122 bp, Homo sapiens
tggtaatggggagccatcctgaatctgcccatgggtggctctaggatgagctcctaaattcgtatgcaaatgtgtgtatgtaagacgacacttatttggggagggagtcctgagctttctcc

SEQ ID NO: 219792 - DNA, 122 bp, Homo sapiens
gtgcggccacaggacaaacgcccagaacctgagcccttcacagtacccgaagccgctctccgggccagccactggccaggagaggaaagtccatgctggaagattcccagctgtgtctggtt

SEQ ID NO: 219793 - DNA, 122 bp, Homo sapiens
ccaggccgggccacccagagcggggtggaaggcgccaggggagccggggagcctttacttcgcctccgcgccctgcattccgttcctggcctcgggagaagcggcacggaccgggatcacgc

SEQ ID NO: 219794 - DNA, 122 bp, Homo sapiens
ttgcaatggccgtgaggtggtggactcgacaacgtcatcgctttgaagaccccatactcccgccctgacacagctgctcctgggaacctagtgcagacccacgtccagggccaggaggaagt

SEQ ID NO: 219795 - DNA, 122 bp, Homo sapiens
tgatgtcatcaggctttgtgagggggactgtactgccctttgagtactactgtgtggccccgcaacccagcacaaccaggtatctgcttggaacccagccaccataaagcctgctagctaaa

SEQ ID NO: 219796 - DNA, 122 bp, Homo sapiens
gtccctccatctacacagggacatcggttccaggacaccccgggtttaccgaaatccacgcgtccgcaggacccgcgcccaccctgtggagctgcatgtaggaaatgtcggccctccacaaa

SEQ ID NO: 219797 - DNA, 122 bp, Homo sapiens
tctgcgagagcagcgcgcggcccgccaggggcaagccgccctgcgcgtgcttgtccgcggcggccagcaggtgcgccgccccgcacagcgagtaacttctccgcacagacggcttgttgagg

SEQ ID NO: 219798 - DNA, 122 bp, Homo sapiens
aaagaaggtgttattatcctcattttaccaacagaaaaactgagacagagccgttaagtacgcagccagagtcacacagctaccaagtggcacaggcaagattcaaactcagggattctggc

SEQ ID NO: 219799 - DNA, 122 bp, Homo sapiens
tcaatttgtgccacctgaaagagtgccatctagaagcagttgcttcaaactgcacttcaacgggacccacacgccctgctaagcaactcaaactcatcatgaaataaatctgcagaagaaat

SEQ ID NO: 219800 - DNA, 122 bp, Homo sapiens
atatttagcctggaagggggttgggggcgctgggagacaaagcgccgcggccagtctgggcgcccagggggcggagccggcgaaagccccgcggccgacccgccctcccctaccgcagggtc

SEQ ID NO: 219801 - DNA, 122 bp, Homo sapiens
gctgtccgcctggtaccagcggtccttcaggttctccaggacttcctgtgctgagaggggcgcagcctgtgggtatcgaggccgacagacgccagcacgcaaatccagaaagttccgagagg

SEQ ID NO: 219802 - DNA, 122 bp, Homo sapiens
aggagtaatttagctcaaaagcttcagtttatagatgcaaaaaatgagtcccagaggggtcgccttcctccaggttacccagctgatagcaaagcctaaaccaattctcatttctcctactc

SEQ ID NO: 219803 - DNA, 122 bp, Homo sapiens
ctcagtgatttgagggtcagcgtgtttacagccccacgatacctgtcaaacaaatgtgttcgggttgagtttatagctctgtcaacagtcgcaatcgcttccacgatggaggtagctacaaa

SEQ ID NO: 219804 - DNA, 122 bp, Homo sapiens
cggttactgaacctctgccagagaacagagaggcccggggcgacacggtcgttagtgaggcggaattgacccccgaagctgtgacagctgcagaaactgcagggccattgggtgccgaagaa

SEQ ID NO: 219805 - DNA, 122 bp, Homo sapiens
tcacgaggggagctcagaaccctacttcctgagtgtgggatgtgcgcagctatgtggttccgaagagttcaagacgaaaagagggagaaagagtaacttcccagcagaggacctgacgacct

SEQ ID NO: 219806 - DNA, 122 bp, Homo sapiens
ggttctgtggagcagacgcccaagaagcctggcctcagaagacgtcaaacgtaaacagctcggtgggttgatcactaaaggagcacgcactggaacccggggccttcagacctcacgatacc

SEQ ID NO: 219807 - DNA, 122 bp, Homo sapiens
tctcgcttacttgaggttgattcccatagtccctttgacgaactccagatggggtaggagcgtcctggtccttaacagttggttggtctgggtcttcaactctggttaaaaaggaattctct

SEQ ID NO: 219808 - DNA, 122 bp, Homo sapiens
cacactaggcaaaggcttctgctacccctggaatcatctctctgcagggagttctagtgccgttgttcccatctggcagatgtgcaacatggctgaaaaagggatgcctgtggctttgggtg

SEQ ID NO: 219809 - DNA, 122 bp, Homo sapiens
gggtgtagaaagctccaccctcctcccggcagcgcgcctgactggcagttcccaagaactcgcccccaacactgattgggtagagctccaaattccgcccccccagggaactgattgacaga

SEQ ID NO: 219810 - DNA, 122 bp, Homo sapiens
ttttcatgtggtactttctattggttttgtatatgggacaaattaaaggagcctttggaacgtatgaacctgtaacttacaaaacaggatgtactttatggggaatttttgtgagtagaata

SEQ ID NO: 219811 - DNA, 122 bp, Homo sapiens
ccatttaaggaaaaggcatctttgttgaaaatggaatagggcaagggtgaaaaggtggggcgaggcagatgtcagttttgtgtattgcagtattccattatctaaaacagtgcaggcagata

SEQ ID NO: 219812 - DNA, 122 bp, Homo sapiens
agtcatatgtgtgacaaaacccagctgcttcaactggaaatgagtttggcagcaatggtccggaacaccaataaattgaatacccaagagctaaaggtcatcctgcccccagaaccagtgct

SEQ ID NO: 219813 - DNA, 122 bp, Homo sapiens
ggtcctgttggtcctagctctgtccctgatgaccacccagctgccccctctgcaggatgccggtgcagtacatccttggagagtgggacttccaggggctcagcctaaggatggtgccccca

SEQ ID NO: 219814 - DNA, 122 bp, Homo sapiens
cgcccatgcgtggggcccaggggaccccaggtgtccctgtttcaagcccatggagcgcctcgggcccaagggggccagcccaaggcggcaggaaggcttgcaatgggaggtcaaggcaccgg

SEQ ID NO: 219815 - DNA, 122 bp, Homo sapiens
ctcagtttcatacagatttggtgggctggaaccaaatacttgcctgataggctgtcccctcgtctttcctagctgttctgggaaaggcagttcctggtaagaactctccctacggccccttt

SEQ ID NO: 219816 - DNA, 122 bp, Homo sapiens
gttggactggctctctggtctctctaactcaagggctccatgattctatgatgtcactgacgagagaagaatggggagctgggctcagctccagctgttccgattcctctctcctctgggtc

SEQ ID NO: 219817 - DNA, 122 bp, Homo sapiens
ctaccgacaggaaggtcccttgcccccaacaaagagggcgtccaatgacgtaaaccaatccgattgctctgtgccagggccgggattcgctggcgtagccagtcagtgctgccccacagccg

SEQ ID NO: 219818 - DNA, 122 bp, Homo sapiens
gggaagggggaggggacaggggaactctcagagcaaacaatcacaaacacactgtgaaatcgaaaataaattacaaaaactaaatagtataaataaattaaaatttaagttaagaagagtcc

SEQ ID NO: 219819 - DNA, 122 bp, Homo sapiens
ccagcagggcgatgtccccctcaaaattgtaggactcatcctgacggtagtccgggtggacgctgaccctgcggatggggtgatttcctagcttcatgagctcttccacatttgtgtggccc

SEQ ID NO: 219820 - DNA, 122 bp, Homo sapiens
acacctctctggcttttctatgatccaagtgtgaccttctgaatgatataatggacaatccgcatactcagaacactcctacaacacattttgaaaaattggagacccttccaagaagacat

SEQ ID NO: 219821 - DNA, 122 bp, Homo sapiens
gcatgccactgaagaagctcatcttgtagatggcaaagatgagcttgcaaaagtggacaccgaagacccaggacttggccgcgctgtaggcccagaagggaagggtcaggaggaagaggatg

SEQ ID NO: 219822 - DNA, 122 bp, Homo sapiens
aggggtccgcgggggctaagccgagctgggacgggtgggggccgctggcagcccgcggctcgctctctccgtccagtctctgtctcccgctgtctctcatcagccccgcccaccctgcgctg

SEQ ID NO: 219823 - DNA, 122 bp, Homo sapiens
cgggaagcagagggcagaggagacgctcacctgcaatgccgttgcagccccagcctcggccgaccctgggagctgggaagctggaattgccctcagaggggtctccaactggggcaaggggc

SEQ ID NO: 219824 - DNA, 122 bp, Homo sapiens
aagcccaaattcccatttaggatgagaaacccaagaaccagagaagaccagtgatcaactcgagggcacacagccagcgggcctggtccacagccaggccaacccgctaacaaaactgcttc

SEQ ID NO: 219825 - DNA, 122 bp, Homo sapiens
accttgtgatccacctgccttggcctcccaaagtgctgggattacaggcatgagccactgcgcccagcctaaactatatctttatgcagcctgagagaatagtgggtatcattcaaatagtc

SEQ ID NO: 219826 - DNA, 122 bp, Homo sapiens
gcggccaggagagacccgggtgtcaggaaagatgggccgtctgggggacagcagggagtccgggggaaacgcaggcgtcgggcacagagtcggcaccggcgtccccagctctgccgaagatc

SEQ ID NO: 219827 - DNA, 122 bp, Homo sapiens
tctcttttttttttcatttgagatcatggggcagtgggctctctctctttctggcattttcgagttgtcctcactagctccagtgaaaggtattaaagtcagcagagccattatgaccttgg

SEQ ID NO: 219828 - DNA, 122 bp, Homo sapiens
ggcgcgtcgcgtcgggtcgcctgggggagtggcgcccaggaaggcagcaagccgggtggccgcagtggcgtccctcactgaagcggcgtaccgcaggccccggccaacggccctcccctcag

SEQ ID NO: 219829 - DNA, 122 bp, Homo sapiens
tcaaaattcacccgaaaatgcgctgagactttggcatggggctgcgctgtgtcccactgacgttacagaagcgcttatgaatttaaaaactgctccaggcggccggacggcgggacaacgcc

SEQ ID NO: 219830 - DNA, 122 bp, Homo sapiens
ccagaaatattcgtctaataacaacttcccatttggtgcaccaacagttctggttggtaccggagggggagcaagacacaaatctgaaccatttaggagtttctctaaacacgttttaggaa

SEQ ID NO: 219831 - DNA, 122 bp, Homo sapiens
cgaggtggcgggggtctgtgacccggcccggactttgtgcccagctctcagtgaggacttcgcggtcctggggccagtaggtgagaaaatgatggatgggccgggtgggcgacggcaggaac

SEQ ID NO: 219832 - DNA, 122 bp, Homo sapiens
tgccgcgctcctcggggaacgtgagggtctgagtccgggatccaggagagcagttggtgtcgggtctctgcgggggagcggggctgcgaggtggaggcgaggaccggggtgggcggaggcgg

SEQ ID NO: 219833 - DNA, 122 bp, Homo sapiens
ctaaacaacagactcagtggagcctgtttgcctagtaaggagtagggactttgtcctcaccgcctgtcacttacaaatagagagaaaggagagaatacgaacaacagagtgggaagtgcaaa

SEQ ID NO: 219834 - DNA, 122 bp, Homo sapiens
tcactgcagacacattatcccttattggggatgtgtagtggggcttcagacacattgtcccgtactggggatgtatagtggggcttcactgggtatggtgtatttgagtggcttgctcagca

SEQ ID NO: 219835 - DNA, 122 bp, Homo sapiens
acgccagggtcgctgagagactctgttctccctggagggactggttgccatgagagcagccgtctgaggggacgcagcctgcactacgcgccccaagaggctgtgcgtggcgagcaggtcac

SEQ ID NO: 219836 - DNA, 122 bp, Homo sapiens
tctcccaagccccttccattccaatgctccaggagttgatgaaacactgcaagaacagtgcggaactagggcaggagctggagatgccatgagagactcggaggaaactccagactgacggc

SEQ ID NO: 219837 - DNA, 122 bp, Homo sapiens
atcctcctctccctcactcccctgcagcttcaactaaatgcgatgtacttaaacaagcagcgccttataggaccgcgaaccgagccgaaagggccccgctactgccatctagtgctcacaga

SEQ ID NO: 219838 - DNA, 122 bp, Homo sapiens
cggactggtaacagtgcaggtgacacagacggcagcggccaatcgggctgcagggagaagcggtggggctgagcgcctggtggcctagggccagggaagccgggtcgcaggctcctgctggg

SEQ ID NO: 219839 - DNA, 122 bp, Homo sapiens
aggcgcgagacgtatagccacccctgggttgggagcacgagccagcagatccccggagcgcgttaaacggacaacatgcccggtgctgcaaatagaggcttttgctggcagggacattggaa

SEQ ID NO: 219840 - DNA, 122 bp, Homo sapiens
ttaatgcctgaaacttgctgcaacttgcatggctcttaaagcgtttgttaaaaagcaagtcgagaggaggcaatgtagcaacaaaaagaacgaaagcaaattgcttacgccaagagggtagg

SEQ ID NO: 219841 - DNA, 122 bp, Homo sapiens
gatcagtaggatcccagggctcacctgcctagcaggggtatgggaggctgtcaccgacaccggagagccaggcctgcttcaggcccatccttggaaggtttcaagttcccttctgtgcccag

SEQ ID NO: 219842 - DNA, 122 bp, Homo sapiens
gtgctacccctaaccctcagcatggcacgtgagcaggaattgcagcagagaaactgagaccgagggaagtggccccgcctgcgctggtggccaggaggacagcccccatcccctccccgctg

SEQ ID NO: 219843 - DNA, 122 bp, Homo sapiens
agccgacttctggtagcttagcaaagagaccagctgactgtctctcggcccagcccaccacgccgagtagcttgtgtggatgcagtcctgtgagggtgtgcataaccgttcccaggtgtacg

SEQ ID NO: 219844 - DNA, 122 bp, Homo sapiens
ccccaaggatgaggccctcggggctagaatcgaaacttgggaacccaaggctccaccccgcgtctgactgagtgatacctgcagcgctcccggggctcagccctgttttcggggagtgcagg

SEQ ID NO: 219845 - DNA, 122 bp, Homo sapiens
aaagaaaggtgtcccactaactccgaagttaagtgggtgtcgacgcagccccctctattgcgcttgcgcagtgctgcctccctgagcaccccgccccttcccgccgctgaggatttactcgt

SEQ ID NO: 219846 - DNA, 122 bp, Homo sapiens
accggggatcttcttaacgtgcaaattctgaggcagatctggggtaggatcgagattctgcgtctctaacaatctcccaggtgaagtccataatgctaattccaggaccaaggctttcacat

SEQ ID NO: 219847 - DNA, 122 bp, Homo sapiens
aggcaaaagcgaagaagacgctcaggaaacgtggaggccaccttgcttctcacaaaatggcggatgacacaggcggcgcgccgcctttgtcctcgtcttatataggccagctggcacggccc

SEQ ID NO: 219848 - DNA, 122 bp, Homo sapiens
agctgggattacaggcatgcaccactaggcctggctaatttttgctattattagtagggacggggtttctccatgttggtcaggttggtctcaaactcccgacctcaggtgatctgctagcc

SEQ ID NO: 219849 - DNA, 122 bp, Homo sapiens
aggtgacaatgacaacaaaattgacgcggacgctccagtcaaaggcatctcccctttatccgatgactcaccctcttaggaagtcggcccgagaggcaaatctcaaaataccttgacatgaa

SEQ ID NO: 219850 - DNA, 122 bp, Homo sapiens
atcctggacaccgctccatccgacaggggaacacttttgatccagacgctttgacaacctcgttcagtctcctctggagagagccgccaaaccctttgctgatgagctgagactgaccgggg

SEQ ID NO: 219851 - DNA, 122 bp, Homo sapiens
atcttagcactcactcacatcttagggcagtgaggtggcggctgatgttaggtgaactcacgcctaaaagagcaggcatctattctggtctgctctcccaagccagtcctgcctctctccat

SEQ ID NO: 219852 - DNA, 122 bp, Homo sapiens
agccttcaggaagagggggcctaggagtcacggccgccatggcatcccctcacctggcagcgcccctcccggtagggtgtgcacgaagacccctcagccacgccccttcgctccgccacccc

SEQ ID NO: 219853 - DNA, 122 bp, Homo sapiens
agacgtcgtctcttccaagttccaccgcacagccagctctttctcttcactgggaggttccgcaggggctgacttgctccttaaggtcccaagactattaagggacacccagtgaggctggg

SEQ ID NO: 219854 - DNA, 122 bp, Homo sapiens
caggcagaacatttaacatcgtcctggccattaatgactaagcctgcgccagctcaaaagcggtcggaaacagacgtcagactatgggacagctaaaacattgattctcagggatgtcgtcc

SEQ ID NO: 219855 - DNA, 122 bp, Homo sapiens
gtgtagctctggctcctcatggataagctgtataaagccttattagattcaaatactaaccgtcgctatgccatattaaaaaaaatcattatagctataagctgtatttcttatataagtgg

SEQ ID NO: 219856 - DNA, 122 bp, Homo sapiens
cattcaacagacgaccgctccgggcctggcgcgggcaggggcgcgcagtcaccgcctactcggctccttggcttaggctccccaaccccctgccacaggaggccaccccaaacttcgcctgt

SEQ ID NO: 219857 - DNA, 122 bp, Homo sapiens
gagttaggcaggcggggggatggcgcggggaaaaccaggccgctgacccaccttccaccccgcagcccacctgcttccagacaaggtcacacacactgtgaacaaaggtgacaccgctgtac

SEQ ID NO: 219858 - DNA, 122 bp, Homo sapiens
tctgttatccgctcctttctccaggcctcctctccgggattaagcgcctcaggacccgtccgccaggccacagcctgggctcaacctctcccagacttcctggactccagtggagccttggg

SEQ ID NO: 219859 - DNA, 122 bp, Homo sapiens
aaacaaagaccaaaaatgacgctcaccggaggagcccaaacggtgaccgcagggtggctgcggtcctccccgggcaaacaggaagttggcgtgactgtctccgacggctccgggcattaatc

SEQ ID NO: 219860 - DNA, 122 bp, Homo sapiens
tccgagcctgggcacccgcgatccccgcgctgcgcggccgaccctgcgacgcggatcgggcgctggagtttaggaaagtagccagaccgcacgtccagcgtctgcccgctgaagttcgtggg

SEQ ID NO: 219861 - DNA, 122 bp, Homo sapiens
atgctgtcctcgcctagtgggggccggcgtcggtggggagctgactgagtccgaggccgtcgagtgaaaccagggggcagccagagagctccatgctctcggcgtcgacgccggatgagctg

SEQ ID NO: 219862 - DNA, 122 bp, Homo sapiens
aagtggcatggcatggtggctcatgtctgtaatcccagcactctgggaggccggggtgggcggataactaggtcaggagatcgagacaatgccggctaacacggtgaaaccccgtctccact

SEQ ID NO: 219863 - DNA, 122 bp, Homo sapiens
aggaccttccgggcccataaggcgggaggcaaggagggcccctgggcagccccgcgcttgcgcgccaatcacggccgttatggatttcgatacgttaccaaacggtctcctacaaaggcaga

SEQ ID NO: 219864 - DNA, 122 bp, Homo sapiens
gctgtggtaacaaatagtaccaaaagtctcaggggcttatgacaaccaggttcacgtatacgtccatcacaggttgaccagtcaccaaagaaaactagagcagtcaccactgtgaacattca

SEQ ID NO: 219865 - DNA, 122 bp, Homo sapiens
cccacacagaatcacagtgtgaacattaaaagtcaggccacttgagtgcagtttgaaaagcgctgccctgctctgctttcttctagctgaccaggtcccaggcctcagctggtggcaggtat

SEQ ID NO: 219866 - DNA, 122 bp, Homo sapiens
taagggtagccacctcgcgccctcctccccgcgccaccggctgcccatagtggtacaatccgcagcccaccctctgagtaggaccgggcccccacgtgactcagcctgcctctccatctcct

SEQ ID NO: 219867 - DNA, 122 bp, Homo sapiens
ctggaaaatctgattggatgaatcacttcatttttgaatcctctcttctcggttagtctgcgatccaagaacgttaacttcttaaagttctaattctgcgcttctcaagctgtagtccgtaa

SEQ ID NO: 219868 - DNA, 122 bp, Homo sapiens
cgtgatctctaagagtcctcccagttcttcacctaagacaaatataaatcaagtaacattcgctattgtgattagaaaagctgcatttacagacgttagccactagatggggacgtgcgatt

SEQ ID NO: 219869 - DNA, 122 bp, Homo sapiens
ctaataatgttgttcttcactcccagacccccttgcactgtgtgtctggggctctaggctcgttgccgctggctgcaggtttgggtgagaactttgacttccttggctggagccagctgttg

SEQ ID NO: 219870 - DNA, 122 bp, Homo sapiens
tcatgagtctggggaacctgggagtgaaaactcagtgtgagcccccctgctgggacccaccgcatgtggcctggggtattcctggcccccgagcctcagtttccccatctgtccaggtgtct

SEQ ID NO: 219871 - DNA, 122 bp, Homo sapiens
tgggtgacattccacgcctgcgagagacacactcatcagctccaacttcggcgacggtggcggcggctccgttccacgtccgcctcctttggccttaatatttaattttgcgatttggggca

SEQ ID NO: 219872 - DNA, 122 bp, Homo sapiens
acagggtctgtgctggtgacaaccccgtccacatctgagtgctcaaaagcctgaggagcccgcctggcactgtccctgtcccctacaaagagagggctcttggtccagccgcacttcctcct

SEQ ID NO: 219873 - DNA, 122 bp, Homo sapiens
tctcagttcctctttgtcctctgctcattctggttgtgcttgacaagcctttcggctcagcgctataccgtgggagctctttagctgactgaggccggaagcagccgcgttgggttgcaggg

SEQ ID NO: 219874 - DNA, 122 bp, Homo sapiens
aagagcctaagtccacattataaaataggaagttgatgcggggtacagttactcccggaccggcggcgtgaaagtcgtgatatcatcgttgaactgtgagcggcagtggcggcggctggggg

SEQ ID NO: 219875 - DNA, 122 bp, Homo sapiens
ctgctccgccggcggccactgccgctacacataccaacaagaagcgatctgagtggctggcgcccactggggctaaaggttaaaggctgccctgcgctacggggcgggatcagcggggccaa

SEQ ID NO: 219876 - DNA, 122 bp, Homo sapiens
gcttctgcacgtactgagggagggttcctcaccctgtgcagaagacctcctggtgaataccggggcactcgctgggtgaccctgggtcctctgggccaagttcatgcatcgaaagttccctg

SEQ ID NO: 219877 - DNA, 122 bp, Homo sapiens
atttatctgttgaatacctactgtgtgtcccatttagaaacctaatagtctcaaagcagccgcacaatgagtcagcaacagagagcgcaccaagatgatcccttttaaaaggactggaaatt

SEQ ID NO: 219878 - DNA, 122 bp, Homo sapiens
gattgaaagttgagccatatctttattctctataccttgcatagcaagtgcctgataaatcgtaagggcactgggctggatagcatccttttggtcctgcagattcattctccatccttttc

SEQ ID NO: 219879 - DNA, 122 bp, Homo sapiens
agggacaggctccaggaaggccttgctcccctcactctccagcttctcaggacctgcccccggccccagaatctagcctggcccctaacagccttttcagcccaggggcccagccaaatact

SEQ ID NO: 219880 - DNA, 122 bp, Homo sapiens
ggggcgagcgcaatggggcgtggcgcccggggaggtccggcttggggctgggctggggagcgcggcggctgcggctggggcacggggcggccgggtgagctggccggcgctcgctctctcca

SEQ ID NO: 219881 - DNA, 122 bp, Homo sapiens
ggggctggagaatgacttgtcagagctcaaggtcgatgtggcgcggggcggcctcgagagcgccgggctcctgcgtggccacggccgccgctgccaaccttcgcggggacttagctttgctt

SEQ ID NO: 219882 - DNA, 122 bp, Homo sapiens
acctaatcaaatgttaaaatctctccacatgtttaccccaagactgtcaggagtacataccgtcagccaaacccattggtgccagtactgaatgttcacacttaaggttggaaaagttgctt

SEQ ID NO: 219883 - DNA, 122 bp, Homo sapiens
aaggcgccgtcacgtagataggcggcctctaccaactcacgacagctaggcggggagcgccgcctcaaagggtgcaaccttgatttcccagaggacgagtctgtctcagtatctacgtcatt

SEQ ID NO: 219884 - DNA, 122 bp, Homo sapiens
gcttggggtgcttgggggcagagctcctgccatgcagcacctgggaagatgctgagcccccggatggtcagctgactgtcaccatgggatctggctggtggccagagcaggtgcacagactg

SEQ ID NO: 219885 - DNA, 122 bp, Homo sapiens
ggccctcgctgtccgcatccccattcacggagtagcagtcgtagtcggagcctgggggcacgggacacagtgaggcccagggcccaggtggccccttgcccccagcccaccagggtgagcac

SEQ ID NO: 219886 - DNA, 122 bp, Homo sapiens
cacgcccaccacagcctcactcacctccaggatgaaaggcagcaccgggatgaaggcccccgagctccccgagagcagcgtcagggcacggatgcagtgcattcgcagcgggtagaagcggg

SEQ ID NO: 219887 - DNA, 122 bp, Homo sapiens
ttggcttctagaacccctgctagatttagcaatgaaagcagcataaattcctaagcctaccgtcaagtgtgaatcctctacttcagaacagatatatcatcctggccccaaaaagaaacaga

SEQ ID NO: 219888 - DNA, 122 bp, Homo sapiens
caacttgtgcagttaacgcaattatcacagagtcctgcggggacattcatcctcagcttacgaagatgaccagattaagaaattaaagtaagacaggcataggaaatcacaagggtattgat

SEQ ID NO: 219889 - DNA, 122 bp, Homo sapiens
ttgtgggtccatccagtctctatcggagtcaggagttgctctctttaagtattgggctggcgtgttcagccaggaaactgcctagcactctcttctctcatctcaaatataggaagtgtttt

SEQ ID NO: 219890 - DNA, 122 bp, Homo sapiens
actcatggcgcgcagggcccgtaacacgctggaggccaggatggacccgacacaggggagcgggaggctcggcccggccgtggggagcgaggaagggccgctggatgtgcctattgataaag

SEQ ID NO: 219891 - DNA, 122 bp, Homo sapiens
gccgccactggcctcgtggggccccgccccgccccgctccagcccggccctcgccctgcccgcctcctgccagcgccactggcttcagccactcaaacccgtcttatagggtccctcgcaac

SEQ ID NO: 219892 - DNA, 122 bp, Homo sapiens
gctcctctctgctgcatcccggcagctcttcagatgcttgcacaccttgtttacagctcccggtaacgacacaggtaacaccggaagtgacgtcagagcaggaggccgagagacaacttaaa

SEQ ID NO: 219893 - DNA, 122 bp, Homo sapiens
ctgctcccccaaaacatactcctcaccccttcataatcaccacccccacgcccaccaccccgctagtcactcaccccaccccgggagccagacctcggggccttcttggagtgtggctccag

SEQ ID NO: 219894 - DNA, 122 bp, Homo sapiens
gcaggggattgggggttgggcgccaggcgcgtgcgcgtctctgaaacggggacttgggagcgcgcgctgcccctcacttggctgcaactggacccagaactagggaagaggccagggacaga

SEQ ID NO: 219895 - DNA, 122 bp, Homo sapiens
cggagccgggacagggtccacggcagccgccatcttggctgagggcaaagacgctcctggcgctcccgtctttcggcttgcctcagttgccactgccatcttggatcagggtaattcccgcc

SEQ ID NO: 219896 - DNA, 122 bp, Homo sapiens
ggaaaggcgagtcggagtgggtgatgagaggccgggagagcccgtccgagccggagagaccggagagaagggagcgagcgactgtgcggcgctcacgctgccagagcccgggcggagtgcag

SEQ ID NO: 219897 - DNA, 122 bp, Homo sapiens
ctgcgtccgtgagggaggtgagagcccgcctgggcacagggcctgggtcctgtcctgctgcgtccatgtgggcgacgtgaggagaggcgggttgagtgtagggcccaggtgctgtcctgctg

SEQ ID NO: 219898 - DNA, 122 bp, Homo sapiens
ctgtgtcctccctagaacgtgccgagctgcctgtccctgccagagtgcagatgagcaaggcgaccgctcagccccaaagtttgcagacaaagcttttcatactccttaagtgggtcacagtg

SEQ ID NO: 219899 - DNA, 122 bp, Homo sapiens
ggtgatccatctgccttgacctcccaaagtgctgggattacaggcatgagccaccgcgcccggcccaaacctgcctatttacccacgacaaggagattccggcttcttgaggggtgaggttt

SEQ ID NO: 219900 - DNA, 122 bp, Homo sapiens
gaggattaaatgagttaattcatgtagagtacttaaaacaatctagtacttggtgccaggcgtggtggctcacacctgtaatcccagcactttgggaggccaaggcaggtggatcatgaggt

SEQ ID NO: 219901 - DNA, 122 bp, Homo sapiens
caacacttaaaattgtgtgcccttaaacacgttacttacatttatgcacctcagttttctcgtctgtaaaactgagtcaattgtactacctattttaggagttttgtgaagtttaaatgagt

SEQ ID NO: 219902 - DNA, 122 bp, Homo sapiens
tctcggatccccgactcctccagctccaggtcgccgccgaaagcacgtggagggacctgccgctgcggccaaggtgtaagcaccaaccagctgccagctcggcccatcgagctcagaagctc

SEQ ID NO: 219903 - DNA, 122 bp, Homo sapiens
ggggagaaagctgcctggaggaagctgctggggtgcggggggctgagggatttggctccccgccctctcccctagatggcggagaaatcgggctagctggaagggcgcagctcctctcccag

SEQ ID NO: 219904 - DNA, 122 bp, Homo sapiens
gttcttcatccactcaaggagaaactttaaaatccacttaaaatgaagagcattcctccccgactcaattttctaactacatattatcttcatagcattaacaccagccagaatttatatta

SEQ ID NO: 219905 - DNA, 122 bp, Homo sapiens
gaactatctgtgccatgggttttagtttcttgtataagaactcagttggtgctttcattgcggacgggaacgagaagctttcccctggtccttacatgtttcgttttgttttacgtttttaa

SEQ ID NO: 219906 - DNA, 122 bp, Homo sapiens
acctcctgtttggacttgctggtttttgtgcagtcacgcagaaagccccatttcgcatgacgctagctgaactagaagcagagagacatgtacaacattatagatcttttatagttaaaagg

SEQ ID NO: 219907 - DNA, 122 bp, Homo sapiens
gaacagcagctcacagcctcggctgaagctcctccacccccagggtggctctgactagggcgcagctctgactagtgtgcaggcaaaaccccaaaactcaaaacaagaagtgaaaaaagtgg

SEQ ID NO: 219908 - DNA, 122 bp, Homo sapiens
gcgacctcttgtccaaaagcaatacagccaagaaggggcaaggagggttttgaaaccagtcggccaggctctggggctcctaacaagcaaagcagcctggtttctaaaactatagcttctgg

SEQ ID NO: 219909 - DNA, 122 bp, Homo sapiens
ctcatatggcgatggcttcgaaggcatgtctctctgatcatatggggacggcttcacagacgtgtctctcatcatatggggacggcttcacaggcgtatctctgtcatcatatggcgatggc

SEQ ID NO: 219910 - DNA, 122 bp, Homo sapiens
tttggggccggggtagcaggtcgtgggggtcaggcccggatcaggttcaggttttggggccgggggagcaggtcgtgggggtcaggccagggtcagattcagggtttggggctggtagacca

SEQ ID NO: 219911 - DNA, 122 bp, Homo sapiens
cttggtgtggttctcctgggataagcccacagtcacaaacttgtgcaggaatgggggtaccgggaagcagcccggtgttccaagccttttgagattctccggacctgcgcgccgcccgctcg

SEQ ID NO: 219912 - DNA, 122 bp, Homo sapiens
tccagagaccaggaaacccaagcacaggggcgtttgccacattctaggtctcggggctgccgtgggaccctgaccctggatgccggacttccgtgggtcaagggcccaggccaccttctcca

SEQ ID NO: 219913 - DNA, 122 bp, Homo sapiens
ttcggtcctacagataaaactcagggaggaaggctttgagtctgtcctaaaaggctgttgcgagaggtctttcagcccccgtttttaccatgtccctctgcagtcctggcgcagcaagagtg

SEQ ID NO: 219914 - DNA, 122 bp, Homo sapiens
gattcaaaagcaattttgatttaaggttttcaaaagccccagagggcaaatgtgaccactcgggtcagccagtcagcagtttggatccagacaggggaccaccgagtggggcggccgaggag

SEQ ID NO: 219915 - DNA, 122 bp, Homo sapiens
tggcacatggaataaccctgtcactttcattctgtacacctggccaccacccagaaagcccgcagtccccaagacagaatgcctagattctggtcttcaaggagctaggggccttgaacaaa

SEQ ID NO: 219916 - DNA, 122 bp, Homo sapiens
aaatctgtgatcccgctgatgttaccttccctgttataaggaagaaaacagagaatgcagcgtttgctaactgtccgagcccacagcgtccatgatggggtgagaaccgaagccagcagctc

SEQ ID NO: 219917 - DNA, 122 bp, Homo sapiens
gggctccgctcgtcttctctgtcttagggctggtgctggccctgcccacgcctagggctccggcgcgtcacgggcctcagctgggattcccgcgcccctcggacggccacgagactcgggta

SEQ ID NO: 219918 - DNA, 122 bp, Homo sapiens
ctgcacgacccgtggcctggaaggctcttttccttcccttttagagaaaggaaatatctgcgtgctcgagggcccagcaacctgcaagtccccacacatcgggtgcgagggaggttgtgatg

SEQ ID NO: 219919 - DNA, 122 bp, Homo sapiens
agagaagaaagaaacacacaagtgcaaactcatcagcaccgagagacagcgaggacagctcgcttaaacgcagcggagacccgaccgcacagggtgtcttcaaactcatcagcagtctatag

SEQ ID NO: 219920 - DNA, 122 bp, Homo sapiens
ttttggagcaaattttaactgaacacattgtcagagggtcaggccaagtttggcactgctcgtgtatctcagccaccttccagttttcagcacgatgtctgaactgaaaaaacaccattgct

SEQ ID NO: 219921 - DNA, 122 bp, Homo sapiens
caatggtgaagatttggcaagtccaaaatctgatggaggagtctggcgggatggagactccgaaaagagttgcagtttgagtcaaaaggcaagctgtcagtgagctaggaagagccgacgat

SEQ ID NO: 219922 - DNA, 122 bp, Homo sapiens
ccagccgcaacgatcacaggagtggtcgcctcggagcctgctgccatggctaccgcaaggcgggttctgccggaacccaaggcggagcggagctggggtggggtcagagtaggggccaaact

SEQ ID NO: 219923 - DNA, 122 bp, Homo sapiens
agagtccagcgtgggctcaggcccacagacctctgcggcctaagccgccagccctgccgccgccagtacagccacgaccggttaccaggcgaccaccggacaatccgtcaccagggaaacta

SEQ ID NO: 219924 - DNA, 122 bp, Homo sapiens
aactggagaggccctgccagaggggcggagggctgagggggccgtgacagaggcgcccgccggtccagagcactcccatcagaccctcatcgccacccaggcgggctggcacccctgtgttc

SEQ ID NO: 219925 - DNA, 122 bp, Homo sapiens
gattccactcccgggccgccgggggcactagggggggtggggtttccttccgcatctccacggttccaactccaacctagactcaaactggacgccggccggagactccgctccggcagcaa

SEQ ID NO: 219926 - DNA, 122 bp, Homo sapiens
cagatgcagctggaagccctgaacctgctgcacacactagtctgggcacggagtctctgccgtgccggagctgtgcagacacaggagcggctgtcaggcagtgccagccctgagcaagtgcc

SEQ ID NO: 219927 - DNA, 122 bp, Homo sapiens
ttcctcagggaagcttcctctgtgtttctctcccttatacgtcctcagagaatcatgacccgggcccttagtttcttccttaccatgcccccagtgtcataatcgctctgtaattgctccat

SEQ ID NO: 219928 - DNA, 122 bp, Homo sapiens
cccttttgtttgtgtttactgttaatgtgtcctctgtctttctttctttcctgtgcctaacgtgtgtttgtgcactgcagttggtggtggaaactaaggcagtggatctgtagctaagggta

SEQ ID NO: 219929 - DNA, 122 bp, Homo sapiens
cctcgtgggctgtggaaggtcttgctgtgttgatgtgggcgcaggaagccactggggctccgattccacttgtctgatgtatagaaaagatgggggacctttggccgctcagatttggggac

SEQ ID NO: 219930 - DNA, 122 bp, Homo sapiens
cgtggctctctgccgcgccctggttttcatgtgacaccagagagtccactggtccagaggcgaccccagacctggtgacaaagccgctccatgtgaactggggaggggccgccccgccagcc

SEQ ID NO: 219931 - DNA, 122 bp, Homo sapiens
ccattcgcggccactttcctgtctgaagaccgcatgttgccgggctgtgcttacggctcgcgggcgcactctactgacaagcggtgggcggcctcacagactctcccaggcccgcgtggggc

SEQ ID NO: 219932 - DNA, 122 bp, Homo sapiens
cagagcgcccagatccctcagtctccgtctcctttgcacacaggagttgggaggcttcagcgccggggttgggcctcaggggcgcggaggagaccgactttcaacctgtattcaatcccggg

SEQ ID NO: 219933 - DNA, 122 bp, Homo sapiens
tgtcccaagagagaagggagcactgtctgaagcagtggcccagctgggggtgtgcaaccccgaggtcacccacttcaaatggcctctctgtgtctctcccatggggcagactcggggttcaa

SEQ ID NO: 219934 - DNA, 122 bp, Homo sapiens
tgtgcacggtgcctgcttgggttcctccatgtggaccagcaccgctgagcggccactctgcgccaggcactgttcatgggtgatcacggcagcccccttattacagacaagcaaactggggc

SEQ ID NO: 219935 - DNA, 122 bp, Homo sapiens
aaagaagcatctgcctgagggagacaatcaaggtcagccacaagtctaaggctgggagaacgtgctcaataacacttgttggattgaattgagtcagctattcaaggctggcttcactatct

SEQ ID NO: 219936 - DNA, 122 bp, Homo sapiens
gataaatacttctttcttctgtaactcctccctcctccctcttcttcattccgtcaacaccgacaaagggtctaaggaatgggtgatccaataagacgtgaaacaggagatggtattacctt

SEQ ID NO: 219937 - DNA, 122 bp, Homo sapiens
tcgtgatccgcccgccttggccttccaaagtgctggaattacagggatgagccactgtgccgggccaaagcagaattttaaatcagcaattgggatacaatattagtgcagataatttacac

SEQ ID NO: 219938 - DNA, 122 bp, Homo sapiens
gggctgtgacatctttcctagagagcctagccaataagggaactgcttgttgacctgagtcgggttagacattgccctctctggagggaggggatggatttgatgacttctagaaatggttg

SEQ ID NO: 219939 - DNA, 122 bp, Homo sapiens
tcaaggatattctgtctagtgggacagacagacagacatatacgtataatagtaattcaacgtgctaagtgaaacaataggcatgtataaaaaaggtgtagtaggtcaagtagggcttttag

SEQ ID NO: 219940 - DNA, 122 bp, Homo sapiens
ataggtaaagggaagggtcggtaggacgatggcaaatctaatggccaatgtctttctaggcgaaagcatccttaagggcaggacaaagacaccaccactacaaacgaacctcgttcaacctt

SEQ ID NO: 219941 - DNA, 122 bp, Homo sapiens
ttattccctttgactgcctcctcacagtgagattggtcctgggggataagggctgggaggcggcacaagtgctagggctgaattctgggaggtactggcctagccctggaaaatagtaactt

SEQ ID NO: 219942 - DNA, 122 bp, Homo sapiens
agcagaagtaaagggaagtgataacccccagagcccggaagcctctggaggctgagacctcgccccccttgcgtgatagggcctacggagccacatgaccaaggcactgtcgcctccgcacg

SEQ ID NO: 219943 - DNA, 122 bp, Homo sapiens
taagtggtatggccacttgtaagccactccattagaagccagagcctgtaagcttaatcacgtcccctccccacatacagatactagtgagagaaccaactttaaatttccagaataaagat

SEQ ID NO: 219944 - DNA, 122 bp, Homo sapiens
caggcagttcagcctgtgcccacaccaaggctggcacccagtcctgctcacaccctttcccgtgggctggggaacacaggttcagaaatgcccacgattcccagcagcctgagtagcccagt

SEQ ID NO: 219945 - DNA, 122 bp, Homo sapiens
tccgcaggcactgcccaggctgtcagccccaaaccctactccggggaccgcggtcaggttcgtctccgggcggactacatctcccacaatgccttgggcccagcctccctcctgccgcccgg

SEQ ID NO: 219946 - DNA, 122 bp, Homo sapiens
tggcgtcagctcgattcgcaggccctggactcctgtctaaacaggacaggcccgggcaaccgcagggcaggggcgtctgccaatgatgggggaggactctgctgcttcttaagctccagcgt

SEQ ID NO: 219947 - DNA, 122 bp, Homo sapiens
ctcccaaggcctgggcggggagcagctcagtccgagatgttctaggggatgctggggagccgggaagtaacctgagccctctctccccacacccccctgacttgctgatggcccctgtggtc

SEQ ID NO: 219948 - DNA, 122 bp, Homo sapiens
cagggtcttgctatgttgcccaggctggtcttgaactcctgggctcaagtgatcctcctgcgtctgcctactgaagtcctggaattataggcataagccactttgtccagccgctgggagaa

SEQ ID NO: 219949 - DNA, 122 bp, Homo sapiens
tcccttcccccctttaaccaatacccaaccttggggataggggccgaggtggagctggggcgcttaccagtggggactttagtgtctcacagctgtttctgacccggcagctctaatcagca

SEQ ID NO: 219950 - DNA, 122 bp, Homo sapiens
gagaccagcggttcccaggggcggggctggggcaatgaggtggggccaggaccccaggggcggggcaggactgggagagagttggatcggctaggacccgaggaggggggtgctggggggag

SEQ ID NO: 219951 - DNA, 122 bp, Homo sapiens
cctgttgcaaaaccagatagaaatgaggaaaactgtcaagaagagtccagaaaagaaatacgggtcagtgacaaggtttcctcagtttataaaacaaagaaaattcatcagaactctccaca

SEQ ID NO: 219952 - DNA, 122 bp, Homo sapiens
ggcacgacccggacaatattggggtagtccacccacacggtgttcgcgttcccccgcgtccggaacgcggggtccacagtcaccagcacctgggagcccttcaccagctccacttccgactc

SEQ ID NO: 219953 - DNA, 122 bp, Homo sapiens
ggggtcatctggacacacagtcccggtccatgaaacagcaactggaggagaacatgagggcggattctcaaatcatgactgtccctttgaggaagtgtcaggaccggctgggcctgggtctc

SEQ ID NO: 219954 - DNA, 122 bp, Homo sapiens
tctcagccactcactcagcgccactctatgctccgaagtccgtgtagcaccaccgctccccgtgttctctgagctggcttagcttgaaggaacctcacaaaaccaagcccggatcgctgtca

SEQ ID NO: 219955 - DNA, 122 bp, Homo sapiens
atcatgggggagtagtgtacacatcctgcgatattgggactaatgtcatttccccccactcggatcataggaacaatgtaacagggaaagtgcacaccccctgtgatattgggggtaatatc

SEQ ID NO: 219956 - DNA, 122 bp, Homo sapiens
tgtagagagacctcatctctaccaaaaaatttttcaaaaaagaaaagctgggcatggtggcgtgtgcctgtagtcccatctgttcaagaggccaagggtgggaggatctcttgagccccggc

SEQ ID NO: 219957 - DNA, 122 bp, Homo sapiens
tgtagcactaactaagccttggcacactctccgttgtatccagagagtaatgtccaagggcgcctcgtgccaaattccccagaactctactgttccttctaaagtaactatatcatctcctc

SEQ ID NO: 219958 - DNA, 122 bp, Homo sapiens
ctattctaaggaaaagaaaaggaacaaatcagtgcagcgagctttattctactcagcccacgaaaggcgccgccgtcagattttaaagttccagccatcccctcaggccctgagtgagaagt

SEQ ID NO: 219959 - DNA, 122 bp, Homo sapiens
aggtgttcatttgataataattcacaaatcttcacatttgtgtggctttctgtgtattggcgattgaattcaaactcagaactgctaaggccagcgcccaaggcagccgaccgcagaggcgg

SEQ ID NO: 219960 - DNA, 122 bp, Homo sapiens
gcggagcccgggggcggccgtgaatggggggtctgtggagcggccggcggggctgtcaggcggctctgcgtaatcagggctaatgacggcggccgggcgctcggcgggacaatgcgcggggc

SEQ ID NO: 219961 - DNA, 122 bp, Homo sapiens
ggccgctgccagggacggtcacgaatgtacgaaccttcccatggaaacattgcaaggggccgagcaaaattccgaccgtcgccagaagcgcagtcggagcgccgtcgccagtgcggattctg

SEQ ID NO: 219962 - DNA, 122 bp, Homo sapiens
ttatgaccctccgggaacccacaacctctgggaatttttaccttctatcccatttaaatccgagaggcttccccgccctgctggcagctccagagttactgctgagactcagggagaagctg

SEQ ID NO: 219963 - DNA, 122 bp, Homo sapiens
taccacatcaacctcttctccaatccttctccaagtctctacacttggccacaaagcacccgccccaccattgtctacatggtgactcatgggccaccatctgagagaactttggggattcc

SEQ ID NO: 219964 - DNA, 122 bp, Homo sapiens
cgcctcttgtttactcacccatggcctgtgtggttccagggaggtcccatgggtgctgatcgggcgggggaggaaaggtggcggttggatggtaggcggggcggggtgagcttcctgtcccc

SEQ ID NO: 219965 - DNA, 122 bp, Homo sapiens
ctccccacctcagggtacgggaagtccacacgtggcgaacgcgaagcctattacatcacccggaagtccctgcatcctacgaaggctgggcccggccaaaggaggcccaatagagggcggtc

SEQ ID NO: 219966 - DNA, 122 bp, Homo sapiens
aatatcaatctgatgaaaaaataaatcctggaacaaaagctgcaagacactcgtggagcccgggcactgtagaaggggcctcgcaacagaccccggcagggtggtgggacgtaggccctggg

SEQ ID NO: 219967 - DNA, 122 bp, Homo sapiens
cacagcagtcatgcttcccccgctgtcgccgccggcaacccggggacctcctaaacccagcggctcctgcctttctcgggccactgagctgcagagctcagtgccggactccgggggcggag

SEQ ID NO: 219968 - DNA, 122 bp, Homo sapiens
gtcccttctggggataatggaatccaggcccttcggggcttttccccagagctggctacacgtcccgctctcgggtgcgcttggtgtccacgcaaacgccatcctccgaacatccccccgcc

SEQ ID NO: 219969 - DNA, 122 bp, Homo sapiens
ggtatccagcacaattctaggaattcgcctcccacccattttgagtagacgcgccactagcgcgttcccacgcacaaaccttttccctgcggccaacctgcgattctcaactccccgccctg

SEQ ID NO: 219970 - DNA, 122 bp, Homo sapiens
tcccccgtctgacgctgcctcctcgggaagggtgtttggagggcagcggccgccccaagccggagccccgcagcgcttcttatgatcagctcggtgtgtgtctcctcctaccgcgggcgcaa

SEQ ID NO: 219971 - DNA, 122 bp, Homo sapiens
cttcctgattgagaacatacctggtccgtggcttcagatggcttttacacgggggacttacggccacttcctgttctccagacacacaacactgtttttaaggagcgtaatgaatgcacggt

SEQ ID NO: 219972 - DNA, 122 bp, Homo sapiens
ccaggaaccaggctgggggcggggtgacctctgacctcacactgcagcctggcctggccacgtccccagggaggggaggaggggaggaaggcctggctcgggctgggccgcagcaggaggcc

SEQ ID NO: 219973 - DNA, 122 bp, Homo sapiens
gccttcttcctgggcatggtcgcggctggagggagacacggggcagcggcgcacaatggacgggttataaactgcgcggggggaggggagcggagacgagccacccggcctccacttcctcc

SEQ ID NO: 219974 - DNA, 122 bp, Homo sapiens
gtaagtgacaagaaatattttctcaaaaaggtggagcttagctttcaggatcctcagcaacgcttcccagtgttactgagatttagtgcagcaatggttgaaaatgaatgggccagtggtta

SEQ ID NO: 219975 - DNA, 122 bp, Homo sapiens
agctgtaggatttggttggctacctggttaactcagttgactaagaatcctttgaactagcggctaaggatcccaggcaaaggtgaaggacttgcttgatttgtatattctagttcatatga

SEQ ID NO: 219976 - DNA, 122 bp, Homo sapiens
tttcccaagaaagcccaggcaaagagaaattgttttgctggctccttcccatttgcatctcgggcctcagggaggcaccggagcgccattcagacagacccatcagctctaatctcctttaa

SEQ ID NO: 219977 - DNA, 122 bp, Homo sapiens
ctggggcactgggggtcaggggtcggggatcagggcggggtcgggtgcactggtagcctgcgcatgggcctccagcttcgcgcgctgttgggagccttcggacggtggaccctgcgcctggg

SEQ ID NO: 219978 - DNA, 122 bp, Homo sapiens
ggaaggcttttaaaagaagcagagtctccgcggggggaagcttgttccctgagaggtggccgcagacgaacccactgctcagtctggcatcccgaagccgctccgctcctggctctccccgc

SEQ ID NO: 219979 - DNA, 122 bp, Homo sapiens
tctttcatttcagaataccaggagcgatatggttctcgccccgtctgggctgactaccgccgcaaccacaagggtggtgtacccccacagcggactcggaagacatgtattgtgagtttctg

SEQ ID NO: 219980 - DNA, 122 bp, Homo sapiens
tcctttctgtaggatatgaaaacttcatttatctggccgttctttgagtctcacattttgcgtgtctcctttgcacaggtgtgcatgtaataaatctgtatgcattttctcctgttgatctc

SEQ ID NO: 219981 - DNA, 122 bp, Homo sapiens
cttggactaagctctgctgctttcaagctgtgtggtcttgggcaaatcactcaggttctccgaggctctgtctcatcacctgtcaaaggcagataatgaatccttcctgttgcaggcattga

SEQ ID NO: 219982 - DNA, 122 bp, Homo sapiens
ggtgatgaaataagctgtacaacaagtttacctgtgtaacaaacctgcacaacgtaccctcgaatctaaaataaaaactttctaaaaaaagaaaaaatccttaaaaacaaattttactggtt

SEQ ID NO: 219983 - DNA, 122 bp, Homo sapiens
ccactcctttcctatttcatttccactccccacctttagtagctgcggtctctttaagtgcgcactttcggtgtaatgataggcgattgggccaataaagcgtttcgtcctggagttaactg

SEQ ID NO: 219984 - DNA, 122 bp, Homo sapiens
aaaagtgggacagccaatgagaattcaggggggctgtcttcagccaatgggcagggcggccgggaggccgggctgggcggccgaggcggaccctaccgcagtgtttgcacaggacccgggcg

SEQ ID NO: 219985 - DNA, 122 bp, Homo sapiens
actgccaggagacgagtccccggttgtcatggtaaccagtggcgggaggcgggtgaggagcggggtcccgtcgggccgggtgggcgccagctccctcccaggactggttcattggtagattc

SEQ ID NO: 219986 - DNA, 122 bp, Homo sapiens
cctcagctgctagcggtgccggcgcgaagtgggtcggggtgcccagctgggggccggcctcgcagcccgcgacccccggatgcgcagagtatgcagagtcacccaggacagagcggggagcc

SEQ ID NO: 219987 - DNA, 122 bp, Homo sapiens
gcgcgcgcggttggcatcctccaggtggcgctgcagctcctcctgccgctcccggtcggccgcctcctgcctgcacagccgcttgttctccagctgaagccgcaggagcgtctccctgcaga

SEQ ID NO: 219988 - DNA, 122 bp, Homo sapiens
aagtcaggttttgcccgcccgggcgacgtggaattcgaggacttcagccagcccatgaaccgtgcaccctccgacagcagtctgggcaccccctcggatggacggcctgaactccgaggccc

SEQ ID NO: 219989 - DNA, 122 bp, Homo sapiens
actccatttacaaatcagcagcaattgtgcaacacactgtgcatgggtggggagggtgtccgaatgcaaagacaccaaagcgaaggagagctacccatggctgtgggattatggttggcttc

SEQ ID NO: 219990 - DNA, 122 bp, Homo sapiens
cagcaagtcggtgccgcgggccccgcaggcccagcagcatctggctcccgggcggagctgcggctgcagcccaggatcttggcggccaagttcagggactgacactgccgcgagggcggctg

SEQ ID NO: 219991 - DNA, 122 bp, Homo sapiens
tgacgtgctgctcggatttagaaacgatcccccagctgcagtgcaggacgcgtggaaggacgtcttgccggaggttgtagcgcccagggatttgtggtatctgagtaagagcggaagcacat

SEQ ID NO: 219992 - DNA, 122 bp, Homo sapiens
tagctgggcctacaggcttgtaccaccacacctgactaatttgtgcatttttactagagacggggtttccccatgttggccaggctcgtgtcgaactcctgacctcaagtgatccacctgcc

SEQ ID NO: 219993 - DNA, 122 bp, Homo sapiens
ccacaaataccagtaactcatttgcttgacataaagcccttccgagaacttctgcaaatgcggtaatttatccaaatcaaaagagctatccctaggccactgcaggactaggatctgatgtg

SEQ ID NO: 219994 - DNA, 122 bp, Homo sapiens
ctcccgcgttgaggaaaacgctatgtccgtctcagattagcctcctttgccaaggaaactcgccaagaatccctgcgcaacctgcgctctcgctgtagagcatactaggtggtctttctttc

SEQ ID NO: 219995 - DNA, 122 bp, Homo sapiens
atgtaccagcaggaggaattccagctgtgacctcatatgatgctcacttccagtcacttgcgagctaagcgatggtagcaatgccgttttacagaggagaagacaggctcagaaagtgaact

SEQ ID NO: 219996 - DNA, 122 bp, Homo sapiens
aacattagggagaagcgacgcccttgacctccggcccggggttaccacatgccttggtgacgatggtaaagggagggaagtcccaacctgcgccgttccctctaggaatggtatgatacggg

SEQ ID NO: 219997 - DNA, 122 bp, Homo sapiens
tagctagctgaaggtctgtttcaaacatacattctgtcttgatagacaggtaaggccaatcgttaccttatccattaatttgctaagataccatctggtctttctaagcctaattaacatgt

SEQ ID NO: 219998 - DNA, 122 bp, Homo sapiens
tgttcagttgaaagccaagttattttgagctgagcaaaatgaggattcaaattacaggagcgcagagtaaacttttggcatattagcggacatcttggtaagtttctcaggacagtgttttt

SEQ ID NO: 219999 - DNA, 122 bp, Homo sapiens
tgaagaggcctttggctaaacttaatgattctcatgccttattagtagatgggttctgaacgtgcctttgtatgagagagaaaatggaaactcatttatctgtggatgaagccccagaaaga

SEQ ID NO: 220000 - DNA, 122 bp, Homo sapiens
tcctgggaagtgtagttccctcccttcgctcggactggggagagcaccccgactcctccgcggagtgccgcctggccccgacacttggagagcaactccagcttcagctggccaggccgagc

SEQ ID NO: 220001 - DNA, 122 bp, Homo sapiens
cctctctgcaagccccttcccctccgtaggtctcggtttccctctctggggaggggggggcgatgtccttgccagcagaggtgctgctcaagtgcagggctggcatcccagcgactcgccca

SEQ ID NO: 220002 - DNA, 122 bp, Homo sapiens
cgcggactcggacccggagacctcgggctcgggctggtcctcaaagggtgggggctcgggcggcgtggtgcgcacagcatagctgtggtagccctggtaaagcgccacctccggctcccgcg

SEQ ID NO: 220003 - DNA, 122 bp, Homo sapiens
gactaaaatttaatcctcacaacaaccatgtaagttaggttttcttattttcccatttgacggagaatacacggtcagagaagttaagtgattacctgaggttacagcaagagcaagcccag

SEQ ID NO: 220004 - DNA, 122 bp, Homo sapiens
ggctccggcagcggggtggcggggagttgggaagaatgcagatttccgggcccctgatgccgacctagtacacacagttccagcgtgcagttgggagtgcatgttaccggtaccccaggtga

SEQ ID NO: 220005 - DNA, 122 bp, Homo sapiens
tttcctttatcgtgtgcctttggcgcgtgcgcaccacgtgacccaggagttcattagttccggcttgagggaagcgccttctttcacaatttcttttcattgttcattgcggatatctggaa

SEQ ID NO: 220006 - DNA, 122 bp, Homo sapiens
gctcgccgggagcagggacctgcgtgcagctatggaaccgaggcgcgggctgcgggatcccgccctacctcccataaaccagggcccgagataagggagtcccagagggccaggggagtcgc

SEQ ID NO: 220007 - DNA, 122 bp, Homo sapiens
tggctgacctttctatcttctctaggctcaggtactgctcctccatgcccatggctgggccgtggggagaagaagctctcatacgccttcccactccctctggtttataggacttcactccc

SEQ ID NO: 220008 - DNA, 122 bp, Homo sapiens
tttgcagaaatctaagcccctcgtggaaggttgccaaggtgaggtgaccttgagtgaatgcgtgtaggtggaaaaaggttccggggaatgcttgcatcgttctgcatccgagcgtccaacag

SEQ ID NO: 220009 - DNA, 122 bp, Homo sapiens
gctcacttctttgttataaggatcaagtatgattttgtatgtgaaatttctgacacagcacgtggcatgcagtaagagctcagttattggtagctatcattaataccagattttgcctatat

SEQ ID NO: 220010 - DNA, 122 bp, Homo sapiens
gaaatgtaaaagctaatttcaaaatatatttgaaaatccaagaacctagaataggcaagtcggtcttgaagaagcagtaagttggaggacttactctgctagacttcaaacctgatttaaaa

SEQ ID NO: 220011 - DNA, 122 bp, Homo sapiens
ccgagctgatggcggagacgaagaggagaggttgttgcttcttacagcgcgactcttaggcggtcgatgtaagagaacctgcggcacataggcggatgcggctccctatatacaactcggtc

SEQ ID NO: 220012 - DNA, 122 bp, Homo sapiens
ctgcctgctcccggtcactcccactttggagccaagggctactcttttcaaccttcttaacgaagctcttgcaccaggaagaagggctttggactggcttctttgatttcggggcatttgtt

SEQ ID NO: 220013 - DNA, 122 bp, Homo sapiens
aagtagtgagaaagttatgaggtatagataagaaaatcattagtttgactctatttagcccgagtatgttttctaggtaaaaatggatattaaaagacttaattttagtttttgtttctggt

SEQ ID NO: 220014 - DNA, 122 bp, Homo sapiens
gcccttctccactcgctttttttctaggtccgtgctgttgtaagtcatttgagggacctgcgtacaatcccagacctactcgtggggcatgtgtgaccctgtttaggcttgggtactctgcc

SEQ ID NO: 220015 - DNA, 122 bp, Homo sapiens
gagcctcacattgtccctctccccatcccacacacagcccaattctcacaacccctcctgcgaggcctgctccccacgcccctactcctgggcccctctcgggtctccttctcatgctccgt

SEQ ID NO: 220016 - DNA, 122 bp, Homo sapiens
gggctgaccgtccgtttgcatcccccacttctgggatccgagcaacgggaatcccccgggcggcgtgggaatgaaccccattcctccggtcccttgtggctcaggcaaagttccacgtccga

SEQ ID NO: 220017 - DNA, 122 bp, Homo sapiens
cgcaaaaccgcggaaatgcccatgggcgaggtcgccccgctacccctcgggaaaaacacacgcacgcgctaacaacaacaaacccagtccggcaacaccctcgcagtcggtcccggagtgcg

SEQ ID NO: 220018 - DNA, 122 bp, Homo sapiens
ggcttgccgcttcctcaggctccgaggacgcgctggcctcgtctatttcggtgaaattggcgctggagctggctgaggtcgcctggtcggagggggacgaagcagagggcttggcgccgtgg

SEQ ID NO: 220019 - DNA, 122 bp, Homo sapiens
gaaagttttcaaagtagtgagttggtaggaagaaagaaaatgcccaaagagggagcctaccgaccttcctgggtcccctgtccttgtcagccaaccacgtaaagggaaagagctaggattta

SEQ ID NO: 220020 - DNA, 122 bp, Homo sapiens
cctgtttcttcagtctgttgtctccctctaatcttcgtgtaagtggagttacgcagcgtgcgcctgtttcttcagtctgttgtctccctctaatcttcgtttaagtggagttacgcagcgtg

SEQ ID NO: 220021 - DNA, 122 bp, Homo sapiens
gctctgcggtggacgggctgaggaaccacagccgctcctggccaagtgccctgtgagacacgaggatagggttggtacggcgaggagaagggcggcgacgtaggagggcgctcctgtgacct

SEQ ID NO: 220022 - DNA, 122 bp, Homo sapiens
aaatgttctaaaattagataatggggatgattgcacaactttattaatatacaataaaaccggtgaattgcacacttttaagtgcttaaagtgaacattatgttatgcaaatttaatcccac

SEQ ID NO: 220023 - DNA, 122 bp, Homo sapiens
agggagcgacccccgggtggccgagggactgagggatgcgcgtccagccccggagggcggcgtccacctgaccccccagcccgagccgccgccgccgcctcccagcccggcctgcgctgccc

SEQ ID NO: 220024 - DNA, 122 bp, Homo sapiens
tgctgttactattcccgtaatgtagacgaggaaaccgaggcgtgtgctggagcaggatcacggccgtgctcagagacgggctctggatgccatgctctgactccattgttagccctaagctt

SEQ ID NO: 220025 - DNA, 122 bp, Homo sapiens
agtaatatgtgggtttctgttttttgtttttttaccttgaggaaacaaagactctcctgacgtaatgagatactaggaatctgaaaagagccaaacagaacaatagattcttttttgtatat

SEQ ID NO: 220026 - DNA, 122 bp, Homo sapiens
ctgtctggccacgtcaccacctccccgcaacaccccgcccgggagtccctttccgggacccgccacactatcgtgtccttttgcgcccgacggccccagagcccatctaagatgggggaaac

SEQ ID NO: 220027 - DNA, 122 bp, Homo sapiens
tctaggagaatgcggagctgggagggcagtcctcacgggccccattacggttccgcccatcggaaccagattttgtttgtgcaaaatgaccctgatcgtaagctctttggcgtggtccagga

SEQ ID NO: 220028 - DNA, 122 bp, Homo sapiens
acacagaagatcgaggcacagaagaggccgtgacaggacgctgctttgtgatctgagaatcgggccgggtgggcggtgccgagctgcctggacacggcgtcggcccctcctgacggtgtcag

SEQ ID NO: 220029 - DNA, 122 bp, Homo sapiens
gtggtgtataatcagagaaaagagatttgcagagagagagagagagagaatgagagagaacgaatgaactccggagatttgcagagggtttcttctgagtcttcatctgagtaatgatcagc

SEQ ID NO: 220030 - DNA, 122 bp, Homo sapiens
aacggaggagcgcgcctggtgtgtggccagccttgcgatgctgttgtgtttgcgtgggcgcggagtctgggcccagctgcactggcggcctgcacgccttggccccatgcccacggccacgg

SEQ ID NO: 220031 - DNA, 122 bp, Homo sapiens
cacaatggcaagatctacccatacctcgtcatgaacgacgcctgcctcacagagtcacggcgagaggagcgtgtgttgcagctgctgcgtctgctgaacccctgtttggagaagagaaagga

SEQ ID NO: 220032 - DNA, 122 bp, Homo sapiens
aaatgttgccaaattcttcaaataactgtttggggggtggggggagatgaaagagagtcgcgttttgtttacagttaaagacatccaatatcttaaaaaggagttttcctttagaaacacac

SEQ ID NO: 220033 - DNA, 122 bp, Homo sapiens
cacagccctgtgtccccaccatcctggccaggcagggctggggcaggcagagaggtcactcgtctccctgggccagggtttttgagttggggccaggctgtggaaaccccagacatccgatg

SEQ ID NO: 220034 - DNA, 122 bp, Homo sapiens
atccacagataggatgggcatggagtccacaaggtcagcgtcaggatcctggctttggggcgaggatcctgtgcccgaggcgcaaagctgccctacccctcagatcaagccgtcggtccctc

SEQ ID NO: 220035 - DNA, 122 bp, Homo sapiens
cccccggcccgccccgggcccctcacccagaagatgacattgctgcgggcacggtcaaagcgcatctgcagccttgccagctcattgttttgctgcaggatctcatcatccttttcctccat

SEQ ID NO: 220036 - DNA, 122 bp, Homo sapiens
ggggccagaaccgacctgagtacggaggctctcgcatttgcttgtcattacttaagatgccgtttagaagcacctcatgtcccgcgtatctcatacctgctcatttactcccatgaccacct

SEQ ID NO: 220037 - DNA, 122 bp, Homo sapiens
ccacggcgtccactgcctgcacccggccgctgtaggccacgatgtccgtctcaatggcttcgtgcttccgtactgctgcctcgacagctgccagctccagcccaaagttgtcctgtgtcggg

SEQ ID NO: 220038 - DNA, 122 bp, Homo sapiens
cacagagcgacgatgaggcgagacgtctgcgttcttctcaggcctgagacccaaccggcccgggcaccagctcctgctggaccccagagcgcctggaaagctccggaacctctcacctgccg

SEQ ID NO: 220039 - DNA, 122 bp, Homo sapiens
tgaagcagcagagctggaggtgctgtcaagagtctcagcagactcattggccagatgcaccgaactcaatgaggcacttagagatgagaaacctgtggatgtaatgtcccagctcagtggaa

SEQ ID NO: 220040 - DNA, 122 bp, Homo sapiens
agactgcagggcactgcaagaactcgatgggtacctgaggccagaaactggcagagctcgcggaggaagccaccagcccctggcccggcctccctcttggctgttcctcccccgggccctac

SEQ ID NO: 220041 - DNA, 122 bp, Homo sapiens
ttaatcaaacaagttccattcacggtggtaaacattgttacctgtgaacaccgccaccaccgggactagcgagcattgtcgcaaacaggcattagcagcgtatccaacacatccccaccagc

SEQ ID NO: 220042 - DNA, 122 bp, Homo sapiens
agggcagccagaaaggggcacgactattctttcctgattttggagctcttgtactgttggcgtgtgggaggcatttgggatggggtgagggtcagagtgggcttgtgggaccgaatgtcccc

SEQ ID NO: 220043 - DNA, 122 bp, Homo sapiens
caaaggcctaggattcgtaggcgccccaggtgggcggtaccaggactctccaggggtacccgactagtgggtgctaagtttctgaactacagaaatgagcctgcttagaaaagaaaacctag

SEQ ID NO: 220044 - DNA, 122 bp, Homo sapiens
ggacttccttatgattgattgtgatgcttcgtgctggcaacaataatgaaataaattgtacggataaaacagcacatttgtcatttccgtgccatgagtgaggaagtcaacgagttaggcaa

SEQ ID NO: 220045 - DNA, 122 bp, Homo sapiens
ggttttttgatgcctctgctcagccataaacataagagtgtctgctttatcaccctggaacgctctatcaccctagaacgttttttctttggagaataaaacataatcagtgccaactgatg

SEQ ID NO: 220046 - DNA, 122 bp, Homo sapiens
ctgccccacagctcccgctgggggcgggctcgtgcggcattctgggaactgtagtttcggcgacgctccaggccacgtggaggaagcgcccggtctggcgcatgcgctctccagcgcgctct

SEQ ID NO: 220047 - DNA, 122 bp, Homo sapiens
gctaacgtttcttgaatgactcggtgtccgtgagaaccaagccatgtgctttatgtttctcgttgtttaatcttcaccatgaccctgcaaggtgaaaccgccactagccccattttatggcc

SEQ ID NO: 220048 - DNA, 122 bp, Homo sapiens
aaggtagtgactgcactgcccagaggttagaaagagcgatgctctccaaggcttcccatgcgcgtaattgtgttggaagagctagcgtgttcatgctggatgtggtgataataacagtaaca

SEQ ID NO: 220049 - DNA, 122 bp, Homo sapiens
ctgggaggggcgggggtgggggtgggggccttcccggtgttgcttggtgaccacgctctccgcccagaccgttccatttcttcagcagggggcgccccgggccgggccggcactgaccagcc

SEQ ID NO: 220050 - DNA, 122 bp, Homo sapiens
ctactaaaaatacaaaaattagctgggcatggtggcactcacaggagaactgcttgagcccgggaggtggagactgcagtgagccgagattgcgccactgtactccagcctgggcaacagag

SEQ ID NO: 220051 - DNA, 122 bp, Homo sapiens
gttctgttaggaactgcgaagatatacaagaaatgagatgtgactcccatcttaatagcccgtggttttgtaatgttaggtcaacaacacatgaaacaagtaggaaacactttaaagcaaga

SEQ ID NO: 220052 - DNA, 122 bp, Homo sapiens
cacttccagacctgcaccgggtcctaggccagtaccttagggacactgcagccctgagcccggtgagtgtgcttccctcccctgtgcccaccaccaaccctgcctggtactggatccttgcc

SEQ ID NO: 220053 - DNA, 122 bp, Homo sapiens
ctggcttttccttttcagggagtagcgggctgggcagaccggcctcccttctcgcagcctcgcacaaggagcctgagcacgtaagacatctggaatgcatcaaaggcgaggcccagccagag

SEQ ID NO: 220054 - DNA, 122 bp, Homo sapiens
gccaaaggggtgtctagccggggagggtctagcgcgggagcgggtttcccgactgcttcccgcactcacctcgacccccgcgctggttcggcctctccaggctggaaaactcaccgcggcgg

SEQ ID NO: 220055 - DNA, 122 bp, Homo sapiens
cgcatggcgtccaccttctgcgtggccacctccatctcctcctccttgtctcgcagctgccgggacaccttctgcttctgggcacggagctctgccatgcgctcgttcagctccgagaactc

SEQ ID NO: 220056 - DNA, 122 bp, Homo sapiens
gacgggtgctccccgaaggcaagggccgcgtccgcaggagggtgggagcgcaacccacgccggagggctgaatggatggggacagggctttcccaatcacagacgctcatccgcggtccgcg

SEQ ID NO: 220057 - DNA, 122 bp, Homo sapiens
caggaaaatgcgcgatcgggaatgtctcgaagtcagtccaggaaagagtcggcccctagtcgtgggggattgggccagggaagggcagggcggggcggggccacgccgccgggccagtcggt

SEQ ID NO: 220058 - DNA, 122 bp, Homo sapiens
ccatcatcactacccatctgggcttctctgagtttatcatatgttaattgttcattgattcggctcactgatgagcccctctgggaaagcaaggcactgcgtttccttgtatttatccaaaa

SEQ ID NO: 220059 - DNA, 122 bp, Homo sapiens
tagtttcatatggttcgacctatggaatcctctgatgtatgtgtgcatgctttatctccacgatagaatttggatagattgtgctagcatttgcggactctgaaagtgaaactaggaaaacc

SEQ ID NO: 220060 - DNA, 122 bp, Homo sapiens
ggttgggcagaatgccagctgggtgctgggagcaggaagcggggctacccttcaataccacgtggagctactctcttcatctgacctgcacctcgcctcacccaggctcacctccacccagc

SEQ ID NO: 220061 - DNA, 122 bp, Homo sapiens
aacagtttcaggcagaggcagcatggataatctcaagaaataagcataccatttctcctgcgtgtacttctctttttatccatcacatgcttttacttatgtatatctcctagcatcaaaag

SEQ ID NO: 220062 - DNA, 122 bp, Homo sapiens
cagattccagtggctgctgacattctttgatttgtggctgtatcactctaatctctgcctcggtggtcacattgcctcctcctcttcaatctgtgtgtgtgtcaaatcaccctctgcctctc

SEQ ID NO: 220063 - DNA, 122 bp, Homo sapiens
cctacaggctggtttggcaaaacaaaatcattctgcatgtttccttgaaggaacatacatcgcaggaagagagaactgaaagccaggacggcccgggctgtgggcagcagatatgggcggag

SEQ ID NO: 220064 - DNA, 122 bp, Homo sapiens
gtaaaactgtggtcagagacagaggcagttttatggagattttttttctttattgggaaacgtaagacttgggtacatcaaataaaaccaatttctgggggaaaaaatcaaaacccacaata

SEQ ID NO: 220065 - DNA, 122 bp, Homo sapiens
gggccgacggctgacattcctggagagaaccaggtgggccgtgcccagcatgaaccagcacgaccctgacaagctcctttcctggggcagccctgcccgccgcgcggccgtactcaccagga

SEQ ID NO: 220066 - DNA, 122 bp, Homo sapiens
aggggaacaggaccacaacagggtgtgaaacctccagcccagcaggctcaatccaggaaacggagagggaagagctacatactgtctgtgggtcctcctgaaccggtccaccttctcgtttc

SEQ ID NO: 220067 - DNA, 122 bp, Homo sapiens
gcgcggggatgccaggggggcgagccgcgcggacgagaagccgctccggaggaaacggagcgctgccctgcagcccgagcccatcaaggtgtacggacaggtgagcagttttgcaacccgcc

SEQ ID NO: 220068 - DNA, 122 bp, Homo sapiens
caaccccagccacccaccccacagtcgaaaggaacaggtgtgaaagttagctttcttcctcgcgtttagactttttgagacgaaagcaatcttgttctgtgggtgctgtgcggcgcttaaaa

SEQ ID NO: 220069 - DNA, 122 bp, Homo sapiens
gggtgtatgtctgggaaataaaacttagaatacaagaaaaagtgatttcatttctttcatcgtagctccaagtgtgctgtatcgtgtctgaaatagataaactgctctaagcagtttcaagt

SEQ ID NO: 220070 - DNA, 122 bp, Homo sapiens
accctcgcctggcacctaggcccgcgcggggagagcgtgtctgtctgcgctttcctctcccgggttaatattaaccggcagctcctgcgttccggaactgctccgaaagttccactggggac

SEQ ID NO: 220071 - DNA, 122 bp, Homo sapiens
cccagccgatgccagcttgaaaaaagccgaatgaaaccctacagagcatctgcagccacacgctgggagaaatcctcccaggtgccatcatctacgtggtgtgcgcggcgcagcgggacggg

SEQ ID NO: 220072 - DNA, 122 bp, Homo sapiens
tcataaatatgatcatcagaatgagaccactttggccaagggccactgccagatttttaccgttaaaaacagactggttgacagtgaaactcaatgacaagaattaaaatactatggatata

SEQ ID NO: 220073 - DNA, 122 bp, Homo sapiens
aaaaaaaaaaaaaaaaaagtcctgaatatacagagaacctcactaacgcgagtaaaatgccgactacttacaaaacgatttcacgtccacatctgcagtctcataagggctttcgaataatc

SEQ ID NO: 220074 - DNA, 122 bp, Homo sapiens
attccaagacctcctgagaaagctggggctgagagggcatcttccaggcccaccagggggcgccaggctgtccgcaggtccctgcggcctccccttgaccttgagtggtcaggtaggggtgg

SEQ ID NO: 220075 - DNA, 122 bp, Homo sapiens
aggagaaacagctgggtctaagggagacggtcgggactctgggtctgactcaacgaatgccggaggccaccctgagctccagagtggtggagtccgggacgtggctgcgaggggtctgtggg

SEQ ID NO: 220076 - DNA, 122 bp, Homo sapiens
cgagcagcgcctgctctggggaggggctcgaaggcgccgcgccttctcaacgcgccgctgcgtcccccaggggctccaacttggacagctagactggaaatactgctgcacaaagttaggct

SEQ ID NO: 220077 - DNA, 122 bp, Homo sapiens
tcgaggaggctgaggcatgagaatcgtttgagcccaggaagtcgaggctgcgatgagcggcgatagcgccactcactccagcctgagcgacagtgagactgtctcaaaaaaaaaaaaaaaaa

SEQ ID NO: 220078 - DNA, 122 bp, Homo sapiens
gcacgactccaagcactggggaagccttcgacatcagaatatgaatggcacctgttcttccgggggcggcaagggggatcccgatgtttatcaaaatgggttgattttccacggagggggta

SEQ ID NO: 220079 - DNA, 122 bp, Homo sapiens
cagatagtaaatatttttggctctgtgggccatattgtctcagtcacaactactcaattccgcccgttatggtaggaaagcagccagagattatatttcaatgagtgggtgtggctgagttc

SEQ ID NO: 220080 - DNA, 122 bp, Homo sapiens
caggaaataggaattaacatgaaatattatttgcccttaaagttatcaaaaatattgaatcgcaccttatgtggcattgtggggagagaaaaagaaaacataaggaaattcccatatagtcc

SEQ ID NO: 220081 - DNA, 122 bp, Homo sapiens
gcagcagcttgaggcagtcgggctggttgtagagtgctgcgtagtgcagagccgtgttcccgtcagcagccttggcatccaggtgaccactggggagaggagggttcagggagaaaggaagg

SEQ ID NO: 220082 - DNA, 122 bp, Homo sapiens
gctaccgtagagacgggcacaggtgacgtctgtgcagcccacagagcatgacgcagctaccgtagagacgggcacaggcgacgtctgcgcagccaaacttgggctatgacattaactgaaaa

SEQ ID NO: 220083 - DNA, 122 bp, Homo sapiens
gaagcagcattgactcgggccagccgaatttggaagatgtaaatctcccagctcacagcacggaatgctttatttgaaagtattgctatgtagacagccggcttttctgtcatctaacctgc

SEQ ID NO: 220084 - DNA, 122 bp, Homo sapiens
cgaaccgacccttcattcatgctgcagtgctgcaacgtttccgccaccaagggggaaaagcggccgcgatctcaaaccaaacacaagaattggcgtgtgactcatctgcttggatacctcca

SEQ ID NO: 220085 - DNA, 122 bp, Homo sapiens
cttctaaaagaaggaaggccatgtctgcctgaagcctattggctgggcctactctggacccgcccctcttttttttttcatgacacacaccacagcgaagtctgtgcggaatcctaaaccag

SEQ ID NO: 220086 - DNA, 122 bp, Homo sapiens
gggagggtgcccgtggagttggcatcctcatctttgatggtccccggggctcctgagctgcgctggtggccccagggctcggtgcctctctcaggcgacagctcacagacggcgggaaactc

SEQ ID NO: 220087 - DNA, 122 bp, Homo sapiens
acctcatggatggcaagtgcctcatgaccacgtccagggcctggatcgtctcaaaagggacgctgggcagccgccctgaaagtgcatcgtgtaacgcctgcaagctcacgcaggacacccac

SEQ ID NO: 220088 - DNA, 122 bp, Homo sapiens
tcagcagcagccaaaccaggaccgtaggccccatctctcaggagcagcccaggccagcgccgtggctcacctggccagcaccaatttgctggaagaagcccaatttgctcattaaatgcggg

SEQ ID NO: 220089 - DNA, 122 bp, Homo sapiens
aaaaccaggaattagaagtcaagtctcctaaagcactactgaactaaaccaagacactgacgtttttccttctccgtgagaattgggagcccttagtgatatcataaaacatcagtcatttt

SEQ ID NO: 220090 - DNA, 122 bp, Homo sapiens
gggaggagcagtccacccgcctgcctgcctgcctgcccgcctgctgcggcggccttcgcccggggaatgtgatgtatggccgcccagcccagccggcacacttgattcatctccagtttctg

SEQ ID NO: 220091 - DNA, 122 bp, Homo sapiens
tcttctctagttggctaatctaaagacctggttgccacccagtgcagaaaggtaaatgtacgttccaagccaggacctttccttcacaaagcatccagctctttgcctagatctatcccaaa

SEQ ID NO: 220092 - DNA, 122 bp, Homo sapiens
ccccgtcttgctggcgtgagaatacattgctctcctttggttgaatcagctgtccctcttcgtgggaaaatgaaccagaagacaatcctcgtgctcctcattctggccgtcatcaccatctt

SEQ ID NO: 220093 - DNA, 122 bp, Homo sapiens
cttcggggtctcaaccggccaaccaccacgtttttaggccgacctgggaggcagggggaacgcaacagactgcgaagtccttaaggaagaatctaaacaagtccgccgtttgctgtttggga

SEQ ID NO: 220094 - DNA, 122 bp, Homo sapiens
ctggccgggggcgcgctcttcttcccggggctcttcgcgctctgcacctgggcgctgcgccgctcccagcccggatggagccgcaccgactgcgtgatgatcagcaccaggtaccggcgccg

SEQ ID NO: 220095 - DNA, 122 bp, Homo sapiens
tcacggacactggagcctggtagggccgccgggcgctgcggggagggcccggggtcagagcgggggcgcggccctcctctctccaatcccgcccggccccagcctgcgcctcaccctgctca

SEQ ID NO: 220096 - DNA, 122 bp, Homo sapiens
aagcaggagaaaaatgccccagcgtggatgtacacagataactatgtagctacacatcgacgcgtgagccttgagtggcggccgagcggtggccggacgctggccgcggaccctgcagagcc

SEQ ID NO: 220097 - DNA, 122 bp, Homo sapiens
aaggcaacaatcagcagcagcagcagctcagccggcatcttcctcccctcctcatggggacgcagctgccgcggcccccactcgccacctgcagggagaccccccagaccaaggggagatta

SEQ ID NO: 220098 - DNA, 122 bp, Homo sapiens
caggagctttaggggccagagtgcttgaaggcgcgtgtctcaagggagccgcaaggcccccgtgaagaggaatccccttttcctcctgagctgtggccggactgggtggggagcccagttcc

SEQ ID NO: 220099 - DNA, 122 bp, Homo sapiens
aacaggctaaaaagattaaaatttcacagcaggaataatcatcaggaagctctgtagtgacgttaaactgtgggcaatgggaaatgaagaggcatgtacaagtctaaaaaatacttaaatga

SEQ ID NO: 220100 - DNA, 122 bp, Homo sapiens
gtcttcggctgcccccgcgcggcctgctgctgctgggctggtgtcccttcgagggctccgcgcgcctggagccctcacacacctgctggccctaaggccctcgagtcgggaggggggacagg

SEQ ID NO: 220101 - DNA, 122 bp, Homo sapiens
agcaagaggagtctcacccaacgctttgtgaggactctggcctgaggcagcgcctttatacgacagttggcggaccgaactgagaacctgaaagaagtcggcgggaagtcccgccccggtgg

SEQ ID NO: 220102 - DNA, 122 bp, Homo sapiens
aggcagggttgtgttgagagtgaaacagcagcagcatctcacctgggattctgagcttaacgagacagacactggcaattctgccctggatcccccctttctgagactctgggacaattcat

SEQ ID NO: 220103 - DNA, 122 bp, Homo sapiens
ccaaggtttctcccatgtgatagtctacaatatggcctcgtgggaagggaaagacctgaccgtacccctgcccaacaccctaaagggtctgtgctgaggaggattagtaaaagaggaaggcc

SEQ ID NO: 220104 - DNA, 122 bp, Homo sapiens
tcgggatgtcagaatgtgatctggggcgtaaccagatccggcagggaaggcatcctgtgccgggcaggctcgtgtgacctgcccttcaattattcaccccttggagctgtgggctgatacaa

SEQ ID NO: 220105 - DNA, 122 bp, Homo sapiens
tcccactgttttctggacttcggcgctgattgctgcaccctatgtgagtcagaatggcagcgaggaaagcaaaggaaaggaaaactgtcattgtactgccagcacactccttccgtgcctct

SEQ ID NO: 220106 - DNA, 122 bp, Homo sapiens
ctgggctcaagcgatgctcccgccttggcctccggaagcgctgggattagaggcgtgagccgccgcgccgggcctccccccttcccctccgccgccgccttctcatcgcccttcctccttcc

SEQ ID NO: 220107 - DNA, 122 bp, Homo sapiens
gaagagggaccgagctcgcgtgctgggcctcactcccactgggggcgtcggccactcgatcgcaaccgggtcgtaggcattttgggggctcattttaacagaagaaacgctggagaagcttg

SEQ ID NO: 220108 - DNA, 122 bp, Homo sapiens
tgtcagtgcagttgcctctgcttggatttcctgacctaaggatgaaattcttccaacttccgttgcagctggaaatgccatggtaatggatgtaattgctgggctggcagcagccatcttgc

SEQ ID NO: 220109 - DNA, 122 bp, Homo sapiens
tgtttattttcttaggtataatagtcttaaagtggtacaggagaatatccttattctccacggatgcctaatttaggggtaaagcatcctgatgtctgtaatttactttcaaagggttcaac

SEQ ID NO: 220110 - DNA, 122 bp, Homo sapiens
aataagcatcattattttaaaaaaaatcccttgcagatgtaagcatgcagcttgctgaaacggtagaatcccataaggcctacagaacataaatcacaatcccttaaatctgcgggtttgta

SEQ ID NO: 220111 - DNA, 122 bp, Homo sapiens
cccatcgtctaggatgtggggagcgcctctgccccgccgccccatctgagatgtgaagagcgtctctgcccagccgcgaccccgtctgggaattgaggagaccctccgcccggcagccgccc

SEQ ID NO: 220112 - DNA, 122 bp, Homo sapiens
taactgtttgtttaaatagcaaacagaaggcggcaatggaggtgtggaaaactgaggatccgatgtcacttgaaagtaatgagatcacataacattgagggaatgtcctaagaggagtggca

SEQ ID NO: 220113 - DNA, 122 bp, Homo sapiens
acaagaaacacctaaagaaaggaaggagagggaaacaagacagcctgctcggctgggagccgagagacaatccccactgcggggaaacagtaagtgggagactccctgtggtccacattccc

SEQ ID NO: 220114 - DNA, 122 bp, Homo sapiens
gacgtgccctgccagtagacgggagctgcgggtcaggttcagcaggaagtgggtgctgggcgaggccactttgtagaagaggcgggactcggctgtggcccccgtgccgcggcgctgcctcc

SEQ ID NO: 220115 - DNA, 122 bp, Homo sapiens
ctgcccactgatcttcacttggcgaactcgcaagccatgttaaaggcattttcaagtctccgggcagagttcgtgcttcctccttcgagctcttacccactcgtgttccttgcagtgtattc

SEQ ID NO: 220116 - DNA, 122 bp, Homo sapiens
tgtctggcccagggtctcttaagagattgcaatcatttgaaaactttgagttaacttgtacgcagcaatagataacttacacatgtggtcgtagcctcatcactggggttagaggatccaca

SEQ ID NO: 220117 - DNA, 122 bp, Homo sapiens
aacaaatgaggcaggcctggaggatggcgtcggaaacccaggcaagcaacggaccgaggacggctggccgccccacctgtgggctggagccctcacaagagcaccctcaatgaagggtttta

SEQ ID NO: 220118 - DNA, 122 bp, Homo sapiens
ccaggaggccgaggagcgcggcccaagccatcgcggggctggcggggctggcggggctggcggggctggcggcctggcccactcccaggtaaagttccccgcccccacccggcgcgcccctc

SEQ ID NO: 220119 - DNA, 122 bp, Homo sapiens
gttgttactctttgctcatggttgtgcaggtggtaaatgcagcgctggagccaggtccatcgactcaagtgtgcaacctcctctttgtctgcctccctcctcccactgacctctgtgctcag

SEQ ID NO: 220120 - DNA, 122 bp, Homo sapiens
tacatacactattttacacaatcaggtacaactgctttttcctattccattctccttgctcgcagcaaagctggctttagctgacaggcaagatttttttcctaaagccttccaagataagc

SEQ ID NO: 220121 - DNA, 122 bp, Homo sapiens
gaaatgggttctcaaccagctcttctgcaattgcaattgcagctccgcgatacatggcaccgtctagcagcactgatggcctgccaccccttgccggagtgttccacctccggaaatttacc

SEQ ID NO: 220122 - DNA, 122 bp, Homo sapiens
tgtttcttagcggtacctggataccacagttgctgtatggaactcatgttatgctctaaacgatgcatctcagaatttctaagtaaaggattatttttctactatttattgaactttcaaac

SEQ ID NO: 220123 - DNA, 122 bp, Homo sapiens
acaaaatagagcaagtcaggatcccaaagctcaaagagctcaccatttagtcagagagaacgcatgcaaaatgattctaacataactgctattgtggagggaggtaaaaaaatgctttggtc

SEQ ID NO: 220124 - DNA, 122 bp, Homo sapiens
acgagccgcatttcctgccgcgaggctgagtgtctccagttcctaccggcccggcgaccccgcctttagctagtggccaagattcgcaaagcctcgcggcgaggaaagcacgagtattcaag

SEQ ID NO: 220125 - DNA, 122 bp, Homo sapiens
tatcattcttttttttgagactgagtcttattctgtcacccaggctggaatgctatgtcgcgacgtcagctcgctgcaacccttgcttcccgaattcatgtgatcctcctgcttcagcctcc

SEQ ID NO: 220126 - DNA, 122 bp, Homo sapiens
ggtgtgggcccaggggagggatgccgagctcacacgacccctaggtagcaaatagacgcacgtgtgcctttcacactccaccctcacttcacactggcccacccactccttgttctgggaaa

SEQ ID NO: 220127 - DNA, 122 bp, Homo sapiens
gaaagaacacctgcaagtggtttgtgagggactgaactgggacacgggaaatttacaaaacgagaaagggccgcaaagccaagcttgcgtcttgtgtaaatataaatcacttacacactggc

SEQ ID NO: 220128 - DNA, 122 bp, Homo sapiens
ctccccgtccccagccccgccagcctgcagccagccagcccccgaccatccctccagcgccgccagcaagcaacccatagtctacccatggatgaaaaaaattcacgttagcacgggtaggc

SEQ ID NO: 220129 - DNA, 122 bp, Homo sapiens
cacctttcagggactccaaggcggccatcctcgcctcctcctctgggatgaacacgctgacggtgaagtcgctggtctccgagccatacttgttcttcacaaccagcccgtatttgcccgag

SEQ ID NO: 220130 - DNA, 122 bp, Homo sapiens
gcgcgtgccctccctcagcttccctggcagtccctgaacttggaacggattctcctgcttcgacgtcgctcaagtcggccctaccattttctcaggtcttggagatgactccaacgtcctct

SEQ ID NO: 220131 - DNA, 122 bp, Homo sapiens
cttgcttctcagggtgtgggacaggcaggaggctgaggttggagttgggaagcagagccacgtgagaggctgagccacatgagaagccacggccaagctctcagactccacctcttcccgac

SEQ ID NO: 220132 - DNA, 122 bp, Homo sapiens
ggagggtgtgggaggggaggcaacagcacggcctgtgtgcccagggtgccagcggagccccgagtcatcacggtgactgttccaggagcgcgtcagcagccctcactctaccctttgagaag

SEQ ID NO: 220133 - DNA, 122 bp, Homo sapiens
tggactgaagaccattgctcagtcacagcagtgtgacactggcagacagcctattgtccacgtatccaacatgattcccacactgctgtaactgaacaatggtctccagtccacgcagggag

SEQ ID NO: 220134 - DNA, 122 bp, Homo sapiens
ggccatcaaggaccaggctccactggtcagagagtctggaaagtcagggcaggccctgtgcgcacaggcagccggggcggggctgggggtcagcagctgcccaccctctcatccacagggga

SEQ ID NO: 220135 - DNA, 122 bp, Homo sapiens
caccccagtgccgagtcctacaggacactggctgacggattaacaggacatttcaatgatcgttgcctcgtaggagcaaatgtggtccggtgcgatgcgaggaaactacgtcctaatttctc

SEQ ID NO: 220136 - DNA, 122 bp, Homo sapiens
agccacatccatttctcaggctggaggaaagctacactcccagggctctgtcacatttcccgtctttcaagattagaatacagggcattacagacattctcacacatagtaaagtcatagag

SEQ ID NO: 220137 - DNA, 122 bp, Homo sapiens
tccttgatgtcattcctgccattgtgagctgacaggccctcccagccctggtggacagcccgtaagtaaatggggaggaaatgctggggaggtgggggcagatcacatcaacatcctggcat

SEQ ID NO: 220138 - DNA, 122 bp, Homo sapiens
gttagcccaggctgcacgagctacagcggagggatgcgagcgctctgtcagttgagcaggcgctgcgcgcggaggcccggtcggtgccattggttggcggcccaattggcttgaccagggcg

SEQ ID NO: 220139 - DNA, 122 bp, Homo sapiens
tacataccacctgtaagctgtaattggttggatggcagccagaacaaacacctgctttcacgtttttttttcttttttgttttttttttttgagacggccttggcctcccaaaatgctggga

SEQ ID NO: 220140 - DNA, 122 bp, Homo sapiens
taagctggagcggagggccagtgtggtgttgagggtgggagttggggggggaaactcacgcggcccgtacttccaccgcatctcagattgaccgccgtaacagcaggatgagagggaatgcc

SEQ ID NO: 220141 - DNA, 122 bp, Homo sapiens
ctgccacgagcgtgcctgtgtggtacagccagaggcggccatcagaaatgtcaggaactccggcgccaaggaggctgccagccaggctgtaaacagctggagtctctccaaaagaaaagagc

SEQ ID NO: 220142 - DNA, 122 bp, Homo sapiens
accgtcccacttcccaccccgcgcctcacagcacagacgggggatttgccggcctcacgccggccgagccactgctgacttcacgcagccccagccatgcccccacgcagacacacggagcc

SEQ ID NO: 220143 - DNA, 122 bp, Homo sapiens
caaaatctcatctcccggctcccacccccaacctctgcatgttgcacaagcactcgcaaacgcagtggtcccagcctgccccgcagcttagcaaatttgtcttactgcccaacaggaaaccc

SEQ ID NO: 220144 - DNA, 122 bp, Homo sapiens
tcctggcagcgatggggtggtgggggccgcggggcctgggcggggctgggggcaacggggcgcgcccatgacccagccgcccggcaggccgtggagctgcggagcctgtggcgggagcacgc

SEQ ID NO: 220145 - DNA, 122 bp, Homo sapiens
taatggagtaggcagcagttatctgggaaagtcacatgacctcagatcatggtttcacatcgctgtaagagcaagctgatgtttgagacccaggtggtgagtagtatgttgctagattcact

SEQ ID NO: 220146 - DNA, 122 bp, Homo sapiens
aacagttgcaatgcttagtgggattcacccttgtcgtcaccaaccctgctactccagccacgtgagttttccgcctgtcagccaagcaaaatggccttcctgcagtcgcacggccctttggt

SEQ ID NO: 220147 - DNA, 122 bp, Homo sapiens
aacagcacacaggcagccagccgtggccagaggctcgaggggctcagggcctcaggcacccgtccccacacgagggccccgtgggtgggcctggccctgctttctacgccaatgttatgcca

SEQ ID NO: 220148 - DNA, 122 bp, Homo sapiens
gtctcccagcccccagtagccaggaggaacgtctcataaaataaatcaggtgatatcaaccgcctgcctccttcccccacttaaatcccttgcaaagctcccctttactcttaggatatatt

SEQ ID NO: 220149 - DNA, 122 bp, Homo sapiens
gcccagcacggccccgatcccccagccaggcggcggccgcccccgaccccgcggcccaggcgcagcccccacgccctggcacaggactgcatggccgcggccaccgtcccctgccccggccc

SEQ ID NO: 220150 - DNA, 122 bp, Homo sapiens
taggcattttctattatatggataaattacccacattttgtcaaatttgctaaaacagtccgggcgcggtggtgcacacctgtaatcctagcactttgggaggccaaggcgggcagatcact

SEQ ID NO: 220151 - DNA, 122 bp, Homo sapiens
agcccgggaggaggcagcgctgggtggtttcgggtgccctttgggaagcccaaatccccccgccaggtcctgagccagcctagtccacttctactccaccagtacccagcctgggtctctgg

SEQ ID NO: 220152 - DNA, 122 bp, Homo sapiens
ggacgttgaagacgaagacgtcgtccttggtggtggacagcacggcggccaccccctccacgaagagggccagcagcggggacaggaacttctcctgggacatgttctccaggcggacagtg

SEQ ID NO: 220153 - DNA, 122 bp, Homo sapiens
gacctgccacccagaccacataaaagtgtatcatgggatcaagttggtcactgcagttggcgagtagtggtagtagccaatcagtcatggcagaagaaagacggtgttaaaagtacatgtat

SEQ ID NO: 220154 - DNA, 122 bp, Homo sapiens
gcactgggaaaggcaatccagcctcaatcctcgccacagacacgggcgactgtcccccagcgtgtgagtcaaaccatactccaggcctccaggaggtgtttgtcgcgacaacacctgcagag

SEQ ID NO: 220155 - DNA, 122 bp, Homo sapiens
tttaccttaggcaaaaaattctgcactactcccctcacctaaaacatatggataataggccgggtggggtggctcacgcctgtaatcccagcattttgggaggccaaggtgggcagatcaca

SEQ ID NO: 220156 - DNA, 122 bp, Homo sapiens
ctgacttctgttccagagcaaaggtcattcagccgcttgaatcagccttttccccccacccggtccccaactttgtttacccgataaggaaggtcagcattcaaagtcaagaagcgccattt

SEQ ID NO: 220157 - DNA, 122 bp, Homo sapiens
tatggctgcgagcagttccggccaaaagccccaggacccggacttggggttattgacttgcgcgtgggcgctgagtcttggaggggaggggacaactcgccacacccccgtcctctccctgg

SEQ ID NO: 220158 - DNA, 122 bp, Homo sapiens
cagccttgactctcagtttcctctctcagtaaatgggcataataataccggtccagcctacgctggagaattgtgaggtgaaaatgaaataaggtatgcaaaggtactttgtaagtataaag

SEQ ID NO: 220159 - DNA, 122 bp, Homo sapiens
ctcgatctcctgaccttgtgatccacccgccttggcctcccaaagtgctgggattacaggcgtgagccaccacgcccggcctagcagtggttttctcaaacgagtctggatcagattcacct

SEQ ID NO: 220160 - DNA, 122 bp, Homo sapiens
ccacgcctgcgtgatccaccggaacccaagcccaggcaggcggtgagagggcggggcctccgcagtgcgactgcgccgctcgaggccgtgcgtcgcgggggcggggccgcgcaggcgtaccg

SEQ ID NO: 220161 - DNA, 122 bp, Homo sapiens
ggagagcggttcggctcaacccccttctccagggccagttccaccaggctgcaggggccgcgctctgggcttgcagctgtaggggaagcacagttcgcttactttgtatttttcttgggagc

SEQ ID NO: 220162 - DNA, 122 bp, Homo sapiens
actccagcccctccctcctctctcaggtagcccaatcacctaagctcttgagcagcaacacgacattgcccaagctggtcctctggatctcaggcactgtggtttcctcaagctcgtgctga

SEQ ID NO: 220163 - DNA, 122 bp, Homo sapiens
gtcccgaggcgaccgagccgggagttgtagttcccgccgccttggcgaggttcccggaggcgctgtccctgggtccggactccgctgtcgctgcccaccccgcttcgcccgtcgcgccgagg

SEQ ID NO: 220164 - DNA, 122 bp, Homo sapiens
cccataaaagaaagcaccatccgcgcttctactttctgtttcttcttacatcctgctgctcggaagactgaggccacactaagcctgacagacgtatgatgagcaaggaatttacgcagggt

SEQ ID NO: 220165 - DNA, 122 bp, Homo sapiens
tccggcggcagggaccgcagcgacgccctcaccggaagtcccgcctctgccgtgggcctgcgagaatcgaggcactcgctggcgtacccatgtatcgaaatgagttcacggcctggtaccgg

SEQ ID NO: 220166 - DNA, 122 bp, Homo sapiens
gaagccaacagcctgcaagaaataggtcaaggtctgatccttgtaagcgaagcatcatggcgtaactggccagagttttagctttaaagttggaaaatccttattctgctctataatttggg

SEQ ID NO: 220167 - DNA, 122 bp, Homo sapiens
tgcggagactgggacttagggaggatgggagctgctccgggcgcggcgaaaagcgctaggcgttaataccttggttctcacagctacccacagaggggaggaagtagccagggaaatcgcgg

SEQ ID NO: 220168 - DNA, 122 bp, Homo sapiens
ctgattaatccttaccccttcatttttacatatacctttgattatctaatttagtccaatcgtcttaaatgttacctatatgctgattactgtctaatttatttcccacccaatctctccct

SEQ ID NO: 220169 - DNA, 122 bp, Homo sapiens
atctatccttctccattagctggattaacaacctggaaaaagtgccgcccgcaaagtgagcgcctggagcaagggacagtccccgagtggccgcccctccctttcggtgacgctccacttcc

SEQ ID NO: 220170 - DNA, 122 bp, Homo sapiens
ccttaggcctccccagaagccaagtagacggtggagccatgcttgcacagcctgcagaaccgtgagccaattaaatctgttttctttataaattacccagcaaagcaggcatttctttagag

SEQ ID NO: 220171 - DNA, 122 bp, Homo sapiens
ctcaaaaatacattaacacaagatgaatttttcaataatcaagagtggctttgtaatgtgcgccctctggaggataattccttcctcgtgtgaagacctgagtctgtcagtcttacagattt

SEQ ID NO: 220172 - DNA, 122 bp, Homo sapiens
ccgcccgcgctcaccatggacaggtaaacgtaggaggcgtagagctccaggttgatctggcggttgatggcggcctctgagtcctggtggtagttctggcgcacctgcgaggtggacgcggt

SEQ ID NO: 220173 - DNA, 122 bp, Homo sapiens
agggaggaagctgggacacccgggagtcaggaaatggtgagtgtgtcgggccctgcgtcccgagacagggaggaggggctggttggacgaccggaactggctgtggcgcggcccgggccttc

SEQ ID NO: 220174 - DNA, 122 bp, Homo sapiens
caggccttgccatggaggctgctgcggggtgggtcggtctgcaggcccacgctgaccgtgcggatggtctgtgtgcccacactggccaggcccaccgtctggctggatgtgctcttcacttt

SEQ ID NO: 220175 - DNA, 122 bp, Homo sapiens
gagagagatgttaaacagataactgtacagatggcatagctaattatattcgtggaagttcgttgtggcaaagacaggcatctcaatatttcaggagctcccctatattttctagcctccct

SEQ ID NO: 220176 - DNA, 122 bp, Homo sapiens
cgcgctgcgtcccgctcgcttcagatgccggcccgcggatccgtcagcccagcaaccccgcgaagctcgatggtggctcctgccccccgacccggaaacagttctctgtgtttccggcctgg

SEQ ID NO: 220177 - DNA, 122 bp, Homo sapiens
gaaggcggcaatgaaaacgccttgggcccgaagtacggcttgggaaaatcggcgcagattcggggccgcccgttggggattcccaaggttgtgcagcccaaagggcctcgtcggaatttctg

SEQ ID NO: 220178 - DNA, 122 bp, Homo sapiens
aggttggactctgccacctcctctatctgtgtggtctttggcttactgaacctctctgggcgtcacactcctcccagataaagaatgcagcacgactgacatccagtgacaatccatgcagg

SEQ ID NO: 220179 - DNA, 122 bp, Homo sapiens
gctgctgcagtggcctcagctatggtattttctactaatgtttcacgggctttatcaaaacgtggctgaacaagttgggcatagtcgactacctgcaaagaatatttgagaaaatcgacata

SEQ ID NO: 220180 - DNA, 122 bp, Homo sapiens
gccgttttccttttcggaatgtgggtaaagaatttaccgctaacagacgacctccaggttcgctcttggacagcaagattgagagacaaaacttaacaaagcgctgtgcaaactgaaatccc

SEQ ID NO: 220181 - DNA, 122 bp, Homo sapiens
ggaaaggggtgggggcgattccttacgttccatgctctggtgtccacctgagaagttccacgcagaccaacaatccactgccttcccagagacgccttgtgtgagaaaggcagagactggag

SEQ ID NO: 220182 - DNA, 122 bp, Homo sapiens
attacagttgcctaaatgcagtctcacacacacatatacaaacaataatgtagcagtgtacggtggggcacagggagtagacttgccaaagaaaagttgaactaacagtgatgacccctgct

SEQ ID NO: 220183 - DNA, 122 bp, Homo sapiens
tcaggcaatctgccctacctcggcctcccaaagtgctgagattacaggtgtgagccacagcgcccaaccagtgaatgcttgatgagcttgtttttgccttgttaaaattgaaaacatgattt

SEQ ID NO: 220184 - DNA, 122 bp, Homo sapiens
gactttctggaaaaaggtcccatcccggcctggtgccccgtgctgggtggagaagccccccgccccgacctggcaccgcctgcactactcacggggtggaaaagttgtccctcggctccgcg

SEQ ID NO: 220185 - DNA, 122 bp, Homo sapiens
gcttgcgggacgtcgtagagaaaaccatccaaaagtacggcaccaaccccgaggagaccgcggccgaggagagctgggactatgtgcagttccaggtaagcccccctcctccagttccctcc

SEQ ID NO: 220186 - DNA, 122 bp, Homo sapiens
gcgtgtctcagcaggtttggagtgcagatgcacaagtccacaccttacgtaaccacgccacgtgaggcgcattaagtaaccactcagatgcgctcgtgcttggcttggagccactgttgtct

SEQ ID NO: 220187 - DNA, 122 bp, Homo sapiens
cggcaggggtcgcgatgatgggctggagcagtttggggcagggggttctgggacccactccgactccccctccccggcatcatttcccctcccgcttcctccggctggacctggggtccccc

SEQ ID NO: 220188 - DNA, 122 bp, Homo sapiens
cgcctcagggcctcagggtcacaccaacagggtccggctggtgccgcgaccaagtcacagcgcctgtctctgtcatcagcttttccttttctcccatattttcaacttggttagagggcagg

SEQ ID NO: 220189 - DNA, 122 bp, Homo sapiens
gagggtcagaaaggccgcctgaggcagctgaccgctcctgtgggctgaatgtcagtctggcgaagcagaaaacatctgtcagtgagtcagagacctgggtttcagtctcagctctgcactaa

SEQ ID NO: 220190 - DNA, 122 bp, Homo sapiens
cctgacagcccacttccttcaatttgtcctcagagtgatgccacttgtctgcctgcagggcgaattccatggcttccctctttgccctgtccggttctggcaggtgtgtggacccaggcact

SEQ ID NO: 220191 - DNA, 122 bp, Homo sapiens
agaagtgacaacttctgagcgcgtttccggcgccccttcttcacgctgagccagagggggcggggggcacgtaccacatgcttggctttccaatcccgacgggggcccccaggcccatctac

SEQ ID NO: 220192 - DNA, 122 bp, Homo sapiens
caagtggggaagctgcgtcgatagggtaaagccgactgggacaggcccttctcaggagcacgcatacgacccatgatggcggcgatcaggcaacgaaaggcttgttttttttttttcttttg

SEQ ID NO: 220193 - DNA, 122 bp, Homo sapiens
gcaaatgtagttttaaaaggctgccctgttgaaaaagacacttcgaaaaaaagctctgatcggtggggggtttgtgcccaaatggtcctttatctcctcccaactggcctctttctaacacc

SEQ ID NO: 220194 - DNA, 122 bp, Homo sapiens
gaaggagacttaggggagcggcggcactagggccccgggggcagagacagggctgagccgcgaggaagctcggaggaaaagtcggaaggctacgcggaccctggggaggggctgcggagcgg

SEQ ID NO: 220195 - DNA, 122 bp, Homo sapiens
ccccaccggcatcagaccaccgcctccattcagcggaggaatgtgggcgggcagaggacgcgcggtcccctcgcccggcgttaaccctgtgcgcgccgggagcttcgcccggagcatcgcag

SEQ ID NO: 220196 - DNA, 122 bp, Homo sapiens
caagatggcccaggagaaccccaagatgcacaactcggagatcagcaagcgcctgggggccgagtggaaggtcatgtccgaggccgagaagcggccgttcatcgacgaggccaagcggctgc

SEQ ID NO: 220197 - DNA, 122 bp, Homo sapiens
cccgcagaggggcgtgaccttgtttcctcaggagtgtggcggtggtcttactactatgttcgttatagcgcggtacgttctagacccttctataggaaatttaaaacctttaaaatgtgtat

SEQ ID NO: 220198 - DNA, 122 bp, Homo sapiens
ccccccgttgtttggccggtgggagcccctcctttcagcaggcgccgggcggtggggttgcggatggctgcgcgcgctgcgggcaccgatcaccggcggcagttgggctccgcggggccgaa

SEQ ID NO: 220199 - DNA, 122 bp, Homo sapiens
tgctggggggatgctggctggaagccggggcctggagcctgggacagcagctgggtctcccgggcaacctcggggacaacttcactggaggttgagctcacagtgcctttacaggggatgag

SEQ ID NO: 220200 - DNA, 122 bp, Homo sapiens
taccgcccaggacatagaaattgactcaccgcccagaggcttacagctcaaggaggggtgcgcgcagctgcaccccgggacaggtcagcatcccacaaggcgcctggagtaaagcgaggcca

SEQ ID NO: 220201 - DNA, 122 bp, Homo sapiens
aaggagccgggactgtgtctaggaggcagtggggagctccggagagcgaagcgcctcctgcgcagactcgcgtgcttggagtaccggagcctgcagggcaagagagggtcttcagaagaccc

SEQ ID NO: 220202 - DNA, 122 bp, Homo sapiens
ccatatctggcccagcacgccggggtcccggcccccgtctcgaatgtaggcctcccgcagcgccctagggagtggggaacaggaaggccgtctttccagaactgctcagcgcttcgccctat

SEQ ID NO: 220203 - DNA, 122 bp, Homo sapiens
tctggttgggacgctgagttaggttggcaaagcgtcattgttttgaaaggcacattcgtccggaatggcattcgtgataagattaaacataaacctaaaccttggcctcgggggaaggcagg

SEQ ID NO: 220204 - DNA, 122 bp, Homo sapiens
gatttttcaagtatgtattctttgtatgtcaccacaaaatggaaatagaattaattcccccgtgaaacagttagtaggcctattactgaatatgcattgtctatttattgaatgtgatgtag

SEQ ID NO: 220205 - DNA, 122 bp, Homo sapiens
aaatccctgtaagcattatggtaatttctagagtgacgacagttatattaacatcttatacggctcacagcttttcggcagacaggctcatttatcttcatgggcttttattataaaagata

SEQ ID NO: 220206 - DNA, 122 bp, Homo sapiens
gaagcgctggtaggccttggagaggcgggttaggaaggtacgtctgaacctagtactgggcgaactgggagtgagaaatggaaagggagttagcagttactgtctgagcaagagtggcagta

SEQ ID NO: 220207 - DNA, 122 bp, Homo sapiens
gaaaggcacatgatttcagcagtctggaatgcaattcagtgtgtctgggcccaacgaaagcgcatacggaaaagtgattcctgactaacttattgttctggtctggagtctccggggaattg

SEQ ID NO: 220208 - DNA, 122 bp, Homo sapiens
atgggcccctcccaagagcctgaacctgaatacttcttataaaaaggttctctggctggacgctgctcaatccactgcctagcaggtggcccattccagttggagaacgtagtgagtctttc

SEQ ID NO: 220209 - DNA, 122 bp, Homo sapiens
aaaacagggaagcggaatcttctccactcaggactcctccgcttgaaacaccctgaaaaacggacaagggtgaaaaattttactttgctggcattgcattcgtgaatctatgtttcctcctg

SEQ ID NO: 220210 - DNA, 122 bp, Homo sapiens
gcccgcctcggcctcccatagtgctgggatgacaggcgtgagccgccacgcccggcccctcggagtcgttctttctgttgcatcctcatggttttctgtggccacgtgctttcgctcatctc

SEQ ID NO: 220211 - DNA, 122 bp, Homo sapiens
ctctccaaacagaataccctagagcacagaatgatgaccccataggacagaggaccagggcgtgatactgggagagactgggcttttcaaaaagattcatgacttattcaactcaagtcttg

SEQ ID NO: 220212 - DNA, 122 bp, Homo sapiens
tggagggtgagggtttccacccgtgggtctctgaaagggctcccacaggttcagcaagagcgtctgggagaaaccatctgtggagtgggggacacaggcacagagtgtcccgtcctgggcaa

SEQ ID NO: 220213 - DNA, 122 bp, Homo sapiens
tttaaaatcataatctttaaaaaatatttttactttaggaacgtttgtcttaatttttgccgatatggtgtgttaagattagaatctgttaatttcctgacatttattaactacgtgatatt

SEQ ID NO: 220214 - DNA, 122 bp, Homo sapiens
aaggccgccttgagcgcaagcatggcgtgcaacagtgtcagctgtgctgtgcctagcagccgtaccagctgcggcttgaagagtgccggtggctgtccctgcagaccccgcagggcccagcc

SEQ ID NO: 220215 - DNA, 122 bp, Homo sapiens
gaaggtgcagaccttcgccctgagtgttacagctcttaaggcggcgcgtctggagttgttcgttcctcccggtgggctcctggtcccgctggcttcaggagtgaagctgcagacctttgcgg

SEQ ID NO: 220216 - DNA, 122 bp, Homo sapiens
tatgttagacataaggaagaacactgtagctttagggggatattctctaagatggattatcgaaggacagtgtaaaatcctcaatatagaattgtgaaaagtttgaaaatggagcaggctcc

SEQ ID NO: 220217 - DNA, 122 bp, Homo sapiens
gtacacccactgcagggtcagcccgcgggcctggggtggggaggcgcgggctggggctggcggcaggggccaggacccccgcctagcatggggacaaggacccccgcctagcatggggaagg

SEQ ID NO: 220218 - DNA, 122 bp, Homo sapiens
aagtcaagctcaggggctcttgccctagagaaaaacaaaacatggcaggaggtggcagaacgccacggcccagggaggtccctggctttgatctcctgattctttaaaggggtttattgact

SEQ ID NO: 220219 - DNA, 122 bp, Homo sapiens
atcatccaatccaacctcttactcagtgggaaaattaatcttttgtccttctctgacacacgtgtgactgtcctccatgtcatggagcccactgcttcctgggactgcctcccgcctccttg

SEQ ID NO: 220220 - DNA, 122 bp, Homo sapiens
attccaggaggagggagggagacccgcgtctgccgcagattgatggctgtgtccttggaacggagtgagtaggctcctggggcctgtgggagtgcgagggggagacctggggcttagaaaaa

SEQ ID NO: 220221 - DNA, 122 bp, Homo sapiens
ctctggctctgttctcaaagcccaggatcccggcagcagcaggaatgcagcacacttatgcgtgaagacgagatctttcggtaagtcctacaaagaggacttttaattcccctcctaattcg

SEQ ID NO: 220222 - DNA, 122 bp, Homo sapiens
cccatgctggggacagagaggagaaggcgtgacactcaggggtgcagagacaggagcgggcgccccacgcccctaccccagcctctggggactgagtgccgttgggtggagaggtcggagct

SEQ ID NO: 220223 - DNA, 122 bp, Homo sapiens
tctgagccaagcatgaactcatgtgagtacttacctaatacacctcacatgacgtggttacgtaatgtgtgggggttgtacacctgcgctccaaatgtgctaagtcatgctgtgctggaagt

SEQ ID NO: 220224 - DNA, 122 bp, Homo sapiens
cgcggtgactttaccttgcctggggtggaagtcaacttcccaagacctggtgatgaagagcgagagatggtagagcagcccagtcagccacttggccacccacatggttccaccctggggac

SEQ ID NO: 220225 - DNA, 122 bp, Homo sapiens
ttagcatgttttttaaatgaattctctgcttgcacttaaaacttgtattttatcttttatcgttctagaagaagcaaacagtatgtaggtatgtggcaagcatctgaggggactatcttagg

SEQ ID NO: 220226 - DNA, 122 bp, Homo sapiens
atcctgttaactgtcctcggcgttggaggcagagaacaacgtccacctgagaatcgcttccgcgcgtagtgactccagccgcgcctttatcgttcttcctttctttacagtgacagctggaa

SEQ ID NO: 220227 - DNA, 122 bp, Homo sapiens
ggggcgctggcggagcgggcggcggagctgtcagtcccagcccaagggtagctggaggcgcgcaggccggctccgctccggccccggacgatgcggcgcgcccaggatgctgccgtgcctcg

SEQ ID NO: 220228 - DNA, 122 bp, Homo sapiens
agttagaatgaagccaattgcaagtcagccccatggtccctggcctcctgccaattcctacggaagccaggcaacctctggcatgcttgttgatttacttcagtatgtcaggggtagtaaac

SEQ ID NO: 220229 - DNA, 122 bp, Homo sapiens
tgtcccgccgcctcccgctcctcgcctggcggatgtaggttgttggcctgaggggagctacgtagccgaggtttgcgctgccgccgccaggcccggtccggttccagcctctgcccggacgc

SEQ ID NO: 220230 - DNA, 122 bp, Homo sapiens
atccccgtttcagacaattccagggcttttgaatcatgcctcagccttcctgtccggtctcgcctccaaagctcgaaaacaagaggcgctgggagcgaggttgagagacgcacgggtcccac

SEQ ID NO: 220231 - DNA, 122 bp, Homo sapiens
gccacgtgactgcagggtggatcacccagcgtcttcagtgcattgtcattaaaataaaatcgacttaaagtggcctaagagaaaaattgtaatttgtggacatgacttggatcctgattcaa

SEQ ID NO: 220232 - DNA, 122 bp, Homo sapiens
acaatctctggttatcactgtttttaaatcctggagacatctctgcagtccatctgaactcggccaagcattgctcaaattgctctaccgtctgtaggttctgccttaagagattcctgaca

SEQ ID NO: 220233 - DNA, 122 bp, Homo sapiens
gtgagcccttggagaggcttcccagcctctgctcttcaagccgaagtaccacaggggacacgagtcccagagttacaggaccccagctatggttcatgtgtaaagggaaccattaggcaacc

SEQ ID NO: 220234 - DNA, 122 bp, Homo sapiens
gaagaaggaaaggatggaaccagtgcaaggggcagggggaagggtgagacacaatgcctccggatcaaaggagaattttggcagaaaaaccacgccatgtaatagagattgagattgaggtt

SEQ ID NO: 220235 - DNA, 122 bp, Homo sapiens
ataaattacaggcagcagcagttttcctggagccaggcagtagaacactctccttggtgccggcctgggaggaggatcctggcctggcaagcagggctgactcaagctcattgcattagccc

SEQ ID NO: 220236 - DNA, 122 bp, Homo sapiens
aactgtcttgaaatcaacaacttcttggatgacggcaaccagatgctcctcagggtgcagcgatccgacgcaggaatctccttttccaacacggtacggttccttgcactcctgcctgaccc

SEQ ID NO: 220237 - DNA, 122 bp, Homo sapiens
ccagacccagttatctagagattttaaccggaaatattggatatgacctccatccggttccggcttgggcagccagaccggacttgcaggctcttggaggtcgcatcctgtccttcccccgg

SEQ ID NO: 220238 - DNA, 122 bp, Homo sapiens
ccgttgaagaatgacagttcagatgtgacttgacaggttaagcaggtgtgagccagggggcggagtggagcctgtgtgtctgtttggacaaaacgggaggcacattttcaggtttaggaaat

SEQ ID NO: 220239 - DNA, 122 bp, Homo sapiens
ccccgcggcccgccgattggccccagccgccccggcgctaagactcaatttcacactacgcgcccaggccacgcccacctgtcatgcggccctggaaactgtgagtttggggattgttgtgt

SEQ ID NO: 220240 - DNA, 122 bp, Homo sapiens
actttctgttattcaagactctgtaatgcaataggaattttgtaattggacacctgtcagcggtagttacagagctagttgcaacacactcagatgtttaaagtcactcttgtgtatttaag

SEQ ID NO: 220241 - DNA, 122 bp, Homo sapiens
ctcacggcctgctcgcactgcacatctagggcactagtagcctcatccaggatgaggacccgcgggtctcgtacaagggcccgggcaatggccagacgttgtttctgtcccgcagccagctg

SEQ ID NO: 220242 - DNA, 122 bp, Homo sapiens
caggcagctccgccagagaggacagggggacgaggtgcccggcatgactcgcgcgataggcggccgcgggtcttgctgggaaatgaagtcccaaagcgtcagtgtttcttgcgagaccgccc

SEQ ID NO: 220243 - DNA, 122 bp, Homo sapiens
tccaggtagctgcgggcacaacacggaagctggttcatggcagagggcctcgtgatggaacggtgcgcacgctccgaccagcagcccctgccctctgagcgagacagcgccaagcgaggggt

SEQ ID NO: 220244 - DNA, 122 bp, Homo sapiens
caaggcccaggagtccacaaagaaaaagagagggaaaaaaggagagcaggcttggcttctcgctcacctgcacatagctccccacgctctcctggtagatcataaaggaaagcaggctgccc

SEQ ID NO: 220245 - DNA, 122 bp, Homo sapiens
aggctacaatggcatgatgggtgcgaaagagattggtaaactgtaaaatcctttagagaccgtgtggccccttcactgtctaggccagtggttctcaaagggtagtgtgtgtcagaattacc

SEQ ID NO: 220246 - DNA, 122 bp, Homo sapiens
ggcgcttttctgacaggcttaaaaaatggtgcaccatgagattatattccgcacctggctcggacggtcctacgcccatggagtctccttgattgctagcacagcagtctgagatcaaactg

SEQ ID NO: 220247 - DNA, 122 bp, Homo sapiens
gttaacccactagggggattttcctgtccctaacgctgaagaaagtgtaagggtttgacccggtctccatggagtcagaaagtacctttcaggaaaattctgtagccttaacagcccagggt

SEQ ID NO: 220248 - DNA, 122 bp, Homo sapiens
ccgcccgcctctcacgtggaggttgggccggacccgccccgccccacagagcccgggtcccgcccccacgtggctggcagcttcctggccctatcatttctgcgctggcttcagcggctccg

SEQ ID NO: 220249 - DNA, 122 bp, Homo sapiens
agcatgcagtcaaagacaaccatgaacagaagcaacaaaacaacactgctataaccagctcgggtagagagatcagcctgaacaatattccaacatggtcagtaatggattataaaaactgg

SEQ ID NO: 220250 - DNA, 122 bp, Homo sapiens
ttgttaaataataggaggcttcaggttagattcattcattatagtcctcaaagttaatctcggagtggaaaacttaaaagagaaagcttctgctataagaaatccaaatgaaatacctaaaa

SEQ ID NO: 220251 - DNA, 122 bp, Homo sapiens
tgcggggtcgggagggaaacggcgtctgtggggagtagctaggggcctgcccggcgggggcgcaggaacccggttgcggtgccgggaggagggtcgggagggtctcagccccctccttgctc

SEQ ID NO: 220252 - DNA, 122 bp, Homo sapiens
aagacatgtggaccactggagatatactctaccctggggagttaagataattgtgagcaccgctgccttcaaaacacacagctacagcaaaacctaattcaaaaggtaaccatggaattaac

SEQ ID NO: 220253 - DNA, 122 bp, Homo sapiens
ctcggggttacgtcctggggcgactggaggcggctcacgactcagaaagtcggggcttctcgccccggatccccaccgctggcgtctgtcgaatccccacctcggtcctcgggtagaggcgc

SEQ ID NO: 220254 - DNA, 122 bp, Homo sapiens
cactgcccctccggtccggacaaacggacgtacggtttatctgcccatgcgctctgcaggcgcaacccaccaccaagcttgcgcacgcgcgctgccgctcacccgtttcccctcgctagagg

SEQ ID NO: 220255 - DNA, 122 bp, Homo sapiens
ttaggcgcgcaggggcccagacgagtggccagacctggctcagagcggctccggggggggcggggaattccaggagaggcccctcccggagccgcgaaaccatcccttcccgcctccgcgcg

SEQ ID NO: 220256 - DNA, 122 bp, Homo sapiens
gccagggccgatatcagggaaggccacgcccacaggactgggcctttctgccttcacttgcgcgaccactggcccctatcccttcaggctttgcgggttaccgcactttccatctctcgtgc

SEQ ID NO: 220257 - DNA, 122 bp, Homo sapiens
ccttctgcacttactgcttttagcctcctcaggggcagaggctagggacggggacagggccggagcctgggccagggcaggggctggggctggagccgaggccggagtcggagccgagtcca

SEQ ID NO: 220258 - DNA, 122 bp, Homo sapiens
gccaaatattagctaaaatctctgaattggtctgtgtttcacctagatactaatggtctacgcagtgggctgttagcaagcttgtatcatgaactccccaagttctcctttctttaaataca

SEQ ID NO: 220259 - DNA, 122 bp, Homo sapiens
cctgggccgccaggcggggcagagtcagactgtcagactcacacggggtgggggcctcagcgctgagtgccctgcaacggcaccccctttctcccatactttttcacaagcgcacgtggggc

SEQ ID NO: 220260 - DNA, 122 bp, Homo sapiens
cgccgggcagggaagatgctattctctagaatacctgcatgctgtccaaggtgttctgcgcgaagagcaaagcaagacagttacagaaagacgccgtaaataaaagacacaattcccagcac

SEQ ID NO: 220261 - DNA, 122 bp, Homo sapiens
acttccccagtttcccccgttaccccccacccatcccaccccctccctcaccctgctcctcggtcctagcccgggctttttctaactggggtggccccgcccagaattcccgcccctgccct

SEQ ID NO: 220262 - DNA, 122 bp, Homo sapiens
cccagccgccaggcgggctgctgcgggtgggtggggagcgccgcctagctggagccgaagcggggcgaggcgctagttgggagcctggaggttcccgcccggccacacccacctcaggtata

SEQ ID NO: 220263 - DNA, 122 bp, Homo sapiens
ggacagggtccagggcttgcatatgggatgggtcagggcggccgagaacgccagcccatccgtctcccggggctcatgctcgcacttaaattttctcagaaaagccgaaagccgtgattccg

SEQ ID NO: 220264 - DNA, 122 bp, Homo sapiens
tcagtgaattccagttactgctccaagctctttacatgtgtctatataaatagattgccccgtttaatgctcacaagttctcctgctccttgtctgatcaagccacgctgttcactggttcc

SEQ ID NO: 220265 - DNA, 122 bp, Homo sapiens
cagctgctgccacagcccatttcccagtggcctgaggactgcgcctgttctcagccatgtcgctggccagctgctgaggccggacaggtggtgagacatgcaggcgtggggccaggaaggat

SEQ ID NO: 220266 - DNA, 122 bp, Homo sapiens
ctgtgtacgctctgtggacaaataaggaaacttaggaatggatcacacagctatcgcaagcgaggagaggactggaatttggagcccaccccaggcaccacacatagcgcaatgttttgccc

SEQ ID NO: 220267 - DNA, 122 bp, Homo sapiens
cattcttgccctgtgctttccaccgacagcgtgcactcgataacattgctgtccagcaggcgaatccgtgtgacaaagcagttcttgctcaggacgttgtagcgccgtgtccggcggagctt

SEQ ID NO: 220268 - DNA, 122 bp, Homo sapiens
atttttcaaggcacttttccaaagagtttgtgggggtggagtgggaagcggtgagacctccgcgggaggagactttcctgaacgctgttgaaattggacgcttgccttaggaggtggatagg

SEQ ID NO: 220269 - DNA, 122 bp, Homo sapiens
tacacccggtcagagctggcggccgcgccggcccagctgggccccggcgcctgggcgtcccgcgcccctcgccccggcctcaaccccagcccccgcggggacgccccctcccccgcccacgc

SEQ ID NO: 220270 - DNA, 122 bp, Homo sapiens
aaagggggtgcttcttcccaccaaggacactttggacgtatctatggatttatttgggtgcgtcccaaaaatccatagcgacaaatctcttctggaaaatcaagtcttttggttagcaaagg

SEQ ID NO: 220271 - DNA, 122 bp, Homo sapiens
cataaataagaaaaagctctcctttgtttctctctttagcgtcatcagcagctattgtcacgttaagagttcttctgggccttccaagatgcataataatgataatgataataacttccatt

SEQ ID NO: 220272 - DNA, 122 bp, Homo sapiens
ttcaagttcattgtctttaccgagccctggaagtgggtacaggtctaagtgttcaccctgcggcctcgccaaggggtaacttggcatagttttccagctggtaagttgataggcaaaggaaa

SEQ ID NO: 220273 - DNA, 122 bp, Homo sapiens
gggccgccgcgcctaggcccgtgagcagcctgtggtggggcatggcggcacagccaccggcgtgcccgcgagtgggagtgcgaggaggcggggagggaagcacccccagcgctcggaggggc

SEQ ID NO: 220274 - DNA, 122 bp, Homo sapiens
ccacgctcacatcccattttcccgttctaacaaagctttcctttaggggcctggatcttccgtttttcccgccttccgacgtcagatcaatccatgacagctttctgattggctaacccctc

SEQ ID NO: 220275 - DNA, 122 bp, Homo sapiens
tgctgagagagacagacggggccaggccagcggcgggcagacaagatgacccagacaaaccgagagaggaagtcgccggggtccagggagggacgcctcccccacccccaaaagcacgcaaa

SEQ ID NO: 220276 - DNA, 122 bp, Homo sapiens
ttcgtccaatcgtctgagcctgtcctcttattcccggttgtaactaaatactgttgcgagcgcagccgaagccctttgttggagatgtgtgagcgcagtctctacagagcgggctatgtggg

SEQ ID NO: 220277 - DNA, 122 bp, Homo sapiens
atcgagagagcctgagtccccgcgaccgcgtatggcagcgtcggagtcaatccgctggaacgcctgccacaagatgaaaaacagccaagaggagcaaggaacaaaaaagactggttccgatc

SEQ ID NO: 220278 - DNA, 122 bp, Homo sapiens
ccacacccactccttgtgcagcacctcagaggaagctcaacaacagttctctgcgtgagccgtggcagacgcaaaaccgcccgcacgtgtgactcctaacactcagagtgtcggtaaaatca

SEQ ID NO: 220279 - DNA, 122 bp, Homo sapiens
ttcctgtgcacccgagggctatgcgtggtgttgcgggagacctgtcattgctgcctgccgcgatgccaggccccacgctgggggagccacccgggtcctcacctggagatgtggctctctgt

SEQ ID NO: 220280 - DNA, 122 bp, Homo sapiens
tggagtggtgggccatgtcacttggatgccccagactctagaaagcaggcaacataaatacgaattacaagtataatataaattggaactgatgagggagtctttttcctcccaggggaaag

SEQ ID NO: 220281 - DNA, 122 bp, Homo sapiens
gggtcatttatttcacttttcctggcgctgagatggcctgagtctgtgtatgtgtgcacacgtgtgtggccactgcttttcttccaaaggactcacctctcttctgccattttactaggaca

SEQ ID NO: 220282 - DNA, 122 bp, Homo sapiens
tgaacccgccctgccacgcggcagccagggagggtgacctgctgtcgtctggggtggtgacgctgcttggtgacctcgccacacgaaaggaccatgattcctgcagggcggaagcaaccgat

SEQ ID NO: 220283 - DNA, 122 bp, Homo sapiens
catgcctgtttctatcatgtgcttgataggcctcaaagctaatgcttccagtgaaacacacgcatcttaataataagggtaaataaacgctccatatgaaactatttgcttggaaacacatt

SEQ ID NO: 220284 - DNA, 122 bp, Homo sapiens
acccacaaggcacccgcagccgctccgaggccctgctctgaatgctctgcctttagattccgtccttagcatcaggaaagaaaagacccggcttgtgagctccttgtcccaccttctttcac

SEQ ID NO: 220285 - DNA, 122 bp, Homo sapiens
tcccagccgcgagccagggaacgcgcgggggcgggcgcgcgcctcggtggagctcatgcccgcctgggtactaagtactgggattggctaaagggtattcctcagccccctctggacttgtg

SEQ ID NO: 220286 - DNA, 122 bp, Homo sapiens
ctgcacgcaggagaactcagcgggccaggctgatcccacgagggacttgtcccgggtgaacgagccacaggcccgcatgctcacccgtcctcagtgcctgcctccaggcgtccgcggtcccg

SEQ ID NO: 220287 - DNA, 122 bp, Homo sapiens
gtttgaccttgggccctcttctcctttctccatctgtcagatgggtataggatgactttccgtggggagtgcttgacaggagctaagaaacaggtcagctatggcgcttactgcctgcggga

SEQ ID NO: 220288 - DNA, 122 bp, Homo sapiens
ataatgatgttactggcttaaaggaatatattgaaaccaaatcaaaagaaagacaggaaacgctgacatcaaaggtttacataaacattcctggaaagcaagagaggagtgcataaaagaga

SEQ ID NO: 220289 - DNA, 122 bp, Homo sapiens
accttgtgtggtggtgcatgtctctggtcccagctactcagaaagctggggcaggaggatcgcttgagcccaccaggtcgcggctgcagtgagccatgattgcaccgctgcactctggaatg

SEQ ID NO: 220290 - DNA, 122 bp, Homo sapiens
tgtccccgagaggcagccctgtctctgctggcccgttaactgtgctggcagagctgttaccgtgacagtagattaatatctctttagtcagccaaaatgaacatggcatgctggtgacagtc

SEQ ID NO: 220291 - DNA, 122 bp, Homo sapiens
ctctggatgaggtccttcgcttcttcagatacatccgtgacatgggatgggaactggaatcgctcctgcaaggggtggcaaaaacaccggtggacaggtggacgcattcagagagtttaagg

SEQ ID NO: 220292 - DNA, 122 bp, Homo sapiens
gagcggagagcctgcccggctccgctccgccaggaatcgccgccgccgccgccgccgccgcggatttcctggcaaaaagcaaactccggccaagacttcacttctcaaccgcccctgctgcc

SEQ ID NO: 220293 - DNA, 122 bp, Homo sapiens
cagctcactttcaaactctgtgtgctatgggagtcttcttatggcgaaaaatggcataaacggggtttcaccaaagccagctcaggttgcttgtgtttctttttagttgctgtttgtttttt

SEQ ID NO: 220294 - DNA, 122 bp, Homo sapiens
accatccaggacaggctgagggagtcaggggtggcatctgtcacggtcagctccccgaggcgaggcttgttggggggctcaggggttgtggtgggcactgcttgggtggtctctgcttcatc

SEQ ID NO: 220295 - DNA, 122 bp, Homo sapiens
ttgccgccggtcgagccgcgcagtttgcctgcagacctcggtcccctgcccgcgcagcctcggctccatcaggcccggcccctcgcccgggccgtggctccaccaatcgcagacttcgcccg

SEQ ID NO: 220296 - DNA, 122 bp, Homo sapiens
agtttaacagctttctgtatcccaagttcttgcccagtgtacaagaagaatcggatgacacgtgggcttgaaggatgagtgcaaggttttattgagtggtggaggctctcagcgagatggat

SEQ ID NO: 220297 - DNA, 122 bp, Homo sapiens
gcgctcccggttgcgggggatggggatcgggcagtccgggaagggcggggacccggggcgcgttcctcccaagttcagactcgcgacccgaacttgggattcggaggagcgcgcccacaggg

SEQ ID NO: 220298 - DNA, 122 bp, Homo sapiens
gtgtcggcgccgggtgcgcagggacagcagagcgctgtcttgggcatgggtcgcaggcggcgcccggaacgggccaggggagctggaggctgcagactcgggctcggcgggtgtaggaacca

SEQ ID NO: 220299 - DNA, 122 bp, Homo sapiens
ttttgctttcaagaggataataatgtttaaaaacgaagtcactcataccatttcctgtcgcgaagccagctcagtgatgggcagagcttcctctgggtttgtttacttgctccatgatggaa

SEQ ID NO: 220300 - DNA, 122 bp, Homo sapiens
cagtccttcgccctgccccaggacgccgggccccgcacactcaccatttcccggcttccgcggtgtcccgtgttctccccaaggttccccgctgccagcataggactcagcgtgacagtgcc

SEQ ID NO: 220301 - DNA, 122 bp, Homo sapiens
tgggcaaggagagcaggttaaattccagaaatattaaaagcaattgtcagaggctgggcacgtggctcatgcctgtaatcccagcactttgggaggccgaggcaggtggatcacgaggtcag

SEQ ID NO: 220302 - DNA, 122 bp, Homo sapiens
ctccccaggaggaagctgggctggcagaggtcctcattgcttgtgtgtggcacctcctaacgtcagatgattgcttttggttctgttctgctagagatgtggcaagagctaaatttttaaac

SEQ ID NO: 220303 - DNA, 122 bp, Homo sapiens
gttgaagaagccctgctgccacatggcatgacagataacctgctccccaaagctaccctgcgtccatcgtcttctgaaggctgcccggctgctcctggcatccctggcctccttgtgtgcct

SEQ ID NO: 220304 - DNA, 122 bp, Homo sapiens
atgaatttctggctggatgccgcaaaggccaagaggttatccacaccctcttccctgttccgctgaaagtaggtctggaggatggtcattttatcctgggtctcctccacttccgtgctgca

SEQ ID NO: 220305 - DNA, 122 bp, Homo sapiens
gtgcatggctgtttttttccctgccaatttgtcaccatctgtaaccctccctttatgagacgatctgatgacagcagttatcttggagagtagaagtgtggtcttgaagcgccatggaagag

SEQ ID NO: 220306 - DNA, 122 bp, Homo sapiens
aaagcggtggaaagtcgcagagctccgcctcttagaaaccacatatcccaggaggcaatgcgcaggggagcacgggtaagagggcaggtgttagaatcgctggaaaggcgggcgccctttgt

SEQ ID NO: 220307 - DNA, 122 bp, Homo sapiens
tgaactacaactctccttaccactggagcgcctgacgatgttctccaaaaatgtgttctgcggtgccaccagccctctcttgccccccggcatcctgggtctggagagcagcggccaggatc

SEQ ID NO: 220308 - DNA, 122 bp, Homo sapiens
tcaggcgctccggcagccgcggccacccactgccgcgttccaggcaagccttcccggtcccgaggggcctcctgggctggatcttcaggtttctggactctcacccaacgacacacgcccag

SEQ ID NO: 220309 - DNA, 122 bp, Homo sapiens
ccattacccaagcacctcctccgcatcctccccatctcagacttgcggacaccacgcagccgggtcagccctgcagcctaagccttgccccatgcacctggcacttacctggccataccctc

SEQ ID NO: 220310 - DNA, 122 bp, Homo sapiens
ccagttttttcatcactgggcgaatggattacaatcccagccagcatgaacaggaggcggcgcgcagtcctgaaggcgaagtccggttgtgccggccttgctgtgcatgctgggagctgtat

SEQ ID NO: 220311 - DNA, 122 bp, Homo sapiens
ctctttggcccctgctaccccgcctagcatcatttcctgtgcgctggatgctgattggtccgacagtcggaagtgagggcgggcggtgggggccgttgccgcagtgacagtgctaggggagt

SEQ ID NO: 220312 - DNA, 122 bp, Homo sapiens
aagcgcactcgcggcgccccgactccaggtagcacgtagagaggaggctgaagagcccctcggttttccgaaagtttccagcgaatccttcttggtgaagatcggcctctgggaggcagcgt

SEQ ID NO: 220313 - DNA, 122 bp, Homo sapiens
gatacaggattataggatgatacacaggcacgtcgggcccatgtccgtgccagcatcacccgccctgtggttcgctggtttgaggtccttgtacttagaaactgagtggtgtttccattcag

SEQ ID NO: 220314 - DNA, 122 bp, Homo sapiens
ggatgatggcgcagcgctgtgcacgcaggcgcagtgtggggcccttgcggtcgaagctcacgcggtaagccgctgcacgtgtgctacggcgggcggagggccgaaagtccagtatgtgggtc

SEQ ID NO: 220315 - DNA, 122 bp, Homo sapiens
tggagacaagggcataggcggcggcgcagatgggtggacagggcaccagtcgcagcgccacgtggcccaaggcctcagggaagtggatgcgggtgacggcctcgaaggcggagctcagcgtc

SEQ ID NO: 220316 - DNA, 122 bp, Homo sapiens
ttcctttgtggttttcaggaagagctaaagatggctgaatttctagatgaccaggaaactcgactgtgtgacaactggtaagacattaaatctaagaaatgttagtggaatgaggacagtca

SEQ ID NO: 220317 - DNA, 122 bp, Homo sapiens
tcaacaacactccagggattttgctaaggtcatattcaatcattcattaggcttcttacccgtcgcttttcagagttccattgtagagctggttttattcagcatttatgtagcctgtgggc

SEQ ID NO: 220318 - DNA, 122 bp, Homo sapiens
gcctctttagttcatctttcacgtggggcagcggaggcctggcggggacggggagccgctcggggactgcaggcccgtaggtcgctccctatccgtgagggattggttggttccaggacacc

SEQ ID NO: 220319 - DNA, 122 bp, Homo sapiens
taccctttgaggttgatttactgccttgcgaatcccgactcccaactgggccctttgaggcgccatgtgcggcccctcgagccagactcggcgccaggagaagggagtcagcgtctggaggg

SEQ ID NO: 220320 - DNA, 122 bp, Homo sapiens
tggcacaaggaagagggggtctgggtcaccatgggatagttggggagcctgttttccatccgtgttgtgtaacggcacggccttcggagacagcctgggcaaagttgaggaaatacccgggt

SEQ ID NO: 220321 - DNA, 122 bp, Homo sapiens
agcccggggcgggaggaggggtcaggaaagggttttaagcgggaggaagacgcgaaaggccggggacagggagaagcctcagagctacttcaacccaaagagaagcgactccgaacccacac

SEQ ID NO: 220322 - DNA, 122 bp, Homo sapiens
gggaaccggggctgcccacggtgcttgcgggccagcgcgagttctgggtgggcgtgggctcggcggccctgcactcggagcggccggctggccccaccaccccgggcagtaaggggcttagc

SEQ ID NO: 220323 - DNA, 122 bp, Homo sapiens
catattgccgcatgcgcactcttaagaggtcgaacggggagggcggcaggggctctggaacggaagtgacgcatggtacttgcgcaaagacgacgaggaggctgcgaaaagttaagggccgg

SEQ ID NO: 220324 - DNA, 122 bp, Homo sapiens
aggctgatgtccctggagctgtgacttggtctacctgggcctggacccacgtggccggcccggggcctgtgcgtggccagctcttgcacactgccttagagctggtgtggcttgttgaaccc

SEQ ID NO: 220325 - DNA, 122 bp, Homo sapiens
cttaaccttttgagtttctgtatctcttcttctcaccactgtaaatccatgggagctcatcgctgtatccctagtgcctggcaaatagaagtgattcaaaataagctaaatggatgcaaatg

SEQ ID NO: 220326 - DNA, 122 bp, Homo sapiens
tttacttactttgtgattctggctgagaacggcttcctcccaattcacctgttgggcctccgagtggactgggatgaccgctggatcaacgatgtggaagacagctacgggcagcagtgggt

SEQ ID NO: 220327 - DNA, 122 bp, Homo sapiens
atgagcctcgtttgacaggccaaactgagatttaatggaaagcttactcatatccccacacggaattcattcttttaggaacttaaaaaaattgtgtaattttaagttccaccactgtcata

SEQ ID NO: 220328 - DNA, 122 bp, Homo sapiens
aggctccgcacctcaaggctccgcccccagcaaggctccgccccaggcccggctccaccccgcacaggccccaccccgagtcaggctccgccccgcccaggccccgccccgggctcggctcc

SEQ ID NO: 220329 - DNA, 122 bp, Homo sapiens
gggaagaaaggtggtttagctgttttatttagccattcagggggctctccagagaggagacggtggtagagggtgaactagagaagataagaatgtcttcctaggccggatgcggtggctca

SEQ ID NO: 220330 - DNA, 122 bp, Homo sapiens
gccaaatgagagatttgccctttttggcccaaaaatgtgattgagctctttatttttcagcgttttccagaaagacagaaccagcaggatataagaaagggggtttattaggggagctggct

SEQ ID NO: 220331 - DNA, 122 bp, Homo sapiens
tgggggatgcatttaacaagcgctccaggttaacctaatgcactgtaaagcgtgagaacacgtgcattaaaagggctttaagaagtggagtttctgaatcagatttgcattttagaaagatc

SEQ ID NO: 220332 - DNA, 122 bp, Homo sapiens
ggccaacccagcccccagtgaggcttggagtggagacgcgcccggggccccttccttcaccgaggctcttgggacagggctcaaagctgcccctagcctcctgcgtctcaactcaccgccgc

SEQ ID NO: 220333 - DNA, 122 bp, Homo sapiens
cttagacctctagggcctacctgggccttgtccgagtgtcaccatgcccatctgtgtgcccgtcctgataaatagctgtggtcatcctgtccttcccacttgctgttctattccagcaaaca

SEQ ID NO: 220334 - DNA, 122 bp, Homo sapiens
acggctgcagctgctggaagcttgtcgcgcgccctggctagcggatgcacccacgctgggcgcccagcggcctctaaccgccgccccagcccagtccccggacatctctatccctaggatgg

SEQ ID NO: 220335 - DNA, 122 bp, Homo sapiens
cgcgttgtccattggctcacacctggctcgaggctccgcgggtcccttcctccatctccccgttcttgcccacccccgcctggctcatccatctgaagagcacacggcagagggggaaggct

SEQ ID NO: 220336 - DNA, 122 bp, Homo sapiens
tttccgtcccatgcgcccagcacagttactcttccaccccatgctcccagcacactcttccgtcccatgtgcccagtgcagtcttccgtcccatgcgcccagtgcagttactcttccgtccc

SEQ ID NO: 220337 - DNA, 122 bp, Homo sapiens
gtcatttttgagttatagtcaattcttatgttctgtaaaatccattagaaaacctgtacccgtatcagttcacatattctgcacctggctctcctgttcatggggaattgcttacaacaggg

SEQ ID NO: 220338 - DNA, 122 bp, Homo sapiens
aggaggagcggaagtggaaaagactaacttccggcctcgggtcgcgcgcagaggtgatgtcgttggtcctgcgccccctcgtggcggtacttcagcccttcgcagcccgacgctaggggcct

SEQ ID NO: 220339 - DNA, 122 bp, Homo sapiens
agacacacatagatagcacagcaaggcagggccagtgtatgaagcacagtgtccccctctcggagcggggagtggactgacctctccaagatgagaaccgcatccgtttggtgtagtttggg

SEQ ID NO: 220340 - DNA, 122 bp, Homo sapiens
cacggcgctcagcaggcccagtgcccgtgcctgtcgctctgatagcctggcccttgggaacgcctcgtagaactgcagggcggcaccatacacctggcagggggcagaagggtagtcaggca

SEQ ID NO: 220341 - DNA, 122 bp, Homo sapiens
aggtaccacctgccccggccttcctggctttcacagccctgctcggattcttgtctccttcgcagtctggcgaggtcccctcactgttgacagtgaccagtcagctcttggcccttctggca

SEQ ID NO: 220342 - DNA, 122 bp, Homo sapiens
caaggaaaaattaaaccatccccttttttgccataataatatgaatttatacaatgctaacgtaagtcttggggaagtggaaccacacgagttctatcaaaaatagatattgtgatgattag

SEQ ID NO: 220343 - DNA, 122 bp, Homo sapiens
agtatctctcctgtctgcccattccctgcatctcccccgtcaccaccccgggccagtccccgttacccgcacctggaggtctgcaccagccccacctgcactccggcgtccactctcgcccc

SEQ ID NO: 220344 - DNA, 122 bp, Homo sapiens
gtcgtccccccgcgcggaatattctcctgaatcccaaacatgaaaactgctggcggcggccgcagctcccggccgaaagcgtttcctcgagcagcggcgctcggggcttggcggcaggcggc

SEQ ID NO: 220345 - DNA, 122 bp, Homo sapiens
tgtcggtggtgagagctggaggcggaggcaggcctgccgccccaggtgtctgcgtgtctgcggtcgcaccgtggtgtgcacacctacacaggtgtgcgtacctgctggccgtgtgcaagcac

SEQ ID NO: 220346 - DNA, 122 bp, Homo sapiens
aaaccgttgttatgaaggggctttagctagccttggaagggcaggctggaggcttctgcacgtccttggaagtctccatccaccagaaggagctccttctgctctctcagcctggatgtgat

SEQ ID NO: 220347 - DNA, 122 bp, Homo sapiens
caataatgatgttatttcacatacagctgttcaattggataatcactgaattgtccttaccgtttaatttatttttctccagacttactctatatgaactattcaacaatagcaacaaaata

SEQ ID NO: 220348 - DNA, 122 bp, Homo sapiens
gcacctgtaatcccagctactccggaagctgaggcaccagaatcgcttgaactcaggaggcggaggttgtagtgagtcgagatcatgccactgcactccagcctgggcgcatggtggctcat

SEQ ID NO: 220349 - DNA, 122 bp, Homo sapiens
gcagggggagggggggtgtttgtttgaatggtgatcacgtgacggggcggtgacgtcacccgccctgccaggccaggcgccgccgagccagagggggagacgtcatcagcctcggagctggg

SEQ ID NO: 220350 - DNA, 122 bp, Homo sapiens
cccctacctgagactcagtgccgcaggtatcaaagcgggcctggatcctgaggttgccgccgacctcctgggcggcacagctccggctgcccaggtagaccttggtccgctccagcggggcc

SEQ ID NO: 220351 - DNA, 122 bp, Homo sapiens
gtcgggtcaggtttggaggcggagctggcgccgagaggcggggcgcaggatgcggtgccgcggggcagcagaacagaaccgaataggtctcagactcccagcgcggcctggggacatgacct

SEQ ID NO: 220352 - DNA, 122 bp, Homo sapiens
acatttaaaaattagccaggcttgatggcatgtgcctgtagttctagcttcttgggaggccgaggcagtagtattgcttgagctcaggagttttaagctgtagttagctatgatcgcaccac

SEQ ID NO: 220353 - DNA, 122 bp, Homo sapiens
tgatagcagaatcctatattttggtgcagaggtggcaaaataaggcggggggtgctggtgcgcagaagctgacaaggttagaatgtgcagcgtttttacgacggactggctttactcatttc

SEQ ID NO: 220354 - DNA, 122 bp, Homo sapiens
gctgcgcgaccgcctgtggaacagtggggacgctgctggtgtcctccaggcctgggtgggcgggttaccacggaagcctatcaacggatgcctgtgattccctggtatttataggtatgtct

SEQ ID NO: 220355 - DNA, 122 bp, Homo sapiens
ataatgtaaaagaaacaaatgatattggccctaaattatcctccagcccctgctgctcatcggacactttatgaggttacaaaggaccatggcgctgcgcatatgggggatccattttaccc

SEQ ID NO: 220356 - DNA, 122 bp, Homo sapiens
caagttcttaactaggcctagaccactgaaatctggctccaaaatattccacggaatgaacgatgtgccaaggcctatgcctggccctcctccacccaggactgctttccccacaccgcagg

SEQ ID NO: 220357 - DNA, 122 bp, Homo sapiens
cccatgcgtattctttgagctgatggggacgcagtgttcacagtcctgacaggaggcaggcgtgaccccagtcggggagtggacttggccctcttcacacccccagggcagaaagccctgtt

SEQ ID NO: 220358 - DNA, 122 bp, Homo sapiens
gaaggaatacctcctgacaactccgggaatgatggctatgctaataatgggtatagtgcccgtgaagaagaaaatgagacactcactgaaaatctgagaagcaaagtaactgctataaaatc

SEQ ID NO: 220359 - DNA, 122 bp, Homo sapiens
attacctagggctagaagaaagggcttccaaatggctcaggaagatgagtgggcatttcacgccacctctgggaccagatgaccacacctcccctgaggaatcccttagccaaaataattga

SEQ ID NO: 220360 - DNA, 122 bp, Homo sapiens
tgcactgtggatcacgtccccatgccgacactcatctgtttcgacctgtgggtggctccccgcgcagctcgccaggcaggcctctgtgaactgactctgagagtgctctctggccccaccgt

SEQ ID NO: 220361 - DNA, 122 bp, Homo sapiens
ctgccaccacagtcttaaatcccttgcccaagacaggagcctttgctttttgtgagagtccgcgtctgtcacctggtgtgactcatccattctccagtgcattgcccctcccactgcaggag

SEQ ID NO: 220362 - DNA, 122 bp, Homo sapiens
ggagcctgttacagtcaaggtgacgcatccttgccgggccagcccgaacagcagctgggtcggcaagcgacaggagcacgggtcatcttttccccagaggcgtcggaatggacctgtgccac

SEQ ID NO: 220363 - DNA, 122 bp, Homo sapiens
tacaaaacaaaacaaaactacaaacaattaggaaccctattggctgggtgcagtggctcacgcctgtagttccaatactttgggaggctaaggtggttggatcacctgaggtcaggagttcg

SEQ ID NO: 220364 - DNA, 122 bp, Homo sapiens
cgcggggcggggagtcaggggatggggcaagtcagggacccctgccccttccaagcctatcggggtggggtccgttggaccttctctgacttcagggtgagtcgtgaggtaggagaggcccg

SEQ ID NO: 220365 - DNA, 122 bp, Homo sapiens
ttctcctcccaacccctttccccacccccatttcagaaacgagaaggaatcctccagtctcggcaaatccaagaggaaataactggtaacacagagtatgtcaacaccattgttgccagcga

SEQ ID NO: 220366 - DNA, 122 bp, Homo sapiens
atgtcatgggcgcgacagagcctggcggggataccagcagcgtgtgtgtgtggacggcaacgttgtctgtgcgcgtgtgtgtgagtgagtgagggagagagagagagaataggtgtgtgtag

SEQ ID NO: 220367 - DNA, 122 bp, Homo sapiens
ttggttatccgttaacaatctcggtttgtgttcggtgttttgtgataaagagatgaaagacgaatccagatttaggaaaagttttcctattggttgacaagactgtattggagtatcccagg

SEQ ID NO: 220368 - DNA, 122 bp, Homo sapiens
aaactagagaaagtcggcaaaagaacatatatatatatcccagaccaaatcctgccaaaccgaatgagtagagggaaatcctgaagctccacaacccctcaacttcgcaacttgggctttct

SEQ ID NO: 220369 - DNA, 122 bp, Homo sapiens
ggggatcccggagcgcccggcgccccacgccctcccttcggctcgctagctgctccttggcgctgctttcagacttgttgcgcctcgatctggggggcagaaggctggcccgggagacccgg

SEQ ID NO: 220370 - DNA, 122 bp, Homo sapiens
tttccgtggaaagtgactgtgctgattctgccggacgctatggggtgggggtgcagcttgcgaggcctgtgcacccacctgccccccgccccctctgccccctccgccccgtccccgtgccg

SEQ ID NO: 220371 - DNA, 122 bp, Homo sapiens
cacagagtcagtgagtttacattcaccaacctatctcccttcagtaatcttctagaagagcgtttgtaggccacagggtgaaatctcgttaattcactgcacccagtctagcttgtttctat

SEQ ID NO: 220372 - DNA, 122 bp, Homo sapiens
taccaagataagcaattctatcttgaagatttttttaaaccgtcttaactattttttgtacgtgctttcctgatagcagtgtaaggtccacatgacatctatatgtgttctctctgttagcg

SEQ ID NO: 220373 - DNA, 122 bp, Homo sapiens
cggctgcgggatggttgactgacaaagtcatgcctgcctagccagcttcctcgtgcagcacggtgaaggctggggcgccgggtttttactcccacgtcctgccaactcgagctgacaaggcg

SEQ ID NO: 220374 - DNA, 122 bp, Homo sapiens
aaaggtaaagccaggccgagtgactccctgagtctgcacatgacgagggccccagggtcccggcgcctcccgagagcaggtcattactgtgactcacattccagagaggcgccgaggcatcc

SEQ ID NO: 220375 - DNA, 122 bp, Homo sapiens
atgaggtccatgaggacggggatgtttttgtattcatggttgtatttccagcacttagaacggtgcctgacacaaattaagtgcccagctatttcttaaatgaatgactgaaccccattttg

SEQ ID NO: 220376 - DNA, 122 bp, Homo sapiens
tctaatgcttctgctgatgtgacaggcagtgatgcccacatgccggctgttcacctcctgcgtagcccagtaacaggccacggactggtactggtctgggggttgggacccctggctttggg

SEQ ID NO: 220377 - DNA, 122 bp, Homo sapiens
tcctcccttccagggtggaacctgaatgcagccctctaagatgcagccaggaaagcactccgcctacccggttgggtgtggcccctggtgctttgaatgggcaatttagaggaaagctgacc

SEQ ID NO: 220378 - DNA, 122 bp, Homo sapiens
ggataaatggcgaggaaacgtatactccctcttaaggaacacggtgtcttccttcgtctccgggttcccgagaccccagagtcactgacctccgtccctcagctttcggggttcggcagcag

SEQ ID NO: 220379 - DNA, 122 bp, Homo sapiens
tccttgagagggcgccagggagcagctgcgcgcggatgccttttggccctctgcggccgccgtagctccccggcagaaacccggaagtggaactctgagccattcagcgtttgggtgaagac

SEQ ID NO: 220380 - DNA, 122 bp, Homo sapiens
ggctatgaacgtcacaaatttctggaaggaagatgccatgaagaccaagacacactatcgcgctatgcaggcagactgcctgcagaaactacagcgatatctgaaatccggggtggccatca

SEQ ID NO: 220381 - DNA, 122 bp, Homo sapiens
gcgtgtccgatggaaagctgcttccacccatccctgtctcagctagtcctcaatttggttcggtgtccgagccctgccttcagagtccagtcccgcctcctacctcagatggaagagaatac

SEQ ID NO: 220382 - DNA, 122 bp, Homo sapiens
tctccgccaggcccgggaggaattgcagggatcttggagcctttttgtttcttagcaacccgggtgaaggctggggtgtcgagtgtcaaaagcggccggcggtgctcgcgcgggcccgctcg

SEQ ID NO: 220383 - DNA, 122 bp, Homo sapiens
cgcctacacccccactgcgctctggcaggaagggcccctctgcctgcgtcatgccagccacgtcaccaccacagccgctggcagcacagcacccagaggcactgggagtttcatatccacgt

SEQ ID NO: 220384 - DNA, 122 bp, Homo sapiens
gttggacgtcagcaggctgtgcactggtgaaatcggttttgccagggagctctgtgatgccgatgagcccggtgcctgccctccggccccgagcggtctctcagtgacaacacatcacagca

SEQ ID NO: 220385 - DNA, 122 bp, Homo sapiens
ggggagaggatggctgcagggggtctggagcccgctctgaatttggaggcatttctggagcggctgccccccgcgtctccccggctgtgactggaaggaggggcgtggccagagccccgcag

SEQ ID NO: 220386 - DNA, 122 bp, Homo sapiens
ccggcgcccgggaaactgtgtggcgctgcgggccgcgcgagagggacggcagggggcgggcgcggcgcggctgctgactcaccggctataaatagcccgggatatatgagccgcgccgccca

SEQ ID NO: 220387 - DNA, 122 bp, Homo sapiens
aggtgtcagcctgcccttgactactcagggaaacgtccagaaatggggagaaaaggttttcgaatactgtgtgttctaagctccgcccattgagatgaaaaccagagtgcaaactgttcaaa

SEQ ID NO: 220388 - DNA, 122 bp, Homo sapiens
acccagaagcagggccagggaggggccgggaggagagggcgcatcccaggtgaacgcagacgggtgaggcagagattgagaaagagacaccaagaagcccagagacagacggcgatggcccc

SEQ ID NO: 220389 - DNA, 122 bp, Homo sapiens
tatttcgatcatatgttttccctcacaaaaatcctcttactccaaccaatgctggttctgcgattcaaacatcgttccctcatgaaacactttgtgttcgctccaaaatcctttgccctccc

SEQ ID NO: 220390 - DNA, 122 bp, Homo sapiens
cccatggtcataagaggtttacagctgattaaacaacttaataatgcctgcaagaacaaacgcctatgacagacaacagaatgtccacatgtcctgacgtcacattataatatatgctttta

SEQ ID NO: 220391 - DNA, 122 bp, Homo sapiens
gaaagctgattcatcattaggacgaggttcaagggagaagtcagtggctgcccacactggcgcatccgtcatgggaactttctatgtcaaaaccctgccaatgaatcatgaacattttagtt

SEQ ID NO: 220392 - DNA, 122 bp, Homo sapiens
gacactggaaagcacctgggaaatatgacagcgttggccaagtgatcaataaaatatttacggcttgaatagcaatattttgagcgtgtctgttaagcatggctctctgccaatgaaaccag

SEQ ID NO: 220393 - DNA, 122 bp, Homo sapiens
aagaaagcctgggcttttgatgggctgagaaccgcctcggcagtgagcactccgtcgggccgcgcggcctgcgggcagcatatgtctcggggcacccgggcaccgtctggcgggtggggccc

SEQ ID NO: 220394 - DNA, 122 bp, Homo sapiens
tccaggaatccccttcctgtctttctggtttctctctgggcttcctgctcgggtcacaagcgccagaagcgccggcggctgcggggaaacggtaggcgggggatccagccccaagcaaatct

SEQ ID NO: 220395 - DNA, 122 bp, Homo sapiens
tcgtcattgcggatggccaattgcaggtggcgcgggatgatgcgggtcttcttgttgtcgcgggccgcattgcccgccagctccaggatctcggcggtcaggtactcaagcaccgccgcgag

SEQ ID NO: 220396 - DNA, 122 bp, Homo sapiens
ggaggctcacattacaacgcacagacgtcctggagggtcgcctgtcacgtcacctgttcgcggtctcggaatgcagccctgcacctttaaatccagactgcgtcagggagtcccgccccaga

SEQ ID NO: 220397 - DNA, 122 bp, Homo sapiens
cccgccgcccggaggtcatgtgagcgcagtgccggagcggggcggggcgaggcggcggcgcgcagtgcctactagcaattgtagtccttgccccaccttggcctggcgaagatcccgcccct

SEQ ID NO: 220398 - DNA, 122 bp, Homo sapiens
ggtcagccccgcagagcaaggggcggtgatgtcatcctctcggcgagcttggctgcgggccggaggcgaggccctgcgggaaggtttctcggcaccgctcaccggggcgctctctccgagtc

SEQ ID NO: 220399 - DNA, 122 bp, Homo sapiens
acccgggggtggagagaagaaagcaagcagctaaccggaaaggtctgaaaaagctagcgccggaagttaaactgcagaaagttgttccctagaatgactgcctactcccaagaggaagcgtg

SEQ ID NO: 220400 - DNA, 122 bp, Homo sapiens
caggtttccctgctgggcctgcaggacccaccgggcctgtcttccccggggcacctatagcgccaggatctccctgaaacacacacaaggaatgtgtcctgaatggcagaggagtggggtgt

SEQ ID NO: 220401 - DNA, 122 bp, Homo sapiens
gtgattccatgtatttttgagtgaccactgcctctgttctggcccttccccatctagaaccgccgctggcactggagcagtgggtccctggtctcctacaagtcctggggcattggagcccc

SEQ ID NO: 220402 - DNA, 122 bp, Homo sapiens
ctgagtgaagtgggagctgagggcatgtctcctctccagagaacatgttctttgaagtgacgatacagcagaaaggaaaaccgcttaagcatgcaattccccaagcacatacggtctgaaga

SEQ ID NO: 220403 - DNA, 122 bp, Homo sapiens
aagtctccaaattcatacttaccatgatgcctgagaaacagattccttcaaaataccacacgtagttggtgagtttattgctggatgcataggaagtttgcccattcgggaaatacaataat

SEQ ID NO: 220404 - DNA, 122 bp, Homo sapiens
aggaccggactacgagtcccagaaggcgtggcgtcagcagccatgttggtaaagggcgcccggaaaatgtgggaacggctagagagttgtagtcctcccgaatactctgattggtcaggatg

SEQ ID NO: 220405 - DNA, 122 bp, Homo sapiens
ggatgcggccgatgtagggcaggttggggcggccggcagagaggaacacggcacagtccccgatacggatcatctccttgccgcgcacgatggccttgtagaagagcttgcgggccttgccc

SEQ ID NO: 220406 - DNA, 122 bp, Homo sapiens
gcctcatttgcattcacgccacttcccattgtccaatcagattttggataccgaacgcggcgtttgagggccgtgcctataaataccgcatctttcatcctccagttctgtttgtttacttg

SEQ ID NO: 220407 - DNA, 122 bp, Homo sapiens
ggaggtgcggaaaggggcaggcggcctgcgggctagcggggatgagagttgtggggagaacggaggagagagtaaaattattccttttggaagtccaagggaagggagctgaggtgagagaa

SEQ ID NO: 220408 - DNA, 122 bp, Homo sapiens
cggctgtcagcgcgtggagaccggcttttgccgcgagcagcagcaaccaagaggatcctgcgaagaaacgcgacagtttgcgttccagcggggaacgagccctgctattgggggtggggagc

SEQ ID NO: 220409 - DNA, 122 bp, Homo sapiens
gcccttccagccctaacaatgtcgttctggcggagctggtgagtcagggagcatccacgccgcctgggaagaccggctctggaggctggagggcttgaccagcactgccacccggtggccgg

SEQ ID NO: 220410 - DNA, 122 bp, Homo sapiens
cacagccaagtagggtttcctgcgtgttggagagaggaagctccgtaatgttctgggaggcgatggttaaaaataactccggtatataaagacagcggagggtccccttgttcgctcactcg

SEQ ID NO: 220411 - DNA, 122 bp, Homo sapiens
accgtgtggactatttcaaggtgctgatgcaacactaataaacctggaggggccggcccccgcctgcagtgtgattctctcggccgtccaccccttgggagcacgcggcggagcagcgcctc

SEQ ID NO: 220412 - DNA, 122 bp, Homo sapiens
gtttggaaacactctgtttataaagtctgtaagtggatattttgacctctttgaggccttcgttttaaacgggtttttttcatgtaaggctagacagaagaattctcagtaacttccttgtg

SEQ ID NO: 220413 - DNA, 122 bp, Homo sapiens
tatgtggccctcagaggaagcccctcagaggaagcttagccactgggctccagaacctgccgtgattccctattgccgtgagggtcccgtctgcaccccacctaccctggaatttctctttc

SEQ ID NO: 220414 - DNA, 122 bp, Homo sapiens
ggccccaagccactggcacagagggcaggcaaaggaaaatcggcacgcgttctgagtaaacggggcgctctttcgtgagtccattcaaggttcatgtggctgttctcaaaataacagattgg

SEQ ID NO: 220415 - DNA, 122 bp, Homo sapiens
ggccccaaggaggaggcctggaaatgtcagggcctgttctccttcccatcagtgctgtgccgcccacctctggccccgaggtgcggggacgtgcggcaccatacctaggcggagctcccgca

SEQ ID NO: 220416 - DNA, 122 bp, Homo sapiens
tggaggtatttagtccgcaacacctcgctccccaggaggtctgccagcctggactggaagcgtgcaacactccagagtcgtaggagtgaacactgcacaggaatctctgcccatctcaggag

SEQ ID NO: 220417 - DNA, 122 bp, Homo sapiens
gcccggcttccctggaaaggcgggatccctctgcagatttccaggctcttggaagaggaccggcgcgtctattaaacccgagtcgctccacgggctctccgcccagagcacaagctgccttc

SEQ ID NO: 220418 - DNA, 122 bp, Homo sapiens
gagccagagggagatttgaaactgacaggagaagtcagtaagaccatgaatgcagagattcgagtaatacggctacgagccaaaagatgccagcagccacctgcagctggaagaggcataaa

SEQ ID NO: 220419 - DNA, 122 bp, Homo sapiens
cgggggcgacgcaaagttttgggaagttgctgcccctaccttgcttggtgagcaccagggcgtcttccctccgcgcctgggtgatgatggagccgtgttccatctaacaatcccgcgggccc

SEQ ID NO: 220420 - DNA, 122 bp, Homo sapiens
ggcatgttacgttgttgatgagcgtgcgtaagcaggaaaacctcagcagcccctgggaggcgccctcagcccaagggacagccctcccaggcaggcgcaggggcagacgatgcttttactgt

SEQ ID NO: 220421 - DNA, 122 bp, Homo sapiens
aggcacctggcacagacgttgcagggcctgggtttcgggatccgagctcggcaagtccagcgaggccctgcccgaaagaagccgcccagctcccaaacggaggggaagaggaggccggattg

SEQ ID NO: 220422 - DNA, 122 bp, Homo sapiens
tggttctgctgtgaacgtgacacacgctgtaataacgcaggcgggacaggcagtcagggacggccgttctcctatcatgaacatcatgggggtctatgtaaatgtacgtttatttacttcgg

SEQ ID NO: 220423 - DNA, 122 bp, Homo sapiens
gccctcccggccctgtgtgggtgcgtgtgggcttcccacaggccgtccgtgtgtgcacgccgtcgcctgccctcccggccctgtgtgggtgcgtgtgggcttcccacaggccgtccacatgt

SEQ ID NO: 220424 - DNA, 122 bp, Homo sapiens
ccggaattctcgggccacttttcggtccatggctgggccaggtccagctgcgtcgttgcacgacccgttccttcgggtgcccggctgccaggagctggaaagagccgcgaccgcgaccgggc

SEQ ID NO: 220425 - DNA, 122 bp, Homo sapiens
ttgccaggcactcagcctgaggacattcactctctcttcaatatcagagcttggtttttacgtttcttcccgtacccctcagctagcacctaatattaactgccttgtcctacaagttctca

SEQ ID NO: 220426 - DNA, 122 bp, Homo sapiens
gggccttgttggttttgcagtagcaggagtctgcaggcttgaggaaggccttaaggcccacggaagcctcatcccgccaagccttcgcctcctcgctgagactctgagctgcgctggggttg

SEQ ID NO: 220427 - DNA, 122 bp, Homo sapiens
ttgagaccagcctgaccatcatggcgcaaccctgtctcttctataaatacaaaaattagccgggcgtggtggcaggcgactgtaatcccagctactaaggaggctgaggcaagagaatcgct

SEQ ID NO: 220428 - DNA, 122 bp, Homo sapiens
aaatacagtctcttgctgggcagagacttcctggttacagttctatcacatgagaggactcgtggtgtacaattagctgtctctgctgcaatacccaaaacacttgcatgattttgcagctg

SEQ ID NO: 220429 - DNA, 122 bp, Homo sapiens
cgagccagcggttccgggcaaacctctgtgtggctgctgggcctgactttgcagagctggcgcccgggtctgggcggggtgggtggaggctatgggaggtggggccgggggtgggctcgggg

SEQ ID NO: 220430 - DNA, 122 bp, Homo sapiens
aagcccttcgctcgagtatgaagcacggcctcgaccagggcgatttgggtgggaaaccagcgttcacaccttaccacctacctctgcctctgaattccgcgctttcccggaaggtctgtgcg

SEQ ID NO: 220431 - DNA, 122 bp, Homo sapiens
ggctgctcccaagttctaagactcattactggaatcacacctctcccacatcttccaacacgcttcacccccaaccctacttccagggcgggctactccctgcacaatgggagatgcagtgc

SEQ ID NO: 220432 - DNA, 122 bp, Homo sapiens
gggtgggggtggatgagactgaggccagagagggggctggcggtctgccctgaggacccccgtcccacccgccgccatagctgcatggccccgggacctccctgtcgtacctgagaggaggg

SEQ ID NO: 220433 - DNA, 122 bp, Homo sapiens
gagcgagatttagtctcaaaaaaaaaaaaaaaaaaaggtgggtgggggtttcttcaacttcgttgtccacagggctcaggtcaagttcaacattgtcagaatgcagggatgtctctccatgg

SEQ ID NO: 220434 - DNA, 122 bp, Homo sapiens
cgcggagcagcgcctgggccgcgccgacctggtcatgagcttcgtcaacatgggtgagtgcggccgcccgcgcggggaccctcggagtaagctggctgcaggggaggggcgcgcatccgcgg

SEQ ID NO: 220435 - DNA, 122 bp, Homo sapiens
accctgtgcccagggacttacccagtggcccggcgtccagtggggaacttgagtaccggccgtgcacaggggctggggggccttctggaaactcccttgtcaactcagccagccgctgctga

SEQ ID NO: 220436 - DNA, 122 bp, Homo sapiens
gctgatgtgaagtccccataacacagagaacaccgttggcctccgagagtggaatctaatcggccttgctgatctcactgtgggaagtttctgcctcttcttctgtgtcgtttttatctccc

SEQ ID NO: 220437 - DNA, 122 bp, Homo sapiens
cagttctccggcagccctgcccttcctcgagttgggcctttgaggggccttggggcctcccggggcggcggccttgagccattagtgttggctgaagtcttaatgacaggcgagaggtgggc

SEQ ID NO: 220438 - DNA, 122 bp, Homo sapiens
tggtccccttgtccttatacgttctaaagtttccagactggctttgtcactttgtgaactcgtcatgtgtgaaaaccaatctttgcatatagggaacttcctcgggccacactttaagaacc

SEQ ID NO: 220439 - DNA, 122 bp, Homo sapiens
gcttcctagatgggcaccaacaagtttgccagccagcagggcatgacggcctatggcacccggcgccacctctacgaccccaagctgggcacagaccagcctctggaccaggcgaccatcag

SEQ ID NO: 220440 - DNA, 122 bp, Homo sapiens
ccagcgggtaggtacaaggccccgcccctcgccagtcctcactgcctgttctccctgcgccggggagctccaggccccagccctaacctgggccctagcggctccccactccatgacctctg

SEQ ID NO: 220441 - DNA, 122 bp, Homo sapiens
tcgccgaaggccggcgctattacgacgccggaaggcccgcgcctgtgacgtcagctgaggcgcgcccctgtgatatctcacaggcccgccccttctgtagaaccaatcggaactcgaggcgc

SEQ ID NO: 220442 - DNA, 122 bp, Homo sapiens
agctggaattctcaggagagggcaaagaaggaaaccccctccggggagaggcaggccccacggctctgggactttcagggctccggggactctcacggcctcactgcagtcgtcccgtcccg

SEQ ID NO: 220443 - DNA, 122 bp, Homo sapiens
ttcaattctggcactatgtacctggaaatagcaggggctcagggtttgatcctatgagaccgccccccatttcagatgccaatcccaggtagtaggttgtctcctgtacctctgcctgccca

SEQ ID NO: 220444 - DNA, 122 bp, Homo sapiens
aggccagaacacgggttcctcgtttgcgtagctgtggagggaacacagagcgggacccggcgcttggggtgggtggcagcgccaacatccccactcgggcttctcccattttcatttctctt

SEQ ID NO: 220445 - DNA, 122 bp, Homo sapiens
caataaactatgacagctaatagctccaagacatgtgcttcatgtgatgtgctaaattcacgtcactcactgaaaagcctaaagttactcttcttgcataggtcatctacattagttaaatc

SEQ ID NO: 220446 - DNA, 122 bp, Homo sapiens
tggggagcgcgggggctgcccgtgcccctccagtcgctccccgtagggagctgcgcactgcggagccctcgcccccgagcgagcctgtctcggactcccaaccgtcagcctcgttccgggcc

SEQ ID NO: 220447 - DNA, 122 bp, Homo sapiens
aagccaagccccccaacatgtattccatcgtgctggtagaagagtctttgctgttgctcccgaaagccgtgctctccagcctggctgccagggagggtgggcctcttggttccaggctcttg

SEQ ID NO: 220448 - DNA, 122 bp, Homo sapiens
ttttttccataaaacattttgtaattagaaagcagaaataaatgatatctttcattctatcggcaagaacacaagactggttatgtgaaaggaggaggcgtcattcctgcggaagccctatc

SEQ ID NO: 220449 - DNA, 122 bp, Homo sapiens
aaaatgtggccaggagtaacgggccctataaaaaggcctgacacattgggcaccagaccccggctgcctgctcccaccacacgcgtcccgttctgcgtccgaagcttctacacttcatcctt

SEQ ID NO: 220450 - DNA, 122 bp, Homo sapiens
caggacctgcagagccggggacctctctgtggcaagcccagcaagatgactgctctgaggcgccctagggctgagggaggggccgtgacaccagccccgccccccagccacctgggaaaagg

SEQ ID NO: 220451 - DNA, 122 bp, Homo sapiens
aggaaatcattgtcgaagttgatcctctgctgcttctcctcagggaggagggagaaccagcgagggtagctcctggggccggtgcactgagcagtgatgaatgtttcatgtagctgaagtaa

SEQ ID NO: 220452 - DNA, 122 bp, Homo sapiens
atataggatattatctgaatgcctcaaatccaggcaccacagttatcatggccacagcctcgactagaataatatgaaccctgtgaagagttgagaaaacccaacttatcactgacagcttg

SEQ ID NO: 220453 - DNA, 122 bp, Homo sapiens
tggaccctgaaccatcctggctctctgagcgtctgccagcccttctgctctggggcgccgcgctccttagccactctcagcatcagtgccagctctgccccaccacacgcccccggcaggta

SEQ ID NO: 220454 - DNA, 122 bp, Homo sapiens
gacgtcaccttacacatcacaaggttaaaaaatgacccctgggctgtgccaggccaagcacgaagagaaagccccgcctgaaactgcctggaggccccccggctgtcactctcgccacattc

SEQ ID NO: 220455 - DNA, 122 bp, Homo sapiens
agctgagacgtctgcaaggccgcaacatctcgcagcagcttttcgcctgcttcctccgctcgctctagagggcacagcaaggtgcggggctcaacctgccgcttccccaagacggaggtggc

SEQ ID NO: 220456 - DNA, 122 bp, Homo sapiens
gcgcactgggccaatgagaaccgaagggctggacttccggcggtgggactgtcacttcgccgcccgcgtcaggccacaccggtggtctgggctggggaccgcgggtcgggtccggtttccag

SEQ ID NO: 220457 - DNA, 122 bp, Homo sapiens
ctgtgctcttactgcacttgaggcagccccccacttcctctcccgttggtgtccggtgaccgctcaccctcgagaggagctgtgagcctgttagaagcggatgtcactcgagtcagtggacc

SEQ ID NO: 220458 - DNA, 122 bp, Homo sapiens
acaacattactggtaatttccccccaagaatcaagataagcactcactgacctgaatcatcgccattctttcttgctcatcagtcaatatgcttttagctgcttcaagtttctccctcgatg

SEQ ID NO: 220459 - DNA, 122 bp, Homo sapiens
aggaaggaaagcacccagggacccattcacacattcagcaggagccattccccaccccctcgagcctgcactattttgggagtcctcccaaatggaggactgagaggccatctgcttccagg

SEQ ID NO: 220460 - DNA, 122 bp, Homo sapiens
tcatttctctttcagagcatttagccttcatatgcccttccctgcatgcttcccccaggccgtcaagacttggtacgctccaacttctgagtcgctcccgcagccgagaaggggccggggta

SEQ ID NO: 220461 - DNA, 122 bp, Homo sapiens
caccggagagtgggggacggccggccatcggcctctcgcttgggactctgaggctgagagcgtgtcagggaagcttcgcctggagaagcggagggggaggggcggccgccgccgcgccgtgg

SEQ ID NO: 220462 - DNA, 122 bp, Homo sapiens
agggctctgggctgcaaggacaaggcagcctgatgaaagagtccctgcccggcgtgggggcggggcccaggacccagcccacctcggtcggtccctcctctctttctcatgcctcagttgca

SEQ ID NO: 220463 - DNA, 122 bp, Homo sapiens
ccactctctgggcctccccctgtggcgggaggcagggccttgggtgggagccgagggtcacggcctccccctgccccctgtcctcgctgttctcaggggcaagtgacacgggcgcaggaggc

SEQ ID NO: 220464 - DNA, 122 bp, Homo sapiens
cgcgaggaggaaacggcggggcgccagcgaggcaggcaggggcgaggactgagtgaccggcgatactggaagcccagaaagagcgtagcaggagggtccggaagggcccagagctggggctg

SEQ ID NO: 220465 - DNA, 122 bp, Homo sapiens
ggggattaggagggaatcacgaagatgaggttcatgacgcggcgggctggggtgaccctgcggaacggcgcaggggacgcgtgggggcctaccttggtctgttcgctcagcttctcacttct

SEQ ID NO: 220466 - DNA, 122 bp, Homo sapiens
ttgagcagcagcagcgagtcgcccaggaacttggggggcaccacgtcgatgaccagcttgcgcagcgcggccgggctgctgtgcagggggttggcgcgcaggtcgggccgctgcttcaggat

SEQ ID NO: 220467 - DNA, 122 bp, Homo sapiens
cctgtgacctgagtttacctgcgtaacaaacctgcctgtgacctgagtttacctgtgtaacgaacctgcctgtgacctgagtttacctgcataacaaacctgcctgtgacctgagtttacct

SEQ ID NO: 220468 - DNA, 122 bp, Homo sapiens
ttaatccggcagtgaccgtgtgtcagaacaatcttgaatcatgaagctactaaccagagccggctctttctcggtgagctcaggtggcgggtttgggaaagggctggggagcagtgtgtcga

SEQ ID NO: 220469 - DNA, 122 bp, Homo sapiens
cctgccgacgccccgcctccggccgcgtttccccgggcctggtcccgctccgctccgcggcgcctcctctccgcaactcccactaggagggcagaccctcagccggagccgaggccgcgccc

SEQ ID NO: 220470 - DNA, 122 bp, Homo sapiens
agagcacacgagggtggggtccctccttcctccttccaagtctgtgcccagaatggggggcggggtgcgagaagagtccgtgagagacgcaagaggcgggctgtgccggaggagggcgccct

SEQ ID NO: 220471 - DNA, 122 bp, Homo sapiens
gcccttccggtcacatgacccgcggcggcctcccgcaggcaaccacccgcccccaccccccgtaccccctgtcccggagccgcttggccgcctcagtcaataccccggcttccggtcccgcc

SEQ ID NO: 220472 - DNA, 122 bp, Homo sapiens
gagtatttccccacaggggggccgtagggctcagtgtagaagagcaaggacccctttctgcgcgcttactttgacataagattttgaaatgtaacgaaacggaactgcttcggtccttctaa

SEQ ID NO: 220473 - DNA, 122 bp, Homo sapiens
gggatgcgtccgcctggaacctcgggaagggatgcgtccgcctggaacctcgggaagggacgcgtccacctggaacctcgggaaggcctttgcagatgtgatcgagttaaggatctcaagat

SEQ ID NO: 220474 - DNA, 122 bp, Homo sapiens
ggagcagggaaggggagactatgggtaggaaaatggcaatcccctggtccttacagcaagcgtggagatccagaccctaatcctgaggtgctgcatccacagtgggcatggtgctggtgcct

SEQ ID NO: 220475 - DNA, 122 bp, Homo sapiens
tccattgaatgagtaatcgcattaccaaccttctaagcaagtcggctccctcaggactgccgtcttccagccctcgtagtacgaaaatgattcattagtcccttcatcacaataacatgagt

SEQ ID NO: 220476 - DNA, 122 bp, Homo sapiens
agtgtgtggggccaggcgtcctgagacgggggcgaagggcttcttagaacctgctggaaccggctgtggcgggacccgggcctccccgcggcgactccggggtctgtggggctgggccggca

SEQ ID NO: 220477 - DNA, 122 bp, Homo sapiens
taaacagacaccctgccggatctggaggggtggaagtcaatggcgggtctgcgacggcggcgttcagcagtggtggacggtgaacaaaagctcagcctgagccggaacaaacgcggcccaga

SEQ ID NO: 220478 - DNA, 122 bp, Homo sapiens
cgtaagttagttcacagggatctcgattgccttttccttccacgagatactgcactgggccgggcgtggtggctcacacctgtaatcccagcactttgggaggccaaggcatgtggatcatc

SEQ ID NO: 220479 - DNA, 122 bp, Homo sapiens
tgagcacaatactctgtgtgtgttaactttgtagttttgaagttaacaagaccctgggctcgctatgcagtccgtatgtgatgttgaaccctttacacacagcactagacggttttgaacct

SEQ ID NO: 220480 - DNA, 122 bp, Homo sapiens
aataatgaagggagatggactgggtccatgccgaaggtttctccctggtttctcagcccccgggcgaagactcagggagacattgagacacaccctgcacaggagggggagggggaggggga

SEQ ID NO: 220481 - DNA, 122 bp, Homo sapiens
tgcgccattgccctccagcccgagcgacagagcgagagactgtctcaaaaactaaacatacgtcagatccacccccggggctcacccgcagcaggcagatgtcgttggcgtgggtcatgggg

SEQ ID NO: 220482 - DNA, 122 bp, Homo sapiens
cgcgcctctccccgccctccagcagtcctggtagggcccgggcgcgtccgcgctctgcagcgggaggtcctcgtcgcctctcgtctccagccaggtactcactgggctcctgcctgccgcct

SEQ ID NO: 220483 - DNA, 122 bp, Homo sapiens
cgtgtctacccctgggatcacgttttcctctccaggaggctgctctcttcctggtttgcacgctcttcggtagtaatcgcttgtccttcgcacctgggttgtctcgcccaggtgtgctgggt

SEQ ID NO: 220484 - DNA, 122 bp, Homo sapiens
actgggtgataaaacgtatattgagaataaggcggccttctggcccctgtgggtctagggcggtaaagcgtctaagggtagctgccaagcgggccatgacctgggctgggttttcgtcttta

SEQ ID NO: 220485 - DNA, 122 bp, Homo sapiens
gcacaattgtgttattggagataatgaattcaatccccatcaaagggcattaggctcgcccggggcctggagttgctgatgcctttttttttttttttttcaaaccaggaatgaaaggctga

SEQ ID NO: 220486 - DNA, 122 bp, Homo sapiens
tcagaaagtaaacagatactttcattcattaaacactgagaaaaaccttaagaggaacagcgtcggttggagagccagcagacactccactgcccatcccaatatgaatgggcaaatacagg

SEQ ID NO: 220487 - DNA, 122 bp, Homo sapiens
agcaacctgcaagtggatctgttcctagctactgctccgcagggcaagcccgctcctgcccgggcccgcccacaagcgaggccccgccccaaaccccgccccctgcgctccgggaaagcgga

SEQ ID NO: 220488 - DNA, 122 bp, Homo sapiens
attgggcacgctagttgtccatcagaccaggctctcttctccctcaacaccattggcagacggagaaaaggccagtccgccgaggtcttcctaccccttggagactcagcgccaccgcggaa

SEQ ID NO: 220489 - DNA, 122 bp, Homo sapiens
cgtgctcgacgcactggctgccacccggctgcggctctgcgggtgcggggaaccccaggccggccagggccagcgcgccaaggaccaggaccccaagcatgttacccaggcgcgccgcgtgc

SEQ ID NO: 220490 - DNA, 122 bp, Homo sapiens
ggaaatctgttcaccgagtgttggcggaactggatgatgagagtgagcctcctgagaacccgccaccggtccttatggagcccaggaagaaactccgtgtagacaaagccccactgactccc

SEQ ID NO: 220491 - DNA, 122 bp, Homo sapiens
tttagggggggaggggaaagtcatggggggcacccccccggaacccctttcccaggcgcgcgttctccgctgaaagaggctcagagagacactttctccgggatcttaagtgtgggggctgc

SEQ ID NO: 220492 - DNA, 122 bp, Homo sapiens
tgaaactctgcccccatgaaaccctcactctccatcccccctgtgacccccggcacccaccgttctgttttctgtctctgcagattcgattgctgtagggaccccgtgggtgtggaatcaga

SEQ ID NO: 220493 - DNA, 122 bp, Homo sapiens
aatataaccaaatgttaaaaacattcaacatgcaatgaatttacacacctgccttctgctcgctgcacaagaattcagaagaaattcattacattcaattttaaggtagggttttttggggg

SEQ ID NO: 220494 - DNA, 122 bp, Homo sapiens
agtctctccaacaggggtcccgagactcaaaacgcaatgagcttgcgcccctcttcgccccgcccctagtggcgtcttcttattagagtcagccaatcaaagctcgagtgcggaggctggcc

SEQ ID NO: 220495 - DNA, 122 bp, Homo sapiens
tttccttggcttgagaacgggatgcatttttaaatgtttgcctcttcatgtttgtcagagcgccaggggagaaacgcttcctcttacttccacacctctctcgctcagccatagctggcacg

SEQ ID NO: 220496 - DNA, 122 bp, Homo sapiens
tagatgggaaaagtgaggctagaagagacgacaaacgacacgccgttggacacacggcaacgttttagatgttgggtctggccgggcggccgtcaccggtcaccatggggaggaggaggagc

SEQ ID NO: 220497 - DNA, 122 bp, Homo sapiens
cgcaggtccgccacgtaattggccgccgccacagctagccaccctctccccagactggcccgaagagaggaaaagtgtggaagtccacaagccgcccccgccccgccctcttcgtcgacttt

SEQ ID NO: 220498 - DNA, 122 bp, Homo sapiens
cgaacgggcgcgggacgcggagcccccgacggcgcggccagcgggcgcgcccgcgctccccgcaccccgcctggccctgccggccacccccgcgcgcagcctagtcccccagcgccctgctc

SEQ ID NO: 220499 - DNA, 122 bp, Homo sapiens
ccatctgccgccgccccatcaaggacatcatcaagacctaccgcagctcctagcccgttgcggtggcccatcccgcatacccatcttctcgggcttcagcccagtcccagctgaggaacaag

SEQ ID NO: 220500 - DNA, 122 bp, Homo sapiens
ccccaaggcttgtaaagggtctatctaggccggcctccgagggcatggagggagtgggtgcggttgtgaaatgtagtgcgctcaatagtttcctggtgaagtttattttaaaatccgcaccg

SEQ ID NO: 220501 - DNA, 122 bp, Homo sapiens
ggcaagctcgccgcgccgcgcggacccatccttgtccgcccgcggtcccagcgcctgtggcgccaccagccccttgtaccgctgatagaatgaggaactgggctgccggggcctgctccgcc

SEQ ID NO: 220502 - DNA, 122 bp, Homo sapiens
agactccgcctccgggacgcgagcgagcggcgagcgcgcgcactcccagttatcgctcggcgactcccgcgcacgcacgcgccgtgccaccctccccgcgccccccgccccatacccctact

SEQ ID NO: 220503 - DNA, 122 bp, Homo sapiens
ccctggtggcgctgtactgtcgtggactctgctgcgacgcagttgtcacttgctgtcctgcgttgaagacctttctgtgtagacacacaattctcccacagagcagagtcgcagaggaccca

SEQ ID NO: 220504 - DNA, 122 bp, Homo sapiens
cttaaaatgattcacgattctcaaaatctggcttcgacttgtgcaagatgagctcctgcccgtctctggctgggagaagttgttctccagagggaccataggatttaactgcagtcagtatt

SEQ ID NO: 220505 - DNA, 122 bp, Homo sapiens
attgattaagaaggggacgggcttaccttccactgcgagagttacccgaagctcggcatccgtgatggtcgggggcttctgaggcgatcgggcagtgtcagtcttcagccgttaagctgaga

SEQ ID NO: 220506 - DNA, 122 bp, Homo sapiens
cgacttagcgaacctgagctgggccggggctgcaagccagtgctgctcgagaagacgaaccgcctgggccctgaggctgctgtgggcagggcgggccgggatgtgggcagtgcggagctggc

SEQ ID NO: 220507 - DNA, 122 bp, Homo sapiens
aagagggacgggaggagggagattctgctgctaagagcctcctccccctccaaagatgtgcgctgcgcttgggacaaacttccaggtcaagaaagtacggggggacaatggcaacagccgct

SEQ ID NO: 220508 - DNA, 122 bp, Homo sapiens
cagctcagcaaccataagttatgcgtgggctttgctctcgggagagaggtttcctgcagccgaaggactcacagctaatctgggtcaggagcggctgccggctcccccactcctggagatga

SEQ ID NO: 220509 - DNA, 122 bp, Homo sapiens
ctgaatctggcaccccaagaccagaaaactccctagagatactgctcctagccccgcaggcgcgatatcccgtccccacggagcccctccgcatctgtgtccgaggccgccgcgagcgccct

SEQ ID NO: 220510 - DNA, 122 bp, Homo sapiens
tctttcagatgtttgatcacttagctggaattagggtgtgggtaaaattcttgttaaagacgtgccaaatgcaagttgggaaatgctgcagtagtctaagatttactgtcagattatttcag

SEQ ID NO: 220511 - DNA, 122 bp, Homo sapiens
agtgggaggactgcttgagctcaggagttcacgaacagtctgggcaacatggtgaacacccgtcttcaaaaaaaataatttttttttaaatcagctgggcatggtggtgtgcatttgtggtc

SEQ ID NO: 220512 - DNA, 122 bp, Homo sapiens
cccagggccagcaggctggggtccgagaacctccttgccggaagcggaagtgcgtcacggcgacggccggcaagcacgcaccgcgcagactcgctgtggtggcgtgacccggaagcgctcgc

SEQ ID NO: 220513 - DNA, 122 bp, Homo sapiens
gagagagcacttgaatgcgggtaggagagattctcaacagaacagggctggcagcagcgccgcagcctctcagggaaaacctgacgatcccttcccgggcgcgccgaccgagcgtcacctcc

SEQ ID NO: 220514 - DNA, 122 bp, Homo sapiens
ttcaatctcacctccaccgccgcacaaagccgaggcttggcccccggccccgccctctcccgggtttctcacctcaggccttaccagctttcgaagcagcagaaccctccccggcactgggg

SEQ ID NO: 220515 - DNA, 122 bp, Homo sapiens
gctcccagaaccatttccggtcacggaaacggcactcagagcggctcccagaaccatttccggtcacggaagcgtcactcagagcagattctagaatcatttccagtcatggaagcattact

SEQ ID NO: 220516 - DNA, 122 bp, Homo sapiens
acaaaacaagcaactctgagtgaatgacctgtccacagcttaccctgggtgacatgggggcgctgtgatggaaaatgggttctgggttcaaaatcaagccacagaacgctgcctggcgagtt

SEQ ID NO: 220517 - DNA, 122 bp, Homo sapiens
cagggacacagggtgctgtttgttgcccttgagccccaagctaaggggctctcaggctggcgaagggctcaccacccggggcgcgctcccagagccgcctgaaagagacccccccgtgttgt

SEQ ID NO: 220518 - DNA, 122 bp, Homo sapiens
tgtgtgggcgggagctcccggacggcccatcccctctgctcaagaacgccatctccctcccggttatcggtggaccccaggctctcaccctgcccacagcccaggctccacccaagccccct

SEQ ID NO: 220519 - DNA, 122 bp, Homo sapiens
atagttcagccctgattttggggaaaatcatcgggcgagtcagcaagtttatgtctgtgccgagcattctggaggatgtaagagaacatgactccaggctgtttggagaggcaaaagcaacc

SEQ ID NO: 220520 - DNA, 122 bp, Homo sapiens
aggagtgaggcggggcaaggatttaaggacccacagctgcaacggatcagacatatgtttcgggggagaaaacttaaaagtacagcgaggattcagtaactgaggcttaacgaagaagccaa

SEQ ID NO: 220521 - DNA, 122 bp, Homo sapiens
ccacattccttattgtttccttcagtctctatcatgttttgcgggggggtgctgcctagacggtactcagacataggcaaaggacatggtctctgagggtactcatcatccttaaagttgct

SEQ ID NO: 220522 - DNA, 122 bp, Homo sapiens
aacctctctgcaaatatgcaggaaactgctaagagcatttgcttcttgcaagggaactggcgaacatggagagtgggttcaagaaagccttattttcccctgcatgcccttctgtacttctt

SEQ ID NO: 220523 - DNA, 122 bp, Homo sapiens
gccggaagcgaggagagggagaagccccagcagagaccccaggaggaaaagaccccacaacggggccactgggaacccatgatgttggttaccaatgtgattggaggttcggaacgacggac

SEQ ID NO: 220524 - DNA, 122 bp, Homo sapiens
ctgcagtcgctcgtggcccggggcgtggggtaagagtttgtggaaggattaacctgcgcgcgccggggtgggtgcctgtgcggggcgcgcggggcgggcggcggtgggtgcccgtgggggcc

SEQ ID NO: 220525 - DNA, 122 bp, Homo sapiens
tggtgtgtaaccatcaccgcaccccagttttgagacacttccctcctcagtccctgctcccggccctgggccacaactgctttctgtcccgccagtttcgcctgcgccgagggcactgtatc

SEQ ID NO: 220526 - DNA, 122 bp, Homo sapiens
caagccccgcccccagctcaaatcctctttccttccccttcgccgctgccgcctggccaacgccacttaccctgtgcaacctcacagggccgggccttcaacgtcagcactatggctctctc

SEQ ID NO: 220527 - DNA, 122 bp, Homo sapiens
ttattgagggcagggcttgggggactgggctgagtctgccacagaatgatgtgcaggacacgaaggatttcagggattctaggatgaggtggctgcctataatagaattggacagtttatgt

SEQ ID NO: 220528 - DNA, 122 bp, Homo sapiens
gtaggctggctggatctggtctaggatgggttccacggggctcccttccacatggtctgccgtcctgtggcaggctagcccaggccatctgcttggttctaagaaggaagtagaagcatgca

SEQ ID NO: 220529 - DNA, 122 bp, Homo sapiens
cctcccggcagactctgcaggcccaagtcgtcctcaagtcagcctccccaggcccagctccggcctctcgacggcctctccaggtgcaaaagttcctcgagtccgtctctccaggtccagct

SEQ ID NO: 220530 - DNA, 122 bp, Homo sapiens
actcattgctgctgcaaaatatccatcttacatccacaagatggtgatctggggcgccaacgcctacgtcactgacgaagacagcatgatatatgagggtaggttctgcgaaggggagatgc

SEQ ID NO: 220531 - DNA, 122 bp, Homo sapiens
gagcggcagcgggtgcaccaacctgaacaacaacagcagtggcaccactgcgtggagggccgcgagcgcagtgggcgcgacggctgtggagacaagcaggagagtggcagcgtcgcggacca

SEQ ID NO: 220532 - DNA, 122 bp, Homo sapiens
tgggggatacgctgctcagacccgggctggcgctgcccatgccgctgctgtttgggctggcggctgtgtctacggaaatgaaagaggactcaggtttgactgcttctccatccctgtggggg

SEQ ID NO: 220533 - DNA, 122 bp, Homo sapiens
cagagaggccaggcccagggcagccagaagaggcccaaatatgccagggctgcaacatcgcgtccccaggtgaggtggaatccttgggtctcgtgtctgttgattctgaggagccctgtcct

SEQ ID NO: 220534 - DNA, 122 bp, Homo sapiens
gataaaagtggccaagcaacacatatgggtatctgaaacagaatttttatttttaggaaccgtgtgtgagacactagaatgatggctcctagctggggagaaagggcatttcatgagcacag

SEQ ID NO: 220535 - DNA, 122 bp, Homo sapiens
tgtgaccgtcttgggtgcgcttgcgcaacgctcctcttcagccctaaccggctcagctgacgtgcccagaagacgaagatggccgccacgctcactgcgtgtcacgcagtttttcaccccgg

SEQ ID NO: 220536 - DNA, 122 bp, Homo sapiens
ctcctcgcccccgcgactgggctgggcgcgctgtcccctagcgcagctatgtcccgagcgcgcccccacctgtgcgttaatctactgggaatgggggtggactgcgccttacctggggcggg

SEQ ID NO: 220537 - DNA, 122 bp, Homo sapiens
ctgaccgacaagcctctgcagggcaccaagtccaaccccttcccggccagcaccccagcccggcctcccgccactggcctttgtccccagctggcaccacccctgggcccgcctgccctgcg

SEQ ID NO: 220538 - DNA, 122 bp, Homo sapiens
tctaagagatggagcccgtcctccgcctcgcaggctggcaggtccacagctctaccagcgcgtcgcctacgcatgctctcttagcaaaggctgttttaggcggccttctgctccgcccccga

SEQ ID NO: 220539 - DNA, 122 bp, Homo sapiens
aatgtagtagttatgccttaatagtatgaaagaattgggctgccttcctctccaataacacgtcatggttgacatggattcaaaggctcatttgttgctgctcttcttgactcaaagaaagg

SEQ ID NO: 220540 - DNA, 122 bp, Homo sapiens
cacattcaccagcacacatacacacacacaaacacacggggcctcacagagccctcagcacgggctctcgcgagaagctgccccaagctccaaatttgagcggccgaagtatcgcgagacct

SEQ ID NO: 220541 - DNA, 122 bp, Homo sapiens
gtggcagcgccaggccccgccccgcagcccgccctgcagcgcccccgggaagtgctctggcgttagcattccagtaaaaggaccccagcatcaacgttcttcctgcagggctgggttctcag

SEQ ID NO: 220542 - DNA, 122 bp, Homo sapiens
ggctagctttcccccatcgcaccaggtttgccaggtggtcagaacgtggaccctgctgcacgtggatggtggggcctggagggcccttgcagatcatctggttggtggcgggatgaccttcc

SEQ ID NO: 220543 - DNA, 122 bp, Homo sapiens
gcggaagggacgaggtggagccagtggcagcactctggtgccgtcatagcaacgaggggccgcttcggccaatcactgctcgggaagcgagggggcggggactgggcagggcctgagcgggt

SEQ ID NO: 220544 - DNA, 122 bp, Homo sapiens
cctggcatgtgtctagggctccaggcgtgtgtctagggctcctgatgagtcagcctcacacgtggcctgctcaggggcccgggaaagagtcagcgctgcacagtcaggcacggggaccctcg

SEQ ID NO: 220545 - DNA, 122 bp, Homo sapiens
attgagttttaaatttagtacctatgatttgaggatgtgggcttctaaatataaagccctcgtggttgtgaggtcaagtgcactcctgacttggtccctggacaagtggcaggtcctgccct

SEQ ID NO: 220546 - DNA, 122 bp, Homo sapiens
cgggcggggatctggatgaaaggcttccacatcagggaaccctaaggttacagggactttcgaggcattcccagactgaaggcagatagggctccacttggatgtgtggtagttcctggtct

SEQ ID NO: 220547 - DNA, 122 bp, Homo sapiens
gccttcggggttgggggaggagctgctgagcctctcactagcctccctgctcccagcccccgcctcaccggggccgcccctggccctgccccgcctcttgatccccaaccaggaagcttgca

SEQ ID NO: 220548 - DNA, 122 bp, Homo sapiens
atgaccacgctgggtgtgaagacaaggccacgtgaggccggaggacagtgcaggccaaaccgaggccaagcgaccactcctcatgaggctgcagggaccaacccggcacgcagagaggcacg

SEQ ID NO: 220549 - DNA, 122 bp, Homo sapiens
agggttgctgtgaggatgaaataagaggctctatatgatgcatttgatgagggtgtaaagcgctgtaaatgatgttggttattgctgttgatccaggatcacagaataaagggcttccattc

SEQ ID NO: 220550 - DNA, 122 bp, Homo sapiens
tattatgagataaccactgaatgaatttgcacaatagacgtgcgtgcccttcatctgccgcgtcatttacttgctttcaaaggactttattattcacctgcccattcattttcacttagtcc

SEQ ID NO: 220551 - DNA, 122 bp, Homo sapiens
tcggtcctctcggcctcagggtggggctgggcctgcagccaggactccgggcgtcctgtccggtccccgcgcggcaactgcggcccaggttccggagtcctctctgggcagctccgcgtccg

SEQ ID NO: 220552 - DNA, 122 bp, Homo sapiens
tctccagcttcttaaactcctagtcatctttcaagacagagtccaggtgtcacctcctgtcggaagatgagtctagccccttcctgataagtggagttagagtctcctcctctttggtctca

SEQ ID NO: 220553 - DNA, 122 bp, Homo sapiens
cgccagacaacagacacagccaggacggctgggcgcccagggtaaccagcacccgcagaacgctgttggattttactcgactctatgcctttgtgttctgtgtggagcttcccaaccacgaa

SEQ ID NO: 220554 - DNA, 122 bp, Homo sapiens
gaagcagcaagcagcttgtttgccgtggccagcagcaaaagaagccccccaaccataccacgccggagggggatcataaggaggccaggtaggcaaagttaaggcagttgcatgtcagcagc

SEQ ID NO: 220555 - DNA, 122 bp, Homo sapiens
aggtgtggggaggaagatggggacagatgggaggagagctcagagccagggttcacccaccgcccccaggcttcttcagatagtcaccaccaccccggccatcagtggagatttcccggaaa

SEQ ID NO: 220556 - DNA, 122 bp, Homo sapiens
cctaccccgacagcccccagcccagatggcattcaaatcttcctggatgggcttgatgcccgtcactcacgcgctctttagcactgcgttgtgttggttactcaggcctgggagaggtggtg

SEQ ID NO: 220557 - DNA, 122 bp, Homo sapiens
ttggcatcgcgtcaggggagttagctttccttcagccgggtctggctagttattgggcgccgggtagatgcatatatatatatttttttctaactatagcaagcaagaagtggcagggcgcg

SEQ ID NO: 220558 - DNA, 122 bp, Homo sapiens
gttaaacatgagaagtgctagttattcatttgccatcaagactagtccaaataaaatagccgtagaattttacaaaacacatttaaagaaaacagtatgttgtgatgatggcttagatggaa

SEQ ID NO: 220559 - DNA, 122 bp, Homo sapiens
tcagatgccggtgaccttgattgaagtcacctgccttctctagcttccagtcctttaaaacgagggtttggacccggtgccttctgaacccggtgcttcactgagtgagcaagtgaagggtg

SEQ ID NO: 220560 - DNA, 122 bp, Homo sapiens
ctttccaatgtgccagaaccagaagggcattccaaggcttccccacatttcctccatttacggagacagctgtttcactaacttgcagcacttgtaaatgctttgaaagctgatcacatatt

SEQ ID NO: 220561 - DNA, 122 bp, Homo sapiens
gtatgctctcattgaacaagtatttattgagagccactacgtgccaggcgccgctctaggcgccgcggccaagacagatacctgctccacggactgtgcatttcagcgtgtgcgtgcgtgga

SEQ ID NO: 220562 - DNA, 122 bp, Homo sapiens
ggtggggctcctacagggacaagcacaatccactctgccctccttgggatgcgggaacttcgtccgcctcagcctctccctgcctgtctcaggacttaagtcgcatggaccccaccacacac

SEQ ID NO: 220563 - DNA, 122 bp, Homo sapiens
ttctgccctctgtcctctgaatcatagccactcccatcttaggctttttttggggaggggcggggggctggtgcggaatcggaataacaagctccgtgggggtgcgcaagaagcatcgccgt

SEQ ID NO: 220564 - DNA, 122 bp, Homo sapiens
ttccacacctaagagaggcacacacagcacagcagccactgtgagtcaacagccctgaagcgggaacccacacatacacaagcagaggccaggaaaacgaagtaccaggcaagctggatgca

SEQ ID NO: 220565 - DNA, 122 bp, Homo sapiens
gggtggttttactcgccctcctggcctgagctgtcctggttctcggggggctggggagagcgacactggaaagccggcctgtcctagagaccaggaggctctagagtgtgaggggctgccgg

SEQ ID NO: 220566 - DNA, 122 bp, Homo sapiens
gaggtggaggcagagaaagggaagggcaggaggtggtcgcaggatgttgcctgcggctggcggcccagtggattctgggaattgtagtcccagccatccagggcattgccgttcagggccac

SEQ ID NO: 220567 - DNA, 122 bp, Homo sapiens
aggtactagcaccacgcagagcccttccttagagcgcagaggggccatttctcccattatcggattccaaccccacttgacaggtgggaaacagcagataaaggactccaggatggggcttc

SEQ ID NO: 220568 - DNA, 122 bp, Homo sapiens
aagctgtttacatccttcaggtctgccaggcaggggaagcgataactgagccctcagctccgcactgagactctgtgtttggtggtgagtggggttttacataacacatcttctcacagaac

SEQ ID NO: 220569 - DNA, 122 bp, Homo sapiens
agaggaagtgaggtgggggggaagtgaaagagaatgaaaaggaggaaatggagacgagggcgactcagagaggaacagagagacagagggagggagaactgagaaagacacagagcgaaaaa

SEQ ID NO: 220570 - DNA, 122 bp, Homo sapiens
cttgtctaagctccgccccggacccagctgtcccgcccctgagctgcgaagcctcgcctccgaccccgcccacagccaggccgggtctggggtgccccttacctggggctccgcggaaagcc

SEQ ID NO: 220571 - DNA, 122 bp, Homo sapiens
ccccacccaggtctcccgctgcggtgactcggaaccactaccccgcctgtgtccaggaggcgccgcggctcccacctccagcagcacctggggctgtgagtggcgccccccacccacccccc

SEQ ID NO: 220572 - DNA, 122 bp, Homo sapiens
tgagggcattagtccttggggcttcctgaagggggccctccccatctctgcccaccctggcgagttgcccagcccaaccaggcttgaagaagtcctgagagattctcctgctgggaggggct

SEQ ID NO: 220573 - DNA, 122 bp, Homo sapiens
aacccctacccatggcccccaataaatatttgcaggggatgccagggcttgtggccgtggcgggggtgggtatgcgccaaccctatttcaggcagcgctcaaagtaggtggagccgatgtag

SEQ ID NO: 220574 - DNA, 122 bp, Homo sapiens
gaaaggagaggatgagggtgactctgaggtggactggaatgagatgtatcaatgtgaatgcgtgggttttactgcatgtagagagatggaatgcacgcacacacgtggacagatacacagat

SEQ ID NO: 220575 - DNA, 122 bp, Homo sapiens
attcagcacagctgtctgcggcccctgccggcaggtgtggccgcacctggtgtgaagtcacgtggagtcagtgctgtggagggaagtcctgtgcgggccgggcagtgaggagagcactgatt

SEQ ID NO: 220576 - DNA, 122 bp, Homo sapiens
ccgcggcctccatgaagacctacaaggggtgcccgagcggctgctgggggcggcggggaccgaagagaagaagaagttaatcagggattttgatgaaaagcaacaggaagcaaatgaaacgt

SEQ ID NO: 220577 - DNA, 122 bp, Homo sapiens
agagctaagagatgtcagccctgaggcttagcatccccatagagggactgaccaggagcccgggagtcctgccccagctgtgtccctaagttgctgggttaacctctgtagaatgtgaggat

SEQ ID NO: 220578 - DNA, 122 bp, Homo sapiens
ggcctgggcagtgcaggccgcctggacagaatccctccctagcctggatgtttctctctacgcctccacaaagccactcctccggctccatctgtcctcgatgtctgcacccattcccctct

SEQ ID NO: 220579 - DNA, 122 bp, Homo sapiens
agggagactatatcacttttagcctggtccgtgttgaccccccagggaaactcacatactcgtgtctgtaagatgtgtcttagagcaagcccctttaaacaaaagcagcgctggcactctcc

SEQ ID NO: 220580 - DNA, 122 bp, Homo sapiens
aacatgttactggtctggtcaatggaggaaagggcatccttgttataaagtagcagagaacgtggctgaattgtgtgtgtgccctagtgttttataggaggcagaacttgtaagcaataaaa

SEQ ID NO: 220581 - DNA, 122 bp, Homo sapiens
caagagaccaggtagaaaagagctaataagagccaaggctaggtcagtgggtgccagaggcgaaagaataaagagcacaatggaaggaggggtccaactgtctagaagcccaggggctgggg

SEQ ID NO: 220582 - DNA, 122 bp, Homo sapiens
ttgactggtttgaattaaacgcaaaataggtttaggctgagaaatgggccagacccttggcgatctgagaaagaaagactgagtccggatgtcaagaggcctgggcctcacgagggagtttg

SEQ ID NO: 220583 - DNA, 122 bp, Homo sapiens
tatctacatgtctggttcttaaacttgttggtatgttgattagggccagacccatgcatacgtaaatttgaggtaagccacggagttcataagcaagtttatggggtttctttcttgatatc

SEQ ID NO: 220584 - DNA, 122 bp, Homo sapiens
accgccaccgccgccaccgccaccgccgctaccgggtccccagggcgcctgcgcgccgcgcgcccagctcactccgcaaccagtggcctgccccgccccgttccgtctagcagcacgtgata

SEQ ID NO: 220585 - DNA, 122 bp, Homo sapiens
cggcaccctgtgcccgcgcgctcctcctggcgacgccgcgttgtgggcactgggaggcgccgtatttatagcgctctgctcgcgcacacaccccctttggggctggctgcaaacctgcatga

SEQ ID NO: 220586 - DNA, 122 bp, Homo sapiens
tataatgcaggctgactcccagggaaagaaattggacaggaaggagcactggggaggaagcgtctcaaaccacagtcctcgagtcagagccacacgcctcttgctggagtgggcttgcctta

SEQ ID NO: 220587 - DNA, 122 bp, Homo sapiens
gcaaccgacgcacgggcattgcgcacgccccagacagtcctggagagatgcgcctggcagcggagacagagtggggacagtaggcggctttacccctggctaggaatgacacaagggcgtct

SEQ ID NO: 220588 - DNA, 122 bp, Homo sapiens
ggctccgacccttccgtcccctgcagcgcctgcttcctggaccagagaccgaaagcctctcgctccgctgggcctcagcaagcccagcatgaggccgatctccaggagtcggttttgctcca

SEQ ID NO: 220589 - DNA, 122 bp, Homo sapiens
agggggttcccaccttctcagtccgggacgcgagacgggaacgcagccctggcgccccaacgctgcaccaccgtgggtctccgagccgtgctcgcagtcgctgagatcctcggtgcggagaa

SEQ ID NO: 220590 - DNA, 122 bp, Homo sapiens
atcattttctctttttaccagtcaactgctttcctacaggccaataatagcattaccaaccgggacaaccatgagagtctccttactcacagttgtccaaagcctttaggcttcatactgtg

SEQ ID NO: 220591 - DNA, 122 bp, Homo sapiens
acgttcctggctgagggaaaggctccttggagacgtccccaggggtccgagacacgcaggcgtcgccagggaccgggctgtgtccggtgccagggctcagccaggcctggagccaggcgggc

SEQ ID NO: 220592 - DNA, 122 bp, Homo sapiens
cccctccaccgggcgtcggggccctggaccccacagcaggggcggggaggctgacgggggcgcagcttttcctcctgagtgttcgctgcccgggctggcggcgcggagccggcccgccgccg

SEQ ID NO: 220593 - DNA, 122 bp, Homo sapiens
gcttccttcagcctacggacatgaaggagtcaactctaccttccactcgttgccggctttcgccgagaaccccgagaaacggactaccggagtccctatcttgcagcccgatccccgctacc

SEQ ID NO: 220594 - DNA, 122 bp, Homo sapiens
gtgctgtagcagaagtttcgattccaaaccaagatacggaccacactcatgaaagcaccccgtggcaggtcgtgactgaagttattttggcaaaggagcaagaaaaaggtctggcccgaaat

SEQ ID NO: 220595 - DNA, 122 bp, Homo sapiens
gcggctgcgcaggtatgctggggcggggcttcaggtcaccccgcccatccccagcctacgcgaccattgaacagctgccgcccaacggctgggtaaatcctcagcggccgaaatgattagcc

SEQ ID NO: 220596 - DNA, 122 bp, Homo sapiens
agatataatcataccatgtaagtgctttgcaaaccgaaagggctactcaaatgtaagctgcgttatgtctccagttgagggattcacaatacaatttgcattttgaaagcaatccttagtta

SEQ ID NO: 220597 - DNA, 122 bp, Homo sapiens
aaatatctcacacaacccagacctctctagattaccgcaccccgcccccgccaccgcccgcgacaaaaacaggtaaacctcagaaaggagtctatcataggctacgttaggtccccttccaa

SEQ ID NO: 220598 - DNA, 122 bp, Homo sapiens
gcccagaaggaaatgaagaaaaagtcctccgtgcccgtgccatgctggaaagttaaaacacggtgcctcctttggttttctgttcaggcacatctgagcctcctgctgctggtcacggttca

SEQ ID NO: 220599 - DNA, 122 bp, Homo sapiens
ggccctgagccaaagacccgggagaaaccgatctgggtgcaagagccggtgcgactttcacggcttgtgggaagtttgtgggctagaaaggtgggctgcttctgtgagcttctctgtgagac

SEQ ID NO: 220600 - DNA, 122 bp, Homo sapiens
gactcagggtgaagatccaggaccactaggttggtgtccacggagagttggtatgcacaccgctagagggcgcaggagatcactcggccccgaggagcccttggtcaaggcacctgtaaagt

SEQ ID NO: 220601 - DNA, 122 bp, Homo sapiens
gagaaggggaagccgaggcttggatgagctgccctggccggctccgggctccaccccccgcgccctggctgttgccatggttggcctcaggcatccggctcggcctacaggaaacacgcttg

SEQ ID NO: 220602 - DNA, 122 bp, Homo sapiens
cctccacgtggcacctgggcgtcctttaagaaccctccaagtggggtttaatgtcaagcccgcccggccagcggggggagccaaagagcagggaggccgaggtgggaacactggacgtggaa

SEQ ID NO: 220603 - DNA, 122 bp, Homo sapiens
cagtgtgggtgggggtgaggcatcttcctttctgcagtgctcactcctcctgcacctgcccgggcagaggcctggtggtccctgggagaccccagccgttcacctgcctctggcgatggtgg

SEQ ID NO: 220604 - DNA, 122 bp, Homo sapiens
aaggaggcggacctggcgcagcccaggcgtccggcccctccccgcggctggcccggcctccggggaagcccccttggtcccacccagggccagggcccgcccccagcttcgccggcctcctt

SEQ ID NO: 220605 - DNA, 122 bp, Homo sapiens
gcaaagaaactacaaagccccagaggctcactccagactggaagttggaaaatttttaagcgacagttaactacccatttaataagaaactgcttattttttataaacatataaatttctct

SEQ ID NO: 220606 - DNA, 122 bp, Homo sapiens
ttccagccaggcacagtggctcacgcctataatcccagcaccttgggaggccaaggcgggcggatctcttaagatcaggaattccagactaacccagccaacatggtgaaaccctgtctcca

SEQ ID NO: 220607 - DNA, 122 bp, Homo sapiens
ggctggaggcgcgtcgacctgatgtatggccaggagctgctggggcccagcaacaagagccgagcgcccctacggaaggctggagaggtggttccccgccacgtaccagttcagccagtacg

SEQ ID NO: 220608 - DNA, 122 bp, Homo sapiens
ggggtcctccgtgtgcagggccgaggaaaccaccgtggccaaagtggaccaccagctgagcgtggctgggatgctagcagcccccaaccctgccggcctgggatgacggcggcctgggatga

SEQ ID NO: 220609 - DNA, 122 bp, Homo sapiens
cacatgtttcggctttcttcggaggtagtcgagtccttagggtcactgttccgatgtgggcggggccacagactcggccggatgtgggtggggccacaagcttcggtttacttcgtagatag

SEQ ID NO: 220610 - DNA, 122 bp, Homo sapiens
cgaaaaagcatctacgagtttgggagatgaggagggttgcagaggtgcctgctcttcccccgcctcgcgcagccagaattagccaagctctcccaagctgagggatgtagattgattgcctg

SEQ ID NO: 220611 - DNA, 122 bp, Homo sapiens
ccgcgccgtccaataggaagcaagccgttagtgggctcgccccttcatgctccaggccaacggccctccagcctgcagacccacccgcccgccctacctctagccgctctgctcttcccacc

SEQ ID NO: 220612 - DNA, 122 bp, Homo sapiens
tggcgtctcctcccttctccctgccccctgccattcctgcgcaaagggcacggggcctggcgtgtggcactggcagctggagctttccatgctgccgtcaagttttccagagcacaaagaca

SEQ ID NO: 220613 - DNA, 122 bp, Homo sapiens
accgctgctgtccctgctgtcgctcctggttggtgcgtggctcaggctaggtcattgaaccgccggccacgccgggggcgctgggaaaggggatggggccctccgccctggcgggagagagc

SEQ ID NO: 220614 - DNA, 122 bp, Homo sapiens
tcccccggggccacctgcatcggagtcactcgggatgcctgtttaaattgctggttcctgcgccccacccaatctgcggtcactgggacaggggtcttgcattttaaggagcaccccaccgc

SEQ ID NO: 220615 - DNA, 122 bp, Homo sapiens
aaagggctgcgggcgacgcgggctcccacctcggggcgcggtgactggggcgagaggtgccggcagcccccaagccagccccgcagcaaggagccagagagacgcgccctccccctcctccc

SEQ ID NO: 220616 - DNA, 122 bp, Homo sapiens
gcatttaccaatgtctgacagtatttaatttcactaatttatctcgtttattttatgtctcgtttatattcctgctataacgtaaactccgggaaggatttttgtctgtcttggttgtctgt

SEQ ID NO: 220617 - DNA, 122 bp, Homo sapiens
attttactgatgaaaagaggccttctgagcgttaccacagctcaagcttggcgtcccagccggatctaggtttgatttgcaattagggaaagttgttcaagggaacaagtcttaggagaatt

SEQ ID NO: 220618 - DNA, 122 bp, Homo sapiens
ttttgctcaccggcagagaccctccgatgcctgtttccgcagcgtgtctgtcatctctcacgagaccttcacacatcagtggcaccgattatctcatgtcacagcccgtcggttggcttagc

SEQ ID NO: 220619 - DNA, 122 bp, Homo sapiens
ccagccttgtgcttctttgcagggtgagtttcaggctcgtttcaggtggttgcaaatcctcggggcgtgaggaagcgctaaagtcgggagtgcagggagccggacctaccgaggatcctggt

SEQ ID NO: 220620 - DNA, 122 bp, Homo sapiens
ccgggctgcggcgggcgtggtccccgggctgcggcggacgtggtcaggggcggttctgggcgtggtccctgggctgcggtggacgtggtctcgggctgtgacgagcatggtccctgggcagc

SEQ ID NO: 220621 - DNA, 122 bp, Homo sapiens
tgcagagggcgtgtgcgtcatcccacgttgcctgggaaaacaagcattaacaagtgtgagcgcgggtctccgtggaaatggtacagaagggggcccacggcgggatcattagtgttactttg

SEQ ID NO: 220622 - DNA, 122 bp, Homo sapiens
accagggccccgaggggacgctgtccctgccgggttcctggaaaaaccctgttcagttcccggcgctgcggccacactccctccgtgccgtttcgctttcgcatcccgcatctgagaggcgc

SEQ ID NO: 220623 - DNA, 122 bp, Homo sapiens
gcattcactgtgtaattattaaaactagcaggcaggtgctgttattggcccgattttatacgagaaggagactgagacactgggaggctaagtaactggccaggacacatggctaattagtt

SEQ ID NO: 220624 - DNA, 122 bp, Homo sapiens
caagaccctgctcttttagagggtggggctaggagagcgtatttcgacgctgcccgccaacgaaccaatccccgcctaaagggggaggggatttaatctgtcgcctctccttccctttggaa

SEQ ID NO: 220625 - DNA, 122 bp, Homo sapiens
aggccttttggctgagcgttcacgggccccgagcaggtaacgactctgtcccatgccggccggcacaagagctccagctccaaggccctggccgcgcgccctgcacgccccgcacgcccagc

SEQ ID NO: 220626 - DNA, 122 bp, Homo sapiens
tatttaaaaaattattgtccattcgattacatttttttttattttcctacaaggcaagcacggttttagtcctgtaggtcagcctttgtcacaaactcttttgaactaagatttgcctagtt

SEQ ID NO: 220627 - DNA, 122 bp, Homo sapiens
caaaaaattctatattgtgccttgggaactctaatttagcacacaccagcactatactagcgccgtagtttttctacaccatggacacaaaaaacattaaacagtaaaataaaaggcagatt

SEQ ID NO: 220628 - DNA, 122 bp, Homo sapiens
taaccagcactggggacagcggcacgcaggtggccggggttggcgaacagccactgcagccgcgcctgcggccgggaagcgagcattttcgcgccctgcacacccagcagccgcaggaggcg

SEQ ID NO: 220629 - DNA, 122 bp, Homo sapiens
ctcccctggctgttcgcgatccagcttgggtaggcggggaagcagctggagtgcgaccgccgcggcagccaccctgcaaccgccagtcggaggtgcagtccgtaggccctggcccccgggtg

SEQ ID NO: 220630 - DNA, 122 bp, Homo sapiens
cacttgcgggccagcgcgaattccacgtgggagtgggctcagcgggccccgcactcggagcggccagccggccccgggcactgaggagcttagcaccaaggccagcagctgctgtgctcgac

SEQ ID NO: 220631 - DNA, 122 bp, Homo sapiens
actcgtgttcacacgggggaaggggtgcgtgtggcagaagcagctgtataaatacgggtgcgggaaagtccctccgggtcacttggagagtttgctgatgacgcggatcaacgctgcattct

SEQ ID NO: 220632 - DNA, 122 bp, Homo sapiens
gctgcccggtgtaggggtcagtgtagccagtgacagcgcgctcagccgacagcagcttcgcgaacacatcaggcccaatgacagcagccctcagtgcctcctcaacggagtgccccttgttt

SEQ ID NO: 220633 - DNA, 122 bp, Homo sapiens
gtatgttctctctttacagtccatggttcttctgcttcatagccagcggcagtacatcttcgaatacgatatgtgggaccgcctgtctgccatcaccatgcccagtgtggctcgccacacca

SEQ ID NO: 220634 - DNA, 122 bp, Homo sapiens
ctagggctctggagggcaggttcttcatctgcaaaagcaagaggatgatccccacttggccgggtctctgtgaggaggacatgggatcatgcatggaaagttcttagcccctgcgagggctc

SEQ ID NO: 220635 - DNA, 122 bp, Homo sapiens
tctccgggtggaaagcatttgaaaggtgcttggagcagtgaccgtcccgcaggaagggcacggggcagtttgcagtgttgttaaaagtgcccagaggccgggcgcggtggctcacgcctgta

SEQ ID NO: 220636 - DNA, 122 bp, Homo sapiens
ctcattcagtggcagcctggtttatcaagcgtttgcagcctagagaaccagaagctgggacgatggaacactccctttggaattagggtcagctctcaataaacacgaaaaacacaaaaagc

SEQ ID NO: 220637 - DNA, 122 bp, Homo sapiens
gcaaaacactttttcagatttagtgagatttgtaatcatattccacaagatgtgctccatcgtgtttgaaaagcggctcacaagtatttactctactagacagctgggctacctcacaaaga

SEQ ID NO: 220638 - DNA, 122 bp, Homo sapiens
ttttttcttttactaaaatacatcgtttatttttaaaacagataagtagccttgccaaaacgaagcctcagaaaattggtttaagactgaattggccaggtgtggtggctcacacctgtaat

SEQ ID NO: 220639 - DNA, 122 bp, Homo sapiens
gagcacattttatggaatgtactgcagtaattaatcttcattaggactgttgcatggcctcgtaaattaaaatttatggtaaggggaaaagtctctggcacaacatatttgaataccaaagt

SEQ ID NO: 220640 - DNA, 122 bp, Homo sapiens
gggcagaatcagtggctaagtttttgtagggctgaaactacctgtcaccccagggaaccacgggctagaacgtggcagtagggcttgaaacagaagcggggcttaagtacatgcacagcaca

SEQ ID NO: 220641 - DNA, 122 bp, Homo sapiens
catctctgcacaggtctccgattggtgcacagcacagcctggccttttagggactgttgtcgcgcgtttaaagtgatagggaaagggtccagtggctgcttttatcgaccaatcaaatattt

SEQ ID NO: 220642 - DNA, 122 bp, Homo sapiens
cacctacaagaaaagttaaaatattgagaagtcaacattaaaaacttttctatcacaagacgttacccctgctagacaaaaaatactttcccttctacttaaactgccatttagaaatgtgt

SEQ ID NO: 220643 - DNA, 122 bp, Homo sapiens
ttctgcgtctacctagcggttggaaagtggccagcgtagctgaacagtaaatgaagctgacgggtcagcaggtgttacagatcaggagactcgacgccgtgcccaagcccttccccgctgca

SEQ ID NO: 220644 - DNA, 122 bp, Homo sapiens
gtggggccttgtgctctctcctctctgaggctgagcctggcctgctgcaggcagtactggcgtcagaaaacaagggcagtggtgctgtggacaggattcagagagcctgtgagttgagatcc

SEQ ID NO: 220645 - DNA, 122 bp, Homo sapiens
cagaggtgagcagcaaacactggtgtccctcctgtcaggagtccaaggggcaagaggccacggagggcttcaggcaacacctgggcgagcccagcggctcctctgacactgcagacacctgc

SEQ ID NO: 220646 - DNA, 122 bp, Homo sapiens
tcacgtattgtccatgatgttctaatatagggttagttatatttttcttttgatgtagcacgatatttatttacaagatggttgtaaggatatagtgtcttcagggttaaaaacagaggtac

SEQ ID NO: 220647 - DNA, 122 bp, Homo sapiens
ggaaggctctcctctgagtacgggttggctcacggactgggaaggaccgtctttgctcaacgagaaataaagcctggctggctagccacggcagcctcttacctgagcggttgttgggagac

SEQ ID NO: 220648 - DNA, 122 bp, Homo sapiens
taggttgtgctgttggccccagcaggcactacttcagcccagaagcccttgtctcagaggcgtggccttgttcccagtcaggcactcttctcttgctatcctgcatcctaaacctgctggcc

SEQ ID NO: 220649 - DNA, 122 bp, Homo sapiens
atctccgcctgttttaacaggttatgctgctctaaggaattgcgttccggagagcgtaagcggtgaagttttagctatttctatccttccaactgagaagccctcctggaagtttcagccca

SEQ ID NO: 220650 - DNA, 122 bp, Homo sapiens
ttcataaatgccacagtcactcttgtgggagggtccctctgactatatggagaggctctccgagccttttctggaggcttcttgagtacttccttactcaccttttgaaacaaccaatttgc

SEQ ID NO: 220651 - DNA, 122 bp, Homo sapiens
tgcaccccacagcagagggctatttgggcagcggcacttgttagaagatctggacttggccgagcgcggtggctcacgcctataatcccagcactttggaaggctgaggcaggcggatcatg

SEQ ID NO: 220652 - DNA, 122 bp, Homo sapiens
agccacttagccttgtgcagaagactagttacacttaatgggccaagcaatagggtgtagcgtttttatagaactgataatcaggcttatggcataagaaaaatgagtttcaaatttaagat

SEQ ID NO: 220653 - DNA, 122 bp, Homo sapiens
taaaactgtgcagagtactttctttttgaacttggcctaatgattatagttttaagggcccgtttgtaccaaaagttgcttgaaattttaagcagagaaaccttgctgaagcaaagcagctg

SEQ ID NO: 220654 - DNA, 122 bp, Homo sapiens
ttttgtaagctccatcagatcttattttgagctatttaacagcctttgcaccttatgcaacgttgtaagcaaacagtgaaagaaatatgtcactttggaaaatgcatctgaggagatttcaa

SEQ ID NO: 220655 - DNA, 122 bp, Homo sapiens
tccacaggctggacccttcttgggcaggtgcctgaagcgggagggccatggcgtagcctccgacctccacaggctggaggtgcccctagggcagggtggtggacagagtcttcctctgttgg

SEQ ID NO: 220656 - DNA, 122 bp, Homo sapiens
tctcttctccatgagacagccaatatctgatcaaggccctgggaatgggaatccatagctcgccacccacgtctgccccctgcctagccacgctgcgctcagggaccattccgacaggagag

SEQ ID NO: 220657 - DNA, 122 bp, Homo sapiens
ttcattcattcaacaattacacccattcactactatatgtgagtcactgttctgggtaagcgagtgctcccctctctccctccagccatgatcaccattaagaggctgatgccatcatctgg

SEQ ID NO: 220658 - DNA, 122 bp, Homo sapiens
ctgtgcaagctttcgggaggcaggagaccaggcctgcagaggccgactggaggtcaatttcggggcctgcagaggtcgcggaaagtcaaaagcggggcctgggaaggtcgccgggaggcatg

SEQ ID NO: 220659 - DNA, 122 bp, Homo sapiens
ttccagtatcaaatcccatcttggaggccttctggtccagacctcagcttcagggaagggcgttactctcagctccagtccactggacagaaatctatggttaaccacgaagcctgtgctgt

SEQ ID NO: 220660 - DNA, 122 bp, Homo sapiens
gaaggatcaggggcagagccggcttcatggacaggaaacctgggccctgtgttttcatcccgggccctgtaaactctgcagccagccgggatgagtagctttctctgtaaagtacccatgcc

SEQ ID NO: 220661 - DNA, 122 bp, Homo sapiens
ctcgatctcctgacctcgtgatccgcccgcctcggcctcccaaagtgctgggatcacagacgtgagccactgcgcctggccaagttagttctggttttagtcgtactttttatctctattac

SEQ ID NO: 220662 - DNA, 122 bp, Homo sapiens
gctgcaagcccgcaggggccccgccccgcgccgggagctccgccctgagagccaatcactcgccgcgaccacgcacgtgactagtgggccaccatcttgaatttttttaacctcctcctcgc

SEQ ID NO: 220663 - DNA, 122 bp, Homo sapiens
ggctgctaacgctgctgccaaggagaatcatgacggcagaaggaaaaggggtatataatacggtattaattattccggctctgtggttagacctgattaatgcccgggttcccaacaccccc

SEQ ID NO: 220664 - DNA, 122 bp, Homo sapiens
ttgccgacaagagaaagaaaacttagaaggctgcttgggttacagagtgttcctaaagtgcgtcgggaggtatggatcttgatttgtggtcactgaaagccactgaagcccaagtgaggaga

SEQ ID NO: 220665 - DNA, 122 bp, Homo sapiens
ccccagtctgcgtgtacacgagggatgaggtaggcggcctgctcttgctcacccagtccccgctcactttcagcccactttccaactggaaaatctgctgtcccgcagccgtctccagggca

SEQ ID NO: 220666 - DNA, 122 bp, Homo sapiens
aatttattcaggtacagtactactaatcaaatccatactcaaaacagctcatgcacaagacgaccctaaccacaggtaaccagttcaaacaacgtcactcttttgttgatagtgtcattatg

SEQ ID NO: 220667 - DNA, 122 bp, Homo sapiens
acgagatccggggacagtgcagaccctcttcggccacctgccacccccagtttcacgaggcggactacaaaccccatgatgccgcggggctgagctgacaagctctacccggggcgcctggt

SEQ ID NO: 220668 - DNA, 122 bp, Homo sapiens
cctgcgattgcaggcgcgcactgctacgcctgactggttttcgtatttttttggtggagacggggtttcgctgtgttggccgggccggtctccagctcctaaccgcgagtgatccgccagcc

SEQ ID NO: 220669 - DNA, 122 bp, Homo sapiens
agaatggcattttgtttgtgaattctcggatcgaccgggaggagctgtgccggcggagggcggagtgcagcatccacctggaggtgatcgtggacaggccgctgcaggttttccatgtggag

SEQ ID NO: 220670 - DNA, 122 bp, Homo sapiens
tcgtccacgttccgtgaaatctgtgagtgctgcccgagtcgagctaccgttgctcaccaccgccacttcctgtcttcctacccagcgccgcggctctcggaggctgccagtggctgggtgcg

SEQ ID NO: 220671 - DNA, 122 bp, Homo sapiens
tcgggagggaggctggtgggggtcgggggtcccaggtcctagaggggggccgatctcctccgggccaagcctgcagctccccgaaggcatgatcagcagaattggggccgggtcgaggcctt

SEQ ID NO: 220672 - DNA, 122 bp, Homo sapiens
cttgggtaatgttgtctctatacctgtgataaacagaaaacaactaataaaggtttatcccgccctcaccctcttaaacccgcttcacagacctggctgaaactcacatccaggcgaggcgc

SEQ ID NO: 220673 - DNA, 122 bp, Homo sapiens
gaatctgaattgttttaaaagattctgttggttgcccctgctttgcggacgccttttgtacgttcttcctgatgtagcgctgcgaggggcgactttacctcggcgtttgacaggtacgcagc

SEQ ID NO: 220674 - DNA, 122 bp, Homo sapiens
tgtaggacgacgacaaacatgcccgggtgttgcaagattgtctcgtgcacagctgctatccggcatagagttaacgtgcaaacggagggtggcttagcagctccagaagtccagccctgtct

SEQ ID NO: 220675 - DNA, 122 bp, Homo sapiens
gaactttaaaataaaaatggaacgatatgtatgacaagagcctcttctcatgatcagaaacgaatacatccatgtccaccctgcagattgtctttgctcttctcttgcttggcttattttat

SEQ ID NO: 220676 - DNA, 122 bp, Homo sapiens
ccccgccacggtgtctttttgcccccaccccgcctcggctttgtgcccccctcccggccgcggctttttgcccgccgtggctttttgccccccgccgacgcggctttttgtcctccgttgac

SEQ ID NO: 220677 - DNA, 122 bp, Homo sapiens
cacattaggatctgaagaacctttgggagaatctgaaagatccatgcctgttcaaaataacggcttatataacatattgcttctcaaatttcttcatagcaaaagaagttcaagctcattcc

SEQ ID NO: 220678 - DNA, 122 bp, Homo sapiens
gggggtcacacggggccgagtggcttcagcgagagtccataggacatggagagtcccggccgtggtgaggacacggggttgcggcagctcacgcccactgcagtgtccggaaggcggtgcta

SEQ ID NO: 220679 - DNA, 122 bp, Homo sapiens
acacttcttcttgatgtttttaatcactcattgttataaaaatgctctttcactgagttccgtggccccacgtactttgtctttccttctacctctttggctgctccttcttggtttccttc

SEQ ID NO: 220680 - DNA, 122 bp, Homo sapiens
ggattacaggcgtgagccacaacgcccggcgggatcactaattatccgtgtttttctcttcgggaggaaaatccttttggtcagatttcccttggcttggtggtggagagggtgagatcttg

SEQ ID NO: 220681 - DNA, 122 bp, Homo sapiens
gcgaaccggtgttgacggagaaaggtcagctaagccttccaggtggttactcacaaaacgcgactgcgcaaatggcttgtggggaaagctcgtgggccttgggggcaccgggagcgtagcct

SEQ ID NO: 220682 - DNA, 122 bp, Homo sapiens
ctcaggaatatgaggctctgctcaagaattgaggtgtgacgaaggacttgaaggacaccacgtgggtgccgtctttcttagggaagttcaggcagtggtgaagagcatgggtcttggagatg

SEQ ID NO: 220683 - DNA, 122 bp, Homo sapiens
gagaaacgctgctttcttttgttcccccttggtgacatcacttaaacccagccctctcttcgctgatacttttctgtgcatgaggctaggttgagagacagtgaagctaggctgggtaccag

SEQ ID NO: 220684 - DNA, 122 bp, Homo sapiens
tcttgtgatagtgagtgagttctcatgagatctgatgctttaagagtgtgttgcgcttcccggccgggcgtggtggctcacacctataatcccagcactttgggaggccgaggcaggtggat

SEQ ID NO: 220685 - DNA, 122 bp, Homo sapiens
cgaacccgcctttgccgacgagctcctggttctccagttcctcgatggacaccaagggggcgggggcaccgctgggcctgagagaggggtgtcgcccactagccggccgtgccgtgcctcag

SEQ ID NO: 220686 - DNA, 122 bp, Homo sapiens
ggatgggaaatgggtccaccaggaaactggagcccacgtcctcctcgtgcaggggaggcccgccctggccccacggcagaatcaggtgaggcttgtgttggaacctgcttctgattggtgac

SEQ ID NO: 220687 - DNA, 122 bp, Homo sapiens
tgcctcccggtcctgacctctggggctcatgtgagggtgagtgacgccagggagcgtcagcgtcagagcccccacgcctggctccgctcagctgcaccctccaggccgtcctgaccttgggg

SEQ ID NO: 220688 - DNA, 122 bp, Homo sapiens
tttcagaccttatcatctttcatctgaagtactgtattagattccaaactctgcgtctcacgtctccttctggaaaccttttagggtgtacttccgtcctctccaccgaaagggctacagga

SEQ ID NO: 220689 - DNA, 122 bp, Homo sapiens
tgccagcttcagaaccagggaggagatggcatgttgcttaaaatgtcaatggaaataaaacgttcttgttggcacactgtcctgaattattctaggacacatctgtgagaaattcctagggt

SEQ ID NO: 220690 - DNA, 122 bp, Homo sapiens
tcaagcagcacagtagtggcgcccggagttgatgtcggtgaggacagcaacaaagaaggtcggtggattcctctcgggacacatctgccacccgctggactggcaaaacagctgggggaatg

SEQ ID NO: 220691 - DNA, 122 bp, Homo sapiens
aggatgaggagaaaggggggctgggccgcacactggccaatcagcacggaaatttgcttccgggccacggctcgttaaagggcccactctgacgtgtgtgcagggagggcggggcaggtagt

SEQ ID NO: 220692 - DNA, 122 bp, Homo sapiens
ttcaggacttggtcctggtctgacctgccgtgggggctgtgatggggtcctgatgtgccccgtgtgccatggcgctcgccaagggccagcatgtctgcggcctcacaggggcttcacgagcc

SEQ ID NO: 220693 - DNA, 122 bp, Homo sapiens
cggcccggcacgttaggggctgggggttggcaagcggggccagaggcactggccggggtccgaagctcacctcgtccttctctcgtcccacaacggccccttcccggctcgccgcggggccc

SEQ ID NO: 220694 - DNA, 122 bp, Homo sapiens
ttcacagagctgttgtgaaggtgcaattaggaaatggaatattctgaagtcccgcagcgccgtccaagtgtaagggtcattactaggctgagctcccggcgggaccctggagggaaaggctc

SEQ ID NO: 220695 - DNA, 122 bp, Homo sapiens
gcctgttgctgatgagaagtcgctgtcagtcccactgcacttcctgtggagactagagagcgctgggcgggaggcaggcgggggaggccagcacggctgagagaagtgaaggccgacacccg

SEQ ID NO: 220696 - DNA, 122 bp, Homo sapiens
ttacatgctcccggggctcccgcacataccccggcagatgagggtgcgcaggggtgagggcgcagggctgggcgtcccccgcccccaccgtgcagccctcgcccccgccccgcccctccgta

SEQ ID NO: 220697 - DNA, 122 bp, Homo sapiens
ttttgtatttttagtagagacaggattgatcaggctggatggtctcgaactcctgatctccggtaatctacccgcctgggcctcccaaagtgctgggattataggcgtgagccaccgtgccc

SEQ ID NO: 220698 - DNA, 122 bp, Homo sapiens
tccgattttccaccatgggcctcggctgccggcgagtggccatgctggggggctcggccccgcacgtatatggggtgctggcaggagctccacgtgctctgagacatcccccctgggtcttg

SEQ ID NO: 220699 - DNA, 122 bp, Homo sapiens
ccaagggtcaagtcgcctctctttagagaaagtctcttcttttgttactgctgaccaccccggcatcactgagagctgttgctatggaaacgaggtatccccagctgaaacagaggtgcttc

SEQ ID NO: 220700 - DNA, 122 bp, Homo sapiens
ctgggcgggtcgcagggtctccgcgggcgcaggaaggcgagcagaggtgggttcgggctccgttggctatgcatacatctccctttttttttttttaattctgtagcgttgatagaagccaa

SEQ ID NO: 220701 - DNA, 122 bp, Homo sapiens
agcccttgcaagggtagtttctggaggacgcagtgggcctcagactcgcctcccgtcttgcgggccaagtggcacgagcagctgtattcagttttcctggaacagggaccgtgtggagcgcc

SEQ ID NO: 220702 - DNA, 122 bp, Homo sapiens
ccttggcgcctccatggagcgtggcgcagagagggtgcttccgcaggaaggaggtcttggcgagagaaactggttccgggtgacccagatcctaatgaacatttcctcaaattattttctga

SEQ ID NO: 220703 - DNA, 122 bp, Homo sapiens
ccgggctcgggtttctgactcgtctcccaggagccggtttctgtttaccgctgaaaggcacgcctgctgccaaatttgaggtgtgagctcaccgagaaaaaagcactgtgctcccccgggag

SEQ ID NO: 220704 - DNA, 122 bp, Homo sapiens
aggctgtaaaccacatttcctagaagaccagggagcagaaggacggggatctccctttgccgctaagagactccaactcccaggatgccttgggagcgctggaccacagctcccggcattcc

SEQ ID NO: 220705 - DNA, 122 bp, Homo sapiens
ccacgccggagtgcagtaacaggcagaactggaacctggccccatcccggactcaggggacgggtgtcatataccccctctgcctcatccttcccactctgctaaccttccaaagatccccc

SEQ ID NO: 220706 - DNA, 122 bp, Homo sapiens
ctgttgatgttcttgtgctgatgatttgatgtccttgtgcttcggatgtgggcacagtctcggatggaagggttcagggagcaggatgcacatcccagcccactctcccactcataggatgc

SEQ ID NO: 220707 - DNA, 122 bp, Homo sapiens
agctggcccacagccaccatcctgttcctctcagcaagcagccagagtcctgtttcaacacggatagtcctccccaccccgcttcctctgctgtccccctcttcctgaccaactgaacattt

SEQ ID NO: 220708 - DNA, 122 bp, Homo sapiens
acagctcccaccgaagtagccgcgctcccagctgcttgcagatgttgaaaaggaaagcctcggtttgtcttgaggttgtcagcaggtgcaagacacgtaataaaatgcaatgtgttcctaat

SEQ ID NO: 220709 - DNA, 122 bp, Homo sapiens
agcggaagccgagtgcgagggacgagcggagtaaaatctccacaagctgggaacaaacctcgtcccaactcccacccaccggcgtttctccagctcgatctggaggctgcttcgccagtgtg

SEQ ID NO: 220710 - DNA, 122 bp, Homo sapiens
tcggggttggggtaagcacgaaggcccagctcagttctctgcatgtgacctcccatcttacgcagataagaaccagtttggtttctgctagcctgagtcaccctcctggaaactgggcctgc

SEQ ID NO: 220711 - DNA, 122 bp, Homo sapiens
tgacttgaagaatgaagccacggacccccgcggtgagtgttacagttcttaaaggcagcacgtccgcatgtctggagtttgttccttctgatgttcggatgtgttcggagtttcttccttct

SEQ ID NO: 220712 - DNA, 122 bp, Homo sapiens
gctgaccctggggcctgtgcgctgagctagggggccccgcgagcattactcaccggcttccgcttctgctgtgattttggctggactcctcccacctgggctgccgcatttcttgcagtttt

SEQ ID NO: 220713 - DNA, 122 bp, Homo sapiens
ctgtctctccagtgaggcccatggcaccttcttgtccactcctgggattcctctgaactgcgggggtctgtgaggctgggaagtgtggtgtgctggcgctgtccctggagcaggagggggtc

SEQ ID NO: 220714 - DNA, 122 bp, Homo sapiens
cagggagcagcgtgggagaagagatggggtcagcgccttccccagagatggggtagggggcggagaccgggctcaccaggaaggctgtggtctcacgggctctgccccagctgcccactgag

SEQ ID NO: 220715 - DNA, 122 bp, Homo sapiens
atcacctaccaccctaccaccctgtggaaaggtattatctctgttttacgtaggaagaaacggcctcaaagaggttaaacaatcttgtaaaggtcagtattagtaagtggagcataggttta

SEQ ID NO: 220716 - DNA, 122 bp, Homo sapiens
aaagcctgtagagcagcgcggatgacagtggaacagcgggtcaggcggtgggcgcctgagcgaggggctagagcgggatgggcgggcggagcaagcctgccagcctgggcggggcctcggca

SEQ ID NO: 220717 - DNA, 122 bp, Homo sapiens
tctcaacatccaccagcaagacgtattccagggcagcctctcaaaactgcctcagtgagacgggacaaggtgtggtggagctccaggttcagaacagctgcctcatcccttcctactgcggc

SEQ ID NO: 220718 - DNA, 122 bp, Homo sapiens
ccattgaatcccttccctttgggggtggcctccctggggcttgggacatagccaccagcgcgcagggtgggctgggcccgcatccttactccgcttatcccgtgcccctcctctcacccttg

SEQ ID NO: 220719 - DNA, 122 bp, Homo sapiens
caccgtattactattaggccaaagttataaaattggaacatgagggagggagaggttaaacgattttcccaagtcatgtggctagtgagtaggataataggaatctaaatggagaaatgtct

SEQ ID NO: 220720 - DNA, 122 bp, Homo sapiens
gtcttgaactcctgggctcaagggattctcccacctcagcatcccaaagtgttggaattacgggcgtgagccatcgcacccagacttgaattatttcttaggttgtttctccttgtgttttg

SEQ ID NO: 220721 - DNA, 122 bp, Homo sapiens
cgacaccattagagcaaggctcagtgtctcgagctttagtttaattctcaacccattgatcgctcttgcagtcagcttaacagttgaatgcaatgctgtattttgttttttttttttttttt

SEQ ID NO: 220722 - DNA, 122 bp, Homo sapiens
aggagagccccaaggtcaggtcccactcacagcagatgtcttggcagtgagcagctctgtcgcatccactgactggcaggatatagatcaggcctccttcaagacggccacccccagggcca

SEQ ID NO: 220723 - DNA, 122 bp, Homo sapiens
ctgattttttttttcttttctcaaatgttacctacaaagacatgcctggggtaagccacccggctacctaattcctcagtaacctccatctaaaatctccaaggaagcaataaattcctttt

SEQ ID NO: 220724 - DNA, 122 bp, Homo sapiens
ggctggcttacccctagctcacaaggcccggccgatcctaatgacctccacccaccctctcggacactgagcgcccccaccgcccagccggcccactctgggccagtaattcattctcccga

SEQ ID NO: 220725 - DNA, 122 bp, Homo sapiens
ttcccctccctttgctttccggtgggcaacaggggtgggtaactgtgttccggactcgcccgcgggccgggcggagccagctacctccaggcgaccctacccaccccgcgattctattcctg

SEQ ID NO: 220726 - DNA, 122 bp, Homo sapiens
ccacccttaatttattaccttaatacttcagcttaagaattatgtgttctgtatatatcacgctgcttgtcaatatccacacataaaccttcttgttttgacaattaatctgaaaaagtccc

SEQ ID NO: 220727 - DNA, 122 bp, Homo sapiens
agcacgggtctggctcacagtaactgctctcacgctccactagccactccttagcaggaacgtgggcacgagaattcccaaacttcctcgagtcagtgttcagaaccccgccctccctttat

SEQ ID NO: 220728 - DNA, 122 bp, Homo sapiens
aacaagaacagcagctcttcgtccagagatcaagccttaaaaatacatgcagtgtgttaacgttcacccagatgtgtacttttctgagaaaggtccccacaaactctcaaagggcagttccc

SEQ ID NO: 220729 - DNA, 122 bp, Homo sapiens
actacacagggttgagggctggaccggcaaaactcgatttgcccatcaagttaacttggtcggcctgggacccgaggccagggtgaagggacgacatcccggggccctgtggcttctcccta

SEQ ID NO: 220730 - DNA, 122 bp, Homo sapiens
aattgaattaaagagttgctataactcattcaagtgagataaaaaccatccagtgggaggcgagacggcaaggcaaagacactgctgctagaatgtgccgtcttcttgagattgcgaggaga

SEQ ID NO: 220731 - DNA, 122 bp, Homo sapiens
agatcccatgccaggggggcaaggatgctgcggtcctgcagggcagccagccatccctggcgggcatctacaggaagttgagggaaaaagagacaaaagatcgaaacagtggcagaatgttt

SEQ ID NO: 220732 - DNA, 122 bp, Homo sapiens
ctaggtcagatgagagccaccctgggacccaaacccccacaggcccccagacccaatccccgatcacacagaacaagccactaagcgtgtgtcccagatgagccaaccgtgctctccgcact

SEQ ID NO: 220733 - DNA, 122 bp, Homo sapiens
ccgagcggggctgctgcgcccgagcggttgggggcgcggagggctggaaatcccggatcacgcgcccccgggcgccgccccgcccccgcaccttggcctagcgcggtggcgtcacagtcgcg

SEQ ID NO: 220734 - DNA, 122 bp, Homo sapiens
ctcctctgccttggacaccatcccctcctagcacaaggagtgcccgccttgagtgacatgcggctgcccacgctcctgccctcgtctccctggccacccttggcctgtccacctgtgctgct

SEQ ID NO: 220735 - DNA, 122 bp, Homo sapiens
agggaagcattttgctgataatccccttctagtctccaaactacaccttctttgtaaaggcgttttttcctcttctgattatagctattgcattgtacacacaacaagaaagtccatctttt

SEQ ID NO: 220736 - DNA, 122 bp, Homo sapiens
gcgggcgccagctgctccagcatccctgttacataaggctcacttacaggcagcacacaccggctcatcgagattcacggctcggtagtgctgaacacgggttaatcatcccattgcgtctg

SEQ ID NO: 220737 - DNA, 122 bp, Homo sapiens
gtgccgcaggagcgcccccgctcgcgactccacaagcccagctgagcacggccgggaatacggggcctgcggaaacagtgaactcagtggctgctgttttctgagcacctgaaccctgtggg

SEQ ID NO: 220738 - DNA, 122 bp, Homo sapiens
aggaatgtacaccgttctaattcctgattcttcctcctgctttacagtgggttatgatctcgatggaaatccccccatgaataaatgtgtctgcaatcacaaatggccccataaatcagaag

SEQ ID NO: 220739 - DNA, 122 bp, Homo sapiens
ctggtgagaatctgaaggtttcttttcggtttctccgtcagtgccatttctctttgaggacgtagaaaactttattcggatacgtctcatgttctcttttcacctatcccccagaatttgtc

SEQ ID NO: 220740 - DNA, 122 bp, Homo sapiens
cccccatccccatggccattttgggatccctgagcccctagcctcccctcctcccctctccgcttaggtcaccgctacctatattggccacctggatggtgggggcttctgagcctaaaggt

SEQ ID NO: 220741 - DNA, 122 bp, Homo sapiens
cactctgtcctcattcggcccagcgtttggttacatcttctgtcactcagggcctgagggcggggggggggggggtcttaaacgttatccattcagcgacgctggcctgggaactgtccaat

SEQ ID NO: 220742 - DNA, 122 bp, Homo sapiens
ccaggttagggagagcttccgagcgctccgacaggagcagggagttggggtgggtagctccgcaggtgcacgctgcggcccttagggcgacagcctcggaaaaggcgcatctccggctgtgg

SEQ ID NO: 220743 - DNA, 122 bp, Homo sapiens
acagggggcagggagccgagctcgggcagcagctcagggtgtgggtccaggcgggccagacggctctgctccagggcaatggcttcggctgagtgcttgcacttctcagagccacattggca

SEQ ID NO: 220744 - DNA, 122 bp, Homo sapiens
ctaaactaaacaatgctgctcaggataaaaatgaccctgacccgctcaagggcatctgaccgggtgaaatgacaaaggaagtaaccacaccagctcttggaggccctggtgggggactcttt

SEQ ID NO: 220745 - DNA, 122 bp, Homo sapiens
ttcctcctatcgtatgttacggttacctgcagaggctggcgtcgaaggagaggtgctatgcgaggatggccccaagttaaacagtgacagcctctgccctcccagaccccaggcgcgcgggg

SEQ ID NO: 220746 - DNA, 122 bp, Homo sapiens
ttgcctccgcgagctccgcggcctcggccccggccccgtctacggctgcgaccccggccccggatgccactgccgaaacctccgcggaagccaccgcagttccccatcccagggcctccggg

SEQ ID NO: 220747 - DNA, 122 bp, Homo sapiens
gcgctccctcctccatgccctcggcgcacggcgccgcccactcacccagctgcacctctccgtgcgtccccaagctcacccgctctgaggctgcccccgctagtctagctgccgagcccgga

SEQ ID NO: 220748 - DNA, 122 bp, Homo sapiens
taggcgcgggccggctggcgggagcggacgcgggggacctccggggcctgagggctgatgcgcagccgcccccggcgggtaaggggcgggcagggcccgaaaggccacacgggcctggtgcg

SEQ ID NO: 220749 - DNA, 122 bp, Homo sapiens
acctgacaggtgcagcggcctggctggggagcccgcccgctggccggccagggatggaagcgacaggaatctcattagcatctcaattaaaggtgagcagggcggggggaggggctgaggag

SEQ ID NO: 220750 - DNA, 122 bp, Homo sapiens
cccagggaggtggcgacacccgcttcccgggccacccttttccccttcctgaccggggtccgtgcttgccttcccaggtgggggaaggtggaacactgtccatcccctggacaaaaacgctg

SEQ ID NO: 220751 - DNA, 122 bp, Homo sapiens
tccgcactgggtggggttggggctccgccgcctgctctagccattgtgcactgaggggcccgcgctaccgcgcgccgggcccgccctcttcccgccccttccgcccggcgcaccccccgtgg

SEQ ID NO: 220752 - DNA, 122 bp, Homo sapiens
tcagtgtccttacttgtgtctggggatagtaatagtaatcatacctcaaagggtggctgtcgcgcattgaaatgagagagggcacgtaaataatttagcaatgggacttgtaggtagaaagt

SEQ ID NO: 220753 - DNA, 122 bp, Homo sapiens
tttctctagtcacaaagcaataatagattaatttggtctttggctctccagcccaggactcggtttccagaatgattctgccagtttacctaagtcaaagaaaatatttatgtgataaatgt

SEQ ID NO: 220754 - DNA, 122 bp, Homo sapiens
ctgcgccgcgcttaccaggtggcacttggacaggtggcgcgaacccgccgtcgttgccgccgccgccactgacacagctcagcggtaaaacctgtcccggggccctgtctcaggcccctttc

SEQ ID NO: 220755 - DNA, 122 bp, Homo sapiens
cttgcctgccatctaacctcacatcatgcaagctgtggagaaggcccagtttccctaccacgggttctcctcctctgatcagtctaactctgtgtctggcacacatctgacaagagttgaag

SEQ ID NO: 220756 - DNA, 122 bp, Homo sapiens
gccacgccgggtacgctgccggtcgctcaagagcagcacggccccgccccgccccgcccacgcccttggggccacgcccactcccggaagcagtcctcaggtagcgcctccctttggcctgg

SEQ ID NO: 220757 - DNA, 122 bp, Homo sapiens
agtggtggggcggtggcggggacctagtgcggtggtgcggaccgaggaccaggcgcttctcgccccgacaaacttgctccggccgcgcgaagttcggattgcaagttgcgccccgcgcctgc

SEQ ID NO: 220758 - DNA, 122 bp, Homo sapiens
tctaagccgttatctatgctattctctcagccaggatgcccttcccatacccaaacaatccgtgctcacctttaagactggctgaggcatcacctcctctgagaagccacctctcccaaacc

SEQ ID NO: 220759 - DNA, 122 bp, Homo sapiens
tctgaaaaggatataaactatatgattccaactctatcggggtcccgaagccccgagctgcgggctagtaaaggtagcctgttaggaacgaggccgcacagcaggaggtgaatggtgggtga

SEQ ID NO: 220760 - DNA, 122 bp, Homo sapiens
aaacacaggaagtgacctatgctcacacttctcatggcctcggccctagtgggagcaactcgctgaagccgagggcagaactggcggaagtgacattatcaacgcgcgccaggggttcagtg

SEQ ID NO: 220761 - DNA, 122 bp, Homo sapiens
ggggctgcagggcggccgaggatgaggccggccggctgggcggggacccctccgctgccgcgccctctgaccacttggaagtttaaaaataaaggctgcggcggcggcggctccaggctcgc

SEQ ID NO: 220762 - DNA, 122 bp, Homo sapiens
gatttagtggcaggcgaacattggagccctcaaggaggtaacaataaatccacaacaggtcgaagtaccctccacatgcaaaacttcctgccggacggacggtgtccccgcagcccaggctg

SEQ ID NO: 220763 - DNA, 122 bp, Homo sapiens
cctatgccctttacggcacctgtttattttcaagtggcttcctccctcacctcctccgggcgtgtgtatcagccggcatggcgtctctgccccatgccctgggccgccaggggcccgcaggc

SEQ ID NO: 220764 - DNA, 122 bp, Homo sapiens
ctctgctcactgcaacctctgcctcccaggctcaagcaattctcatgcctcagcctcccacgtacagctgggactacaggagtgagccaccacacccggctaatttttgaattttttttttt

SEQ ID NO: 220765 - DNA, 122 bp, Homo sapiens
aaccacagtgggacgaagtgaggccgggatctccggaacccgcctctcgctaccaggcgccggagctgccgctcccgaggttcctaggagatgcagaagacactgccctgaatgcctacagc

SEQ ID NO: 220766 - DNA, 122 bp, Homo sapiens
gttgtttaaaaccatggtttggggctttcctcatcagatctgtaattcataatgaaacagcggttatttatcaaatcctttaagtcaggcagagccggtggggaggtttttgaatgtaaatt

SEQ ID NO: 220767 - DNA, 122 bp, Homo sapiens
ttttaggcacacttcttccttctttctccctctggtttctctctctttagtttctctttccggaactatgggatttttgttgcatgatagcctcttagatgtgtgatcttcatgcttaatat

SEQ ID NO: 220768 - DNA, 122 bp, Homo sapiens
atcctgcccaccgaagttctccccagccaaggcgaggcggccgcagtgcgagatacacaccgcagcctaggaagacaaatgcagcattcctaatgcagacatgacacccccattgctcatgt

SEQ ID NO: 220769 - DNA, 122 bp, Homo sapiens
gctccacgatctccccctgcagcccgaagacaaagagccgggagtcatacagtgtggagccgtagatctccttctgcacgtggaacttctcaaaggtctgtggccagtccttggccgagaag

SEQ ID NO: 220770 - DNA, 122 bp, Homo sapiens
agcctggcatcttaatgcagccagatgcatgaggtcccagttactcaggctcctgcagagcgtccattgagtgatggacaatggaagtatgatggaaacgtttctctaattgtctgaggtgg

SEQ ID NO: 220771 - DNA, 122 bp, Homo sapiens
cccaaggtagcggctgcctcagaagagccttctccgcacaataaaacttaacacaaatgccgggagcccatgctggtccgtggctggagagcagagggtggctgggagtaaaccggggcagg

SEQ ID NO: 220772 - DNA, 122 bp, Homo sapiens
ctctccctgacaaggatttaattttgaatttttctttatggcgtgggagaggccacagcccggactccatcgactcccccggctcttagactagtaagtgcaggaacgattatttctttgtt

SEQ ID NO: 220773 - DNA, 122 bp, Homo sapiens
cgcgtcttcctgtgctcactcaacatgacatctgggtggctcgttcgggctactacctgtcgctctggttcattcctatttaccgcttggtcatttgccatgtgtgatcacagaacttctgc

SEQ ID NO: 220774 - DNA, 122 bp, Homo sapiens
aaaatcacatactctctttaaaacttagttttccattgctgaaaaggggatggagagagccgttaagcacttcctcaaggttacacagggggcaaatgacaacgctgactttcaaacagaaa

SEQ ID NO: 220775 - DNA, 122 bp, Homo sapiens
gcaggagtcgcagaaggccttcgcttccgaggtggaagtacctgttgtgtctcccaattccggagtttgcgggggatgggggttgggggggcttcttgggaaaatgcttcttttcgaagcat

SEQ ID NO: 220776 - DNA, 122 bp, Homo sapiens
acacacctcctgggaaggtggcggtggcaccaggacagtggcactttgaggtacctgattcggacggccctggtcgctcagaaagtgggagagcgtctggaacctctcttgcctccagtggg

SEQ ID NO: 220777 - DNA, 122 bp, Homo sapiens
gtgggccgctatgctgcaactgaagcccagtgatctgacagtatggaagtgctttccttccgctcatccgcggccctgggctgcggcaggggggttgggtgtgtcaggtgaaaagtgctccc

SEQ ID NO: 220778 - DNA, 122 bp, Homo sapiens
gatctagggggtggatgttctgtcaccccaaaggcacaagcctagtcctttccactgccccgcatcaggtcagcaggcaaagtggcactgaccagactgctccaacaccgtcctggaggggc

SEQ ID NO: 220779 - DNA, 122 bp, Homo sapiens
ccagggaggggaagtgacgtgcccatggactcacagccagcttgcatccagagctgtaaccggaaccctgcctaggctgccaggccaggctcccagccccggcccggtcaactttgtcatgc

SEQ ID NO: 220780 - DNA, 122 bp, Homo sapiens
gaaaggcaggctgaggggaaacagcttgtcttcttccgtgaccctggtccacgggacaggcgaggaaagggttaaggcaagctgtgtccactgcgcaaccaacatggcccactttcatcctc

SEQ ID NO: 220781 - DNA, 122 bp, Homo sapiens
aacagtagctacagagttcctgctccagcaaccaggagccttgaggcagcacaaggacaccggggcgggagcgtggcccaagaagcagagacagcaacaacaacaggatgacttcatttact

SEQ ID NO: 220782 - DNA, 122 bp, Homo sapiens
accaagacatacaaaaggaaaaacatagagcctactcacgcgcctttcatagagaaatcccgcagcggaggcagtatgtttccagccccctgtgttaggatgcttcattcctgctaattgag

SEQ ID NO: 220783 - DNA, 122 bp, Homo sapiens
ataagcagtgcctccagtgagatgtccggtgagaactaagatccagcaggtggggtcatccgatggtttcggtcccttcataccttcaggttacccacctcctgcttttaccttcagctctg

SEQ ID NO: 220784 - DNA, 122 bp, Homo sapiens
gggtgcatttgtttccggggcaggtgttgggcccgctggggctgggccaggagtgagctccgggttctgggctggggcacgctcctccacttcttctgcctccatgggctcccggggaggtg

SEQ ID NO: 220785 - DNA, 122 bp, Homo sapiens
ggcgccgggcaagggcatcgtgtgggagtgggagaacgacggcggcgcatggacggcctacgatatggacatctgcatcaccatccagaacgcctacgagaagcagcacccgtggctcgacc

SEQ ID NO: 220786 - DNA, 122 bp, Homo sapiens
aaccctggggtctgcactcctgtacgtccgtgactgatgcagatgctccggctttgggaacgctgctgagagcgccagagccacaaggtgcttgtgctgctgctgcaccgcccacggggctc

SEQ ID NO: 220787 - DNA, 122 bp, Homo sapiens
tcaaaatgatttttctggctgtttgacagcttgaatctccagcgctgcactcctgtatcccggagggactgactgtttcctggcctcagctctctgaacgtgaagctcaggctttgcttcag

SEQ ID NO: 220788 - DNA, 122 bp, Homo sapiens
tgccaacaactccatgagggaactgtggttacacaggctcagggcttgcccgaggttcgccgggagccgaggtcctcagtcaggcctgtcagactctgaagcctgtgacctttctgctccac

SEQ ID NO: 220789 - DNA, 122 bp, Homo sapiens
gttctctccaatgcgaacgtactcctgtgatctctggcggcattcccattgtgttcaggccgtgttgatgttaacacgctgtctgtagcgtggcgcgagggtgtgtgctttttctgatcaca

SEQ ID NO: 220790 - DNA, 122 bp, Homo sapiens
cccgctccgcgtcccgcccagcggcgcagggggccgggctccggctaggagggtgggggccgcgccggtgacagccgatccccgcccctgctgcccgccacgtccctcacgtaccactcggc

SEQ ID NO: 220791 - DNA, 122 bp, Homo sapiens
caggcttcgggacgaggtcgcgcaccgcgcagaaaccggaaggctcctggcggtggactgcgccctcacagccctacgctgagagagaatcggcgtgagtctccgccctcagagcctacgac

SEQ ID NO: 220792 - DNA, 122 bp, Homo sapiens
atagaaggctccacacaccgcgcgcgggtcagcgacgtcgccgccctccacactgccccccgaaatataagacaagcgaatgatcagaagaaatgagatctaactaggtcacagtatgtaaa

SEQ ID NO: 220793 - DNA, 122 bp, Homo sapiens
ccacttccgccgggcaagcgtttgtaggcggcgctgccgtaaatcaggcggtctgcttgccgcatcacgcaagatggcggccgcggcggtgaacggggcggcaggcttctcgagctccgggc

SEQ ID NO: 220794 - DNA, 122 bp, Homo sapiens
tcctgtttctgccatcagtggggccacaggcctgaagacggcttgtaccgccaccttgggcgcctctgctcctggctgcgacgtggggcgtcctagccttcggaccgggaacctgataggag

SEQ ID NO: 220795 - DNA, 122 bp, Homo sapiens
cacaccagaagggaggcccagggaggaaggagttgcagagatgaaagggtaggcagcccacggccagctccgcactgcctgcctgggccctcccagctgggctcccttgagcccctccccca

SEQ ID NO: 220796 - DNA, 122 bp, Homo sapiens
caggtcttgaggcctttcctgtcatttgtgatcagacatctgccccatttccttaggtggcgaagcgccccctctttcagcctccaaatgtggaaaattgtggagcatgtgctcaaaaggaa

SEQ ID NO: 220797 - DNA, 122 bp, Homo sapiens
agggaactagacctgcaaacatgacacccacagccttgcagcaggagggcctggcggggtcgtgggtggcgtggccccgtttctacacctggggaaactgaggcacagcccaaggtcataca

SEQ ID NO: 220798 - DNA, 122 bp, Homo sapiens
tataacttttaggatctatgtaagtgatgcaaaatatataataagtatagatccaatccacggatgaaaagttgatgagctcattcaaaaagtctctcagtcaagaatatacctaatttcca

SEQ ID NO: 220799 - DNA, 122 bp, Homo sapiens
gggcgcagcgggggagggggcgggcagagacccggaaagctccgcagaccgccgtgggtgcgactgtgcggcctggggagtgagcctcgcgccaccgccgctgcaggccggggagcccaggt

SEQ ID NO: 220800 - DNA, 122 bp, Homo sapiens
caaacaggaaggctgggcaggtctcaaacggagaagtgggggccgagacccctgtggccacgcagcctgggcggcctagttctgagcccagcctgcacagcccttgccaggccctgaccccc

SEQ ID NO: 220801 - DNA, 122 bp, Homo sapiens
agggaggtagtgaaagggaagctggccggacaggcagggccattccaagagggctttgtgcgcagggctaagccaagctttctccataggcaatggggagcaactggaggttcgtagcagga

SEQ ID NO: 220802 - DNA, 122 bp, Homo sapiens
ccttcataatgactgttatgtttctctttaagacattcttgtggagtgggttggaagacacgtagaatcctatgttagagatgcagaaattgtttcacttattcaagggctacaggctctga

SEQ ID NO: 220803 - DNA, 122 bp, Homo sapiens
gctgttggtagaggggtgtctgggagcgacagagggcttcatcttgctgatttcccgttccgctcggttctctaggttgaaattcctgataccgcgaatcactagtgctcccatctcctcat

SEQ ID NO: 220804 - DNA, 122 bp, Homo sapiens
gacagtttacgttcccagctggttggtgagatatgcttgtccggggaccactttaggaaccgctgacctgaagtttcgggaagacattgaacggagagccagatagaggcgttggtgggacg

SEQ ID NO: 220805 - DNA, 122 bp, Homo sapiens
agccaattactagacggtattctcagacgggccgcctccattgccaatgaaatcttccagcggggtcgcggtaggcgggccgtggaccctctggtataaggcggtcccgggggagtgaggag

SEQ ID NO: 220806 - DNA, 122 bp, Homo sapiens
aactttggcaggttttaaagtctgtgggaagccaagcactttctccataggagactgctacggggaaaaatggaacccgtgtcctctaagttaggttacggagttactcgttttaagagttc

SEQ ID NO: 220807 - DNA, 122 bp, Homo sapiens
aggacgcgggggaagggctgtcggggaccgtgtccctccacgtggcggggcgtggggaggcgcacgtggggtccctccgtgttgggagccccaggccagcctccgggctttgtgtgccatgc

SEQ ID NO: 220808 - DNA, 122 bp, Homo sapiens
cgctgcggaaggagaaggcacctagactgtactgggaaggctcctggagttgacctggagcgccaggaaaggtcagtggaggaaagtgctccaagcagagggaagagcttgtgccaaggccc

SEQ ID NO: 220809 - DNA, 122 bp, Homo sapiens
ggtcccgccgagccaatcggaaggttcaaccttcacacgtgccctggcacttgggaaacccgggctgagacaaggtccggtcacgtgaccaaagagttgccgtttctttggcctctctagcc

SEQ ID NO: 220810 - DNA, 122 bp, Homo sapiens
cagccatgtagaatgaaccgtccagagagccaagcacggcagaggactgcaggccatcagcgtgcactgttcgtatttggagttcatgcaaaatgagtgtgttttagctgctcttgccacaa

SEQ ID NO: 220811 - DNA, 122 bp, Homo sapiens
gccaactcattcttactcctttctcctggggtccgatgctagggcaccacggtgaccagccgcgcagcgggcagcggcccgcgccgcgcccaccgcctgcggaggctgggtctgggtctggg

SEQ ID NO: 220812 - DNA, 122 bp, Homo sapiens
taggaaggtgcaatgcaagccaattgtttactgtatcttgtccgctcccagagctgcgcccgagctctcgcgttaactaggcaacatcgttgccacggtaactgggaggcgcgggagggcga

SEQ ID NO: 220813 - DNA, 122 bp, Homo sapiens
gaagggctaaatcgataatcacagttggcttatttaccatcatttgtgtaggtttaactacgtggacacatttcctcacattgatttcagcactggaagggaacacttagtgatcatctctt

SEQ ID NO: 220814 - DNA, 122 bp, Homo sapiens
tgcccaccgcgacttcaagagccgcaatgtgctggtcaagagcaacctgcagtgttgcatcgccgacctgggtgagccgggcggggcaggggcgcgcccttcacaggtgggcggagcttgtg

SEQ ID NO: 220815 - DNA, 122 bp, Homo sapiens
actcccagaactgccccccaagtatgggagcgtccagccctgaggcgctcctggcctagacgaggcttcattgcatcaatttgcaccacggtttcagaaaagtgggaaagggtgaaggtgtc

SEQ ID NO: 220816 - DNA, 122 bp, Homo sapiens
aaccaccggaagcggggatgcttccaggtcataggtggattcgaagattttctgattggccgttggttgaaagagttattgtcggtagataggaatgtctgggttaagataatgggttgtgc

SEQ ID NO: 220817 - DNA, 122 bp, Homo sapiens
aaaccaagaaattggcggtgcagctctgcatgacgtcataccacaggcactccaatcccacgtgggggagctcttggtcccgcctctcctgaaatggtgcgccacgcctcctcctctttatt

SEQ ID NO: 220818 - DNA, 122 bp, Homo sapiens
gcacacctcaggcctcaaatgacttgtttcgcctagaatcaactcccgtctcggccgcctcgaagtccccagccctggcgagaacagcccaggatgagtgaatgtttgccgaacaggatcgc

SEQ ID NO: 220819 - DNA, 122 bp, Homo sapiens
atgaccagatagttatttgctttaggtcagttcattcactgatgcaagaatatcactcctcgaaggtcatactgcaaaaagatgtatttcattcaaatgagtgttttggcttgtactttcta

SEQ ID NO: 220820 - DNA, 122 bp, Homo sapiens
accgcagaaacacacccaacattaaccaaaatggtcgctaccagagaacgctgagaatcccgccactacgttacgtgcgcacacagaaacgcctttattctgagcccttactggttctgttg

SEQ ID NO: 220821 - DNA, 122 bp, Homo sapiens
tccaattgcatgtgtccctcgtgcatgaggactttcagcatgtggcctctttaatttacccgtattgctagttcccttctttctgcaattctccctctcactggtttagattctaagataca

SEQ ID NO: 220822 - DNA, 122 bp, Homo sapiens
cagcccgatcccaggaacaatttgagagtgtcattcaacccagacaatcctgcacagacacgggggagctggcaattgtaccctccatggtgtcactctcctggccatgagtgacaggtggc

SEQ ID NO: 220823 - DNA, 122 bp, Homo sapiens
tgctatgtaataagccactcctacccttagcagattcattttatcatctctcaatttttgcgactgttctctgagcatctctcttacagttgtaatcagaccgccgctggagtgcctggagc

SEQ ID NO: 220824 - DNA, 122 bp, Homo sapiens
ctcctcccagacaaatggctgttggcaggaaattggacgcgctcgggggaagccgcgcgccgcggggagggggcgccgcgcggccagcgggcctcgggtgcccccagccggggcgggggcgg

SEQ ID NO: 220825 - DNA, 122 bp, Homo sapiens
ctagatctgccagtgactggcacttccttcccgccagctgacctcccgggcaccttctctcgctggcccaaggcagagggctgcacgggacagactctcccagccacaagtacctgcaggca

SEQ ID NO: 220826 - DNA, 122 bp, Homo sapiens
cagctcacggctctgctagacagctctagggtttagggagctcttccctcccccctaccacgcccatgcacacgtcctaattctcgctttggaatcatacacccatgtctacttgtctgttt

SEQ ID NO: 220827 - DNA, 122 bp, Homo sapiens
cgccctcgcggtgcccccggcccgcccgggtctgtgccaaggagaacactgctccgccttcgctgtatctccgaagtctgtgcacaggagaactcagctccgccctcgcgatgctctccgag

SEQ ID NO: 220828 - DNA, 122 bp, Homo sapiens
tctttttttctcagtgaaacaaggcccagtcaccagcataacaatccagtgagcgacctccggacactttgttaaattgagtgaactagtcagtaacattctagactgcaattaaacatcag

SEQ ID NO: 220829 - DNA, 122 bp, Homo sapiens
gaagatattactgacaataacgtgaacacgctgtgtgaccaccgaggatcctcatattcacggggggagagggggttgataggactcccccctttttcctgggatcttttgtctactgcccc

SEQ ID NO: 220830 - DNA, 122 bp, Homo sapiens
tctctctctaaatctttctctttcttccttctaaatttcagcagccacatagatggcacacgttccaaaagatgaggttgatgatcctttgaccaatcagaagaataacaaattttatggac

SEQ ID NO: 220831 - DNA, 122 bp, Homo sapiens
tccttctccaccttcaaaagaaaacacgaaatcacatcactgctgcactccagaactaagcgacagcgctgcaccactattttcaacctaaggcccaagtctaaattagccaacttgagaag

SEQ ID NO: 220832 - DNA, 122 bp, Homo sapiens
aagagccttcttcaaactccgcccccgacacgcacaaagccggggaccctcggccagttccggccccgcccattaaaggagacgcacagtcctggaaaagaaaaggcgccgagaccccgcag

SEQ ID NO: 220833 - DNA, 122 bp, Homo sapiens
tgtgccgagtgttggcctcttccccgaaagggccagacggaccaagggggccttcccagccggctgcaagctctcagacgctaaaatgggaacaaagcttccagaaaggcagcgcctttggg

SEQ ID NO: 220834 - DNA, 122 bp, Homo sapiens
ccgggcgcgcgggggtgcagggcaggggctggaggaccgcgctctaatttctgagagtggcgggcttggggggccaccgggcgcctccggactcccttccccagggccggctccggacggag

SEQ ID NO: 220835 - DNA, 122 bp, Homo sapiens
atgcccagcacgtgggccaccggccctcctggcccctgctctgggtaaccctggcccccccgcccgcgaatcctcacagcccccacacccccgggcctggcactttcagtgcccccgctccc

SEQ ID NO: 220836 - DNA, 122 bp, Homo sapiens
ttcctccagcgaggctcatacaaaacctggacgtggatttaaaactagttcccggcagggcggtgttcttggtgcttttcctctcggccgcagcttctgccgccctcagggccccgtggctc

SEQ ID NO: 220837 - DNA, 122 bp, Homo sapiens
ttggactccctaaaaaggtttccgtttccacttccgtccagggagacttccgggagagcccggcgctccccgccacgcatccagcccctctacctccggcctccggcggactctatggtcgc

SEQ ID NO: 220838 - DNA, 122 bp, Homo sapiens
ggcatcagctccagcaccaccctcggcttccgcatcgagggcatcaaggtgaggcaggcgcgcttcgctggcaccgccgcagccccactgcgcgctgtctttcccgatcccccgctcccgcc

SEQ ID NO: 220839 - DNA, 122 bp, Homo sapiens
gctcctctgagcgcacgcgtactcaaatagcagcgctccgacggagacgcagtgcgcctgcgcaagagccggtgcgtatttgcctgtacctacgcgcgatgccagtacttctggtcagtttc

SEQ ID NO: 220840 - DNA, 122 bp, Homo sapiens
gcattgtgagtgggtgtgaggaggtgccaccgagatagagcagttaggaggctatttcaccgttggccagaagacagtggagtctatgaatctatgctcatgagagaggctggggcttgaga

SEQ ID NO: 220841 - DNA, 122 bp, Homo sapiens
atggatgaaaggaagagtgagccaataaacgagggaacgccgggaaaggcagcctcaagccggtgggccctgccacccccaccgtccctgagcatccgagccggttcccgcccccggcccga

SEQ ID NO: 220842 - DNA, 122 bp, Homo sapiens
ttgccgcctgacaacggcccacgtgtgcccagcactgggctgcctctcgcatttggcagccgggtcctgctggcgcctctgcccagcgctctcccacccaacgcctgtgctgtgaaggctct

SEQ ID NO: 220843 - DNA, 122 bp, Homo sapiens
agctaagcaactggcctttgtttgtgaattggagcagtttaggggacatcctccggtcgccgcggggcgcgcgcctccgctgagtgtgcggtgcggtacccagcggtgcgggggaggctcca

SEQ ID NO: 220844 - DNA, 122 bp, Homo sapiens
ctcgcggcacgccactctcccggaggcggtggctagatggggctgggctggcggctagcacggcctgtggcgcgacgaccgctgtatttgcatggttcgcataggcagagaaccgtggggct

SEQ ID NO: 220845 - DNA, 122 bp, Homo sapiens
aacaccaggccttaaaatgaagtgctgccagattaatgaacagttccagaatctaatgagcggtttctaatgtctggagggcctcctttatggggagtttgccaggactgggaatgggccta

SEQ ID NO: 220846 - DNA, 122 bp, Homo sapiens
gatggtaactggtaaacaaaagcacagagacattctgaggtagaggaatgcatttgtaagcgtacaactgtttgctcttttcaggaacgtggaagtatgctcggtcatacaatgagaggaag

SEQ ID NO: 220847 - DNA, 122 bp, Homo sapiens
gcgcgccagctgggacgaggcccgggaagcccaggagcacggctgcgcctgcgtactgggcgcagggaactttttcgcgcttcgccgtcccctctggtctgaacttgggaacgacacgagct

SEQ ID NO: 220848 - DNA, 122 bp, Homo sapiens
tctgtcccctgctttttcctggtcacatcccctgttgcttcaactcttttttctggcatccgggtttatgctcccaccctgtcagtggtcccctaggggtcaggggctccacctcctacagc

SEQ ID NO: 220849 - DNA, 122 bp, Homo sapiens
tatcttatccatatggacaggcgcccctcatgcattgacttataggctctccacaggggtcgcattccattcccagagctatgaacatctgcttttctgggatgggaatcttggtgatgtga

SEQ ID NO: 220850 - DNA, 122 bp, Homo sapiens
ctctgttccctcactcacctgctagaacagcctggattcgctgagtggcctctctcactgcggccagggctcgggatccccctctcatcccttctccctcaggatcccaagctccatctgat

SEQ ID NO: 220851 - DNA, 122 bp, Homo sapiens
ttaccccaacaaatgtttaaattaaacagataccacagaggatgcaccctgtttgctccacggcattcctgacccctggcacacaacagaagtataaaaacattttagccagtacaacttta

SEQ ID NO: 220852 - DNA, 122 bp, Homo sapiens
ggagaccgagggggcagtaactgtcaaacctcgccgcttggcgccattatttaaatggaacgtgcctgtctcgcagctgtacgtgcccggggcggggcttcgagcgccctgagcggggcgga

SEQ ID NO: 220853 - DNA, 122 bp, Homo sapiens
acatattcttccagggaatggtctgcactttcccaggggcaggggtgcctgagttaaggtcgtgggggcagtctccatctcccagagatgattagttattttctccgtgggtaagctatgga

SEQ ID NO: 220854 - DNA, 122 bp, Homo sapiens
ccaaattcaacattaagggccaaccctgaccacagctgagccgtgtgaagaggctgacagcggcgtggccaccacccaggatggagagaaaggcactgtgaggtgttaatggaaaaatccaa

SEQ ID NO: 220855 - DNA, 122 bp, Homo sapiens
ttgacaactaatacaggactcagcgccggtggacaggaagccagggcccctgcagggaggcgcccgtcccttctcccggggagggcagggcgggcgcgcgcgcgtcccaccgggagcgcctc

SEQ ID NO: 220856 - DNA, 122 bp, Homo sapiens
tttcctgcaaccaccgttaggttgccacacagagtagtggtgtccttcaagtcctctgtgcgccccctcatcttctctcccctagcatttggtcttttccagaatgtcctatagttggactc

SEQ ID NO: 220857 - DNA, 122 bp, Homo sapiens
acctcgtcaccaagctccgttctgcctccggagccctaaaacaccaaaaggggctcgggacgcgggcggtgctgcttggggagcctcggtgacaagtgttcagtgaggtgtgccgcacgctg

SEQ ID NO: 220858 - DNA, 122 bp, Homo sapiens
gtaacagaggcaattcttgtttctcattcccaagggaatgtaggaagggccccctgtcctcgggagagggctgtgtttcctgctcacactcatgtccacgctcacatgtgcacctggagcct

SEQ ID NO: 220859 - DNA, 122 bp, Homo sapiens
gccagagccatttgtgtcctctcacacctaaagaaaacacaaatactggtaggaaaagcccgctcctccagcctcatccctgccctgatgactcagggagaaaccacacagtaatttaccta

SEQ ID NO: 220860 - DNA, 122 bp, Homo sapiens
cttccactgttgtgtttttaattttgttctgctgtgacagatgcagcagagctcagactccgctgcatctaccgggaatgattctctcagaagctcaagctgcaccaagctcctccctccca

SEQ ID NO: 220861 - DNA, 122 bp, Homo sapiens
cccccagcctggctgagtccacggcgcctccctgcccagccctcgggagaggggagagggcgctggctcctgggtagttccaaagtggagtgtgaaaatagagagatatatatatttatatg

SEQ ID NO: 220862 - DNA, 122 bp, Homo sapiens
ggagactcagaggagcagcagccgcacctgagccctttccaaagctgaggcaggtgcgggcggccctggacaccccgtggcgagtccccgaggcggggctggcagcctctggcggcggccgc

SEQ ID NO: 220863 - DNA, 122 bp, Homo sapiens
ccaggattgtgtgccggggacagcgctccacagggcgagatggagcggacagagagaggacgccgatgctgtttcggcagccttgggtggcttaaaacaaaagaaaaaagatgtgcctagat

SEQ ID NO: 220864 - DNA, 122 bp, Homo sapiens
gggctgctccgatagggccgggcgggtcatctgagcggcgcagccaatggagtggctgggcggccccggggatggccaggcccgccagccaatcaggcacccgtgcccgccccgcctgcccc

SEQ ID NO: 220865 - DNA, 122 bp, Homo sapiens
gttatgggtcggctgggtgactctgggtcctggccacccggtctctgaagctgggttgcacgcgtgtccaggtccacggaaggctgcagtacccgcgcagccccggcatcacctggcgtcac

SEQ ID NO: 220866 - DNA, 122 bp, Homo sapiens
tgagtttatccattaatataataagagtcctcaggggtctcttctgttaagtgctctttccgttctcctgaagtggcaccaggggactgctccactgctcctcttggcagggtgtttttaca

SEQ ID NO: 220867 - DNA, 122 bp, Homo sapiens
taccattcatatgaaactatagctcaattctttgttgtttctcaagacaagctccttttccggaaattatgttagatttaagcagtgagatttgcagagactttgaaaaagaaatagttttc

SEQ ID NO: 220868 - DNA, 122 bp, Homo sapiens
agcgcgtagtagtggcggggcggggaggcggtggtggttcggcgcggggctcgctcggagcgcacggacgcacgcacgctggtccgtctgcccgcccggggccggaggtcgacccggcgctg

SEQ ID NO: 220869 - DNA, 122 bp, Homo sapiens
ggaactggttagtacaagtctctttatgtgtcccttactctacaatcatgcacctagggtcgtgcaaacatcctgaaaccaacccaagctctaggagtcagaaaaggccctgaatgcatctt

SEQ ID NO: 220870 - DNA, 122 bp, Homo sapiens
acccaccccaacctcttgctgttcctaacagatttactactgggaggcagacagccagaacgaaacggagaaaatgaaggtcctcttcctccccgagcccgtggtgaggctgaagaacctga

SEQ ID NO: 220871 - DNA, 122 bp, Homo sapiens
tagaggtaattgcatcctgctgtgtacagttaggtcgtggaggagacaggcaccttctctcgtctttctggaaggtaaccagaggtctttcccctttcctatcatggcagctgctcagtcgc

SEQ ID NO: 220872 - DNA, 122 bp, Homo sapiens
aatccttcttttgcctttttttttttttttttttgacaaagcactcatattttgtttgtccgtctcccctactggaatgcaatcaccctgaggtatggatttttgactattttgttcactgc

SEQ ID NO: 220873 - DNA, 122 bp, Homo sapiens
gcggtaacaccagcgtctgggaagacacccgtggccaggcggactgtggtgtagcggtagcgtaagtgtcaaggaaaaacacccgctacttagcagaccgggaaagggagtctccctttccc

SEQ ID NO: 220874 - DNA, 122 bp, Homo sapiens
ggcggcctggccgaaagcggggctgcgggcccggaggcattgtcggggcgtgggcgggggcgggagggttcgaggccggccggtgggcgtgggcgggagctggctggggtgtgccccaactt

SEQ ID NO: 220875 - DNA, 122 bp, Homo sapiens
cacccagctgttaagtggcaatgtcaggattaggaagctaaagccctcctcctttccagacgctcagagcctgggatgagttctctgtgtctgggagcagggagttgccaaagaccaggctg

SEQ ID NO: 220876 - DNA, 122 bp, Homo sapiens
ggaccgagcagccctcttgcccggtcgggtcagccctagtggctgcctgcacactgtagacgtcccagggcctgtgctgtgatcacctgcctttggaccacatttgtgtttgctcttagaga

SEQ ID NO: 220877 - DNA, 122 bp, Homo sapiens
acatacacacagagaggtgaagtggctggcaacatttccaccctacttacaggcaaaatgcgaacttgaacctgcctggttttattgcaaagacagtgcatttagccgttatagttgactaa

SEQ ID NO: 220878 - DNA, 122 bp, Homo sapiens
ccgcctcgccggggcccaagccatctttgaggcccagcagctggcaggagtgcgacgaggcgccaagcctgaggtgcctcggattgtggtgcagcccccggaggagcccagaccaccgcggc

SEQ ID NO: 220879 - DNA, 122 bp, Homo sapiens
aatgacccgtagcgtttggaacttgtgttcaggcacctgacacaactccacatttatgaacgcaaaagtgcctgtacagtcttttcctgaatcacatgtgtgtgggaagagcaatgagcttt

SEQ ID NO: 220880 - DNA, 122 bp, Homo sapiens
gcttctcctctacgcggccggaccccagggacgccccaggcgcggccagcccgccccacacggcccgcagcgccgccccgccacattggaccagcactggcagcagtcgcccggccaccagc

SEQ ID NO: 220881 - DNA, 122 bp, Homo sapiens
gtaagacccactggaagttcagagaaaactgaagaactatattgggcttttcatggggcacggaatccaatcttatttacagcttaaaaggtaagaggacctcaggtaactgttagcccaag

SEQ ID NO: 220882 - DNA, 122 bp, Homo sapiens
gctggtgagtgaaagcttaatcacgttttttcagttttcacagcacaccagaaactgaagcggggattgccccagcccttatctatgacagtcagccacgaagctttccaccgcagaacaat

SEQ ID NO: 220883 - DNA, 122 bp, Homo sapiens
attttaaaaaatttcaaatagacaatacctaaaaactacttttaaaatatgctatggggccgggcacagtggctcaggcctataatcccagcactttgagaggccgaggtgagtggatcact

SEQ ID NO: 220884 - DNA, 122 bp, Homo sapiens
tgcatgtggtccctttccctcctgttgttgagcagaataaaagcccattttgccagggcccgcagtcctggcggcccccgcagctgcggccctgtaactttaaacctggcctgagatcatcg

SEQ ID NO: 220885 - DNA, 122 bp, Homo sapiens
aaccagaggccggggaggagccgcccacgcagggggccgagggctgaggccaggcaatcacgggctatgcccggggagctgtcgggagtggcgggaatcggggccatgcccggggagctgtc

SEQ ID NO: 220886 - DNA, 122 bp, Homo sapiens
aggctgaggcaggagaattgcttgaacccgggaggcggaggtttcggtgaaccgagatcacgccatggcactccagcccaggcaacaagaacgaaactccgtctcaaaaaaatttaaggccg

SEQ ID NO: 220887 - DNA, 122 bp, Homo sapiens
ccacgggcagatgcagatgcctcgagccagacgggcccacaggccccgggaccaggcggccgccctcgtgcccaaggcaggactggccaagcccccagctgctgccaaatccagcccttccc

SEQ ID NO: 220888 - DNA, 122 bp, Homo sapiens
atgtcctcagtcttcctcaggccttcagtgtgtgtcactgagtggacctctgtgacatctcgtcttcctcaggccttcagtgtgtgtttgtcactgagtggacctctgtgacatctcgtctt

SEQ ID NO: 220889 - DNA, 122 bp, Homo sapiens
tacataatacatttctttctctgattttcttcagaaatccagaggcagcactttctcccacggaagtgcatggctgctgtgtaacaaccaagcactattccgcctctgtttccccttctcca

SEQ ID NO: 220890 - DNA, 122 bp, Homo sapiens
gcagaccccatgccttgccaccctcgaccctgatacgcgatgccaatagacacactgctgcggaaaccataaacgtcaccagattcagagcttgagcccacctctcccagaggttttgtccg

SEQ ID NO: 220891 - DNA, 122 bp, Homo sapiens
tgctcggagagccggcctgtcgcgggaggaagcggtgtgggccgcgggcggcgcacgccgcgcagttgttgtgatacagcccccgccacgtgactgcgcgggcccgcctcccccgcgcgcgg

SEQ ID NO: 220892 - DNA, 122 bp, Homo sapiens
aactcctgaagaccaaaaaaatggtgataaaaaagacaccttcctaactttttagtgctacgatccaagagacaaacaagcaggtgaacgcataactacactgggctccaccataagccaga

SEQ ID NO: 220893 - DNA, 122 bp, Homo sapiens
gctctttaattaactttaatcctccaaaaatccatgctgcaatctgttctgacaatcccacgctccttaggaggccctcggcacgacctggcacatcctgtgggctggaggtggccggaatg

SEQ ID NO: 220894 - DNA, 122 bp, Homo sapiens
cttgagttttccccgccctcacctccgaaaatgctcttttcgccttagaattgtagctagcgcagggaaaaactgactgggcaaaggaaaactggggaggctgtcatggaagccgcccagaa

SEQ ID NO: 220895 - DNA, 122 bp, Homo sapiens
aacactggcagcacctattgaggccatgtttcaggatcagaccatgctggtttgagcagacgcagcaagagtgagaaccccggccgaattttcatgggtggctctagtagagctgctggtga

SEQ ID NO: 220896 - DNA, 122 bp, Homo sapiens
tctaggacatttagttgtcttagtgtgaagtttgacccaagcccaaggcctttttcaaggcgtccttaaattccttgttcctcaggcagtaaatcaaagggttaattattggcgtgacaaca

SEQ ID NO: 220897 - DNA, 122 bp, Homo sapiens
ggacagaggagcccagggtgggtcgggggagcgccggtggtcagcgttcaccacacccttcgccgggtggcatcctggcctctggcccgcgtgggagcgcctcctgttgggaggtggtgaca

SEQ ID NO: 220898 - DNA, 122 bp, Homo sapiens
ccatcattactgtactgagcgaatgagttttccatgagactaagaatctggtttgatttgcggttccattccaagtgcctgagggcctcagaagtccgtgttgagtccatcaataaaggaaa

SEQ ID NO: 220899 - DNA, 122 bp, Homo sapiens
gactggtgcgcggccaggtcactcagggcggcggggcgaggtgtgcgggagtgggcaggacgggtgggaggaggggaggggtgggagaaggcggggctcaggtgcctggcagcgcggccggg

SEQ ID NO: 220900 - DNA, 122 bp, Homo sapiens
tgaacatctgaggactggtcctggaaccaatctcccacagatactgggtactgagggatgcgactgtatgcactttgtggtccatggggcctgtaacaaggaatgggaaatacctaccttca

SEQ ID NO: 220901 - DNA, 122 bp, Homo sapiens
aggactttgcaatgaggagccccccgtatcccaaccccatatcccacccctggggcaggacgcgttccccctgcacgcctgtgcccagaggggctccgtgctcagttcctgttatctctgct

SEQ ID NO: 220902 - DNA, 122 bp, Homo sapiens
gttgtgtccagcactggggaccgcccacaggcgtgacttgagccctgtttccagcctctgcgcggggttgcccagacgcccctccagggcgtgacgccactgccccctggtggccgcggctg

SEQ ID NO: 220903 - DNA, 122 bp, Homo sapiens
gtggtctggcggccgattgtgcttctgggctccgcggggctacctgccagtgattttgtgcgcctagtatgtgccagaacgttatttacaatgaaggaaactgaggtccagcggggaagggt

SEQ ID NO: 220904 - DNA, 122 bp, Homo sapiens
ttgaaaatcgttagtgctttgactgccgtgagtccaaagggaagtggagaaaacgggcaacgatcaccaagagctattttgggtttccacgagaagtaacagcaagccaagatctcccggac

SEQ ID NO: 220905 - DNA, 122 bp, Homo sapiens
cagtatccagagctgtacaccctctgggcccggagcccagcctgactttcgttctgcatacgctcctgggacctgggctccacagagacatccgagaccattcctgctcccggggccctgcc

SEQ ID NO: 220906 - DNA, 122 bp, Homo sapiens
acagcatttgactcatctaaaatgggcaatgtagtaaattcgtgtctaaaagcttttctacggattgtaggaagtgttcaaagtcaccagttactatagaaagaagggaaggtgggcgggta

SEQ ID NO: 220907 - DNA, 122 bp, Homo sapiens
aataaaaggggcgaaaagggggcaagtccgcaccttgaggatggcgtgcccattgcgatgcgggtgttcacagccacgactctcaccagccacgctacacggagaggaagtcaccgcggacg

SEQ ID NO: 220908 - DNA, 122 bp, Homo sapiens
gacagccctttccctgagtcagggtgataggaggggtgggaaagagaaggagggaggaaacgaaagagagaagcttgaagttttctagctgtaactgagtaagtcatctctatcagaagagg

SEQ ID NO: 220909 - DNA, 122 bp, Homo sapiens
tcagttcctcccataagggtcaaagccagcactgcttgaactcaggactgacacgcaggccgagaccatggcctggcttttcagccctacttcttacacaaccactcgtccgccctcctcag

SEQ ID NO: 220910 - DNA, 122 bp, Homo sapiens
aataatgcattttctgaaaaaaattatgcatgtcacttgtattttttgtactttatgtgccggaagaacattgtatacaaatatgtcccatgtgcatgtatgaatttatatagctacatgta

SEQ ID NO: 220911 - DNA, 122 bp, Homo sapiens
tcccttggatgagaaaaccaagactcccttctcccctcaggctggtgaattccaacatcccggggcacattatggaagctatcaggcagtaggggctcatggaggttagtgacaactggagg

SEQ ID NO: 220912 - DNA, 122 bp, Homo sapiens
tcccctgataggtgaaaaataaatgagagagtgcagtttcttttgatttttctaaagcttcgtcaatgtattcaataaatttggatttatcagccatggtggctccctgtaaaagaacctgc

SEQ ID NO: 220913 - DNA, 122 bp, Homo sapiens
tcgcgtctggtcgcctacccctcgcggtccactccgcccagcatggacctggatccggggcgccttggttgcgaattgccaggagggccctgaggtgagctttctgcccccaaatccgcagc

SEQ ID NO: 220914 - DNA, 122 bp, Homo sapiens
ttttcaccaactcagcaaagcacatacatagaaactgctacccaatgagtaatttcacaacgtatatattttcacctttaagaggatttatataaggatttaaaatcaaatacatttaaagt

SEQ ID NO: 220915 - DNA, 122 bp, Homo sapiens
cttaagggttgtagaggcatgaagatccatcttctgtaacttcttcaggctgaatagaggcgatgatattcctgcctaactattagagtctcttgggtttggtgcagagaggaactgagtaa

SEQ ID NO: 220916 - DNA, 122 bp, Homo sapiens
caaactcctgggctcaagtgatcctcccacctcagcctcccaaagtgctgggattacaggcgtgagctaccatactcagccagtgtttattaaaaagtaaagtttttattaagccaaagagc

SEQ ID NO: 220917 - DNA, 122 bp, Homo sapiens
gagaaagtcaggaaagccaggatagctagaaggaagagagcagaggaggcagggaggagacgctatcaaaggctggacaaaggccagacaggtatgattttacagactgcatgaggactgca

SEQ ID NO: 220918 - DNA, 122 bp, Homo sapiens
ggaggaacagggaagggcaagggtggggaccttggctggaaggttcaatgcaaagtgaggcgacatccaggattgagcattctggatcctagacccagggatggctgggaggtggggctccc

SEQ ID NO: 220919 - DNA, 122 bp, Homo sapiens
ggaggcagggtttgagagcaaacaacccgtctgactaaaatttactgggcgggatttcctcgtcctaataagcctgggagcactacccaaaaccagggcttatttcatcccttatctgcaac

SEQ ID NO: 220920 - DNA, 122 bp, Homo sapiens
ggagtgggctgagggaagattggccctggggctgttgggagaagtttcagggactccctccgcaccccggcggtgtcaccactttctcagcccctctcgctactgaagcgcttttctctctc

SEQ ID NO: 220921 - DNA, 122 bp, Homo sapiens
agctctgttttcactctattaaatcttgcaactgcacgctcttctggtccgtgtttgttacggctcgaggtgagctttcgctcgccatccaccactgctgttcaccgccatcccagacccgc

SEQ ID NO: 220922 - DNA, 122 bp, Homo sapiens
agggggtggggtgggaatgggggcgggcgcgtccctccctagggtgtcccctccgacgcccgctcctctggacctctgccgtggagccccccgggctacccccaactccccggccccggccg

SEQ ID NO: 220923 - DNA, 122 bp, Homo sapiens
tcccgcgcctggtgaccgccgactcgccctcccgggctccaggctgtccccactcccccccgccccaaccccagcatgttgaggcgcctggtcccaactgcccattcactccctgtacacag

SEQ ID NO: 220924 - DNA, 122 bp, Homo sapiens
tagaaggtgtgtgtgtggatcacctactgtggggcatggtgcgcgcaaagacgaaggtggcggcgctgcagcccacggtgtgcgccgcgtggttgcaggcatggatgtcgatccggtattcc

SEQ ID NO: 220925 - DNA, 122 bp, Homo sapiens
ctttaatcaggaacacagaaggggcgggccctgagccggcgcgtaatcggatagctctgccgcggctctgacatccacatgctgctcggcctgaaaaggcagtggggagccggaggggaggc

SEQ ID NO: 220926 - DNA, 122 bp, Homo sapiens
gaagcgcagcctcccaggcggagggccagcgaggcaggagagcgcgcgcaaacataaacacgagactgttgcagtaattggtggctctgaaaacactgaggaaatgagaggcttgtacgaaa

SEQ ID NO: 220927 - DNA, 122 bp, Homo sapiens
ccagcaggacaagctccatgagggcccccctctgggttgcaggcagctgccttcccagggcgtcctcccccggcaggtgggcatggcagggcagggggagctggcacgctcggctctgttgt

SEQ ID NO: 220928 - DNA, 122 bp, Homo sapiens
atctgaccttggaactcggagtccccctcccagtggttcctgcaaagccccagggggactcggagtggcctcctcttgacagtcagttgtgagtcagcaatttcctctcatgattaagacgg

SEQ ID NO: 220929 - DNA, 122 bp, Homo sapiens
cgggctctgccccgcccaccctgcccacctgcaggggttccatccggagggtgtgctgggcgccaccccgcactctgattggacagcagagttgatcagttctaacttcacactgcaagcta

SEQ ID NO: 220930 - DNA, 122 bp, Homo sapiens
agcatggtggccggcgtggtctctgtcgggctgggagggcccgtggacctcatcaagatccggttgcagatgcagacacaaccgtttcgggacggtaagaggccaggggagcggaggctggt

SEQ ID NO: 220931 - DNA, 122 bp, Homo sapiens
gttgggttaaagattatatgtaattgttgggcacagagggccaggaaagaaaaagattcccggtgaagctagacccaagtacatcactgttgacaagggtaactactgtcctttcctattta

SEQ ID NO: 220932 - DNA, 122 bp, Homo sapiens
tgctctcagacaccatgctccagcaccctagtcgggcagcggggtaggtgtagagggactcggagaatgagcagctacctgggctgcgaatcctgcctgttcacccaggcaagttccttcat

SEQ ID NO: 220933 - DNA, 122 bp, Homo sapiens
tgaccgcgagtgatctgccagcctcggcctcctgagctgccgggattgcagacggagtctcgctcactcagtgctcaatgttgcccaggctggagggcagtggcgtgatctcggctggctac

SEQ ID NO: 220934 - DNA, 122 bp, Homo sapiens
ggccgaggtagatttgcaactctggctggtggggtggcccgagccaggggggcccacgttcggctgctgacggcggtccacaggaggggagggtctgttgggcgggggagcctctctctgcc

SEQ ID NO: 220935 - DNA, 122 bp, Homo sapiens
cgttgacgctctcgagactgcggcttctcgggcgagagcgcccagtgcgcagccgcattccgagctcgccccgccccaagcccagtctcaggctctctcggcccttgaattacgcctgcgcg

SEQ ID NO: 220936 - DNA, 122 bp, Homo sapiens
gtttctgaccattttcccaccccttatgcttctcctccagctggattactgtgcttccaacgtcattgatcactttgcatgtgactattttcccctcttacaactatcttgttcagatacat

SEQ ID NO: 220937 - DNA, 122 bp, Homo sapiens
tgcctgtgcccctgtggacagaaatgaccaacctgagctgcaaatgccagcatgcagttacggctgcccccagttttccctctgccatctctagtttcagtggagattcctcagagaaagga

SEQ ID NO: 220938 - DNA, 122 bp, Homo sapiens
gagaaggagctggaggccccgggagtgcagacggcatttcagtgctcacaggagagcgtccgtagatggcgaggacagagaaggggttaccaggggtgagttcctgaggagagcagggctgt

SEQ ID NO: 220939 - DNA, 122 bp, Homo sapiens
gagcatcctgcgcaccacggtccaccatgccttcccggtggtcacagagaaccgcggtaacgagaaggagttcatgaagggcaaccagctcatcagcaacaacatcaagttcaaggtaaaga

SEQ ID NO: 220940 - DNA, 122 bp, Homo sapiens
gaccgacggactagctgactggcgggcgggcacctgggctggcgggtggcgggcgggcggcgggagagagggctgctcgggcccgtaaacaacgcggcccgtcagctgggccccgtgcgggc

SEQ ID NO: 220941 - DNA, 122 bp, Homo sapiens
ggcattgtaatgtactgaccctgaagtcccggatgcttccagggcgctaacggccggggacgcccaccaggtgggcggggcgagagtggggcgcgtcagggagggggtggggcctccacgtg

SEQ ID NO: 220942 - DNA, 122 bp, Homo sapiens
acagctctgtggatttcctaaggagaatatcctaaatccaaggcagaggccttagggccccgagagtggcacaagaacggggcgctggggcgcgtcactccaccccccgggtcccgtttcct

SEQ ID NO: 220943 - DNA, 122 bp, Homo sapiens
tgatttgggatggcaaaaaaaaaaaaaaaagaggagggggttgtttattttgataagaaacggaatcggcacagacctgaacagaagctgcagagcaggagaaattgttttctttccctcac

SEQ ID NO: 220944 - DNA, 122 bp, Homo sapiens
aatgagattcaggatgtcaagcccagaggccaggcgagtccctcacgagctcgtttccgccgatggctcgccatggccaccaccggttgcaccttcacctctgaggggctgtgggggcagtc

SEQ ID NO: 220945 - DNA, 122 bp, Homo sapiens
tgttcgtcttcattggataaattctccattggagtttagcaggggatttataaagataaacgttatgtaggaaagtttgtaagtagaagttataaagtatgtaaattttggatctttaattt

SEQ ID NO: 220946 - DNA, 122 bp, Homo sapiens
cacgcccgcccacgtggatggcttcaaagtgaacagttggcattcctgcggggtggccctcgctcctgcaataggccatcccgggcggccgctccctccctcacctacgatctgccgtcagc

SEQ ID NO: 220947 - DNA, 122 bp, Homo sapiens
tccccccagcccccgcttaccgccccctcccaccctctggacggaaataccgccctctcgcgccacaaacaggaagtgacgtacaaagagccagagacgaactctgagagagcgagagcgca

SEQ ID NO: 220948 - DNA, 122 bp, Homo sapiens
tggacgtgggcggcggcggggcctgaggtctggggctcgggcggtgggcgctgctctggccggcgcgcgtgggccccggcgaggcggcgctgcaggagctttgcgggcagctggagcgctac

SEQ ID NO: 220949 - DNA, 122 bp, Homo sapiens
ggcgcagccactggggctggcgaggacacacctggtcccggccagcgcggcggagggcatcgtgactccaggctgtaccgcggcccccaacgaagcacgtgaccctcgtgtggtcataaagg

SEQ ID NO: 220950 - DNA, 122 bp, Homo sapiens
tattgcaaacaatgcccttacctgtgctaatttttaaattagcagaattcccacaagagacgttggtttctttcatggatacatgacaatgtagtgtctcgcacaggcacttttcaagcagt

SEQ ID NO: 220951 - DNA, 122 bp, Homo sapiens
aggacactttagccatcgcctgactttctgttgaattgggaaagagcctcctcccgtccacgtgggatggccttcctgatgtggctctccaagaccatccctggggggataaaacctcacaa

SEQ ID NO: 220952 - DNA, 122 bp, Homo sapiens
actttacagtgaagacattcattatgtccctttgcagagcatatttgatgcagaggaggccgctggaggcctgagaggagtgaggagaaagtgcaggtccccgagcagcccctgggcgcttc

SEQ ID NO: 220953 - DNA, 122 bp, Homo sapiens
aaaaagtcatcactttcaaagcaaatatccagcttctccttcctctgtctaattgccagccgctaaccccctcccccatatcttattttccttgataacagaaaaagagtggaacctttaaa

SEQ ID NO: 220954 - DNA, 122 bp, Homo sapiens
ttagggattcttttcgcacagtttccattttctggcctttggaactgcgccctaagccctcggggccctccccctccggtgcccggcgctggcggggcccagccacgggggcgggctggggg

SEQ ID NO: 220955 - DNA, 122 bp, Homo sapiens
tgactgtttagaatttgagagtctctagcatatggcacagaaggtagatgatttaagctgcgtggacatcttcgataaacactggaagaatgggcagtggtatcctctctcggcccactgaa

SEQ ID NO: 220956 - DNA, 122 bp, Homo sapiens
cttcatggggtgggggtgtcccagctccccttctcacagaggccagggtcttgaggatcgcgaaatggggccagccggggcaaagacgaagtttcaagggccagcggcagccaggctcctcc

SEQ ID NO: 220957 - DNA, 122 bp, Homo sapiens
atgttgacctttcttccccttttcccccagaaaggatttgctgggggcaaggtgtctctgcgggattgtttcaaccttttcactaaggaagaagagctagagtcggagaatgccccagtatg

SEQ ID NO: 220958 - DNA, 122 bp, Homo sapiens
ttgggaaaagcacttggtgggtcatcctgaaaacttcccatttccggcactttttgatggcgtggcagtcgtgacacccgaggctctcctttggggcactgtcctctgtggccgtcagtggc

SEQ ID NO: 220959 - DNA, 122 bp, Homo sapiens
gtatgtgaccctggagcccagacagccttgcacataaatctttctggtccacctgcagatcgtctgtcagcagctgccctgtttctctgttggatgggctattccctcacatctgtcagact

SEQ ID NO: 220960 - DNA, 122 bp, Homo sapiens
ggggaatcgtgcacactagtgcccaacatgaataaaatcagagcattttgggtacccgggcgaggcggaagatgaagaggctgtgcgatcttcagtcggctcttcaggtcttcccatcttct

SEQ ID NO: 220961 - DNA, 122 bp, Homo sapiens
accctccaccctctgctcgctaaccccagtccagtcagctctcccgggcctcgacccccgcggtggagactaaagggttcaggtttgggtcccccacaggcaaccgccctcaggtcagcgta

SEQ ID NO: 220962 - DNA, 122 bp, Homo sapiens
agtcccaaactgggcaaacctggggctggacacacagaacactgtgccctatcctttgttcgcctgagagccagggccagaagttaacacacagcttagcaaacaagtattttcttaaaaaa

SEQ ID NO: 220963 - DNA, 122 bp, Homo sapiens
tactctgctttctaagtcagtggttctcaaagtgtcatcagtcccttggccagcaactgtcggccacacctgagaacttgtaataaatgcacattcttaggccccattcctgagaaagggat

SEQ ID NO: 220964 - DNA, 122 bp, Homo sapiens
attcagtcatctattctgacagcgtcttcctggagataccagcagacccccacaggttaacggctcagccccgcaagactgccccccacttccagtgcccaggttgtttgacctgcgcttgg

SEQ ID NO: 220965 - DNA, 122 bp, Homo sapiens
cagcattgcccctacccaaaatttgctacataatttgtgaggccaagggaaaaatgcaaacgcaggacctcttgttcataaatcattaagtgggtgtttttaaacacagtgtgctgtgaagc

SEQ ID NO: 220966 - DNA, 122 bp, Homo sapiens
ggactccaaggagccgggactggagcccatatcttgagagtagggattgtggtgcgccgccggtactcaaggagccacccgcgcgcaatgtggaagggcggcgagtcgccctcggggcccac

SEQ ID NO: 220967 - DNA, 122 bp, Homo sapiens
tcattccgcttgtagatcagctcccggcgtaagtagctgtcaatctcctgagcagtgatgcgctcctgaggtggtagcgtggcattaataaaattgggaacctccaccaaaataaagagaaa

SEQ ID NO: 220968 - DNA, 122 bp, Homo sapiens
aaatcaccctcagaccgaagagccggccgtctgtgcattttgcttttcccgcagttcagccgggactctgcttcacggatgctttcacctcacggacagcgaagccagacacacaggccctg

SEQ ID NO: 220969 - DNA, 122 bp, Homo sapiens
ctgccttggcaaacgagggcagtaataggaatccgaggagcaccgtcactgggtcgtttccgggtgcctggcactgtgctacctgcctggtgctttacctctatctcctttcctccccataa

SEQ ID NO: 220970 - DNA, 122 bp, Homo sapiens
gcttcagcgtcccgtcgcgctcagcatcctcaatcatccgcaggctgatgcggtccttcacgctcccgcccgcgttgaagaactcacacttggccactgggaggcagagatgaatcacagag

SEQ ID NO: 220971 - DNA, 122 bp, Homo sapiens
aggctgttattcctccccatggaagccctggcttgtagagagggactatcacttggggtacgcagctcagtgttttggacagggacagttcttgtgttagtatttgtaatttcttttgccat

SEQ ID NO: 220972 - DNA, 122 bp, Homo sapiens
cagcatgataaacatttcatatttgagtcacctctgctacgcctaacaagcagaggcggacgagctgctgtgccaaacgctcccagatgcacactctcggcaacttgttgccatgcagcatt

SEQ ID NO: 220973 - DNA, 122 bp, Homo sapiens
gcaccgtccactgtgcgctgtccactgcaggagaccccaggctgtgtccacacgtacccccggaaggacctcctgctaacctgggcttgactttgagaccctgttccacagaggtagccggg

SEQ ID NO: 220974 - DNA, 122 bp, Homo sapiens
gtcctcccaccttccccgcccaccaggccatatttcaaaagaatgaaatcgactttggctcgagggggaatccactccacaaaagccacagtgtccgagacatcgcgaaccaggatctgcgt

SEQ ID NO: 220975 - DNA, 122 bp, Homo sapiens
cagttgttccctcaatgactttgcagaagtggcaagatgaggttggtggggagagacaagcggcatgggtttgtaagacccttactgtcagctgacccacccgccctgctaggttccggctg

SEQ ID NO: 220976 - DNA, 122 bp, Homo sapiens
atgaacctcctagacacaggcgcaaacggtaccaagcaatgtaacagaacaaaagtgagacgtctgcccaaggggcagccgaccctggacatgcattcagagcgtcagtgtcagctgacact

SEQ ID NO: 220977 - DNA, 122 bp, Homo sapiens
gccaagcaggcgatgggtgtctcggttctgcctggaactgccgtttttcggagggtgggccgcaccccgcagtgcgtccaactctcccagctgcctagatgttccttgggcttgggacaaag

SEQ ID NO: 220978 - DNA, 122 bp, Homo sapiens
gcaggacaatgtgggttctccggggctgggacgaaaccttcatcatctgagcagccgactcgcccagggctactccggcacatggagaccctcagtatatatatatataaaaaaaacaaaaa

SEQ ID NO: 220979 - DNA, 122 bp, Homo sapiens
acagctttattttcgcgcccagtattgactataagtagtggagctctggtgaacttctctcggctgttctcagttcctccatttatcgtttcttcgtcatgtcgggacgcggcaagcaggga

SEQ ID NO: 220980 - DNA, 122 bp, Homo sapiens
cggggacccccgcgggccccagaagcagcccagttctcagagagcccttggaaggggtctcggtggagctgtgcaccagcagccaagcagaaagaaacacgcgacatggactctgtcaagta

SEQ ID NO: 220981 - DNA, 122 bp, Homo sapiens
acagaattttgccagtgtctacagacatttagatcagtgctggggtggaggggaatcctccgtcagtccaggctggaatcacagccagctgattaaagttacctaggtccccaaatcacagc

SEQ ID NO: 220982 - DNA, 122 bp, Homo sapiens
aggaggcccgggggcggggacaggaggctggggttcgcagcacccatgggaacagccagccggggttgagatcccaactctgctgattgccatgttgcctcagcggagggttccttgggtgt

SEQ ID NO: 220983 - DNA, 122 bp, Homo sapiens
agagcctcccagccagggtcagccagcacagcctctgtatgtgaagcgtcaggacagcgacggccgggaggaggggatgctaggaagtgagtaccagaagcactagacagggttttgggaag

SEQ ID NO: 220984 - DNA, 122 bp, Homo sapiens
gtaattaaatatcctagagttcagtaggcagatttatgtttgagcagcttgaaaagaatccgttggctgagcgttgtctagaaattgggtgccgctacatttcagctcttcgatgtgatttc

SEQ ID NO: 220985 - DNA, 122 bp, Homo sapiens
acacacacacacacacacacacacacacacacacacagacacacacacggaaggggaaggcggggaatgagagaaatgctaagtattgtgacccaaatgctttttgaaaagatatgtgaggg

SEQ ID NO: 220986 - DNA, 122 bp, Homo sapiens
gggtggagggaagggagggtgcagggattggttggggttgccctgtccatcgggctgtgtcgctgacataaaatccagatagaaaagctaagaactctaccggtattctaccccggaatacc

SEQ ID NO: 220987 - DNA, 122 bp, Homo sapiens
tcagagctagatctatatcgtcccgcgcccagcaagaagcactgtgtgactgtactcccccgacccccaggacatccccacgcccagcttcccaggccggtcttctgcgcggctcaagtagc

SEQ ID NO: 220988 - DNA, 122 bp, Homo sapiens
ccggggctggaggaagcggccctgctgcagtgggggtggctgtcggagcagagtgggagccgtgggcaaaggtggcctcagcagcgggggtggctgggacagcgaggtgggaggtggagggg

SEQ ID NO: 220989 - DNA, 122 bp, Homo sapiens
ttacactgcctctgagctgccttctctacatcgcagtggggtcagcttctaccggggcggcgtcccggggtcttggaactgcatgcagactgcctgcttgggaaacatacttctttatatgc

SEQ ID NO: 220990 - DNA, 122 bp, Homo sapiens
aggaaatatttactctccctggcctcagtttacccttcacataatatattgagtgctcaccgagccaggctctttaaggtattatctcatttaatcaccactaccatgtaacggcataggga

SEQ ID NO: 220991 - DNA, 122 bp, Homo sapiens
ttactcctcctgactgggcatcatgtctttgccaacggagacccagagtccagagaaacccgaaaaagcaaccccagctttcccaggatgagctggtcgggaggaagggaggtcccaatccc

SEQ ID NO: 220992 - DNA, 122 bp, Homo sapiens
tcaacaaagccctccgaaagcaagtgctttactaagtgccccttgaggctactggcagtgcgaggctggctgtcattagaacatttttctgaaccctcaaaaaggtgaaaaagcaggaccgt

SEQ ID NO: 220993 - DNA, 122 bp, Homo sapiens
cgagccggagggactggttggttgagagagagagaggaagggaatcccgggctgccgaaccgcacgttcagcccgctccgctcctgcagggcagcctttcggctctctgcgcgcgaagccga

SEQ ID NO: 220994 - DNA, 122 bp, Homo sapiens
aatgagtagaacagttttgtattctactccctacaagccattttgaacttctgccctcaccggactctgggctgtgactggggcaccaaactcagcacatgagtctcccctagctctcgtgg

SEQ ID NO: 220995 - DNA, 122 bp, Homo sapiens
tcctggcccagccggctcgtgcgttgctttattttcctttttctgaatggttgtaacagccgcgatctgcctagatacacgggcggcctgctctgtcattggtcactgctgccacccggaga

SEQ ID NO: 220996 - DNA, 122 bp, Homo sapiens
tgaaatgtggatgatccttgaaagcattatgctaagtgaaagaagtcagtcacagaagtccgcatattgcatgattctatttatatggaatgtctagaacaagcaaatctatatatagagaa

SEQ ID NO: 220997 - DNA, 122 bp, Homo sapiens
tccaggggctcctctgaggcgttggcaggggcagcgcatcagcagccgtgacactgccctcgccgtgtggcatcctcttgagttccgtccttcagcgcagttccctcccaggacaggccaag

SEQ ID NO: 220998 - DNA, 122 bp, Homo sapiens
ggagcggctgccgggctagtggcgaggctgagggcttcacgcaggtcccgggacaggcagcgagcggaagggagcaagcggggatgccccggaacaggtggaatgcgcggggctgggggaag

SEQ ID NO: 220999 - DNA, 122 bp, Homo sapiens
cgctatggcccttcgagttcagcatttccagaatctggccatcgccctcctccccgtaggcgtttcagcagcatctgctgacagcacctgtcatgtcctcggccagagtcgcaggaccctgg

SEQ ID NO: 221000 - DNA, 122 bp, Homo sapiens
agagggaaaaacttctgaaactcaaagccactatgctgctggttcattccccaggaaacacgcatggtagaaaagcagcaggccaaaaactagagattccaggattatctgtcattttcaaa

SEQ ID NO: 221001 - DNA, 122 bp, Homo sapiens
ccgggaaagacggagagtccgagtccagcctagctgaggcctgcgcaccgccgggaaagacgcggggtccgagtccagcctagctgaggcctgcgcaccgccgggaaagacgcggggtccga

SEQ ID NO: 221002 - DNA, 122 bp, Homo sapiens
gctcctccagggtagactggtgaggacagcaaaaaagacccaggtgccacctaaccaaggcgacgtctcgcttcggggggcagatgctccaggcctggctgcttctctcccgggctgtcctg

SEQ ID NO: 221003 - DNA, 122 bp, Homo sapiens
ttagtacaggtactacccatcagcaacttagcggccaggtgagttggtgcagaagcgcttcgggtgaattcataccagagccaccgggtgtgactcggctacctctcccaattaccacaggg

SEQ ID NO: 221004 - DNA, 122 bp, Homo sapiens
ggttagggctctccaaggatggggccctccctcccagccccggcaggatattggtctagccgctcgcgctggctcatggcgtccaggcgcgcgcggagcttggtcagaccgcgcacccagcg

SEQ ID NO: 221005 - DNA, 122 bp, Homo sapiens
ctcctttgtgtctcagcttgaccccttgagaccacccacttccttggaggtttatgccagcggtgagctgacatcctacctcctatatcctggtgggtcacaaatactaactttaaaagaag

SEQ ID NO: 221006 - DNA, 122 bp, Homo sapiens
caccgctgccagggttgctgtctttttgtccccgctgcatacactcctggctcagttttgcgcgtgccatcagcgccccctgctgcagggcggggctcacggcctgcatgaatggcgcggcg

SEQ ID NO: 221007 - DNA, 122 bp, Homo sapiens
gctgtcctcgcgcttccgccgggtggacatcgacgaatttgacgagaacaaatttgtggacgagcaggaggaggcggcggcggcggcggcggagccaggcccggacccgagcgaggtggacg

SEQ ID NO: 221008 - DNA, 122 bp, Homo sapiens
ttcctccaatggtgaaacggttaccatgtgatccagcaggcccagtcccaggcagacccccgagagaactgcacacacatctacacagactcgtccgtgaatgttcagggcagctgtgttca

SEQ ID NO: 221009 - DNA, 122 bp, Homo sapiens
agccattgcgctccacggtcacacttcagcactcccaatacaccaggcagacactgagtacgagtctcggctggtgtcctagcaacagcgacgcgaccccgccccttcccgcgtacacctcc

SEQ ID NO: 221010 - DNA, 122 bp, Homo sapiens
ccggcgaggagcgaggcttctgcagtcctgctgtcccgcagccccgcagccccgcagcctcgcagccccgcagccccgcagccccgcagccccgcagccccgcagcccagcgccagagcgct

SEQ ID NO: 221011 - DNA, 122 bp, Homo sapiens
ggacgaaaggccaccacatacttctcaaccccgagggtctcttccgcccccaaaccccaccggccccattgcccaagtcagcgatgacggcaagagcttccaaaaaggaccctgcaacccta

SEQ ID NO: 221012 - DNA, 122 bp, Homo sapiens
cttatacagacattcatttatgtaagacccacatcaggctttttctaaagtgccaaaacccgtgcaatccccataacttcaggtgagaattataatgggcagaagaatgtatcaactaaaat

SEQ ID NO: 221013 - DNA, 122 bp, Homo sapiens
tggtttatcttgcaagaataacgaattgttccccaccccaaccacccaagttttcttgttcgagaagattgagtagactaaggtggctcagtgaccccaaacccaggtagaggttccgaaga

SEQ ID NO: 221014 - DNA, 122 bp, Homo sapiens
ctccggctctcgccccacaatgccgtgcgcaggctggcagcagttcagctgaggactaaacgcttggctcaagttcaacacggctgccaagatttggcaaccagagagttgcagggaagcag

SEQ ID NO: 221015 - DNA, 122 bp, Homo sapiens
tcccccaaacctcccacccgcccaggcctccccagtccccggctccccgacgcccctgcacgccacccccgcccaggagcaccttgaggtcttcggccgcgtcctgcagcggccgcacgcgg

SEQ ID NO: 221016 - DNA, 122 bp, Homo sapiens
gggggaagcgggggaggaaggttgccggctgggctgcccaagaaaggggggtggttgggccgtgccaagccggagcctcatggcacacagacagcctcgttggctgcatgaccgggctgggc

SEQ ID NO: 221017 - DNA, 122 bp, Homo sapiens
tcgagcccgcttgtccactcattactctggaatccgagtcccagcaggggcgcgggaaaccgctgctctgagaaaaggtacctcccccagaaagactgcgcgggaagtcccgagttttcccg

SEQ ID NO: 221018 - DNA, 122 bp, Homo sapiens
ataaacatagctgtatgtacaacactcagcttttacactggtctccattgaatgagtaatcgcattaccaaccttctaagcaagtcggctccctcaggactgccgtcttccagccctcgtag

SEQ ID NO: 221019 - DNA, 122 bp, Homo sapiens
tcaattactgcagcaccttggggaccaaggccagtgggatgagaaatgcaggttctggttcgtgccctgtgcccctgggctggtggcaggagcagcggggctggttagcatcccactgtcaa

SEQ ID NO: 221020 - DNA, 122 bp, Homo sapiens
agggaggggtaaaattccttagcttagacctcagcctgtgctgcccgtcttcagcctagccgacctcagccttccccttgcccagggctcagcctggtgggcctcctctgtccagggccctg

SEQ ID NO: 221021 - DNA, 122 bp, Homo sapiens
ctctctctaggacagaggtcgaagagaaaaagtagaggcgaagactccacgctctcctcgcggcgcgcagccacccacgcccacccccggcttccctgcaacctcaaaccagctcccagggc

SEQ ID NO: 221022 - DNA, 122 bp, Homo sapiens
attctggaaatgttctctatcctgcatgaacattaggttggatccatgcaaaataagttacgccaattaatcaatttactcatttcatcatacacgcttggaaggaagactttttgaaatta

SEQ ID NO: 221023 - DNA, 122 bp, Homo sapiens
gtttccggccccacactgacctgtaagacagcacagccggtcactcgacggccaggtatacggtcatcagtggtcaccaccataatgcagaaagggccaagtgtcacgtgtgaggtgagagc

SEQ ID NO: 221024 - DNA, 122 bp, Homo sapiens
ggaagggctcccggaataataatgagtgcaaccccatgcatcgatgaagatgcaggagaccgcagccacgctccaaagacaaagcaaaacagccggacacctaacactgggatcccactgct

SEQ ID NO: 221025 - DNA, 122 bp, Homo sapiens
aaaccccatctctaataaaactacacaaattagtcaggtgtggcggtgttcacctgtaggcgcctgtagtcccagctactcaggagactgaggcagaagaatcacttgaaccccgggaggtg

SEQ ID NO: 221026 - DNA, 122 bp, Homo sapiens
ggggtgaggagagaagaatccaggaatcaatgatggggcatatggagttgacttcaagagcgtctctgtcctctctgtcttccagagggactgcttaatagaaattagaaactccagcaatc

SEQ ID NO: 221027 - DNA, 122 bp, Homo sapiens
agatttttctcatttaattgcatgtaatttcattctaaagagcagacaaacaatttcattcgattagatatacttcctcaataaaggcttttgaatgaaagcaaatttcattttgctgatca

SEQ ID NO: 221028 - DNA, 122 bp, Homo sapiens
gttacaaaacaagaccataggcacaggccattttggatttttatgatactctgccactctcggaaagagatgatttcaaatacatgtgagttttgggggttttctgtttgttttttagcaaa

SEQ ID NO: 221029 - DNA, 122 bp, Homo sapiens
cagctcaggcaccagctgaggtttggcatttgctggccgcgggcgccgacctccagggggcgccgtggcctcgcgctgtccgggccgttgcatttccgggcactggggctccgccatcgtcg

SEQ ID NO: 221030 - DNA, 122 bp, Homo sapiens
agagtcacacccaaggcaggagagcaagagtgatgagtccgctgcaccttctccggcaagcggaggttctcccgccgccctcactctgtgatgcttgctgtgcttgcgaggcctacgccaaa

SEQ ID NO: 221031 - DNA, 122 bp, Homo sapiens
ggcgggggggaggccaggtgccgggttgggggggtcctcacgtctgtgggtctggtctatcggggggcccgcaggacgtgtgcggggtgtgcggggtgtttgagggtccggatgtgcgtccc

SEQ ID NO: 221032 - DNA, 122 bp, Homo sapiens
ccaaggcccggggcccttgcagcatagcgagtaaggcgccccctacccaaaagggcttggcgcgcccgcggacacctgcgggttccggtgctgccgcctttcacacggcccgcggcatggcg

SEQ ID NO: 221033 - DNA, 122 bp, Homo sapiens
gcggtttggtgggaggtgccctgaagacgggagctaattggtctgggtggtggaccgtcccggggggattggtccgagccagaggccggcgcggcgttgggcgcggctggggagctgtgctt

SEQ ID NO: 221034 - DNA, 122 bp, Homo sapiens
tctccttttaactccccttccctactcttttcttctttgtttctgattacctgctttgcacgtgtgaggtaccttgtgtaagtagcagctttttcctaaaaattcctcttcatgatttccca

SEQ ID NO: 221035 - DNA, 122 bp, Homo sapiens
aatcgagaggcgttgagccgtaaatcagcaccacttcccgcccagggcgttctgggtccccgcccaccggcaagtcacatgagccaccaaaatggtggtgttcgggtatgaggctgggacta

SEQ ID NO: 221036 - DNA, 122 bp, Homo sapiens
acttctagcctctctttcaatccagctgaagttcaatctcattgaagtcacttcccatcccggttcgcttggggggaaaccaggcgtccctggaagggaagggaagggagtccgggctgcgc

SEQ ID NO: 221037 - DNA, 122 bp, Homo sapiens
acaaaactcgtaggcttaagtcttagtaatttctgttgtttatgtaatttcagccctgcacgtcactgaaaagttatttatcttaacaaactggccaaatttggcgggtaatgctgtctgcc

SEQ ID NO: 221038 - DNA, 122 bp, Homo sapiens
attattaataatacctaaccctggatcactcccctgatagatctgtatctttgcagcaggcgcaattcagtttggattcacccaaaacaaaaatggtctccgtcggagtcaacgccctttcc

SEQ ID NO: 221039 - DNA, 122 bp, Homo sapiens
aattagcatctgcctaagctgccgattttctgcaggatgagctgccagctcaccacagtgcggcactgagcaccagagagttcctgtcccagattcctccggtcaagtcacatgagatgctc

SEQ ID NO: 221040 - DNA, 122 bp, Homo sapiens
ccttcagcctggcatagaaagtgtggtcctcttgtcctttaattatgtcccacctaatcacgttatctcatcatcgttcccgtaaacttctggagggtggcagggagcacgctttgtctcct

SEQ ID NO: 221041 - DNA, 122 bp, Homo sapiens
gtgggcctggggcgggggcggaggccgggcccaagctgcagggtgctcggcctttccctgcgcccggctccgaccgaagcgcataatgaaagctgacattacatcaaacacaataaggagtt

SEQ ID NO: 221042 - DNA, 122 bp, Homo sapiens
aagaagcataggagataaaacccccactgagatgcctctcatgcctcagctgggacccaccgtgtagacacacgacatgcaagagttgcagcggctgctccaactcactgctcaccctcttc

SEQ ID NO: 221043 - DNA, 122 bp, Homo sapiens
agactagaatggaattttgtctgtctatatcagtctgtcatggtgtgtttgactgtctctcggagctatgtgtatctccctctcacatgcctgtcagtaggacaccattgtctaaattgtgt

SEQ ID NO: 221044 - DNA, 122 bp, Homo sapiens
gaagtattttaagtggataatgagtagtctcttctctcaatgaatacgttcaaataacatcgactgcctgtaatatgcaaagttcctagtcaaggctgccttaggaattcctgccccttaac

SEQ ID NO: 221045 - DNA, 122 bp, Homo sapiens
agcgcgcgggcgctcctgaaaggctgcttcaggggaggggttctcccaggtagagtaggccgaaagcttcccaccgccgtccgcacctcctgggaaagatttcctggccgcccctcacccct

SEQ ID NO: 221046 - DNA, 122 bp, Homo sapiens
ggcggggttctcgccggtcctgcgggtcgctgcttggctgtgggttagcagcaccctgagcggagcggaagagctgcccgccgccgcgtaaccccgaggccgagactcctggcctggcctcc

SEQ ID NO: 221047 - DNA, 122 bp, Homo sapiens
gcctccgctttcctatctgtgaaatggggcaggctcgtggggcctggagcattcagcaggcggtaacccagtgggcgttccctgcacggtgccacgccccctctgccgcgcaggccacgccc

SEQ ID NO: 221048 - DNA, 122 bp, Homo sapiens
tggcggcggggacgtgttcatccagatgcccgcgtccagggaggaaggagggggccggggcgaggggggcgcctaccaccaccgccagccccaccaccatttccaccatggcggccaccgcg

SEQ ID NO: 221049 - DNA, 122 bp, Homo sapiens
agagcagtttcttgttttgcatgtggaactgttttaaacccttcgatgaagagatgatgacgagtctgacttggggatgttctctttgcccaggtggcctactctgtgctgcgttctgtggc

SEQ ID NO: 221050 - DNA, 122 bp, Homo sapiens
aagagtctgggggtgggagtgggggagtaaaggctcgactggacgtggatcccaggttcgcgctgagagtgtttggggcaggtgaagtttcccaaactgggagagacaaggtttaaagcacc

SEQ ID NO: 221051 - DNA, 122 bp, Homo sapiens
tgtatctgggaaggatgctgcagggcgtggtgctgagaggccagactctgcgtggaagagcgagctgacccctcgtgaccgccaaagcctagctggccatggggagtgaggaggaaagctgt

SEQ ID NO: 221052 - DNA, 122 bp, Homo sapiens
cgaccgccagagccagctgccatcgcggcagcccccccgtgcccgggcccgcagtcccgccgccgcccaccccactcccggagctcggtacagcggctgcgaccaccgctgcctccacaggt

SEQ ID NO: 221053 - DNA, 122 bp, Homo sapiens
acggcagagggaggcctccactgtcaccagcagagctgctcccaggcaaagccaaagaaacggcctggccaaactccaccttcctgacaaaggcaccatgtgccaggctcctgggattgcag

SEQ ID NO: 221054 - DNA, 122 bp, Homo sapiens
agaggtccagtgaggccatcactggttaggcagccccaacaccgttggcgcatcccagggcggggccaaactcacaggtcgaagatcaggtagtggtgtccctcctctgagatgctgtcatg

SEQ ID NO: 221055 - DNA, 122 bp, Homo sapiens
tgtcccacctggagagccaccgtgacggccagcgcagcagcatcatggacgtgcggtgagcgcggcagcacctgcccggcccctcctagggctttcctgggggctgagccactggtcgcaac

SEQ ID NO: 221056 - DNA, 122 bp, Homo sapiens
cacggtgaagacgcggatgccggcgcgaatgccggcacggatgccggcacggtgggcagccgccgtggcgtccagcaccaggtcctggctgcagccattggtgagcagtatggccacctgct

SEQ ID NO: 221057 - DNA, 122 bp, Homo sapiens
tgtgcatgttgtagtggcggatcacgtcctgcttactcgtgaacctctgccaggagacagcgccacgtgggcaggagcctgagctccccctccgcccttcctcccatatgccaagagcacct

SEQ ID NO: 221058 - DNA, 122 bp, Homo sapiens
gagcccgaggaggccccaccctccgtgcgctcgttggctggcgagggagacgagcctgggcgccttgggcacgcccattggctccgacggccgtccttcagggcgccccctcggtggggtgg

SEQ ID NO: 221059 - DNA, 122 bp, Homo sapiens
gcttctgtggccagggttcccatggcgggtctggtggcaacagcttggagaaaagcctcccgggaccaaccctcattcccaggtccactgatctggggtaggagtagccaagtgttctgaca

SEQ ID NO: 221060 - DNA, 122 bp, Homo sapiens
aaactccggcgccggtcacggactagggaaggcagccttcccttggtgtttaatcattgccgagctaggtcccaattcttcctcagcctctgctcctccaccctataatccttttatcacct

SEQ ID NO: 221061 - DNA, 122 bp, Homo sapiens
aattatctaggaggtgacctgtagctcaactgagtcatgcttcctcctctctcagtcccccgaggcaggctctggacacctgctcatctcatggctgctcagccagaaaaatgtcctcctac

SEQ ID NO: 221062 - DNA, 122 bp, Homo sapiens
tcctacaaaagggagaaaagaaaggagcgggaggaaggcacagtgggggcgggggacagtcgtcggacactagttaacaatgatgcctccggtgtttaaatcatagctcagactgctttctt

SEQ ID NO: 221063 - DNA, 122 bp, Homo sapiens
attctgggtaacggtgcagaggactgaggccgccgagcgctgtggcctgcatggctcctacgtgctgagggtggaggctgaaaggctgactctcctgaccgtgggggcccagagtcagatac

SEQ ID NO: 221064 - DNA, 122 bp, Homo sapiens
gctggctgagggcggctttgctggggttgtccagggccagactggggctgggctaggacccgcccgggctgcatgaggacctctcccaggtattcctgcagagctctgtgattggctgctgg

SEQ ID NO: 221065 - DNA, 122 bp, Homo sapiens
ccccgccccacctcccccagggggccgcgccggcccgcccgccccgcgcattccagcgtgcgcgctcccggacccggacgcagatagggacctaggcacaaacgcagacatccacatgtgac

SEQ ID NO: 221066 - DNA, 122 bp, Homo sapiens
attaaggcatgtggccaggcgcgatggcctgtcctgtaatgtggccattacaggactgcccgctgaccccgtacccagaggccgcagctgccgcagctcccgcagtggccagtcctgtaatc

SEQ ID NO: 221067 - DNA, 122 bp, Homo sapiens
tgcgtatgtttatgcttgataataataataatatattttatgaacatccctcccaagtcccgattgcactgttttgatattcagtcacggtatctttattcatagcctgcctttaatgagaa

SEQ ID NO: 221068 - DNA, 122 bp, Homo sapiens
attaggtatctttatgattcaataacccattcttacagaaattaattgtaagcctgggagcggtggctcacgcctgttatcccagcgctttgggaggctaaggcgggaggatcgcttgaggc

SEQ ID NO: 221069 - DNA, 122 bp, Homo sapiens
gcagcaaacagattggcacctgaacctctctattagcccttctggggcttaggctgtgggcgcatggggccatgcactaaaaatgtctttcaccttagttgggatgcaaagagacaagtttg

SEQ ID NO: 221070 - DNA, 122 bp, Homo sapiens
cgtcgccctcaccagggcaggcggcgggtaggctcaccatgacttcggcgaagatgtccccggcgtactcgcgttctccctgcagccccagcgcgctcagcgcctcctccagccccggcggc

SEQ ID NO: 221071 - DNA, 122 bp, Homo sapiens
cctgtagctacacttgcatgtaaggtacagcagtaggagtttttgtttctgtttttgtttcggcagttaccacgttccttggagaattagagcaagcagaagaaactaaatctctcttcaat

SEQ ID NO: 221072 - DNA, 122 bp, Homo sapiens
tttttttctgagtcgaagtttcgctcttgttgtccaggttggagtgcaatggcgtgatctcggctcaaacaacctccgcctcccgggttcaagcgattctcctgcctcagcctcccgagtag

SEQ ID NO: 221073 - DNA, 122 bp, Homo sapiens
ctgcgccccactttgctggtgacccagcgtggccgtgtcccagaaaccgcagaatcaccgcgggagctactggcccactttgccaggccacagaaaatgcagctaaaattagctaaggacag

SEQ ID NO: 221074 - DNA, 122 bp, Homo sapiens
gatgtgcggcccgcgcgtgtgtccacagagggaatccctgggtgggtctggtcctggtgtcgccgggacgtcccgatggtggcttcgcgcactggggccctgagccctgagtccaagtgcgc

SEQ ID NO: 221075 - DNA, 122 bp, Homo sapiens
ctgtgacctgcggctgtgcaccctcgaccctgatgacgtggccagcaccacgtccagcagcgagagcttgtgaggagctgcacctgactgggagctaggggaccacctgccttggccagacc

SEQ ID NO: 221076 - DNA, 122 bp, Homo sapiens
cgtccttcctggagaaggtggcgctgccatgtttgagtctcaggctcccaacggccgtggcgtgcgtcacccttgcgtcgcccttgcgtcgctgcacgtggggcgtgggccctcccagttct

SEQ ID NO: 221077 - DNA, 122 bp, Homo sapiens
ataaccctagtaagtgccaaagccaggattcgaattcaagcagcctatcttcaaagcccacgcatactgcctcccttaatagtaatgattaattttttaaaatcataacttgcttggctaca

SEQ ID NO: 221078 - DNA, 122 bp, Homo sapiens
catgcaggaggttgccgcccagaattatcgcaacctgtggcgccatgcataccacacttacggccagccgtacagtcacagccctgccccctcagctgtccctgccttggactcagtacggc

SEQ ID NO: 221079 - DNA, 122 bp, Homo sapiens
cctcattcctccgccccccccttacacgtttgcacgcgcttttcacgtcctcccccccgccgccagcacgcaccgtgcacgccctgcccccacgctcagagctccgtggcacgcccccccag

SEQ ID NO: 221080 - DNA, 122 bp, Homo sapiens
tgagtcaggcctgccgttggtgtcactggcctggttcttgatttcgccagtgacttgacccgcattccacctggattctgatgtattcgagcacgattctacttaagccctttccttcctgg

SEQ ID NO: 221081 - DNA, 122 bp, Homo sapiens
aagggatccaacatcctttttataaggggaacagtctcctctgttttcctccccaagacacgatctttctagaaatgcaatcttacagagtaaacatttgagagaaattatctttcatatca

SEQ ID NO: 221082 - DNA, 122 bp, Homo sapiens
cttagactacaagaactaaattcagtcagaccaaactctctaagtgctacctgctttgggcgtttaaaataaataaataaaaatgaaataaggctgcttatgagcatgactatatccttaac

SEQ ID NO: 221083 - DNA, 122 bp, Homo sapiens
ccctgtcaccgcctgtggggcacacaactctgtgttccacttgctgtctcatataatgcccgaaattgttgcctagagagctgaacagtgacatctgttggttcgatttgaaataggcaagt

SEQ ID NO: 221084 - DNA, 122 bp, Homo sapiens
agcaatagttttcccagcagctgtccccgtctgctcggaagtgggctccccgaactctgccgctgggaaggaaaagagcaacatcagcactgaactcctcaggcaaacattcttccagcgat

SEQ ID NO: 221085 - DNA, 122 bp, Homo sapiens
gtagggccgcgcccaagcgggagcgcgcgctgcggccgccccagtctccttgctgtgggacgagcctctgccttcctgccagagatgtgactcccgcttgaaggggattttttttgttgttt

SEQ ID NO: 221086 - DNA, 122 bp, Homo sapiens
taatgcgttagaattttaaaaaccgggtagaacgcagcgcaggaagcgagcgttccccgccgcagcgccggagcgtccagccagaatccccctgcatgcgcagcccctggcgtcttacgtcc

SEQ ID NO: 221087 - DNA, 122 bp, Homo sapiens
acgacaggacaggaaatgaagggcaggggataaagcaagaagaaacaagcagcggacagacgaaatcgtgaccatcacaaacgcagaaatgagcccctgacatcacttgtccatcaaatagc

SEQ ID NO: 221088 - DNA, 122 bp, Homo sapiens
gaggactattttctccagccaatcactggtccgaacacctgattcctctcctcacacccccgtcctggggataagtgattggttaggagcgaaaatgctctcgccctctgccacctcagcca

SEQ ID NO: 221089 - DNA, 122 bp, Homo sapiens
acccaagacggaacccactcgcgttgcgcccgaggaggtgcgaggctggtccgccagacccgcccagcacgtcaccaacacacctaaggaagccggctccggtgccgcctccgtggggcgca

SEQ ID NO: 221090 - DNA, 122 bp, Homo sapiens
ggctccccctgtgtgcctgtccatcacctcccacagggcagggtcagccagcacctggcacggaacagtgtgcactgcagcgtccatgctgaggacggacctcgctctcacaccctccagat

SEQ ID NO: 221091 - DNA, 122 bp, Homo sapiens
agccccaggagaggcagagagtgagggaaagggcctggccggcatgcacagataggatcacggtcctgggagaattcctgctcttatagtctaacctaccatggcttctcttttctcaaggc

SEQ ID NO: 221092 - DNA, 122 bp, Homo sapiens
ggggcagcgcccggaacaaaggcccgcagaggggtcctggagacagcggctccccgggggcggctcccctctctcccctctctcccctcctctcctctcccgccagctcctccttctcctcc

SEQ ID NO: 221093 - DNA, 122 bp, Homo sapiens
taccattcttcctgggtggaggtggccctgcactttcttacccacagacaggaggcgccacgagacggcgggagtggcaaagcaggcaaacacgtcgtcggtgcaggagaagtgggtgaggt

SEQ ID NO: 221094 - DNA, 122 bp, Homo sapiens
ggcggctgggtctgtgcatttctggttgcaccgcggcgcttcccagcaccaacatgtaaccggcatgtttccagcagaagacaaaaagacaaacatgaaagtctagaaataaaactggtaaa

SEQ ID NO: 221095 - DNA, 122 bp, Homo sapiens
ggagggatggggggagcttcggggcacaggagagttccgagaagcaggggcgggcagcagcgagggattagggaggcctgagcttagcctggcagcccagatgccagcctgggagctcctga

SEQ ID NO: 221096 - DNA, 122 bp, Homo sapiens
ggcaccgccgcgagcccagggcgccacttccgggtccgaagctcccatggcgcccggcggcgaggtcactccccgtcacgtgacggggccacgccccctcaccggcgtcagggggcggggcc

SEQ ID NO: 221097 - DNA, 122 bp, Homo sapiens
ccagaggcggagaagatattattgacaataaggtgaacacgctgtgtgaccaccgtggatcgtcatatccagggggggagatgggggtgatatgactccccgcatcgcggggggcgcccgcc

SEQ ID NO: 221098 - DNA, 122 bp, Homo sapiens
aataaccatcccagtgagggtcaggaaaacacttcagatctactttacacagttagagggcgttacaaactgaaaagattatcataccaccatctccataagtatttgaaataaaaatgata

SEQ ID NO: 221099 - DNA, 122 bp, Homo sapiens
tgaaaagcacacaacttacttatgctttgagctgttgaattgtcacttggaccacaacagcggcttccttcccggcctccttgctgcccatagacctggcagttgcatctttactccatttc

SEQ ID NO: 221100 - DNA, 122 bp, Homo sapiens
gagaagctgatgttttggtgtattgtcagccatcgtcctgggactcggagactatggcctcgcctccccaccctcctcttggaattacaagccctggggtttgaagctgactttatagctgc

SEQ ID NO: 221101 - DNA, 122 bp, Homo sapiens
gtttgaacgtctgactgccctttgacacctggaccagtgggcaggaagagaaactaaaatcgaggtagtaatttaagcagcacattatgggggggctctggccttactgaacttgaactcaa

SEQ ID NO: 221102 - DNA, 122 bp, Homo sapiens
ggtgggcaaagagttgatgacacagaaaacagagaactttcttggttttggaaaaagaaccgcaacaagaaatgtgatgtataaaatgagtggatcccaagaggcaacgagaaatggtttaa

SEQ ID NO: 221103 - DNA, 122 bp, Homo sapiens
tcctgcgcgagggccctgggccaggtgccctaatgcattgcatcatgggtggtactgctccggcagggctggtagtcacagcgggggtcctggagatggatgggcccgcctccctgtccgta

SEQ ID NO: 221104 - DNA, 122 bp, Homo sapiens
tctgttcaaactgttccaaaatataaaagaataaaattaattaagttggcactggacttccggtggtcagtcatgtgtgtcatctgtcacgtttttcgggctctggtggaaatggatctgtc

SEQ ID NO: 221105 - DNA, 122 bp, Homo sapiens
gcgtcagcccgggtgtgctctctacggtccaggggggccagggccttcttcgggtgggcccgccgcccctcccgcaggccgcacgccgctcctccggggtcgcagggctcagttaagagccg

SEQ ID NO: 221106 - DNA, 122 bp, Homo sapiens
tgagttgtcatgaggggtaggattgtggctttttaagaggaagagagacctgtgctagcacgtgagcatgctctttccccgcaccgggtgatatcctgcactgcctcaggactttgcagagg

SEQ ID NO: 221107 - DNA, 122 bp, Homo sapiens
gggtcacgaacctacctttaaagagttaagcccaaatgccggcctgactggctcttataacgcggccgcctgggaatagcagcctcccattggctattggtgctgtccttcaggcagctctc

SEQ ID NO: 221108 - DNA, 122 bp, Homo sapiens
ggaggcagaggaggaggagagggaggcggggcgggcaggcccggcccaggagctgggcggcgcgactcacctctgctcccggcctgcggggccagagtagccaggatcccgcgcagctccga

SEQ ID NO: 221109 - DNA, 122 bp, Homo sapiens
tgggcaggctgagcccggagacacccgggagcccggcgtcaccaccagggaggtgacagacgctgaggagcaacaggacggtgcctctagcagatcccctccaggcgatggcagtgtgtcca

SEQ ID NO: 221110 - DNA, 122 bp, Homo sapiens
ttcaacttaatctggtggtgacacccactgaggttgctgttcccaatgtgctatctttaccggagcaaatcggtacaaccccagacactcggatgcagctaagaccttgtgaattcctttgc

SEQ ID NO: 221111 - DNA, 122 bp, Homo sapiens
tagtgatggtggtggtacagttggaattagtgccatgtcatacacaaatgttccacaaggcgggagtgtttcactttctggtgataaacttgatggtcattgttatgattaagataatgccg

SEQ ID NO: 221112 - DNA, 122 bp, Homo sapiens
ccagcctcagcatccccatccctcagtactggacagtccagtcccctggcatgagctttacggggcttgggacttagttctaaccctgcagccaacttcccggaactgtgctcccatccatg

SEQ ID NO: 221113 - DNA, 122 bp, Homo sapiens
tgtgccttttctcctttcttgtgtggcagatagtgatcccctccccagggcagccctgtgcggggcgctgggtcacatctggctcagcccctgtccttgccagactcttcccaactgggcac

SEQ ID NO: 221114 - DNA, 122 bp, Homo sapiens
tgaaaatctcttagtctgtttagctccataaataataaaccagagtttcagtattccttgcggtatcactctgggttcttagaatatctaaatccctttgcccatcttaccttctccctggc

SEQ ID NO: 221115 - DNA, 122 bp, Homo sapiens
tacaggaggggcggggcctacagggcggggcctgcgaggaaggtgcgggcggggcttacccggcgcgggcagctgacccagcgagtcccggcgggatccgggcgagcccaacccggggtgag

SEQ ID NO: 221116 - DNA, 122 bp, Homo sapiens
actactgacattttcgtttctgccccaagaggatgacagttgaacaaaaccttgaagtcccgatgtacctctgacaactcccagtcagctacatccttgggataattttatttttcccttaa

SEQ ID NO: 221117 - DNA, 122 bp, Homo sapiens
gatgtgttctcagctcctgggccgcagctcctggagttggggccctcctttcttgggacccggaggtggtgcttcttgctgctgtggggactgtggggggtcctgactctcaagctgagggg

SEQ ID NO: 221118 - DNA, 122 bp, Homo sapiens
cctcccctcctccgcggaactgctggctccatattagcgagggtgccctggcagcgcgaccgaggccaactacccctggggaccctcccgaggctccccgcaccctgcacaccctcaagatc

SEQ ID NO: 221119 - DNA, 122 bp, Homo sapiens
aataaacagcaggcattaggatgaggatgacagttctgtgggagccacagagatgtgtctcgcaggcggctgcctccaagggccacttgaaagatacccagtctgcatggttgtccctgagc

SEQ ID NO: 221120 - DNA, 122 bp, Homo sapiens
ctatgcacccatttcacagatggcaggtcctagctcagagggttagggcaggcccagaaccgcatcgccatcgcccgttcgcaggcctgattgagaggctggaaacgaggatgggcagggag

SEQ ID NO: 221121 - DNA, 122 bp, Homo sapiens
cagactgcccagagcaaacccaaggtgtctactgtccttgggaaagtttcttaccttctccgtgttgccaattcctgagcgcttgcttggaggttctagtagagagcgcagctactcatata

SEQ ID NO: 221122 - DNA, 122 bp, Homo sapiens
gcgtccaaaatctggttccttgttggatttgaacagattatgtggctcgtcggggcgaaccgagggtttttatttacttggaaagaatcatcacagcccgcgaattcacaagctggatttag

SEQ ID NO: 221123 - DNA, 122 bp, Homo sapiens
gggcatgttagcctcagcctccttatccgtcacatggagaaaacaatggtgcctccgccccgcaggttacacgagggctgactattcattgattccctccacaggcatttactgaatgttaa

SEQ ID NO: 221124 - DNA, 122 bp, Homo sapiens
caacaagagcagggctggcgggcaggccaggaaagtcctccaggatctgatcttgccttccgactgaccagtgcgagcgacttctgcttctcttgggtcttctagtggtagaagacagctgg

SEQ ID NO: 221125 - DNA, 122 bp, Homo sapiens
ttttccatgtgctctcactctgtcaaaacactttttctcacctgcttgtcttcatggctacgtcctgctcatctttcaggttttagcttaaagttcactttctcagggagattttccccaac

SEQ ID NO: 221126 - DNA, 122 bp, Homo sapiens
ctctctcaagccaggaaactgccacctcccacctgaggccccagggctgagtctggcacccgggcagtttggatcgcattctcagttaaggggaagccagctcctggctgagtcccatgcaa

SEQ ID NO: 221127 - DNA, 122 bp, Homo sapiens
tggccgggacttcgcaagggcttcctgaatgaatgagtgaacgcgggagaatcaggagcccgtgtgattggccaggactttgcaagtgctttctgaatgaatgagtgaacttgggagaatca

SEQ ID NO: 221128 - DNA, 122 bp, Homo sapiens
actggaggaaggcacagaaagagaaagggcttggaagtagaaagagacattacttacctgcggtggagaccccaagaagatacagccactgctacagaagaaacagatgcacaggccaatga

SEQ ID NO: 221129 - DNA, 122 bp, Homo sapiens
ttgaccctgccacagccaacccataaagccagtgtggtggtaattccaaaggggagcattcgagcaggaaaaggaataggtttccaaaaatgattaagtgcccaaagttctcgaacaatgct

SEQ ID NO: 221130 - DNA, 122 bp, Homo sapiens
caggacaaagccaagatccctttgtaaggttcagtccttgctggccttccccagtctgatcgaatttttttaaagtgatctaagggtctttctttctcaaaggtacactttgtgatagttac

SEQ ID NO: 221131 - DNA, 122 bp, Homo sapiens
aaactctccacaggcaatcctgggcattccactgggttctgtcccacacagctgactggtcggccagggagactctggaaaacagcttggttgggagaaaagagttgaagagaggtgagggg

SEQ ID NO: 221132 - DNA, 122 bp, Homo sapiens
gcacaccttcgagccgaggccagtccggggcccactcctgcgcagcggcagcgatgcaggcgaggccaggccccccacgccagccagcccccgtgcccgtgcccacagccacgaagaggcca

SEQ ID NO: 221133 - DNA, 122 bp, Homo sapiens
tcaaggtcactgagagtgttgtcaaaaggtggtctcaggccaggcttggtagctcacacccgtaatcccagcactttgggaggccgaggcaggtggatcacttgaggccaggagttcgagac

SEQ ID NO: 221134 - DNA, 122 bp, Homo sapiens
acatacagagagttcatacagatccaataactttgttacttattaccaagtcaagtaaagcggggggcgggggtggggggacaaggcatggtagctcacacactttgagaggctgaggcagg

SEQ ID NO: 221135 - DNA, 122 bp, Homo sapiens
cgcgcgctgggacaggctgcttcttcgccagaaccaaccggttgcttgctgtcccagcggcgccccctcatcaccgtcgccatgcccggaggtctgcttctcggggacgtggctcccaactt

SEQ ID NO: 221136 - DNA, 122 bp, Homo sapiens
ggacagacgggcaggcaccaggacgctggctgctgcgtgaatgtcacctgtggtcacggccgacgcccggcgggcctgggcatggagtcaggaccggaaagcgaggccggcagcagcaccag

SEQ ID NO: 221137 - DNA, 122 bp, Homo sapiens
gcggcgggtgcaggatgcccaccctcgggggagcccagctggcatttaatgatgatacagcgtctaaggctgacctcaaggattcccttccaattgcccttggtgggctgctctccatgggt

SEQ ID NO: 221138 - DNA, 122 bp, Homo sapiens
ttccttcacttggagaatacagctgggttctccctaagagacaggtgctgtgctagacgccggggatgccctgagatttcacttcatccaccggcacaatccatgtgtctaagctcttcctg

SEQ ID NO: 221139 - DNA, 122 bp, Homo sapiens
ccaccgggctgtgctcaccttgaattcctggttgatgtcgtcaaagcgctgggagtcccccgggagctgggtgcggatgtcttcggagccgatgaagatgctctccaggtggctccaggttc

SEQ ID NO: 221140 - DNA, 122 bp, Homo sapiens
gggcatctcaaatgagagggcagcatacatacatgtaattggttgcttttttctttccctcggcagtctgtaaaaaatgtgaaaatgctcctgcttctgcctagccattaaaaggcagtggc

SEQ ID NO: 221141 - DNA, 122 bp, Homo sapiens
gaggcgtcactctcagcttctttccgccttccagtccctcttagaggagctgtttcctgccggaactaattatctcgacttgtagctgattcgctacgactccaaaagagactgcaccaccc

SEQ ID NO: 221142 - DNA, 122 bp, Homo sapiens
tctaccatctaggggtagcccaggcaccactgtggtgttatttttctctctactcagttgcgaggtcacccttgctctcaggattcataagccatccttgtctgttccatagctatacaccc

SEQ ID NO: 221143 - DNA, 122 bp, Homo sapiens
cgccaagttcaaactggcggagccgcggcggggacgcgctttcccagcgggccctgcgcgcgccaggccggccaatcccggccagcacagaccccgcgttgccatggcgacgcgtggaggcc

SEQ ID NO: 221144 - DNA, 122 bp, Homo sapiens
tggggctgagtgggagcggctgccagcaagaaagcaaactgaagcaggcaggggactgcacggactatccaggattgtcaaacccatgtccttggaggaaaggctggtaactcagagcttcc

SEQ ID NO: 221145 - DNA, 122 bp, Homo sapiens
agcttgcagtgagctgagatcgagccactgcactccagcctgggtgacagagcaagactccgtctcaagaaaaaaaagaaaagaaaagaaaaggccatcgggatttccacttccagctctta

SEQ ID NO: 221146 - DNA, 122 bp, Homo sapiens
ctcgatctcctgacctcttgatctgcccaccttggcctcccaaagtgctgggattacaggcgtgagccatcgcttttgacccaaatgcaaacattttattagggggataaagagggtgaggt

SEQ ID NO: 221147 - DNA, 122 bp, Homo sapiens
agctctcagggagctgcgcacaggcgttcctagcccaggcggggcgctggcaaccctgcccgccctctgcctgtgtcgccaccacagcccacagggctcagatgtggtttcacagacccaga

SEQ ID NO: 221148 - DNA, 122 bp, Homo sapiens
agcacagcagttacaagcatgacctctgggcttcacagagacctactcgaggagttagctcggctactaacttgggctactaacttgggactgtgggcaacttgtctaatgccctagaagtc

SEQ ID NO: 221149 - DNA, 122 bp, Homo sapiens
tgtgtatattctattcatcagggagagttgggtgaggacgtggtgatggggccaatgctgcggtggccccttggatggtcctgggtgaattcagggactcggcattcagacccctgtcccca

SEQ ID NO: 221150 - DNA, 122 bp, Homo sapiens
agagaggtctgcaagcttcaggggaccccgcagggctggcaggataccctctgctaaaaccgcctggttggcgctctcccggaattcctcttcctggcggtcaggccgggacagtcgggagg

SEQ ID NO: 221151 - DNA, 122 bp, Homo sapiens
tcgaatctgagaacttccacacctgaggcacctgagagaggaactctgtggggtgggggccgttgcaggtgtactgggctgtcagggatcttttctataccagaactgcggtcactattttg

SEQ ID NO: 221152 - DNA, 122 bp, Homo sapiens
cccgaccgcaggagctctcaacgcgaggttcttcttagttgctctccctcaggcaggccgcgttcccttctagtcctatatttctgaagttttttaaaattttccatttataaacgaataat

SEQ ID NO: 221153 - DNA, 122 bp, Homo sapiens
agtgtctagagccaggatgtgcacttccagatgcctgccttacccttcagctcccagctccgccttggtgtgaaaggaaaggccagctggcaccatcaatagctagcttgtcagcagcaaaa

SEQ ID NO: 221154 - DNA, 122 bp, Homo sapiens
tcctcgggacccccctccagccctcctcaagcgcccctcgtcagtctggcctccacgccccgtcccctcagcccgccaacctcactgccacgaccctgcgtggcccctgccgagcccgcggg

SEQ ID NO: 221155 - DNA, 122 bp, Homo sapiens
tcatgtctcttcctcctcccccagcaaatgacggctgctcggaaacttttataaaggaagcggttgctttgtggctgatagatctgaaggtgaagagcttctggccaaaatgattcagcagc

SEQ ID NO: 221156 - DNA, 122 bp, Homo sapiens
ggaaactcgagccacgtccgtgcgcaccgggacagcggccagaactgctgggcgggggatcggtgagctccccagctcccgggccaaactccggagtctgatcgctgattggctggccccac

SEQ ID NO: 221157 - DNA, 122 bp, Homo sapiens
aggagggggaggggatgaagggggctgttgtccaaaatgaggggggaagcaaaagtgacacgcagacacagagatatgtccacacagacagccacatgcacatccagggacacccaggcaga

SEQ ID NO: 221158 - DNA, 122 bp, Homo sapiens
gcacacggaagtcgctcagcagaaaactctcgacttcaccattgcgtcctgcgccacaaacggctccctgagcggagttgggtgcctgagcttcctgcacacctctccacccgcttttcccc

SEQ ID NO: 221159 - DNA, 122 bp, Homo sapiens
tctctactaaaaatacaaaaattagccgggcgtggtggcatgcacctgtaatcccagctacgtgggagactgaagcaggaaatctcatgaacccgggaggtggaagttgcagtgaggcggga

SEQ ID NO: 221160 - DNA, 122 bp, Homo sapiens
acaggcgcccccaaggggatagggctcctgcaaggttcaaggccaagtttgtgggtgacccggcactggtgttgaatgacatccacaagaagattgccttggtaaagaaactggccttcgcc

SEQ ID NO: 221161 - DNA, 122 bp, Homo sapiens
tgacctcatgatctgcctgtcttggcctcccaaagtgctgggattacaggcatgagccaccgcacctggccagctagggcttactttatggtctagggagtttcatgggagtcaaaaaagaa

SEQ ID NO: 221162 - DNA, 122 bp, Homo sapiens
gtaactcaaagaatgtttcttttctcctggtacagggagggcatctttcaaatgaaagtccgtatctcctgttttcaggaagaaactagattagaatgcccttcttgcatctgctgtttttc

SEQ ID NO: 221163 - DNA, 122 bp, Homo sapiens
gggagaggatgggcagctcccactgccccagagcggagctcgaagcacccaggttgcccacggaaaatccaataaaaagacaccagtgtgaatccacgtagccctgaggtgtgtgtggtatg

SEQ ID NO: 221164 - DNA, 122 bp, Homo sapiens
attatagcgtattagcctatgacaaaacagccaaaattgataggagcgtggagggtggcacgggaggaagaagggggaagcagaaatgaaagttcataaatggtcttgggaaaaatatgtcc

SEQ ID NO: 221165 - DNA, 122 bp, Homo sapiens
gcaccgggcctcaacctccccggagggctggactctcgctgccaggctgtggggatcaggcgttgtgggggagggggacacttaacaggtatggagggcggagcagagccccgcagtcactg

SEQ ID NO: 221166 - DNA, 122 bp, Homo sapiens
tgagacggctgctgcccataaagctaaaaaaaaaaaaaaaaaaaatccacagctcagcgtcggccctgggcagaaactgacacatcttaaccgggcacggaggtcaccacgagataacagca

SEQ ID NO: 221167 - DNA, 122 bp, Homo sapiens
attctcttgcctcctctctctgtctcgctttttaaactccatccccagaaaagtggtgaacgccttctccccgcatgctgcttggagtgtagactgtgaatttcccgtgccagctacaatgt

SEQ ID NO: 221168 - DNA, 122 bp, Homo sapiens
ttaagagccgtaacactcaccgcgaaagtccacagcttcactcctgagccatcgagaccacgaacccagtgggaagaatgaacaactccagacgcaccaccttaagagccgtaacactcacc

SEQ ID NO: 221169 - DNA, 122 bp, Homo sapiens
ctctggacccctgtcctggcacctcttcggtccctggttcggtctgcccctttcccaccgcggcccgtcttaggccaggatgtgctccctgccctgcggactctggagcagggcccggccac

SEQ ID NO: 221170 - DNA, 122 bp, Homo sapiens
tgccgggatgggaggggagtggcgtgtcctaggggtcccaggggcatgtactaggttcagcgtggggcgggacagccaggtcacggggctcccagggactaaggttgggtttgatccaggga

SEQ ID NO: 221171 - DNA, 122 bp, Homo sapiens
cttgagcctaatcacattgagcaacctctctgctaatgtcctccagcactttgctgctggcgaccccccatgattaaaaacccacccatcttttgtttcagtggaatagaattcaatctctc

SEQ ID NO: 221172 - DNA, 122 bp, Homo sapiens
ctcaaacaataacaggttggacggacggatggacggatgcatgtctagatgtcgattgcccgttggctcgtgcgtctgtgtccacatgggcactgctgccctcccgtggccaacggcagtat

SEQ ID NO: 221173 - DNA, 122 bp, Homo sapiens
tgatgacttttatacatgcattccttggaaagctgaacaaaatgagtgaaaactctataccgtcatcttcgttgaactgaggtccagcacattgctccaacagtgggtagatagagagggaa

SEQ ID NO: 221174 - DNA, 122 bp, Homo sapiens
ccctaaagtcctatttcactctgttgggaggagggggaaaggtgtacgcaggcgcagtggcgtctaaatttgggcccactaaatgcgtcggagcatctccgcgcccaggcggctcctcctca

SEQ ID NO: 221175 - DNA, 122 bp, Homo sapiens
ctgcggagttgagatgttgacactaaaatggcacagcaggctacttcacaaccccacccccgtcttttcttttcccttcttatcccactcaccccccaacccccagatggtttaactaaaaa

SEQ ID NO: 221176 - DNA, 122 bp, Homo sapiens
ctgttcttttaagcaggagtctcctgaaagattcccgccaggcagtcacagtcgcccatgcgtggtctccagccttggtgctcagcccagccacccgggttctgccctcctgacttcctgga

SEQ ID NO: 221177 - DNA, 122 bp, Homo sapiens
ttctcttaagtacacagacggttttagaatctgtacttttaatgattggtgctgcttagacggtcaaggcaaatttgagtacagccagaatgccacataaacatagccacagaggatgtttt

SEQ ID NO: 221178 - DNA, 122 bp, Homo sapiens
caccctgcaacgggacctttacatactcagccttttgttcatcctggctgcgcttgtccacggcatagcggttttcctccactgtaaactacttctgctgaataactttgttctactcatct

SEQ ID NO: 221179 - DNA, 122 bp, Homo sapiens
aaggaaacggacgagcgtgcgacgcgaggcggggaactggtggctcgaagacgcgcaacacgcgcgatgcctagaagtgctctggtgtcactcccctgtataggacctggcgagatggaatt

SEQ ID NO: 221180 - DNA, 122 bp, Homo sapiens
agatgccagttgcaagtattgagtgcccaggtaccacacttctgtctgactcggctacgacggggattcccaggaccccttcctcaagttcaataatttactgctatggctcaaagaactca

SEQ ID NO: 221181 - DNA, 122 bp, Homo sapiens
ggtgtgcccaagactggcctcctgataattgtcctgggtgtgatcttcatgaagggcaaccgtgccactgaagaggaagtctgggaagtgctgaatttgacgggagtatattctgggaagaa

SEQ ID NO: 221182 - DNA, 122 bp, Homo sapiens
agcgcgcgagaggagtggttgtgcccattgcacacaggcggatctgaggcttggcgacgccgctggtcgcgacctgggacaggacgagcacaggaaccgcctggcctgcgtccccgcccgcg

SEQ ID NO: 221183 - DNA, 122 bp, Homo sapiens
attccctacccctccaaaaggtaatcttaggcattgcaggtaccttggcaacatgtcccccgccattccctatccctccaaaaggtaatttaggaagctgctggaaataggggaatgggaca

SEQ ID NO: 221184 - DNA, 122 bp, Homo sapiens
cccatgctgctcccaccagaaggtacagcaaggagaatgatggaaaacagctgtaattgccggcaagtcgaagtttgtaaccccttggcccataggggctggctactgaggacaagttctga

SEQ ID NO: 221185 - DNA, 122 bp, Homo sapiens
caggacaatggctcagcacatgctgactgaataattttttacaagacctggtctgcaccacgaatgcagcagcctgaataaagcactgagagaagaaatgtagggacaatgatggaagtgtc

SEQ ID NO: 221186 - DNA, 122 bp, Homo sapiens
cgtcttgtttgaacgcagtgagagcacactcgtttccagatcactcgggaccgggtgtctcggatctgtgcagactatgtatggctccggcctcaggcggccagggcgggacaagcacgcct

SEQ ID NO: 221187 - DNA, 122 bp, Homo sapiens
aggactcgctgctgctgctgctgcttgtgtaggtcggggagccagagatccccgaggacgcgcgccggacagtcggcactgaccggcccacctggtagcagaggacacccccagccccccaa

SEQ ID NO: 221188 - DNA, 122 bp, Homo sapiens
acttggactcctgaattcaagccatcctcctgcctcagcttcttcttcttttttttttctcgctccgtcgcccaggctggagtgcagtggcaagatcttgactcactgcaagctctgcctcc

SEQ ID NO: 221189 - DNA, 122 bp, Homo sapiens
ctcccgggttcaagcgattctcctgcctcagcctcccgagtagctgggattacaggcgtgcgccaccacgcccgactaattttgtatttttattagatacggggtttcaccatgttggtcag

SEQ ID NO: 221190 - DNA, 122 bp, Homo sapiens
tcacctcttgaacactttgctgcttagaaatttcttccagtgcggtaacgtgaccgatcccggagaagccggcgggagccccggggagagttctcttttctttgtgaagggcagggcgccct

SEQ ID NO: 221191 - DNA, 122 bp, Homo sapiens
agaaaccggcccactgtacagacgcgcaagtttataacccgggaagagctgctctcagagcggagggagaccatataaccctgggactctgccgtacctcctagaggaacagagcgcctctc

SEQ ID NO: 221192 - DNA, 122 bp, Homo sapiens
cactgtgatgattatgaagtggcagcgctgggactggcgcccagcccgggcgggcttacccgcctcgctgcaccgacctcctcggcagcgacctcaccttccatgggaagctgtttccttct

SEQ ID NO: 221193 - DNA, 122 bp, Homo sapiens
atctgggaaacttgaagtgggatcagggagggctgtgagatcgcaggcgccgccccgcagcgaggcgcctgttgagagctcccgcaggccttcgcaagccggagccctcagcggacgatgtt

SEQ ID NO: 221194 - DNA, 122 bp, Homo sapiens
aggccaccgccgtcctgcatctcttgatgtgactggtgacagcccaccagggcggggaaccggttcacctcccaagtgctcaccgggggccgcgctttcgactctccctgcacaggccgtgg

SEQ ID NO: 221195 - DNA, 122 bp, Homo sapiens
gcagctcccgcttcggcgcgccagcgccccggtccctgtgccgtcgcccgcggcccccgacggctcccgggcttcggcccgcctaggtcttgcctgccttctgctcctgctgctgctgacgc

SEQ ID NO: 221196 - DNA, 122 bp, Homo sapiens
ttggcaggactcgagctggaagagatcctataactgctttggatggctccctcgtgcgcacgtaggtcacaaggctgaggcaacaaatattcagctgaaaataaagtggagaaggaaggctg

SEQ ID NO: 221197 - DNA, 122 bp, Homo sapiens
gcgattggtgacgtgggcaccggggagcctgccgcaacagcccctttggactcggggtgtcgagttatatgagttttatgcgttttacgatctgctgactttgggcttttttttttttcttt

SEQ ID NO: 221198 - DNA, 122 bp, Homo sapiens
gctcgggcccagcaggcgcgtcacagggtggagggggcgggactgcaccatttgcgcaggcgcctccaatagttggccaatggaaaagctgtggctctagaaagccagcccgcgctccgttc

SEQ ID NO: 221199 - DNA, 122 bp, Homo sapiens
cgctgctgggagttttctgcaaataccccccaaagcctgaaggcgggcttcaaacgcaggcgccggggaccatgggagccttcaaatagctgcgctggcgcaatgataccttaatgatagat

SEQ ID NO: 221200 - DNA, 122 bp, Homo sapiens
tgagtgcagtaatggggcctgggcttggatttgggagtaaccacctggccagccaaacaacgatcttttttttgagacggagtttcactcttgttgcccaggctggagtacaatggcgcaat

SEQ ID NO: 221201 - DNA, 122 bp, Homo sapiens
ctggatggtgatgcccaggaaggtgcccaagtggcgcagctccgtgaggttgtgcaggaccgggtcgatggcccaggactcggaggcgatccacacggcgccagtgaagttctggcgcagca

SEQ ID NO: 221202 - DNA, 122 bp, Homo sapiens
cgctgttcatcgtgtggtacgtggcgtccggcttgaaaggatggctcttgccctgggacacggcgatgtccacggccgccagcgcctcggcccgcgccagcagcgtctcgtccaggctggcg

SEQ ID NO: 221203 - DNA, 122 bp, Homo sapiens
ttcaagctggtgtccacctacaagaattactactcgttggtgctggacagagctctggaccgcgagagtgtgtccgcctacgagctggtggttaccgcgcgggacgggggctcgccttcact

SEQ ID NO: 221204 - DNA, 122 bp, Homo sapiens
gccccagccgggggggaggccgggcgcccgggccagagtccggccggagcggagcgcgcccggccccatggacagctcggccgtcattactcagatcagcaaggaggaggctcggggcccgc

SEQ ID NO: 221205 - DNA, 122 bp, Homo sapiens
cgctctgcgtccctcccggctctctgacgtctcccccgcccgaatccccgcaccgccccccgcaagccctacaacctctgctttaagaacccttggaggcactgctgcgcttcccgcgagga

SEQ ID NO: 221206 - DNA, 122 bp, Homo sapiens
attatgaaaactgggcttcaaaaagggtaggtgacaattagctatttgaaaatctctcatcggttagcaaagatcaaaatgattctaaagtagcactcctggaaatgaattgtgagactcat

SEQ ID NO: 221207 - DNA, 122 bp, Homo sapiens
gctttccaagtcaaagaaaggggtgacggacagcacctggaaaatcgggtcactcccacccgaatactgcgcttttccaacaggcttaaaaaatggcacaccatgagattatatcctgcacc

SEQ ID NO: 221208 - DNA, 122 bp, Homo sapiens
aggcagaggtggcagtgagccgagatcgcaccactgcacattttagcctgggtgacagagcgagactccgtctcaataatgataataataaagtacaacaaaaatgtggaaacatggaggac

SEQ ID NO: 221209 - DNA, 122 bp, Homo sapiens
aggcttaacagtcattggctgaattgggccagagaggtctcattggctgaattcctgcaccggctcgtcggaggcgggacccaaagtaggctaggcctacggaagctgggtcttcttgctgt

SEQ ID NO: 221210 - DNA, 122 bp, Homo sapiens
caagtgggtctcggttgcatggatctcggtgcgcttggtttggccggagcagatgggggccggaagggacctgtggtccgcaggcgccctcccagcgggccagtcacttggttcgggccctg

SEQ ID NO: 221211 - DNA, 122 bp, Homo sapiens
gctggcagatcgtctctgagggtggggctgtggcttctctgatctcaggcccccatcctccgcccaggccccgcccctgcccctcccagcactgcctggaagtgtggggtgagagctcctcc

SEQ ID NO: 221212 - DNA, 122 bp, Homo sapiens
ttccaacactcttctttgcagaaggtattctgcacctacagctggaagcaggagacgaaccggccaaaggtgtcttggctgtgctctgccttctttccttagctttcctaactctgcctttc

SEQ ID NO: 221213 - DNA, 122 bp, Homo sapiens
ttgcgatcccgttcttctttccccctcatttcttgtttgtctcccttctgctgtggcaatcgcctttggtgatgtcgaggttcacagcataaccagtggagatagttcaaggctgaacattg

SEQ ID NO: 221214 - DNA, 122 bp, Homo sapiens
tgagaaatgtttcagaaactttaaaagtactctatgcaaataaagtattatctttaactacggttcagtttattttactttagtcaacaacagaccttattcagactggctcaaactaaaat

SEQ ID NO: 221215 - DNA, 122 bp, Homo sapiens
actgttgttttgactcactttgtgacgtaggtctttctcaccagtcaagaaaatataatccggagatagcctctgggctggctttagctcagcggttacttcgagtacattgtaaccacctc

SEQ ID NO: 221216 - DNA, 122 bp, Homo sapiens
ctgtctcccaaagtgtagaaagattttttttgttgttcagtttctcttaggacaacaggtcgttgtccacagtatgtgactcagcacccttggatgatgaagttggctaagatgttggcagg

SEQ ID NO: 221217 - DNA, 122 bp, Homo sapiens
tcatccaggataagtacacacggtttccggatcaatgctcgggccaacgccactgcctgtcgctgaccccctgacagctggctcccagcctcgtctacctctgcagagcaaagggccaagat

SEQ ID NO: 221218 - DNA, 122 bp, Homo sapiens
gcagggccacgctccctctgaaacttgtaggagagtttttccttgcctctttctagcttccggtggtttgctggcaatcgttggcattcctgggtttgcagctgcttaactccagtctctgc

SEQ ID NO: 221219 - DNA, 122 bp, Homo sapiens
ttgaataatcagtaagatttttgcctgaaggttttcacaaaatatgcccctttatccagtcgaacatggatgctaagcatggccagtgtgactcatcctgttgcttcaaaggtaaatgtttg

SEQ ID NO: 221220 - DNA, 122 bp, Homo sapiens
aaaaaccttaagcacagagagttctaaagtgtttttgagggggccatgcattcaggcatccggcagaatcaaatgcaaattctatttagagaaagagatcaaaataattctcacaaataaag

SEQ ID NO: 221221 - DNA, 122 bp, Homo sapiens
ctcctgacctccacccacctcagcctctcaaagtgctgggattacaggctggagccactgcgcccagctaggactagtattcttgattagtggttcttgtctgtacttgcttaactggaaga

SEQ ID NO: 221222 - DNA, 122 bp, Homo sapiens
ggtgaccggccaggagacggtctcccaggtcgcggctcaggcagcgccactggagggcttcgccccggaagatctatcgtgctcctggcaggcgcgtccctgcagggcgaggccaccctgga

SEQ ID NO: 221223 - DNA, 122 bp, Homo sapiens
ggaaatgcaggagagcgggcaccctcaggaccacggggaaggccgaggggaggcacggggcgggtggagccagcctgagcctaggcgcgccctctggcacccactcaggctcggtactaggc

SEQ ID NO: 221224 - DNA, 122 bp, Homo sapiens
ctcaggccagcggcagctgctcctgtgtgagacgttgacggagaccgtgtacggtgaccgcgggcagctaattaagtccaaggagcgtcgggtcttcctgctcaacgacatgcttgtctgtg

SEQ ID NO: 221225 - DNA, 122 bp, Homo sapiens
agccgattttgtttggaggggaggtgggcgtgtttctcccctgggcccttcctgctgaggcgacttgtctttcactgacggtggctctgtccccaggaccacatctgctgggtgccctccac

SEQ ID NO: 221226 - DNA, 122 bp, Homo sapiens
aaagcaatgtaaatagaggattgacatatgtcatgtccaggtgaacattttaggagttctcgcatgatttatcatgttccatttccccagttgcaatgacagtggaagcacatgttgagata

SEQ ID NO: 221227 - DNA, 122 bp, Homo sapiens
gattcacaataggcgctcaataaaacattattgtcctgaattaaattcccggggaaggcgcgccctcggggacttgggtacttcaggccccgcccaccactcccctggggttccaggccacc

SEQ ID NO: 221228 - DNA, 122 bp, Homo sapiens
gaagctctaagtagacgctgctcaagattcaggcagaaggtggccaggcatggtgtctcacgcctgtaatcccagcactttgggaggttgaggtgggtggatcacctgaagtcgggagttcg

SEQ ID NO: 221229 - DNA, 122 bp, Homo sapiens
cacaaaaaggaagagtgtgaagccgaacttcttagaaatatctgaggtgccttttcgaaccgcatccatttgaacaccaagtgtttctctaattccaataaaatgacaaatttaagttgaca

SEQ ID NO: 221230 - DNA, 122 bp, Homo sapiens
ctgaggcccggctggctcttccagcctcttcaacagggggctgcattacctggtctcttccggaagctcctcgataaaaccagactcgcatcttggacagatataatcctgcaggagagaac

SEQ ID NO: 221231 - DNA, 122 bp, Homo sapiens
ggcgcaatttctcattgatttctagaatgttcatctctgctttctcactggaccaggggccggcagataccaccatggtgacgtttgtggcagaagaggtggagccagggactggggagaag

SEQ ID NO: 221232 - DNA, 122 bp, Homo sapiens
gaggggccggagtattgggaccaggagacacggaatgtgaaggcccagtcacagactgaccgagtggacctggggaccctgcgcggctactacaaccagagcgaggccggtgagtgaccccg

SEQ ID NO: 221233 - DNA, 122 bp, Homo sapiens
ttgtcaagtaccttttccccaaaacttgatacggatgtgtaacacggcgcctgcttagcacggtgcctggcacccagtaggcgctcagtaaagatttgttgaacgcatgagtcactaagctt

SEQ ID NO: 221234 - DNA, 122 bp, Homo sapiens
cccactgcgatcacaacacccgcgccctccatgcccggagtgacaggcagaggcgggagacggtcgtacagcccctgcctagccatgaggtctgcgaagttgagcccgcaggcccgcagacg

SEQ ID NO: 221235 - DNA, 122 bp, Homo sapiens
caaactccgggcctccagcaattctcccaccttggactcccaaagagttgggattacaggcgtgagccaccacacctggctgatggttgtatgttttggttgagtattgtatcatttacaat

SEQ ID NO: 221236 - DNA, 122 bp, Homo sapiens
atccccgggttactgggttaaggatttttgataggaaggctactggttgtcagtggcctccgtgcttttgggatatgcccttgtttacactgacaacaagatggaatagctacttgagggta

SEQ ID NO: 221237 - DNA, 122 bp, Homo sapiens
gtgttcagcttaacatgggaaacatttcctataaaacgccccatcttaggtcgaccctgccgttgtccctcacagaactggaccaaagtctgaatggacgcaattgacacatatctcagggt

SEQ ID NO: 221238 - DNA, 122 bp, Homo sapiens
tgctcactccctccatcctgcaggcctgaacgccgtgcaccaccacacggcagcttggcgcgtcccccagcctctgctcagatgcccctcggcaagaccttcctgtggccgagctgtgcaac

SEQ ID NO: 221239 - DNA, 122 bp, Homo sapiens
gcggggggaggagaggggagcggcgggcggggccgggctgcagggagcggcgggctggggcgggctcggggcgggctccgcgctccgtccgccccctcgcgcccgcgccgcgctcgctcagc

SEQ ID NO: 221240 - DNA, 122 bp, Homo sapiens
gggaggtcatgggaatgtgggctatggctgcagggacagatggctgccaagggttgggtgcgtttggtcacagcttcatcagcagcagagacctggaataggaaggcaagccggaagttata

SEQ ID NO: 221241 - DNA, 122 bp, Homo sapiens
cgctcctgcgacttctagggcccgaaagctggggaggatgagagaccaggggcctttcgtcgtcccctgggctgggcagaggctcagcctgtgccgcaaccctaagcggcttctggcaagtc

SEQ ID NO: 221242 - DNA, 122 bp, Homo sapiens
aaccaggtttgcagcgaaggtcctggcttaacttaccccgctggttacacgagaggaaggcgggaggaagaatatggcagggccacccagctcttccaaatgccagggcctgcagaggtcgc

SEQ ID NO: 221243 - DNA, 122 bp, Homo sapiens
ccagcactaggtgaacgggggtccgccactcgagccagatgcttgttgtgcggcggaggccgcgctggtgtgactgggacgctcttggctgagcccatctcaaccaggagttgcagggtggg

SEQ ID NO: 221244 - DNA, 122 bp, Homo sapiens
gggcctgggccttcttggcaagtgggaaacccaatcttttggctgcctgcctcttcctgccgcagaagagcgacttatggatgctgagagcagccactgagagggaagcttagggctccatg

SEQ ID NO: 221245 - DNA, 122 bp, Homo sapiens
cgctgctcctccttcttgcgggccgcgccctgccggcagtgacgtgccccgccctgcagccgcgggattcaaactcccggaagcggcatccacacctgatggtgtgactcggccgacgcgag

SEQ ID NO: 221246 - DNA, 122 bp, Homo sapiens
agccgtgggcttggggtccggatcgcggccgcggggcgctggcgtgcggtgtcatttctgcggtgtaaatgctcccaccttggccgatttcaagccaccaggtgaggatggcactacaggag

SEQ ID NO: 221247 - DNA, 122 bp, Homo sapiens
gcaggcccctcgggcggtggcgaggaggcgcccaggcggaggcggcggcgggcggaggagcgcaggagcgggcggccaggccaccgcgcggcggcggagcgggccgcggcccggcgctcctt

SEQ ID NO: 221248 - DNA, 122 bp, Homo sapiens
acagacgacatcgcctgcaccttttgtggccaggatgagtggtccccggagcgaagcacacgctgcttccgccgcaggtctcggttcctggcatggggcgagccggctgtgctgctgctgct

SEQ ID NO: 221249 - DNA, 122 bp, Homo sapiens
catacagataaatgcccagatcttaggcgtgctgcttgatgagttttaacaaaccctgtccgccgggcgcagtggcttacgcctgtaatcccagcactttgggaggccgtgggcaggtggat

SEQ ID NO: 221250 - DNA, 122 bp, Homo sapiens
agggcccgtccgggcctgcgcgggaagccctgggttggccttggtgctctgtgatgcccacgctgggtgcaaatgttgctttggtaaaaataacaacaacgaaaggaaaagccaagccggac

SEQ ID NO: 221251 - DNA, 122 bp, Homo sapiens
gcagttcacagacctctgcattccccaaggagacactgggggaggggcagcccacagaaacggggaggtgggaatcattggacctgcatgctgccagctgtgagatgccacatgtccagcaa

SEQ ID NO: 221252 - DNA, 122 bp, Homo sapiens
tactacctgacattctcaaacccttctttcctttgtactttttctgtgaacagatggtttcgtccagcttggagtgggtttaggggagactgagaaaacaagacggctgcctgcagttttag

SEQ ID NO: 221253 - DNA, 122 bp, Homo sapiens
tatgggtaatgatgactttcttcctctccttatctgtattttctaacttttttcaatgaccgtgttagttatgtaattttaagtttttttcttaaataaaaagaatcttcccaaattaccag

SEQ ID NO: 221254 - DNA, 122 bp, Homo sapiens
tggaatgaaacagcaaagataccggggacaaatcattcttgttgcagaattccttcaatccgccatctttttgttctagtcttgataacgggaataacatccacaaaacgcaaggtggcgct

SEQ ID NO: 221255 - DNA, 122 bp, Homo sapiens
gcggtcggcagagcggggaggcgaactgcagcagagttcttgctttccggcaggtgatggcgccccccgcggcctagaggtccagcgcccgccgcgagcagcggacagtcctcctgttgtgt

SEQ ID NO: 221256 - DNA, 122 bp, Homo sapiens
cagtcacaaacctaaaaacttttcccccagcaagtttcaagatgtacttttagctgggaacgtccagggaggtgaaggaaggcagcaggtgtgcaggtggctgtgtggagtggacacctggg

SEQ ID NO: 221257 - DNA, 122 bp, Homo sapiens
gtccggggaggccgctcccgcagggtcggtccggccggctctggaacgcccgccgcgggccgcgtcctcgccatgcgccttgcgctctgcaccctgtggcctgcgccttccgctctgtgccc

SEQ ID NO: 221258 - DNA, 122 bp, Homo sapiens
ggcagggcctagcccaaggcaaggaggacccaggcgctgtgcggcggggtgtggggagatcgcccagacaccgggacagtcggacacacacactgactgggacccacagatccacaccccca

SEQ ID NO: 221259 - DNA, 122 bp, Homo sapiens
tcaggccatcgtgggtgggggtgctgtcacaggtcagattgtgggcctcggagtctccgtcgaccccgagggcacgtggggtccaggcggccgccctggcacaactgccctctcacctagtc

SEQ ID NO: 221260 - DNA, 122 bp, Homo sapiens
gtccgtgccctccccacagccccgccccagagtcaccggaggacccactggcgccgccgccgccgcagcagcagtgcagcaaaccccacccacccgacccgccgccgcggcaaggacgcgcg

SEQ ID NO: 221261 - DNA, 122 bp, Homo sapiens
caggacagtcaactcaggcgctggactctcattctggttggattttatgacagccgtattcgccataagaattctagagccagaccttgttacttcacaattgcctcacgttgcaggacaag

SEQ ID NO: 221262 - DNA, 122 bp, Homo sapiens
gttgggcatcaggtcccactggggcacacagcagagcaatgaaattcctgcatattaagacgtcgtcttatcccaatctcaaggtcacttattttcctgatgatagctcaggcgtatgtttt

SEQ ID NO: 221263 - DNA, 122 bp, Homo sapiens
gtcacttaaaatatcgtaactgtctggaggacaataccccatgctgaggattaatggtcccgccggacctttgattcaccagtgccttttcttcgcccttgacaaattggatttttaggaat

SEQ ID NO: 221264 - DNA, 122 bp, Homo sapiens
cagttttggaagaatggtttcacattgacagtgaggagcaccaagaggaaggaacggtaccgcattaatctacacaagagatcgtggaagccatgaccagggtcatggcaagtgaggagaag

SEQ ID NO: 221265 - DNA, 122 bp, Homo sapiens
acgcggtcgccctgcgcggcccacaggctggtgggaggcaatgacccctcctgtgaagggcggcggccgaaggcagcaagcctggccaggggagagaggacccactcacgttctcgaagcct

SEQ ID NO: 221266 - DNA, 122 bp, Homo sapiens
aaaagtttttcactacttagtacaagcttacaaaactcagaccactcaccagaaaaaaatcggcatttatatagttgtgttacttttggtttcctgcatcttttcacatctggctcatttac

SEQ ID NO: 221267 - DNA, 122 bp, Homo sapiens
tcgtgaattattgcccatgtttctcttggatctcaattgcttttcacttggcatttgtctcggctgagtagagaattgctttttaaatgatgagaaatgagtcaacaatgcatggtgatgta

SEQ ID NO: 221268 - DNA, 122 bp, Homo sapiens
ttccagcgagtgacaaggtttcgtggcctgggggcctgagctgtttcctcttggaaaggccgaggaggctccgccactctcctttggactggtcgcgctgaagctctatcctagggcactgg

SEQ ID NO: 221269 - DNA, 122 bp, Homo sapiens
ccttcacccccgcacaagcgcccggggccggagtgtcgcctggctcctatcgggcagcatcgacctgttcattttcctcagagaacgggcatttccatgaaggaaatctgtgcgggggtgtg

SEQ ID NO: 221270 - DNA, 122 bp, Homo sapiens
tcatgtttttgtacatttttaaataatcacatgtttaaatcgtttccatctccaaggcgtcgacctcccctccattctcctgggcgtcgcgcttccctctttgtttcccgcccttgcggttc

SEQ ID NO: 221271 - DNA, 122 bp, Homo sapiens
tgaatcaccggagaaggcagcccggcaagtaaggacgggacgcctgtgtctgaaacccaccgtaaagaaaacccgggccgggacgagcatggccaccgcagcggcgctggtgtagaactgca

SEQ ID NO: 221272 - DNA, 122 bp, Homo sapiens
gcttttagttgggctgcactggcttgtttaaatagccaaacacctgctaggcaagccctgcgcatgtgagtggctatatatgttccttcctttaggatttgcaaggctggagcacaaagaca

SEQ ID NO: 221273 - DNA, 122 bp, Homo sapiens
agctccagcacatcctccactgcagcctgggccctgggagccctgagcatgaggattgggcgagacaccgggactgagggagacagtagactgtaagagacagtctctgacaatgcagcaaa

SEQ ID NO: 221274 - DNA, 122 bp, Homo sapiens
atcaagttcccagaagatttggtgtctggtcaaggcctattcctcatagatgtcctcacacggaaggagcaaggcacctcccttcagcgtctttgataagggcactaatcccattcatgagg

SEQ ID NO: 221275 - DNA, 122 bp, Homo sapiens
gagagagactatgtgaaccaacacaccagacatgtgaatgaagaaaccatcttggaccttcgagcccacctattcaagcccccaaagaactccagctccagctgctatatgactgcagtcac

SEQ ID NO: 221276 - DNA, 122 bp, Homo sapiens
tacccgagatgggccaggtcccccatagaaggcagattaataatacccatctccaggagccgggcccagagacgacggggcggggccaggaaggggcggggccttgggagggtgctgtttcc

SEQ ID NO: 221277 - DNA, 122 bp, Homo sapiens
caacaataaatgcccggagggaaaaaggcgggggcagggatatttaaatgggggcgggggcgattctgcctatcactccccacggccgcatctgcccagctgtgagtgacagaagcatatga

SEQ ID NO: 221278 - DNA, 122 bp, Homo sapiens
aggctgggcaggcagggcgccctagtgcaggaacggagcttcaagaagtttggagcccgtcgagcactgaactcaccagttaagaaaacagagcagcaatttgggggcactcggctcccggg

SEQ ID NO: 221279 - DNA, 122 bp, Homo sapiens
ttattcagtcataatgaacaggtccctatgcttgtggatggccataggctcttggatgtccggtgttcctgtgtctatgctacagacagcttggatgatggcccttcctttctgtggaccaa

SEQ ID NO: 221280 - DNA, 122 bp, Homo sapiens
ccgtctacgtctgcaggactccaccactcaggattcacgccgcgcttgtaaccccgaccgcgcttgtaaccccgaccgctgtcccgaacttggggtttgtttgactgtggttttcattaact

SEQ ID NO: 221281 - DNA, 122 bp, Homo sapiens
cccgcaaaaggggaactaatacagaaacactctggtatttgtctgcctctcttgttccagcgccgttttccctatatccggaattcgtccctgcgcattccaatacctgaagcggccacagg

SEQ ID NO: 221282 - DNA, 122 bp, Homo sapiens
ctggccccctcggggagctgccagaactcagtctagagaggatgcacaaggtgggtcgctcgagccgatgaggatcggggcgtcctgtcggacagtaggcaccaggtgaccgccaagtgctt

SEQ ID NO: 221283 - DNA, 122 bp, Homo sapiens
cgccatccaggaagtctcttgagggtggaaggtcctaggaggatgagaagggtacgtaggcgaccacaaatatgcctgattgaaaataaaatctggcggcggctcgcctctgacgactcagt

SEQ ID NO: 221284 - DNA, 122 bp, Homo sapiens
aggtaagacactcgctcccctcgctcgactcctagaacttgccagatctcagagccccgtcgctgctttggagtcccctgggaattgaccttgggagacttcggggaccaggggactttctt

SEQ ID NO: 221285 - DNA, 122 bp, Homo sapiens
tccgcccccttctcccactcccccggactgtgcccaaggtgtccagagctgcctcaagcccggtggtctaagcaggagacttggtgacgctccttcagggactggcttcaggaagttaactg

SEQ ID NO: 221286 - DNA, 122 bp, Homo sapiens
gtctgtgctgctggtctgggtcactgtgataatcgagcgcgtcgcccgctcgccaccttgcggccatttctgtccactgcagcttcgtgagcccgtggtcaggagcgctgaccaggactctc

SEQ ID NO: 221287 - DNA, 122 bp, Homo sapiens
ttcaagcaattctcctgcctcagcctcccaagtagctggtattacaggcatgcaccaccacgaccagctaattttatatttgtagtagagatggggtttctacatgttggtcaggctggtct

SEQ ID NO: 221288 - DNA, 122 bp, Homo sapiens
ggaaaggtcgcacgtgtgttggtaaatggaaaggtttatgaggcgcaggtggtcgtgctccgcggagattgtggtattagcatgtcaaagacaaaacggaaccaaggtatacaggcacagag

SEQ ID NO: 221289 - DNA, 122 bp, Homo sapiens
accagcctcagagctctgaggtgcctgggctgagcttcccttcagaccagaatcccgccccgttgaggctttgagaaaggagtaggagccgagcattccggcagaggaagaaaaacggccca

SEQ ID NO: 221290 - DNA, 122 bp, Homo sapiens
gatactatattaaataaaatgagaacttgtccctaacacagttagtgataggctgaaacacgctgattgcactctttacccatttagtgatttttctcaagttactctacaccatgtattat

SEQ ID NO: 221291 - DNA, 122 bp, Homo sapiens
attcaggatgcggttccgggcagcccggtagatccggccatataggatgatgagcaacaccgagggaatgtagaaggccccacaggtggagtagatggtgtaggagatctgagaggtgttca

SEQ ID NO: 221292 - DNA, 122 bp, Homo sapiens
ggtcggaggtcactgagggcggcagggctaggcctctgccacctcctcaggggcgagggtcgggccaggaattcaggaccaggcacaatgacagcagcatctgtttattgacaattccaggt

SEQ ID NO: 221293 - DNA, 122 bp, Homo sapiens
aaggaacgcccagggaaaccttctcagaactaactcagctccggcgctagcagcagaagccgagtctttcataattgtgcgaccaactcctccgggtgactggccacagggacgcgcccgcg

SEQ ID NO: 221294 - DNA, 122 bp, Homo sapiens
ctctctgtgctgagcctcctccctggggcccagagctttgtctgatcatgtgtgctggggcggggtttgtccaggaagctctgtttcctctcctctcattcctacctttgtccttactttct

SEQ ID NO: 221295 - DNA, 122 bp, Homo sapiens
ctttccgtgacaaacccattagttcgtgtgcagatttttccattcaggtcgcttctagggcgaacgcttttgttcgctaccactctgtagtgcgagaggaactagagaggcatgtaaagcaa

SEQ ID NO: 221296 - DNA, 122 bp, Homo sapiens
ccagcacacacacgtgtctagccacccagacagggccatgaaaggcacacttttttctggcgggttgcagcggctcacacttgtaattccagtgctttggaaggcagaggcaggaggatcgc

SEQ ID NO: 221297 - DNA, 122 bp, Homo sapiens
aaatgctcccctatggaatttcccactgctaaggtagttcggtccaggatgcccgctcaacgcgtattggaaggtcagccgaattgttgcaatgaaacaaggttttaatgactaaagatgca

SEQ ID NO: 221298 - DNA, 122 bp, Homo sapiens
gcgcgggagcattgagtcgggggcggagagcctggggcgccggggctgggcgcagcgcggcgcggctggactccgggcgcggtggcgccgttgagagagacgcgcagctcgcgaaatgcccc

SEQ ID NO: 221299 - DNA, 122 bp, Homo sapiens
ccagcggggacgtggaggtgacatttctctgacccacaggactgtgggcgccctgccgagcgtcgcgcggtcttggggcgacctgcagtggggcccctgcggcgcagcgcgcggtgggactg

SEQ ID NO: 221300 - DNA, 122 bp, Homo sapiens
gaggcctctgaggaatggctgaagagcagatccatctacatggggctgggaggggaggtgcggtcaccgctcagccgccgactcagccgagggagaccttggccagcccctgccactccgca

SEQ ID NO: 221301 - DNA, 122 bp, Homo sapiens
tcttctccccggctgatcccagcactctccgtgacagcgcctcctgactcagcccaggaccggcttcttctcacgacctgctggagactggacgcccacacctgacccggaactcggaggcg

SEQ ID NO: 221302 - DNA, 122 bp, Homo sapiens
cggaggcgggactttccctttttcttgaaccccattgggttaagtccagtccgagacaagcgtctctcctcagcagtgggaggggtgatttggctcatccatacttaggaatttggggtttg

SEQ ID NO: 221303 - DNA, 122 bp, Homo sapiens
ttgtcctagcacctgacgcctcgttgtacatcagagacggagcattttacaccttgaagacgtaccctgtgccattccaaagggaggatgtgaaagagtcttttgttagtctcgggcataat

SEQ ID NO: 221304 - DNA, 122 bp, Homo sapiens
ctaccccccaccccccacctccgcccccgtctctataaaaataaaaatgatactaataaacgctctaaggcatagtttctaaaagcatggattgtggaactatgtgaccttgagcaagtcac

SEQ ID NO: 221305 - DNA, 122 bp, Homo sapiens
gatggcagccagtgtgtgttttccactagagagctctctaacagcaagggctgtgtctgccgcagtcttttcttcatcttggccatcagcagcttaacttcagtgattaattttcctcctgg

SEQ ID NO: 221306 - DNA, 122 bp, Homo sapiens
gatggggtttcgccatgttggccagactggtctcaaactcctgacctcaggtgatctgtccgcctcaacctcccaaaatgctgggattacgagcgtgagctaccgttcctggccggttctct

SEQ ID NO: 221307 - DNA, 122 bp, Homo sapiens
ggactcaaacagagctgtccgcagctgcaactggctgtcttgagaggtggtgacctttctcgagaagggtggaaactgtagccagacaactacttggtgaagcagcatacagagagatcgcc

SEQ ID NO: 221308 - DNA, 122 bp, Homo sapiens
cgcggccccccccgccccctccccccagcccccgcttaccgccccctcccaccctctggacggaaataccgccctctcgcgccacaaacaggaagtgacgtacaaagagccagagacgaact

SEQ ID NO: 221309 - DNA, 122 bp, Homo sapiens
ctataaaaccagatcaaagggaacaggcgtttggtttcttcccagatcgctggggggcctcggggctcaggaagccccaggagtccagcccgctgccgctcactgcgctcttctctccagcc

SEQ ID NO: 221310 - DNA, 122 bp, Homo sapiens
cacactgaatgtgcagcacaacggattttgtgaacgttgccacaacgcccggcaacttcacgccagccacgccccagaccacacaaggcacttggatcccgggaagtgccaagcctgcctcc

SEQ ID NO: 221311 - DNA, 122 bp, Homo sapiens
gaggccgaggcaagtgggtcacttgaggtcaggagttcgagaccggcctggccaacaaggcgaaacccatctctactaaaaatacgaaaactagcaaggcgtggtggcaggcctgtaatccc

SEQ ID NO: 221312 - DNA, 122 bp, Homo sapiens
aacacatccttgggcctttctttgcatgccatttttccacggtttcaaaaagataagcttcgcctataaaaggagtttttgttgctatctggttgcgtgtggaacctgacggaactgccacg

SEQ ID NO: 221313 - DNA, 122 bp, Homo sapiens
gagagaaaagaaggaccttgtgtttgtattcataccggtgagcaccaaagaatagtctcacgcagttataggacccaggttcagcgatgtgactacttgtccaaggtcacacagcgagctgg

SEQ ID NO: 221314 - DNA, 122 bp, Homo sapiens
acgacatgctggctgtgtggtattacagcaaaggtgttggcctgagaagcaggcttcaagcgcctcttagtaacagttggctggtgaacttggaccaagcatctaattttcctggaccttgc

SEQ ID NO: 221315 - DNA, 122 bp, Homo sapiens
tatgtggctagagacgtactactccttagctataactcgttaactcttatggggcctcagcgttgagatgctcattctaggtacccccgagggggacaaatcccttcctagtggctcggatg

SEQ ID NO: 221316 - DNA, 122 bp, Homo sapiens
tttcctaggtgactccttcctttctcttcccttgtttaggggtgtctgtgagtgtgtccacgctaagcctcgtggccatcgcactggagcggtacagcgccatctgccgaccactgcaggca

SEQ ID NO: 221317 - DNA, 122 bp, Homo sapiens
tgactttcttcctcagccccataaggacagtctgtttcatggacagctgacaacagtacccgtgtaacttcccacaaagcataggactcccctccactacatcctgaattgattaatttcaa

SEQ ID NO: 221318 - DNA, 122 bp, Homo sapiens
gattacaggcatgagccaccgtgtccatcccggtcatattttttatgtgttgatttttttcggtttgtgttacagtccaagtgcgtagtgatagtaccgggatagaaaacaaaaatgtcgag

SEQ ID NO: 221319 - DNA, 122 bp, Homo sapiens
ttgagattacaggcgtagccaccatgcccagcctctttctcttagtgttgactgtgttaacgttgagccccatgcttgtttaatgaggctcataagatgaatagtgttcagtcatttcctgg

SEQ ID NO: 221320 - DNA, 122 bp, Homo sapiens
gccaagaaatgaagagacggtttgagaagacgtaggcggtgggggaacggaaagaggaatcgcgaaactaatattgtccttccaaggacaccgtagggcggatctcgcagctacggcgttct

SEQ ID NO: 221321 - DNA, 122 bp, Homo sapiens
atctaccactactcaaaaagctacctctccctccccccctcagggctgcacagcacttttcgttcctccccaatgacaggcaccatctgtacctggtccagcgactctaccggtgggtggtg

SEQ ID NO: 221322 - DNA, 122 bp, Homo sapiens
atcacgcatgtacgccgtgggaacgggtccaggatcacgcacgtacgccgtaggaacgggcgcagaatcacacacgtacaccgttctgcacagctggcggacgcttcctctttcccacatgg

SEQ ID NO: 221323 - DNA, 122 bp, Homo sapiens
gcctgcaaagtgaggcctcgggctagggttggcgggcgcgtggtgggaaccgcgtggaaccgaagggctcccacgggaacaagggcatcactgacggtacggcctctcgggtctattgaccc

SEQ ID NO: 221324 - DNA, 122 bp, Homo sapiens
gcagctgggatcattcattgactgatttttggataaatgaggtgttagtggaccttgattcggaagattgtgaaagaggataatgggaaggcctggcaccccacggtcctcagatgtcagtg

SEQ ID NO: 221325 - DNA, 122 bp, Homo sapiens
ctcaggtgatctgcctgccttggcctccaaaagtgctgggattacaggcatgagccactgcgcctggtcctgttggtaatactctgtaaattctccttaaaagtatataggatctatagtga

SEQ ID NO: 221326 - DNA, 122 bp, Homo sapiens
gacgtccctgcgtgccctgtgctggcgcaaggcagctcttccgtgcctccgtggtgcctgcggtgaggctgcctgggacccccctgtagatgctgccaccagggtctgctccaaggaacggg

SEQ ID NO: 221327 - DNA, 122 bp, Homo sapiens
gagagagagagagagagaggaggggaccgagagtggcctgtcccagagtgaaggtcatagcggaggcccatggagtatctgattccagccacctgccctggcaggtcactgcacctcccggg

SEQ ID NO: 221328 - DNA, 122 bp, Homo sapiens
gggaaagacgcccgtgatgccaaggcttgggcagcggacagccaaaatcctgaaaccccgcggtgctccctgtgattcactttccagaggcccctcagtgccccgacgctggcccggagggc

SEQ ID NO: 221329 - DNA, 122 bp, Homo sapiens
ctgcaggtgtaccacccctcccgccagcccatgggtaaggggctcggggcctcgagcagccggaagggagccagcagcctctttagaagctgtagaagctcttaggagaggagagggcagtg

SEQ ID NO: 221330 - DNA, 122 bp, Homo sapiens
cctccggcagcgctgctccgagcaggacgtgcgcttccgggcggtgcttatggaccagatcgccgtcaccatcgtcggcggccacctcggtgagcgaggcgggcccggggagggcagggagg

SEQ ID NO: 221331 - DNA, 122 bp, Homo sapiens
ctgcaacttatcagtgactgcctgcgtttgtgttggaggctgggtgtgcgctgcggtgcgcgtgtgagtggatcttttaagacctttgtctgagccgggcagaggcacaagtgccacctgac

SEQ ID NO: 221332 - DNA, 122 bp, Homo sapiens
gtatagttctccaagtaaaaagcatggacatccctgcctcctcccagagttactggtctgcgtatcagagattctactcatcttcaaggccctgttctaagtcacctcttcctggaagcttt

SEQ ID NO: 221333 - DNA, 122 bp, Homo sapiens
ggcgggactcaaagcccacgaggagggccggcccagttgttctctgtctcgttttctaagcgctgcggcagggctggtggtgaattcagataaacaggcacaaagggccagtggggtcgcta

SEQ ID NO: 221334 - DNA, 122 bp, Homo sapiens
acaaacagagatatatcggagtctggcacggggcacataaggcagcacattagagaaagccggcccctggatccgtctttcgcgtttattttaagcccagtcttccctgggccacctttagc

SEQ ID NO: 221335 - DNA, 122 bp, Homo sapiens
acccgggttgttggaggtgtcagaggtcactgtccacttccggccacagggcgggccccacggtactgatgtgttgtccggctgccaggctaccaggcagtggttcaggtcctcagcaaggc

SEQ ID NO: 221336 - DNA, 122 bp, Homo sapiens
gctcccggtagggctaacatacttaagaggaacatggaattgcactgcctgttctgtgagcgttctgatctccctggctgtaccacatgtacgccgcatacagacacactctacctctctct

SEQ ID NO: 221337 - DNA, 122 bp, Homo sapiens
ttttactttcagttggattttgctctgggtaaatgaattcaaacacagtgaagcaggaggcgggggtattgtgccggaaaacccaagccatgaatctgaaggaaattctacactcgccaaat

SEQ ID NO: 221338 - DNA, 122 bp, Homo sapiens
gcgcacacgtagcgccgcacgtggtgcttgaaggccaggctgaggtactcgccgctaccccgcttgaactccatattgcgggtctcgctgcccaggaaggcaccctggaagagctggtcctt

SEQ ID NO: 221339 - DNA, 122 bp, Homo sapiens
cctgaacaggcagcattctctgccctacagggcttttctcccagcgaatttgcaagcctccgggtctccgtgacgcgtcccatcctccccatctggatgcatctccttgtccctctgtcctc

SEQ ID NO: 221340 - DNA, 122 bp, Homo sapiens
aacaggcatataaaatttgcacttattttatattgaaagatacatgcaacttcatttacccggcagaacaataatttgtatggcaaacatatctctgtgtctggaattggttggttcttggt

SEQ ID NO: 221341 - DNA, 122 bp, Homo sapiens
atggtaggctttcgtgtatgaaaatttacaaggcttttaatggactgcattatggaaggccgtgcggggccagtcggtggggagataaggccgctgggcgtgcatccatctcatggctcagt

SEQ ID NO: 221342 - DNA, 122 bp, Homo sapiens
taaaagataataaaagcctagcaaacctaagtaatccattttcagatgttaatccaattacgtaaacaaatattacccttttttttttttggtcattgtttcaaggataaagtgtaaatgaa

SEQ ID NO: 221343 - DNA, 122 bp, Homo sapiens
cacaccagcatcgctgcatttcttagaacacatgggcacatttcagcctcagggcctttgcgcatgccattccctcatcctgaaatgcttttcttttggtcttcccaggacagaggtctcag

SEQ ID NO: 221344 - DNA, 122 bp, Homo sapiens
caagtagccaggattacaggcatgcgccaccacgcccagctaatttttgtatttttagtgcgcagctagtttatgtagttttagtggagacggggtttcgccatgttgggcaggctggtctt

SEQ ID NO: 221345 - DNA, 122 bp, Homo sapiens
ggaagcgagggtagtggaagaagttcatcggctctttgggggtagaagggctgcctctctcgcagacaaggacctggaggccacaaatcccaactcagtagtggtgatgagagagtgggacc

SEQ ID NO: 221346 - DNA, 122 bp, Homo sapiens
actcagctcctattaattgttgccataagggaatacaatagtccccaccattctcatcgccgtggtttcagttacctatggtcaaccacagtatacaaatatagaaaagaacgttccagaaa

SEQ ID NO: 221347 - DNA, 122 bp, Homo sapiens
cacacatttgaacctcatagccaatgaacagacccagcacttagcaacttctccctcctgcgccccagagaagggagaaaaagagggagcagaggagcaccagctacttcccaaacagcgcc

SEQ ID NO: 221348 - DNA, 122 bp, Homo sapiens
ggacaacccttggacccactcccacttgccagggtggagggccaggaagcagtaagaatccgcgagaccagactcggctcactgccgacgcgggtatagacctcgctcccatcggaccccat

SEQ ID NO: 221349 - DNA, 122 bp, Homo sapiens
agcagtgcatccatggaggtgcgggagaagagcaggagctccaaggcccccgcagaccaacgcccttggctgcacgctcagtgtcgcttcgtggaggagaccttctttttccgtgctgcgag

SEQ ID NO: 221350 - DNA, 122 bp, Homo sapiens
cggacgccaccactgcgcaggcgcggcagcctgaggggctcgccgggaaatgtggtttagcggccctcacctccgcggggcgcaaaccctgcagctccggggcaggctgcggggcgcgcggg

SEQ ID NO: 221351 - DNA, 122 bp, Homo sapiens
tttcccatcctccgaactatcgtccatggagtgatctccagtttcttctttatctcgtatcgtttcgggatccgtatccatacttttattttcactttcttcctcttccgcctcgaactcct

SEQ ID NO: 221352 - DNA, 122 bp, Homo sapiens
tttggaagaaaatacagcctgtttcaatccaatgctggatcttccaggcgtaaaatgactcgacgcatccgcagggcacaactcaaccgtaaccctctacacctcctccctcccgctctaca

SEQ ID NO: 221353 - DNA, 122 bp, Homo sapiens
atttctttcagtaggtctaggctccctcggcattgggaatccagatgtaaagaaaacttacgccataaacttcaaggtagatttcagttattactgcccggtggcaggaacctaggaaggtg

SEQ ID NO: 221354 - DNA, 122 bp, Homo sapiens
ggcaggggaaggggagaggcggcgagctcagcaaccggaaccgagggaagattttggctccgcgggctcgccctccgctccctctgccagcggcgccagacgccgagtggggccagggacag

SEQ ID NO: 221355 - DNA, 122 bp, Homo sapiens
aaagtctaagtcagaagagacccaggaggaagtgcaggttctgttggattctttggtccacggcaatcccaagtaccaaaatcaagtgtataaaggtctaatagctttgctgccctgcgagt

SEQ ID NO: 221356 - DNA, 122 bp, Homo sapiens
ccagggagatatgggcttgagatagagatttgggaatcagctgagagtagtggttattgacgtcatggaaattgtgatgcccagggagggcatgtttcgaagtgaaaagagaaggtcagaga

SEQ ID NO: 221357 - DNA, 122 bp, Homo sapiens
ctgggggtcgaggctcacagactgcgctgaccccagcaggcacagctgggtccagggactcgggaactcgcagcctgacgcgggccggacccccggggtgggtgctgagggcctcggatgcc

SEQ ID NO: 221358 - DNA, 122 bp, Homo sapiens
tggcccgtgcgtcgggccaggctcagtaacgccttctccaagtggatggcggggtggacacgcgtcccggcgccccgggctccctgggatatgtagttcgcgacaggacgagcggaaatact

SEQ ID NO: 221359 - DNA, 122 bp, Homo sapiens
ggctccctccccagtacccatcccctcccttcttcctcatgaggtggatcagggtggccacgtggccagtcacagggctctcagccagggtccctgctggctgaggcggccactgttctccc

SEQ ID NO: 221360 - DNA, 122 bp, Homo sapiens
taaccacctctcggcccggccggaagaagccacctcccccgcacgcgtttagccggcccccgcgattcggcctaatgcgacgattggctatggctccaaatcccgcccttccgattcctgtc

SEQ ID NO: 221361 - DNA, 122 bp, Homo sapiens
gggaaagagcaagcagcagagcctctcccccagtggtggacttcagttgccaggacttcccgcatgctgctcaccatcctttatgccactgtatcctaacctgttatttcttacccttgcct

SEQ ID NO: 221362 - DNA, 122 bp, Homo sapiens
gccagtgccagcaattgcttctgtttcactgtttgcaaaaatagcattgtttctcttttccgttcacatagaaaatacagtaattcctgcagaagaaagtaaaaaatcatatgcaatccact

SEQ ID NO: 221363 - DNA, 122 bp, Homo sapiens
tgtccagctcaacgtgggcggctctctgtactacaccactgtgcgggccctgacccgccacgacaccatgctcaaggccatgttcagtgggcgcatggaggtgctgaccgacaaagaaggtg

SEQ ID NO: 221364 - DNA, 122 bp, Homo sapiens
gccctggcgagacagcctgggagacgcagagtgggaaatgatgactgggagctggtatcgcgaatgtctacacgcagactgacttcaggggcgaggaattccgcctggcgagcgtctagact

SEQ ID NO: 221365 - DNA, 122 bp, Homo sapiens
tcgggccacccatctgtattctcgtattctcggtacacacagcgccccctgcagtcattgcgccccccccccaccccccacccacgcaaaggcgcacaccctggagcagagacggctcaata

SEQ ID NO: 221366 - DNA, 122 bp, Homo sapiens
gctggcgcggcttggcagaggcggggcggcgagcggacggtcactatgtctctgcgcaggcgcccgcttccccgctctggactctactgcgcaagcgccttcattcattgcctaacctaagt

SEQ ID NO: 221367 - DNA, 122 bp, Homo sapiens
acactcaatcttgattatcctaaatttacccttaggacctgtcacctcattgggtgttgccgctagaacaagagggttttttaaatggtataaaaaggagaggcccggcttggtagctcatg

SEQ ID NO: 221368 - DNA, 122 bp, Homo sapiens
gccaggaacctccgcccacatgggaggggcagtctagcctctcagtttcccgggctgtcccgcctagtacgtttgggaggggtgagggccacagggtttccccagagtatggtaagaataac

SEQ ID NO: 221369 - DNA, 122 bp, Homo sapiens
cttttcctatacatacatctcgtgacctctggtcacatctgttaactccacctgttaactcggcagctggttcttgttccagtgccttccgcttatacaaggtatctttgctttgcagctgg

SEQ ID NO: 221370 - DNA, 122 bp, Homo sapiens
ggggcagcgcgctttgtccggcccagcggctctggcggtcgggcagctggctgagctaggcggggcccccagcccggccttccctagacccccgcgggggcggcaccggggcggcgaccccg

SEQ ID NO: 221371 - DNA, 122 bp, Homo sapiens
gctgacagttctcccagcagcaggatctgtgggagcgggactccagtgcactcgggtcctcggtgtctgtccttccaggggtatccaggtctcagagcacaggtgcacacgggtacagtggc

SEQ ID NO: 221372 - DNA, 122 bp, Homo sapiens
ttcaggtgaccaaagaagtgatccaccccccacggcctctcaaagtgctgggattacaggcgtgagccaccacgtccaggttaacatgtcttttatattgaggtattttgcagcagcttttg

SEQ ID NO: 221373 - DNA, 122 bp, Homo sapiens
cctgtctgagcagcagctggagcagttcctgggccgggtgctggaggccagcaactacggcgtgtcggtgctcagcaacgcctcgggcaactggaactgggacttcacctccgcgctcttct

SEQ ID NO: 221374 - DNA, 122 bp, Homo sapiens
cctccccgtccccgcacctgtgcagtaaactgcgccttctgctgctcggcggccaccaggcgctgcaactccgcttcatcggcttcgcccagctccgccattgttcgcctcaggctcgccac

SEQ ID NO: 221375 - DNA, 122 bp, Homo sapiens
accgcccaatggctctgaaactttttgcccatactcttagattgaggtcaccccagccagcgccaaaagaatgagcgcgggagggggtcacagcagccagttcggccaaacatcgacgctgc

SEQ ID NO: 221376 - DNA, 122 bp, Homo sapiens
agtgggcttccagagtgtgcagtcgacgcgctgcccctcactgccttctgtcttccttcacggcccctagtcaactccacagagaaagcacactaccaggaatcagggacgcagaaaaattc

SEQ ID NO: 221377 - DNA, 122 bp, Homo sapiens
tgttattttttgaccactcactgctatctggaatcatctttttgtttatgatctctctcccggcagtaaaacacaagttccacgagaggggaagtttgtctaccttcgctgccgtattccca

SEQ ID NO: 221378 - DNA, 122 bp, Homo sapiens
acagcgtctgttctcacatttgttgaataaaagctctgtgtttcactctgattgggtaatcgcaggtcatatgcccacttggaaccaatcactatgagaccgaggcagggcttagaccagtc

SEQ ID NO: 221379 - DNA, 122 bp, Homo sapiens
ggggtatgataatctctcaagatgtatagagcagtgaggcacagctctcagtcagccatgcgatcataggggtcaacaactgatactctatggtgtgtattttttatttgttttcaacttac

SEQ ID NO: 221380 - DNA, 122 bp, Homo sapiens
gtctctgcagttgtggcggattcccagggactctgcccaggaaatggaaacccgtgagggcgctcctcaaagccgagggtggtgatggccagcgaacccgaaaaaggggcagggtgggcgcc

SEQ ID NO: 221381 - DNA, 122 bp, Homo sapiens
atctttaaaacatcctaagtaagaaaagccagtcataaaagaccacgtattgtatgattccgtttatacagtgtgtccagaataagcaaatctagagagacggaaggtgaggagtggttgtc

SEQ ID NO: 221382 - DNA, 122 bp, Homo sapiens
tttttccatgccctgctgcactccgtaatgacttctcgcttgaacttctgtggttccaaccgtatccatcattttctctgtgatattaagccattgctaaagctggcctgtgggaacactga

SEQ ID NO: 221383 - DNA, 122 bp, Homo sapiens
ccctggccaccccctctgggcctggcacccaccggtgttcccggatgtcggctcgataatcgtgtccccgggcttcagcgtcccgtcgcgctcagcatcctcaatcatccgcaggctgatgc

SEQ ID NO: 221384 - DNA, 122 bp, Homo sapiens
tcgctgccaagtgggatgttttctttttaatattttttttaagaacgtttttcttccccccgcccctattacacgtttcccaccctcctcagatggctaagctgagaagcaggaggcggtga

SEQ ID NO: 221385 - DNA, 122 bp, Homo sapiens
gcggcgcggcccggcccgagcgagggtggggggcggcgggcggcgcggggcggcggcgagcgggggccatgcaggcgcgctactccgtgtccagccccaactccctgggagtggtgccctac

SEQ ID NO: 221386 - DNA, 122 bp, Homo sapiens
tccttcagagaagccctggtgcagctggggctgggggtgctccccggggcgctgtgccgacggtggtggtgggagggtgttcccgggggcgctgtgccaacggtggtgggggaagggtgttc

SEQ ID NO: 221387 - DNA, 122 bp, Homo sapiens
ggcccactggtctctgccgccctctagtgaccggcggtgggactgcgccccggctgctcccgccctaacagcttctgcacacttcagatctgactgaagacactgaaatcccagaacgaagc

SEQ ID NO: 221388 - DNA, 122 bp, Homo sapiens
atgaagccaatgtatcattttatgagacctcccaacactaattgctccattgttccctggcgcccttgttataaaagtggctgcaactatctcatttgctgaggccaccactgatggctgtt

SEQ ID NO: 221389 - DNA, 122 bp, Homo sapiens
tctgcagcccgagcacctgggccaggggcggagaccggaccaaggaggcaccgggcgcggcgaacacccccggggcccctccccgagcggggccccgcgtcccaccgcaaaccaggggagct

SEQ ID NO: 221390 - DNA, 122 bp, Homo sapiens
tgtgtacctagtggctcaggttcccctaccctgcttggcaataattaactgtagccaaagcgtctgccctattcagacagaagcctgtgtgtgctctagttcccaacagtttccttttaata

SEQ ID NO: 221391 - DNA, 122 bp, Homo sapiens
tgttctcccaaaatgcgaggaatacagccctctccaaggttcagctgttgctgcagttgtcgttattgtctgtggttctcaatgagaggagggaacatattgtctcagggattacatttaat

SEQ ID NO: 221392 - DNA, 122 bp, Homo sapiens
ccctccgggggccgtggcgtgtttataaaagacaagctgtggctccgcactctcattccacgttcttaactgttccattttccgtatctgcttcgggcttccacctcatttttttcgctttg

SEQ ID NO: 221393 - DNA, 122 bp, Homo sapiens
ctcagagcatattcagtcaagttgatgaggaatggcggcccgacctcagcagcaggtcggcgtgcgggactctcagaatggcggcctgatctcagcagcgggtcggcatgccagactctcgg

SEQ ID NO: 221394 - DNA, 122 bp, Homo sapiens
tccctctgaggggctgacctgccccccaccttctggaagctgggaggttggaagaggggacgcatgccatggacccagcacacagctgggaactcgaggcacacctaagccttcccttgtgc

SEQ ID NO: 221395 - DNA, 122 bp, Homo sapiens
aatgtgggagactgcctgttctgtattagtcttccatctgcaacttggctattcattcaacgattgtggctgtcagggtactttagagtgagcattgggctgcaagtcaggacatttgggat

SEQ ID NO: 221396 - DNA, 122 bp, Homo sapiens
cccttatccgtcacagccattggcccgccccagttggccgcagggactgagcaagttatgcggtcgggaagacgtgcgttaaagggctgaaggggagggacggaactgacagtctctgtgac

SEQ ID NO: 221397 - DNA, 122 bp, Homo sapiens
ccagttgcctccccagcctcagttacctgtgaaaggtgtggagagcggacacctggctcccgcaggcaaccctggccttggccaaggaggggttaaagccaggagaactggggcaggtggag

SEQ ID NO: 221398 - DNA, 122 bp, Homo sapiens
atcaagcgcgcggttgacaaatgcgtgctgcacgcagattgctgggggtcaggagttggtcggatgctgccagttagaattcacatcctactttttgaaaaatcccgttgcaggggtttaat

SEQ ID NO: 221399 - DNA, 122 bp, Homo sapiens
atataacactagggatgcatatgataggatactttgtgcagaaggaaacaaaactgcacacgagcacaaatgaaacagaaactaccccaatggtttttagatgaacctttttgggtgaaggt

SEQ ID NO: 221400 - DNA, 122 bp, Homo sapiens
tgggaccttaggccccggtggtgtgaattcaccccaatctgtgggttgcatggttccatgcgaaaagcagtttctcctgctgtgtagcacgctcactcacacctcccttggctggggggtag

SEQ ID NO: 221401 - DNA, 122 bp, Homo sapiens
gcggccacagccttgcaggaacgggcactcacgcccacctctggctggtccaggagcgcacgggcacgtgtcccaggtacacacagggcaggcatgttcccacaactcacaggcctcccgag

SEQ ID NO: 221402 - DNA, 122 bp, Homo sapiens
aggctgtaacggtttctgtcatggcaggtcttctttcccgaaatctgaggctgtcactaccgcgccctggttttcttttcttttttcttttttcttttttctttttgagacggagtttccct

SEQ ID NO: 221403 - DNA, 122 bp, Homo sapiens
ttctcaaatcgaagcttgattcagcggcgcgccgggagccaggcagctgctgctgcggttcggctttgtgtcccacgcatagccttattgtcctctctgcagcttggactttgacccccttc

SEQ ID NO: 221404 - DNA, 122 bp, Homo sapiens
ttgctcagctatactgtgtgcatttcctaagaaagacggagcagcagatgaggctccgatcgcactcctggcgctgtccagcccatggtgggagaagtgcagccgcgtctgaacgtacctct

SEQ ID NO: 221405 - DNA, 122 bp, Homo sapiens
ttgtaggtctttaagtcccaacaattaaaaggactgtgcttggctgggcgcggtggttcacgcctgtaatctcaacactttgggaggccaaggcgggcagatcatgaggtctggagagagag

SEQ ID NO: 221406 - DNA, 122 bp, Homo sapiens
ccagccccggctccgcctcgctcccggcccgcgtccctccgagctccggctgggaccctgcgccccgcctagctcccggctctgctcgctgcgcgccatcctccgctcgggcttgcgcccac

SEQ ID NO: 221407 - DNA, 122 bp, Homo sapiens
tgttatctcctgattcatgactcatttaccacatctactgtatgagaggttggtctcattcgcccacctactgagtcccagattgcatatgtcaagcaggacacctctccttaacccatctg

SEQ ID NO: 221408 - DNA, 122 bp, Homo sapiens
agcagccaggcagggaggacgacgctgtgagcggggtatcttacgagggactcggacggccgggggatgactgccgccgggaccaaggagctgggcggggaccgcagcagccgaggaggcgg

SEQ ID NO: 221409 - DNA, 122 bp, Homo sapiens
cgcgtgtgtgtgtcaggtacgcgaaggggcgaggaagggatgcgcgtgtagacttgggggcgggagggtgatgagaaactcaacttgctcactgagggcaataaacctgtcacccggtcccg

SEQ ID NO: 221410 - DNA, 122 bp, Homo sapiens
aagagacgtggaagtggagagagcaaggcgaccgcagccaccccaaccctgggctgctcccgccgttggggagaaagaggcaaggcaaggaagagcccacctagacttccgaggaccgcaga

SEQ ID NO: 221411 - DNA, 122 bp, Homo sapiens
tgggtccctatttcctctctgggatctgtagccaatcattcacgaggtaaacagaacgaccgagtttctctcagccgagaactgtggctgcccctccggtgaaaacagaggaagtgggagcg

SEQ ID NO: 221412 - DNA, 122 bp, Homo sapiens
ctcagtgaaccctcccacgatcctgacagtatgttcccacttacagacatggaaaccaaacgcgcagagactgacctcccaaaagtcacacaaacctgggtgactccagggtctgggaagcc

SEQ ID NO: 221413 - DNA, 122 bp, Homo sapiens
taccaagattgtgctagccactgtactgcgctacccactgttactaagattgtgctactccgctgcgggaccagcggagatcctccacccaataaaagccccaggcgcctataccggattcc

SEQ ID NO: 221414 - DNA, 122 bp, Homo sapiens
cttgaggaggcaccactgctccatgtggccgcccaggcggatgcggcacttgctgcggcgcgcgtccagctgccgccgcttctcccgccgcctgcaggacacgtccaccgccggggaggaag

SEQ ID NO: 221415 - DNA, 122 bp, Homo sapiens
acgggagggatggggcctgggctgccgagtggcgaacataccattccgtgctgaggtggacgcttggcctgtgtctgcccagcaggtgccgctgccgcccgccgccgccgccgcctcctcct

SEQ ID NO: 221416 - DNA, 122 bp, Homo sapiens
caccaccacaccacacatcgccacaggaactttatcctaaggcctggtggctcccccaggcgactgggccaggagcaggagcagaagcaggcctcgggcctgcgaggttacagggttcaaca

SEQ ID NO: 221417 - DNA, 122 bp, Homo sapiens
gtcgcgcttcacccgcaacgagttcaacctggagagcaagagcaccatcggcgtggagttcgccacccgcagcatccaggtggacggcaagaccatcaaggcgcagatctgggacaccgctg

SEQ ID NO: 221418 - DNA, 122 bp, Homo sapiens
gcagtcgcaacgattctccacttgatggctggttgtgtcactgctagtcgacagctgtcccgcatccagagaggactgggagtgatttaggtcagggagtctggtttctcctttaaaccgtg

SEQ ID NO: 221419 - DNA, 122 bp, Homo sapiens
atttcttccctgatccttttttcctgtctaaataacatccatttgtgatttttttcaacacggtacatgacctgtttctaattggctatctcttgggttgtttttgtacattcatgtttgtt

SEQ ID NO: 221420 - DNA, 122 bp, Homo sapiens
tctgcactccgagaagggacagccaccgcgcagggaaaggggcgcggagggtatggagcccggtcatggggtaacttgctttaaccctcgggacgtcaatttcctcacatgtgaaatagaag

SEQ ID NO: 221421 - DNA, 122 bp, Homo sapiens
aataactgtgtttgtgtttctgtggaggagttgcggttttgtttgttttaatttggcccacgctgccccaatggaggaaattttaagataatcattaataaggcaacagcttccaggattaa

SEQ ID NO: 221422 - DNA, 122 bp, Homo sapiens
gaaaggaggtatagtaggagacaattgtaataccctaggagagtagacttgaatatctaccgtagtttctggcacatagtaggtgtttcagtcttaggagttatttaattgtgatggttgcc

SEQ ID NO: 221423 - DNA, 122 bp, Homo sapiens
ccccgggctcccccgctcctccctcagtgctctgagagcacatggcagctgccccagccccgaagccaagcctggcgcctgtcctcgggcctctggaagtcctccccgcccctctacaagcc

SEQ ID NO: 221424 - DNA, 122 bp, Homo sapiens
ccatgccagagaacaaccgctcattcacgggctggaaagccccagttctcaaaacaccctcgcttagcgctgttagaagatgctggagagttcctgccctgaaacttgcatccacttggtcc

SEQ ID NO: 221425 - DNA, 122 bp, Homo sapiens
ggttagtatcttccaacagacccaccaggtacgcttcgctagcctcctgcagcgcaccgacggctgcgctctgaaacctcaggtcagtgttgaaatcctgcgcgatctccctcaccaacctc

SEQ ID NO: 221426 - DNA, 122 bp, Homo sapiens
agagcagcagacggaactcagcaatgtttttctaacacaagaaggatgactttccgaaatcgtttgaagtgggaagactggggcgagcgggcggggcggggcggggggcgagcgggaggggc

SEQ ID NO: 221427 - DNA, 122 bp, Homo sapiens
gcggcggcgcgaacggcagctaggagggttgctccgggcttggtgctcactgcgacttcccgcgcagggcccggtcggactaggacccgcggcctgagagacgctggaggatgcggacgcgg

SEQ ID NO: 221428 - DNA, 122 bp, Homo sapiens
ggcccccacgccgaaccaccccctccagctccgccccctgcccctctcctccgcccaccccgcccctccccggcccgccccggtaccccgcccacgtgccgcacgcagaccaatcacccgtg

SEQ ID NO: 221429 - DNA, 122 bp, Homo sapiens
gcctcccgcccggcatacccacgggccagtgccgggactgggcgcggggcggcgcgcgggcgcaggtagccatggtgacagcgccccagactactcgtatttcctgccttttgtgttcgcac

SEQ ID NO: 221430 - DNA, 122 bp, Homo sapiens
tcccccagccctccaccatttgcatgacccccgagacactcacagtgggagccactaaggcgctgctggatggtgacaaggactgaggcttcctgggtacctgagctgccgaccacacggca

SEQ ID NO: 221431 - DNA, 122 bp, Homo sapiens
tattccagtatgacctcatctgaactaattccatctgcagggaccctacttcccaaataacgttgcattctgaggcactgagggtgaagttaggacttcagcacatgaatcgcgggggatgc

SEQ ID NO: 221432 - DNA, 122 bp, Homo sapiens
ggtggctggggcaaaaagctgcaaaaagcacggctgcgggggcaaaaagcagcaaaaagccgcggcggcggggggaaaaagccgcgggggcaaaaagcagcgggagcgggggcaaaaaacca

SEQ ID NO: 221433 - DNA, 122 bp, Homo sapiens
taaggggaacccgcgccactctggggggcccaactaggccttggggtttgcagggaagcccgagggcactcatttgttggtgccctaatgatggtagcatttcttgcacacatgcatacgtc

SEQ ID NO: 221434 - DNA, 122 bp, Homo sapiens
gaatgactcttagcttactgtgtttccaggggttgaggagccatgtatctgtgggatactcgaggaaaagcggaatctaagaccaggttccatgggtaggtcagaaaaggacacagagagag

SEQ ID NO: 221435 - DNA, 122 bp, Homo sapiens
gcaacagagacgccaggatgggagagctcggagctatttcggactccaggccaacatccacggagaccttgagttacgtcatcggaactgtctggactttggtccccttatgccaaatgcgg

SEQ ID NO: 221436 - DNA, 122 bp, Homo sapiens
tctccattaaaaagccatttagccatgtgaggtcaataggcaatttacaacctagacagtcggtttgttttgaagcccctgaactttggtagactttgccctctgtatgcttcctccataaa

SEQ ID NO: 221437 - DNA, 122 bp, Homo sapiens
gaagctcatagaagtgcatcttgcttgggagtctgtgggttgcattgtacagaatgttcccggagttcaggaattggaaggaactggtaacataaaacaattctaattgtctattttaaaaa

SEQ ID NO: 221438 - DNA, 122 bp, Homo sapiens
tcaggatacgacaaacactggtgagagccgtagctggaatgaatgtcagggtgtgacagacgctggtgagagccgtagctggaatgaggagctttaaagtgctatcaagtataagttcttat

SEQ ID NO: 221439 - DNA, 122 bp, Homo sapiens
ggtggggggacttgtgacaaatcacagagcatgtggcctatctaaagtcattcaaacacacgcacacaaagaattaactgctgtgtcagccaaacaaaaaaagattgcagcaaatttaattt

SEQ ID NO: 221440 - DNA, 122 bp, Homo sapiens
ggggcagaaagccgcggcggcaaaaagccaaggcggcgagtgtgcaaaaagctgtgtcggcggtggggcaaaaagccgcggcggcgggtgtgtggcagaaagccgcggcgggcaaaaagccg

SEQ ID NO: 221441 - DNA, 122 bp, Homo sapiens
caggcaggggcggtggagcggggccggaagtgaggctagcggagccccgcagtggcggctcgcgctcattggccgggagcagcgcggtgggcgggacggagctcggcggtctgcgctcggtt

SEQ ID NO: 221442 - DNA, 122 bp, Homo sapiens
tgtttctgcagttctaataaaaacagcagccagaacacaagggccactgtctatcgagaacgtaagaaacagtgagcccagcctcgttcacacttgataaagccaactcagtgatccctctc

SEQ ID NO: 221443 - DNA, 122 bp, Homo sapiens
atttcccagtgctcagaaaatattagagtatgtctcccagaggagggtggccaactgtgccgtattatcaagtagagggcaggcagtgcttggaggagaaagttcttcagaaacagccatct

SEQ ID NO: 221444 - DNA, 122 bp, Homo sapiens
tcgggagggaggatctcctagggcgggcatccttgcgagacggggtggggcgaatcctcccgggtgggcatcgtggggtgggggtgggcgttccgcgaggggcatcctcccgggcggacgtt

SEQ ID NO: 221445 - DNA, 122 bp, Homo sapiens
gcgcgggcggaacctacccgcctcgctgcggcgggggcggagctggcgctgaagaaacagcgcatgcgtatagcacatagtggccttgtcactgaggagctgccacttcacgtcccacccca

SEQ ID NO: 221446 - DNA, 122 bp, Homo sapiens
gtgacatatccatacagtggaatacggttcagcaacaaaaagaattgaagaactgagacacgctggaatctggatgaaccggaaaatatgatgctaagtgaaagctcgaaacaagggaacat

SEQ ID NO: 221447 - DNA, 122 bp, Homo sapiens
ttttgctattcccatcacttatggtccagcaaaactgaactaattgtagttcccccatcacgtgttcttacttttctatgcattttcacatatttttctctctgccttttttctatttcttg

SEQ ID NO: 221448 - DNA, 122 bp, Homo sapiens
gttcaatgtattctacatttgacataagatgagaactttctaaagtattctctccaagagcgtaaacgatgactaccccagccctgctgcccctctctggacgtaggataccacctctgaac

SEQ ID NO: 221449 - DNA, 122 bp, Homo sapiens
cttccaaaaccctagttcctgatttcctgcagagggcacctacaggctgaacctaaaaggcgaacaaattcctgcctgtcattcaaaagcagctaccttttctaaggcagcgtcaaggaggg

SEQ ID NO: 221450 - DNA, 122 bp, Homo sapiens
gacttccccaaatcgtgtcccagcatataataattccctcttggaattattttatacaaccgaagttctacaaaaaagaagctggttcggctttaattaatccaacatttctcaaactcatt

SEQ ID NO: 221451 - DNA, 122 bp, Homo sapiens
ccctcccctctcacctgctcaaagatgttgttcataatatttccctttatcttgcatcaccgaccgtcatctctctattgactcattctcaccagcactcaaacctgctgatagaatatctg

SEQ ID NO: 221452 - DNA, 122 bp, Homo sapiens
tttttttggggaggggcggggggctggtgcggaatcggaataacaagctccgtgggggtgcgcaagaagcatcgccgtgtcttcggacccagactatgaactgatctatgacgctgaacttg

SEQ ID NO: 221453 - DNA, 122 bp, Homo sapiens
tttagttcccggaaagaggctgacgcagtgtttccccgggatccctatggatctctagaccgacacacacaaacagttcgaacatacagtgagaaggtggaggagtataacctgagatactc

SEQ ID NO: 221454 - DNA, 122 bp, Homo sapiens
cgggagcctctgcagagaacgcgagagatgaagatgggcagacggattcatttagagctgcggaacaggacgccctctgatgtgaaagaacttgtcctggacaacagtcggtcgaatgaagg

SEQ ID NO: 221455 - DNA, 122 bp, Homo sapiens
aaactctgtctcaaacaaacaaacaaacaaaaaaccctacaagactacctaagttttcaccgaggagcaagagactcattctctgaacagaataacttgtagagagacaagggaatgcaaca

SEQ ID NO: 221456 - DNA, 122 bp, Homo sapiens
cttgcgccctggcttgcctggcccagcttccccagcaccagattcagaaccttaagctaacgaggaatgaccagctaagaatggggattggggctgtgtccatcttactactgtgtttgcta

SEQ ID NO: 221457 - DNA, 122 bp, Homo sapiens
tccaccgggaaagaagcgcagccaccgctcctctctattggccagtgctctgaacgctcacgcattcaaatgagagcgcgcgctgggcgcagccattcagcttcctacaccctgcggctgaa

SEQ ID NO: 221458 - DNA, 122 bp, Homo sapiens
aaagtaaacaaagcaatgaaacctagctgagtcagtggttggacattccaaattgcttagcgtgctgttaatgactttaaaaggcaagagggacaagagaactagttcccacaaagaggaca

SEQ ID NO: 221459 - DNA, 122 bp, Homo sapiens
cccgatgcaggaggccgagctccgggatggcgaggcggcggcggcggccgcttcgtaccgcgtcctgagccgcctccttggctatggagaggcggcccccgagccaggccctccgccaccgc

SEQ ID NO: 221460 - DNA, 122 bp, Homo sapiens
aaaaactcaagtcactcaaggatgaccccttttcagtcccggttctcaatttcaccttctcgcaggaaagccccgcgtctctattaacccttccatcaccgctgcaccgcgagagggaccgg

SEQ ID NO: 221461 - DNA, 122 bp, Homo sapiens
ttttgtcaagaatgtttgatccttccttcaattttttagttaataacaaatttcaccatgcgcatttttagctgctgtcagttctattttgtgtgtgtgtgtgtgtgtgtgtgtgtgtgtgt

SEQ ID NO: 221462 - DNA, 122 bp, Homo sapiens
cacgaggaggactcgaaagccatggcctctgttctgtgggacgcgggaactcttggagcccgtccgtggctgcctccccaccactgcaggggagccgggtgggacctggacgggagcccagc

SEQ ID NO: 221463 - DNA, 122 bp, Homo sapiens
tgtggtctcagtcaatgacttcacctctctgtgcctcagtctcctcatctgtaaaatgggcgcagtacccagctcctagggtggtggtgaggggaagtgagataatgcatgcaaagagcata

SEQ ID NO: 221464 - DNA, 122 bp, Homo sapiens
aactaaaaggcctctcagtaagcggttgtcaagccttagggtgcctctctggacagttcccggtactgcaccactgcccagagaccaagccaggcccgctcccagctctgcagaccctgcca

SEQ ID NO: 221465 - DNA, 122 bp, Homo sapiens
aaaaaataagatagtaatgtgggtttaaagaaaggtaaacatggtatgaagagtgtggcacgtttggaatgccaagtatttagattcagtgtgatcagattacagatagttttttttgttgt

SEQ ID NO: 221466 - DNA, 122 bp, Homo sapiens
gccttccggagccagcggccccgctcttggctctcccggggctggcccgagtgagccggacgaagtggacaagttcaaggccaagttcctgacagcctggaacaacgtcaagtacggtgagg

SEQ ID NO: 221467 - DNA, 122 bp, Homo sapiens
ggcgcgcacgctttaaatggcattcgctgtcatccgagctcagagccgtgtgggcagccgcgggctatataagccgcgagcctggccgccgcggggcagacggcgacagcagcggcggcgag

SEQ ID NO: 221468 - DNA, 122 bp, Homo sapiens
cccaatctttcttgcatcttcagctctaaaagtcggcacctcggggtatgccaggatcctcgagaaaacagatataaacacatatttacccacaaaacagagataaagcacaagcctgcggg

SEQ ID NO: 221469 - DNA, 122 bp, Homo sapiens
gcgtatttgcgccattggtggatattccggaccgtgatggtggcgctgcgcgtgcgcactcgctccgagccctgctcccgggagagggagctctcgggtcggggctagggaaggctgacccc

SEQ ID NO: 221470 - DNA, 122 bp, Homo sapiens
tggaagataggagcaacgctggctggctctggggccaaagccccatgaccctagggagggcggatcggcgctagcaccaggcgccgggtccagccccctctccacatcgtatccctttctca

SEQ ID NO: 221471 - DNA, 122 bp, Homo sapiens
ggggaggggaagaggcgcccgggcagtgggcggggcctgggcgtggggcggagtcgaggtcggggcggggaggtaaaggcggggccagggaggtgtggtgggcgtggtctggggcgggagga

SEQ ID NO: 221472 - DNA, 122 bp, Homo sapiens
cagtgctcccttcattactcaccatccttagtcactatgagcttttagctgcctctcttccgctctaatttctccccaacttgataagtattaattaagtcatttcaggtgttggccactgt

SEQ ID NO: 221473 - DNA, 122 bp, Homo sapiens
agagcgacatactccatgcatgccttcacagaaggggaaactggtgcgggatggaatgggcgtttagactggaggttaacaagcaaaaagggtcattatttaagttaagaaggttgcgccca

SEQ ID NO: 221474 - DNA, 122 bp, Homo sapiens
ccgacaaccggcctgtggccttctccgggggtgcaagccacagacaaagttgaaagaaggcgttctcctccggtgcccaatctcgataccaacccctcccctaccagggccaccttgctgct

SEQ ID NO: 221475 - DNA, 122 bp, Homo sapiens
acaaaagacactttctaagcggatacagccttctgaataacaggatatgaggggagcaggcggatctggatctactctgtgagtcacggcccatgcccaaaacccccccacatcaaccccag

SEQ ID NO: 221476 - DNA, 122 bp, Homo sapiens
cgaaccaggtggagacctgtgtgagggtcatcttggtgatgatggccagcatgatcttctcgcccttggtggggtaggggttcttgcggtgctcctgcagccaggccttgagcgtgctggtg

SEQ ID NO: 221477 - DNA, 122 bp, Homo sapiens
ccctgtctggggccaagtaggatgggactaccggggtgaatgagcagtcatcaatcctggcgcttcttggttgatcggaaacttgctggcagtgactaatgtggagactcattaggctagga

SEQ ID NO: 221478 - DNA, 122 bp, Homo sapiens
ccctctcccaaatgtccttcagatctggctggggtcactcccacattgagggcagccccccgaggtgagatggagtggcctccttcagcccttgcccaggaggcacaagagcaagcaactga

SEQ ID NO: 221479 - DNA, 122 bp, Homo sapiens
gtggggggcaccccagcccctgcccaccgtgtgcacccattcatttagtcctcagacccccgaaagggaggtgtgtaccccaccccgttttccagatgaggaaacaggttcacagcgctcaa

SEQ ID NO: 221480 - DNA, 122 bp, Homo sapiens
actgttttgtaaaacatactccaaaatttaacacatccgtttctggaagggcacgtggaacgagatagagtactcagggagaattctgaccagaggcgaggacaacagagattccctcctgg

SEQ ID NO: 221481 - DNA, 122 bp, Homo sapiens
ttctctgtcttttgatatggagttcttacaatagcaatattttagaattgtaggaagccgcggcagatttgtactcaggtgcaagaaggtcgtggtcctggtttacattgcatcagtcaatt

SEQ ID NO: 221482 - DNA, 122 bp, Homo sapiens
ggacgtgcccttcggcgctgccaagacccgtcctggtacttgccgagccacggaccgcggcggctaccgcccggcctccctcgaccaccctccgcagcagcatcgcccgcggacgggatccg

SEQ ID NO: 221483 - DNA, 122 bp, Homo sapiens
tgcctggccagggtcccctcccgccccccgcgtgatgacacgccttcagggcgggcccagcgtctcaggccttagggacacaggtctgtcccaggacggcactgagggcccaggcgcctcca

SEQ ID NO: 221484 - DNA, 122 bp, Homo sapiens
ggcccaagcagtgtccgggaggggtcggggccccggactaggggcgcagcgaggaccgcccggaggctttcccttgggcagctaagtccgagtcagctctactcggatttccagcttccagc

SEQ ID NO: 221485 - DNA, 122 bp, Homo sapiens
aggctcccagttcacgcgataataagaccaactcgatactcactaggatttgtagtctttcgtctttcttcgggtttactcttccggtcctagggtcacacccaccgcagggtctggcttgg

SEQ ID NO: 221486 - DNA, 122 bp, Homo sapiens
tgacctgtcaatttgtttgtattgaatatctcctaacaagattttttttctcagccctgacgtgattcttgtagtctcctatcagaatattcaatgtgagagctttaaaaacaaacaaataa

SEQ ID NO: 221487 - DNA, 122 bp, Homo sapiens
tcctgaagttacagaagttaataattttttaaaatcctgcaaacaatgcatggatatccccgtcttgcacactctttgggccagtctagaattcttcccatcagcatttcggtgatctggac

SEQ ID NO: 221488 - DNA, 122 bp, Homo sapiens
ccttcacccccacccacccccgaaaaaaaacctcaaaaccattttcctgggtgaagacatcgttccagttgagaggtgcgggaagcttaggcgtgggggtttagaaagcctgggaacaagtt

SEQ ID NO: 221489 - DNA, 122 bp, Homo sapiens
ggagactcgatacgcgacatcacgtcacggcctatgccccgccccacggccggccgagcgcgcgtggccgggaagcaagtcttgtcccgccacccgggtctcgcttcccagcggagccgcgc

SEQ ID NO: 221490 - DNA, 122 bp, Homo sapiens
aacaaataaacactagattttgaaatcaaggtgccctcaaaagtaatgtcactcccaggtcgaaccatcaaaggaggagtgaaccataaaacaaaccttcagcttcctgggtcccttcactc

SEQ ID NO: 221491 - DNA, 122 bp, Homo sapiens
cgtctctctagctaccgtctctatggttcggggaatctccaggtcggggcttgaccggtccgacttttgcgcgtgcgcgagtcctggcgcgtgcccgccctcaagcaactgtccgacccagc

SEQ ID NO: 221492 - DNA, 122 bp, Homo sapiens
gcaccggcagccatgagctcggagatggagccgctgctcctggcctggagctattttaggcgcaggaagttccagctctgcgccgatctatgcacgcagatgctggagaagtccccttatga

SEQ ID NO: 221493 - DNA, 122 bp, Homo sapiens
actaagctattgatgtgagtaaagcccgcctgggcgtgtctgccgcggagcataagctcacgtggattacctgtagggtctccatcaggaagccctaggtgccggcaagaagggtagtggaa

SEQ ID NO: 221494 - DNA, 122 bp, Homo sapiens
ggaggctgggcgtgacgggaggggagggcggggcgggcctctgcgctgcggctgccccttcgccccggcgcgggaggccagaccccaaccctccgctcccggccccacagccgcgtccacgc

SEQ ID NO: 221495 - DNA, 122 bp, Homo sapiens
gcagctgtagtttgctgcctagattcaagtcatgtcactctgcttctaaaaaagcttcagcgtttcctaatccttaaagattaacattgaaattctttagcatcgcaagaatgctgaaggcc

SEQ ID NO: 221496 - DNA, 122 bp, Homo sapiens
aggtagatgtgttctcctgtcacttaaagaaccacttctcctggtctgagtagtaagaggcgcatttgctgttgctgcaccatttgccaaggctctgagtttgaggtatgggatgtattaaa

SEQ ID NO: 221497 - DNA, 122 bp, Homo sapiens
ttacctcgcccacacagccgcggaagtgagcgctcatgttggtggccggggacagtggcacggaaggctccacaccccccaggtagagcagggtgtgcaggttgaggccctggctcttgccg

SEQ ID NO: 221498 - DNA, 122 bp, Homo sapiens
aaaccttttccacaaagggccacagaataaatattttcagctctgggggccattcaagcccgggggtgactactcaggtctgccattggagcagaaaacagagacgagaggtaagcaagtgg

SEQ ID NO: 221499 - DNA, 122 bp, Homo sapiens
cgttttctagaaatgaggaaactgaggctcagagaagtaactactaatctctaacagagccggaatcagatcctaggtttctagattctcattccaagagactaacgcgggagcggggaagg

SEQ ID NO: 221500 - DNA, 122 bp, Homo sapiens
ggcgacgccgaccgagacacaaagaccgaggctgagaccgccaggggttgagggtgaggccgcgtcccggggccgctggagcgcgggcgtcatgcgagactgtcccggctgcgcgccgcccc

SEQ ID NO: 221501 - DNA, 122 bp, Homo sapiens
tcttgcacatagttagaatcttaagtcagtgtcacacaatgtgctgtgcatctggcacaacgataaacagcccgagggagggttggggacctaagtgtcctagagaattagaggagggaggc

SEQ ID NO: 221502 - DNA, 122 bp, Homo sapiens
aagttaacactgccgggtccttcttcctctttgggccgtgatagagcagttaggaccacacgtggccttcactgcacacaaccagcaaccaggatgcagtcacacagtttgtgaggcaagtt

SEQ ID NO: 221503 - DNA, 122 bp, Homo sapiens
gaagaccatctcgggaaagctctgggttaggcaactcgatttcacgaaagcggacaccaacgctctacccagaggcccgagcgtcgtctaacgtttccattggccctttcggccttcactca

SEQ ID NO: 221504 - DNA, 122 bp, Homo sapiens
ttgaggagcttaaggatgagacatcggcagagcctgcaaccgactagaggacctgggtcccggcagctctttgctcacccatctccccagtcagacaaggtttatacgtttcaatacatact

SEQ ID NO: 221505 - DNA, 122 bp, Homo sapiens
catgaaaaaacaaagaggacaggataactcgggtggtgctcttcaggccggggtggtctacggaaatatctttgagaaactgacatatgcttagaacatattcaaaaattcagctctgctgt

SEQ ID NO: 221506 - DNA, 122 bp, Homo sapiens
ctctccatttcccctgtagatcaatgctaataccaggaggccccggaagatggatggaaccgacaggaaccttgaaatcccgacacgggggctggtgcctcaaccgataaaggatttcttca

SEQ ID NO: 221507 - DNA, 122 bp, Homo sapiens
ggtccaccccgacaccggcatctcctctaaagccatggggatcatgaattcctttgtcaacgacatcttcgagcgcatcgccggcgaggcttcccgcctggcgcattacaacaagcgctcga

SEQ ID NO: 221508 - DNA, 122 bp, Homo sapiens
gcagacaggggcggggccctgcagacaggggcggggccctgcagacaggggcggggccgtcggcttcgggccccgcccccgatccgcgccggccggccggccccgccctctcagcgaaggtg

SEQ ID NO: 221509 - DNA, 122 bp, Homo sapiens
ctccccctccctcccagacccccacggcaccctgggagcaatgcaggcactgcgcctaggcgggggcagccgtgtggctgacactgtcctttctagagttgaggaagacacagttgggggag

SEQ ID NO: 221510 - DNA, 122 bp, Homo sapiens
ccataagcacaaggactcccctttccagatggggtgtagaggacataaggatggcaagaccgtttacatcctcgccagctccctggttgggaacatagtaaatatctttgttgatggtgtgg

SEQ ID NO: 221511 - DNA, 122 bp, Homo sapiens
ctaggtatgtaatggatctatctttatctcttggatgacttggctttctgatggtggccgcgtgttgggcttcagtagcccctggagcccatctactcgaaataaatatttctcggtagcca

SEQ ID NO: 221512 - DNA, 122 bp, Homo sapiens
cccgcagaggtgcagcctcgaggaatctgagggcgtcggggcagcgaacctttgcatccacggactcctccttccctagtcctgctcaagcggtccggggaatgggtttttgtttttccttc

SEQ ID NO: 221513 - DNA, 122 bp, Homo sapiens
ctcatgggtagacgccgactccaccccctgaacatccggggccttttaaccgcccacggacggacggctggtacttacatgtgcacatgtgcagctactttacttaccgtcgaaggcagcgg

SEQ ID NO: 221514 - DNA, 122 bp, Homo sapiens
taacagctatgctcagtataaagtgccgggcagaacgcgtttggccccaaccagcacccccgccccagcctaccttccaccagggcctttttggccatggcagcggcccggtgcgagctgaa

SEQ ID NO: 221515 - DNA, 122 bp, Homo sapiens
tggcccccaccctctgcatttgccatccagcaggtctgggtgggtaccaggatgcggattcgtaacaggagaggctgatgctgccagtctgggtccacattttgagaagcattcctccaagg

SEQ ID NO: 221516 - DNA, 122 bp, Homo sapiens
tatctgatagggcggagccttcacccttgcagcgagctctctcacaccagatgtgctctgcgtggaatcctaggccatcaggggattccttagcaagccctgcaggacccaaatcctaactc

SEQ ID NO: 221517 - DNA, 122 bp, Homo sapiens
cagtgtgacagacccacatgttcccgctacccgcacagcgttcacgggtctcccttcccacggagtcggtggcttcccaggcagcctcccagcccaaaagggccagataaaacctcagagac

SEQ ID NO: 221518 - DNA, 122 bp, Homo sapiens
atcccacaagaaggggcaggtaagtctcctctgttcatctatctcacttcccctggtttccgtctcgggcctggacttgggggacttcccttagatttctgccacaaacattccagggtggg

SEQ ID NO: 221519 - DNA, 122 bp, Homo sapiens
gcccctccctcgggccggggggcggggcctcctaatccggaactgaaggtcttgcgtagccggcaccgcccatctgcgtcccggaaggagcgagcttgcggagcgtgaaccagtgagtgaaa

SEQ ID NO: 221520 - DNA, 122 bp, Homo sapiens
gcagaggaacacacaagcacctggatgtggagagggtgtcgagagcacgctgacaggtaccggcaagcctgcaggccatcgaccgaccggccgaacgacttggagtttggtcagggcggttg

SEQ ID NO: 221521 - DNA, 122 bp, Homo sapiens
tttctacaatagttctgttaaaaaatgctgttacccttgggaaaatcattctctcccttacgttcctgcaggatcttatgttcctaatgtttatctcaaagtattagagatagtttttatct

SEQ ID NO: 221522 - DNA, 122 bp, Homo sapiens
aatcaatatcgacctccagctcactgggatcctccaggggcccctctacagtcacctcctcgtgctcctgggcggcatcggcgctggacaagtctatctgtcgaaccaccttgcgaatgatc

SEQ ID NO: 221523 - DNA, 122 bp, Homo sapiens
cttgtcaccctgaacttagtgaagtttccttcacttggttttgctcttcaactcggaccccgaaaacgctctaaacgctggcggaagtcacgcagagatgggctagacgctcaaccccggtc

SEQ ID NO: 221524 - DNA, 122 bp, Homo sapiens
gcgagaggccgtagattccctggttggagtcccgtttcctggtgccgggatcagggctggcggtggggcgggggtggcggggcgggggtgcgggggagccggctggggcggcggccaacaga

SEQ ID NO: 221525 - DNA, 122 bp, Homo sapiens
ccagagcgccgtgcccacctcaggctggggctggaactctgggggacttggctggggggccgggccggcgaggacagctgctgccgctgatgtcacagggtcatgagtgaaacctgaggact

SEQ ID NO: 221526 - DNA, 122 bp, Homo sapiens
tccaacagttggcctatggccagagtctcctgcctggggagggctcaaagggatgggcaccggctgaaaaatctcttctgggccgaatccgtcttggctgaggcctctgtttacatagcaac

SEQ ID NO: 221527 - DNA, 122 bp, Homo sapiens
tttatgaaatacatttattaagacttgaaagtccaaattacttcttgatccatgggctgccgattggatgttgtgttagcggacgtgaaaacaacatgaatctcattttacatctctatcag

SEQ ID NO: 221528 - DNA, 122 bp, Homo sapiens
ctgggcttagctgagaaaagctttgggttacttcaccctcaagcattttcccttgaaacgcgttgattgacaagttagtgatactacgacaccaaaagacgtatccccctagtgtaaattag

SEQ ID NO: 221529 - DNA, 122 bp, Homo sapiens
agcccagcagactctacagtgtagcatgaccagcaggaatattttcctggccaggtgcggcggcacacacctgtaatcatagcatttggggaggctaaggcaggagaatcacttgagccctg

SEQ ID NO: 221530 - DNA, 122 bp, Homo sapiens
cagcacggtgctctgagagtgccgtgtacgcgtgcgccggtggagacgggcagaggggtgcgaggagccccaggatcccgctagggggcgccgcggacttgcgtcctgaggaggcgggaggg

SEQ ID NO: 221531 - DNA, 122 bp, Homo sapiens
caggctctctaccaggaatgtccaggcgagacaccagagggctctgcgatggcctggatacgggagctgtgcaaggaaaagatcccctttggaccactgaagtcctcacttaggatttcaat

SEQ ID NO: 221532 - DNA, 122 bp, Homo sapiens
ttaaacattaaaatgccttctcagtgtagcagtcatccatgctctttgtaacaaaaatgtcgcaaagcgtaggacgacagcctttaattaacctttgcccagctcctttgaagcctctccac

SEQ ID NO: 221533 - DNA, 122 bp, Homo sapiens
cccgcgcgagcgagggacgccgacgtgccagggagccaataggcgcagcgctcgtgagcccgtcagcggactcggctcggactccgctgctcttttgagaacccgcacatccctgagcccgc

SEQ ID NO: 221534 - DNA, 122 bp, Homo sapiens
actaaatataaaataataggcaccagtaagtgtgtattgaatgaataaatgcagtagatgcggcaccatcaatgaagcatgagaaagagatttctgttcctgttgcaaccaggacagagtgg

SEQ ID NO: 221535 - DNA, 122 bp, Homo sapiens
tcagaggtccagccctccaaaatactgaagtcctagttccgctggattgaaaatgggcaacgcagaacggggactggaaattttttaaaaattgtttttaaagacggggtcttggccaggcg

SEQ ID NO: 221536 - DNA, 122 bp, Homo sapiens
tcgatgggggagcagggatgtggtctctggacagggagaatacccactgtgtgctgaacccgtgtctttctgggcctaggcttggtgctgctgagtggggctggagtggcagagaggacaag

SEQ ID NO: 221537 - DNA, 122 bp, Homo sapiens
aatcttaatggagtaatagggatgcaatttgccctttcaactcaaccaagtagaaaataacgggtaaaatacataaaactacttgtttcagacattgggcaacaagcagcatggggcagtaa

SEQ ID NO: 221538 - DNA, 122 bp, Homo sapiens
agactgaggagcagggtgaagccggccaggcccagagtggcggtcaggggaaagaagggccggtactggatctggcagtaccagagcagcagcaacagcaggagcagcaggggcagcagcag

SEQ ID NO: 221539 - DNA, 122 bp, Homo sapiens
gctctcaaaagctggtgaaagctggctccagagcaatactggatccaacaaaccagcgggcgaggcccacccattaagtaaaggatagagccattctctatatcttgctcccagctctaccc

SEQ ID NO: 221540 - DNA, 122 bp, Homo sapiens
cagaaaatcacccaatcaccgactggatctttaaattctccagccactcagaggtaggggcgtaacaatgggcgtgtctttctttgcgtctctactccaggagcttgggctgtaccaattgc

SEQ ID NO: 221541 - DNA, 122 bp, Homo sapiens
cactgatttagcctgtatcatctgccagtgctttgcatgcattatattgcatacttttcacgataaacctatgaggtagatattattattgcccattttacaaatgagaacactgtggctta

SEQ ID NO: 221542 - DNA, 122 bp, Homo sapiens
aacaaacaacttagacccagagaaaacagtttaaaacacacctgaaattaattcttcccacggactcttcaactatggtagtaaccaactctgtcctagtttaagtccttttaagttggctt

SEQ ID NO: 221543 - DNA, 122 bp, Homo sapiens
caagcttttaaaaacaagagctcagagacatggccctggccttggaagatgccctagagacgctgaggtggttgtacttttgccataggagtggcagccagagaactgagcccaatgaatgc

SEQ ID NO: 221544 - DNA, 122 bp, Homo sapiens
ttattccactctgttaagcttcctgaatcacagagaagttgtcagaaagattttagcctccgctataggaagtcctgcccaccttctccagatctctgttctcatagtccatcctctggttc

SEQ ID NO: 221545 - DNA, 122 bp, Homo sapiens
cagtcagtgagaggctcttaggggtagtagaggcagcagggcctgtcctacctggggctccggggggctgctcagtggccgggcctggcaggtggtggggcagcagcagctgctctctccag

SEQ ID NO: 221546 - DNA, 122 bp, Homo sapiens
tcttgacctgaccctgcaaaatccctcaaactctggctctctgagttgattttggatatacgatgaaccataggtttggaatgcagataacctccacgtgtattaatgaaagaggtcagcta

SEQ ID NO: 221547 - DNA, 122 bp, Homo sapiens
tttttctttttactcttctttcatgttgctgctggaaaatttaaaagtcaacatgtggcacgcacactactcctattggccatctgctctagctggatgggaactgcaagcagcaaaggcct

SEQ ID NO: 221548 - DNA, 122 bp, Homo sapiens
tgcattcatgaaagctgatgactcctttccaccagtgaatttcctgcaacccacagggcccggcctcagttggggtgtggggggagcagaatgatgtggggagagtggtggatgctgtggca

SEQ ID NO: 221549 - DNA, 122 bp, Homo sapiens
tctatttctgaagacaatgtggaagcagagtgtgggccctccacaggtgtagcgaggcggcgtgctaccgcgaagaaggagggaagacgcctgagcccagccggtgccctgctgcccctctg

SEQ ID NO: 221550 - DNA, 122 bp, Homo sapiens
gcctccgggattcccagagtcactggtggcatgtgccccccgctgccctgcccagtgccccgccctggggaccctgtagtgagtgcagcagccacagcccacccttgttgggggctgtggtc

SEQ ID NO: 221551 - DNA, 122 bp, Homo sapiens
cacttctgccagaccatgctgagagaacctctcatatgctcccgcttgtaggagccactccggaagtgtggcctctgttcaaatcctttccactggaaaaactaccccattcccatcccgca

SEQ ID NO: 221552 - DNA, 122 bp, Homo sapiens
ttgagtcctgctgacccagagctgccctgggaggtcaggaggcctggtctgcagactccacgccggtggtggtggcagctgtggggttcgggcagctgtttgttgagggcttgctgagtgct

SEQ ID NO: 221553 - DNA, 122 bp, Homo sapiens
cacccacctcggctcggtcccgcctctccccgcgcgccccgggctccacctaagccggcacgaggtccactcatggctccgcccccgactccccgcccacctcagcctgatcccgcctctcc

SEQ ID NO: 221554 - DNA, 122 bp, Homo sapiens
caccccggggggcggggcgtgggagactgtattcgggggcgcgagctgccccaggtgagccgtggctcaggtccggagcgcggtcgggacacagcgcctctaggagaaagcctggaaggcgc

SEQ ID NO: 221555 - DNA, 122 bp, Homo sapiens
cagatacagaaactaagacacagccgggctaagtaattaatctaagcttacacaaatagccgagacagagccaggacttaaatccaggcagcctgtttcacagtccctgctcataaccatgg

SEQ ID NO: 221556 - DNA, 122 bp, Homo sapiens
aaatcacccctaatccctagatccccgggccccccgtcccacccgacaagcagacactctcggacgtctctcccaggcagtccatgcctgtaaacttccagaaactgacttccggagcctgt

SEQ ID NO: 221557 - DNA, 122 bp, Homo sapiens
tgtggtcctcagggcctaggaccacctgcatctttcaccaagatgcccagcccagaaaatcgcctccatcccagttcaatggactgagagttctggaggagtcttctctgtgtgatttctca

SEQ ID NO: 221558 - DNA, 122 bp, Homo sapiens
ccagtgggcagtgaagatgagatcctctacatccttagggcagctcagagggccactcagcggccaagtccggccggggagggccgagggctctgtttgaggtcaccctggagaccggcctc

SEQ ID NO: 221559 - DNA, 122 bp, Homo sapiens
gcccatcgtgccccggccatgacccgcaccttgctgcagctctgtgtagctaatggagcccgagcggtcccggtcatactgctggaagaggttcttccactgctggatgaatttccacaggg

SEQ ID NO: 221560 - DNA, 122 bp, Homo sapiens
gtagtttaccccatgactttctagaagttagaacagtagagcgattttgagaataagccccggattcatactgctggaagttaaatcacctcctaggccagcatctctcagtctttcatgtg

SEQ ID NO: 221561 - DNA, 122 bp, Homo sapiens
ggagcctctcacatctgtgcagaatgcaagggagcaatcggcaagagggcgcggcagacacggggaggccagggatgggggaggcggcagcctgggcagaggcaggaggggaccagcatccc

SEQ ID NO: 221562 - DNA, 122 bp, Homo sapiens
atccgcaaaggacatcttttggagacaagaattcagacagactggcacagcctggacctccgccaagactgctcggaaggttgccatactgggagcaaaagagtgagagagagaaagaggga

SEQ ID NO: 221563 - DNA, 122 bp, Homo sapiens
ctcgggtgccgtcttgtaggccttggggcatagcggacacgcatagggcctaggcttggccgcggagcctgacaccttctccccactggcttcctctgccttagcttctgtctctggctttg

SEQ ID NO: 221564 - DNA, 122 bp, Homo sapiens
tgcccgccgcccagggcgtcccggcccggctcccagtaggaacgcaggctccgggcgcgccgcctccagatgctggaggtggttgcccctgggtttactgccgcccaccaggcctctcccca

SEQ ID NO: 221565 - DNA, 122 bp, Homo sapiens
gtcattagagccatggaggagcaccagtcactgttgagatgctgcccagcacccagggatcggggagagatcccctggcttgcccctcttcccactcttcccatcccagtgcctctcattgg

SEQ ID NO: 221566 - DNA, 122 bp, Homo sapiens
tacgcgcgctcacgccggcgttcagctcccaccctcccgccgctcccttgccgcctcgcgcgtgccgcccgtgtctggacagcgctatcttctgctgtctggatatagctctcttccctcct

SEQ ID NO: 221567 - DNA, 122 bp, Homo sapiens
agagttctccgcggtgtctcctagggtttcttgtcagagggccccaggcgcctagggagtcgttaccgccctggcattcaaataactcccgcgagaggcggaaatcccgcgagactgccgac

SEQ ID NO: 221568 - DNA, 122 bp, Homo sapiens
ggttggtcagcatggacagtgggaggccggtgcagtcactcttccgcgcgcggagcaagccgcagcagtaaatccctgaggggagagggaggaaggatcgcacactcaccaccatcggagat

SEQ ID NO: 221569 - DNA, 122 bp, Homo sapiens
gcaaaccttggaaactagctcccccaatagcagcagttcctggagagcgcgggagcctttcgaccagggtcccaaaggaaagcagtgagtggtgctgtttccctgaaggaagggactaaggg

SEQ ID NO: 221570 - DNA, 122 bp, Homo sapiens
cacatatcaagggaaatgcttcccatggagtgactcagcctgaaaccctaaaccggagcacggtcacagcatgctgtaggcagtcacagcaggctccgtatcagctgccttcggcatttgta

SEQ ID NO: 221571 - DNA, 122 bp, Homo sapiens
agtgtccgtgggcccttcccggggtcgtggggccgtctgctgagcatccgtgggcctgtccgtgacccctcagtgacttcagagagcacttgcttggggacagcatcccatcctgctggcca

SEQ ID NO: 221572 - DNA, 122 bp, Homo sapiens
gagcctggctgggtgctgcccacgctgaggctacgtctcataggaaaaggcagataattacgtaagcaattaaaacaaagtggtcactccattgtcccaaagcagagagtggatgattggat

SEQ ID NO: 221573 - DNA, 122 bp, Homo sapiens
tagcgagaaagatgcttgttactcttgaatcagacttttgtgggtaaataggcttggtgccgggcacggattcaatgcatcactgtgaacataacagcatcacgcgactgcccacagacatt

SEQ ID NO: 221574 - DNA, 122 bp, Homo sapiens
gcggacaggattacctaatcgtatatgcttaagggagtaccacgagagcgcgagcagcctcggcagggcagaacaggccctcggcaggttcttcatcctgggtatctatctagactctagtt

SEQ ID NO: 221575 - DNA, 122 bp, Homo sapiens
gagacaagcagtgaggtgctagatgagctctaccgtgtgtccaaggagtacacgcacagccggccccaggcccagcgcgtgatcaaggacctgatcaaagtggccatcaaggtggctgtgct

SEQ ID NO: 221576 - DNA, 122 bp, Homo sapiens
gaaaagaaaagaaaacacacacacaccaaaaataatactttcctaagtcagggtcaccctcgccttcccctccatacaccatcatgtggagtggaaaggagaaaaggctgtctcgctgacat

SEQ ID NO: 221577 - DNA, 122 bp, Homo sapiens
catggcagtcccgttgaggggattcagtgaccaaaacttcacaccacattcctggggccccgagaaacgcgcttgctgtgctattttcaaacacctccctgctgatgctatcctttatggcc

SEQ ID NO: 221578 - DNA, 122 bp, Homo sapiens
ttttcaaaaatcattaacactttttaattagtatcgactaagactttttccccctggaatcgaggctgtgtgtccgtcatcccagcccccggttggagcctgctctttgaactccgctgcct

SEQ ID NO: 221579 - DNA, 122 bp, Homo sapiens
cccggaactcgcgctggcccgcaagcgctgcgcgcagtcccgggtcccgcccgcgcttctcgctctacacctccccgcaagctgggggagccggctccagccttggccagcccagaaagggg

SEQ ID NO: 221580 - DNA, 122 bp, Homo sapiens
catcctaatgctatgaacacagtaaaagacctaaactcctttcctaactcatgcttttaacgtttcttttctaataagcaatcgtgcagaacttctatggctcctgccttgtgtagaaccac

SEQ ID NO: 221581 - DNA, 122 bp, Homo sapiens
gctccagcgcgctcaccaccgccaccgccgtcgtctcggctttatttacccagcccggcgcgcgccgcccgggaacaggaatagcgaggccttctcatgtttcctgactgccggtcccagcc

SEQ ID NO: 221582 - DNA, 122 bp, Homo sapiens
tacgtgtgcgcatgcacataaatatacacacactcgcatgcacacacgtgcgcatacacacgcacacaacggtgctgttgtttttttatttgaagtaaacaccatctgtcaccctaaacgca

SEQ ID NO: 221583 - DNA, 122 bp, Homo sapiens
cccccattttgccaacgaggcagctgaggttcccagaggctcaataccagcaccatgagccgcagcacgcaaggcaaacacagccggaggtgagcacatacctgcttcgcaccccatgcgcc

SEQ ID NO: 221584 - DNA, 122 bp, Homo sapiens
aaaaggaggaggcatttgtgtgtcttaattactaggatagtgcctgttacttactagcctcggtttagtgaaaagttattaatgaatgccaattcaaataaaaccttcagaagaaaaatgaa

SEQ ID NO: 221585 - DNA, 122 bp, Homo sapiens
atggaaataaataaggagctgttgaagttgccagctccctggagtaactgtgtaaacctccggtcttctattctcatggccaatagtgcttccactggtcaaaactcaagcctcaagataaa

SEQ ID NO: 221586 - DNA, 122 bp, Homo sapiens
tcgctgaacggcgattcgagggcccaccctaagcgacgcctccgacgcggaggaaaaacgcgattcggcccgccctcattccgagaagcagcacccagaccacgccctcaggggcagcgaca

SEQ ID NO: 221587 - DNA, 122 bp, Homo sapiens
cccccagtcttcagacagtgaaaacactaaaatcgaattgactcttacggagctgcatgacgggttgccagacgagacagccaacctgctcaacgaacagaactgtgtgacgcacagtaagg

SEQ ID NO: 221588 - DNA, 122 bp, Homo sapiens
atgttcaatgcagatgcaattttttcctgaatattttccatctgaggttagttgaattcacggacgtggactgccccccatagggagagctgattgtattttactgttgttggttgcagtat

SEQ ID NO: 221589 - DNA, 122 bp, Homo sapiens
ctgcccccagagctgcagccccttccaattagcccaggctcggagcttctaggctgggaccggcttctcccctcccgcccctcccccacctggctcccacgtggggagcccggctcccaggc

SEQ ID NO: 221590 - DNA, 122 bp, Homo sapiens
tcactcggccaacacacgaaggacccacagaaaacgtctgttacagctagaacggctgcacgtgagttcaggcaaggggcccagaagtggccctccggcgactgcctgctccacccctctta

SEQ ID NO: 221591 - DNA, 122 bp, Homo sapiens
attcccatccattcactttaatgagcatctgtttacattccatccatctgcattctatgacgcgtgctaagcacctcagcctgttctgtttattctgaaaggtatttcctccaaatattttg

SEQ ID NO: 221592 - DNA, 122 bp, Homo sapiens
tcagacacagatccacagattcacccctgggagtctggaaggttgcagggacacacataccgtgtgtgcagagccaaggagcacacggaggcaagagccgcagaggcgggggcccgacacgc

SEQ ID NO: 221593 - DNA, 122 bp, Homo sapiens
ctgtttctgtgcttcatctgaaatcctacaggatgccctctttgctgggtattaagtctgcgaaattcatccatgttgtgtgtaactgcgacttgctcattctccgtgctgtatgttaattc

SEQ ID NO: 221594 - DNA, 122 bp, Homo sapiens
actactattcctgtattctaaatgtcagctagcgactgaatgcaggatttcaaaaatccacgccatttacctaaagctttgctgaactttagaaggataagactaaaataataactaaacaa

SEQ ID NO: 221595 - DNA, 122 bp, Homo sapiens
aaagcagtctagggcaactcaaaataagaaccacagtctcaaccaagttacacttacattcggctagcttcaatgtcgtcagactgaggttctcctgatctgtaaaatgcaattgagaaaca

SEQ ID NO: 221596 - DNA, 122 bp, Homo sapiens
gcccactgcgctgacaccggaagcgaggcgtgtctgggagatcactccgcgctccggcggcgaaggaaagaacggactctgatcatagaagcctagtaaagtagtacacctctctcctttcg

SEQ ID NO: 221597 - DNA, 122 bp, Homo sapiens
gtgactacccttctgggtgtggctgtaggggggtttgtcctctggaaaggcatccagcgccgccgaaggagtaaaacgagtcctgtgacccaacagccacagcagaaagtgctgggcagtag

SEQ ID NO: 221598 - DNA, 122 bp, Homo sapiens
tgtggagctcgatgctgtcgatgtgtgactatctccacgtctgccggcctagtggctccacgtctgaagagttgctgcatgtcagctatttgccccagggaatatgggtggaatattttata

SEQ ID NO: 221599 - DNA, 122 bp, Homo sapiens
atcaatgatcaggaaattgccttgagcagctagggtttaaaacatgggacctctgaaaaacgggtagaacacaccacagacttgacccattcaggaggcaaggaagctggggaatttatctt

SEQ ID NO: 221600 - DNA, 122 bp, Homo sapiens
tgatgcccacggcctcctgtccccaggaaaggggtctgcgcccctcccccaccggaacagcgacagaagaggcgaccctctcaaaggcccttctgctgctcaccgcggggtgagtgatggtg

SEQ ID NO: 221601 - DNA, 122 bp, Homo sapiens
tctttgattgtccggacaacctcaaactcagccgaggtatggaagtcaaccccttccttgcgcagcaggagtcggaggtagcgggagacgtcgcggccggcaatgtccacccgcatgatgga

SEQ ID NO: 221602 - DNA, 122 bp, Homo sapiens
tagagacacggtttcgccgtcttggacaggttggtctgtaactcctggcttcaggcgatccgcccgcccgcctcggcctcccaaagtgttgagattgcaggcgtgagccaccgtgagggcct

SEQ ID NO: 221603 - DNA, 122 bp, Homo sapiens
tccacaggtgtttttttcagcgtctcatctgattctccctttcaaatcctttgtgacggacgtgcatgcatgagctccagagatactccaaggtgtatacacacattcgtgtgtgtgagctg

SEQ ID NO: 221604 - DNA, 122 bp, Homo sapiens
ggaggaccataaatcagtaccaggcaaggcccggagcccgtggctgacctttcctggggtcgtcctctggatcaatggcagtgcagctcgcagttcaccctttctggcccaaacccaatacc

SEQ ID NO: 221605 - DNA, 122 bp, Homo sapiens
attgatcctgggaaagggggcggggggcggtggctggagtgatactgtttctttccatcccgggcagttaaatatgtttactcctccatccggaggtgaagagatcttaattctgttttggg

SEQ ID NO: 221606 - DNA, 122 bp, Homo sapiens
gtggcagagagctgtcagtcatccctgggtgcctcctgcgcaagcgcagttgtcctcctgcgccgacctcgaatgcggtcctcctgctgcagaccacgcccaccaagggctggccgcagcca

SEQ ID NO: 221607 - DNA, 122 bp, Homo sapiens
gaggggactagcacaggggacagctccgagcctttctccagggaggatgctgagcgcggtcgtggacccgttgaaggatctcctttcctgcaagttggtgtgtgctggaggaaaaaggaaag

SEQ ID NO: 221608 - DNA, 122 bp, Homo sapiens
gcgcgcgtgtcgggggagctgacctatgacaaacatgtgcagagctctagtacccagccacgcggaggctgccggttgacagaagcgttgccgccccctgccgccgagttcaccctgccgtc

SEQ ID NO: 221609 - DNA, 122 bp, Homo sapiens
ctggagctccgggtggacactgcgctcagaagcgtcactggctcctgggaggccaaggaccggctttgcctgttggccgccagcggggacgcggagctgcggctgggagcccccacgtggag

SEQ ID NO: 221610 - DNA, 122 bp, Homo sapiens
cccacgggagggcggctccggcaggcgggggtagggaagctggcggggagctgggcagggcgctgcagccggcgccagcgcactcaccctcacacccacacgcgcgcactcgcagctgctgc

SEQ ID NO: 221611 - DNA, 122 bp, Homo sapiens
gccgcgaaggcgcagagcttgggcttgctggttccagcgtggttcccacctcctggggagcggggggctgcgctactcagggcgctcgctgctcccgtggcggtttatggcctgtgtggcct

SEQ ID NO: 221612 - DNA, 122 bp, Homo sapiens
gggctgaggcaacccccggcgatatggggggttacagcaccccctctgcccccaaccccccggctattacgatccatatggcaagggggtgagacacccctctgccttacggggagtaatag

SEQ ID NO: 221613 - DNA, 122 bp, Homo sapiens
ggccctttttcccacctgtaccctcctgtccaaacttggaagctttccttaagaggccatcggctggcgagtgtctgtgtgagtgatatgtacttttgacttggaatttctctctaactctg

SEQ ID NO: 221614 - DNA, 122 bp, Homo sapiens
gagcaaggccagttgcttccacaacaatggccctgcccaggaaggttcttaaacattcctcggatcagccctgttaagtttcttagccttgtgaaggcatttacatcctccaaagggagcaa

SEQ ID NO: 221615 - DNA, 122 bp, Homo sapiens
ccagcaagatgactgctctgaggcgccctagggctgagggaggggccgtgacaccagccccgccccccagccacctgggaaaaggaagcacaaaaaggagaagcagcaacggctgctctgct

SEQ ID NO: 221616 - DNA, 122 bp, Homo sapiens
cctgctccagtcgccagcctctccattccagagttttctaccttcagccttttccaaatgcggccacgctgaaactgggagccgccgcagtgattgggggaggcaaagtggaacgtaataaa

SEQ ID NO: 221617 - DNA, 122 bp, Homo sapiens
gttaaatactttcacttctcttttccccatttgggcggagccctttctgagtcagtctgtcggccgacttcctgcttggggcctgggcagccacactgcacgcaggctgggccgactgaggg

SEQ ID NO: 221618 - DNA, 122 bp, Homo sapiens
acctgtaaaatggggtaagggtccaggctggtccaactcctggggctactgtgaggatcacggggctttgccgatgaaaaccctactgccctgccctgccctgcaggcctgtcctgcatgcc

SEQ ID NO: 221619 - DNA, 122 bp, Homo sapiens
ctccctcccgcccgcggggccccagggaggaggagggagggggatcccggagaggcgcagcgccggccaagtgtaagtccagaggcttacgctgagaaagggcctttgcgggctctgttagg

SEQ ID NO: 221620 - DNA, 122 bp, Homo sapiens
aaactgaggctctcatgcttggttgctggtggctgggtattacccacaccaggctgaagtcggaaggaggccagtctgcagaaaaagggagagacagagagagggagagacagagagagagg

SEQ ID NO: 221621 - DNA, 122 bp, Homo sapiens
cgactcttcgtagccgctcgcagcggccttggcatcacgagtcctgggaggggtcaggcgcggagagcagataatagcagccacggtgcttcttcccgactgtttgagatccgggccccgaa

SEQ ID NO: 221622 - DNA, 122 bp, Homo sapiens
ttgctgaatgaataatgctgtgggtatgatattcggttcggggccgggtgcggtggctcacgcctgtaatcccaacactttaggaggccaaggtgggaggatcacttgaggtcaggaattcg

SEQ ID NO: 221623 - DNA, 122 bp, Homo sapiens
ctcccacctccctgcgccattactccattgctgtgtgtgcattgtggcctccctggagagcggcgggcgggcggcagacggggccgcgctcaccgccagtctccccgcagcaggcagcagaa

SEQ ID NO: 221624 - DNA, 122 bp, Homo sapiens
acagcatctgtgccagaagggctggcccggcaactccctctaaggctctgtggatggagacgctctcaaatgcaaacaaagcttttgagcaaatatgccgacggagtgactttcgacagcca

SEQ ID NO: 221625 - DNA, 122 bp, Homo sapiens
aaagacttgtatttaatgtgatttaatcgactgtgcccatctcactgcggacactgagtgcgcaacctgagcctggagcagttgagggagacggcaagaccccacgcgccgtgtaacgacca

SEQ ID NO: 221626 - DNA, 122 bp, Homo sapiens
tatgatgtgtcatcccctttacattcacaacattccaggccaggtgaggtgtctcacacccgtaattccagccctttgggaggccaaggtgggaggatcacttgaggccaggagttttgagg

SEQ ID NO: 221627 - DNA, 122 bp, Homo sapiens
tccgagccaggtgtgggatatagtctcgtggtttgccgttttttaagccggtctgaaaagcgcaatattcgggtgggagtgagccgcttttccaggtgcatccgtcaacactttctttgact

SEQ ID NO: 221628 - DNA, 122 bp, Homo sapiens
cgggagaccttgcggggagagcagctggccctcgcccaccgggccgcgctttgtctagggcgcgagtccgcccgtttccggccccgcccctcgccctggtcccagtccgcccctccccctac

SEQ ID NO: 221629 - DNA, 122 bp, Homo sapiens
ctttcaccttgtatccacaagctgtgctgaagggcccttgttttaaactctcaaggcactcgatactcacttttatcttaaggctgaattacccatttgtaacacttggagagtaggtacta

SEQ ID NO: 221630 - DNA, 122 bp, Homo sapiens
tagacagctacttgcccacacctcatcgagctctgggcgttgtgccagcatttgaagaagcgatctgttgcaaagcgatccacacggagagccttagttatcgcgagacttgacaggcaccc

SEQ ID NO: 221631 - DNA, 122 bp, Homo sapiens
aataaaactagctgcacgtcaagtttgagcttaatttctggaaataggcggaagtcgctccggatcatgcatggaaggctaattgaaaagatcagtcggggcgcttgtggcagccttgtcac

SEQ ID NO: 221632 - DNA, 122 bp, Homo sapiens
tataaataggcccagcccaggctgtggctcagctctcagagggaattgagcacccggcagcggtctcaggccaagccccctgccagcatggccagcgagttcaagaagaagctcttctggag

SEQ ID NO: 221633 - DNA, 122 bp, Homo sapiens
atgtccacctgaggcttcctgtcctcatcttactaaagaagaaactgggcccagagatgtcgagtgactgctgtaggtctcagagcctgctgatagcagagccaagagttggatttatcttt

SEQ ID NO: 221634 - DNA, 122 bp, Homo sapiens
tgggtggcgctggacctgctggacctgctggacatgcaggccagcctgtgggagccgccgcgctccgggctgccgctgtgggccgagggcctcaccttcttctactgctacatgctgctgct

SEQ ID NO: 221635 - DNA, 122 bp, Homo sapiens
cacgccctccctcacctgcggccttcggggcaactcgaccgcgcctgggcgcgccccacccgcccgatttccccacggcactccgcgcccccccagccagagccggtgtccctccctctcca

SEQ ID NO: 221636 - DNA, 122 bp, Homo sapiens
cctggcagagatcacagaggcaggttctgttagacacatatgcacacatacactcttacacgtatgctcacttacatgcttacacatacactcatatgtacacactgacacttgtgcccacc

SEQ ID NO: 221637 - DNA, 122 bp, Homo sapiens
taacaggtagttaagtgtcacacaaggtgttgttgcaatggcatgacggtgacctgttgacgtaactaagccttacagcaaggcatgtgccgcacgtgctccgtggtacttagagccctggg

SEQ ID NO: 221638 - DNA, 122 bp, Homo sapiens
ccgccgcggcgagccgcgcgcgtcaggccccgcccctttccagctgccctgctggggctccgccctttccagctgtggatctccaggccccgcctttgagggaggggtctggccggcgagac

SEQ ID NO: 221639 - DNA, 122 bp, Homo sapiens
gccatgaaggccagcacggcatcgggctggagggtgccgctgcgagagaccaggcacaggcgctgcagcgaggggcactggctcagcgcctggaagaactgggcgttggcgctgaagtaggg

SEQ ID NO: 221640 - DNA, 122 bp, Homo sapiens
cccatccctgccggccctcgcttctcccctcccccgtcggagtcagtccctctcttcaaccgcccccaccccctagtactggtctcagcttctgcagcgggcctcagccccgtccaccccca

SEQ ID NO: 221641 - DNA, 122 bp, Homo sapiens
gggtcagtccctgggccagtgccctttgctttattcagtcaacttccctggaactactgacgggctgtgcacagcaggaaatgcaactccaggctgggtgtcttgaaaactgggctccagcc

SEQ ID NO: 221642 - DNA, 122 bp, Homo sapiens
cagcccaaacttgcctcaggcagagactgggagagggcctattgcagccccctgctctcacgtcagccatcagctttgcactggccaatgccgtgtattctgctggggctggctgtgtgctg

SEQ ID NO: 221643 - DNA, 122 bp, Homo sapiens
accgagccccgcatcacgtgtgcagagacggcctatagtgtctgaaggatgccacctagtcgcaggcccggcggcgccaccaacagcgaccgcggtagtccagctcgcgccgcgtcccggcc

SEQ ID NO: 221644 - DNA, 122 bp, Homo sapiens
tgcggcagaggagcccagccggcagagagacgcagctttcttccatccctggggaccctccggcttgcactggcctttccagcccggcctgtggctcttagcatcatttttccttgctctgg

SEQ ID NO: 221645 - DNA, 122 bp, Homo sapiens
gcctcaagctctagctatagtgggagaaaactcaccatggaaagttaatgactcatcacccgttcagcgacgacagtgatgaagcaccagtgcccaagtcctaaatcagaccctgtgtcagg

SEQ ID NO: 221646 - DNA, 122 bp, Homo sapiens
taaacgtggagagcaacaagcagggagacgcgacgaataccaggccgagggatctccaaacgcagccaactcctcccggggacacagaccccgcgggggcacggtctcgatggaggggagtg

SEQ ID NO: 221647 - DNA, 122 bp, Homo sapiens
atagtctgaaaaagaagaaagtctgtcttggaaagaattatgcatatgacatttggggcacgtagtgactgtcaatccgattcatagggagacacaaagttttgaagaaaactatactaact

SEQ ID NO: 221648 - DNA, 122 bp, Homo sapiens
tatttggagctagggtggccaaaggtacatgacagttttgcgctttaacaaagcaagaagcgggcctcggcgtcccttcaaaatgcttttgacgcagccagggaagcgcttcgcgtggcaaa

SEQ ID NO: 221649 - DNA, 122 bp, Homo sapiens
ggagtcgccgcgtaagcggggccggctcagtgcggtgcggcaggcgcggctgtgcggcagcggaagtcctttgttgcagcacagtccctggcagagccagagcctctccgcgcagcccagcc

SEQ ID NO: 221650 - DNA, 122 bp, Homo sapiens
cttaacatcgtggagcctcagtctcctcatctctaaagtggaaataataatgataatgcccgactcactaggtagtcaggggattaaatgagatgttagtcaagtgtttaacacactgccag

SEQ ID NO: 221651 - DNA, 122 bp, Homo sapiens
cgaccccaacccctcgggcctgagacggtcccgcggggccccacaagggagggggcgcgacgccgatggccccagaggaccctgcgctgcgtcttgctctgaacctccgtcgcggacacttt

SEQ ID NO: 221652 - DNA, 122 bp, Homo sapiens
cttcttaaaggcggaggcatgcacagctggctctgcagagctggaggccctctaaggcagcgaggtgtgaaggagtggactttgggacaaaaaggaggtttgttttactacgttgttcaaac

SEQ ID NO: 221653 - DNA, 122 bp, Homo sapiens
ccaacacctaggaagtgccaagctctgtactaactgatttacataataatagctaacaatcgctgtgcattattaggagccaggccctgagctaatcgttttaggtgtattatctcattgaa

SEQ ID NO: 221654 - DNA, 122 bp, Homo sapiens
agctaaatgaaattaagtaataacaatggctaacagttgttgagcacttactacgtgccacgaatcgttctaaatccacaatgtagaataactcctttaatcttcacagcatctctatgagg

SEQ ID NO: 221655 - DNA, 122 bp, Homo sapiens
cgaaagatggctctagaagctggcggtccccacccaggacgcccgtccgtgccccacgcgcgctgccgcgttcgtctcccacaagaagccaggagatgttactctgttttgtgggtgagggg

SEQ ID NO: 221656 - DNA, 122 bp, Homo sapiens
cctagaaacctggtaaaaatgggaatggtaattgcccagctcatggtctgtgaccgcggccgggtgctgggaagcttaatctcaatgcttcctccaagaaaataaatgcttttatgatgctc

SEQ ID NO: 221657 - DNA, 122 bp, Homo sapiens
tcgtcactgctgtgcgtcggcgggagcattttgcgagtgtccgggggccttcgtcacttccgcccccgcggcaaagcagggaggtcggaggactggagaggtggggaccctggggaggtggc

SEQ ID NO: 221658 - DNA, 122 bp, Homo sapiens
cataaaaaagatggcggccgcagcttctccacagcaacggcaacgccattctcaagcaagcgcatcaatatatttagttccggcctctttgcacgtcatttccggcaccggcatggccgggt

SEQ ID NO: 221659 - DNA, 122 bp, Homo sapiens
catcttgccccttcagaggcaccgcaaacaaacccaattcctggtgtcccctagtcttggcggaggagccttttagatgagccccgaaaggccgggcaggtgggtgactctcaggcagggtc

SEQ ID NO: 221660 - DNA, 122 bp, Homo sapiens
aagccatcgagacctccgacctcgagaaatctcagagctcagactctttctcccaagacacgtctgtgacgctgatgccagtgtcggttaaactccctgtccacccagtggaaaattctgtg

SEQ ID NO: 221661 - DNA, 122 bp, Homo sapiens
tgttcctcttcccgtagatcccaactgggccagtttgaacttgggagccctcatgtgcatcgaatgctcagggatccaccggaatcttggcacccacctttcccgagtccgatctctggacc

SEQ ID NO: 221662 - DNA, 122 bp, Homo sapiens
cctgtccacttcagtggcacagtcttgcaggcacccgagtgggcagagctggaggagggccggaggtggctcacccagacgccttcaccccctggtggccctgtgagttccgaggcagaagc

SEQ ID NO: 221663 - DNA, 122 bp, Homo sapiens
tctctatctccttccggacccccagatccctgtccctggtgaggatgcccccactccacccgcaaccctcgccagggaaaaagggaggctgggctaagggagcctcactcccggggaccaca

SEQ ID NO: 221664 - DNA, 122 bp, Homo sapiens
ggcgaagggaggtctaggcctctgctcctctgcttcagatgccggcaggccccggaggagcgcccgcgacccctcggaggctctccaggtgggcggctggggtaaaacacagtatcctgagg

SEQ ID NO: 221665 - DNA, 122 bp, Homo sapiens
cacccatcgccacgctgtgcctggcccccgcagaccctctccctggcctcagggctactacgtctgcgggcacagctcgtcgccgtctctccctaacagcccctccaggaagttctctcaca

SEQ ID NO: 221666 - DNA, 122 bp, Homo sapiens
tacacctcccaggggtctgtgcgcgcctccagggaacgggtcttgtggctttgtctcccgcgaagaggagatggcggagtcgttgaggtctccgcgccgctccctgtacaaactggtgggct

SEQ ID NO: 221667 - DNA, 122 bp, Homo sapiens
gccaagagcattttttttttctccttgaatcatgaaaagtagtatagtggtatttaattgcgtgggtttctgtccatgaggtctcactcttcatcaagcgcacacttttcaaacaaagatgg

SEQ ID NO: 221668 - DNA, 122 bp, Homo sapiens
gcctcggggacagtccgtgcagcccctcctggggctgggggcgggcacttgtcccagccacgtttctgctgactgagcagccttcttcatgagctcacgcctttccagagaaatcccttaat

SEQ ID NO: 221669 - DNA, 122 bp, Homo sapiens
tctctacccctggacattaggagcaatgtcacaggggtggtgtacaacccctgcgaaattcggaggtacatcttcctctccacctttggatattagggacaataacacaagggaggtctaca

SEQ ID NO: 221670 - DNA, 122 bp, Homo sapiens
ctgcaacctccctgcctgattctcctgcctcagcctgccgagtgcctgcgatcgcaggcgcgcgccgccacacctgactggttttcgtatttttttggtggagaccgggtttcgctgtgttg

SEQ ID NO: 221671 - DNA, 122 bp, Homo sapiens
cagaacgaagatgtaaacctccgtattcctaaaggacaacgggtcttgctacctatagagcgagtgaggtgccctccgcgtgggtagcatatatgctcaagaaaagagggcgggggaaggag

SEQ ID NO: 221672 - DNA, 122 bp, Homo sapiens
gtgtcagtcggactgcacagggaacacggtttccagtggctttggcccctactcgggaaacgtctgcctgttctcgatggtgatggggtggctgccattcccttggttttcctaagcccttt

SEQ ID NO: 221673 - DNA, 122 bp, Homo sapiens
aacaacaaaaaaaagccagatgcggtgggaagaagctcctgcaagaggccacggagccagcgacgggaggccttgaagccagtgacgacccactcagccgagctgccgctttcgcagcacgc

SEQ ID NO: 221674 - DNA, 122 bp, Homo sapiens
ttaccctcttctttcaggcctctgctggaatggtgtcttagcaaggaagctttccttaaccgagagtctacctaaaatagcactactccatccctctgtcctcctaccctggtttatgtatt

SEQ ID NO: 221675 - DNA, 122 bp, Homo sapiens
gagctgactgatggtctggaagcacccagcgaagaagagcaatgatgtttgctaaggcaacgtcggtactgtttctccccaaaggcatgggattttatacacaccacctgcttttcatatag

SEQ ID NO: 221676 - DNA, 122 bp, Homo sapiens
gctggctttaggagtgaagctgcagacctttcggtgagtgtgacagctcttaaggcagcacgtctagagttactcattcctcctggtgggctcgtgggctcgctggcttcaggagtgaagct

SEQ ID NO: 221677 - DNA, 122 bp, Homo sapiens
gagaaccaaagctgcttcgctgctctccagggagaccctcctgggatgggcctgagaggccggggctcagggaaggggctgggatcggaacttcctgctcttgtttctggacaactttcccc

SEQ ID NO: 221678 - DNA, 122 bp, Homo sapiens
gctgttaactaccaacagcttccaaatgtgcagcctatcaaaggttcacattatgaggatcgagtcaagctcaactatgaagggttccgagaacatctcactttgcttctcctgcaagagta

SEQ ID NO: 221679 - DNA, 122 bp, Homo sapiens
gggctttcgaactggtatgggctgtaggcttcgaccttctccgaggcctgtgcaatcaaccgtgagaaaggggtttcctcctcgaaacggaactggctccagttggcatggccgcagagttt

SEQ ID NO: 221680 - DNA, 122 bp, Homo sapiens
gctgactgctgtcgatggagggaacccgccgagatctggcaccgcagagctccgggtatccgtgctggacgtaaacgacaacgccccagccttccagcaatccagctacaggattagtgtgt

SEQ ID NO: 221681 - DNA, 122 bp, Homo sapiens
ggccgggctgaggggcagctcccgacgacctggggcctgggctgggccgctaacggagcccggccaccagccagcccgtcccggggccacgccctctctggcctcagtttccccgtctgtaa

SEQ ID NO: 221682 - DNA, 122 bp, Homo sapiens
taacatgtataaggtgatatcatataacaatgttttcaccatcacaacatcccatgcaatcggtacaattgttatcatgattttacagacgtgctaaaaggttaagtaacttgcccaaggtc

SEQ ID NO: 221683 - DNA, 122 bp, Homo sapiens
ctaatttttgtatttttagtagagatggggtttcaccatgttggccagtatggtcttaatcgattgccctcgtgatccgcctgcgtcagcctcccagtctgtcccctcaccactactctctt

SEQ ID NO: 221684 - DNA, 122 bp, Homo sapiens
ccaactccggacctcaggtgatctgcccccctcggcctcccaaagtgctgggattacaggcgtgagccaccgcgcccgaccaatatacctccaatattaagtctgttgggtgttattcttgc

SEQ ID NO: 221685 - DNA, 122 bp, Homo sapiens
tccgcgtccgccattttggctgcctctgtcggtctgttcagttaccacgtgaaccgccgacggagacccgtagtgggggaggcggcggcagcgttaagtgagaaaggaaaaaagacaacgag

SEQ ID NO: 221686 - DNA, 122 bp, Homo sapiens
caaaataaactgataaatgcttgtacgcagagtacagaaggagtaaggtagctggcctttcgtgctggcatgcctgtcactgtgctgtgaaagtgactgggacatgggcctcttgtgaacaa

SEQ ID NO: 221687 - DNA, 122 bp, Homo sapiens
gcatgtgactacagtggctcagttcccagatgtaatgctgagagactgtccagtgcgctgcgttctagaacatttttgctgatagggaggccgtaaagtgaggggctggttttggagccagg

SEQ ID NO: 221688 - DNA, 122 bp, Homo sapiens
tgaccttcctgggctcaagtgatcctcccggctcacccccagtagctggaaccacaggcgcgcttccacaccggaaagcccattttctagaggcggaaaccgaagcgcccagtgggaaaggc

SEQ ID NO: 221689 - DNA, 122 bp, Homo sapiens
caccaacagcgtcctctgcgcctgctgcagcttgtcccttagtcctccctggacagagggcgtgaagttggctgcgccaacaggacgcggcccgctcacttcggggctcattgtcctggaca

SEQ ID NO: 221690 - DNA, 122 bp, Homo sapiens
gtgtgcttgtgtgtgcacatctccaaggtggagctatatatagctcctgcatacccagcccggcttccctgctgctgagccggctgccttggccttctcaagcaatctggaagcactgagtg

SEQ ID NO: 221691 - DNA, 122 bp, Homo sapiens
ctgttattcatgtgtcagaagccaccacgggcagaaatcgaacttagtcttacagtggcccgatttctctcatcctttgaggatggttatgtaagttccgaagacagagtaaagaacgtatt

SEQ ID NO: 221692 - DNA, 122 bp, Homo sapiens
tccccgatcgtgatcgtggcattggtactttctcttctcaattccctctcaataatggtacggctagcggaggggggaatagagggccctgggaaggcctcagggctcggcggctagtacca

SEQ ID NO: 221693 - DNA, 122 bp, Homo sapiens
caaatatctcttcagacattgccaaatgtgccatctagtgcaaatcctccattctgccctcgagaatcactggattaagagcattaccttctgtccagaggctctaaaggactacacagctc

SEQ ID NO: 221694 - DNA, 122 bp, Homo sapiens
cctgcctgccagccgggaaggaggcgtggttatggagctggcggctgcaaccccggggcccgcgccgctgcctagcgcttcccgggggctctttggggacgcgccccccgccgcggctcggg

SEQ ID NO: 221695 - DNA, 122 bp, Homo sapiens
taatatagagatgagcaccggacgctggaggaggacactggaagaggacctgtgcagccccgggccaggacagcttccccaacatgacattttagctgagacatgaaagggggtggtactgg

SEQ ID NO: 221696 - DNA, 122 bp, Homo sapiens
gaggggaggtcgccctcggagggcgcttggctttcgctccaggcgctccgggctggagagcggcgaggctccgtccgctccagtccactcctccggccgcctcctgcctccgctgctttctt

SEQ ID NO: 221697 - DNA, 122 bp, Homo sapiens
gcaggcctggggaagacggctcgcaaggtagaggctgtttattttgagggtccttgcctgcgccacacgcgggtctgcacacggccccacatacgccgctgcgcacggctctcctccgcctc

SEQ ID NO: 221698 - DNA, 122 bp, Homo sapiens
caggagctccacgcgtggaatgtggaagacagcggctttcccaggccttcctcctcgtctcggttcacttgcactgctgtaacaaaattcctgagactgggtaatttagaaggagaagaaac

SEQ ID NO: 221699 - DNA, 122 bp, Homo sapiens
attctgattttggtttctgtgtccttcctccaacccttccaggagctgcgtgagaccaagcgccgtcatgagacccgactggtggagattgacaatgggaagcagcgtgagtttgagagccg

SEQ ID NO: 221700 - DNA, 122 bp, Homo sapiens
tctcttgggcttagcaaacgtctccaagtaacaatcccacttgggcgtctgcgagtcctccgtggtcctctcgtcgaggtgatggttttatagtggcccgcccgctaaagcactttgaaaag

SEQ ID NO: 221701 - DNA, 122 bp, Homo sapiens
caacagcctccggaaccaaagcctcaaaatagtcgtctcccccgcccctcgcagaagcggcgagtggtatctgccaaacagatgacaaagtacctccgactgaatcccacagacagcgcttt

SEQ ID NO: 221702 - DNA, 122 bp, Homo sapiens
atttctcacagttctccatgctggaaagtcctagatcaaagtgctggcagattcggcatccggtgaggtccagtttcctggttcttagacagttgccttctttcatgtcctcatgtggcaga

SEQ ID NO: 221703 - DNA, 122 bp, Homo sapiens
tctcatgaatgatttaggaccaacctttggtgctgcactcctgatagtgatgacagtgagcgccttctctcaagatctgggcatttaaaagtgtgtggcacctcctcccaactctctcctgc

SEQ ID NO: 221704 - DNA, 122 bp, Homo sapiens
ggattgaaaagctgaattaggttgattgtccctggggtcacccagcaaggttaggcttaacgttcctggggatatgggggacaggtgttggtttgttcctgccacgtgttccttattgcgct

SEQ ID NO: 221705 - DNA, 122 bp, Homo sapiens
atccgtaaaaagcccaggtatccataaaaatgggatcccggtggcctagaagggtgaggccgggaaactgcttctggaggaggtgagaggagttgggttttgggaactgccgttggcttctg

SEQ ID NO: 221706 - DNA, 122 bp, Homo sapiens
cccctcccccacgcggtcccgctggctgtgccggactggcagcctcgccgtttcccactgcgcctgctgctgcgcgggtgcccaagccgggaaattctccctgcagccccctgccggtgttt

SEQ ID NO: 221707 - DNA, 122 bp, Homo sapiens
gagatagaacccagatccgggtggcaattcacattccattacaaaactctacacagcttccgggctagcaccagcacacatttggggaacatcggagggattttcttcttcttttgtgggtg

SEQ ID NO: 221708 - DNA, 122 bp, Homo sapiens
tcccgcctctggcgtgcatggagcatgcgcttccttcctcacttcctctgcaggagggagcgagagtaaagctacgccctggcgcgcagtctccgcgtcacaggaacttcagcacccacagg

SEQ ID NO: 221709 - DNA, 122 bp, Homo sapiens
gcagcgaggtggggcatgaagcctccaggaaaaagctccaaaggaccagaacacgggttccggagcctggggttgggggctttaggaatagacgggaagtgggaaacgggaaaggggtgtgg

SEQ ID NO: 221710 - DNA, 122 bp, Homo sapiens
atataagacaacaagggttgatggggttgtaaacaactggaaatacatgtctcctctaaacggcatggtgcttctcagctatgcctgatattgttatgtagaaatgtaggcagccaattctt

SEQ ID NO: 221711 - DNA, 122 bp, Homo sapiens
ccagatttcccctttctggctctcgagttttctgcaaaatgtcctctttcctggggtgcccgcaatgggtcttccggaatgtttgcctcaagaagctgtttccgtgcagttccctgttcgtg

SEQ ID NO: 221712 - DNA, 122 bp, Homo sapiens
cgggagcgggggccgccggcgagactgagcccgggacagcccagagctccagcgctccagcgctctgcagcccgcccagagcgcgcagaccacccccatgccccgcccgccctcctgccaca

SEQ ID NO: 221713 - DNA, 122 bp, Homo sapiens
gccggcgttccgttcggggtcctccccagccagtgggctggcagctcccgggggcaagagcggccggctcagccgccgccaaccacgatgtcgcaactggctgcgttcgcccccgccagagc

SEQ ID NO: 221714 - DNA, 122 bp, Homo sapiens
catggcttctgaaattggagaaccctaaatttaatttctggctctactgcttctttgctacgggccttgggcatgttacttaatcacatcttaaagtggaggcagtccttgtagtgttgctg

SEQ ID NO: 221715 - DNA, 122 bp, Homo sapiens
ggtcagcgggctcagccacaggtcctcagctacacagtggagccaggtgggctcaggaggcgcctcctccgcggcctccatctacccagccccagggaacagctaacaagcatgtcagcccc

SEQ ID NO: 221716 - DNA, 122 bp, Homo sapiens
tcatgaattattaaaatataattatctgattgcttttggcatacttataacttcagttaccgtgggtttaagatgctggtcacatttatgacggcacccacatatacacaccctcctctcat

SEQ ID NO: 221717 - DNA, 122 bp, Homo sapiens
taacatcccagctgcctccagtgtttcctgatctataaagcaagattcagtggcaccaaacggtgctagaagcattctctggttcacagcacacttcgcagtgtacatgtgaggtggggagt

SEQ ID NO: 221718 - DNA, 122 bp, Homo sapiens
ccagatcttgggagaagcacggacatctctgtttctgcttttggtccccgaacgcagttacgcgcccactggctccctgtctctggcgcttctgggcacgggggagctggggcggccccgcc

SEQ ID NO: 221719 - DNA, 122 bp, Homo sapiens
ttcctctctggaaagcacgtggaaacgctgaagggaggagtgagagggcaggcagcctgccgcggggaggaaagggttaagcctgatttcttttaattgaactccagaactggtggccccag

SEQ ID NO: 221720 - DNA, 122 bp, Homo sapiens
gtgtccagattctaagcgacacggcagcacacacctgcaccagccctcgcttgtacatggcgcacaggatgaagagcgagtctgccgaccactcgatgtgctggatctggtctaggcacgtg

SEQ ID NO: 221721 - DNA, 122 bp, Homo sapiens
ctgagactggctaccccacctcatacagagtaacccaggttaagtgagacggtgcatgcacgttgaaccagagagacttcatggcatcctccagcccaaggtggcttccggtccgaggtggg

SEQ ID NO: 221722 - DNA, 122 bp, Homo sapiens
gtgatgatgcgcagcagctgcagcacctggcgaaagttactttcatcacagcggccctggcgctccagtgccaataagaagtcacgtccatttcggatgagtccacgctcgtggtcatcaat

SEQ ID NO: 221723 - DNA, 122 bp, Homo sapiens
taaggttaagactgaccatgggaccagatggctaaagggaggtacagatgaagctcctgacgtctcagtgtctgaaacttggccactatattagcagtctatgtaaccattaaaatattcca

SEQ ID NO: 221724 - DNA, 122 bp, Homo sapiens
gcccggagcccccgtccccacctagatacggtgcccggagccccgaccctcacctacacacggtgcccggagcccccaccctcacctacacacagtgcccggagcccccgtccccacctaga

SEQ ID NO: 221725 - DNA, 122 bp, Homo sapiens
gaatttccgccagcgtgtgagcaggaagacagcacgtgggcctcggtcaccctgagccctcggcgcctccaccagctcctccaccctgtgccgcagagaagttcgcagtggtgaggctggcg

SEQ ID NO: 221726 - DNA, 122 bp, Homo sapiens
ggcccgcagagaggccctggcagcccagatcgtcccagggcggccccatcgccggcgctgcgcggtgcatctcaatgcagaaccccaatccgcccgcagggatccctgcctcgacacgggct

SEQ ID NO: 221727 - DNA, 122 bp, Homo sapiens
cgcgggcaagttggacacttaccttcccctaaagcgctacaccatcaatagtgaggtgttcgcggcccagctccggggaaagtggcggggatggggcgggaggccgcgcggaggctgcgggg

SEQ ID NO: 221728 - DNA, 122 bp, Homo sapiens
gtgttcatgcaagcactctccagaaaggtcaaaagcaggcgggagctgcggcgccttcaacggagggcactgtactcctggaacctctcccagtgggagcctaggagatgcagggagctcaa

SEQ ID NO: 221729 - DNA, 122 bp, Homo sapiens
gggtccccggcacccaccttgacaaagtacagctcaggcggcgggtcctgggcccgcacacgcagcacgaaggtgcgccaggccctgtggatatcgtccaggcccagcacagaggcgcccag

SEQ ID NO: 221730 - DNA, 122 bp, Homo sapiens
gaagggaagaaatagagaaaaaatgttctgctctgaaataaatgtggtgtttcctgacagcgtttgtcaaggtaaggtgttgtctttaaaatgggacatctagtttcaatttacattatgct

SEQ ID NO: 221731 - DNA, 122 bp, Homo sapiens
ctgggcgcggacgctgcgcttagcagagcctgtttgccagcggcgggctccctgagaccccggcaactgcacaggtgaacggggaagtggaaggagcagccctgctaactgagaagggggag

SEQ ID NO: 221732 - DNA, 122 bp, Homo sapiens
gcctaagctgcagcgccccagagcctcagcacccccgcgacccagctcccacgaggggcacgggttctagctccgccccgcaagaaggacttccgcgtcctcggccgtcccgctccccccgc

SEQ ID NO: 221733 - DNA, 122 bp, Homo sapiens
cctttcgcaaaagcgacttcgtctggccccaaaacctttgccctccattccccagcgtcccggaccggtccttgctcatctctcaggggcaacacctgacccacggggcccgtcccggagct

SEQ ID NO: 221734 - DNA, 122 bp, Homo sapiens
tgggtaacactgcataagagcagtcctgaagtgcctgtcacagaggtagcagctgcaaaacgtttctgcttctcctagaacttgggaaatgaagagaagaggttggactaactcaaacttag

SEQ ID NO: 221735 - DNA, 122 bp, Homo sapiens
agtcaatttttttgagtgttgatgtagggacaagacatgactgtgatgaggagctgctttcgccaatttaacaccaagaagaattgaggctgcttgggaggaaggccaggaggaacacgaga

SEQ ID NO: 221736 - DNA, 122 bp, Homo sapiens
tctgcggccggatgcccaagacaccggatccagactccagggcggttgccctgggtgggccgtgggttctgagtccgacatggcaagcacacgtgcgggggtgtagtagagggtggggggcc

SEQ ID NO: 221737 - DNA, 122 bp, Homo sapiens
ctcccagatgcagcgccgggacgaccccgccgcgcgcatgagccggtcttcgggccgtagcggctccatggacccctccggtgcccacccctcggtgcgtcagacgccgtctcggcagccgc

SEQ ID NO: 221738 - DNA, 122 bp, Homo sapiens
gtctccgcaggttttaaatcagacgccgctcaggctgtgcccaggctgctgagccaaaagcgggatcagaaccacaaggaggaagaaattactgatggggatgaaagaccgaaataactttt

SEQ ID NO: 221739 - DNA, 122 bp, Homo sapiens
acttaatgttgccatccgagagttttctgcgaggccaagaatgagctagaacgtgtgccgcggtgaggctgccaccaccaggactcttctgcaggatgcgaagggaacagtctggatgtgtg

SEQ ID NO: 221740 - DNA, 122 bp, Homo sapiens
caacaatgaggcagaaaactcaggataggaagggacagagaaccaagatgatgaagtgcccgcaaaaacaagaagtaaagctctgagacatttcccagtgctaacagtgtactaaagatata

SEQ ID NO: 221741 - DNA, 122 bp, Homo sapiens
tcccgccggttaggttttgttatttcaaaaataaattaaccgcctttcctccggcggagacgcgcaggtgagagggcggcgcctgacccagcgggctctaggtgctacgccagggccccgag

SEQ ID NO: 221742 - DNA, 122 bp, Homo sapiens
gggggaaagtaagggagagagaaagagacggagaaaaacaggaaaacttactcttcagtacgcagggaagaatagagaaagaaaaacacaaagaaacgccacgcagactgcagagaaggacc

SEQ ID NO: 221743 - DNA, 122 bp, Homo sapiens
gattctctttacttccaggaccactacgcactgtgccctcaatgcccaaactggagtaagcgtcttagctgctgcccacggaggaccacgtctaaccacaccaagccatgagaactgtctat

SEQ ID NO: 221744 - DNA, 122 bp, Homo sapiens
aggggtgggtcaccggatgaacgggggtgggtcatgggatgaaccaggggtttccgaggtcgcaggcggcttccttgccccgtgacctggctggggctgcttaacttatgagcagttcggct

SEQ ID NO: 221745 - DNA, 122 bp, Homo sapiens
ctgcaggggtctgaaccgctccttggcctactggcaccgggtcctggacgaaatctaccgcggtccaactgagctttatcttgtgcggtgacgcccatgcctaggtcttgacacttccctcc

SEQ ID NO: 221746 - DNA, 122 bp, Homo sapiens
aacggtcgcgcactgacttgttctcgtcaccctggctctccaggggcatgttgtagacctcggagtccagcagcatcgtgcaggtgctgaatggcactgcctggttggcgatggtcctggcc

SEQ ID NO: 221747 - DNA, 122 bp, Homo sapiens
ggggggcgggagcccccagggccagaacagccaccacacctgcgctggccagggcctgcacgtagcccgacaccgccgatgccagggcgcccgtggcctcatccgccacttccaggaaacct

SEQ ID NO: 221748 - DNA, 122 bp, Homo sapiens
caggcctagcggcacttcgcctccttcacacagacccccgccggacaccgcgccctgccgcgactcacttagcaagtctcgcggattaggtttgatcgcattcggccctttcccggatagct

SEQ ID NO: 221749 - DNA, 122 bp, Homo sapiens
gttatattccctggcagtgtcccaagaaaggagaagaaaaaccgggctccagtatccccacgcactctgtgttggctgggatggctgttccccgggttccccacacctcgtctagaggcaca

SEQ ID NO: 221750 - DNA, 122 bp, Homo sapiens
acctcgtgatctgcccacctcggcctcccaaagtgctgggattacaggcgtgagccaccacgcccggccagaatagctaaattttagtgactagaagtggaagaagaaaaacaggagggata

SEQ ID NO: 221751 - DNA, 122 bp, Homo sapiens
cctcagccaccagcgtggagacagagctgcagccaggcataaggatgatcttgatagggtcgttgtagagcagctcatataggtacttggtggcttggcctggatcacactgaaagacaaga

SEQ ID NO: 221752 - DNA, 122 bp, Homo sapiens
acttgtgttctgggcagttggagaggcagggaggttgaggaggtctgcagccactgcagacgacagggtgagttgcaggaaaagttttaaaggaccaccccacatcaatgtaggatccgagt

SEQ ID NO: 221753 - DNA, 122 bp, Homo sapiens
ttatacatagctggtctggtccgtcgcagaatgtgtggaagtactaagtgccatcaatgacgcccatcaagttactgtgtcatgacacgcacacacatttcatcaagtgacgcccttaagtt

SEQ ID NO: 221754 - DNA, 122 bp, Homo sapiens
agcaagaacaagttctgcaggtgaggatggggcctgctgcctggggcccacgagacaagccgggagcagaaagggtggggagccaggtgaagccaggttttcagagtcaggtcggaagggaa

SEQ ID NO: 221755 - DNA, 122 bp, Homo sapiens
tcctagcaggaaagacaggatcttgggatgtccagctccctgactgtgagaacctgggggcgaagcatcccagtacatgatatctcagtgctgggcccattcagagtgggggctgctccctc

SEQ ID NO: 221756 - DNA, 122 bp, Homo sapiens
ctcaaacaatcctcccgcctcagcctcccaaagtgctgggattacaagcatgagccaccacgcccagccccactcaaatctttaaagatacaactggccacatgttttggtcacaaaatagg

SEQ ID NO: 221757 - DNA, 122 bp, Homo sapiens
attcttcttgcagaaactggttttgttccatagagcccacaacccaacccaacacctcttcgccttcccccgcctccctcactcccagatcctttaccaccttctgccacctctatcattcc

SEQ ID NO: 221758 - DNA, 122 bp, Homo sapiens
ttctaggattcttgtgtttcacaatcatgtgattatttctgggctgccccggggcctccccgcctcctccccactcacaactggggacttattaggaaaacaggaacatgtggcgcagggct

SEQ ID NO: 221759 - DNA, 122 bp, Homo sapiens
gttggatggattacttgagccctggagttcgagaccagcctggccaacatggtgaaatcccgtctctatttaaaatacaaaaatttgctgggcattgtggcagacacctgtaatcccagcta

SEQ ID NO: 221760 - DNA, 122 bp, Homo sapiens
attaactcatgctcctagcttcgctaggaatgtgatagagaatttcccctgtaggttcttcgtatggtgcgctccgctggatcacgtgagccagttccaaaatggcggcaggggtggccggg

SEQ ID NO: 221761 - DNA, 122 bp, Homo sapiens
caagggattatttctgggctgtttattctgttggtctgtatgtctgatttgccaataccacgctatagctttgtagcaagttttcaaatcaggaaggtatgtgtcctccaactttgttcttt

SEQ ID NO: 221762 - DNA, 122 bp, Homo sapiens
caggccgtctgccgcactctgggggaggtcaccctggggctgctgacctgctctgtccctcgccccagcaccgtggcaatctaacaggaaggggcagggccagctccctctggaactcgggc

SEQ ID NO: 221763 - DNA, 122 bp, Homo sapiens
gtgcagcttttggacggcacaagtcctgccttgcgataaccaggttctgttactctctgccgaagagaggcccggtggcctcatggaaggggagacgcagtaatccttcagtaaattcatca

SEQ ID NO: 221764 - DNA, 122 bp, Homo sapiens
cactcatgaatgcaatggtttattaaagaatacatttccagaggaagtgatggtcagagacgcttgctaagcttctaacagaagcttgcagccctgaaggctgcctgcctcctcctggaggt

SEQ ID NO: 221765 - DNA, 122 bp, Homo sapiens
gggttctgtttttgtttagttgttttgcatcatggggtctctgttgcccaggctggagtgcggtggcgcttccaacctagatctcttgggctcaagtggtcccgtgcttgcttttttttttt

SEQ ID NO: 221766 - DNA, 122 bp, Homo sapiens
gcgccgatcggcggcggagcctctggcagagccccccgacccggcagcgcggaggggactcgcgtccgtccgcgtcgcgtcaccccaaaccctaagcagcgccgccccatcggcgcggagct

SEQ ID NO: 221767 - DNA, 122 bp, Homo sapiens
ccagggccgctactcttggcaaaggttgggtggggccagggaacgggcagggacacatgccgcggaccctcgcccatgccatgctcttgcccctcagcccatgtcacgggagtaccagaacg

SEQ ID NO: 221768 - DNA, 122 bp, Homo sapiens
gttcttcccttccctgatgatttacgtacttcagaccttggatcccaacagtgcccgagacgcgaagcaattcgaggttcaggttcgggaaggttgtgcttggaagctgcgtcgagggagag

SEQ ID NO: 221769 - DNA, 122 bp, Homo sapiens
actgacactgtgtgcgcatgagcagataggctggagtcttcagctcacaaacttcttccacgttcccgattacccacctcatccaaagtctcttgaggtgcttagagaaaggattgatacct

SEQ ID NO: 221770 - DNA, 122 bp, Homo sapiens
gagtttactgacctagtagtctccaagatcctgcacaatgctgaccttccaaagtaaaatcgtcttgcaaattatgaccagagagaatgactgcttcttctcctttaaaaataattttctct

SEQ ID NO: 221771 - DNA, 122 bp, Homo sapiens
gggaggactggttttagaggactcccgcttcccccagttgtatcagttcaggtgtaaacccgatatgcaataggatccggcgtggtgtccacactcattagacacatggcatcgtttccaaa

SEQ ID NO: 221772 - DNA, 122 bp, Homo sapiens
tcaacccttctaacttaaaatactgtgaaatagcaggaaatatgttcaatataattttaccgaatgctcagtatggagcgttccaggaatacagggatatttaggaaaattaaagaagcaga

SEQ ID NO: 221773 - DNA, 122 bp, Homo sapiens
ggtgcagggttttaaggagggcaaaggcccctctgtttgtttttccttgatgctgccccccgtgcgacctgggggcagttttcaaatgcttgacccaggtagtttagttctgtcaccccctc

SEQ ID NO: 221774 - DNA, 122 bp, Homo sapiens
agcggcgggggcagagagacgggtcggcgctggggacaaaatgcctcaacgcgtaacggacgccagccacccgacagggcggggccacggccggaagtggcggagagtgctaagaatcgcgc

SEQ ID NO: 221775 - DNA, 122 bp, Homo sapiens
caccacaaaacggactctctctgattccccagaagacaagcaagaaggcattcaccctgtcggcagatcgcctccagaaatggaaaccatcctccaaaaagagggttccttgggaattctat

SEQ ID NO: 221776 - DNA, 122 bp, Homo sapiens
taaaactccaaatgattctacacaaggttaccgcgaggtctcaaccatgtctgatatctacgtgggccccttggatggccaccacttttctctgcccaacctaccagctacaagagagcaaa

SEQ ID NO: 221777 - DNA, 122 bp, Homo sapiens
taacaggtgcgtgcccccctcctcccactaagggccaggcctgggcatcagagtgggccacgtgacccttaccctggcaggacagggcagggggttactgttggcccaagccaagggagttc

SEQ ID NO: 221778 - DNA, 122 bp, Homo sapiens
ttatttctccataggtcgagcgcttgctctgtgcagggtggggttctaacggcaaagcagcgagcagcttctcctggaacttacatcctacagtgtgtgcgtgggatacacaataagcatag

SEQ ID NO: 221779 - DNA, 122 bp, Homo sapiens
gagtgtcagcactcacttcctcttcaaggctgcgtactattccatcatgtggatggaccacgtttcacttgtccattcgcccatcagtggacactgggctgctttcgcctttggctgttgtg

SEQ ID NO: 221780 - DNA, 122 bp, Homo sapiens
aggaggctctcagcggagtcgctcttcacaggagtcttgaacgcggtgtggaatcggcagcgaggaatcctggagcacagagaagctcccagctttgaaggtcttgcggtggtgcgtggcgg

SEQ ID NO: 221781 - DNA, 122 bp, Homo sapiens
gcctcccgcccccattttgcttattgtctgacactgtctctaggaccctagacagagccccggattgctcttctccagtcctcccccgactcccatgctatctgagcccacccctttggggt

SEQ ID NO: 221782 - DNA, 122 bp, Homo sapiens
ttccaacagcacaaagtccttaccaatcttgtccatgactcctacctgactgcccaggaccgtgcctgtcatacgggaggcctcgtagaggagctggtgactgagggaatgaacggatcttt

SEQ ID NO: 221783 - DNA, 122 bp, Homo sapiens
actgtcgttgaagggctgaggcgccgccgggctgcggggtctccgtctccacgcctgaggcggcagttaaagctcatctgtaaacactggccgccgcccacccccctgccccctcggcctcc

SEQ ID NO: 221784 - DNA, 122 bp, Homo sapiens
cctcggaagactggctgagagggaggttgaggccgcccagtctggtcttcatacaggaagcggacaggtcggcccagctccaggcccagctgtcggacaccctgggcactgtagagagtcag

SEQ ID NO: 221785 - DNA, 122 bp, Homo sapiens
tagaggtggggctacgtgtttgccctgcataggtatgattcacttagtcatctgcatactcgaacacggatagtatgttctggacttggctttttctggaactctgtgaagcatagagaacg

SEQ ID NO: 221786 - DNA, 122 bp, Homo sapiens
tgagtcacagactataagtaatcagatgttcagaaacacttaaagaagctccagggataacgccagcttctactctggagtgggagttaatgcacttcccccgcagaatgagctgagcagtc

SEQ ID NO: 221787 - DNA, 122 bp, Homo sapiens
gtttttttcttacaagaaactgatgagatgagttgaaatatctgatgatgaaaatccagccgaggaacaattggagaaccatccggctagatttcccctactgagtatggactttgagcatg

SEQ ID NO: 221788 - DNA, 122 bp, Homo sapiens
gcccccgggcaccgttgcacgccccacctcctcccaggggcgttgcactccagcccctcccgcacatgcgcactgggccttccaccgccccccgcccccagcaaagccccccgctcggagca

SEQ ID NO: 221789 - DNA, 122 bp, Homo sapiens
cgcagccccgcaccttccccgggctgtggggtgaggagtagctcatctggaagacgcctgcgtcgcgtgcgcgatgccggagtgggagcagctgtggtccgggggggtcctatccctacttg

SEQ ID NO: 221790 - DNA, 122 bp, Homo sapiens
gaaaattaccgggcatggttcaataatttttttctgtctcattattggcagactctagagcgacagcggaaacgaggggtgagattaggagtacttgataagagtaaccgaaaacataaggt

SEQ ID NO: 221791 - DNA, 122 bp, Homo sapiens
tctcgccagggacaggtggggtcctgaggggccgtcgctcagctgcacccacagaggggtcggcggcgcggcaagttaggctgcggggcgccgggagaaggggctgcgggtgacgggtgcgc

SEQ ID NO: 221792 - DNA, 122 bp, Homo sapiens
gtcatcatagctactacaggtcactgtcaggttgtcattggagaggatgatgtccgagtgcgccgagccagggtcgaaagcaaaccaggccactgggaacaacagaagggaatcaggttatt

SEQ ID NO: 221793 - DNA, 122 bp, Homo sapiens
tgagtgcgtggtgctggtgaaaggtgagtacctgggacaggactctgatggtcagggccccgggctggcagccaaaggtgctgtggctgtggtcctcaggggcagggtctcacatgaggcta

SEQ ID NO: 221794 - DNA, 122 bp, Homo sapiens
ctagagcaaacgtcctgtgctttggagttagaaccagtcttttccctcctgggctgggcacggggtcagggcatcaggttgactaactcgggcatttttcccaattctttggatcgctcctg

SEQ ID NO: 221795 - DNA, 122 bp, Homo sapiens
tggggggctcgggggtcagactctccgcccccatttaacctttggagagcctctcctgcccgtccctaatatctcaggttcacttaacccccagaatgggtcctcacacgtgccctcttcgg

SEQ ID NO: 221796 - DNA, 122 bp, Homo sapiens
aatgtgtgctctcttctactatccactatcgcctccaccgccctcaatgagcagaagcaacgtgaccttagtttcaagggcaactacaaaagcaagttaaaaatgctcgggttggcataacc

SEQ ID NO: 221797 - DNA, 122 bp, Homo sapiens
catggatcccgtgtgccggatttgagacttgcaggcagtgtctttaggaaggaactttaccgggcctcactgccagagctgggctagaacagaggccagtggaaactattaggaagactcag

SEQ ID NO: 221798 - DNA, 122 bp, Homo sapiens
acacacactaacagtcgtcttcacaggcgaccgcgcaccacacacactaacggacgtgcccgacatcttcacaggcacagcatgagccctgatgtgcgctttctgctcctgctcctgctcct

SEQ ID NO: 221799 - DNA, 122 bp, Homo sapiens
aaactctgtcacccacccatcaactcccactaccaattccccctcaagatggggaagaaacggttgggcacaattaaacggtaacttcgcagaagtcaccaaagtaaccattccctctgagg

SEQ ID NO: 221800 - DNA, 122 bp, Homo sapiens
gggactataagggatgatgtgcgggttcaggaggtgcccaaactgaaggtttgtgcgctgcgcatgaccagccgggcccgccgcggccctagagtcccccaagggctgtggcaccgtcctgc

SEQ ID NO: 221801 - DNA, 122 bp, Homo sapiens
caccatctaacatactacttagcatcttattgtctatctgcccacacaatgtaagcttcacgtgggcgtggatctgtcttgttcagtggtgagtccccagtgacctggtacatggaggtact

SEQ ID NO: 221802 - DNA, 122 bp, Homo sapiens
ccaggtttgcagcccaggagcaatactccgccatgtagcctgggtgtgtagcaggctccccggtctaagtgtgtaaatacattctatgatgtcctcacagcgagaagatcgcctggtgactc

SEQ ID NO: 221803 - DNA, 122 bp, Homo sapiens
tgaaccagactgcctgtgtccatggagcttagaagaagtgggaagagcattatcaggctacgaagacaagagtggggtaaaacagcagagatcaatgagatcagagcacaccctcggaggaa

SEQ ID NO: 221804 - DNA, 122 bp, Homo sapiens
ctaaccagttgccacatgctggtggtggtggtggtccgtggaccccacactgagaaccaccggtctaggcaaagcctccactatgtaggtgggcaaacagacccagctggggaacttgccaa

SEQ ID NO: 221805 - DNA, 122 bp, Homo sapiens
ctggggctgagagtaaagtgcttgtcaggtaaagaccttggttgagatggagcagacagacgccagtgactcaggtgactcaggaagtctttgtggagagggttaaatttcaggcctttata

SEQ ID NO: 221806 - DNA, 122 bp, Homo sapiens
cattctcttctgttggcttgggttttaattccttggataagttatatctgcctcttaaagcgccattgagtaaaatttggtcatttctaagatttctgttctagaactgtttccgttaccat

SEQ ID NO: 221807 - DNA, 122 bp, Homo sapiens
tgatggggccgaaagcgctcggcggccggagagagcctctccacagtctgtgctctggcacgaggccctttgtgggattatctgcccccctgggaggcacggaatgctgggggcgaggggcc

SEQ ID NO: 221808 - DNA, 122 bp, Homo sapiens
gcccttgggaacgcccctttctggatgtggaccggcgaggcggtctctcctttctgccctcgcctggtgaaatgtgggcactgctgccaggagaaaaaaaactgaagctgtgaattcagttc

SEQ ID NO: 221809 - DNA, 122 bp, Homo sapiens
ctttggtggaaagtgcttgggcctagagcaccagtgggccagtcacgctgcctctttggtcggccacatctttattcgcgggaaacaactttcaacgcatggttcccctttccgagaagtaa

SEQ ID NO: 221810 - DNA, 122 bp, Homo sapiens
aaataccttttttaagcatgagtggaggttttgttctggttattttgactttcagccgctcgtgcttttcccggattgtgactcatgtttttggaaaggagtggactccgaccaatttctaa

SEQ ID NO: 221811 - DNA, 122 bp, Homo sapiens
agcttcatttctgaaaccagcgagacccccaacccaccaggaagaacaaacaactctagacgcggtgccttaaaagctctaacactcaccacgaaggtctgcagcttcagtcttgaaccacc

SEQ ID NO: 221812 - DNA, 122 bp, Homo sapiens
tttcattatacagttggaaacccggtgaaatcatgtatacgactggatcttttcgctcagcgagtgaggtctttttgttctttgtcttgcagtgtgtacagcaaatttctgttgtgcctggg

SEQ ID NO: 221813 - DNA, 122 bp, Homo sapiens
tgccatgttggcggaagcggacccccctgtgccgtggaaactggcggtggccgcggccgccgagtcggtctgcgcagcctcctgcgttttctcgcttggatcttggcactgagaggcggtgg

SEQ ID NO: 221814 - DNA, 122 bp, Homo sapiens
tacgcatttatggctatatagaaaaactatgccaatactaaccaaacagaactttgtaagcggtcatcccaaagctgtaatcccacactgggctgtgcacaaagccatgcattataccatat

SEQ ID NO: 221815 - DNA, 122 bp, Homo sapiens
ctgctgggcgccctccaggagagggggtgctgggccgagccgggctggcaggagtggtgtcggccttcgggaaatgctgggctgctaagggtttggtccacccatcccgggagtgcccggtc

SEQ ID NO: 221816 - DNA, 122 bp, Homo sapiens
cggggcattctggacctgctttgccttaggctgtgcctaattcgaaaccaaagcgcgggacggatgaaagtacgggtcgcgagaggttgttcgcgccttgagagttaagcgaagtgtggtgg

SEQ ID NO: 221817 - DNA, 122 bp, Homo sapiens
gaacaagactccgtctcaaaaaaaaaaaacaaccttctcttcccttgacattctaggcaccgcagaagctctccaggtccccagctgtctgactgcagacttctgctcctctgccttctccc

SEQ ID NO: 221818 - DNA, 122 bp, Homo sapiens
ttttttttttttttccgagacggagtctcgctttgtcgcccatgctggagtgcagtggcgcgatctcagctcactgccagctccacctcctgagttcacgccattgtcctgcctcagcctcc

SEQ ID NO: 221819 - DNA, 122 bp, Homo sapiens
taagattcaggggctgctatggatgcattacccaggagataagggcaacctcaggtgggccggggccctcacagcaaccttacgagaggggttgtatcatgcccatttgatggaagagaaaa

SEQ ID NO: 221820 - DNA, 122 bp, Homo sapiens
tgctaggtgcccgctactctgggaaaaggcaacaggggttcaacacatggtccctgctttcgagggaggcaacatccacagaaagcatagcctatgtgaaaaaatacaagactgtacacaac

SEQ ID NO: 221821 - DNA, 122 bp, Homo sapiens
ttccagcgccggttccggaactggtactggcactcctcaatggccagctgggcaccgcggcgcaccgagtccatgacttccaggttccgcttgcacatctgcacctgcctctggatcaggcc

SEQ ID NO: 221822 - DNA, 122 bp, Homo sapiens
gctgtatgctttatatttaatccttacagcaacccaatactgtagataaaatcattatcccgatttcacagatgaagacactgcccagagtgccataaagagattattgagcagggatttga

SEQ ID NO: 221823 - DNA, 122 bp, Homo sapiens
agcccggaggatgggctaggccaagctgacagttcaaatcccctggctgctcctccgtcccgcccgggagtctctagctttagttccgggtgtgggtgccctgatgtggagctggggtggaa

SEQ ID NO: 221824 - DNA, 122 bp, Homo sapiens
aggtctgccagggcctggggccagcacttggcacagctgctgtctgagagggcacatctccgacctctgggtgtcctcctacccttgcagtggttcagcccccgccaccctggtagctctct

SEQ ID NO: 221825 - DNA, 122 bp, Homo sapiens
tcggggagggtgcgggcgttgagaggctgcagcagagggcgctgggtcgccagcctgggccgcgtctcccattggtcggggctggggcgctgggctggagagttggtggaaagtgacaagtt

SEQ ID NO: 221826 - DNA, 122 bp, Homo sapiens
agaacaacccgcgaactcataaaggggagaacgcagcgtgaaagcacacagcggggagaacgcctggggaacgcaaagagtaaagagaatgccttgggaacgcacaggagagagaacgcaac

SEQ ID NO: 221827 - DNA, 122 bp, Homo sapiens
atccccagtttttgcaggctgacatccgcttgaattgcccatttttttctatctctgagtcgtgagtcgcgagttaggcctggaggtgccattaccccatcagtaggcgcctttccaccttc

SEQ ID NO: 221828 - DNA, 122 bp, Homo sapiens
tgaatatcagtttttatcctatagttcagaagaaaatgcttcaatatttgagccttctgtcggtagttcactgtgaaaaacaacaaccatagattctgtgttgagttcattgaccatatttg

SEQ ID NO: 221829 - DNA, 122 bp, Homo sapiens
cctggtggaggaggtgtcccgcggtgcccccggcggtgtcggtggtgcgtgttgccgtggcgcctgcctggtggaggaagtgtccctccgtttctggatttgccttaatagctcagagaagg

SEQ ID NO: 221830 - DNA, 122 bp, Homo sapiens
tctccactctccgctgccatctttacaaggtgtgctctctctgtgtcttcacatggtcatcgtcttgaaggacaccagccatgttggattaggggcccaccctactcctgtatgacctcatc

SEQ ID NO: 221831 - DNA, 122 bp, Homo sapiens
taatgcgcacaagaaaatcaagaggattggtcggctgcagagaggcggcccgtaacgcgacgcgaaagaagtggggcatagcggcccggggaattcttgctagcttccgattggacgaaagc

SEQ ID NO: 221832 - DNA, 122 bp, Homo sapiens
tgcttcagctggttatttcctcatcctctcactcctttcctgtggttgcttcacaggccacggcacatgttcctgtggtcgctgtgtttgtgagagaggatggtttggaaagctctgccaac

SEQ ID NO: 221833 - DNA, 122 bp, Homo sapiens
agggttatcctcctaggcaaagaggacttttgtgaaagatgggtgcactcgggggtgctccgtggagggtgggcctccaaggagcacgtgtcccgcccctttcagctccacttccttcggca

SEQ ID NO: 221834 - DNA, 122 bp, Homo sapiens
gaactgccaaatttcttcccaaagtagctgcactattttacatacttagtttttgtttttcgtttttttttaaataaagaacctttagggtttcctcagcgtcccagaggagggcctgcttc

SEQ ID NO: 221835 - DNA, 122 bp, Homo sapiens
ctgggagaggagagggtgagatgggaaaacacacagcgagttagtcccctcacaaggaaacgaacaaactccacgaaaacgtgactttgcaggacaagaggcaggaccccgcaaccttcagt

SEQ ID NO: 221836 - DNA, 122 bp, Homo sapiens
cgacctttggccgctggcattcctgcgcgggcgggagctgcgggcgctcgggggataaggcgaggacgcaccagcattaatggaataggagaactcccgaagcttttagggccctgggaaag

SEQ ID NO: 221837 - DNA, 122 bp, Homo sapiens
tggccataactcgccaaacccaaatttcatttcccagtgtgtcaggacgagactcctgggcgcgccactcctttctcctttcttgaggattctcccagcacttgtgtattcctcttttccat

SEQ ID NO: 221838 - DNA, 122 bp, Homo sapiens
cagcctttgggatttggggtgggggtccctgagtcaagagccaagcaccagtagcggtggcgctggccccgccgcggggaggcgcggggtgcgcggccggcggctcagctctcccgagccga

SEQ ID NO: 221839 - DNA, 122 bp, Homo sapiens
ccggccctgcgcaacacctccgctccgtcactgcctgaccctgcgctgggaactcattcccgggaccgccagggaatctgcccttcccaggagaactcctggctgcctccgcgtgctcctag

SEQ ID NO: 221840 - DNA, 122 bp, Homo sapiens
gacgtaagcggggtcggtgggaaagtagacggtggggcggcggcatcacacatacgcaagcgcagcctccgtttcctccggcgcgcctgcgctcgcgttcacgagtggttgaagcggaaatg

SEQ ID NO: 221841 - DNA, 122 bp, Homo sapiens
acctgggggagctggaagtgaatctcctcgtagctgagccttctgatgagactgcagccccggctgacacctggattgcagactcatgaaagaccctgagcagaggacccagtttggcagag

SEQ ID NO: 221842 - DNA, 122 bp, Homo sapiens
tccagggtccacagaggagttgtgaaggttcacacagggctggtgctcaccctctgccaccgacccgcacgcctcccacacaagctgccaggcccacggtgggggttgtgcctgcagaaggc

SEQ ID NO: 221843 - DNA, 122 bp, Homo sapiens
agagagaaccaggtgagtattgccaggtggtgttggaaagcaacagcagccatccccatacgcgggagagggtcccaaccacatgtggggagatgatttaaaggaaacaggaggatgtgcat

SEQ ID NO: 221844 - DNA, 122 bp, Homo sapiens
gccgcagccgccgccagtccgcgcggcctcgggtggccggagctcagcctgcgcgcgccgcgccctgtgtctccgggtggggcagaagactcgccccttgaacctcccgcggggactctccg

SEQ ID NO: 221845 - DNA, 122 bp, Homo sapiens
gtccctcctcctagatttattgcctttgcaaatcaatatgatgccataaaaacggggaaccggttctgggcagagaggtgctgtcgaaggatgattcaaagccttcccaaagcggagagtgg

SEQ ID NO: 221846 - DNA, 122 bp, Homo sapiens
tctgggtgctgggccgtgctgggccctcccccgtggaactgggatttatgaagccgtaaccggccagcgccgcggcaacctccgcttcatcctggagccaggccggcctcctgcgccgcgga

SEQ ID NO: 221847 - DNA, 122 bp, Homo sapiens
gtgcggaaatccatgacctggccatgacttctacaacccggaggacttgcctggcattaccgaaaagcacaggggaaagattctgtggcaggtgccgcatttcatccagctcactccgtgct

SEQ ID NO: 221848 - DNA, 122 bp, Homo sapiens
ttagtaaaaaaaaaaacaaagaaatccaacaagtgttctttcggggtttgtttcttcttgcgtgtagtacacattcatgaatgtccactaggcgcaagggaaattgtttagctgcacaatgt

SEQ ID NO: 221849 - DNA, 122 bp, Homo sapiens
ggtggcttcatgcctcacctcagagttagtgaagctcagtgcagaggaagtgcctgagcccgctgagtgcaagtcagagcaaagcccagaaagcagaacccaggaaccccaaggcacccaac

SEQ ID NO: 221850 - DNA, 122 bp, Homo sapiens
gcccaccctgccggaggctgctcctgattggcttcccggccgcggggctcaggttacattcgcgagcggagccgagcgcgggagaccggacccgagagcagagctgctgtttcggcgcgggt

SEQ ID NO: 221851 - DNA, 122 bp, Homo sapiens
agggaattaatgatgcaggcacacaccggaaaggtagggaccaggaatgaggcacagcagcgagttctgagatgtttagtctggtgtctggcttgttaactccactgtggtttctgagccag

SEQ ID NO: 221852 - DNA, 122 bp, Homo sapiens
tgatgctggccgccagcggcacggaggagaacgtggcccggatcaggagctcatccaggtcggccagtgccatcaggaggtgctcgcgtgtggccggctgcccatcgggccggcgccagaat

SEQ ID NO: 221853 - DNA, 122 bp, Homo sapiens
cagctgcgcacaacgcctgctcatcttccggcttcagcttcagcctggaggagtctgtttcgtttgcctgagaaagcatttgctcatagaagcctgcgtggatgcggcaggcagcaggctct

SEQ ID NO: 221854 - DNA, 122 bp, Homo sapiens
cgggagcgggaaacttccagcttcaaagctcggtgggctccggatcgtactatgcggagtcgctaagcagaggccagtggtctcaagggcctcagaggcaagttctgccagggagggtcctg

SEQ ID NO: 221855 - DNA, 122 bp, Homo sapiens
gaaacccagcatggatttcatcttggggacgttgtggctccagttttgagactcaagtaacgatggatggagaggagaacaaggaccacctgagctcgaccacaagagctcgaggagggaag

SEQ ID NO: 221856 - DNA, 122 bp, Homo sapiens
cgaccctccacacctcaccacgcccccatctccgtccgtgtacacacactcacacaaggacgccaaccccacctagatgcaaagcaggattcaaaagaacatctttgcgttttctaccggct

SEQ ID NO: 221857 - DNA, 122 bp, Homo sapiens
aaaaaaagtcagacccatcccccacccccaccaggaaaattcaagtccttcctcccaccgcggagcccaggaaattcagctctaggtcccaggcgagccccaccccaaaacctcaccccgca

SEQ ID NO: 221858 - DNA, 122 bp, Homo sapiens
ggaggctgacatgggagaatcacttgaaccagggaggcagggattgcagtgagccaagatcgcaccactgcactacagcctgggtgacaagaacgaacctccatctaagaaaaaaaaaaaaa

SEQ ID NO: 221859 - DNA, 122 bp, Homo sapiens
cacagcgcctgcgccagggactgggcgccgggtgcgagtggggcggggctcggagaggggcgaggcgcggggcgcggagaggggcggggccctgaccttgcgggccgacggctgcgcaggtg

SEQ ID NO: 221860 - DNA, 122 bp, Homo sapiens
ccaaaagactcttttctccatggtggggtgacaggtcctagaaggacaatgtgcatattacgacaaacacaaagaaactataccataacccaaggctgaaaataatgtagaaaactttattt

SEQ ID NO: 221861 - DNA, 122 bp, Homo sapiens
tgacagggcatatccagtgaaatgcagacataaatcatcttttaaacaagggtgggtttgcggtaggaaggcctgtgtgaggaaataggccctctctgggctccctccgtccttcacagagt

SEQ ID NO: 221862 - DNA, 122 bp, Homo sapiens
catcagcttccccagctcctaatcacattttaaaataaaattggagctttcaacacagcccgggagctgttccttatattcttcaaggacttagacatccaccctggagctactggaccttt

SEQ ID NO: 221863 - DNA, 122 bp, Homo sapiens
cctccagcattggaaccccaggaaggggcactaagtctcctggctcctgtctcagttgggcggctggtaaggagctcgtctcccctgatgcctgctgtgggcctcagttttccacctgttac

SEQ ID NO: 221864 - DNA, 122 bp, Homo sapiens
cgtaggtcaccatggcctgtaccaggcctccggcggagaagctgggcaccacgtacttcacgtcaaagtcgcgagaggccgcgtagggggtgcgcgggcactgccagtcctcgcccgccgcg

SEQ ID NO: 221865 - DNA, 122 bp, Homo sapiens
acacgcccgggccgcacagcctcctccacgccctggctcgatgggcaagcccattgcttccggtttcacagctgtgcagcccgtgactgtactgagtactgtaggccactgccacacaatgg

SEQ ID NO: 221866 - DNA, 122 bp, Homo sapiens
caccttccggactccacgaggtcctggagccaggcccattccttccgcagtagtgggctgcgtggtgtacgccggaggcgccagagctactggcgcacctcagagcagtgcgacaagacaaa

SEQ ID NO: 221867 - DNA, 122 bp, Homo sapiens
acatttatcaacaaaggttattcttgagaagtcagtatgagtttaaagcatcttcataaacgtatccagtgagccaagatgtagcttgacatgggtttaggcatatcactcccaatgatgga

SEQ ID NO: 221868 - DNA, 122 bp, Homo sapiens
cgaactgcctcaaccatccacctctgttcttaagcccatcagcacccaccacaaggcggacgctgacatccaagaggcagctcagtttaaattaagaagttgagttatcatctctaactaga

SEQ ID NO: 221869 - DNA, 122 bp, Homo sapiens
ggcccgtctgagcagaatcctgtttattttgaggcctgagttgccagggaaacagcaggtcgtggctcggagactctcctctggagtcagaaggctgctggatgaaagggaggccttttctg

SEQ ID NO: 221870 - DNA, 122 bp, Homo sapiens
aatatcgaatactgcaaggatatgtataaacacaattcttcctcctgaacttttaagcaacgaccaatagttacataaagttggcttcttggaatacaatttaagggtgacataggagtccc

SEQ ID NO: 221871 - DNA, 122 bp, Homo sapiens
ctgccaggcgtgtcagcacgtattcctcggggatgatgcccttgcgggacagcatggctccggtgacccccagggaggggcttcccccatcggaggcacccctcggacgtggcctagggcct

SEQ ID NO: 221872 - DNA, 122 bp, Homo sapiens
ctaaattggctggaggggcccgtcggcggcgaagttgctagctgggggcagagacggccacgcggttgcaggagtaagagatccctctgtggcgagtgcgtgagacgaggagtccggcgtcc

SEQ ID NO: 221873 - DNA, 122 bp, Homo sapiens
ttgtttcatatacagcatccccaggtggctccagacagaattcaagggcttttttctctacggcagtgcttaccacttaacacacagtaggtattaaataaatgcttgtgccagaaagagag

SEQ ID NO: 221874 - DNA, 122 bp, Homo sapiens
cggctcccggcagccctgtgaggtgtttatattaataaccttatggcttcctgctgaatacggaggaaactgaggcccagacaggaggcagcacaagcaaggttcctgcagaagcgagaggc

SEQ ID NO: 221875 - DNA, 122 bp, Homo sapiens
aatccagatcagatatgtgtgcaaacttctaagaagttagagcttcgttcagtgacactacggacacatataggattatttgagactaatctgagtttggttagagaagcaaagacaaacaa

SEQ ID NO: 221876 - DNA, 122 bp, Homo sapiens
cagagtataaattcctgggaaaaaatgccatacagctgaaaaattgtgtagttcttcaaacgatagtccatttcgggtctcctactttgagcatagtgttcttctgcctggaatgctctgtc

SEQ ID NO: 221877 - DNA, 122 bp, Homo sapiens
agggagagcgagaactgagacgcttgccccaagttgcctggagccaaaggcccccgagagcgtggccgtggggctgggtcgctggagtggccgcttcggcccagacactcgcacccccggcg

SEQ ID NO: 221878 - DNA, 122 bp, Homo sapiens
ggctgtccggaggggtcggctttcccaccgaggatttggcactctggtgagggaaaagggcgaaagagaaaagcgagcagccgtcctttcacagcctcagaaagtgctcgcttcccttcggg

SEQ ID NO: 221879 - DNA, 122 bp, Homo sapiens
ttccaccggcaacgacccgacgtgcagggactgtggcaggtttgtgacccctcccctccccgcagagcctggcacatcggcagccctcccgcgagtcagcctgggtgactgcgactgccctg

SEQ ID NO: 221880 - DNA, 122 bp, Homo sapiens
caatgagcctcagtacaggggcgtgtgggggctcctgagggggcagctccatctgcagctcgctttccaatagcgcgaggctgtgctttgctgtgacgtggtcgccgtgccatgctgagcac

SEQ ID NO: 221881 - DNA, 122 bp, Homo sapiens
cacccaccccaaggctggagccgctgcaccctgctgtccctctccaggccttggcaatgacgatcccccaaagagcccgtctgcaccccagacccagggcctcaggcctccagctcctggga

SEQ ID NO: 221882 - DNA, 122 bp, Homo sapiens
gcacagccctcagcgtgactggacggctccccccgtgctgagccatggccgtgtctcctgcgccactgatggttggtttacgttcactcttaggtaacctgggcaaagcacacagcaagtgc

SEQ ID NO: 221883 - DNA, 122 bp, Homo sapiens
taaattcattcagcgggtgagggaggagctgggattttaatgctggcagtatgacctccccgccactggcacaccgggtcttttgctgggacatcccctgtaaccggattgggggaatgcag

SEQ ID NO: 221884 - DNA, 122 bp, Homo sapiens
ccccgcagatcacgatcagaggtgacaggtgagagtttctctccggagcaggccactcaccgcatccgtgtaggtgtcctcggccggcttccagtcgcccccggggtagcggctctcgttct

SEQ ID NO: 221885 - DNA, 122 bp, Homo sapiens
gccgcaagctagttccagcccgcaggagacccagggctttgcagcccgggagactctgagcgctcacacgtacaaagcgtagccggaggaccctggatagacagtgctgcgaggcaggcagg

SEQ ID NO: 221886 - DNA, 122 bp, Homo sapiens
tctcctggagcccagcagggtggcaagggattgtgggaggcaactcattcctggaacaggcgtcttcggaccttgcacggagggcgctctgggagctccgggcgcgcgtggggacctggact

SEQ ID NO: 221887 - DNA, 122 bp, Homo sapiens
atgaaaaattcttccacagctagccactgtcaggaaaaaaatgatttggaaactgttgtacggtgcacatggacaatgcatacctgcagatattttcaaaggacacgtgctcttgtgataca

SEQ ID NO: 221888 - DNA, 122 bp, Homo sapiens
tttggcttttagggtccgggtttccaaggcccccgtggaagggacaaaccgattacttctcgactctccatctgactggtctggtagtgctctgtgcggagattttcatggtgtattttgga

SEQ ID NO: 221889 - DNA, 122 bp, Homo sapiens
agctgctccttatccctccccagaaatactctttaccggagtgccctctgcagggtaccacgctggctggaggcacacaccaggaactccccgaggccaggatcaccttctttatgcagttt

SEQ ID NO: 221890 - DNA, 122 bp, Homo sapiens
cttgcttgcccagacacttctgtcctgggtagtgtggaaaataaaacaccttttgtacttcggttgagggtaggtggattggagggagagtcctgtatagtgtcatgctgcctctgtaatag

SEQ ID NO: 221891 - DNA, 122 bp, Homo sapiens
atggtgcgggaagaaagtagtctttccttgaagcctggctgactccagccgggtcgtctccgaagtcgtgtggtctgacattaagccgcgtctagccttagtctctgatgcgcagttgcttc

SEQ ID NO: 221892 - DNA, 122 bp, Homo sapiens
gtggctgcaatattcatagttagccactagatgacagttaagagcaacagcttccagctgcgcagcccaaagggctcctgggaggccagtttcccggctgacccgtgagaagtcccaaatag

SEQ ID NO: 221893 - DNA, 122 bp, Homo sapiens
aaaaacagatacattttaaaaagtgttccaaaagaaaaatactgtacttgaaggtattctcgcagtgctgaaggctcacactagtgtatttccagaggtgacagttttaatagtcatattgg

SEQ ID NO: 221894 - DNA, 122 bp, Homo sapiens
cctgggctttccggagactctgcccaggtaaaaccctcccctgcccttgatcagaggctacgtggagcccagaatggagagggccgggagcagccctggacttcagggacgaagcctgattc

SEQ ID NO: 221895 - DNA, 122 bp, Homo sapiens
ctagttattaagctaaagaagagatactgccacttagcctttaggctcctccttcaaaatcgtaacagctgtttaaaataataatcataatcacgatgcagtaagttataaagcaaaagatg

SEQ ID NO: 221896 - DNA, 122 bp, Homo sapiens
aaacgttatgaaagccggcttcgaggcattcctctgaagggaagggactccccgacccagcgcctcccccgtcacgtgaccctgtgacccggagcagccatcttaggcatcgcctcatagag

SEQ ID NO: 221897 - DNA, 122 bp, Homo sapiens
tgatttctcattggcgcctcctacctcctcctcggattggctacctctaggtgaaatgagcggtggttgagccctacttccggtggtgctgtggtctgcccctggagaacccagaagaacac

SEQ ID NO: 221898 - DNA, 122 bp, Homo sapiens
ccccgcaagagaagccgagcaggaaagccagactctgactttgatctctgcaaagggacccgaagcgcgaggtctccttacctgctgggtgaaggcggcctgcggggacgacggggacttgc

SEQ ID NO: 221899 - DNA, 122 bp, Homo sapiens
tcagccactgccaaggtgcggacgcagcgggggcggcgccgtgcgggagggggcagccagcgcggccacttcaaagcgccgcgtgtagggcggcaggggaagggctggacttggaggcccac

SEQ ID NO: 221900 - DNA, 122 bp, Homo sapiens
aaaatgtcatagcaacacaatatataagattcctaattttcacacaaggaaactgaggtccgcaaaggttgaatgactcactcaaatttccatagtaaagtagaggatttgggtgccttgag

SEQ ID NO: 221901 - DNA, 122 bp, Homo sapiens
accagcccccactcgagaaccggggcctgcaaaagagcagcagcttctcccagggtgaggcggagccccggggccggcaccgccgagcgggggcgcccctcgagatccccgtggccaggctt

SEQ ID NO: 221902 - DNA, 122 bp, Homo sapiens
tggcctttgtgggacctgggggcaaagaagaagagctgtctctgggaccatgcctcctcccgtacacagcaagatgcgtccctaaactcccgggggaattagacttgtgggaatgttctggg

SEQ ID NO: 221903 - DNA, 122 bp, Homo sapiens
gctcctaactacctaagagcccaagtttacgcaaagacagacttggaagttagatgggaacgagcacacaggtggggaaagtggcagcaacagtgggctcaaggattccagcatcataaagg

SEQ ID NO: 221904 - DNA, 122 bp, Homo sapiens
cttaacttctggctttggaatgatttctaaaccacaatgatcttgtgatttcagagcagtcggggattctcccaaatgttttgcattacagtggaactgaagagtaacctgcagacagcttt

SEQ ID NO: 221905 - DNA, 122 bp, Homo sapiens
agttagatatccatttttgttcatcaaagtcgagtgactctcctgcagcagggttttctccggataggatatctggaccaagaaacactagacacagtagagggcggtcgaaatatgctgaa

SEQ ID NO: 221906 - DNA, 122 bp, Homo sapiens
gctcccctctggctggctcccggctttgggatcaggccacctcctccacgccacctcctccgccccacccaaggccacagacccggtctctgtgcccccagccagagacctctctaccacag

SEQ ID NO: 221907 - DNA, 122 bp, Homo sapiens
ggagaataggtagggtggtattagcaatgaaagcacagacctcggagccgggagagaccacggaaatccgtagcccgatcccgctcactttatagaagaggaaacgaggctcagggagatgt

SEQ ID NO: 221908 - DNA, 122 bp, Homo sapiens
agcttctgggagagggggatgattgttgggactttgcgaattacctaaacagcccagggccgaggcgccgccgctcgcgtcctggtcctcctgccgggtgtggggctcccctgcccgagatg

SEQ ID NO: 221909 - DNA, 122 bp, Homo sapiens
cccacagtggaatcctatctttgtccttttcctctagtgttacctttgtgcatcatttcccgtcccctacctgtgacactgctgtggaaggtgaagatgaggactgtctcaccactatagtt

SEQ ID NO: 221910 - DNA, 122 bp, Homo sapiens
tcccctcacgcctagtctgtaaagaactttgtttaacccggaggcggggccagccagctccgcccctccagctggacgcgggagcgaggttgaggttcatacccctgggttctctccaggcc

SEQ ID NO: 221911 - DNA, 122 bp, Homo sapiens
cacccattcgttttccagcagccgctgggttacttcccaccagctttgcaaagacgcctgcgatttcctttggtctacagttctgtcctagacttcgttcggctgatcgatgaaggagacaa

SEQ ID NO: 221912 - DNA, 122 bp, Homo sapiens
ctatctctatccaatgcttaactcaatcaaatataagtacataccctttttagcagctaccgttttacttggaactttatctgtctgtttcagaccaaatgatggtgaaaaaacagaagcag

SEQ ID NO: 221913 - DNA, 122 bp, Homo sapiens
aaaaggaccatgtaaacttgtatttggtttttggaggtaaacacataaaggaagagattccgatttgtggggaggatgctctgctgaagttggtgacttgccttgggcaccacaggcaccca

SEQ ID NO: 221914 - DNA, 122 bp, Homo sapiens
atcataaaacctatttgctttggggaaactgcaatgtaaggacaagcagaatcatagctccgtgaattccctctaatataggatattagggaattatccaggtagttttctatgaaattgtg

SEQ ID NO: 221915 - DNA, 122 bp, Homo sapiens
gggtccgcagtgattgggcgtaggagcggggccgccagccagagctgggctgcagggccgcgcaggtttcacttcgctccgcgcagccgcctggtctgcagtttgttggagctctgcgtcca

SEQ ID NO: 221916 - DNA, 122 bp, Homo sapiens
ccccaatctccttctgaagaccagtgaagactcgcctgtgtggcaaggctgcctctaacccgcacatctgcaccgacacggctgcacgaacagcaaaaccgcagcatcccccgtcccggcgg

SEQ ID NO: 221917 - DNA, 122 bp, Homo sapiens
tagtggatagacttgccaggccactgggaagatttgccaatttttgattcattcttctcacgcccataactggctcttactagctgttcggccctgaatatgaaatgcagttttgtgacctg

SEQ ID NO: 221918 - DNA, 122 bp, Homo sapiens
cgaactgctagataagtcagctcccaggctgccaggagcggtggcattcctcggctacaccggacagctgcgagtttcaagagaatgactaaaactttcaagtcacccagacctccacttcc

SEQ ID NO: 221919 - DNA, 122 bp, Homo sapiens
cttcacaattcccagtgtgatttaaacagaacccttatatgttcccctagccaggtgtaccgcacatttaaaactaactcatatacgtgcatgctgttatcttacctagtctttgttcttaa

SEQ ID NO: 221920 - DNA, 122 bp, Homo sapiens
gactgggccgccagcggaaccagcatctcttgcagcacactcaagacctgctgagagctgcggccggggcggcgggtgcggaggcccctcggggccgcgtgctcttcgaggagatcaaggtg

SEQ ID NO: 221921 - DNA, 122 bp, Homo sapiens
cagtctggtaacactggtgcattgtatgcggcagtaagaaatgacaactccaaatgaggccggcttctctcttaatgtgatcagcttgctatgccctcaacgattccatgagattttgcatt

SEQ ID NO: 221922 - DNA, 122 bp, Homo sapiens
tccccttcccgcacgccggggggcgcccggggcaccgaagtctacactgggtcgggagaccggtctaggagccagccggcagtgctcgggatctttgctgatgtccaagttcatctctcggg

SEQ ID NO: 221923 - DNA, 122 bp, Homo sapiens
cacagtctgggcctatgaaacctgacagggtcatggatcagctgtgggaggaggctccaacggagacatcctgccctgcccagagagaggggcggccggagagcccctgtgaggacacacct

SEQ ID NO: 221924 - DNA, 122 bp, Homo sapiens
cccactcgcgctggttaacaatgggcgtccccacagccgcaagaagtacttgctctgcgccgcacgggtcacgcctcccccagcggcctcagaacccccagcagccctcctcagacaactac

SEQ ID NO: 221925 - DNA, 122 bp, Homo sapiens
caaatgcgccctgtgcagcaagtccttcagccgccgtgcccacctcgccgagcatcagcgcgcccacacgggcaactacaagttccgctgtgctggctgcgccaagggcttttcccgccaca

SEQ ID NO: 221926 - DNA, 122 bp, Homo sapiens
atgggccggggcctggttcttggtgacggtctgggaccagacacaggagcagaaggcgtccgggtggttgcgccttggtggttcttacccgagagcctgtctgtgagcacagcctgctctaa

SEQ ID NO: 221927 - DNA, 122 bp, Homo sapiens
tttcaaacgactacctccttgtagtcagttgcatactggagtcttcagctcctctgcctccgttgttctcgtttctggagtagggatgaggcatttatttcttagtttccgagcgggaaaca

SEQ ID NO: 221928 - DNA, 122 bp, Homo sapiens
atgaaaggaaagcagccgttaacacaggaagagcgaaaaaaggacattttccctggcgatcgtggcctagaggacaccaggttaaacctatacagaggctgaggcctataaaactgcccccg

SEQ ID NO: 221929 - DNA, 122 bp, Homo sapiens
ccccggttcccgcccgcgcctctccctccacacctccctgcaagcagagggagccggctccgacctcggccagcccagagagggactcccatagccggctccgatctcgggcggcccagaga

SEQ ID NO: 221930 - DNA, 122 bp, Homo sapiens
gggagggccgcgagggacggggagggcggcggccccctgcccgcccggctctgacaggcccgggacggttcccaccccaaggccgcccagggacctcttcgttgcgaccctagccgcgggat

SEQ ID NO: 221931 - DNA, 122 bp, Homo sapiens
cacagaaaagcaaagtcaacatcatcctgttacgaccttactagcgacgacaagggccaccggcgaccgtgcagctgtgcccttaacgctgcgcagctgccgcgcgcctcggccgggtgttt

SEQ ID NO: 221932 - DNA, 122 bp, Homo sapiens
aggatccaggccgtcggggccgtccgaacgcggggatctctgagagctgagtgggggtgccgggttgccggcagccggggctgagggcgggtcctcagagccccccgaagtgggagggtcgg

SEQ ID NO: 221933 - DNA, 122 bp, Homo sapiens
tatgcaggcagtctctagaatctgggaacagtcctcaggtgactaccagcaaggaaatggcgacctcaatccttgtaacaggaagaaactaaattctgccaacaacagtgaaggagttaaaa

SEQ ID NO: 221934 - DNA, 122 bp, Homo sapiens
gtaaattctccctgcttaattgtgaccattagtgaaagtgggcaagaatcactgttggtacgagtgtgggaaattgccactctcatactttatcagggtgtaatttggctgttcctataaaa

SEQ ID NO: 221935 - DNA, 122 bp, Homo sapiens
actcaccgaaagagttagcggaggatgggggcggttggggtgggctcggtaggtcacgggcggtgaaaaccgtgggaacccagaaagacggccaaagcacgatgaggaccgctgccggcagc

SEQ ID NO: 221936 - DNA, 122 bp, Homo sapiens
tggcctagggccagggaagccgggtcgcaggctcctgctgggcccgcctacctggaaggccggctgcctgctgcctgagaacactgtggtcagccccttgctctgtggcgtcggcttcaggc

SEQ ID NO: 221937 - DNA, 122 bp, Homo sapiens
ggggacgcaggcgggtcgtagagagcgtgagtttccgcgtctgtttggtccggctgctgtcgttggttgtgagcggcatctctcgccgtttccccgggctgcgggagctggcggccgggctg

SEQ ID NO: 221938 - DNA, 122 bp, Homo sapiens
tagaagaatgggaggaatctaccctaactagaggatgcaagcccaatgaaccagcagaaccgtgtcacaaacagcaaggccaagagatgatttgtttggttttatttatgttgctttgagat

SEQ ID NO: 221939 - DNA, 122 bp, Homo sapiens
agcctggacatcgtttctgaggaatttaactccacctctcctgccagaatggaaaatcaacgccccccattcccgcccttcaccaacccctctccgcctgcccctttcccttgggtcctctc

SEQ ID NO: 221940 - DNA, 122 bp, Homo sapiens
gacggacagacaggcctttgcctatgatcaagcgactttctgtgcaaatcttatggaatgcggcattccagactttaaagggaaagggagatcaccatggcaacggcacatgggggctggag

SEQ ID NO: 221941 - DNA, 122 bp, Homo sapiens
attgtaattaaagtggcctagctaagtgcattacatcacttctttccttgacctgtagggcgtgagcaatagagaagttggaagcggcccaaaagcttagaccaactaattcacaccacagc

SEQ ID NO: 221942 - DNA, 122 bp, Homo sapiens
tagcaacgcagaaggcttcgactcccagggggccttgcggctactcagccaggaggggcgcgaagatctaacagaagcgggagagggacgcacgcctgcccgtcttccgcagacccacaccc

SEQ ID NO: 221943 - DNA, 122 bp, Homo sapiens
tctaccaacctttccagtattttctcccaccctaggcattagacagggccaaccaagacccgctctccaaacatgatcagagacatgctttgtacactggaaggtagaagaggggctggcac

SEQ ID NO: 221944 - DNA, 122 bp, Homo sapiens
tctcctaggaagggtgtgggagagctgttttccaagggagactctctggaggctgctttgcgcagcaagcagtttttacccagattatatacagtatttcagaccaatttcaaaacctctgc

SEQ ID NO: 221945 - DNA, 122 bp, Homo sapiens
tcgttccgcagcaaatcacacgtgagaccagggcacgccgggaaatgtagttctagttgccgctaatcacgtgtggcgtcgaagcatgccggaaactgtagtctctgggtttaaagccgctt

SEQ ID NO: 221946 - DNA, 122 bp, Homo sapiens
agagctgcagatcattgactctgaagatggaaggctccatgaggctgtgggaagggcccgcgcgtttctggggaagggaattgcagatggcaaggctggtgatgcttgtggggcgggccctg

SEQ ID NO: 221947 - DNA, 122 bp, Homo sapiens
ctgtgatcttggagggggacaagcggatgggcttgtcttcgggtgagagtgccaggcgctcgggcccatcagccgggagcggcacatcaggggccaagccgtccgcgtcggcggcggccgtg

SEQ ID NO: 221948 - DNA, 122 bp, Homo sapiens
atcagacacatctcatctctaaacctttccctgcagatcaccatctgagtcatgacttcccgtcgtttgtcttcagtgatctggttggtgcaaacgtatgaggtgactggaattccttagcc

SEQ ID NO: 221949 - DNA, 122 bp, Homo sapiens
cctcttcccgcgccccatttccagtcctcagaggaaaaccctccgacgagcagcgagctgcgggctgcgcgctacatccttcagtcctgggctggagatccgagagtgaaaaatgtaggagt

SEQ ID NO: 221950 - DNA, 122 bp, Homo sapiens
agcgctctttctgtgtggatggtctggccctgtgttgacaaacacctaaataatccagcacgattcccttctagatgtatctctctacggtgactgagtgtgctcaatgcttacaactaggc

SEQ ID NO: 221951 - DNA, 122 bp, Homo sapiens
gcgccacccagcggccgcgtcgggcgctgcacgctcgtgtccgggaaaatctgcagcagccgggcctgccaactgattcggaaattcccagaatttgaccatgggcttgcggcggggcggga

SEQ ID NO: 221952 - DNA, 122 bp, Homo sapiens
gcgcgcccgggtctggagctgcagcagctgcggcagcggcgggggtggtgcggcgcggggcggggcggggcggggcggggcggggcggggcggcacgggggcgggcccggggcgaggcagct

SEQ ID NO: 221953 - DNA, 122 bp, Homo sapiens
tgggtgctgctccacaggcggtggtcggaggccgttgcggaggtcgggcctgactgacagcgcaggtcctaaaactgaaggcaacttggttaagggaggctgaattcttggagctgaaggga

SEQ ID NO: 221954 - DNA, 122 bp, Homo sapiens
gaaaggagagacggacatcgggaggaagaacacacgggtacggctggtgttccgcgttcacgtcccgcaacccagcggccgcacgctgtccctgcaggtggcctccaaccccatcgaatgct

SEQ ID NO: 221955 - DNA, 122 bp, Homo sapiens
cacgatgcactctgggagtcgtagtaggggaagaacgtcctccgctcttttgcgcacggtcgctagaggttctgggaagtgtagttgcctgaagctcgtgttctttgtctttcgatgatgtg

SEQ ID NO: 221956 - DNA, 122 bp, Homo sapiens
ctccagtcaaaagtaattgctatcctattactgaatcataatgttggtatttttaaaggtcgctttcaaaggcaccaaatgataggctttaactttactaaaaccttggtctcaatatgaag

SEQ ID NO: 221957 - DNA, 122 bp, Homo sapiens
agttatgtttctcacttccaattaatatatctgctttaagcatcagttccttttgccagccggcttcttacatattcatgtgtttgtctcatcaatggagtggtggagtttctgcataggag

SEQ ID NO: 221958 - DNA, 122 bp, Homo sapiens
gagacgagctagtaatggagggtgggccgtggggtgaggaaggtgcccaaatttgccgagcggtaaccttaccaaggactgggaagcagggttttcacctactgacccccgtccctcctcgg

SEQ ID NO: 221959 - DNA, 122 bp, Homo sapiens
gcggagtatttttacagccagttaaacggcttttctcactgagtgtgtggaattgactttcggtaaggtagactgcgtgttaacagttaggcacgggtacagcaacggagaacagctctaat

SEQ ID NO: 221960 - DNA, 122 bp, Homo sapiens
cacacacgagcatggaaacgtacgctctagtacttcctgcggtttctgtcttctcatcaccggggtttggtgcccagcatttccgctccatcccgaccgatgtgcactcctgttttccgttt

SEQ ID NO: 221961 - DNA, 122 bp, Homo sapiens
gaattcacggaccaccctgtgcaactggcttcaaccctcaccagctgtgaggttgcatctcgaagtgtaggcagtcatctactttaaccgacagctccgcgatcccagtcagtgggaccaca

SEQ ID NO: 221962 - DNA, 122 bp, Homo sapiens
gcctcgttctagtatgtattgtttgacttgtctctttgaactgtttcttcttttgtaagacgtgaacagtagtatttcataggattgtgtgaagattacatgagttggttataggacgctgt

SEQ ID NO: 221963 - DNA, 122 bp, Homo sapiens
ggaagggtctacaggcagtgagtgaaggccaggagcagggcccaggccaggcacgaccaccgaggggatgaacttcacagtgggtttcaagccgctgctaggggatgcacacagcatggaca

SEQ ID NO: 221964 - DNA, 122 bp, Homo sapiens
acgtccaggaggtggggatggggacacggacaggacacccggagcacagcaccagggctgcggcctggccactcacttatcctgggagaacactgcccccgtgaggccatagctggtggtgc

SEQ ID NO: 221965 - DNA, 122 bp, Homo sapiens
gtcctggcgctgtagtgagaactgccgctgctcgagaaacaactctgcgaggagcacctccgcacgggacccggcgctgctgctactgccgctagagccgctgccgccgcttttctagaacc

SEQ ID NO: 221966 - DNA, 122 bp, Homo sapiens
aactattacccagagtaatggtaacgtagaacttggactggcccttattcccactggtgtcgtgtgtacagtgagcagaaacccaccctctccctctctcccccttgccccgaaacttgcta

SEQ ID NO: 221967 - DNA, 122 bp, Homo sapiens
taggataacttcaggttcagctgaggcctctgaactgtgactccgccccgtggccgcatgcgtcggaactcctacctgccctttgcccttctcgaggccggtgcttgactggaggagggctg

SEQ ID NO: 221968 - DNA, 122 bp, Homo sapiens
tcccgtgagctgtaggatgtttagcgacatccctggcctctacttattggatggcagtagcgccaccctccctcgtgacaaaaatatctccagatattgctaagtgtcctttggggttgggg

SEQ ID NO: 221969 - DNA, 122 bp, Homo sapiens
acgaacacgctgggctgcttcgactgcatgtagttccacatgcgctggtacgtttggtaccgtgaattctgggcaggaggatcacaaggggaagatgggagggtctttccagccgcttcctt

SEQ ID NO: 221970 - DNA, 122 bp, Homo sapiens
tctctgctccgcaggggtccactgccctcacctcttcccggaactgggccgggcccagctcgtgcagtgagggcaccagaagcctcagtccacgaacaggccacccgacagggcgcggcctc

SEQ ID NO: 221971 - DNA, 122 bp, Homo sapiens
ccaggcctctctaacgtccgggccaaacccgtccttcaccccaaaaccagttcatctcctcggaactcacccaggccagtgaggccttaactctgaaaggcaaaaagactctcaggcgctca

SEQ ID NO: 221972 - DNA, 122 bp, Homo sapiens
atagagaaaaaacaaaaaagcacagtccattttgaagacattatttggtgtctgacaatgcgtatcttgacattcagtttcagtaagctattccttcacccttcaatttatagacacacaga

SEQ ID NO: 221973 - DNA, 122 bp, Homo sapiens
gcggggcggggacagggggcagcagctgggggcgtggcctgtgaacaggggcggggcctgcgggggcggggccgggccggacagcggtcccagcactaggcggggcgggctgccggggtccg

SEQ ID NO: 221974 - DNA, 122 bp, Homo sapiens
gggaggctgcgcgccgagcgcaagccgcgagcacaaacagggcgaggaggctggtgtgagcgcctgggcccgctgccagcgcgccggggctggaacacaatgtcccgagcgggcgggcgggc

SEQ ID NO: 221975 - DNA, 122 bp, Homo sapiens
tgtgcacacgaacaccacaagaaccttgtgaggcctcattacctgccgctcacgtgggaccgttatgtttactcgctcaaggtcacaacagtcaggggcagaagaattttcgctccgattct

SEQ ID NO: 221976 - DNA, 122 bp, Homo sapiens
gccgagcttccacccccaccttttacagcagggccttcggcgggcgcctcggccgccgggcggccccgaaatccatcgctctgaggggttatttttatttcccggctctcgggctgttactg

SEQ ID NO: 221977 - DNA, 122 bp, Homo sapiens
ggaggggaagaaggcaggggagggcgggaggccattcgcaggtcactcgggttagatccgcgcgaggcactaggcgaccagccacccagccccgcgaccaactagcgccgcctctcgccgcc

SEQ ID NO: 221978 - DNA, 122 bp, Homo sapiens
aaaaggcagggagtgtaagagaataaagggaccatccattctctgctgtactcagagccccgagaggctgacctctagacaccacatgactcaggcttcctcactctgtcccagtgcttcct

SEQ ID NO: 221979 - DNA, 122 bp, Homo sapiens
ttgtcaatgaaggaagcaaactggttgttgagggttctgatctcctgggtctcctgcgtccgcaccacctggaactggggatcgatctcaatcttcagtggggtcagcagattctggttgat

SEQ ID NO: 221980 - DNA, 122 bp, Homo sapiens
tttctactgctgatttcattttctactgttagactgaccaccttgtgtctcctgaaatgccgtcttgcttgaaaagtccttcttaactctcccacaagtcactctcttctctatgaacccca

SEQ ID NO: 221981 - DNA, 122 bp, Homo sapiens
tgaaaaccaagcactactgagttactgtcattgcttgcagtaggtaggtttaatttgtatcgcttttattcaactaaggcaaactgcctatattagagtggtttcattttctaaatctattt

SEQ ID NO: 221982 - DNA, 122 bp, Homo sapiens
aatgctaccctctcctcccaaggaccctgtcccctccactaacagtgtcatgctgaccctcggactgcaagggggagtctgaatgcagtgaaactcaagatctccagggctacttggtcagt

SEQ ID NO: 221983 - DNA, 122 bp, Homo sapiens
ccagcctgcacatgggtagaagaggccaaattgaggcacccaagtgatccactggccccacgtcacacagttacagtgaagcccaagccaggcctggttgagggtgataaacgccactgtct

SEQ ID NO: 221984 - DNA, 122 bp, Homo sapiens
gtgaaacaagggttagtgtttaaccactggatctgggtagggcaggtgtggagagaggcccgatttacagcatttgccatttctcatggtgtaagtattcctattatagccgatatatcagc

SEQ ID NO: 221985 - DNA, 122 bp, Homo sapiens
gcttcaaaagtccaacctgctaggttgaaatctgacactgacacagactccgggagctgccgcggaaagctcaaccaggaacccggaaatgcacaagcctcttgatgcataaaaacagctgg

SEQ ID NO: 221986 - DNA, 122 bp, Homo sapiens
gaagcacgggaggagggagggcggccatgtacaacccctggcaggtgggagcctccctggcgccagctcgggcagggccacgccccttcccaactccccgcgctcggcctccggactgctca

SEQ ID NO: 221987 - DNA, 122 bp, Homo sapiens
tcgagaccaacctggccaacatggtgaaaccccaactctactaaaaatataaaaaatagacgggcgtggtggcacacacctataatcccggctactcaggaggcggaagcaagagaatcact

SEQ ID NO: 221988 - DNA, 122 bp, Homo sapiens
acaggaggcaccaagtgaacacagcatcacttccatgatattcctacagaatgcaacctacgctaataatggaaaagaaaatgagacagacccaaagtgagtgataattcacaaaataactg

SEQ ID NO: 221989 - DNA, 122 bp, Homo sapiens
gcagaaaggagctcatgaaacctctgagatcacctaccctttgtgagaaaatcactgggccgggggtggggtgggggtggggtgggggaatggctttacagaactgactttacccgatggga

SEQ ID NO: 221990 - DNA, 122 bp, Homo sapiens
agtaggaaattggagccagatcttctagggctttgaatgtcaagctaaggggccatcatacggaccagtgttatcacagcagtgctgtgagatagagctgcatcacaatcactgggaggtcg

SEQ ID NO: 221991 - DNA, 122 bp, Homo sapiens
gtggcagagaaggagcaggcctcggtcaccgggcagctcactgcgcttccaggcatctggcgccacggaagtgcactgctctaaaggttgtcagatctgggtgaaatcccgatcctgcatct

SEQ ID NO: 221992 - DNA, 122 bp, Homo sapiens
attcggcccaaagtcctaggagttaattccctgtactgcatgaggtgtcagggtaattaccgctgatcagccctatttctccgcgcgctgcccgctcctcgggccccctgtttactgatgca

SEQ ID NO: 221993 - DNA, 122 bp, Homo sapiens
gtgggagctctctagtcttgaggctcctacctttagagaatacacacagggccggccgggcgcggtggctcacgcctataatctcagtactttgggaggctgaggtggacggatcacgaggt

SEQ ID NO: 221994 - DNA, 122 bp, Homo sapiens
tcaccatggagctggggacaagcggacagaggctggggaccctcaggggagcatggaacccgggccccaggccagacttcatggcagcaacacaccccctgctctacgttccctggggaacc

SEQ ID NO: 221995 - DNA, 122 bp, Homo sapiens
gtcggttgcagcctgcgcaggaaggatgacgctcccgtcaggctgtgcggcgcagacggtcgcccaatggagttgtctttcaggaggttttaacttggtaatgcctgccctcctcaaatgtc

SEQ ID NO: 221996 - DNA, 122 bp, Homo sapiens
agagaagggtccggggcacccagtgggctcggatctcgagcggtccccgtgacggccccgcgactgcgcgacttcccgctctagagagtttatggaccctgtcccaggagggctccgcagcc

SEQ ID NO: 221997 - DNA, 122 bp, Homo sapiens
cctgtccttcctcagcactgtgggagggaggcaaggcctgcggttgaagcgtccccaacacggggctccaggagagaaagcaccacatctcagggaatgaaaacagagacggggccgcccag

SEQ ID NO: 221998 - DNA, 122 bp, Homo sapiens
tgccacaggacgtgctgcacagcgcccacgatgaccacggggtccacgccccattcctggcggggtgggaggggacagagacagatgcccctctgagccctagcttcttagatctagtctgt

SEQ ID NO: 221999 - DNA, 122 bp, Homo sapiens
gcgtaggaccctctgagtcaggtgcgggttataatctcttggtgcaccgttttttaggcccgtcggaaaagcgcagtattagcgtgggagtgacccgattttccaggtgccgtctgtcaccc

SEQ ID NO: 222000 - DNA, 122 bp, Homo sapiens
ctctctccctgtgctgggctcgcactcggggcgcctctgccaggatcccggcgcagagcgcggccaccagaagccgcagcgtcatcctaggcagtaaaagccgtcagctaggacccccgcct

SEQ ID NO: 222001 - DNA, 122 bp, Homo sapiens
gaggagatctgcgggctgggttgggggcgtttgaccccttggcttgtcccagtgggtaggcgggactccaacccccgcctcctccagggtaaagctctcacgtccacctggcgcgacgctga

SEQ ID NO: 222002 - DNA, 122 bp, Homo sapiens
gtcttttctttcccctccccctacaggtcaaagcctttaacgtcgtggctaaatcagaaccgtattttctcggcgcagccccgcaggaaggaggggagcgcgttcattcattcttccatcaa

SEQ ID NO: 222003 - DNA, 122 bp, Homo sapiens
acctggccaagcccccaggacccaggaaaggccccctgactcctgccaggctccagagggcgacatcccctgcaggcccccatgctgacaggcctggcccagcctagggaaaagcccaggcc

SEQ ID NO: 222004 - DNA, 122 bp, Homo sapiens
gagtcaggagaaaaggcaaagaacacaagaccccaggataaaataggcccacctctcggccgggcgcagtggctcacgcctgtaatctcagcactttgggaggccgaggccagcagatcaca

SEQ ID NO: 222005 - DNA, 122 bp, Homo sapiens
aacttctgcctcaactccgccccttacttccgcttgttttctcagaaacccgtcacaacgcgtttccatggcaacctaccgcttgctcttcggaaaaggttaacactccctgacttctagta

SEQ ID NO: 222006 - DNA, 122 bp, Homo sapiens
gagcaaagtcgttaaaagccatcctgcggattggagcaggagttctctgcccggataagacggggagacactggggaaaggtaagctagagggtggcggctgcactgcaggtcttctcgggg

SEQ ID NO: 222007 - DNA, 122 bp, Homo sapiens
tccactcgggaccgccacagaaaaatcgggggtgcgtgcagcgtcagcacagttgcggcgcgtgtttttatcatgctgggaacacgctgctcctgggagtgataagcattaaaccggccggc

SEQ ID NO: 222008 - DNA, 122 bp, Homo sapiens
ctttccggaaggcccctggcgctaccgttccgctccacggcaggaaaccaaaggttccggcgtccagagggcgcctcccagtcccgggcagcttttcttggaacaccggcggctctcggaag

SEQ ID NO: 222009 - DNA, 122 bp, Homo sapiens
gaccacccccttccccagggctgagccagactccaggcagcctccagccacccgtgcctccggttcacccctgcctgcctgcccgcctgctgctgtcctcagccaagcccttctgcattccc

SEQ ID NO: 222010 - DNA, 122 bp, Homo sapiens
ctgactatactcctctactagtaagtccacagcaggacaaggaaaaaagcacaagggaagcgtaaggatccatccactctgctgtgagggatcatcgcaagcccaactacccctgccagcct

SEQ ID NO: 222011 - DNA, 122 bp, Homo sapiens
aagacccctttacccgcacccccaaggccccgcgctgctgcctaagttagtgacaatggccgtagggcaaaccttcgggattacttgcgtgccgggccccggaccaaactggtcaagagcac

SEQ ID NO: 222012 - DNA, 122 bp, Homo sapiens
aacccactgcatgtgtaggattgaccaggttgctccatgtattcttcatgagacttggagcggagggagagcaagggcaagggcaaccattaaaatgaaacaaatactgtttgttgttctgg

SEQ ID NO: 222013 - DNA, 122 bp, Homo sapiens
gctgccacaggaaaaggaagtgcttaccactcccgctgtatatgtcaccttccccttgaccgccccaccttgccccgcctaagaaccaacacggatacaaaaaatatctctctaccacacta

SEQ ID NO: 222014 - DNA, 122 bp, Homo sapiens
tccacagccccccgtggcgtcctcggggatggatctcctcctacttgtttccgcagtgcgcggccgtcagcacccaactctggtccaccaggacacccgcgcagtggaacgagaggccgttg

SEQ ID NO: 222015 - DNA, 122 bp, Homo sapiens
gaggtcccttcctgggctctgtctggctgctcctttcaatgctccaagctaccttgggagcgtgggtccccaaccttggctccgctcaggaaaccataaagtcttgagtaacatcccatctc

SEQ ID NO: 222016 - DNA, 122 bp, Homo sapiens
cctgctcgatcttctgcttcaggaactccatcttcttggcctcgccatgcaccagcagcacgctctccggctctgcctggcccaccagctgcatgatgcccttggcgtccgcgtgtgcgctg

SEQ ID NO: 222017 - DNA, 122 bp, Homo sapiens
gctggggatccggcacctgggcagggtgagcttggccggacatcctcctccaggactacccgcaccccacagtcgcgtcaaaagcgccccatccccctgtctctcgccgcgcaggtttccca

SEQ ID NO: 222018 - DNA, 122 bp, Homo sapiens
cctgcagcagatggtcagagcctgttgccattaaacatttgagtggttccaccagcatcccgatgagtctgggttcaccaagaaacattattgtaatgtgctccccaggcagctctgcctca

SEQ ID NO: 222019 - DNA, 122 bp, Homo sapiens
ggcctgagagcaccagatgcccacatgaccccaagcccttaggaaaggttaaggtatgttcggtatgttctgtttagccatgcagtgacacagtatccttaaaagagagttctaaccaagcc

SEQ ID NO: 222020 - DNA, 122 bp, Homo sapiens
gccaacctcacccactcttggggaggacagctgcaaggtaaacgactctgcaaccggtaccgccgtcctcctcactccgaccgaggaggctgggcccgggctccttccacacctcggcttcg

SEQ ID NO: 222021 - DNA, 122 bp, Homo sapiens
gtattcaggggcatcgaatggagctgcagaaaaaccacccatttcctgtgtagcccagaccgcctatgttttcacagaatgccgttcccaagtgcaggcccttgcatgacacagaactttaa

SEQ ID NO: 222022 - DNA, 122 bp, Homo sapiens
taattgctcatctaaaacaaatttccttcagaattgcacttctgtctgcatccttctctccgccgagccgcaaggagcccaggaggcaatgcgaagcaattattccctgtgtatatacagac

SEQ ID NO: 222023 - DNA, 122 bp, Homo sapiens
tcagtacggagatgctgccttgagacagctgaggtcaccgcggcgcgcacaggccccgaacgctcaggagtgtggttgttaggagagcacacaggtgggtttggacacctccctgccctgag

SEQ ID NO: 222024 - DNA, 122 bp, Homo sapiens
caagtggatatcgctgccgcttcctgctgaacactcacgagggaagcagtgcaaatgtgacggaaacccgcgcctcctccggcctgagcgggaaggccgagggccgcacccgggcaggtggc

SEQ ID NO: 222025 - DNA, 122 bp, Homo sapiens
acctcgtgatccgcccgccttggcctcccaaagtgctgggattacaggcgtgagtcactgcgcccggcccgcagaaggatattaaagagcacctgcaggaattttttaaggggatgccgggg

SEQ ID NO: 222026 - DNA, 122 bp, Homo sapiens
aaactgggaaagtcctgggcgagccgggacaagtcgctcaccctactagagacagttgggcgaaggagacacattgggatcagtctcccatggccttcaagtgtcagggcaggggctgggga

SEQ ID NO: 222027 - DNA, 122 bp, Homo sapiens
ccataattttttcaaatgatcctgaaggcgatttcatattcccctgatgttctcaagtcccgatgcgtgtgagtgacagtcgatcggaatgatgaactgacactcggagctgcgtaattttc

SEQ ID NO: 222028 - DNA, 122 bp, Homo sapiens
aaacacatctgtatgtgaatgcacatctgagtaccattcagcaagaagttttgaagagaacgtcagtttaataaagctaaatggggagaattgaagtttgcatttgacatggtattaaacaa

SEQ ID NO: 222029 - DNA, 122 bp, Homo sapiens
tgagcccatctctgagcctctgcccatgaactagtgtgtatccatcggagtgtgtcaccacgcgaagcactcggtgttggggtcatgcgggcaggagcgagcatgcggtggatgtgcggccc

SEQ ID NO: 222030 - DNA, 122 bp, Homo sapiens
ggcaagtattgctgtgggtgctgggacttcccgtccgcggcgtggagggtgagtgtgggccgggggcggtgcatgagatgatggggcgagctgaggtccacccgggcgacgctctggacctg

SEQ ID NO: 222031 - DNA, 122 bp, Homo sapiens
tgtgggaggggctgggcctgcatcttcagggagtgagtggctgggtgcatttcaaacatacgtatgtgtatttttacacagcagcgtggacatgggtatgatttgtggagttcttttgtagt

SEQ ID NO: 222032 - DNA, 122 bp, Homo sapiens
ttctataatgagagaaaaccaatttaaatgcaaatagcctacggtgtcgttggggaaaggcgccttgctacagaggaaggctggaaaaacaaacacagccctcatcacgaggctggttcacc

SEQ ID NO: 222033 - DNA, 122 bp, Homo sapiens
gcacaaatgtctgaatcccaggctggttccaaagagtagtacttcaaagaactctgcacacggcaattccatagtgtacttttactacttattgactttagtttctttgccatggtagagat

SEQ ID NO: 222034 - DNA, 122 bp, Homo sapiens
agtaaatagcaggcatgtttcaggagaaactccagccagggctgttgggttgaactttatcgatgctgcttcatgatatgtgtcaaaataaatgcaggaaacagcttttgcctcaaagcttg

SEQ ID NO: 222035 - DNA, 122 bp, Homo sapiens
cctggttttttcctttctttttctgtgtgcgtgcgaatggtgcggcccctcccctctcaccgtggttaacgtgacgaaggcacgattcctgtaaatgtgtaaactaaggggatggttggatt

SEQ ID NO: 222036 - DNA, 122 bp, Homo sapiens
atcttcgagacacccgcgccaagtctggtcccgggggtggctgccgtcgggccccgcctgcgctcctggctcctgtccttgccccgacgcctctgccaaccagcacctcccttttcaactcc

SEQ ID NO: 222037 - DNA, 122 bp, Homo sapiens
caggcttcactgtgaaagtgcagaggacggtgcggtccctaggcgggctgcttctcccaacgatcggggaagaaatgagatctgtttccctgtaggaaaatcatttgtaccgtgattagaca

SEQ ID NO: 222038 - DNA, 122 bp, Homo sapiens
tccggatgttccaaacctccagcgtgaggtgggcactcaggtgcgaaggaaccatggtggcgaggcccacaggtggcgtcccatcccagagccattttgccggggcctggctctgcagtagt

SEQ ID NO: 222039 - DNA, 122 bp, Homo sapiens
tctccttgcaggccccgcagcagcccacaaaagccaccaggaagaggaagacacccactgcgatgatgaccactggcaacagagagccaggggtagccccctggattatggtctgactcagg

SEQ ID NO: 222040 - DNA, 122 bp, Homo sapiens
agctccgaggaattccgctgccactgtgagagaggcacccaaaatgacgagtgaggtctacggagctgggagggtgtccagtgagtttgacaacacagtgaccttgggcagacggttaatgt

SEQ ID NO: 222041 - DNA, 122 bp, Homo sapiens
aggcaggaggaaaagagcctgcacaacaggcctcctttctgcaccagggcttgagttccacgttagacccactgagcagtggcaactcagtgaactgaactcaagatgtgcggcgtgctcca

SEQ ID NO: 222042 - DNA, 122 bp, Homo sapiens
ttttctgatttcttttttttaggtaactgaatattggatacatggctcacacaaatgaatcgatggtgtctgagtttgtacttttgggactctctaattcctggggacttcaacttttcttt

SEQ ID NO: 222043 - DNA, 122 bp, Homo sapiens
ctctgcgcatccaggccatcagggaaatgcaaaccaaaaccccagggatacggcacgccacgcccaccagaacgggtgtgccagaaaggcagatacccagagctagcgaggaagtaagcaag

SEQ ID NO: 222044 - DNA, 122 bp, Homo sapiens
cacagatgggaaaaagtataattatagcccttgtggttcaccttcatttccagcacggctcggtgggtctgcaggatcccctcagcctggagcaaaatattgtccccggttggggagaggag

SEQ ID NO: 222045 - DNA, 122 bp, Homo sapiens
aagggaaggctgactgctgggaagagtacagactctccctacctgattcccagtctggcccgtggaaaatgtaaccgcgagcctgcgggccgggcgccctgccaggccgggctttccagagc

SEQ ID NO: 222046 - DNA, 122 bp, Homo sapiens
gttccaggtagagcggggagggagagggtgccccttggcgttcgctgaggaaattgcacgcgcctgttgacccagggaaagcgctgagaaagcatctcactcctgatctaactttacttatt

SEQ ID NO: 222047 - DNA, 122 bp, Homo sapiens
tcgcggagcgcggccgctgggggcggacggcagagcccgcgccacgcgatgcggggccgccgagtgtgagctgagcccagcgggccccaagccacctgcggccccctcccctctccctgccc

SEQ ID NO: 222048 - DNA, 122 bp, Homo sapiens
atgagaatttggccttcagttgattttctagctctgatcgcctggtgacctgataaatatcgaaagcctgttatgttttttttgttgttgttttttttttagacagagtcttactctgtcgc

SEQ ID NO: 222049 - DNA, 122 bp, Homo sapiens
ttctaaaatgcaaaataatagtaactttccctagcactgtgttacatacccttttctacccgtgaggaggcatgttgcatatctcacaaggtcagactttctcaacttaggctctgtgagaa

SEQ ID NO: 222050 - DNA, 122 bp, Homo sapiens
cctcagcgtgtcttttcagcaggagcagaaccgatgagagccgcccttaccgttggtctccggatcccccagtcccatcccgccgttttcggctgtcttcctaaccgtcctgtcttctcttg

SEQ ID NO: 222051 - DNA, 122 bp, Homo sapiens
aaaagcaatttaaaaataaataagtaaatgtttaatgaatgaaagtgccaggctctaacacgttatgggagactctaatttggagctggatcttggaacagaagtcatcctctgccaggaag

SEQ ID NO: 222052 - DNA, 122 bp, Homo sapiens
ggcgccgcatgcatagtgtttacaaaaattgtgcacatgctcacatgttcccttacctgtcgagcgtacctagagtaaggtcatataccagttaaattccgccattttgcctcttagtgcac

SEQ ID NO: 222053 - DNA, 122 bp, Homo sapiens
gcagcggccaacccagcctcttcaccaggtatgggcaccggctgctccttgctgcaggaccgctggctggggtggccggggcacgcagcaggcacatcccgacctgcgggccagcacctgcg

SEQ ID NO: 222054 - DNA, 122 bp, Homo sapiens
acaaaaaaacaaaaaacaaaggtgtcattatcacttcctgagtgatcagggctcagatatcgctggagtaaggggtatgtttaaaaatcatttttgtcctaagaaattatcttaatatgaag

SEQ ID NO: 222055 - DNA, 122 bp, Homo sapiens
gcgggcctcagggagcccaagggccgggtgggcggggccggcaggttaggcccggaccatcgccctgggcggggcttccgaggtggtgccggagaggtttcgcggaatcggagctggcaacg

SEQ ID NO: 222056 - DNA, 122 bp, Homo sapiens
cagatctgtttcaccttcgtaattttctcactgttaaaatttttgcaaaggcgattgcagcgccccttgtccacacctgcgcgctccccaaggggtccctacccaccccgcccctggctggg

SEQ ID NO: 222057 - DNA, 122 bp, Homo sapiens
gacaagaagagacacaaggaaaggggtgcaatctgaggaaggagggcccggtaagcaacccggtaatcacagcgctgggagagaacgcataaaagaagggtagctcaggagttgtggggcac

SEQ ID NO: 222058 - DNA, 122 bp, Homo sapiens
tagggtccaggcaggaatgaagccaataatttattgctttccattctgtggtatgatgtgcgtgtgcgtgagtgtgtggcccctgtttattcccctcctgtcaagaatgaagtggattcagt

SEQ ID NO: 222059 - DNA, 122 bp, Homo sapiens
tttcgcccccatctcgctccgcacgccagcggttcaaacacccccggtaggatcagcccccgagtgcacctctgaccccaactctgagcaggcaaggttaaggccatttgtgtgaagcttgt

SEQ ID NO: 222060 - DNA, 122 bp, Homo sapiens
tctttccttcagtgattcctttccttcttgaaataattcctggcctggcacagtggctcacgcctgtaatcccagcactttgggaggccgaggcaggcggatcacctgaggtcaggaattcg

SEQ ID NO: 222061 - DNA, 122 bp, Homo sapiens
aggtttaaaacttgttaagaaaataatagcacaggtgatacacagatgaagcaaaattgccgtggatggtctgggaatgcctgaggattgagaaacactggctgaattatacactgtggcag

SEQ ID NO: 222062 - DNA, 122 bp, Homo sapiens
acgataaatgagtgtgtgtttgctgtggtggcagccctgaagttcgcaatgcccgggaagcgtttggtgaaactttaaagaaagcccaggtgactcctcctggggagcagcgcttcgcaaac

SEQ ID NO: 222063 - DNA, 122 bp, Homo sapiens
tgctggtggagctgcgggcaggaaaggttatgagagctctgacacttgcggagctgcctgcgtttcaggaagtgcagatgccctctagtggccagagtaagatgttcgcgaagaagaaaggc

SEQ ID NO: 222064 - DNA, 122 bp, Homo sapiens
acaattgggcgcacgttttaaaaaacagaatctagaattttcttcctcgggctttgcttccgatactagtttttccttctttctttttttttttttttaaactcatcatctttttcagatga

SEQ ID NO: 222065 - DNA, 122 bp, Homo sapiens
aagccagcagtggaagcttgctcactaagacctacaatatcgaacaggccgtgcatcgatcgggtgagacaccaactcccagtcgactgcaggaggagagaggccgcgtggagaggcagtgg

SEQ ID NO: 222066 - DNA, 122 bp, Homo sapiens
ggcctggagcgcaccctcgccctctagttgcacgtgggtgcagtggtgaccactgggggtcgtggatacccccagtgcctgcaaatcgaaggactgctggggtattgaccttggggctgtag

SEQ ID NO: 222067 - DNA, 122 bp, Homo sapiens
cctcccagtgaaaaataaaaagataaccaaaccctggacctctgttgcccctctctctcccgtgcctggtttcctcatccttgcatttcttgtctggtgctatcccttgggaagccagccaa

SEQ ID NO: 222068 - DNA, 122 bp, Homo sapiens
gtcacctgttcactgcagcacctcgttaggtgagtagcaggccagggtgacagacgatggcggcgctgaccttatgaagttggcgttacgacagacaggacgggcgacctttgtaaagcagc

SEQ ID NO: 222069 - DNA, 122 bp, Homo sapiens
taaatcactacctgatacacatttcaacctgtgatatatcttttttccaagacggagtctcgctctgttgcttaggctggagtgcagtggcgcgatctcggctcactgcaacctccagctcc

SEQ ID NO: 222070 - DNA, 122 bp, Homo sapiens
gcctgtgaagtggatggcgcccgaggccttgtttgaccgggtgtacacacaccagagtgacgtgtgagtcctgccggcggtcactgtcctaccccacaaaaagggcaaggcactgcccaaag

SEQ ID NO: 222071 - DNA, 122 bp, Homo sapiens
gcgggacgcggctgtccggccactgcagggggggatcgcgggactcttgagcggaagccccggaagcagagctcatcctggccaacaccatggtgtttcaaaatggggctcacagcaaactt

SEQ ID NO: 222072 - DNA, 122 bp, Homo sapiens
aggtgcgtcctaggttctctcaggttcaggaactcaccggctctggcggcgcgggcggcgcgggtggcccttgtccctcaggaaggactctccctgtggtcacccaactctaggcgctcacg

SEQ ID NO: 222073 - DNA, 122 bp, Homo sapiens
ttaaccagaacttctgcaatatccacaagaaattaggtaaaattctaacgttctggtaatcgacatgttaggaaacaacagatattacatctgaaacttaggaaataaaatacacaaaataa

SEQ ID NO: 222074 - DNA, 122 bp, Homo sapiens
tactgccttggtggagactatctccgatatcccagcactaaaaggcagatccaagactcccgcaagctacggtgggtccccagcccagaggactcctgggggtccccattttccgcaagcgc

SEQ ID NO: 222075 - DNA, 122 bp, Homo sapiens
tggaggtctccagagacctagcgctacggaccccaggggctgagaagctgttgttcaggtcgacggccacacggtggcgatgttgcgccgttccagggcgtgggcgctcacgggtggggcgg

SEQ ID NO: 222076 - DNA, 122 bp, Homo sapiens
ttaatttaatatttactgcctcctccactaggtcttggctgaactaggttatggggaatgcgatgagcaaaactggcagccgtaccctcccgcaaactgaaaatcgtgtgagaaagcagata

SEQ ID NO: 222077 - DNA, 122 bp, Homo sapiens
cccgaattaattgctcccacccgggagggatctgggtaggccctccgggtctcaggaacacgaacagcaacattatttaggaattgagaaagcccaggggagcagatgtaaaggagcgcccg

SEQ ID NO: 222078 - DNA, 122 bp, Homo sapiens
gtgaggggcctcacgggccaaaccctccctcggcctgtccttcaagcctcagcagctctgcggagtgagcgttatcatccccattctacagataactagtttgaggctcagggtaagtgcaa

SEQ ID NO: 222079 - DNA, 122 bp, Homo sapiens
tgctggcgttccagggggatgcattgctggagcagatcagcgtcatcggcgggaacctcacgggcatcttcatccaccgggtcaccccgggctcggcggcggaccagatggccttgcgcccg

SEQ ID NO: 222080 - DNA, 122 bp, Homo sapiens
tcctgttccacctacgtaggatctgtgaaacaggctcagtgcctttgagggaggagggaacgtttagattgagaccaccccactcccgggtgattaaataaatatgtctctcccccacccca

SEQ ID NO: 222081 - DNA, 122 bp, Homo sapiens
gggacttggagtcccttatctttccctggtttggtacatgacccggaagcctcggctggccgttgcgtcatccatggcgccggcgcagagcgagaaggaggtgggaacgccgtgaagcaaga

SEQ ID NO: 222082 - DNA, 122 bp, Homo sapiens
aggaggggcgcgaggtcctcagaaccggaaaggctagcactggatgggtccccgcagccccgcgccgctgcgccgcagcctccggaagacaggggacgctgtggcgccgggcggggcgccct

SEQ ID NO: 222083 - DNA, 122 bp, Homo sapiens
atcgaggtgggggcacagtgtggccccaggagcaggtggaggcagccgagctggggtatccgtctggtcgctggtctctgtctccacttgggtcctcgcctcccccttgtccctggcgctcc

SEQ ID NO: 222084 - DNA, 122 bp, Homo sapiens
gcaaagaaaatgctctgaatgcttattcaatacgcgggcatccatttccacaaagtgattcggggatgactccacattgactctgctataagcaaaatactcaaaaggacaaaacaaaattt

SEQ ID NO: 222085 - DNA, 122 bp, Homo sapiens
gctcctcctgctgctcccgctggttcctgcggcttctgctcagacaccaacgccagacggcgatgcctctcgggtggtgactccagcgcaggaacttgaagaagcgctttgcccgccgtcct

SEQ ID NO: 222086 - DNA, 122 bp, Homo sapiens
caaaatagaagtactgtgatttttttttttaatatcagatggctttatttttctaactaacgtaaagggtaagattttagaatttatgtccttgtgtgtggaaggcattgcatggagtgttg

SEQ ID NO: 222087 - DNA, 122 bp, Homo sapiens
gcgattttcccagcctgtcacctccagcaaggtgtgagccagaatgcacacgcaggcctgcgtgtctctggggctgatgacagagtcacaaggaaacagatctccatagcacagcgtggaaa

SEQ ID NO: 222088 - DNA, 122 bp, Homo sapiens
gggggacactagaagaggtagtgggaagccagactttcccacatcattccaccgaggccacggaggcaggaggaaccgagccttccctgtgctcggcactgtgtttttcttcatcatgtcac

SEQ ID NO: 222089 - DNA, 122 bp, Homo sapiens
taaatacgagcttccagaacaaatgctacaacacaaaacagaaacacatgtgcggccgcgcggcaagcgagcgcgcggcggggcgggaggcgcggggcgcggggcgcgcgcgccccctgccg

SEQ ID NO: 222090 - DNA, 122 bp, Homo sapiens
tttgttggatgaggacaggtactgggtgtgtatctcctcctacttccacgaacaaggtgtcgctctttggtaagagggatgaggaggtcgagtgtggatcattctggaaagatctcaaactg

SEQ ID NO: 222091 - DNA, 122 bp, Homo sapiens
aacaggctggctggacaactggcagcttggtgtggccttagaagcatgagtgagggtggccgggagacgatttgtctggactgttgtgatttcaccctgacttttcctgccttcagcctctg

SEQ ID NO: 222092 - DNA, 122 bp, Homo sapiens
cacccccagcctctctccgttttgattccgagcgcctcttccatgccaggccaagtgagacgctaggaatataaagatgaacagaatcagcctggacaccatgtaatcctagcactttggga

SEQ ID NO: 222093 - DNA, 122 bp, Homo sapiens
agggttttgtgcagaatctgattaactctttgaaaagagcccctgcagtctggagcctcgcgggcagtgcggctcccctcctggctgcagacaaaaccccacagctgtggggcccccaccct

SEQ ID NO: 222094 - DNA, 122 bp, Homo sapiens
gaaacaaagaaacaggacagtatgtcccattcagaggggaaaaaaagaagccaacagacacggttcctgaaaatcacctgacggtagatgtcccagacaaagattttagggaactgtcttaa

SEQ ID NO: 222095 - DNA, 122 bp, Homo sapiens
gccgtgcgcgcgcgcgcgagcggcggaagaggcgggcgtggcgggggatacaactggggacgcagcggggctgcgctcagacgctcagggcgcgccctcggggtcggggctccctggcgaag

SEQ ID NO: 222096 - DNA, 122 bp, Homo sapiens
gtgtttcacacagagacagttaggaaggataggaaaatgcatatacaacataatacgacccgcattgttttgcaaataatagggtcaaagttgtgataataggaagaatatggatttaacat

SEQ ID NO: 222097 - DNA, 122 bp, Homo sapiens
atttgttccctggcaggttatttgctttccaaagtcgaagaaaaagttggctccccagaacgtccactctcagatctggggcttataagctatcgcagttactggaaagaagtacttctccg

SEQ ID NO: 222098 - DNA, 122 bp, Homo sapiens
tggtaaaattgcccaggagcccgggacgggtgcgtggggggcgggggtgcgggggcacgccgtgagctccagcgacccgccgccgggcgacgccgccccccgagatgagctcaccgccggcg

SEQ ID NO: 222099 - DNA, 122 bp, Homo sapiens
ctctgaactcccatagcactttatttagacctcagacaatctgcagcatctgatatgtttcgtccttgaagctctcccctccctagcagccaccaccatgcactgccctgactctcctctta

SEQ ID NO: 222100 - DNA, 122 bp, Homo sapiens
catctgtcccatgtatgttctccctagccttctgagggagctagtctgcaatatggccctcgatgaaccacgcctccctcataaccgcacctgtacccacctcccttccaaattgactctgg

SEQ ID NO: 222101 - DNA, 122 bp, Homo sapiens
gggatcctggaataatggggttttgggtgctgtgggggaagggcagacgattgaacagaccgaactacttcctcagaaacaggtcccctgatggaggatagaagtgaaggaggccgggcgcg

SEQ ID NO: 222102 - DNA, 122 bp, Homo sapiens
agtagtgttacagaatcgattccagggccaccgggtctgtaaggcatttggcgcggtggccgttggatgagcagccagcaatggcggctctgcaatgtcgacaccgcaaagccaagccaagg

SEQ ID NO: 222103 - DNA, 122 bp, Homo sapiens
ttcctgggttcaagcaatcctccctccttggcctaccaaagtgctaggcatgggtcactacgcccagcctctgctgcttgtatcaaattctctcctcaccctgaaagtctgggaaatccttg

SEQ ID NO: 222104 - DNA, 122 bp, Homo sapiens
cgggaaaaggaagtttgagggccactgggaaagagaaggggtatcaccgcttccggaccccggcctgtacttgaaggcaaagagaactacaaatcccagcgtcacccgcggccttgaagccc

SEQ ID NO: 222105 - DNA, 122 bp, Homo sapiens
ggatgcttctggccctaggttccctgtcctcactcctgtggccctagtcccgggcagcctcgggttacttggggttttcccggtggcgagaggctctctacccccgccctttcgcagcaggg

SEQ ID NO: 222106 - DNA, 122 bp, Homo sapiens
ggcaggggcaagggcagctgtgggcagtgctcagctgtgggaaggaaccttgtgaggagccgcctcctcttttctagcagagagaaaagagctgcctgttctctagccttcctccccaggaa

SEQ ID NO: 222107 - DNA, 122 bp, Homo sapiens
tcatcctgcaggcagcagagcctcgggttaaccgttaacgtcaggaaatgacagatccaacgctcctgcttggggcagcgtggaggccagcggaggaactgcaggagcctaaaggagatggc

SEQ ID NO: 222108 - DNA, 122 bp, Homo sapiens
ggctagagaagacaggtactcatacatggctggtaggactataaactggtacaacatttccggaaagcaatctgacaatatgtgtcaaaaattataagtgagagggccgggcgcagtggctc

SEQ ID NO: 222109 - DNA, 122 bp, Homo sapiens
tcatccttctcacatccttgcccccgcacccctctctcaccccagagttcaagcaccaaccgaaaagattgagagtagctcagggtacggtaaacggaggaagctttgaaaaaggcggggaa

SEQ ID NO: 222110 - DNA, 122 bp, Homo sapiens
gcgccctccgcagcagacagccgtgcgccctcggcgacccggtccctgcgctccggcgcccgcaggtcctcgctcccggcttctgcacctcccgctccgggacatctggctgagccgcgcct

SEQ ID NO: 222111 - DNA, 122 bp, Homo sapiens
gcaaggcacatggttatggtcacaaggtaagcagcaggccagtgtggctgcagtagctgccggatctatggcagtcagggccttggggacacagggtaggcaggagagctgactctggctgc

SEQ ID NO: 222112 - DNA, 122 bp, Homo sapiens
atctcggctcactgcaacctccgcctcccggttcaagccattcttctgcctcagcctcagcgagtagctgagactaccggcgcacgccaccacgcccagctaattgttttgtatttttagta

SEQ ID NO: 222113 - DNA, 122 bp, Homo sapiens
gaggggctccacgacgccaatcacaataagcagggagccagtcagattaggaaggaagcacgagaccagagactagtgtcatcaccggtcacggcaggacaagcgccccagaggtcggaaaa

SEQ ID NO: 222114 - DNA, 122 bp, Homo sapiens
tttcacagttctggaggtcagaagcctggaaacaaggagttggcagggccatgcttcctccgaaggctccaggggcgaatacttcccagcagcttccagcttcggatggcctgtggcattcc

SEQ ID NO: 222115 - DNA, 122 bp, Homo sapiens
cacagctgctggtgcgggccctcttgtcccttagagtcacctggcacatctgtcatccaccggtgcctgctggactcccccgcagaccagaccaggtggatttcaccactcacatgcccaaa

SEQ ID NO: 222116 - DNA, 122 bp, Homo sapiens
ggacctgcggcagctcaccagggcgggcctgcggcgcctgcagcggcagcaacaggtcagcgtggacttgagcttcaagaccaaggccttcaccaccatcctgatcctcttcgtgggcttct

SEQ ID NO: 222117 - DNA, 122 bp, Homo sapiens
aatttagattttaatacttataggaggtgtgttaattggccccagggccgcaggctttagcgttcagaggactttagccccaaaggttttgtggaacttttccagagtcctcaccagtacat

SEQ ID NO: 222118 - DNA, 122 bp, Homo sapiens
gcgtcacatccggtccccggggcttccctgggttgacagcaggggcggagtggattctgccggaactggggtgggagttggggtgggagtgagggtgggagtccgggtggggtggggtacgg

SEQ ID NO: 222119 - DNA, 122 bp, Homo sapiens
gctcctctttctgtgcctgggttgtttctctcccagagggaggtgctcgctcctgatgttcgctgttcccaaacccctataaggatccttcagtccaacctcttgggtggggaacagagggg

SEQ ID NO: 222120 - DNA, 122 bp, Homo sapiens
tcctcctgactttctgagccagactgaactgactcggcacaccaccaccaccctcttcgacgtctaccagcttcagactcaaaggttaggaagcagaaaacccaccgccctcttcgacgtct

SEQ ID NO: 222121 - DNA, 122 bp, Homo sapiens
gcccagagaggcattaaaatgtgacagcagccacgtcccactccccctcgagctagagaacgacctcttgaatctgccagctgtatgggctctaggctgacaccgggtagccataaagtgcc

SEQ ID NO: 222122 - DNA, 122 bp, Homo sapiens
cgaccctggcgcatctcccgagccagcgagaagcgagaccagggcacccccattcacctacgaggcacgaccctggcacatctcccatgccaacgagaaccgaggctggggctggcagagga

SEQ ID NO: 222123 - DNA, 122 bp, Homo sapiens
cccccgaggagggcacgacgcgctgacaaacgtggccgtcaacacctcgagctgccccggcgagttatttcaacagactgggagagagccgtactatttgagtggcaggcgacgcctttccc

SEQ ID NO: 222124 - DNA, 122 bp, Homo sapiens
agcagctgcggaaggagggcaatgagctgttcaaatgtggagactacgggggcgccctggcggcctacactcaggccctgggtctggacgcgacgccccaggaccaggccgttctgcaccgg

SEQ ID NO: 222125 - DNA, 122 bp, Homo sapiens
ttgtgtgactgtccttgatgtggttgtatgtgctcactaaggctgcctttgactgagtaccgagtgagctgagcttgaacctttctgtcttacccagcgccctgactagtcatgaatggtca

SEQ ID NO: 222126 - DNA, 122 bp, Homo sapiens
tcactccatgcctttgccacctccagtggcttctgtcatgcctagaacagaaccccaatccggagaaaactgacccactgtggtccctggctgcttctttccaccatctccctgcccagcac

SEQ ID NO: 222127 - DNA, 122 bp, Homo sapiens
gagtcctggtgccgccggctgcacttctgtgtgtctttcaggaagccacagggcagggggcgtctgtgcagagaagcgggggagtgagtagcaggcaggcccagcttgtgtaccagcccagt

SEQ ID NO: 222128 - DNA, 122 bp, Homo sapiens
actgctggccaagcctgcccaggacggtggggcccctgagcagtctgtgcctttgcaggccggagagtgcacatcatcgaggacctggaggatgtggatgtgcaggagggctcctcggccac

SEQ ID NO: 222129 - DNA, 122 bp, Homo sapiens
cgccctcccctacaagtggcctccagccgctcagagcagctccagaaggagtgtggattccgagaagctgcagagccctggaaagcagaagagacgtgcagacgcctttgtggggttctgtc

SEQ ID NO: 222130 - DNA, 122 bp, Homo sapiens
tgggtcagaggcagtagatggatagcaggcagttgctttccatatgcacccttttacacacgtttaaccttttctaaaaattccagtaaatgcaatacatgtatccttcccacaagtgaaga

SEQ ID NO: 222131 - DNA, 122 bp, Homo sapiens
taacctccagaagctggccccatgacaaaacctgctcaaaaggaccagcctgcggcctggcgtggtggctcacgcctctaatccctgtgctattagaggctgaggtcaaggaatcacttgag

SEQ ID NO: 222132 - DNA, 122 bp, Homo sapiens
aaacttttaagccacggtgaaaatgtttctataaatgagtggttctaatgttttcgtgagcgcccattttggggagcaccgccagctgcccgttcaggagtgtgcagcaaactcagctgaga

SEQ ID NO: 222133 - DNA, 122 bp, Homo sapiens
cccttcagtgactgtggcagtctgcaatgtattaatccactcaatggctagggcctttaacgagtattatatacttccaagaaggtgctagcagagagcctcaccatgcattttacagcaaa

SEQ ID NO: 222134 - DNA, 122 bp, Homo sapiens
ccggcgcctcccgagcggcccggcaaggacccgccacctcctccctcccgcagggcatcccggttctgctccgacagcccaccccaaggcccctctcaggccagccctcgcccagcccgggt

SEQ ID NO: 222135 - DNA, 122 bp, Homo sapiens
cggtgtcctccgtgctgcttctagtcggcgtgagcccctgtggtttcatcacctgctcgccgatgcccactgcattttaaaggaggtttagcaacacttagacctcagcctaggtcagaatc

SEQ ID NO: 222136 - DNA, 122 bp, Homo sapiens
accttcaggtaagagggagcggggagcgccccctcggcttggggtgccagaggtgtgcggcgggagcgccttttttcgtggggccctcgccctgcagggcggaggcggcattgcgttggcct

SEQ ID NO: 222137 - DNA, 122 bp, Homo sapiens
ccccaccccccacgacccacttacgctcaggacccggcttgccagctggcaccaactccacgacaagttcgttgtcctccttgccccgggccagccagcggtgggcttcgaacttgtgctgc

SEQ ID NO: 222138 - DNA, 122 bp, Homo sapiens
gcccttctacaaagagcttttccaaaatccaggcggaagagctttcctgccgcttgggcacgttgaccatgacccccctccccggccagacgacctctctcccgccaaccttcccttctcta

SEQ ID NO: 222139 - DNA, 122 bp, Homo sapiens
caagctttgtctggtatgtcttttaaaacgtgattaacgctgagcttgatgctagcagcccgcaaggggtactataggcttacagcctaattcctttccccaagcggagcggtaccttctca

SEQ ID NO: 222140 - DNA, 122 bp, Homo sapiens
gggtagctacagggaaaacacatccggaggtcatcattctgggtgggcaggcagaccagccgggtcccgctgccattccactccctcaagagcgcccaggcctgaacccagggccagggcct

SEQ ID NO: 222141 - DNA, 122 bp, Homo sapiens
ccggcaagggtggctctgggaggcctggggcactggcccggggccggggcaccagcaggtcgctcaggccctgggtggtcgcgtggccggtggtggacagagcccactcacgctgcccctcc

SEQ ID NO: 222142 - DNA, 122 bp, Homo sapiens
gggagactcccaagggctctttaaatacgagctataaatactacaggcgctcggcgcgtgcgtcacgacacatccggctcccgattgggcggcgtaacctcgcttatttgcataggccgatt

SEQ ID NO: 222143 - DNA, 122 bp, Homo sapiens
ggctacccctaggatgtggctttcatcttcctgctagtaagataactgctgggctccagtcgtcatatcttatatgtaatcaggaaaaagcaggagaggaaaacaaaagcatgcaatttgca

SEQ ID NO: 222144 - DNA, 122 bp, Homo sapiens
caagtaaaaataattttatttattttattgattgtgttaccagtcccccctacacacacgcgcgcgcgcgcacacacacacacacacacacacacacacacacatcttagaatataaacttc

SEQ ID NO: 222145 - DNA, 122 bp, Homo sapiens
tcccagaattctagtaaaaggaagtttcctggataagatagtgtggtagagatatgaggacgcaggttgctgggttagggaaaaagtgaatggatattgtgggcatgtaagagaatgaaatc

SEQ ID NO: 222146 - DNA, 122 bp, Homo sapiens
ggccgagagggatgggaaggtggaggaggaggcctgaggagagggacacaaggaagacagcgtgtgccgaggtgacagctgccatgtcccgagtttccagggcaccttcactcaaaagggtg

SEQ ID NO: 222147 - DNA, 122 bp, Homo sapiens
gcggcacggggagcggtgtggaagcccggcggggccagcgcagttgaggtctggggagcccggctggcatctgctccgggctgcggcgcgggccccgcggagcccaggaggcggcgggtgct

SEQ ID NO: 222148 - DNA, 122 bp, Homo sapiens
cacacagtgttattgttacagaaccattaaatacaacttatacacaagcaagctgggcggcgtccggggggcagggagagtgcaagagggtcaggggtgagcagtccgggcccggtcctgga

SEQ ID NO: 222149 - DNA, 122 bp, Homo sapiens
gagcctcatgcatcacggagcatgagaagatgttcccctgctgccacctgctcttgtccacggtgagcttgctgtagaggaagaaggagccgtcggagtccagcatgggaggcgtggtgttg

SEQ ID NO: 222150 - DNA, 122 bp, Homo sapiens
tgagtgcctcatgtttcctaagggctctgcctatccacgcgtgttggacgtgtgcctgtacgttaagtgcaggaagtgccagcctcagtgtgaacgaggttaggccccagcctggcattctc

SEQ ID NO: 222151 - DNA, 122 bp, Homo sapiens
tgcaagctctgcacatcgctagaggatcttctattgcagttagagtaaccaagcatacgccgtacagtgacaacatctgcgtggctcacaccacacaggcagccgcagaaacagcgcctccc

SEQ ID NO: 222152 - DNA, 122 bp, Homo sapiens
gcggatgacgccggtgcagcgggggggcacggaggccctggtggccctgggatggggaaccgcggtggcttccgcggaggtttcggcagtggcatccggggccggggtcgcggccgtggacg

SEQ ID NO: 222153 - DNA, 122 bp, Homo sapiens
ttcccagtctattatctgagacacctggtgtgggcgggtgattcagagacaaacaatgagcgggggccccctgcacagcaattaactgctttaactgctaatatgtttaatccaccacgtgg

SEQ ID NO: 222154 - DNA, 122 bp, Homo sapiens
cgccaccccgcgaggagccccttcctactgtctccaaggggtccccgacactgctctgagcgaccctaagatacctgggtgtctctgctgggcacaaacctctctggcgccacttccaccat

SEQ ID NO: 222155 - DNA, 122 bp, Homo sapiens
tgaccacctccccggcatcccctcaggcgtgttcaaccccaactcggaggaccccctgcccgggcagctcaagaagcagctggtgctccggatcatcagtggccagcagcttcccaagccgc

SEQ ID NO: 222156 - DNA, 122 bp, Homo sapiens
gcctcctggtccggcaaagctgcggctgctcccagagagagttggggtcttctcagggcccgcgatgggggagtggtcgtggtcagacccccgtgagccccttcggaaggtcccagtccctg

SEQ ID NO: 222157 - DNA, 122 bp, Homo sapiens
caggcgccgcctagaagtgacttctccaaaaagtgtgttagttcccggtcacctgagctccgggtgacgcggctgcggtagctgcggatacaagccttccgcgggtcctgcctggcgacccc

SEQ ID NO: 222158 - DNA, 122 bp, Homo sapiens
taatgggcgcgttttgacccgggttaaccagttctggagctgtgaagtaactctaaaacgcgtgatggaggccaaggggccgccgcccgggctgcagctgaaacggcgctttcacaaacaag

SEQ ID NO: 222159 - DNA, 122 bp, Homo sapiens
actaaattaaaaaatataaaaaaattattactaaaaaagtaacagaaactaaagcataatcgccaacatagaaggttattttatatatgggggtaggtgctgggtaatacaagagggtccct

SEQ ID NO: 222160 - DNA, 122 bp, Homo sapiens
gatttgaaatgtgaatgcctttcagtaaagttctcattttgttacatgggctgcatatttcggggcatttttaaaaactctgtcacaataaggctctagacaagtaggatcttaaaatttag

SEQ ID NO: 222161 - DNA, 122 bp, Homo sapiens
gccaagacaagtcgtgaaggtgggatgctgtgccccatgacagggaagccaacctacttccgtgaattcctgagtactgcagcaggaagcacacacataggcacacacacacaggcatacat

SEQ ID NO: 222162 - DNA, 122 bp, Homo sapiens
ccccaagcccagaccctagtcccccctcagaccgaagacctcaagcgccgactcagactgcgctctgcacctcgaggacactcacttcccaaatcgaggccgcctcagccccgcgcagcctc

SEQ ID NO: 222163 - DNA, 122 bp, Homo sapiens
ggccgctttcgggagccccaggcgcgaagcggcctctctccgcctcaggtgagtcctgctcgacgcccaaggcccaacggtcagaaccgcctctgcccgccggacccagcgaagctagggga

SEQ ID NO: 222164 - DNA, 122 bp, Homo sapiens
tgtagccacagagaggacactccacagggttccctgtcccagcctctgttctccctctggcggccaacgtgatgaccaaactcctgagccagtgcatccctgtgtccctctattcaaaaccc

SEQ ID NO: 222165 - DNA, 122 bp, Homo sapiens
caaatgtaaccaatgaggtactccgactagggggttgggaacccaataacagtggttgggcgggcgccttcctggagcgcggggagatgtaaagatagacaaataattttcccaatgagact

SEQ ID NO: 222166 - DNA, 122 bp, Homo sapiens
ctccgatcccgctctttgcacctcatcagggcaaggggcaggctcgggctggggagccggcgcgggcacggcggcagcccgccgagggggacgcagggcacgtcgccccgccccggcccgcc

SEQ ID NO: 222167 - DNA, 122 bp, Homo sapiens
aggcgtaggcgcccgggcgggaggcaaccgggatgtggaaactctcgcgggaagatgcgtcgttgcctcggtaaccgcgtcgcagtcgccgaagatggcggggcgaagtctgtgtctcacgg

SEQ ID NO: 222168 - DNA, 122 bp, Homo sapiens
cggcctggatgaggccactctgctctgcggcgcccccacgaatcaggtcagagatgatcacgggcggcttactgacccgctccttcaccagaaatcccaggcccccaactttgcgcttgaag

SEQ ID NO: 222169 - DNA, 122 bp, Homo sapiens
gaaaaagtcttcatgtaggaggtgagctttatgttcatttgggaaattacataaacagcacggttgaaaattttaatgtgaacagtagattattttactttaaagggaaatcctcactgggc

SEQ ID NO: 222170 - DNA, 122 bp, Homo sapiens
tgggtgggaaggtgctgagagcaacagagggctggactgtgcatcgtggtgggggttgagcgccagaagccactgcaacagcactttcctctgtggatcctgtacagggttcatgtggcctt

SEQ ID NO: 222171 - DNA, 122 bp, Homo sapiens
gcaggcaccgcggcctcgggcctcccctgacgacgccctcggccccgcagcccgggcgcccgcgccaccctgtcctgctctgcgcccgcctgtccagccccactcaccgcctgccccgcaga

SEQ ID NO: 222172 - DNA, 122 bp, Homo sapiens
gactgtccggaacattatcttggttaatcatctactccagggtaccggctcttcagatcacgctgaggtctgcttctcaaagcctgacaggatcagaactgtacaacctctcacagtcttct

SEQ ID NO: 222173 - DNA, 122 bp, Homo sapiens
gttggcctggatggtttcctggatccacttggtgaacttgcagaggttcgtgtagacacccggtctgttgggccgggcacaagggtaatctccccaggacacgagtccctgcagggagccat

SEQ ID NO: 222174 - DNA, 122 bp, Homo sapiens
gttgtggctctcaaaagggaaaacccgggcttcaaggagccaggcccagcatccttttggcgcctcttcccgacgtttggttgctacgtccgggcctcggcgcccacacaagatttccccgg

SEQ ID NO: 222175 - DNA, 122 bp, Homo sapiens
tagttttagggaaacagagtaagtagctctctgagaagtgaaaaaaaattctcaaacagtcgcaaagaacaaggactgatgaagaacattgatgttcctttgagagcaggacaatgtactta

SEQ ID NO: 222176 - DNA, 122 bp, Homo sapiens
caaatctgaaatcgggtaacagttgggggcgttggccgattttctctcctctcagcgtatcgtcctccccctgccgcccctttccctcctcttccagtccactatctccccgaccccagccc

SEQ ID NO: 222177 - DNA, 122 bp, Homo sapiens
agtagatgtggcagctggttccattctctcccaaacacacaggggaatgattagtagcaacgcacacaacctagagtgctgcaccaggtcctgcccttgccagttagttagtgagctccctt

SEQ ID NO: 222178 - DNA, 122 bp, Homo sapiens
ggcctcgggccgccgcgggagcccggggatcgggccaacacaatgcacccaggcctaggccggggcggctcgaacacatcaccccgggactttctagtaaacagctcgctgagccctcgtcc

SEQ ID NO: 222179 - DNA, 122 bp, Homo sapiens
cgctcctgcttcttctcaatacatttcacttcggctgatgagcaaagcagcccagcccttcggcacagtaagagggagggaatgtgattacggcggagcataagcagggcttaatcagcaca

SEQ ID NO: 222180 - DNA, 122 bp, Homo sapiens
tagctgatcaattagcacagttgtgaccggacagactgttagctgatcaactggagcagtcgtgactggatagactgttagctgatcaattggaacagtcctgattgcatagactgctagct

SEQ ID NO: 222181 - DNA, 122 bp, Homo sapiens
ccaaagcggcgccgtagccaccggccccctcctccccagtgccccaggcgcggagcagaccgccggcaacctcctctacaccacgccgcagggaccctccagcagagccgggctgctgcagc

SEQ ID NO: 222182 - DNA, 122 bp, Homo sapiens
gactagcacagcctgcaactgtttacatgcagagaacaggagtcagcctactgttcccgacgtgcattttaataagccacctgacaagatcaacaggaagaaaagaaaaattgggaacaggt

SEQ ID NO: 222183 - DNA, 122 bp, Homo sapiens
cctactgaggactccataaacagaacgggatacagagataaacaatttgggttctgtccacgtttgtcaaaaggtggtgctggcccacctctgaaagcagaacacttgctcaacaaccttgc

SEQ ID NO: 222184 - DNA, 122 bp, Homo sapiens
caaagcactgctaattagagcgcctcgttaaatgactgctctgaacacagtggggatggacgtaggagagggcaccgcagacaaaaagaaaaaaaaaaaagaatgagcagacgcagctggag

SEQ ID NO: 222185 - DNA, 122 bp, Homo sapiens
ttggcagaggcagttctatttctaggtaatgaatggaccttacggaagattggtctcttccgcccgaagagctagaaataactgttctcaagcaaggcccatgctttctcagcacagagctg

SEQ ID NO: 222186 - DNA, 122 bp, Homo sapiens
tctccttctgatctaggtgaggagactcagattcctcgggcccaaagccttgggtgaccccgggcccctcagcaagttctgctgggtccaccatgctgaagggtgtgcccacagcccaccgt

SEQ ID NO: 222187 - DNA, 122 bp, Homo sapiens
ccctgttttgctcagttcagctccatgctcaaaaacaaacaaacaaacaaacaaacaaaacgtacaactagctctttactgggaacagcagagacgaacttgcaaactggtagcccaccggt

SEQ ID NO: 222188 - DNA, 122 bp, Homo sapiens
ggcgctgccctggagggggctggtcgtgccgccggattcccgcgcggggcggggctgccccgcccttggctccgcctccgccccgtccccgcacacctggcccgcaggtagccggcaccagg

SEQ ID NO: 222189 - DNA, 122 bp, Homo sapiens
gagtgacagaatcaggctaggtggagtggagtctccgttcccatttccaagtacagggtccgctcccctcaactaccggctcctggttgcctgtgcgcgttcacacctagggctccaggccc

SEQ ID NO: 222190 - DNA, 122 bp, Homo sapiens
caggcggctgtctggaacagtaaggaagagacgtcagcgacaaaaggacaacaagcaattcgtacgcaccctttcccagggtaggtgaatggatgccttccaaatacagaaggacggcagca

SEQ ID NO: 222191 - DNA, 122 bp, Homo sapiens
aagcagggagtgattaagagatccattttaaggataaaataacaaggttcagagaagttacgtagggaggacagacagatggactttaaaaggaaagagaacaggaccgggggtagaacacg

SEQ ID NO: 222192 - DNA, 122 bp, Homo sapiens
ctcaggtaatccacctgccttggcctcccaaaatgctgggattacaggtgtgagccaccacgcccagcctaaattaatgctttgaattttgcatggagacactgaaggaagacaaagtacaa

SEQ ID NO: 222193 - DNA, 122 bp, Homo sapiens
ccatcccctgtggaatggtggaatgcagggaacctcctgttcctgctgacaccctctcctcgaactctaggctgctggtggggggtgtgcaggaagaccagtttttccagccctgagaccaa

SEQ ID NO: 222194 - DNA, 122 bp, Homo sapiens
tacctgggtgcgtggctgtgcggcgtcaggaggagcagggtgtgggcgcccggcctggggcgtggagaggacgcagggaacaggtgtcttcctggtatccatcgaactgaaacgtagccctt

SEQ ID NO: 222195 - DNA, 122 bp, Homo sapiens
ggtttgcatttgtgccagctcgtgagcagcctgttcatggtgccttgatccgtgatgccacgcagcttctccctttcctcctccgcaccatcgggggtcgtgggggcagctgcggaagcagg

SEQ ID NO: 222196 - DNA, 122 bp, Homo sapiens
aggcagccgggcttctggccccaccagcatacagagacgcattctgaagctcggatagtgcgtgaggtgtgaggctgcctctgctgccggtgccacccagtgggaaccccctccatgccggt

SEQ ID NO: 222197 - DNA, 122 bp, Homo sapiens
ttttgacctggatttgagagcatcggggcttgagacaagcgcgtcttccacagagagaggcgaggcccaggcagggagccccccagcctttactctcggcacctcggcgctgccgcgcggcg

SEQ ID NO: 222198 - DNA, 122 bp, Homo sapiens
ccccagcctacggcttcgggcaaccctacggccggagcccgtctgccgtcgccgccgccgcggccgccgtcttccaccaacaacatggcggacaacaaagccctggcctggcagcgctgcag

SEQ ID NO: 222199 - DNA, 122 bp, Homo sapiens
cgcaacctaacggcggacgaagactggacgccggaagtcccgcccacgccgctacgggaacgcccctctgcgccttccgtctatggcttggggtcggcttccgtcccttgtagcactgcctt

SEQ ID NO: 222200 - DNA, 122 bp, Homo sapiens
gacataacggtccccgcgcggctccccgaaccggaagtggaggtgagctgtcgcgggcggcgcccggccttgctcaacgcccagcagtccccaccgtcgctgccgccgccaccgccctcggc

SEQ ID NO: 222201 - DNA, 122 bp, Homo sapiens
aaagaagggaagggagaatgcaccggccggaggggtgcctgcctttgtgggcgaacccatcgctttaaaaactgcccgcggtgggaaaagatggtgtgggcccccggggcgcaagcgatgca

SEQ ID NO: 222202 - DNA, 122 bp, Homo sapiens
cccgaggttagctaccaaggcgcttcctgaaatctgacactgatgcccgtcagcccagttcgtgcctaaccacaggcccaagcagacccaccccaacaccaaagcgtcgctgcctctgtcta

SEQ ID NO: 222203 - DNA, 122 bp, Homo sapiens
tcctgaaattcgcaaggaaccaaaaatgagcccaaatagcaaaagcaattctaagcaaaacgagcctggtatcacattacctgacttcaaattatactacaatactatagtaaccaaaacag

SEQ ID NO: 222204 - DNA, 122 bp, Homo sapiens
ctcctccgagccgcgggcctgaggcacactccttggagtgaggtgtgccctacttgctctcgttcacgagcatctgccggttcctggtgatgcagtgagggatctaccccactctgggggct

SEQ ID NO: 222205 - DNA, 122 bp, Homo sapiens
tccaaaacgggcctttgccaagtctgtgccagaagagggctgctctttgtaaggctctgccgtactccaggagctgggattgacctggccacaaataaaacaataacgcaagaagctgctgt

SEQ ID NO: 222206 - DNA, 122 bp, Homo sapiens
cctgtgtgaagagacggtgtaaacaggacaagagtagaacattcggttaaggggcaggcacggaggatgggtcagaggccagtgtctggaagactggcctagctaccttgtgtgggcagggg

SEQ ID NO: 222207 - DNA, 122 bp, Homo sapiens
gagtcaggagtaaaatggtcactacatagaaactggtatttactgggaacccatgaatctcgcttcatattctttaaccacttttccagtctttctttgtcatgtagaggaaatctggaatt

SEQ ID NO: 222208 - DNA, 122 bp, Homo sapiens
gtgcgccttgatgggagcagaaaggcccctaggaaccttggaggcctcggaggaactacccgcggagatccgctcccagaaaggttccgggaccacgcggcgaggagcacgtgaacggcgca

SEQ ID NO: 222209 - DNA, 122 bp, Homo sapiens
ttactgaagttagtaattcatattaatgcaaaataaaaggagattagtgaatcactgctacgtctgtcttgtttggcctgacaagaaaagtatcatagaagagaaggtgtgttatgggcatt

SEQ ID NO: 222210 - DNA, 122 bp, Homo sapiens
agcacagaggaggggacgggccggcggcggcctgtgagccgcagtgattttgacgttttccgctgctgcgtctccggcgggcaggggccgggctgcgctgggtgggccagctcgccccgcgc

SEQ ID NO: 222211 - DNA, 122 bp, Homo sapiens
aacatcatcaccatcaatatttcctcctgccctgtcaataaacactgattcagtaaaaaccgtattgtaccacgtgcgatggctcatacctgtaatcccagcactttgggaggctgaggcag

SEQ ID NO: 222212 - DNA, 122 bp, Homo sapiens
tgctgcctgctggcctcctgggtttacggtgtcactgcggccagggctgggggaacaggacgtctagaagacggtgtgaggtgatggacgaagctggaaactaggatgcctgggttcccggg

SEQ ID NO: 222213 - DNA, 122 bp, Homo sapiens
ttgggggtactgcaggataatcaggagggccgtggggagtcaagaggtgacccgggatgccggtggtggggaaagaaaagaggagcctctggaagcttggaggcaaaattgcgcttgggttc

SEQ ID NO: 222214 - DNA, 122 bp, Homo sapiens
ggcttcataaatctgttgttcaaagagtggtggattatcattgaggtcggtaacgtccaccgtgacaatcacatcactgctcagcgtgggcataccaccatcaactgccctcacaaaaatcg

SEQ ID NO: 222215 - DNA, 122 bp, Homo sapiens
cgctcggccgcagtagtggggcccgggcgggcgcagggccgggctacggggaccggcaggcgcgcgaagggcccggggcgccgggaggactcgggttcacagtcgctcccgctccggaaagt

SEQ ID NO: 222216 - DNA, 122 bp, Homo sapiens
agccgggggcgggcggtagcctgcaggcgtaattggcatgcacgccgttgtagctgagaccgcttaataaagcattacatatctcaccgcttccatatttcattacctcacgcggagcctgt

SEQ ID NO: 222217 - DNA, 122 bp, Homo sapiens
cagtcgggacagaggagacaagatggcgctgcgggcgatgcgggggattgtcaacggggccgcacccgagctacccgtgcccaccggtgggccggcggtgggagctcgggagcaggcgctgg

SEQ ID NO: 222218 - DNA, 122 bp, Homo sapiens
caagtggggggcctggggggtgggggaccaagaggccagaggggaggtgcccttaaatagcgcaacctcagctggagcctgtgcccatccactgaaggcccctccaccttcctcctgaagct

SEQ ID NO: 222219 - DNA, 122 bp, Homo sapiens
gggcgggggctctcgggaatcgctggatgtcttcttccttggccagcttagattctcagtcgcctcttctgcctcctccatccctcttggctcttacctggcgccctttcgcctcctcttct

SEQ ID NO: 222220 - DNA, 122 bp, Homo sapiens
gccgtggggcaaggggaaaagagcagttctcctttcttactcccaattctttaggttgggcgaaaggaggactttctatgaaaggtcccagaagtgggctgagtggcagcctgtgcagacaa

SEQ ID NO: 222221 - DNA, 122 bp, Homo sapiens
tgcctcggtgcagtttgccaacatggacccgctgctggaccacatcaacagccatgctgccgagctcggtgtctcggtgcagtatgccacgctgggcgactacttccgtgccctgcacgctc

SEQ ID NO: 222222 - DNA, 122 bp, Homo sapiens
ccctacgtaaacacgcagtttcccgagctcgacaatcggctagccactcctgatagcgttcggcgctcgcctctcggcccttgctcctgcgtactacggcttcttccagtcacctcggcccg

SEQ ID NO: 222223 - DNA, 122 bp, Homo sapiens
ctgggggaggttttacaaaatacccgtgctccacccaagacaatgaaatcagactccctgcgagcggggccgaacatcagcatttttgaggacgctccctgtggctgtgcatcggtgatctt

SEQ ID NO: 222224 - DNA, 122 bp, Homo sapiens
tctgtgggctcagagtttctaaaccaaccgtctattggatgcccagagaaggaaggaaagcgagggccctggcttgctgattacaaaccatctccatggtcacaggttgctgggtgctcctt

SEQ ID NO: 222225 - DNA, 122 bp, Homo sapiens
tgtctctctagtcaataaataagtgggaaataaagtatttgcaagaaaatagaatgcagtcgaaaggtaaattgtggacttaaaagcccctaagagactggcgcagacttggaaatgtttcc

SEQ ID NO: 222226 - DNA, 122 bp, Homo sapiens
taagtggaaaaggggggagatgaacatgaacagaccaaccagccaacaaactggggatgtcgtcattcttctcagatcctgcgaaggctgtagcctctgctcagcactgctgcccgtcctgc

SEQ ID NO: 222227 - DNA, 122 bp, Homo sapiens
ccaaaagacttagagtctggcattgcatttaaataacatttgaaatcaaatgtgtgcatgcgtaaaaggcttacaaaggttagtagttgaatacagatgcaaacactgcagagagttaagaa

SEQ ID NO: 222228 - DNA, 122 bp, Homo sapiens
agtgtggtcctcgggaaagctcttctgctcaccgcaagttggctggtttccaaagctgtgcgtgccagcttggatctcctggggctgatataccacattctcccctcctcccatctctatcc

SEQ ID NO: 222229 - DNA, 122 bp, Homo sapiens
ggggccgggcctcggcgtccgggaggggctgagacccgccgcgccacctcccttcaacttcgggtgggcgcgaagaaaacacaacgttgatctccacgttccattggatcgctacatatctt

SEQ ID NO: 222230 - DNA, 122 bp, Homo sapiens
gaaacctttgttgccagcggcgcctctgtttgagttttgctactgcccgctgggctcattcggcacacttggcccggcagcctgcattggctcaccctaccaacctcacaaaatttcatgag

SEQ ID NO: 222231 - DNA, 122 bp, Homo sapiens
agagactccaaatgctgcagctgtgacaccccacagtgctctgagtaaccaaggcagtggcggcggggtgacagaggctgttctttctgtcactgggctccaaggggcaggagcagcggggt

SEQ ID NO: 222232 - DNA, 122 bp, Homo sapiens
aggaaggatagcagggcgagggggagaacgtgtctgtctttctttgcttcctataaacgccgtagagtggaaactgcacctttgccacaacttctgctgcccagcacttaaggtagagattt

SEQ ID NO: 222233 - DNA, 122 bp, Homo sapiens
acttgtgggccctttatgatgtagcctagagctgtgcagtgtacaacctgtgcagctgtacgtgatctacatggtggccctggagaagccccagctctggaatatgtctcccaccctaagga

SEQ ID NO: 222234 - DNA, 122 bp, Homo sapiens
cacgcggccacttgccatctgctgcagccgaggcacatccaccgccgtgagccacgacagcgactgcaggtccccgggaaggtcatcatcgctggtggtggctagaagcctgcaaagaggaa

SEQ ID NO: 222235 - DNA, 122 bp, Homo sapiens
tggccctgtactcctgaaagtggtttgtaaatggccaattaaaaagatgaaaggatgagacgtaattatggtaatcaggaaattctcaggatgggaatgtcatccaatcaattgtattataa

SEQ ID NO: 222236 - DNA, 122 bp, Homo sapiens
cccggcctcagactactataaattgcgaaatgacaaacctgctttgggtcccagtctctgcgtgcccgagtgcgcacccgcgattcgagcagcttaagccctactccctcctccttcccaaa

SEQ ID NO: 222237 - DNA, 122 bp, Homo sapiens
acataacatttgccattttaaccattttaaagtataaaattcagtggcattaagtgctttcgcagtgttgtgcaaccatcaccactatcaaggtccagaactttttgatgactcaaatggaa

SEQ ID NO: 222238 - DNA, 122 bp, Homo sapiens
ggactcggtgactatttttgaagacagggctgttccctctccagtcacgggattgtttttcggggggttggctttgcctgaaattacattgcacactatcaccccagtcctctcatttggag

SEQ ID NO: 222239 - DNA, 122 bp, Homo sapiens
agtctgaatgcatgcaaatcaattcatgctatgctagtagctgtcttcccttgattttcccggctgggaattcctctctgcctctctgcttttcctcctcctttctttgaaaacagcttgaa

SEQ ID NO: 222240 - DNA, 122 bp, Homo sapiens
gcgtcctttcccgctggtcactgggtcctctcgggctgtcctgccggtggtgtcctttcccgctggtcactgggtcctcctgggctgccccgccggtggcgtcctttcctgttggtcactgg

SEQ ID NO: 222241 - DNA, 122 bp, Homo sapiens
catcaccctccggcccgcactcctccgatcaggactccaacaggaagagtggaggaagggcgggacctgtgatgtcataagggcacctgtgatgcaggcaccaggacagcttccagcatatg

SEQ ID NO: 222242 - DNA, 122 bp, Homo sapiens
gctgaaaatgttggacactcctgagaaggcgcctgcagccagagagcagagctgggtgagcggggtagacgcaccaccgctgccacgcccggtcctccctcgcccgcccgtcgcccgggata

SEQ ID NO: 222243 - DNA, 122 bp, Homo sapiens
aacagagcgagactccatctcaaacaaacaacaacaacaacaaaactttgctaggctgggcgccgtggctcattcctataatagcagcactttgggaggtcaaggcaggtggatcacttgag

SEQ ID NO: 222244 - DNA, 122 bp, Homo sapiens
ccagcgtcagcggccagcccgcctcagctccgccgccgccaccgtcgctgctgctgctgccgccgcgaccgctccacttctacagacttgattcttcgacagtctcgcacggcgcctgcgcg

SEQ ID NO: 222245 - DNA, 122 bp, Homo sapiens
cgcctcctcctcctcttttcctgagctctgccgccacgcccctcacctgcccgggctccccgttgccccctcacctgtctccgccctgtgccgcgcctcacctgcttgggctccccattacc

SEQ ID NO: 222246 - DNA, 122 bp, Homo sapiens
cgctttggtttctcccacccggcagtcatggggacgctggatgagcccatttctgaagtgcggaggggccgggcttcttaggctgtgggcggagcctgggcctgggagaggaacagggccct

SEQ ID NO: 222247 - DNA, 122 bp, Homo sapiens
ctagtgcagccatgcggaggtggatggacagatggcatgtacttatacttattaaggttacgactcatggttagagagctccagctagcttagggatgattagaattctcctggtgagtttg

SEQ ID NO: 222248 - DNA, 122 bp, Homo sapiens
gaatctggaccactggccagtgcaagtctccatttttactggcataatcttaaactcattcgtgagggttgcccccaggaaaaagtcgatgatctcagcctccttgatgggcagggagagga

SEQ ID NO: 222249 - DNA, 122 bp, Homo sapiens
cacctggccgagagcggccgaggcgcgaggccggtgtcattagtggtaatggatggccggcgcgggcccagataagacgtccttccacatggtcagccccattaggctgttctcgtctcgcc

SEQ ID NO: 222250 - DNA, 122 bp, Homo sapiens
gtaactaatggtaacctttttaatagagtatgtgaaaggtagtggctgatgaatccttaacgttcatagggtctttttgctgttacggttgtatatagaggtctgaaggatttttaaaatga

SEQ ID NO: 222251 - DNA, 122 bp, Homo sapiens
tggtcccacagacggcttccgggagtgatgcgtccccacgagcatcctcctcttccttagcgacccccggactgcagagcttcaagaccagcgaactgtttcccaagaaataaaattgtaaa

SEQ ID NO: 222252 - DNA, 122 bp, Homo sapiens
tgcctctagtcataaggcagatgaatctacaaaaacccaaactgtagaaaaacgatttggcgttgtcctgtcctggtgatgggatcctaatagcatcttcaagcagaaataaccacacagag

SEQ ID NO: 222253 - DNA, 122 bp, Homo sapiens
aaaattagctgtgtgtggtagcacatgcctgtagtcccagctacttggaaggctgaggcacgagaatcacttgagtctatgacttcaaggttgcagtcatctgtgatctccactgcactgca

SEQ ID NO: 222254 - DNA, 122 bp, Homo sapiens
atcaacactggtggactgaggcctctagctatgcttgctgcttcccaggaaatctgctttcggggatcaacagtatgaatgaagtgtacttcctgaaatgagcttcctgaaaatctgccccg

SEQ ID NO: 222255 - DNA, 122 bp, Homo sapiens
ctcgcgctccgaggcatgtgccggccggcatgcatcctgccagggaatctgcgtctctgtcggtgacatactccgtttcctgccacagccctggtatgccccaggagtaattactaacagag

SEQ ID NO: 222256 - DNA, 122 bp, Homo sapiens
ggggctagggccagggccccggcacggaatgcggcttccacgtgttgtcgtgacacccagcgtgtgcttcggtttccgcgctgccggaaccgcttcttgctgtgtctagtgcctttttacac

SEQ ID NO: 222257 - DNA, 122 bp, Homo sapiens
cccctggaggccgagacccatccgcgtcccgcgcgcgctttcctcagaggctcggccgggcgccctgcttcgaagtgggcctgaggaagcctccgcctccgccgctgctttctcccccttcc

SEQ ID NO: 222258 - DNA, 122 bp, Homo sapiens
tccacatggctcccggaatccttatttcgcgctactcaggttgcaactccggagggaagacgctgggacttccagcttgataggcggggattggaaccaatgaaagaggtctgctgtgtatg

SEQ ID NO: 222259 - DNA, 122 bp, Homo sapiens
atatctgatatttgaagacctcatttttaagccctaatctttgatattatttttataactcgagtgccgtgacaccatccctggggcaacacggtagtggggaaatggagatatgcgctatg

SEQ ID NO: 222260 - DNA, 122 bp, Homo sapiens
gagcgggtcacgacgctgccggggcggggataacccctcacgtggagcagatgaaagggccgcggcgcgacggccgggggagccgagctgagcctgcgacccacaaagccgccgccgccgcc

SEQ ID NO: 222261 - DNA, 122 bp, Homo sapiens
ggaggacttggcacccccacgcgcatcctgggcatttgcagcgtgcgccttggcgctaaacgaagccaagcggttgttggtcgagtccaaggacaccttggtagaaatggcaaagaacgagg

SEQ ID NO: 222262 - DNA, 122 bp, Homo sapiens
gcgggtggggctgccttgcagtttctggccccttcccaccctgactcagctttccttccacgagctcctatttcttgccgggcagaagccgccgcggtacccgcttcaccgggcatgctcag

SEQ ID NO: 222263 - DNA, 122 bp, Homo sapiens
gggcaagccaataaaggctgcggcgcgcggctgcgcgggactcggccttctgggcgcgcgcgacgtcagtttgagttctgtgttctccccgcccgtgtcccgcccgacccgcgcccgcgatg

SEQ ID NO: 222264 - DNA, 122 bp, Homo sapiens
agcgtgaccgcagaaggctgtggtgctcctgctggagtaggcttgtggtgggtgacagtgcgggcacaggggaaggtgtgtgggcacaggggagggtatgtggacactggtctggaagggaa

SEQ ID NO: 222265 - DNA, 122 bp, Homo sapiens
ccagtttgagctgatgtatgtgacgctgacagaactgcgaagggtgcacccttcagaagacgagatcctcgctcagtacctggtgcctgccacctgcaaggcagctgccgtccttgggatgg

SEQ ID NO: 222266 - DNA, 122 bp, Homo sapiens
aatataggtgatccctttagacataagcagcagaagaccttggtgccaggggtggaggcgcggcagaaggggtggtatgtaccttagctgtgaggggggctgctgaaggcatggaggacagt

SEQ ID NO: 222267 - DNA, 122 bp, Homo sapiens
atcccggcaggaaaggtctgtgtgaggattcaccaagagtggacgtccaggagtgtgtgacgccggagccggtgtgccccacgcatgtgtaggtgctcacaggcacacgcctgcacggaggg

SEQ ID NO: 222268 - DNA, 122 bp, Homo sapiens
tctgatacttgaattggaatttttactctctcaaagcctaccctggcaggccatgccctccgctgtcatccaggaagtatgggttccaatttctgcccaagaccagccaagccctttgggca

SEQ ID NO: 222269 - DNA, 122 bp, Homo sapiens
atggcatctgccatgtggacgggaagtgcacgctgtccgccatggggatggtgggtgtagcgatttgcagtgcgttttcctgggtggacgggaaaagacctttcctgtctgctctgccgtgg

SEQ ID NO: 222270 - DNA, 122 bp, Homo sapiens
atcactgcataattctactgaacatttaataacaaattaacactgagaacaatggttctccgctgcgacgagcaggaggaaggaaagctgaacagaaacatcttggtgcctaagccgtatgt

SEQ ID NO: 222271 - DNA, 122 bp, Homo sapiens
tctcccagtagatcccaatgtgcatgggccggtgccgccagtccaggtgaagctgacccccgggacccaggcaagatggataggattaaacccaaggctgtgcagcaaggctacctggggtc

SEQ ID NO: 222272 - DNA, 122 bp, Homo sapiens
agaccagcctagctaacatgatgaaattccgtctctactaaaaacagaaaattaaccaggcgtggtggtgcatgcctgtaatcccagctactcaggaggctgaggcagaagaactcgggagg

SEQ ID NO: 222273 - DNA, 122 bp, Homo sapiens
gtcagggccccctagttttggactccattgccgcactgcaggcgacttctcggaccccaccgttgaagcaccaggccccccgcccacccaagagcaaccgggaagcacagcacaagcccaca

SEQ ID NO: 222274 - DNA, 122 bp, Homo sapiens
ccttgcctcccgccgtctgcctctgcggccgccgcctgcggctttgttttcctcccaggtcgcattccccacacgtgattccgtgttattgcaaagagggctttggagcgcgagcgcggggc

SEQ ID NO: 222275 - DNA, 122 bp, Homo sapiens
gatctcggctcaccgcaacctccgcctcctgggttcaagcgattctcctgcctcagcctccggagtagctgggattacaagcatgtgccaccaagcccggctaactttgtatgtttagtaga

SEQ ID NO: 222276 - DNA, 122 bp, Homo sapiens
gcttgccggggccctagtatctcagatgaagtgtggctcaacactgacatggagcacatgcgtccggttgaccaggacccctctgagcgggcaggtggcatcgggcagcccgcacacacgcc

SEQ ID NO: 222277 - DNA, 122 bp, Homo sapiens
tgcactgcagaagagtgtgagtaaatagcataagaaaccctgacagtcggccaaaattaacgaacagaggtttctacttagatctatcctcacaatttgaatttttaggataaaacaatccc

SEQ ID NO: 222278 - DNA, 122 bp, Homo sapiens
ccgccgggggcgggagtttcagcaagccgctggccaggggaagagacgcgctggggtgcccgagttcagtattggaagaggcaggtaatccttccccatggagcctgctggggcctgaaaga

SEQ ID NO: 222279 - DNA, 122 bp, Homo sapiens
gggaaagtgaattcgttaactgaattagggttatgatactaaataaacgtctttctgattcgtcaggttaaaaggcatttacacagctgcctttttgcacctggcaccggaggccaggtggg

SEQ ID NO: 222280 - DNA, 122 bp, Homo sapiens
ttggactgggctcggtgaggcggagttaagccgagttgggttggagctgccgagttcggccgctcaggcttcaaagctgcggcttggggtcgttgcgcgccaagcgccccttatatacacca

SEQ ID NO: 222281 - DNA, 122 bp, Homo sapiens
ctgcgattgggcgggcgcggcgatccctttgaagtgtggctgccgatcgcggctatttgacgtgcggctcgaggaaggcgaaggtttttgtgttgctagccggggccagcggcggtggcggc

SEQ ID NO: 222282 - DNA, 122 bp, Homo sapiens
gggttaggacgggcccgggaggtggctaaggagacccctattatcctatgctggggagagcgtaggggcaccgggactggtcccgcagtcccgcctccagcacttgcccccaatggaccaga

SEQ ID NO: 222283 - DNA, 122 bp, Homo sapiens
tgcttctttcatctgttgagcctcttcttaaaaacctctgtaagttcaaaaccctccaagcggaatactgaatggcttaaagcaaaaccacataaattagatagttacagctgaggaaatgc

SEQ ID NO: 222284 - DNA, 122 bp, Homo sapiens
agaggaacagcgaggacaatttagcgcaaacacacgaagggtcggatctcaagggggcagcgctgggagaaaggttaggcttgaagcgcgcgtcgcctgcccggatcttatcccgggccccc

SEQ ID NO: 222285 - DNA, 122 bp, Homo sapiens
ggccaagacccccgagcgccgcagcatagcgtagcccagaccagtcacctcatcctttttcgccctctcaacccagcttttcccgactccgggaagaaccgggaagagaaggcggaggggag

SEQ ID NO: 222286 - DNA, 122 bp, Homo sapiens
ctttacttctcacagcagagtaaacattcatggagggagaaaacatgggcttggaagtcacggaacctgagtttgaatcttggtgctatcacttggtagctgtgtgaccttagatatgggac

SEQ ID NO: 222287 - DNA, 122 bp, Homo sapiens
gaatggcctggggaccagtccacctcgaggcagggtcaggcgccagggagtttggagacccggcagagtcaccccgcaaccgtcccgttgccttgggtcgggattcctttgctttgcagtct

SEQ ID NO: 222288 - DNA, 122 bp, Homo sapiens
cttctcaccactgatcatctcaggactgagactcccttagtgtgattcaccagccaaagacgactattcagactctgctgatagaggttcctggatgaaaattttttatctgtatgtgtcaa

SEQ ID NO: 222289 - DNA, 122 bp, Homo sapiens
ttgttttcctgggcctgcttcttcataaagggactggactaagaatactcttgaccagcccgtaagaacttggcactcgtctcagtaatctgagatagcagggtttggcgtccatagcaacc

SEQ ID NO: 222290 - DNA, 122 bp, Homo sapiens
ggatgggggcgggggccagagaaattgttcagctcctgcgcagtcagcagggaaggtaatcgggattaatctgagcactgccaaatgcagatgagtcccagccaaggagggagggcaggaag

SEQ ID NO: 222291 - DNA, 122 bp, Homo sapiens
tgccgctcaggtcagaaacggtggactggactagggggcgggggtatcagtggcagcaggcggagctggcaattgtcaggagtccttggccagagcctgacccagcccacccagctctctgg

SEQ ID NO: 222292 - DNA, 122 bp, Homo sapiens
gcagaaagacaggaggaagaacagtttgctcttcaaggcgatgagcctgaaggcgtgcaccggctgggctgtggctggggacagccgcctattaaatgcattttcattttaatcaaggtgag

SEQ ID NO: 222293 - DNA, 122 bp, Homo sapiens
cagggctggttgtgagaaatgctataacacaaacaaaacgctacaggcatatgggagaggcggaggaaagactgattccaacaatgggaccagtgaggtgttggcagagagaatatttgagc

SEQ ID NO: 222294 - DNA, 122 bp, Homo sapiens
gtcgatgggccgaggccgagactggaatgttgacctgattcccaaattcctcatggctaacggtgagggacaggaaggaggtattgcaggtcgggggtgatagggaagacccgaggacggtc

SEQ ID NO: 222295 - DNA, 122 bp, Homo sapiens
tcttcttctccttgaaccacattgtcttctctctgagttatcatggaccatccaagcagacgtggtacccacagtcttgctttaacgctacttttccaagataaggtgactcagaaaaggac

SEQ ID NO: 222296 - DNA, 122 bp, Homo sapiens
gctccttctgccgcccggccaggatcaggtggtggttgtggttcaggacgtagaccacggcgttctgcacaatccacgcctcctggatctcctgtccgatctctgcggagcgcagccagtta

SEQ ID NO: 222297 - DNA, 122 bp, Homo sapiens
ggacttgggggtgccaggcagaaagccacatctgggactctggagagaatcacacagagacgcgaaatcggagactctgggtcgaggcccccagccccacctgggcagagtctgtcctcgga

SEQ ID NO: 222298 - DNA, 122 bp, Homo sapiens
agctcactgggccaagagagacagtcgccacaggtgtgtgttgggtgggtgggcacatggcgacacagcaggatgccaggttgcggtgggcttcacccccacggggtgcaggagatgatatt

SEQ ID NO: 222299 - DNA, 122 bp, Homo sapiens
gctgccaagaagcctctgtgtagctgtgtaagaaacttcacacctgtcttccacggcagccgcaccattttgcaccctcaccggcaatgacggggagtgcccgtcgctctgcatcccagcca

SEQ ID NO: 222300 - DNA, 122 bp, Homo sapiens
tctttgtcatagacacaatttctcttctgtatgccactagttacatttctaaattctgagcggtctcagttaggcctgtatgtgtgtacatgtccaagtaaagctggaaaatgtcagtcttg

SEQ ID NO: 222301 - DNA, 122 bp, Homo sapiens
ccgaagtccatccaagcttctgcgactttcccaataacgtcctttacagcagcccaggtccgagtcacatgctacactcagtcgtcacgtcatagccatctccgtcagtctgcaactgtctc

SEQ ID NO: 222302 - DNA, 122 bp, Homo sapiens
acatgccccctgccccccacatgcacgcacccacacacaccatcaccaccagatctggggcgtgttcattcagcacacattctagggtgactactgtgtgcaaggtgcaactagtgtgagtc

SEQ ID NO: 222303 - DNA, 122 bp, Homo sapiens
cccccgcgcgtgcgggaccacctgcatctcagctgcccccgcgcctctcaagaccgcccacgtcccagctgccccctggcatctcgggatcgccgacgtcccgccatcccccgcgcgtcccc

SEQ ID NO: 222304 - DNA, 122 bp, Homo sapiens
cgcagggcccggagctttacctgcctttggaatgtgcagagcgggatcggatccggactccgggttgcgatccgctccggaaactgcgcagcaccggaagccggggggcggcggcggggcat

SEQ ID NO: 222305 - DNA, 122 bp, Homo sapiens
tactatcgcttgaaaaataccggatatttcattattatcctgtccggagtcggcaaactacggtctactatctgtcttcgtatacgtcaaaagctaagaatggtttttacatttttaaatga

SEQ ID NO: 222306 - DNA, 122 bp, Homo sapiens
gaaggtggccgcgcttctggccgctagagcggatagtggatcctagggtatggagcggctcgctccgcccatggacgcctctccatgtggggcggagctagggccgtggcttggcctagtag

SEQ ID NO: 222307 - DNA, 122 bp, Homo sapiens
acagagaccccacagtgtgtcgggtgtgagctccgccggcaagaagcggatcgaaccatccgtgcaaggccactgtaggtgcttcctgaaacgccatttacgaaggtcgtagacgcaagtgc

SEQ ID NO: 222308 - DNA, 122 bp, Homo sapiens
ttttccttcaaagtatgatatgtgggcaaagattaagttctcttaattatgacacatttccgctcttgcctctcaagtcactaaactgagatgtgctggacccctatggccaccacccattt

SEQ ID NO: 222309 - DNA, 122 bp, Homo sapiens
gagatgtgaggagcccctctgaccggccgcccagtctgggatgtgaggaatgcctctgcccggtggcgaccccgtctgggaattgaggagtgtctctgcccgaccaccaccccatctgggag

SEQ ID NO: 222310 - DNA, 122 bp, Homo sapiens
gcagcctgggaggctcaggtgctacctttgccgggtggggtttgtgaggagtgagctcttcgtccccggaggcgagcaaatctgtcggtggctcatcacagagcgctgttttggaaagcgtt

SEQ ID NO: 222311 - DNA, 122 bp, Homo sapiens
gctcaagatgcggctccccagggcgagtgctggggtcccggggcaggcgggcggctggagcgctctcgtgggcgggcgcaaggggcaggctgggcgggcgcaggcgggagcgtagcagccgc

SEQ ID NO: 222312 - DNA, 122 bp, Homo sapiens
ccgcgtgccgtagacaagcatggctgcacagcgcccgtcggggtccacccgcactcgcggcgtgtgtacattctgcacaaacccgtcctgggggcagagggggcatcagccaggcccagcat

SEQ ID NO: 222313 - DNA, 122 bp, Homo sapiens
tttcacattcctgatgaccatctgaagatagttttttctttcttagatggagtctaagatcgctcaggctggagtgcagtggcgcgatctcgggtcactgcaacctccgcttccagggttca

SEQ ID NO: 222314 - DNA, 122 bp, Homo sapiens
gtgtcggccaggcggctggatggtccaggaaagagtccggtgtcagcagagtgcgtctcccgggagccggcagagctgggcagctggggccagggccggccccagggaactagacctgcaaa

SEQ ID NO: 222315 - DNA, 122 bp, Homo sapiens
ctgtgtcctatggagatgctgaaagcgaagaggaatattactatacagaaacttcatccccggaagggcaaatcagtgctgcagatacgacttacccgtatttcagtcctcctcaggaactg

SEQ ID NO: 222316 - DNA, 122 bp, Homo sapiens
ttccatgggtaaatgctcccaccacatcagatttcgagccacgggctggcagtgcgaaaacgtggagttggttagagaagcccaggagcgcgccgtgatgcatccttctatcacccagacaa

SEQ ID NO: 222317 - DNA, 122 bp, Homo sapiens
tgtttgtggcgcctcctgctggtcactgggttcaggcagtttggagctgggtggaaggaacgggtagtatattaagtcttgggccctggaccttgttggctgtcctctccctgctgacctaa

SEQ ID NO: 222318 - DNA, 122 bp, Homo sapiens
tcgctccgtggttcttctcctaagtggtctccctgcctcctttgtactctgcatccattccggtccccactttgcactcaaagtgagcatccgggaccgtgtcactcctctgtttcaagact

SEQ ID NO: 222319 - DNA, 122 bp, Homo sapiens
ctctattgaactccccctcttctcaaactcggggccagagaacagtgaagtaggagcagccgtaagtccgggcagggtcctgtccataaaaggcttttcccgggccggctccccgccggcag

SEQ ID NO: 222320 - DNA, 122 bp, Homo sapiens
gataacatctcaggagttgcgcgaatgggctcacacatgcacactaaaaggcaaaatggccgtgtttaaccagcatatgaccctctaggcgcattcaactggaaaggtaagaatgcctcaag

SEQ ID NO: 222321 - DNA, 122 bp, Homo sapiens
gatcctgtctcaaaaaaaaaaaggctggtccaagcccatctgggatattattttcagagacgggccccatattttcaaaggaacattgataaattggaatatatcatattagagaggcttgt

SEQ ID NO: 222322 - DNA, 122 bp, Homo sapiens
tcctccttttaaggtgacctagagccatacccaaggtcacagggcgcctagcacagtgctcggcacgtggaaagagcttagtaaatttttggtgaatgaacatagtaatttaagaactagag

SEQ ID NO: 222323 - DNA, 122 bp, Homo sapiens
gggctgcggagaaccggggctgtctgtcttctcgctttgggggccgggcgccctgcccctcgcccagaaaagcctggaaatggtgtgggctattgttgggagaacccgcctcgcaacagagc

SEQ ID NO: 222324 - DNA, 122 bp, Homo sapiens
tagcagcatagttttccaagtgcgtgtacatcattcattcacaaagactgacacacaggacgtgaggcatgtggatgaaggcgagcgtgcaggcaggcgcaggggattcgtgagcccgtgtc

SEQ ID NO: 222325 - DNA, 122 bp, Homo sapiens
ctggggcccggtcacacgcagggcggggaatcagaggggtgcgttgtgaaatgagtaagtcgataatcaacaatcaatgaacaggtttagaagcgggcagaggcgggagggttcaggtcaat

SEQ ID NO: 222326 - DNA, 122 bp, Homo sapiens
tgtgaggtaaattctataaggagttgttctttcaatttggagatctgattaatgacttatcgagggtaacagaatgtggataaagggacagtagatattaactattattattattttctttg

SEQ ID NO: 222327 - DNA, 122 bp, Homo sapiens
gaatgtttataagacatttatacctatcatgtttacaaaaggcataaattcagtcttcagcggcactacaaatgcctcaatataatataatcacagtataaggaatcagaaattctctgatt

SEQ ID NO: 222328 - DNA, 122 bp, Homo sapiens
cccacccgcctcacgtctgccagctgcctcctacttccggaaataaaggtccctaccctgcgggccaaggtgacctgagcagaacggtctcccgcagcgttcaaggccttcttcccggcttg

SEQ ID NO: 222329 - DNA, 122 bp, Homo sapiens
cctgcctcggcctaccaaaatgctgcgattacaggcgtgagccaccgttcccggcctatacgttgtttattttggaaaaattaaaaattaagttttttttcattaaagatatgttatttccg

SEQ ID NO: 222330 - DNA, 122 bp, Homo sapiens
acttcaacaggatatttgcttggggttgggtgggggtggggggcgttgggttgaaggacacgtccttgcagaaccaagatgctgtctcacgttagctttgaggctctctaaagtatcctgaa

SEQ ID NO: 222331 - DNA, 122 bp, Homo sapiens
gggcgggatctgggcgcgtgcgcagcccgagacctcccggcagtcttccgagcaagatggcgccgcgggcatttcttccactgcccgtctgagggaacgctaagtagtgtgtccggcgccgt

SEQ ID NO: 222332 - DNA, 122 bp, Homo sapiens
acaatacacggatggtcagaagaaacacagcagatgttatctatttggactctaggaaagcgcttgatgaaaatgtcccatgaaattttacttgcgaaacaagttcaaattggctggaatag

SEQ ID NO: 222333 - DNA, 122 bp, Homo sapiens
ggctgcgcggcggcagcggcagaaagcgtagctgctttgctgtagtccacgcccccttgccgctccggtgacagtctctgcggaaagtcacgtttgtgatttcgggagagcacagaacggga

SEQ ID NO: 222334 - DNA, 122 bp, Homo sapiens
caggccccaaccttccctcatctctggcggccctcttgggcctctgacccagcccctccccgggccaggctcacagaagctggcttctgggactgtcctgggcccaagtgggcacctgcgcc

SEQ ID NO: 222335 - DNA, 122 bp, Homo sapiens
tcgaatatttcaccttccggtcctgcgtgggccgagaggattgccgtacgcatgtctgtacgtatgcatgtaactcacagccccttcctgcccgaacatgttggaggccttttggaagctgt

SEQ ID NO: 222336 - DNA, 122 bp, Homo sapiens
cacgcgtgtgggccgcccacgtctgacaagttaatgcaaggctttatagttaggggaaagcggttctccttgagctctttctcctagcagttccgattccgaccctgactccaacagacacc

SEQ ID NO: 222337 - DNA, 122 bp, Homo sapiens
cggagttgcagaaagtcaacagaagccgaatctctgaatttctgttcgcagcctcctaggcggggccgggaaaaaaatccagtagtctgcgctgactgggcggcgagggaccgggaggagcc

SEQ ID NO: 222338 - DNA, 122 bp, Homo sapiens
agtgaaagagaacaagtgatggatgtggtgacgtcgcgttctcccgggcggggccggaggcggtacagatgagggacacattcatggctaacgggacggctcttctcgttctgcgttccgct

SEQ ID NO: 222339 - DNA, 122 bp, Homo sapiens
gcataaacgttcgggggttggggggctccagaacgggggcaccaggtgctcaggaagacccggcggagccttcgcctcccaggcccaggggctgtcctctttgtcagccgggggtcatcaca

SEQ ID NO: 222340 - DNA, 122 bp, Homo sapiens
gcggattcgtcaggtgggtgcacaaagtgcgggaggggcgccggcaccccattgtcctcgcgtcccccaagggcggggacctcaaccccaatgcggcggctcccctaggagcggggccgaca

SEQ ID NO: 222341 - DNA, 122 bp, Homo sapiens
ggcgcgcagaaaactagttcccactgtcaccaccagtgaaaacacccctcgtaactttgacgagaagggctcccccgctgaaagcccaactgcagagcgcccggagcgcgctgtgagtccgc

SEQ ID NO: 222342 - DNA, 122 bp, Homo sapiens
aggctgcgtctaaagcacatgccatctgcccttaaaccttagggccagcacttgccgttccgcggcctggcctgcttgcttgaaaatatcatcatgcacctacagcagcaagtgctgccaag

SEQ ID NO: 222343 - DNA, 122 bp, Homo sapiens
ctgctctctcaaaaactccaagactttgccctaactctggaccaccggtttgagggagaacgcaccctcttcacagtcataccccccaacactttccagatgagggagaagtagaactgctt

SEQ ID NO: 222344 - DNA, 122 bp, Homo sapiens
gcgctagtggtcgccatgcactttgagtgcggggacttgttggatactctggagaatggccgtggggaggcgctaggaggcggcgggggctccctgggcccgggggccgggccgccgcctct

SEQ ID NO: 222345 - DNA, 122 bp, Homo sapiens
ttgcatcccattagtatcaagggatcccacaaatgctaatatggcatagtgataattacacggctcacagttctgaggctaggattagaaatggcaaccaggttgacggttacagattgtgg

SEQ ID NO: 222346 - DNA, 122 bp, Homo sapiens
gttgaagaggactcacaaatcgtgcactctcaactaagccctttgtaagactccggacctcgggctagcacaggagagaggtcgctgcaattaaaatacaaagtatgtgcatgtttttaagt

SEQ ID NO: 222347 - DNA, 122 bp, Homo sapiens
gaagcaactcactctacaccctccatggttccagccggaaaaagaggaagttggcgcatgcgtactgtccacttaaagacttcgcgagagaagccccacgactcataggtgtcttagaataa

SEQ ID NO: 222348 - DNA, 122 bp, Homo sapiens
tgccctttgcaaatctaaacccgcgttggggatcccggataattccgggccttgcatgggcgcggctaacaagagtgcccaccagggaactcgcctcccagatcccggctccggatgccgcc

SEQ ID NO: 222349 - DNA, 122 bp, Homo sapiens
cgcgtccctgtgcaaggtcccaaacctgtgtggggctcagcttgcttttcaggaagggggcgggcaggtgagcagccgactcccttagcgccttcggccccggagggactggaggcctggag

SEQ ID NO: 222350 - DNA, 122 bp, Homo sapiens
atatgaccgcgccgagaataattggccctccggctcgctaatatgaaagagcggggccgccgaagcctgggacctggggttgccctgccggtaggcccccagtccacacctgaaacttcagc

SEQ ID NO: 222351 - DNA, 122 bp, Homo sapiens
gcagcggcgctcctccagccaaagagggaggcactgacgaaacccgtgcagtcaaattctcgcggcctgtggtgggttgaatcatgtactcctaaaagatatgttcattgggaggccaaggc

SEQ ID NO: 222352 - DNA, 122 bp, Homo sapiens
tttattggattttttaaaaaatcacttgcacttaaggcaaaaacttcgcacatagacatccggcagagaacccctctttcatttaaatacaaaccctaacacattttggcatcatcagataa

SEQ ID NO: 222353 - DNA, 122 bp, Homo sapiens
gtattccaagtcttaactgggtaatttattacaatatgtattctctctagaggtagactgcgctatgacttgtagcatggagagatggacttgaaaattatctgaaagcaatagttatgttt

SEQ ID NO: 222354 - DNA, 122 bp, Homo sapiens
tgatctctccttgtacgtcacggccaaagccggaggtgctgtctggtctgagcaggggcacgggccattgacccggggctgcagagatccagatgctggttaaggaaaagggaaaataactg

SEQ ID NO: 222355 - DNA, 122 bp, Homo sapiens
ccgggacccgcgcagctccccgaggccaggacagccagcagggaagtgccaggcctgaaacgccgccggaggaatggtacccagaagctcgggcgctggagggcggctgtggagtgaggggc

SEQ ID NO: 222356 - DNA, 122 bp, Homo sapiens
taattgggaaaagaaggcttaaggagtcgggatgcagttgggatgaattgcaggcccacacgagaatatcattggtaattaggtcacctctgcttaagtatccttctccttactttatcccc

SEQ ID NO: 222357 - DNA, 122 bp, Homo sapiens
gtgagtgcgctgtgcctgcggggccggagaaaagtcacctgatcagtctcgcttgcagctcgcactagccggggggcgacatgggtgttggggggtagggctgatgagggtccgagaaggga

SEQ ID NO: 222358 - DNA, 122 bp, Homo sapiens
gagaggagggacgccatccgccagccgtgtcgtccgaccccgcgggcccctcccgcgccacgtcccgcccctgacccccgccccccggcaagggtccccgcccgcggccacggcggtcccac

SEQ ID NO: 222359 - DNA, 122 bp, Homo sapiens
cagaggcgtggaggcggtgccggcagtggaggccgcagacaccttgggcctggccagcagcgcgcgccacaccgccctgccgccgtccccatgcgcgccccgacgacggcgcttggctccca

SEQ ID NO: 222360 - DNA, 122 bp, Homo sapiens
ccgcatctcatccgtatcacgcccttgaagcaccagaacgtgcagctgccccgcgagggccgggaggaccagggcctgaccaaggactatggcaactcgcccctgcaccgcttcaagaagcc

SEQ ID NO: 222361 - DNA, 122 bp, Homo sapiens
aagtgtccttactggtattgtagtcatactcccaagctctcctgctgtttctaatctgtgcgcacagccgtgaaaaaactggactgacatttacaggcacagcagggagacacttgactagg

SEQ ID NO: 222362 - DNA, 122 bp, Homo sapiens
aatttggtgtggaaactcggtgtctgggtgatgtgtgagtgtgcgaagcccttccggaggcgaggcccggagagaggagggagtgattcataaactcagagccggcgtgccagggtctgtga

SEQ ID NO: 222363 - DNA, 122 bp, Homo sapiens
gaaacctggagggtacttggagtttgggttcgcatcccctctccagctgcttagtggtcgcgtgactttggacgagtaatttaacttccctgagcattgctttccccacctgtaagatgaga

SEQ ID NO: 222364 - DNA, 122 bp, Homo sapiens
taattataaattacatatctcacttcagtgcacacaagttcctgatcctcatcccaacttcggttggcttttgactattttgttaatttttttccctgtgaatttgttgggccttttggagg

SEQ ID NO: 222365 - DNA, 122 bp, Homo sapiens
agagtgaggttaggggacttgcccagggttacacagttagcaagctgcagaagtgggattcgaacctgggtcctcccatcaacccatgctctatccctactgagttaacaagccacatctct

SEQ ID NO: 222366 - DNA, 122 bp, Homo sapiens
accacagaatactcaagcaaggaagatgggcacacattacaagtgcaaagtattccatcacgtacttctgaaaaaaagcgcaaagtaaaacatgtaaagcagatgatttcacacattcagga

SEQ ID NO: 222367 - DNA, 122 bp, Homo sapiens
tgtcttcacagagactaatagacaagtcacgagttacctgtgtcaaatgggttcccggttcggaaagccttttcctagtagcccactcgagtgggaacatgtacttatataatgtggagcac

SEQ ID NO: 222368 - DNA, 122 bp, Homo sapiens
ggagtgcagtggctcactgcaacctccaccttccgggtttaagccattctcctgtctcagcgtcccaagttgctgggactgcaggagcacgccacaatgcctggctaattttttttatattt

SEQ ID NO: 222369 - DNA, 122 bp, Homo sapiens
cacgcaagctgcggccaggcttgcatgaacaggcggggccaggcagccagtatgggggtgcggcgagggtcctgggccactcaccatcccgtcgatcaggcccatccccagcccggaggggc

SEQ ID NO: 222370 - DNA, 122 bp, Homo sapiens
ctgctcggaggctaccatgggacagtacccgggcagccacagccctccatgccctccttccgccccgcagtcccagcatgaagccacagttccccatgagcccagggcaagctcgtcagaga

SEQ ID NO: 222371 - DNA, 122 bp, Homo sapiens
cagctccgcgcggcgggccctgcggcctccttcagcacctgggacccccgggaccccgggcgtgtgagggccgagcccccccgtgaggcccctggctccgcaccagcccagcaacaccccct

SEQ ID NO: 222372 - DNA, 122 bp, Homo sapiens
tcacccgaggttggccggctaagatcaaacccaggtcccgtgcctctgagtctgggagcccggcacccagagctgagaacacctttttttggtctgtcgggaggctggatgttctcagggcc

SEQ ID NO: 222373 - DNA, 122 bp, Homo sapiens
ctacagagcaagactcggtctcaaaaaaataggaaagagaaagaaaagaaaagaaaagaacgagggctgggctgtgactgtatgtggctgataaattgctatcgacctcatctgttgagtgt

SEQ ID NO: 222374 - DNA, 122 bp, Homo sapiens
ctctaacgccggcacccgccccgcgcgtccctcgcccccgctgccccgccccctgcagggcgtggccacggcccgaggggcggggaaacacccatatttggccttatatgggcagccgcgtc

SEQ ID NO: 222375 - DNA, 122 bp, Homo sapiens
tgagtatatttccaagtacttattctcgtgtggcataacatttgtagttacacgaagtggcggtgttgagactgccttggttcaaatcctggcttcagttactgctgcagtgtgacctgaag

SEQ ID NO: 222376 - DNA, 122 bp, Homo sapiens
ggccccccaacccgccctctctcctcagcccccgggataccgcccatcccaccccttactcggacccacagcctcatggccatgtccctgccaggaagtagacggacctctgctggatcacg

SEQ ID NO: 222377 - DNA, 122 bp, Homo sapiens
tgatcctactcccaggagtgtgctctaagttgaaagtagatgccccaccccctgagtcagcgccggcaggacttctcaccaagcccttctcccccttttccgctccctgttcctggttccta

SEQ ID NO: 222378 - DNA, 122 bp, Homo sapiens
tggctgtgggttagcagcaccctgagcggagcggaagagctgcccgccgccgcgtaaccccgaggccgagactcctggcctggcctccttgggcccacgacgcctgccccgcggagcggacc

SEQ ID NO: 222379 - DNA, 122 bp, Homo sapiens
tggagaaatgggcaagtagtagagaatgacaacatggcaggcagcggtgggcgcacctcgcgggctccgcgaaaggaagggttccatttgatttatcacagttatttacctttgatgtcaga

SEQ ID NO: 222380 - DNA, 122 bp, Homo sapiens
gcacacaggcaagtgtcaggttgaaagtcgaggccctaggaattgcctggagtcattttacgtgaatgggactctaccctaatgagacccattttatccaagtgccattttgcatgccaccc

SEQ ID NO: 222381 - DNA, 122 bp, Homo sapiens
gggtgttctttcaagtgaaagtcttgctttgtgtatcacatcgattcttactgatgtctgcgttctccttccctcaactcttcgtcaagcaggactggggtcaggggttggcatctctgggg

SEQ ID NO: 222382 - DNA, 122 bp, Homo sapiens
agcgccactgtgtgttaggataagcaaaaacagccaaaaatcctagacacccttgttttccggttttctctgctggaagagacagcatccaagaatcaaggaatatcccggagggaggagag

SEQ ID NO: 222383 - DNA, 122 bp, Homo sapiens
aggaccccacaatgcctccttctgccacctctgccctcccaggttcttcaacccctggcccggccaggatgcctgtttcccctgtggctcagaggccacccagccagagaagggcaaggaca

SEQ ID NO: 222384 - DNA, 122 bp, Homo sapiens
aacaaacctgaacaacaatgcattcacttctcctcccagctgaggccatcagtcaagctacgttacaacccgggtcaagggaaaatgcacttaaccagtgagaatcccatatccaggatggc

SEQ ID NO: 222385 - DNA, 122 bp, Homo sapiens
gttctgcgtccctgcttttagttgtcagaggtcagacagtaccctaatttctctgggcttcgactgccccttcctatgctggaatagcaacatcccagagtggaaaaaggagccagcccagc

SEQ ID NO: 222386 - DNA, 122 bp, Homo sapiens
cgcggaggagagccgggccgcaggtagcacagagcggggaggcctgactgccactgcccgcggctccgcagactcaacttctgcgttccacactcgcgcagggaagccgcccccgggtccta

SEQ ID NO: 222387 - DNA, 122 bp, Homo sapiens
ggcggcctcggtgggtcgctgctcagtgcctgagggcccctttccagggcatctggtggacgtgaggggcaccgggagcctgtctcagaactatcagtacgaggtgtgcctggcaggaggct

SEQ ID NO: 222388 - DNA, 122 bp, Homo sapiens
ctatcaaaatgtcacttctttggccttcacttttattatgtaaaagtactcagatcaggccgaatacaattttattctctttatccaatgccggaggctattgtcgaagccacggcctgcca

SEQ ID NO: 222389 - DNA, 122 bp, Homo sapiens
ccatgtttttcttcagcttgatgcccagcgtcttgctgaagctgcccagcttgttggccacggagtcggcgcgcgtcttgtccttctccttgcgctgcttctccttctccttgtccttgccg

SEQ ID NO: 222390 - DNA, 122 bp, Homo sapiens
agcacagtgcctcgctttggagatgctgaatgcatttttgttgacaataaattgtttatgcggctgcctgggctgtgaggtgtacacagaatttacctgatacagcttcatcattagttctc

SEQ ID NO: 222391 - DNA, 122 bp, Homo sapiens
tttacgactgccaaacccggggctgcaagacaggacagcctcgggcagacacagaacctgcgtgggggtggcacagcaacaggtgctggaggaccctgagaccacagctctgtttccagatg

SEQ ID NO: 222392 - DNA, 122 bp, Homo sapiens
ccgcctggtggcaccttcgcgcacacggtcccgacggagcgggaggcgtcaaccccaagccggcagccactcctgccgggagcccctacagctgcttttaaatcgtaattgttatcaaatag

SEQ ID NO: 222393 - DNA, 122 bp, Homo sapiens
ccccgtgcgccaagcgcagccaccgccgcccacaaaaggatttttcaaatgtttttttcgcggggaaagaagtttgaagactactgcaataaacaacaacagagaaaaaggaagaggaaaga

SEQ ID NO: 222394 - DNA, 122 bp, Homo sapiens
gggcggcggctgtctctgggggcctcctcgctccggttggtcggtcggtcggtgcctctgcgcctctgccagcgggctctgcatttgcatccgtcccggcttctctccgatcactcaggctt

SEQ ID NO: 222395 - DNA, 122 bp, Homo sapiens
gcctgctatgacatgcttatgagcagtgggcagcggcgccagtgggagcgcgcccagagtcgtcgggccttccaggtgtgccacccggggtaagggatgggaaactgctccacacatgcacc

SEQ ID NO: 222396 - DNA, 122 bp, Homo sapiens
ggggcgggacttccggcatttggatgggacgtaatttgggagcgacggttccgtccacgccggctctagggagggggcggtgttccgtggccgcctccctggcggcgctggggaaatgagca

SEQ ID NO: 222397 - DNA, 122 bp, Homo sapiens
ccagaactttctggaaggcaattagcaaactatctccaaagtcttgctagcatgcagggacggtgtttctaaaaggagaaattggattcacttaaataccgccaagtaggggattggtcgag

SEQ ID NO: 222398 - DNA, 122 bp, Homo sapiens
atttctggctctcttaaaaacaaaagaactggcatcatgaactgacgctcccatgtgacacgacaaccagctgcagccaaagagccagctgccccctgatagagcatgtcctgctcctccag

SEQ ID NO: 222399 - DNA, 122 bp, Homo sapiens
aagtgtggggtacagggaggtcatcatccctaagttgttacccaggctacactctgttatcgcaggggccacacatctggggcaatacctgtttaggagccccggggaccagtcaggggtat

SEQ ID NO: 222400 - DNA, 122 bp, Homo sapiens
gagcggcacgctctcggccggtggcatgctctcggccagcagcaactggaagacggtgagcgccagcagcacggtgacgcccagcgacaccttctcgcctgagtcggcaggcaggtggaagg

SEQ ID NO: 222401 - DNA, 122 bp, Homo sapiens
cttcagacaattgggaggtgagggccgattgccttacacggtgagacaagcggcctgactcgtgactatttttttggacaaatcaggcagccactgactcccttcattatggcctcagcttt

SEQ ID NO: 222402 - DNA, 122 bp, Homo sapiens
tggagctcttgagctcgcccccagcctgtgagctctggatggccaggtacacggagtactcgataatcttgccggaggtcacagagggtggctcccaggtgaggtgagcaccatccggactc

SEQ ID NO: 222403 - DNA, 122 bp, Homo sapiens
tgccacttctatggagcttcttgcctgtgtagagaatctcatggaaaacctgggtactaacgttctttcatagtaagagcatgggtttcatttttgagcacacttttgaatgttcttcatac

SEQ ID NO: 222404 - DNA, 122 bp, Homo sapiens
agggaatttaccctctatctgggccaaatgtgtcattttctaggtgagaaaaatgaggctcggagagcttaaaaggctttctaaaggccacagagccccaggtttaaaggaaaagtgaaagc

SEQ ID NO: 222405 - DNA, 122 bp, Homo sapiens
gacacatatacagctaccccaaactaggcctgagggaatttggcttggacgtagagcgcccgtggcaaggggactgtaggtgcaagggcaaggcggtccggcatcacgggcccggctcacct

SEQ ID NO: 222406 - DNA, 122 bp, Homo sapiens
ctggtgcccgcagggcagagttaaagatgtccacactgaggcacaggttattgcccagatcggtctgtccagtagagggcaggagtgtgcagggacccaaattttgactaaaaacaacgtcc

SEQ ID NO: 222407 - DNA, 122 bp, Homo sapiens
ccctgggcgcgtgcgcactgagcccgcctcgcccgggcaggtgcacaaaggtgagtgccccgcaggctggctctgtcctctcgaagccctctaaggtcggacagctggagacagatcctcat

SEQ ID NO: 222408 - DNA, 122 bp, Homo sapiens
ggtaagcacgctagcctgcctgggaaaccctttttttccagaaaactgcaacccacagatcggaagatcccactcgggagcccaggccaccagggccttgagtctcaatggaagcatgcaga

SEQ ID NO: 222409 - DNA, 122 bp, Homo sapiens
gtccctcccggagccgcaagaacacgacgtggttaggaagccaggtctgccacagctcgccgtcgcccaccggtccctcggcggccgccatcttggcccaactgctcccctcactccagttg

SEQ ID NO: 222410 - DNA, 122 bp, Homo sapiens
gccggggcgggggcggcggggatgttttgacatctcgtcaaagaaaggaacttgatgcttcgaaagtgcttttcacagccgggctgtgtctgctccagagctgatttatacgcagaatctgc

SEQ ID NO: 222411 - DNA, 122 bp, Homo sapiens
aggccacagggtcaaacaacaatcaggagaaggaagcctgcagaccaagggcctggctcccggttcaggaaatcaaggcacagaaagggtaagtcatctagctagaagtggagcttcatcaa

SEQ ID NO: 222412 - DNA, 122 bp, Homo sapiens
cgttcaggatggccaaaccgccgtctgcgctgttttctcgccagggctcaggcctgggaacggaagaggttaaaatccagtggcttgtgtttcagctttggttacgtggcagaaaccaactg

SEQ ID NO: 222413 - DNA, 122 bp, Homo sapiens
ctcgcctgctgccgcgggggcgggaatccgcaagccagcctgggagaagggacagaacagcggctgatccttccctgggctagggaaggaaaataaactgtgctggcctcggagtgggggat

SEQ ID NO: 222414 - DNA, 122 bp, Homo sapiens
agccaggcccgccgcacttaggacttgaagtttcaatgctccctgcaaggtggggccatccgggcagcggcgaaatacaggttttgggcgggggcagccacagcacccaaccctcttgcaaa

SEQ ID NO: 222415 - DNA, 122 bp, Homo sapiens
cagccagcgccactccagatatgtgaaggaagagccttccatgatgccaggccccaccctcggatcccccagctagcatcccagacctggtggccacaggcccccaccacgtggtcccgatc

SEQ ID NO: 222416 - DNA, 122 bp, Homo sapiens
acacacatggccccccatcccccatccagaagcctgtgcatttaagcacacgtggtcccccgtctagaagcctgtgcatttaagcacacgtggtccccggtccagaagcctctgcatttaag

SEQ ID NO: 222417 - DNA, 122 bp, Homo sapiens
gcgcgtcaacgaaagcgatggacgtctagaccaatcgtcagcaaaagaccctttggagcccgcgccccctccccctacgtcctccaatccgaaaacgcaaccgggtgagggagcgcttccgc

SEQ ID NO: 222418 - DNA, 122 bp, Homo sapiens
ctgtgggggtgagctggcggggcctccgggctgcttttaaggccactgcccgccccgtcccgcctgcctgtgctgtgcctgcctcctagagctcattccctacgccccgactctgtcctgga

SEQ ID NO: 222419 - DNA, 122 bp, Homo sapiens
gcgcaggatcctcacacgcaggggccgggctctgttagtgcgatccagagaggccgtgggcgtcggtgagctccttcagacccgcaggagccggagcccggcgttgaaggggccgtgggaag

SEQ ID NO: 222420 - DNA, 122 bp, Homo sapiens
tcagaggtaatgctgatgaaacctccggcaggtcaggacaacaagggcagacccaagccacggggggtgaggtggggggagagtgggccagaactctgctctgcagagctgtggtttgtcct

SEQ ID NO: 222421 - DNA, 122 bp, Homo sapiens
gattcagtctgcttttagtttgccatctcagactacatctggaattttatagcagttgggcggggtgggggaggttttcagataatagtattttgtttcagagaaaacttttcaggaatgtg

SEQ ID NO: 222422 - DNA, 122 bp, Homo sapiens
ccttccatccaattgcttgcgactgtcttacccgatctttccctttccttttttcccacccgttagccctccggaaagagccgaacacacaagagcttcccagtcttcctccgcccccttgc

SEQ ID NO: 222423 - DNA, 122 bp, Homo sapiens
gattagaaagcactgaccgcgcacttacattgggacgcccaggcagaggcaagactcgcgcgctcctaagccgaggcaggtcagcctaggcgcctggctgctggaagagtccattagggatg

SEQ ID NO: 222424 - DNA, 122 bp, Homo sapiens
tggccggttgatgtatggacaggaagatgtacccaaggatgtcctggagtatgttgtattcgaaaagcagttgacaaacccctatggaagctggagaatgcataccaagatcgttcccccat

SEQ ID NO: 222425 - DNA, 122 bp, Homo sapiens
ccggtccacccactgctgggccgagggcacgtcctgggcacagaagttgtaaacgcgacgcgttgtcttcacctggggaagggcgggttactgactccgcagcccccacaccgcagagcccc

SEQ ID NO: 222426 - DNA, 122 bp, Homo sapiens
gagactcacggctctccctctcctcacagggacgcggagcttgcagtggtgagagagcagcgcaaccgtctgtgtgaccttctgggcgtacccaggccccagctggtgccccaggtaaccct

SEQ ID NO: 222427 - DNA, 122 bp, Homo sapiens
tttgtgccggccggccagggactcacccaaacctttatgttttaaaagatttattcaggccgggcgccgtggctcacgcctgtaatcccagcactttgggaggcccaagcaggcaggtcacc

SEQ ID NO: 222428 - DNA, 122 bp, Homo sapiens
cagaagcacggagtgtattcaactcaggcgactgagggtatttgggcataagaaacaggtcgcaggacaacagtcacagggctgacactgaaggcaggggacagcgagagttctgcccttgc

SEQ ID NO: 222429 - DNA, 122 bp, Homo sapiens
tctgtccccgcagggaagtggccgacccgatgtgtggaggggctgggagctgccatgccccgcacaacccggcgcaccctgcgggcttcacgcgtgggcttcacgcgtgggactcgcaggct

SEQ ID NO: 222430 - DNA, 122 bp, Homo sapiens
tattgggacctacagacactgggcgccaaggcccaggcacagactgaccgagtgaacctgcggaccctgctccgctactacaaccagagcgaggcgggtgagtgaccccggcccggggcgca

SEQ ID NO: 222431 - DNA, 122 bp, Homo sapiens
gcctcaggagaaaccaaatcggccgatacctttgatcatggacttccaatatccagactgcgggaaatggatttctgctatttaagtcccctcgccccctccccagtctgtggcactttgtt

SEQ ID NO: 222432 - DNA, 122 bp, Homo sapiens
caccggtgacgccacagacaccacgtgctgcagggtccagcagcctgccccaggtacagccgggaaagtcagagggagagcacttgcaggaactgagctcttaaaacactcacgggcactct

SEQ ID NO: 222433 - DNA, 122 bp, Homo sapiens
ccaggactgaaggtgggatctgctgcttgtaacctgcaggtccccggatgcgcaccccaacggcgcctgcgcctacgggggcctcagccttgcaaaatgtcactcagcagagcctgctgctg

SEQ ID NO: 222434 - DNA, 122 bp, Homo sapiens
gccaaagactgcaaacccagattgccagcaagggccacatctccatgagaaccaagtcagcgtctctgtcaccagccgctgccacccatcagtcacaaatctatgggcgctcccagactgta

SEQ ID NO: 222435 - DNA, 122 bp, Homo sapiens
ccgcagggactccggggtgggagtcagtccgtctcaggtgcgtctccggaagaacttcggcgtcctcagggaatcagtccctgccccagtgagaaaaaccttgctgggtcctccctgatccc

SEQ ID NO: 222436 - DNA, 122 bp, Homo sapiens
ggcggggcacacttctacctggggcttgaaactcccagtgggacaagaaaacccagaccccgctcttcaccccttccctacctgagctcttcctcctacacatcatagcggtgaccacagct

SEQ ID NO: 222437 - DNA, 122 bp, Homo sapiens
cacagcagggattgaaacctaggacgcctggctctgcgactcacgaacatgcagggcgttcgttgcatggatgaaggggccgagggtgcacgggtgcttgtcaggggtcggtgtgggacccc

SEQ ID NO: 222438 - DNA, 122 bp, Homo sapiens
tccggcagcctccttccggcctggctctccttccgcccgccccagtccgcccccggcccgcggccccgcctccaggcctcccgggcccgccccgcccagtcccccgccctctagcgcccccg

SEQ ID NO: 222439 - DNA, 122 bp, Homo sapiens
ttaggacagcggtttttcagtccggagattccggccacaactatttttgtctgtttttatcgtaagccagagtctttgggtgcagctctgggacacctaaagggcctggagaaattcaggcg

SEQ ID NO: 222440 - DNA, 122 bp, Homo sapiens
ctcgcgctgcgttattgggagaaggcggttcctgagcaccagcacgggcctcggtgacaccggaggtcgctggggtcttccccttccccttaagactctgggtctgtctgtgggaagagctt

SEQ ID NO: 222441 - DNA, 122 bp, Homo sapiens
gggattgggggttgggcgccaggcgcgtgcgcgtctctgaaacggggacttgggagcgcgcgctgcccctcacttggctgcaactggacccagaactagggaagaggccagggacagatttt

SEQ ID NO: 222442 - DNA, 122 bp, Homo sapiens
gtgccctggtggggatgggggagggtgggggggcccttcctttgcctggcgtcaccctgccgccgacagtcactttaccccaagggccaagggtcccctggggacccagcagcagggacacc

SEQ ID NO: 222443 - DNA, 122 bp, Homo sapiens
gcctgccttcttgcataattgagcttcctcactcttgctcttgtgcctttgccatgagaacgggctaaggtagcctgctgaagaatgagacaagtgaagcagagctgagttggctcagttgc

SEQ ID NO: 222444 - DNA, 122 bp, Homo sapiens
ctttcttttcttttgagttgcattgttcttttctaaggaactgattgtgtggcagatcgtcggatcattgcagggagcacagatgaaaagcctgttattccaaaggattaaattgcaattct

SEQ ID NO: 222445 - DNA, 122 bp, Homo sapiens
cactgaagaatccaaccaggaaacctcctgaacacaccacttccccatcagacccagccacggacccagccacggaccccaccccagccagctcacagctaactccccagcacacaggaagg

SEQ ID NO: 222446 - DNA, 122 bp, Homo sapiens
ggctgctgagtgactcatcagcctcagcagagcctactgtgactggcgtagctcctcccacgcttgccctgaccaccccactgggagaaggttctcagaacagataagaactaagtagcagt

SEQ ID NO: 222447 - DNA, 122 bp, Homo sapiens
tggctccagatactccctgcttggtgtaccctcagtgggcctagttaccttttccagaaacgaatctgattatgtctctccttttctataagcccctgttgattacattccaggattaagac

SEQ ID NO: 222448 - DNA, 122 bp, Homo sapiens
aggtgaatggctgagacttcgaagagatttcctcccggaaaggccgagcattgagccatccggggggtggggacagctggactaagaaagggcttagtaggcctgacctttcatgtccccat

SEQ ID NO: 222449 - DNA, 122 bp, Homo sapiens
gattacaggcgtgagcccctgtgcccggccaggatttctactccggaggaagctgaggttcggtgcctgagcagtttaccggggaaagcagagtgctctatagcagagctagcatgggcttt

SEQ ID NO: 222450 - DNA, 122 bp, Homo sapiens
atggcgtgaacgaggagcgcagagctgggcctgcttggggacaagcccggagcaagatgacggggatgtcaggtgttgacggggatgtcacctgtcacttgggaatgaacacatgttctctg

SEQ ID NO: 222451 - DNA, 122 bp, Homo sapiens
tctaccctcatgtagggccgagacctacagagcccttccctttccattttgttaggtcaccgccggcttctataataaagctgctttataactgaggactgtgcttggggttagcatgctat

SEQ ID NO: 222452 - DNA, 122 bp, Homo sapiens
tgaaggcaaacacttccctctaagcctcttgctgtgactttgcagcaagctccccagcaacgccccgggctgggtatgccaggcagagacctggagcatgcacagggctcctcccttcccca

SEQ ID NO: 222453 - DNA, 122 bp, Homo sapiens
gcgcggtgccgccggcagggtcccagctggccgccttgagggctgtattctgactgttgacgttggagtttaaatgttcagttgttgctggcttttgagttcgcagcctctttgcttgattg

SEQ ID NO: 222454 - DNA, 122 bp, Homo sapiens
agcactcgctcgcgcccccgcacgcacacgcgaaacccggcccggcccgccgcgccgccccgcctctcgcactcccggagctcgcccaccggccgcgctggctcacactctccctcacagca

SEQ ID NO: 222455 - DNA, 122 bp, Homo sapiens
agtcaccaaacaaagacagcccctgtcttattcactgcacctagaaaagaacttgacaaacggtaggtactcaataaacagctggtgaattctatttcaagttgattggtttctctccagtt

SEQ ID NO: 222456 - DNA, 122 bp, Homo sapiens
ctgcgcattcaggcctctcccaaagagaaacgctggcgctgggggctcatgtccaggagacgaccaggtcccctgcggcgaaaacccagcaggcaggggcaccgggttgaaatggggctccg

SEQ ID NO: 222457 - DNA, 122 bp, Homo sapiens
acttttcaaagggctccagttgcgggccgtagacgggggagcccaggaccttgagggggacgccgccaccgtacttgcccgacgcctcctccgcggctcctggcggcttggcccggaacccg

SEQ ID NO: 222458 - DNA, 122 bp, Homo sapiens
aaaatcaccactttggagacaggaacaagatctgattagattcttttttcccccttttgtcgtttgagtgggttccttttgttaaaagcaggcaggtttaaaatatttaaaaatcattctca

SEQ ID NO: 222459 - DNA, 122 bp, Homo sapiens
ctattattcgtgatgtagtcatctggtcccttttgttttggtgtcacttagtataaaggccgcaaggagctgacacctttggcacttttccttttgctgtctatatgtgtaataaaatgtta

SEQ ID NO: 222460 - DNA, 122 bp, Homo sapiens
cctgacggacgcttcccagtctgtcctgcgctgcgaggtgctggctgcctcccacggtctcgccctcaccccagacccctggccctgtcactgagctttcagagtagatcctgaggagtcag

SEQ ID NO: 222461 - DNA, 122 bp, Homo sapiens
agagtccatctcttccaccctggctcttcttcgctcagatccagggaaaataaactaacacgtaacaaactaataagcactgttcctgcatcacgtcctgcagtccttcacagcagcccttc

SEQ ID NO: 222462 - DNA, 122 bp, Homo sapiens
ggtgctaagctcctcactgcctggggccggtggctccgattgcggggcccgccgagcccacgcccacccggaactcacgctgacccgcaagcgccacgtgcagcccgggttcccgcccgcac

SEQ ID NO: 222463 - DNA, 122 bp, Homo sapiens
tcccatgctctcttcaccggattgcagctgctggagaaaaaccacaagcaaggaaggaaacgcggccgatctggcgggtttgctccagccggggtattttataaatgaatgatcactgctgg

SEQ ID NO: 222464 - DNA, 122 bp, Homo sapiens
ttgcttcggtgggtgacgcggtacagctgcccaagggcgttcgtaacgggaatgccgaagcgtgggaaaaagggagcggtggcggaagacggggatgagctcaggacaggtaagggaatgaa

SEQ ID NO: 222465 - DNA, 122 bp, Homo sapiens
ctatacaaatcttgagaatacaacgtgaaggtgaactgctgactaaagtttggtccctttcgctccgtctccttgcgaaaatgctctaacggcaggaggtcacgcgagcgctggacgcgttt

SEQ ID NO: 222466 - DNA, 122 bp, Homo sapiens
cctttcggtactcaattcttcttgggaaacgtcacgaggggaaagcccagccggcacctgcgcagggtaaggaagtggatcacctccgcatgacaggtgctctctgtgtgacttacatcact

SEQ ID NO: 222467 - DNA, 122 bp, Homo sapiens
gctcgactgccgccatctggctccggatcttgcccagctccgtgtgcaggccggtggccacggccacacccaccgctttgcccgatgtgatattggtgccctggccaggggagggacaagga

SEQ ID NO: 222468 - DNA, 122 bp, Homo sapiens
agatttctgttatgtctgcctttttataaaaaaggaaactaagacttagagatgttaaggcgctcacagtagtcatcggtggttaaggcaggaagtgagcccaggctgtggctcaaaacctt

SEQ ID NO: 222469 - DNA, 122 bp, Homo sapiens
ggaggcctggaagtgaagcagggagaacccggacgcagcgtcgcggccaagcggggcacgcgcttcccaggccccaaaggaagaaggatacgagggtcttgacctctaagattatagctttt

SEQ ID NO: 222470 - DNA, 122 bp, Homo sapiens
atggaaacctcgggggtggggacgtggcccctcccccccggagcgggactccaagaactccggggggcgctgggggctgactttccagctctatctagctcagccccctcccccagactcac

SEQ ID NO: 222471 - DNA, 122 bp, Homo sapiens
ctgccctgccgcgggtggtcttcaccacaaaagcagcagcggtacaggagtgccacgggccgcccacccggaagccccgctctgcccaccccgggatcagagccgcacgaacagccccagca

SEQ ID NO: 222472 - DNA, 122 bp, Homo sapiens
cgccctccggtctccagcaatggtggccaagcagccctcacgcacgactgaagtcctctccgccgacagcagagccaaagcagccgactgcctgctcgtgtggctctgccctcctgcccctc

SEQ ID NO: 222473 - DNA, 122 bp, Homo sapiens
taactcttcaaaacaaaatatttcactttccacagctatttgccaattgagagcccaagacgcgtcttttaaaaattaaacataagcatttctaatggagctgcctccatctcctgctattc

SEQ ID NO: 222474 - DNA, 122 bp, Homo sapiens
tgctggcgggctggctgtgcctgagcctggcgtccgtgtggctggcgcggaggatgtggacgctgcggagcccgctcacccgctccctgtacgtgaacatgactagcggcccgggtgggccg

SEQ ID NO: 222475 - DNA, 122 bp, Homo sapiens
ggcgagcgcccccaccggcagcaggcgcacctccccaggggcagctgtcgccgcggcccgcggggcccgggcctccccgggagcaataggctatcgattcagctgcctgtcgctaggagccc

SEQ ID NO: 222476 - DNA, 122 bp, Homo sapiens
agggaagggagatggggcgggatgtggggaaagctgtcgactgcttggatctctccggcccggatggcgccagctgcctccagctcagcctgcggaaatccgagctcttcccagcggcccga

SEQ ID NO: 222477 - DNA, 122 bp, Homo sapiens
cggtccactaaccctcagtatcaaatccatccccgaggctcctggaaacaacgctgtcttcggggaggaacggttggacccaccaccacttctccatgacacccgaagagatgattttctgt

SEQ ID NO: 222478 - DNA, 122 bp, Homo sapiens
acctcgtagacatctgcttcttggcctattaaacccttcttcagacaacacatgttccatcgaaaccaactgacttccttattcctctccaatataaaaaggaagtgcagaatcctggcctc

SEQ ID NO: 222479 - DNA, 122 bp, Homo sapiens
tccccaggcccacccccagttcctgagctcatctgggctgcagggctggcgggacagcagcgtggactcagtctcctagggatttcccaactctcccgcccgcttgctgcatctggacaccc

SEQ ID NO: 222480 - DNA, 122 bp, Homo sapiens
ctaggtgctttagatttggacctggctgtgtccctactttattaaaattctcatgtggcgcgcgctgtcttctctcttctctctctctctctctcacacacacacgcacatacacacacagc

SEQ ID NO: 222481 - DNA, 122 bp, Homo sapiens
aagacagactgctgggaacctggggtgacagagatggaagggcaggagaaactcacccttcggaaagagacaacataaaatgtgtcttcccgtcggtcaattgcatccaagaatgctggctg

SEQ ID NO: 222482 - DNA, 122 bp, Homo sapiens
gtttagaaaaattgggtgaagtgtgtttttgtgagcaaatttatttttctctaggttatccgtaatttgaaagctgtgagtattctgattaggtgacaatatagttatttgcttaagtacat

SEQ ID NO: 222483 - DNA, 122 bp, Homo sapiens
atagcgtgattggaaacttgtgcgggccggagaccgcggcgcggctgctctttcaacaggcgatttgttctcctgtccgaggctcatttccatgcaaagagcctgacatcagagcacctttt

SEQ ID NO: 222484 - DNA, 122 bp, Homo sapiens
attcccatcaaggcgtgcacccggccccggcaccatgcggcccccacccttgccttcctgcggctctgaccctgcagttcccagcagccttcagaggacggaacgccatgggcacacggcag

SEQ ID NO: 222485 - DNA, 122 bp, Homo sapiens
attgcacctagtgatgtctgacacactttcgggcgtacaaaaggcatccacacgcaggcccggcttcagcctgaggagggagcttgtgctacctgtcgctgtcagcagggggcaaccccaca

SEQ ID NO: 222486 - DNA, 122 bp, Homo sapiens
aagtgcccccaacatgagccccagcctctgtgccttgagggtgcctggcatcggaaatggcgcaggctgcggcagcgcaggctccctgcccccagccaccacctggtacccgctgcagtgtt

SEQ ID NO: 222487 - DNA, 122 bp, Homo sapiens
catcgcgttcaaaaggggcgtttcggtgtctcccgtcatgcaagcaaatggtatggctctcggccgcctttgaataaacgagtgcttcgaaccctttaccaggagggactaggcgcacaacc

SEQ ID NO: 222488 - DNA, 122 bp, Homo sapiens
cttcagggaacagaatattcagcagcgctgtgatggaatctgaggagtcactcagagccccgcccccccaccaccccatacacagtgactgagggactgtgcctcattgtgggcaaggggtg

SEQ ID NO: 222489 - DNA, 122 bp, Homo sapiens
cccctggctataatgtccatttctttaaagcgctggttgtctagctagtgtggtagagtacgctgtgcataagggtagttataaatatttgatggcagtaacataggatggcctgtttctcg

SEQ ID NO: 222490 - DNA, 122 bp, Homo sapiens
gatctcgcggctggcgggggcgggaccgcagtgcgggggatgtcgcggggcgaggccagacgagaatcgaatgggacctaggctgagggcctggtcccgcctccagacccaggcgtccgcat

SEQ ID NO: 222491 - DNA, 122 bp, Homo sapiens
tgggcttctgtagtgaccacgccaaacatttaaatcccccacttaaacaagtaccagagacgaaacaaccaaaagaaagacaaagcaagaggagagagggtagaaagagaacaatacaatcg

SEQ ID NO: 222492 - DNA, 122 bp, Homo sapiens
gggtttttgtctccgagattagagccagacagacaaggatctcctgcaaactgcagctgccgacaatggaaaaaaaattaccctgcgtttgtccgggggagatgtgtgcgtgggtccgcgcg

SEQ ID NO: 222493 - DNA, 122 bp, Homo sapiens
cttggtcattcgtcttgttgccattttccttcccaacaccaatcctgcttttgtctcactcggtttgtgtgttgggctaatcacctacaggctacgtcatggcctcatctccagccttgctc

SEQ ID NO: 222494 - DNA, 122 bp, Homo sapiens
aacgggaacagaaaagggctgtagtaagaaccatcatcaaagcctccaggacttgagcagcgactgacgtttttacttctaaccctggatatctcagagatttggttccactgtgcttttct

SEQ ID NO: 222495 - DNA, 122 bp, Homo sapiens
cgagggagaagcagggagacagtagaagagcatgggaggagggaaacccttgaaagggaacgaggagttctaaaatgggtcagaggtcataggtagggatctcggagcctcacctgtttgag

SEQ ID NO: 222496 - DNA, 122 bp, Homo sapiens
ggtgcggctctgtgcgctccagatcagggggtgcagagtcgtgaggggacaccaggggctcgtggagcccggggcagggtccgttttcgtcgcccgggttgggtgctcgctctcgcggcgct

SEQ ID NO: 222497 - DNA, 122 bp, Homo sapiens
gagcgcgtcaggtggggacggggcctgtgggagggtcaggtggggaccgggggcctcgggcgcgtcaggtggggacggggttgtcgcgggcgcgtcaggtggggacgggattgccgcgtgcg

SEQ ID NO: 222498 - DNA, 122 bp, Homo sapiens
tgggtaggggcagggtgaggctggggatgccaaagaaagcataagaggagcctatggcaacggttcagacaagacgcgaggaagtcatggactaaaggtgagaaagtaacttttatctgagg

SEQ ID NO: 222499 - DNA, 122 bp, Homo sapiens
ccctccaccccccaggtcctctttcaactcaagagctcagtcctgtgtctctcatggaggcgtctctaaccagggtaggaaaacaatagttctaaatatcggtaattggtgtttggaggcca

SEQ ID NO: 222500 - DNA, 122 bp, Homo sapiens
ggtgccgtctccaccaacagaaaggcagaatttccagggccgttctcggcagccaatgagcgcggcggtgggcgggcctctcccgtccattgttctcggtgccccacgggcttgagccgggg

SEQ ID NO: 222501 - DNA, 122 bp, Homo sapiens
aagtcattggggaagcacatagctggaatggtggaggcagaaaacccaggcaagtgaccacgaggaaagccattattagaacaagcaaaatacaagagggtggagaaggagtggcaatatga

SEQ ID NO: 222502 - DNA, 122 bp, Homo sapiens
cgcccgcctcggcctcccaaagtgccgggattacaggcgtgaaccaccgcgtgcctggcccgcctggaagccattctatggactccctgcaaacttgcaaaaaggaaaacaaacaaaacaaa

SEQ ID NO: 222503 - DNA, 122 bp, Homo sapiens
gatgtttacccagccatgtagtgaaggactgcagtctttcccacatcttgctgtgtggaacgaactcaagatccaagagtggcctaagctgcctatccattataaccattttctcaatctca

SEQ ID NO: 222504 - DNA, 122 bp, Homo sapiens
aaatttaaaaggcaacgcggggcagggacaagcgtccagcgtcagatggaagcaggctcgcgtcccctacccttcctccaacccctaacctaagaaaagaaaccgatctcgccggtctcccc

SEQ ID NO: 222505 - DNA, 122 bp, Homo sapiens
gaccaggcaactgcaggtttggggctctgcgacccgggggcaggaacagagccttgcaggcggcagcgcgtcacaaaggcggccggagcttggcatttagcttgggccagagcaaggcgcag

SEQ ID NO: 222506 - DNA, 122 bp, Homo sapiens
agaaagagtcgcaaattcccaggcagattggctccatcggtctaatcaagctgcacttgacgctccgcgggcctgctgcgcccccgccccctcaggcgaaaactcgcctctgcccaaggctg

SEQ ID NO: 222507 - DNA, 122 bp, Homo sapiens
gtagccccaagtgccctgcatttgctcttctaacaaagttctgtttgttgacggactgaccggcttaccgacacaaagatgggaagcaaatggagagacggatcaaggcccttcctcggcat

SEQ ID NO: 222508 - DNA, 122 bp, Homo sapiens
tttgatttggaaaccccacagatccattccctttaggacgggaaacagcacgtcggggatcgcgctataatcttgtacacatctttcgagttggctagtaaatttctggggcgacattacct

SEQ ID NO: 222509 - DNA, 122 bp, Homo sapiens
ccaagggcatgaccaaggtgtgcagggagatctagccctgtgaggaagcggcacggtggccgcagggcaggaggtaaggacaccctggtctctgtgcctaggtccgtgcaagacagcggcca

SEQ ID NO: 222510 - DNA, 122 bp, Homo sapiens
cagcggcgccaccagaaggttccgtctgtggagaagggcggcccgcaagccggacgagagcgcccccaaacggaaccttgagcccaaggaccccggaggcatcgtcgaccgcaggccgccac

SEQ ID NO: 222511 - DNA, 122 bp, Homo sapiens
ctgtccaattgtcctttctttttcatgcaatatagattatttaaacagccactctcactgcgagtcaaataaaatgggttggtgacacagagaatggactccgacgaatgttttatttcctt

SEQ ID NO: 222512 - DNA, 122 bp, Homo sapiens
tgcctttcattttttttttggtttggaactcctgcactggtcctgtgatgtgactgcagccgccaggcgcgtgcgcagtgtacactgcgtgcgcatacgcgagcccgttgcgcctgcgcgcg

SEQ ID NO: 222513 - DNA, 122 bp, Homo sapiens
aataagaatagcccttcctaggcgcccaccggaatgctcagcgctgccgcacagagagtccgcatccgtgcctgccaccggcctaagttatacccggagctacgacgacttatgagatgggc

SEQ ID NO: 222514 - DNA, 122 bp, Homo sapiens
cagcctgtcagactgagggactgcaggccaaggcacaagtcatttgcatctgggaggccacgggaagattcttgcgcagaggttgggaaaagcatcctgcttgtaactgtttcttcagagtc

SEQ ID NO: 222515 - DNA, 122 bp, Homo sapiens
cagggttggggtggtccctgtcaccgcctgctgctggtgggggtcagctgcacggatgcacggcctcgcaccagcggcagccccagaggccatgcatagggcaggccccggtggtcagggac

SEQ ID NO: 222516 - DNA, 122 bp, Homo sapiens
ctgttactatctatagcaggatctcctggctcccgggcgcggcggctggaggcaggtctgcggtccggctccccgcgcgccccgaactatccgcccgccggcctcatcctgcctcgcccctc

SEQ ID NO: 222517 - DNA, 122 bp, Homo sapiens
actcggggtgagatggtggcacctccatcacagacccacagtctctgtgtccagcccttccggaaagatgacagaaatgaaaagtctgccttatggaagacaaggttattcagaattttcgg

SEQ ID NO: 222518 - DNA, 122 bp, Homo sapiens
ggggacccagtacaccctccgcagccgctgacccgggtgctaagcccctcataagccggccggctgcgccgccaagcccacacccacccggaactccagctggcccgcaagcgctgggcgca

SEQ ID NO: 222519 - DNA, 122 bp, Homo sapiens
catttaccacctgagcctatctaatttccggcaaaaggatcccctgcccagttttgttcacggccacagaatctgataacaagtcacgatctgtgttgagaaaggcagtgggggagtgagaa

SEQ ID NO: 222520 - DNA, 122 bp, Homo sapiens
ccagccccactcacactgactcaccccggcgctatttttagccccccatccttgccgagccgcgccagcccaatcctgggctcgttccccaggcaaccctggccgtcgccgacgccgcccgg

SEQ ID NO: 222521 - DNA, 122 bp, Homo sapiens
tattccactgtcagatgaagccctgatgtgtgtaggggaatagggaagagacgtgattttcgaagttttcacagttctgcaagtttccaacttgtgtgtaaataggtagaaagaggtaggga

SEQ ID NO: 222522 - DNA, 122 bp, Homo sapiens
taattaatctgatgatattctgatggcaaggaaaagtataagctccaatcaggcccctgtcgtaagccgcctgacaagtgagagaaatgaggttcacagttggctggtcacagcacagggaa

SEQ ID NO: 222523 - DNA, 122 bp, Homo sapiens
ctttctgtctgcaaaattccaatggtgtgttgaatcgcctcttcctagggacaagccgcccgctgagctagcaaggaatgcatttcagttcatccacttccggcagttcacagctccacagt

SEQ ID NO: 222524 - DNA, 122 bp, Homo sapiens
cttcactcccgaaccagcgagaccacgaacccaccagaaggaaaaaattctgaacacatccgaccatcagaagggacaaacgccagacgcgccaccttaagagctgtaacactcaccacgag

SEQ ID NO: 222525 - DNA, 122 bp, Homo sapiens
gtctgttcattcttacactggggacccaagcctgctctgaggagtgagtcacagccctgacgtgcgccttgcattactgtttcctgagatgtgcccggagactcaagcttgctcatttctgt

SEQ ID NO: 222526 - DNA, 122 bp, Homo sapiens
ccatgtgaactatgaactttttaagtaggcagtggacttagagcatcattaatgctttaacgggcataaatttgggttttacacttcctttgggtaactttgattccattttatttttttcc

SEQ ID NO: 222527 - DNA, 122 bp, Homo sapiens
tttcacaaaaaaatttaaggactctacagccgccttgttctttgttatcccacccctgcccgcctcggctaacggttttggggcccgtttgcttggtgcgtctggaactcctcgggcggcgg

SEQ ID NO: 222528 - DNA, 122 bp, Homo sapiens
cactaaggccatcaccaaggtgaaaacagatccttatgaaatgcagccacaactgcagaccgcagagaaagtataaatgtttcccatcacctttacaatctttcccagggcagttttcccca

SEQ ID NO: 222529 - DNA, 122 bp, Homo sapiens
ccctacatgtcctttgattccgatgttcgtgggcagtgacactgtgaatgaattcaagagcgaagatggggctattcatgtcattgaaaggcgctgcaagctggatgtagatgcacccagac

SEQ ID NO: 222530 - DNA, 122 bp, Homo sapiens
gcttcccccaaacattgcataaaggataaacacacccctctgcctcccgccaagaattaacgcagcgcccgggctaagaacaggcctgcgctcaaaggaggtaaggataggctccctcctca

SEQ ID NO: 222531 - DNA, 122 bp, Homo sapiens
gtgcgcagcctgacatgtggtgctcggccgcaaaagcgcttcagtctcgccccccacccccggagcagccaccaaccaagaaacattgtctgtatctggcagcatttggtccctgtcatgag

SEQ ID NO: 222532 - DNA, 122 bp, Homo sapiens
aaatctcctggcttctgggtgtccagggtggctgtcccaggcaggcgacggtcttcttggcggccaggctgcgtatgcgtcacgaggaagcctccagatggagcgcggccgccaaggcgcag

SEQ ID NO: 222533 - DNA, 122 bp, Homo sapiens
tgtccacgcagtcccggggctcaggacgatggagggcgggggtacggtccttgcggtgggcgttctgcaccaggatgtaatttccacacccgttcaagatgcttgtaggggtattagaaatc

SEQ ID NO: 222534 - DNA, 122 bp, Homo sapiens
cctgctcgcagggatggggaacactcctggagcctgtggctgtggctgctccagagtccccgaccgtcaaaaacgcggcagcccagggtggaatgaccgggcttccacctcatccttgaaga

SEQ ID NO: 222535 - DNA, 122 bp, Homo sapiens
ataaaataaaataaaataagccaggcattgagaggtgataacgtgctggcggccgtcgctcgctctgggcgcctccttggcctccgcgtccgctctggctgcgcttgaggagcccttcagcc

SEQ ID NO: 222536 - DNA, 122 bp, Homo sapiens
cgaactcctgacctcagatgatccacctgccttggcctcccaaagtgctgggattacaggcgtgagccactgagtccagcctggaatggtaatattttccatataatgggctaaatgcaaca

SEQ ID NO: 222537 - DNA, 122 bp, Homo sapiens
gactaaacgatctcagatttcttcatgtgttggaaaatgtacttaaaaaaaatctttccccgaggcatcttctttgccaactggactgacttttgctcattcttggattgccccctagtggt

SEQ ID NO: 222538 - DNA, 122 bp, Homo sapiens
ggagagaaaggaggctggttccctgggaggttcagggcgcgggcgagggtttacgggggccggtgagtgtaggggtcactgacctgcccgttcttgcagaggtccgcccacatgctggtgcc

SEQ ID NO: 222539 - DNA, 122 bp, Homo sapiens
gacgtggtccccaccttctcggtcaccatcctcgctgctgcctggcaggggctccggtgacgccagccttgaggggcaggagctgcccaggtctcaagcctctttactctcacccccggcac

SEQ ID NO: 222540 - DNA, 122 bp, Homo sapiens
gtgactatcagaaaaccttacccaataggagtagccagacttggtcatttgtgaggagtccggcagccggggttccagcatctctgttgcttccctgctgttgccagtgtaaatgttttatc

SEQ ID NO: 222541 - DNA, 122 bp, Homo sapiens
ggaattgagaatgaacttcctggtactgtaatgaaaataaggtctgctcaacacagtaaacgtttcctctcttctttaaaactgcgcagtcatttggcctttgtgtttaggaagggcagatt

SEQ ID NO: 222542 - DNA, 122 bp, Homo sapiens
tgagaaagaaaagccagccgaggaggtttgggttttctcaggtacagacgctatgcaccgcgtcccctgaggagcccgggcagtggcgagccgtccggcccctccgctgcgtgtgtggggat

SEQ ID NO: 222543 - DNA, 122 bp, Homo sapiens
ctgagggaccccagcctctcaggtcccacctgggtcctgctctggggctgggggaagccacgaccacctggtggcagggaggggctgagggccaacagctcacacaggctctccctaagcac

SEQ ID NO: 222544 - DNA, 122 bp, Homo sapiens
cgattttcctaaaattgcgtcatttagaacccaattgggtccagatgttatgggcatcgacgagttaccgtctcggaaactctcaatcacgcaagcgaaaggagaggaggcggctaattaaa

SEQ ID NO: 222545 - DNA, 122 bp, Homo sapiens
accccctttccagcaagcttcccgtgggaatctgttccttttcaggacagctgtgatccacgtgagtaaaactgggcgttccgtcttgtgctttttcctcaggttcatgaactggaatgtaa

SEQ ID NO: 222546 - DNA, 122 bp, Homo sapiens
cgcgtagtctgcccatagcctcggccaccagccccctttacatcgtccacccacccacagcgtcctgccgtccacgcctcgcccacccacgggttccccgcagtccgtgcctcgtccaccca

SEQ ID NO: 222547 - DNA, 122 bp, Homo sapiens
ccagctctccccacccccaggaggactgtacctgctcagggtccagtcttcccaaccacacggcctgggccctgggcaccgagaccaaagccagaaaagcagccagcagcaggccgcccatc

SEQ ID NO: 222548 - DNA, 122 bp, Homo sapiens
actcgatcgaagagccctccgagaaatcgtacgttcctctcacttactttgagttggaaacgtcctctctggcgctcagtctgcctttgttgcaaggggcgaggttgctaccgctgagtcca

SEQ ID NO: 222549 - DNA, 122 bp, Homo sapiens
cagaaaaagaatgtcctcagaaatgatgctgacaatcaaaaccacaatgaaatgccatttcgcccccaataggatgactagaataaaaaaagacacacaattacaagtgtttgcaaagatgt

SEQ ID NO: 222550 - DNA, 122 bp, Homo sapiens
acttttgctttgatacactaaacagtttgagtttctagatgatgcccattttaattcatacgaggaaatatcttctagtatagtttctgcttgattaattctatgtttgtctcttagggaca

SEQ ID NO: 222551 - DNA, 122 bp, Homo sapiens
actcactcggtgctgagcactccggagtggggggtcagctttgctcctcagggctgcaggcggatcctgccgcatggagctgattccacctgaggctgaggcccgggtttcccacccgccgc

SEQ ID NO: 222552 - DNA, 122 bp, Homo sapiens
gcaccatgctggcacgaggcatggttatttgttgattgaatgaatgcacttttgctaggccgcgaggactgtggcaaaccccaacaaccaacagttcgtagggttagatcgcaaacttttct

SEQ ID NO: 222553 - DNA, 122 bp, Homo sapiens
gactcttgggggtctgggccccaagggtgattcaggtgctgcccttccccgacctgggctcgcctcccccacctcctcctctgcttcactgtcccgggcccagcagttgccggcgcactcat

SEQ ID NO: 222554 - DNA, 122 bp, Homo sapiens
gcggagacagcctggggcacgcgcagacaccggggctgcccgagggctgagtgggagcgccggacccattgaacagatgaaaagactgaggccggccacaagagagccgaagaaagttgagc

SEQ ID NO: 222555 - DNA, 122 bp, Homo sapiens
tggggcgccctttctgtatgtcacacgctgctctgctttgcggaaggtcaggggaaatgccgcactggcttcgccgcaggccctgccccgcgtgatgcatgccctgaatgcagacgccctgc

SEQ ID NO: 222556 - DNA, 122 bp, Homo sapiens
gcatctatttgtcttcttttaatacttactataaaacacaccttctcttacatcattggccgtagctttgtaaccatttcaaattatatttcaaagacctacaaattgttaggcccctctca

SEQ ID NO: 222557 - DNA, 122 bp, Homo sapiens
gcgcattttccgcactccgatacactttacactgaacaccaattcggaagttgtgtggaccgtgctccagattggaaggcctgccactgtgctggtgtcatttctccctggaaatgacaatg

SEQ ID NO: 222558 - DNA, 122 bp, Homo sapiens
ggcaacttccttactgtgtgcggacttctgcggagttctgcggccttctgcggagttctgcggccttctgcggagttctgcggccttctgcggacttctgcctggggaagttgggaaatatg

SEQ ID NO: 222559 - DNA, 122 bp, Homo sapiens
accatctcccctaggctggcgaccctctgtggctgccaggtgggggcgaggggcgtctcccgcagctgaacttggagtacccagcctcccgtcgcgcctcccccaccccatccgcatccagg

SEQ ID NO: 222560 - DNA, 122 bp, Homo sapiens
ccgcagccccctccaaggcggagtggagctttgggaacccctcggccaagcacagcggttcgaaaatacagctgaaacccagcgggcccttagcacgcgccccagcgccggagcagggtcag

SEQ ID NO: 222561 - DNA, 122 bp, Homo sapiens
atgagtgtggggacactggtgacttctacaaaggctcattgaaaaggtccagtccagcagcggcttggtctaaggtaaggcttcttttctcattgattagctgagcagggggagaggaagct

SEQ ID NO: 222562 - DNA, 122 bp, Homo sapiens
actcttccaggtcgttcctcacctcgtgcagcattgctgtgagtgggcgacaaggaacctcgtggtctccgtgtgctttgcggggaccacctcttcgcaggggccgccacctgcctctccgg

SEQ ID NO: 222563 - DNA, 122 bp, Homo sapiens
ctatttgtaggattgctgtgggattacataaaagcttttatatatagttcctggcaactgcgtacaccttcagtatagagccattcttcacaacttctcttatcttttctgctataatttct

SEQ ID NO: 222564 - DNA, 122 bp, Homo sapiens
ggctctggcacccagtgcctgtctccccagccttcccttcccaatttcttcctccaaaaacggctgcgatcgctcaacatcagcgtgcacagctggacttcacgttcccatttgcagtggat

SEQ ID NO: 222565 - DNA, 122 bp, Homo sapiens
caaccgcctggcggcaggggaccgctcttcatatccagagagtgactgaaattccctggccgccgttgccggctgctgtccttgtgggagatggtgggtgacatatcagagacgatgcagag

SEQ ID NO: 222566 - DNA, 122 bp, Homo sapiens
tgttggggcctccccggccaccttccattgctaccccaggattcccgagtgcaacgttcccggctcgcgccccacacacggctcagcgcacactgcgcggcttccacctttactgacggagc

SEQ ID NO: 222567 - DNA, 122 bp, Homo sapiens
ctctgcccttccttcctctgttctttggccttatgttccccgccaccacagaccttcccccgccccacccctctgcagacttagccgtgcattgcaggcatggaggattaatcagtgacagg

SEQ ID NO: 222568 - DNA, 122 bp, Homo sapiens
cggggagagggatgcaggagcccttccacctggacctctggcatcaggcctgccagagcccgtcgtgcccgctgctctgccagtcgcccaactcccaccaccagccgcacccccagcagctg

SEQ ID NO: 222569 - DNA, 122 bp, Homo sapiens
aaactgttttgtacaaattcctgaaaatgccccaaactataataagggagttctctgtatcgagggggtgggggacagtgggcaggccggtggggaaaggaattcagtcaggggagaagggt

SEQ ID NO: 222570 - DNA, 122 bp, Homo sapiens
agtccccgggtcgcgctccggcgaacgcagtccctgaatgggcgcggcggacttgggaggcggactactcagtccccccgggaaggagggagctggggtccagatctttgctctgaaggagc

SEQ ID NO: 222571 - DNA, 122 bp, Homo sapiens
atgacagctgtgaggccccagacccggtgtggtccatgcaggaagacgggtagtgtgtagcggaagtggccaccccggcagaagtgggtatagccctgattctgcgtctgcagcaggtgggc

SEQ ID NO: 222572 - DNA, 122 bp, Homo sapiens
attccagagagccccccagaccctttcaggaaaggtcaaaaacattttcataataatactcgacattatttgccttttctttcattctcacaaagataaagagttttccagaggcagcacac

SEQ ID NO: 222573 - DNA, 122 bp, Homo sapiens
ccccacaggctgcaacgtgcccgcggtctagactgcgaggccgcgggctgcaccggagcgcgcagtatcttcccccggactgcgaccacccgcaccgccagccacggagccctggcccgggc

SEQ ID NO: 222574 - DNA, 122 bp, Homo sapiens
tcgcgcgccggctccccggctcacgcagctggccgcgctgtgctctccgctccagtctggcggcccaaggggttccccacaagaccctagcggaaacctgggccttagtcccgcggtgcttc

SEQ ID NO: 222575 - DNA, 122 bp, Homo sapiens
acaggcttcaaacccactgagattaacaaaccagacctgctctccgacagcagcctggcccgctcctttaagaggcagcttcttgtgccggtcttccctggggaagatgggcatggaaaggt

SEQ ID NO: 222576 - DNA, 122 bp, Homo sapiens
ggaatgtctttaaaaatgatgtcaaggaatgcatatatcttacgcttttcagcatctattcgatctatgacccctgctgagttgataaggaagaggcatgtcacagtcgtagaaaaaaagaa

SEQ ID NO: 222577 - DNA, 122 bp, Homo sapiens
tatggggacaaaggcgtcacccgccaggttctacagaggggaccccaccatccacctggccggcactcccacgccccccaccccgagacccccgtgccgggctgggacaggtgccccaaccc

SEQ ID NO: 222578 - DNA, 122 bp, Homo sapiens
acataggtacgcgggtaccgtggtggttagttacataggtacgcgcgtgccgtggtgcttcgttacataggtacgcgggtgccgtggtggttcgttacataggtacgcgcgtgccgtggtgc

SEQ ID NO: 222579 - DNA, 122 bp, Homo sapiens
gcctctgtgtccacgaagcaggatctaaggtcccacctctgaggctgtgggaggattaaacggtggcccagcatggagcacagctcatcccctgcagggcccttatgcgaaagcatcacgtg

SEQ ID NO: 222580 - DNA, 122 bp, Homo sapiens
agccagaacaaaagtaaaggccaagactcacagaaaacaaacaagagagaatgactgtgacgaaactaagagatgagaccaaagggtctaggcctaaccgtagtgctttaatgcagggtaag

SEQ ID NO: 222581 - DNA, 122 bp, Homo sapiens
gggtacttccgatttgttacctaacaaaaacaacacttcagactccaagtaactgaatagcgcaaacctgggctgccaaaccttaaatttcaggattacataagagttcactcggctgggcg

SEQ ID NO: 222582 - DNA, 122 bp, Homo sapiens
aatcaatcctccacttcaccacccacccagagtgctgaatgccactcaccaccgcagggtcgccagggggcgcaactgagtctacggccaagtgaaaaaatattcggcttaagatctggcct

SEQ ID NO: 222583 - DNA, 122 bp, Homo sapiens
cccaaaacttttctttcttcaagagcgaggcattatccacaagggctggatttccagaaacgaagaccttccctggctgggccagaggcaaaggagctgctccaccccctggcacgttcaga

SEQ ID NO: 222584 - DNA, 122 bp, Homo sapiens
acttgacccttcctctccttcagagatctcagcgtgtaaactttgcacactgaggaacttcgatcatgatataatgctctgatacggccacacaccatccaggagttctgaattggcttttt

SEQ ID NO: 222585 - DNA, 122 bp, Homo sapiens
tgcccttgcttggcgcgaggaggcgccagcaccgcgcacagaccttgcccgcccccgggccggcaccagcagcccaggcaagtcagtgggcccacatttatggagcgcctcctgaaatcctg

SEQ ID NO: 222586 - DNA, 122 bp, Homo sapiens
aaagagatgatatttgttcagaagccagtttgacctgcaaaattttgcttttaaacacctcgcaagagtgcctatttcttggaattatcttccatagctgctactgtctccactagctagtt

SEQ ID NO: 222587 - DNA, 122 bp, Homo sapiens
ggtccccaagaatgcattgtaagtgcaaaggggagtcaatttggcctgatggagacaccacgatcccagagaagagatctgggcactgctgcaagtggtctgaaaggatgtgagtcaacttt

SEQ ID NO: 222588 - DNA, 122 bp, Homo sapiens
tatcagttaattgggctcctttgaaacgctgaggatctgcttacacaggtcaactccttgcggaagggggttgggtaaggagcccttagtgtcttgtaaattaaggggtcaattggagtttg

SEQ ID NO: 222589 - DNA, 122 bp, Homo sapiens
ctccgccctctatgggcacttggcctggcatatggacacactgtgtccagggaccccaggcgggaccccagtataccagaggtcatgccacatgggcctcaaacccactgaacccaagagta

SEQ ID NO: 222590 - DNA, 122 bp, Homo sapiens
tggaattgcagatttgggggccacagaaaacatcagccagagcgtcacagaagggcaaaccgcaggcgagaagtcccatggggggggggtgggctccccgcagccgggtcagcagcacccag

SEQ ID NO: 222591 - DNA, 122 bp, Homo sapiens
tagaaacagacttttcttttgagtgtgcatttttttctttttacctaaatgtgtcatgctcgacacttttttttaaattgaagtacaaaaaagatcacgaatcattaagtatttaggttgat

SEQ ID NO: 222592 - DNA, 122 bp, Homo sapiens
tgcattcttgtaaccttctatggtgttttgtggctcttatcttgtggaccataaataacacggcccaataactctttgtgtttatggagtgttgttttcttagaataatggagatgcagata

SEQ ID NO: 222593 - DNA, 122 bp, Homo sapiens
gtgtccgacccacttccagtgctgatgagggcttgaaaaggtggtgcttggtgccattcgcggagacattatcttgcagcttggggattgtgttttatgtgaaaagttagattattccaagt

SEQ ID NO: 222594 - DNA, 122 bp, Homo sapiens
gctgcgaggagctcgcggttccccagaggggcgggcctgcgtccgggtaaccgtgcgcgacgtccacgagtttttaggacgaccagcccttcagcctctaggccccgacgcctgcgccattt

SEQ ID NO: 222595 - DNA, 122 bp, Homo sapiens
gcagaaagaggtagcagccccaggcttggatgtggcctacagagccagggtgaatgcacccggaaagtcagggtgagtgccagactgaaggagtgtgctataaggccctggcggaggcttgg

SEQ ID NO: 222596 - DNA, 122 bp, Homo sapiens
ggcagcggcggcctctgaaaggaaccggggccgcaggaaagacggtcgttttacagctcccgagaaggcgtgcgtcggtcagcagcaaaagcttaagaagaatctagaagtcaggatctgga

SEQ ID NO: 222597 - DNA, 122 bp, Homo sapiens
aggagatttctcccagcactaatatcctggtgttctataaaatctttattgagtgcctaccggtgcaggcgctgggagagacaatagctttgaggagctcacaatctagctgaggagacaag

SEQ ID NO: 222598 - DNA, 122 bp, Homo sapiens
ggatgaggagggggcgtggctgagggacacggtgtttgttccccatccctgagttccgtgcggacctgccccagccccagcacagtcaccctgtggaactggcatccaggagaggtgctccg

SEQ ID NO: 222599 - DNA, 122 bp, Homo sapiens
aggggccaggggactgtgtggggcctgacgggccggtgggtggggcggggcttgaaggaccggagggtgtgtgggcggggcttgataggcaggggcggtgcgggggcgtgggcagcacaagc

SEQ ID NO: 222600 - DNA, 122 bp, Homo sapiens
acaggctgcgggcgggcaggcgggaggcgtagtgtgggtcgcggtggcggccccggccgccggccctggccgcggcatcatgaacatagacgtggagttccacatccggcacaactacccct

SEQ ID NO: 222601 - DNA, 122 bp, Homo sapiens
attgcggagaacagggaagagggtggcaggaagggtctggtgcacgatacccgccgcgcccgctcggaatcctggttccctggagcgctcaccccagcccgccctgccccggggagcgcgag

SEQ ID NO: 222602 - DNA, 122 bp, Homo sapiens
tgggatgggggattctggagccatacaaagcaacccagagagtcctgggccggccacacccgagagtccctcccacctggtttcttcctggaagctgggtctctcccctaccctgcacgggg

SEQ ID NO: 222603 - DNA, 122 bp, Homo sapiens
gcggggaccctggcgcaccagacccccgcgcagcccgcgcctgtcctcctctcgctccgccgtgttttttatgaatgaaaatgtggtatgcaaatgagagcgattcaagaaaacgaaatggc

SEQ ID NO: 222604 - DNA, 122 bp, Homo sapiens
agtatgtgaggaagggagcggtcagtgactatcgtggagaaacctgacaaaccacccagccgtcaaggtgacctcgacaggggtaaatcatactgattgcatgcaccgcttgtggtcttcct

SEQ ID NO: 222605 - DNA, 122 bp, Homo sapiens
atattccttgaggcgaagcctgggaagtgccaggattagagcctgcagcttaacagaagccgtgtgtgtgtgtgtgtgtgtgtgtgtgtgtgtgtgtgtgtgtgtaaaagcggacttgcttc

SEQ ID NO: 222606 - DNA, 122 bp, Homo sapiens
cgctgccgctgctgcaactttctcctgtaataccctctctttgttatcgagcagctgatccgctgacatcacccagcgccggtgcgctccctccctcgctgattgacagttccctgtccctt

SEQ ID NO: 222607 - DNA, 122 bp, Homo sapiens
ggtactattcaaacacgagaaatacgtgagaactgcaagaggtcactgtttcctaccgaacgcgatgtactgaagagacacctgttcacatggagatgattagcgtcacacggagttttaag

SEQ ID NO: 222608 - DNA, 122 bp, Homo sapiens
cacctctttcgagggtgggagtgcacatgcgcacaggggacctgaaaaacccttaaataccggcatgcgtgcggatgaggcctctttccctgccgccgccgagtcgcgcggaggcggaggct

SEQ ID NO: 222609 - DNA, 122 bp, Homo sapiens
cccattgatatgtgggttcttcaaagaccacatatgttttatctgtggttccataggacccggcgtggctttgaagagtgatgtattaatgttttttgatgatggttggatggatgaatgga

SEQ ID NO: 222610 - DNA, 122 bp, Homo sapiens
gagagaacgagatatggaaaggcaccaaattcatcccaggccctcgcattcggaaactgacggaatgtaggtttcagagagcaaagcagcaaagcagggaagaaagacaagaggccaacact

SEQ ID NO: 222611 - DNA, 122 bp, Homo sapiens
acaagggatcagccccagccccacggaatcaatctgcatcttggtgagatgtcccagcttcgcaggtacagttttatctacccatctttaggggaatggctccttcctccactctgtcaaat

SEQ ID NO: 222612 - DNA, 122 bp, Homo sapiens
tccagatattttccaagatctctggtatgacctgactgttaagtagatatttctgtcctccgagaggagtggtgggttatttgtgaggcagtatctaatgccagaggacttgctttaaaaga

SEQ ID NO: 222613 - DNA, 122 bp, Homo sapiens
tgacaaggcaggcatagggatgaggaacagggatcaaccctccgttaaggggctggcacccgattaagaccaaacagggagagataaaaacgagtagaatgtaatcctttcttcctctttcc

SEQ ID NO: 222614 - DNA, 122 bp, Homo sapiens
ggggccatctgatgccccccttttcttcagccttggagaggatggcttctcaggccgcctcgcagcagatttgtagtctggttgctgtcgttcctgaaatagcctctgaagctctgtccggg

SEQ ID NO: 222615 - DNA, 122 bp, Homo sapiens
gcgcgaacccgcccgggcagctccagtcccggactccgcagctcggagcgcagccagccacggccattgcgggaccctatttatcccgacacctcccctgacgtgggctcggaacgctccct

SEQ ID NO: 222616 - DNA, 122 bp, Homo sapiens
tgcattagatgaaagttaaaattctgaatctagtataacagcatcaatgacaaatttaaacgtgcaagtcagaggcagttgagggagtcaaaaaagttaaataagactaacaaaaaaaggaa

SEQ ID NO: 222617 - DNA, 122 bp, Homo sapiens
cccgggccgggacagtcttgcgtcggagagacagtgcagcgcgagagggccgggagaggacgccggagggaaaggaagggggagcgcgcccagcaccgcttgggcctcctccacccgctcag

SEQ ID NO: 222618 - DNA, 122 bp, Homo sapiens
cccgcgtggcctcagcccgacacgagaagtgggtcaccaagtccacggcactttgggagccggaccgaacgagttgcatccttcggggccggccggggctcggtgcagacccggcaggaggg

SEQ ID NO: 222619 - DNA, 122 bp, Homo sapiens
caggtccgtgtttggactccaatgtgacatatcaactgtggggaagatgcgggggcagggcggctctgccagcagtgctaggctctgggcctgtgcattgtgacagtgtgctccaaagtgtg

SEQ ID NO: 222620 - DNA, 122 bp, Homo sapiens
ccctgtcgcggccgccggcgcgctgcgtcgctgtcccgggcacccggccgccgccgccgccgcctcaacctcagcctcagcctcagccccagcccgacagcctgcggcccgcccgcccggct

SEQ ID NO: 222621 - DNA, 122 bp, Homo sapiens
tcctcctagcgctaggcgggagtgggaccccgggccacagcaagagtcgccgggtgaggacgggcccggcccgtggcgcctagctgtaaagggccctaatgctgcgcgtttgtcgcaaaggg

SEQ ID NO: 222622 - DNA, 122 bp, Homo sapiens
tgctccgccgcggctggcgggctctgggttccccctgcgacggaggtggcctcgaagggccgcgtcccgccccgtcctaaaccccgaagcggagtcgccgtcctacagggccgcgtggatgc

SEQ ID NO: 222623 - DNA, 122 bp, Homo sapiens
tgatttttccacagccccacggaccagagcaggatcagtacctgcttcaacgttccaccccgcaatcacctgcaccagggactcagagacccggcagcagcatggttcgcaccacagtcccc

SEQ ID NO: 222624 - DNA, 122 bp, Homo sapiens
cctcttcctcccagggcagctaaggggtctgctcctgtgggtgtgcagctgggcggagtccggctctgttctttccctcctagggcagtggatgccccaggcttgtctgttcccgctgagtc

SEQ ID NO: 222625 - DNA, 122 bp, Homo sapiens
acgtatgttcacatgcagccttcatgtccgggaatgctagggctgcccacctctcctccacgtcctcctctgcacaatcagcaacaccgactgatccctttctgcacgtcacagacccaggc

SEQ ID NO: 222626 - DNA, 122 bp, Homo sapiens
ccagtcccttggtgaggtcacacacggaggcggggctcaggattggggggcggaatcatgcgcagggggcggggcccgagagagagcttggagaagaccggaagtccctccgcctccactcg

SEQ ID NO: 222627 - DNA, 122 bp, Homo sapiens
aacccggaaacgccttgcggggcagtgtgggagggagaagtccagggcggacaggctgggcgcacccgtgctcgcgcaccccaagatggctgagaggcaggaagagcagagagggagcccgc

SEQ ID NO: 222628 - DNA, 122 bp, Homo sapiens
ggccgcctcccgggagggccgaccgcgtgggtgggagccactgcaggtgcagagaagcggcggccgggccggagcctgccccaagccgctcgcaggccgcccacccgacccctcccctccgc

SEQ ID NO: 222629 - DNA, 122 bp, Homo sapiens
ggaaaaaaatagctgggctgttcagtgtgtctgagaaggcttttagttactgtatggtgacgtggctggtgtgattaaagaaagggctttctgctttaaaaagcttggaacctaaaaatggg

SEQ ID NO: 222630 - DNA, 122 bp, Homo sapiens
gacaaagacagggcaaggtgcaggtggtgaagctcagagctgcataagtggagaggtgggcgggtgtgtcacaggctctggctctctttaatcctagctcggaaccaggctggtgggcagca

SEQ ID NO: 222631 - DNA, 122 bp, Homo sapiens
ggcctcggcgctgaccaggggtgagcacgggcagccagctgagaccggggtcaggcgcagcggcgtgcccagtgcagagagctcctcagggctcatcccgcgcgtctgtgccttttatctcc

SEQ ID NO: 222632 - DNA, 122 bp, Homo sapiens
cttccttcctttcaatcagcaagcatttccctagagcatgctttgtgccaggccctgggccggatgccggggacagatccgtggtgtcctattagggatgtctatgcttggcagtgatgaaa

SEQ ID NO: 222633 - DNA, 122 bp, Homo sapiens
tacaaaaccaatagttatatttaatgaaaatttacgtcaagatatgctttgaattgttaccgattaaccaacagaggctgaaatcagtggcctttaattaataagaaataacaactcagtag

SEQ ID NO: 222634 - DNA, 122 bp, Homo sapiens
ctccaggaagtcggcgcgggctaggcgacgggtggaagccggtaccgagaggaactacagcgtcgccgcctgggttgtgtcgccgcggtaggcgctgcgctctgagcgcagcgcaggccccg

SEQ ID NO: 222635 - DNA, 122 bp, Homo sapiens
ctgcatccctccctctgaagcgacgttgttgtctgggtaaatactcaattcatcttctggcgccaagaaaattaaggacaggtgatccaccctcggcctcccaaagtgctggggttacaggc

SEQ ID NO: 222636 - DNA, 122 bp, Homo sapiens
aaagcaggtagctactttcagagcatgatatgagctgcaaaaaattgccctgacttatgccgcccccaacacaaccactcaccatatctaaaattacacccttgaagacattcattgtggtt

SEQ ID NO: 222637 - DNA, 122 bp, Homo sapiens
ctccatgtcacggaggaggaaggccagtctcccagagatgaagcagctggcctgagagcacgtggctgagtcctggctgggtatgagcccagactgtctggctccaaaagtgacacagagac

SEQ ID NO: 222638 - DNA, 122 bp, Homo sapiens
gaacacttgtttggccaaattttaatactgctttacatgttttctgtttgtgaaacaattcgtattacatttataaccaaaaatttcaactggtaccagattgaatattcactgtcgaacac

SEQ ID NO: 222639 - DNA, 122 bp, Homo sapiens
ccactcaacacacacactcacccacacgcgcgcgcgcaaacacacacacacatattttaacgccctattcaggcctgggcttcgtctgaccaagttctcggggtcagataaccggttccttt

SEQ ID NO: 222640 - DNA, 122 bp, Homo sapiens
gacccaactgtaccagggtcacggacattcaactctcagctacccacaccggcgcgagcgcgtcatcccggtggccctgggcattcctaactgtcagagcgaatatttttgggaataacctc

SEQ ID NO: 222641 - DNA, 122 bp, Homo sapiens
gttccatccgccaggagcgccgtttcctgcctgactgcgcggccctgggcctcagtcttgcgctctgcaaaccggggtctcgaatctaccccagccctcctgtctcggcgctggggaggggc

SEQ ID NO: 222642 - DNA, 122 bp, Homo sapiens
tcctacccagtaggaatgaggccttagcttgcgcggaaaaacccaggcctggtttgagaacgtgtgaaaatgcaccgccttctaagtggctttattatacgtggatgtttaagttacttaaa

SEQ ID NO: 222643 - DNA, 122 bp, Homo sapiens
cttcaggggtcaggcaggtaacagaaacaaattatccaggcaaggcccagtggctcacagcggtaatcccagcactttgggaagccaaggtgggcagatcgcttgagctcaggagttccaga

SEQ ID NO: 222644 - DNA, 122 bp, Homo sapiens
gcgacgcgcgaggcctttcgggagctgtagtccgggtcctgtcatggcggcggggattcgcgagccgcctactacagttcccaggaggccccggggcggggtgtgtgtgagccgagcttgcg

SEQ ID NO: 222645 - DNA, 122 bp, Homo sapiens
tttgtttgcactggaatgccaaatctgcaatacaactagttagaaggtttgaccacccgacgaccacacaaagtctaagtggagagtgctgagaggtgattcaccctccttctctgcctggt

SEQ ID NO: 222646 - DNA, 122 bp, Homo sapiens
gtagtctgcaatgctttgccacctgcctgacagattcctgccccatatgtgttttctgtacgttgcccttgctcatagaacccattgatctttgcagcctaggaagaatgctcacctctctg

SEQ ID NO: 222647 - DNA, 122 bp, Homo sapiens
cttgtctgtaaatgctttcaagtcactggtaatattgctgtgaaatagacaattctgaaacgacaacaggaaatttgatattaatgtcaaactgcccagctgcggggagttgttccacaaat

SEQ ID NO: 222648 - DNA, 122 bp, Homo sapiens
tacaaaaaacccagggtgctggagcaagaagatctcatgctgtgaccctctagagggaagcgctttctgttgtctgaaagaaaagaacgcgcttccctatagagggttaccctttgagaaaa

SEQ ID NO: 222649 - DNA, 122 bp, Homo sapiens
ttggtgaacacatggaggtgctgagacggcggtgttcccagagagcgtatcgaagctctgcgcaccattcctccacacccagaccttaccctaaccatctcttccatttggctgctcctgag

SEQ ID NO: 222650 - DNA, 122 bp, Homo sapiens
agtagctccatgatccttcttggagccattaggaacatctatcttattaatgatcccgctcgacagccacgggcccgggtgcccgctcctctctcgctcctcatctgtgcacagaaaagcgg

SEQ ID NO: 222651 - DNA, 122 bp, Homo sapiens
aagtgatccacccgtctcggcctcccaaagtgctgggattacggcgtgagccactgcacccggccaactcccaaataattctaagataaaagaaatgaagacaggctgggcgtggtggctca

SEQ ID NO: 222652 - DNA, 122 bp, Homo sapiens
gagccagcgcacagcgatctctaccagggtgtggacggagggaatgccattcggagcctgcgctggctcagggcgcccgcgtggcactaggagccaacaggatttaaacaggcggtgacagg

SEQ ID NO: 222653 - DNA, 122 bp, Homo sapiens
gcgaatcacagagtggtggaatctattgcctttgtctgacaagtcatccatctcccggcgcggggagggggaggaggtctggagggggctttgcagcttttagagagacacacaccgggagc

SEQ ID NO: 222654 - DNA, 122 bp, Homo sapiens
ccgcccccgctgtcgctgtcccgccggtgctgatgctgaggctgctgctgaggctgctaccgcggcggccggcgcctgggcgcgggctctgcatctctccccctgctggggagcgcaagcgg

SEQ ID NO: 222655 - DNA, 122 bp, Homo sapiens
cgggcctgccggcctcgcctttggggccctggatgaaggtgggcagggactgcatgaggccgcggtcgggcgtggcagcggtgctgggcgccttggtgcccccgtaggggtcgcagaccatg

SEQ ID NO: 222656 - DNA, 122 bp, Homo sapiens
ggaagtcactgccccccccggcccggagtcgccttttctccaaactgagcaatcctcttacgggaattatgttacttccaagcacctttctagggtgggtcggtgatttccttttcccaaca

SEQ ID NO: 222657 - DNA, 122 bp, Homo sapiens
gtccgataggcctcctggaggcgttctaaaaacgctcccggtgactcatcaggccctgtgcgacttcagtcatcttagacaagtttatgggtttctgagcagctcctttgatacctgcaagg

SEQ ID NO: 222658 - DNA, 122 bp, Homo sapiens
tccacatcctccggattaggtccattttcagacaagctcctccagcaactacataccatgcgtcttctcaggtgtgggtcctgcaggaaaactaatacactctttgtccataagtctcaaaa

SEQ ID NO: 222659 - DNA, 122 bp, Homo sapiens
atgaaggcattagccccaccatccaccacccactccaaccctatgctccccctggtctcccgcagtccctggctctgtccagctggtcacagggcccactctttgtgcatccaccttgctcc

SEQ ID NO: 222660 - DNA, 122 bp, Homo sapiens
cacacacacacacacacacacacacagcaccatgtcctgagctgctgcctcctggactcccgccagactgcacctgacagacaaagccaactaggagggaggggagtgagggagaaggtccc

SEQ ID NO: 222661 - DNA, 122 bp, Homo sapiens
tctcggggcctcttgtatacctacgttgatgccacagttcctattgccgtattatagaggcgttgtcatatatatatatattagagacagtctcactgtgttgcccaggctggtcttgaact

SEQ ID NO: 222662 - DNA, 122 bp, Homo sapiens
aagtccctcccagataatagcccaactccaccgtccatttgagaatttggagctagatgccgggcagtgccatttccccatctctggtctgtggtgggcagcgggagtcctcggacctgggg

SEQ ID NO: 222663 - DNA, 122 bp, Homo sapiens
gccgccgccgcgatgctcccggctcaggaggctgccaagctgtaccacaccaactatgtgcggaactcgcgggccatcggcgtgctgtgggccatcttcaccatctgctttgccatcgtcaa

SEQ ID NO: 222664 - DNA, 122 bp, Homo sapiens
actttaaagtgataagaggcagttgtaggggagaaaaagtaacatattttcctcatccatcgcaagggtcatgactgaaccctctgtaacgaaacagattaacaagagaaaagcataattta

SEQ ID NO: 222665 - DNA, 122 bp, Homo sapiens
acacggacagctcctctaaatctggacaaaccaagacccaacagaagcctggaattcaatcgggtcatatgtctcagctgcttggaagacagctcctgttcagggagagacaaacataaaga

SEQ ID NO: 222666 - DNA, 122 bp, Homo sapiens
cgcgacctcaaggaggtgaggcccccagggaggcgggctgccctgggtccctcgcctttccgtagagctctccctcgcgcattgctcatgaatggcggaacctcgattcagtccacaggctg

SEQ ID NO: 222667 - DNA, 122 bp, Homo sapiens
ggcccgtgacagcaggagtctgcagaaaacatgggtgggggtggcaccagccccactgagcgcttccatcctgtcgcagaagccggggaggtggtgtgccgtgcacgtgcagatcgcctggc

SEQ ID NO: 222668 - DNA, 122 bp, Homo sapiens
aaacagaagttactaccatctccctcagcctgtgaaattctggaacttctctttctttctcgccttcttcttctctcacctggaagacgagcagagtgaacacatcaggggttgtcagttcc

SEQ ID NO: 222669 - DNA, 122 bp, Homo sapiens
ccggataagatcccgtggtctgcactaaagaccttaatggcccagtccatttatggcgggcgcgtggacaacgagtttgaccagcgtctgctcaacaccttcctggagcgcctgttcacaac

SEQ ID NO: 222670 - DNA, 122 bp, Homo sapiens
ctaaggcccagggaggtgagctaagtggcccaaggtcccacatagcaaagacttataccacgcagttttgctccagaacccatgctcttaattgccgctatgctgcctctctaaataataaa

SEQ ID NO: 222671 - DNA, 122 bp, Homo sapiens
gaccccgcggctgaccgagggcgctgagccgggcctggagtacgcgccctttgacgatgacgacggcccagtggactgtgactgcccggcctcctgctaccgcggccaccgcgggtacaggt

SEQ ID NO: 222672 - DNA, 122 bp, Homo sapiens
ggtcccccagccccccttattgtgcatgtgggtgcgtgtgtgtgcgtgtgaacacatacacgcacaaacacacgttagctccaggtgccaactaggggtggagctgctagacctgcttgcct

SEQ ID NO: 222673 - DNA, 122 bp, Homo sapiens
gtaggtgccccctccccaccctttgggctcatctgggctatgcccatgggcctgtagggacgggaaaccggcctctctacgggacaggccttggagatgccccaaggtagcggctgcctcag

SEQ ID NO: 222674 - DNA, 122 bp, Homo sapiens
gctgcgactacgaagtacggagtacggagtacaggtctgccagccaagactgacgccgcgcgctgcgccgcgcacctcgacgtcaccgcgtagtcccgccccgaagccgtgcgtggccgggg

SEQ ID NO: 222675 - DNA, 122 bp, Homo sapiens
ggcgcctcctgggggagcagcctcctaagagccgcaaagctgcagaactttaacaggggccgggctagggtaggcgccgtccctaaagaagtgaggggaggtctctttttcttagaaccacg

SEQ ID NO: 222676 - DNA, 122 bp, Homo sapiens
ggggcggtggggggcgggggtgtcctctgtataaaaagtgctgtcctgcgagcttcccgacggacactttggggcatctgagcgattcccggggagggcagctctgccttcctcaggctacc

SEQ ID NO: 222677 - DNA, 122 bp, Homo sapiens
cccacccgcggcccagctcgggccggtacccacccagcaccgcggggctgctgctcaggacgcattcctgccccaggccgcggatcagttgatgaccggccagggcagcaccgcagcggtcc

SEQ ID NO: 222678 - DNA, 122 bp, Homo sapiens
tatcacttttatgaaagtcagcttctgaaaacggactatgggaagttccttacccgtgcacgcggcaaagaccttctttgccatagtcagaacacacgcgggagttcagaggagcggggccc

SEQ ID NO: 222679 - DNA, 122 bp, Homo sapiens
agggaggcttgaactggaaatcctagagaactcagtacctggagcatagtttaaaagggccgtatgggatatgggtggggcccaccagagaggagggccttgacaggagcctcttctgccca

SEQ ID NO: 222680 - DNA, 122 bp, Homo sapiens
cactcccgctccggcggagctaaggttaacattagacgaggctgtggctaccggaaagagcgcaggcgcagagcgcggaatgcgcctgcgcagagcgctgggcgacgtggccagtcggggcc

SEQ ID NO: 222681 - DNA, 122 bp, Homo sapiens
cttcaacatgtccttacttttctattctattaactttcctcctgggtctaggattgacaacgatgcagtctcaatctttgaaatctatttctaccatgatgctttccctgattctttaaaca

SEQ ID NO: 222682 - DNA, 122 bp, Homo sapiens
ctgcggaggggaagagggcagacctcagcgctgcgggggccggcggcgtcctggtgcccgcggcaggctccagggaacaaactcgctttcgctgagggccccagggctgtagcgaggggcag

SEQ ID NO: 222683 - DNA, 122 bp, Homo sapiens
ctcgctgccggtgccctggggagtgcaggcggccagctggctcctgtgctgcgccctgtccgcgctcaatccgctgctctacacgtggaggaacgaggagttccgccgctccgtgcgctcag

SEQ ID NO: 222684 - DNA, 122 bp, Homo sapiens
gaattctgtcgcagcagggggcacaactgtcagccaatcagcttggagaacaggcacggccgcgtcccccccaagccccacccccgacagctggatcttgtgactgggctcctgggtagagt

SEQ ID NO: 222685 - DNA, 122 bp, Homo sapiens
tgcggacaagttaatgaagtagctggaaaatgcacaaagagaggatgcaaaagaagggtgcgaggggagggaaggtaagaggattaaagctgcaaaaacattcctctaatggatttctcaaa

SEQ ID NO: 222686 - DNA, 122 bp, Homo sapiens
actgaacacttgaaatgcagtttgaccaaatcgaaaggtgctgtgagtgcaagcagcatacgggacttcagagacttagtacaaaaggagaatgtaaacgatctcgtgaagatttctacatc

SEQ ID NO: 222687 - DNA, 122 bp, Homo sapiens
atcccccagctctaaaaatagtagcagttccatctcttgtagtttacccaaccccaagcacgcctttatcactagtcctttgcaaatatactatctttaaattatcctaatttgagtgtacc

SEQ ID NO: 222688 - DNA, 122 bp, Homo sapiens
aaactgaagccctcttggttcccaaattccccttcccaaaagtaactgcaatgaatttagcgtgtaccccttcagcccagtgttcgaaacttgtgcagacatgtagtcctgaataatattac

SEQ ID NO: 222689 - DNA, 122 bp, Homo sapiens
cagctgcctgtccccaagaggcggcaagcacagccagtcgcctggtctgcgatgccaggtcgccccactccagcacgggggtcaaggtcctggcattcttgtcgctggctgaggtgggtcag

SEQ ID NO: 222690 - DNA, 122 bp, Homo sapiens
aatccaccagcactgccccagacggcgccgccttgactcctccatcaccttgtaagtggacgatgaaaccgaaaccacaacgcccagcgtccccggcccgtccaaacagtctccactgcaaa

SEQ ID NO: 222691 - DNA, 122 bp, Homo sapiens
gtgggcgtcttatgaagagctgtctggcatacggaggcgggcagcagaagccattcctgacgtggctttgatagttcatggaaataaaaagagcccatttctttctttctagatagactttc

SEQ ID NO: 222692 - DNA, 122 bp, Homo sapiens
ccgccccctgcctggggcggaggttactgggaagctcccgccttctgacccctgcgggcccgcggttgagagggaccctcccggggctcttttgcactcactggggctcgtgctcgctttgg

SEQ ID NO: 222693 - DNA, 122 bp, Homo sapiens
tgaatggatgatcttttccacctagggatgatgggtcatgccaacttttctctttacagtcgccctcaatttcttgcattgcatatgtggtatgcagaataatagcctccctgaatacgtcc

SEQ ID NO: 222694 - DNA, 122 bp, Homo sapiens
ttccgggtagagtggaggaacctgtagttttcctctccccgggccagaaagtagccaaaacgaaagagcgcccgcccaggtgaccgcagggcccggagtcccaggtgtcctggttcctaacc

SEQ ID NO: 222695 - DNA, 122 bp, Homo sapiens
agccccagcatgggagctgcatgcagccttggtgaccaactctctcactcatttaccagccggagacactgaggcctgggagtgcggttgacttgtcctaggttatgcctctggtttagcct

SEQ ID NO: 222696 - DNA, 122 bp, Homo sapiens
ctctacacctgattgttcattgtttgtttcctgctacttttctgactcccatgtaagtctcgtgaaagcagatgccagaatgaggagatcaaattaacatttgttaagtgaatgactcacta

SEQ ID NO: 222697 - DNA, 122 bp, Homo sapiens
tgtgaggagcgcctctgcccggccgccatcccatctaggaagtgaggagcgtctctgccccgccgcccatcgtctgagatgtggggagcacctctgccccgcctccccatctgggatgtgag

SEQ ID NO: 222698 - DNA, 122 bp, Homo sapiens
tggtcgttttctggatgagccctcatccctcctgccacataagtgaccttagcaggcccccgaggcccaaagagtctcacccggtcactgaacgtccccgcactcagccggccccagaccag

SEQ ID NO: 222699 - DNA, 122 bp, Homo sapiens
aatgtgttcccaagatactaagtgcagaaggatcggacgccactaaatcccaatctgtcacggctggcagaagagagagggtgaagggtggggaggggtcgtggaggcggcccccctgcagt

SEQ ID NO: 222700 - DNA, 122 bp, Homo sapiens
cccgtgggaagcaaggtaggacccgcagcttgcaagaatctgcaaggtgggaacggcgttcgggatgtgtttggccccccaaggccaaggcacgaaggggtcccaggcgggtcgccagcggc

SEQ ID NO: 222701 - DNA, 122 bp, Homo sapiens
cgcccgcaccgactccgagcacagtgccagccatcccgcggggaggcagcggcggccccccgccctgcgcgccgcacgatcgagtgtcctctgtgctccagtgcaacacactcccgtgaaag

SEQ ID NO: 222702 - DNA, 122 bp, Homo sapiens
tctcgggccgacttcccatatctgctgaccagaaatccttccttgcagccgcccctgtaacggggctggcatttgcaattcgaaagtgtctttggccttgtttttccgaggaaatgaaaacg

SEQ ID NO: 222703 - DNA, 122 bp, Homo sapiens
cacttttaactctgcctggaaaggtcaggggaggcttcccgcattcagggaaatttgagccgagtttgaatgttgggtaagaggtcacctggcaaacctggaaggaaagagcaatccaggaa

SEQ ID NO: 222704 - DNA, 122 bp, Homo sapiens
tctacccaatagaaggccagaaagccaatccggaccgttagggagcccaatgggcgtcgccgccaggccccgttgcagagcgcgtctagccaataggcagcggcggcgggcgggcgcgggcg

SEQ ID NO: 222705 - DNA, 122 bp, Homo sapiens
aaaaaatgacagaaattggcttcaattgtttaaaacatggagcaccgagtctatgattgacgtgaccttcaggaaaataaaatacatccacaagttttgtcacttcaagctttgcttgttct

SEQ ID NO: 222706 - DNA, 122 bp, Homo sapiens
tgggtgttgggcagggcctggcggtgtgtggggtaggcggggggcgtggccgcgattagccgcgcgcggcgtgggggcgtggtcgggttgcgggggtgcgcgcggccggccgggcgcgcgcg

SEQ ID NO: 222707 - DNA, 122 bp, Homo sapiens
ctgtttccgtcggcatcactgatagggcctctgaaataatacgctgttgtacctgcctcccgaaggggctggctgtttccgtcggcatcactgatagggcctctgaaataatacgttgtcgc

SEQ ID NO: 222708 - DNA, 122 bp, Homo sapiens
ggtttcctcccccctccagcggagcctcagcgcccgccgcgtccctccctccgcccctttcgcccacacctacccgcccccgccggcccggctctcagtagcgtcgcccgaggctgcagcag

SEQ ID NO: 222709 - DNA, 122 bp, Homo sapiens
cgtgattggtggcttcctggcttccaggccttgcaccaggccgtgtggagcatcgtctaacgagacagcagctctgcatgcctcatcttatgtgaacaaacgcagaggccccgaatggatgt

SEQ ID NO: 222710 - DNA, 122 bp, Homo sapiens
ggctgccatcaagatgagggtgagggccagagggcacagccacatggctctgggtccagtcgctgctcctgccggagggatggccgtgagcccatctgccacctctgccaacatctccccca

SEQ ID NO: 222711 - DNA, 122 bp, Homo sapiens
cagtgacccctggggtaccttggactgccaactcgagttccttacactattaaccccactcgcaatccatattcagccatcctccgcagtttccctgtcaggttcccaatcacaccaatttc

SEQ ID NO: 222712 - DNA, 122 bp, Homo sapiens
cccatcaccacccagtagttgggaccacaggtatgtgctaccacggccagcgaatttttacgtactttttgtagagacaggattttgccaagttgtccaggctggtcttgaactcctggact

SEQ ID NO: 222713 - DNA, 122 bp, Homo sapiens
tggctcgggaggaaatggacaggcgcggagttggagtcggagccggagccgggggttgcccgttagtggcgctcttgggctggcacaccggtgctgctgcgggaacggccactgaggagtca

SEQ ID NO: 222714 - DNA, 122 bp, Homo sapiens
agggatttgcatccatctaagcaaagggcatcaagccaagtcatctgatgagagtgactccggttggggggtgggggcgtgtgggaggccgagcctgtcctcggatcagttgcgtactctgc

SEQ ID NO: 222715 - DNA, 122 bp, Homo sapiens
gcgccgggcccggttttcatggacccggagaagctgatccagttacggccctgccggcaacgggattgtccatcctgcaagcccttcgactgcgactggaggctctgagcccgggtgagaga

SEQ ID NO: 222716 - DNA, 122 bp, Homo sapiens
ttcctccagaaggttctgcacagctcccaagcgtgaattaaactgaaaggtgtcaaacaccgcagttccagagttgagtctggaggtggaagacaaccaaaccactccacctggagctgcgg

SEQ ID NO: 222717 - DNA, 122 bp, Homo sapiens
ctgcctggagagaccagatggcaagctttttggggaaacaggacggaagggctgaggccacggaaaaaagacccaccattttgctggtggttggacctgcagagcagtttcctaaggtaatg

SEQ ID NO: 222718 - DNA, 122 bp, Homo sapiens
caactccctcagcactccggagagccactgtcctcaccttcaccattcctgtcaaatctccggcccacttctcccaggagaccactctgtggccaacttcagcagccgaggcccctgggtgg

SEQ ID NO: 222719 - DNA, 122 bp, Homo sapiens
tgcttcaggccagctaatgtggctcttcaaactagggatgtgcacgagctagatgcgtgccgtgtcactgtgggtaacagagatgcaacctgccaaggtttgttggtcaccgtggtcaatgg

SEQ ID NO: 222720 - DNA, 122 bp, Homo sapiens
ggcgcgcgggcgtgttcatcagtcgctgtttgggacgctgggtgtgcggtgttctgtctccgctcccgtttcgctgtcacagcccgttccttcccggagcccgggacaggctgggcgcgcgc

SEQ ID NO: 222721 - DNA, 122 bp, Homo sapiens
cttggctctcagagctggttttggcattatgagctctgtgtgtgcactggagccatggcccggcccagggctgacctgccaaaggccaaagaggggtacgtgtaaaggatttaaaaggtgtc

SEQ ID NO: 222722 - DNA, 122 bp, Homo sapiens
gtgttttgtttgaggggacagaaacacacgtctccccatcccagcactgcctgtgttgagcgagcacacatcctcctcctctgtggcaggacggggcgagcacgtgcacctcgtgaccaccg

SEQ ID NO: 222723 - DNA, 122 bp, Homo sapiens
ctatgctcccggcacccttagggctgaggtgtagggacttactccatccccagggaacagcgtgggtccggagaggcgactcccaggagggccccagggaggtcgcagcccgagcagctttg

SEQ ID NO: 222724 - DNA, 122 bp, Homo sapiens
gaaacaccagggcatggcagccaccacctgaagctgaagaggaaaggggcaggttttccccgacagtctccagagggagcgcggccttgccatcatcgtgatcttggacatctggccttcag

SEQ ID NO: 222725 - DNA, 122 bp, Homo sapiens
aggtaaaagcaacttgtccgcagttaccaaagcctagatacgcgttagatgcgccttttccggcctgtgcgtctgctctggttcctctcaggcagcaaagctggggaaggaagctcaggcag

SEQ ID NO: 222726 - DNA, 122 bp, Homo sapiens
agacacgctggcgcatggggacgaggagccctggagactcagggcccgtctggtgcggcccgggctttgctccgcgctcgccccctgcagctgccggggccgccgcaacttttcaaacctca

SEQ ID NO: 222727 - DNA, 122 bp, Homo sapiens
cttgccgccgaggggtgccccacgcagcacagacacgcatcctggggtggaagccggaaacgccaccaattcccgggtgcggcgcagggcctgctgggaaggcactggcctacgggagatga

SEQ ID NO: 222728 - DNA, 122 bp, Homo sapiens
agttcaatgtcattatgtgcataatacacttagcactgtgctagacccacatgaagagctcgatagatggtagctcacatcattaattactccaggtaattctggtttaatatttacaactg

SEQ ID NO: 222729 - DNA, 122 bp, Homo sapiens
cacagatggccaagacgggccggtccccggaagttccccgtctgatgatgcagggaatgacgatccaaacagacacctagaagagaggatggggagagaggggcagagggttttgtggcgcg

SEQ ID NO: 222730 - DNA, 122 bp, Homo sapiens
agccggcgctgccagggcgcagggagggcggcactcggccccagtcttcgcaatcccgcgcgctctctccgccgtgggacctgggtccccgcgccgctcccctgagccccgagcgcgcggcg

SEQ ID NO: 222731 - DNA, 122 bp, Homo sapiens
gaattccaaatcggaagcaagagggcggggccccgtgagaggcgatggattgctccagtccgttcccgacgcactgtgcgcatgcgctggtcctccgcggaccgttcgtgctgcccgcctag

SEQ ID NO: 222732 - DNA, 122 bp, Homo sapiens
agaagtcgctgcagaaggtaaattgccacgacccttttggaaagttatctggcataagcacgtaaaagtgaatatgtgcgtagccctgatcctagagacactcttgcacatgtacacctgga

SEQ ID NO: 222733 - DNA, 122 bp, Homo sapiens
ggaggcaggggcatggaaggaatgacctcctgggcaggtccagatccagcatgacctcaccggccggggccctgagaaccggacactcgagtcctgtggacactctggagtgaatagggctg

SEQ ID NO: 222734 - DNA, 122 bp, Homo sapiens
aaaaagtatgaggaatgctcaggccaattatggagtgaaagctggtaaccagatgcttaacgggaagattgggatattggagcaccaaggctacttatgacatgagggcgtttaccaatatt

SEQ ID NO: 222735 - DNA, 122 bp, Homo sapiens
atttataagactaaagctggagagtagagggtgacagcagacactcctcaccccagcctacgtgtctgcggccccagcaaggacccagagggtggtctccctccaggctccagggctgggaa

SEQ ID NO: 222736 - DNA, 122 bp, Homo sapiens
tcctgtcctaggtgccctcatggtgctggggtagctgagacagagctgccgacatcaggccgcgacgggcaggatgcttgtgctttctgatgttctcagtctttcttgtttgcctaaagtac

SEQ ID NO: 222737 - DNA, 122 bp, Homo sapiens
ccattgctatgccaatctgttttctctttctgctaccatagcaagaacgtccagtgtcaacgacccctccaagccaagaccagcgcttggtagggactggacagggctgggggcccccagca

SEQ ID NO: 222738 - DNA, 122 bp, Homo sapiens
ttgtgcattgactatggaggtgtatattcaataaagacagcagcacacagatatgttcagcgttcaaaatgtgtcaaaattcccagttgtagtgtcaataaaaacatccacagtgtctccgc

SEQ ID NO: 222739 - DNA, 122 bp, Homo sapiens
cctagttttaaaaaccatttcccattaaaatgaagttggaggaacagctgcttctggagccggggcaaaaatttcaaggtgagcctggagcattgtgtgtggtgaagtaaaataaaggctca

SEQ ID NO: 222740 - DNA, 122 bp, Homo sapiens
gtgaccggggcgcacccgccgattgtggccatggcggccgcagtctctagtgtggtgagacgagtggaagagctcggggatctggctcaggcccacatacagcaacttagcgaagctgccgg

SEQ ID NO: 222741 - DNA, 122 bp, Homo sapiens
acccatttgcccatctgggcccagaaccccaggaatagcccccctctcccctcctctgagcgcttgcaatttgctagccttgctgagacagatcgacacgctcagcctcagagacagctgat

SEQ ID NO: 222742 - DNA, 122 bp, Homo sapiens
aacattgttatacttatttggtatttcttttatgtctatctttggagatctaagagcatgcgctgcaggtattcagactaaatgtctatcgacaatcttgttatttctgtatgctctctgaa

SEQ ID NO: 222743 - DNA, 122 bp, Homo sapiens
agctacaaccctaaccaatgacatatcttctttttcgcgcccaatagtgtttataaaaggcgctgcctttcctcgttggctactttcagtaagttgtgaccagtatgtctggacgtggcaag

SEQ ID NO: 222744 - DNA, 122 bp, Homo sapiens
gagagggaaggggaggtctgccccactaacacaagacagttttcatttgtaggccctcaccgcaggctctctatcaatttgtctcaatgcaaacattcaaaatatcccctttggctgctcgt

SEQ ID NO: 222745 - DNA, 122 bp, Homo sapiens
caggcaggcctcagaggactggacaaagaacagtctaacaccatggtcttggccagaccccgaggcaggaggcaatgaaagtatcaaaccataacacccttcccaactccagttcctcccaa

SEQ ID NO: 222746 - DNA, 122 bp, Homo sapiens
aggtccgggctccgctgtcgaggcctttgctgtcgaggtctcattttggctgcttcgggtcgccacgttgcctgatgtcccagactctctgttgaaacgccacaactctgttcagtgatggg

SEQ ID NO: 222747 - DNA, 122 bp, Homo sapiens
gaattgcgccaccgtgcgtctcacagggacgcaagaaaactgcaggcggcctctgcactccgtggacggcagtgtgtccacaaaaagtaggcgaccctaagctgtcacaggcagggggcgag

SEQ ID NO: 222748 - DNA, 122 bp, Homo sapiens
tgccctggtgtcctcttcgttctggcccggggctggcgcggggaggtgcagcattaggggcgctgaggtgacacccgagaacttcccagggagagggtgcgcgggggggtggatttccacag

SEQ ID NO: 222749 - DNA, 122 bp, Homo sapiens
gttgtgatgcacttttggactatggagttcttgttttctctctcctagatgcagatgcttcgcatctgtgactgcttgcagagtccttcctttgagccattgccccctgctgttattttgcc

SEQ ID NO: 222750 - DNA, 122 bp, Homo sapiens
gtgctactctgcgccctccgcttctcctgcctcctgcgcctgcctccccaccccccgccgcgtcgccagaatttcctgagccgtctggatttcctgcaccgccagtcgcctcttccccacgc

SEQ ID NO: 222751 - DNA, 122 bp, Homo sapiens
gttctctagcctctgtgttcagggagtgaagagaacgtgtgctaaccaccgccgcatccccgacggcaacgcacgcccagcacaggtgaaggagctctctgaagccacgctgtggtccgagt

SEQ ID NO: 222752 - DNA, 122 bp, Homo sapiens
agaaaggccttgtacttggcacagaagaagggtcagcttgaggaatgaataagcataggtcgtgggggcaaggttcttttgctagcccatggttggtgcttcagggtcaccaaaagatctaa

SEQ ID NO: 222753 - DNA, 122 bp, Homo sapiens
gtcctcagacagtcactcacccatcagacaggatgccctctgcaatctcacacaccaggacgaagagcagcatgaaggtcaggatccaccgcaggttgtgcccagggaaatgaagccatgtg

SEQ ID NO: 222754 - DNA, 122 bp, Homo sapiens
ctcaagcttgcctacctgtccagcttgctttctttttattatgaaataatttcaaatacacggaaaagctgttagtacaaagaactccagtatactttttttttttttttttttgagacgga

SEQ ID NO: 222755 - DNA, 122 bp, Homo sapiens
gaggataacagtagtcactactgcgttttgtgagcgttggttaatatatgaaaaatgccacgtgtttgccattagcatcaatcatgccataaccagaaaaattacattgcattttttatttt

SEQ ID NO: 222756 - DNA, 122 bp, Homo sapiens
aagatttaagcagtagacacaagtcacatgaaagaggctctatgcatcatgtggcctgtccgaataaaaagcaaacattagaatgccatttcagcagttacagtgttgatatgatcaatata

SEQ ID NO: 222757 - DNA, 122 bp, Homo sapiens
ggacagacgttggagagatggtgcccctttgtgcccagggtggagggggtggggctttggcggaccagggctggccctttctgtgccccaagaggagggtctcctcgaggggtctctgcctc

SEQ ID NO: 222758 - DNA, 122 bp, Homo sapiens
aggggccgggacatggctgcaggagggcgggccggactggactgatggtagaggggacggcggcctcagcactgcctccagccaaggagtggagctccccagcctcaaggggatttaaagcc

SEQ ID NO: 222759 - DNA, 122 bp, Homo sapiens
atacggagggagggaccccaaaatatagaaattctaaccaccctctcggctcagccccgacgaccctgggagccgtcaacttgcccccacagtcccggattcccagccccctacttcctcac

SEQ ID NO: 222760 - DNA, 122 bp, Homo sapiens
cggaactagagagacggcctgggcggccgaaggccagcctcccttcagcagggccggggtcgctgccttaaaggagccctcaagtctgccaccctgtggcccataacctgtctgctgatctc

SEQ ID NO: 222761 - DNA, 122 bp, Homo sapiens
aaaacaggtgtgacccagactcgcgccctcgccagacacagatgagctgttggccaaatgcgaaggccgccaaagccgtccttgggcgtgaaaggtcttgggaagtttcccctttctagacc

SEQ ID NO: 222762 - DNA, 122 bp, Homo sapiens
aaccgttcactgatgaattctagaagacacaggtctgggatggccctgtggacacaactccgtaagtgctcagctgaggcttttgggtgcagtgtgggctgaccgcacgcccactctacagc

SEQ ID NO: 222763 - DNA, 122 bp, Homo sapiens
aagccttcgaggtgggcttgtccccagccagagaggcggaaaatcaatttggctggcaaacgagagcccccaagagcttagtccacgctccataatcctatccactagcagctcaggaaata

SEQ ID NO: 222764 - DNA, 122 bp, Homo sapiens
tcacgttgccccctggcatgatctcgtggctcatgggcaggatggagaagcgcggggccacgcggcggactggggagggggcggcagtggcggcgggagggagatgcgaggggtgaggtggg

SEQ ID NO: 222765 - DNA, 122 bp, Homo sapiens
attacaattaagtgagaattagcagaatgttacagttctttaacaatttgcgtaacaaaccgaggcgtcctacgccatctcgctgaaatgaaattcggatgtagacacccttgcgcttcagg

SEQ ID NO: 222766 - DNA, 122 bp, Homo sapiens
cagaaagaaagccatgatcgattattgatgtttgcaatgggcgtgggtggggaaagtagtcgtacttgtgccacatatttgccatccttggaccagatgatctttatttaaagatctttcca

SEQ ID NO: 222767 - DNA, 122 bp, Homo sapiens
tcaccgggtgggtgtgctccaagcagctgagacctagaagaggagcctgtgacttacctccgcccacaagcgagccacagagggctggctgctccccggggcttttataggccattggtaac

SEQ ID NO: 222768 - DNA, 122 bp, Homo sapiens
cgggcccctcccccttggtctcaggcctcgcaggaggagatgtccactccggcaaagacccggcatggtcctcacctgctctttgagccaccctttggtacttaaagagaggataccctttg

SEQ ID NO: 222769 - DNA, 122 bp, Homo sapiens
cccaggaccacgagctcggaggcctggggccgggagatggcgcccgtggagtgggtcccgcgagaaggccgggaatggcgggccgctgtcgttcccacctgggccgccaggtgggtgccgct

SEQ ID NO: 222770 - DNA, 122 bp, Homo sapiens
tcagaaggggaagaaaagcccagagtccgccccccgctgcggctgcgcgctacgtcactacgtccggcgttgtcgtcacctcgtcctgcgttccggccgtccctgcttcctggcttcccgcg

SEQ ID NO: 222771 - DNA, 122 bp, Homo sapiens
tgaacccaggaggcagaggttgcagtgagccgagatcgcgccattgcactccagcctgggcgatggaccaagactcattctcaaaaagaaaaaaaagagtgagccattgcatattgatttaa

SEQ ID NO: 222772 - DNA, 122 bp, Homo sapiens
ttatttcagacagcaacatggacttcaaagctgctgagtgctaggtagcaagggagggaacgtgtgctgtgatcatccaggaaggaagcagtgggtggtgaatcagaactcagagaaggcag

SEQ ID NO: 222773 - DNA, 122 bp, Homo sapiens
cccaggagcagtttatttcagtgtaaaatgccaggcggcttaatgtgaccactgacagcacgagtttgatcctggcttttctgcttctcagctgagatccccagcaagttacttgagcactt

SEQ ID NO: 222774 - DNA, 122 bp, Homo sapiens
gataataactgccttactcattgccatttgaatgttgtttagatgcaacaaagtaatgtacgcgagggttaaaaaaacagtagtaagacattatagggatcactcaaagaatgtgactaggt

SEQ ID NO: 222775 - DNA, 122 bp, Homo sapiens
gtctcgccaggaggcgcagacccggctccagggccagcgccacggtatgttcctcgtccgcgattcttccacctgccctggggactatgtgctgtcggtgtccgagaactcgcgggtctccc

SEQ ID NO: 222776 - DNA, 122 bp, Homo sapiens
gtctgggccccccgatttccacaggcaaggctaccttagcccttttaaaaggcagagctgcggagggggccggattctaggaggaaccaatgaaaagcctcactcggcctccgctcctccca

SEQ ID NO: 222777 - DNA, 122 bp, Homo sapiens
aggctgagtgcttttaactcttatcctaaacttacccattcctcacttgtgtgcttacatcgaccaacactgtattctgatgaatgtggcagataagaaacatctattgtaccaagggtcag

SEQ ID NO: 222778 - DNA, 122 bp, Homo sapiens
tgggttcttcgattcattcatgcttgtgtcccgagccctctggggatgcaggaggcacagcgggaaagggaacaggtgctcggtccaggcggccttggggcagacactgtcccttgccagcc

SEQ ID NO: 222779 - DNA, 122 bp, Homo sapiens
cttgaaggtgtcatctgtaaaatgaaggggctggatgcatgaagggaggttttgcgaccccgtgtagtgtgactgggctggcttagtgagtgttcgccgcccctgccttcaggtggcagtcg

SEQ ID NO: 222780 - DNA, 122 bp, Homo sapiens
ggctcgggcacaggagcccacggagggggtgggcggctcaggcatggcgggctgcagtcccgaatcctgccccgcgggaaggcagctaaggcccggtgagaaatcgagagcagcgccggcgg

SEQ ID NO: 222781 - DNA, 122 bp, Homo sapiens
ttttggtcaggacctgagatcatttgggctggtacagtgtaactgtacttgcacaatcgtcgtttttaagtcatcttagcttgggaagtgttggcctctgctaagagtaagccctcctactt

SEQ ID NO: 222782 - DNA, 122 bp, Homo sapiens
gtgctgtggggacacgaacgatccagtcacagggatggcctctgaggaagacactgacagcgacgccgccatccagggctccctgggtggggtgcgggcgctgggaatcttgatcagcccca

SEQ ID NO: 222783 - DNA, 122 bp, Homo sapiens
atctgttggctcagctcaactgttttggccaagagtttggcatttgttagtaaagttgcacgtgcacataacctatcaccaggaattacattcctagatgtataacttagagaaaatcttgc

SEQ ID NO: 222784 - DNA, 122 bp, Homo sapiens
tgtgccatctgtccgaatagtatgggttgcgactgccacctaaaattgggaatgcgaatccgcgctccccggaaaaatgcgaccgcgcaacaatcagacgtcagcgccctccagccaataac

SEQ ID NO: 222785 - DNA, 122 bp, Homo sapiens
ctgacgaaggagtttaaagggtttctggtccaactgtatcacccagtgatcttaaagccacggctggctgtatttctttcctatgaaacaaatttttattgatcaccgtgtaacgaccaaga

SEQ ID NO: 222786 - DNA, 122 bp, Homo sapiens
atttgttcaacgtaagcagctgaaattctgcgtggggtggtgatgaacggctctagcactcggtaaaaggtatttaaagcgcatgtagtttacaacactaacagcccgccgcccgcgagcac

SEQ ID NO: 222787 - DNA, 122 bp, Homo sapiens
gggggatggtaaagaggggaagaggaagacccagaaacgaagtcccctccaaccccatctcggggaccaagcagagactaggcctcaggctagcccagcagggcttcctgtgtcctggttgt

SEQ ID NO: 222788 - DNA, 122 bp, Homo sapiens
cgcttccgggtagaggtgcggctgggccctttacgaggttcggtcttggagctccgtcttcggcagcgggctcgggggcctcggactctgcataaggccccggaaaagatgaccggccccgg

SEQ ID NO: 222789 - DNA, 122 bp, Homo sapiens
aatacccagcttgagatgtaaattttggagtcacaatttaaagatgatagttaaaagcaacggcaatggatgagatcactcaggaaaatgtagagtgaaaatagaagagaaatgaggttgga

SEQ ID NO: 222790 - DNA, 122 bp, Homo sapiens
aagaaagtctctgggatggaaccagggaactgttgtatttcagggtggttctgttgtgcacgtggattcaggactactctttctgttcaaaagtcccacaattctaaatataaaataattta

SEQ ID NO: 222791 - DNA, 122 bp, Homo sapiens
ccctccctcagtcaaatcagtgtagcaaaatgtattacccagtcacaacacaggatgttgcgaggaaacaagggtggtagcaacaaatgcagcctattctgaacactgcaaggtgcatgcac

SEQ ID NO: 222792 - DNA, 122 bp, Homo sapiens
cgcggcctgccggtaccgggaagaccctgcagagcgagggagccggggagcgctgaagcccgcggccgttggggctaagagagggctatctgcaggcgtcctaggccccaggtggacccctg

SEQ ID NO: 222793 - DNA, 122 bp, Homo sapiens
ccttcttaggattcagcttggggtggtccattgacttctccagggagctcctagcgtttgcggccgcgtcacatctccaacctttgcctcgccctgcctgtcatcccggttttctttcttgc

SEQ ID NO: 222794 - DNA, 122 bp, Homo sapiens
cactgcctgggcgacaaagcgagattcaaaaaaaaaaaaaaaaaagagaaccactagacacgggtggggagggtgggtggtcctccctacagaatccaccactcatgagggcggaccagctc

SEQ ID NO: 222795 - DNA, 122 bp, Homo sapiens
gtgagactccaggcgtgtgtgtgtgtgtgtgtgtgtgtgtgtgtgtgtgtggtgagactgcgactctgtgcgagcttcctgagtccttgtgtcaggggttgtgtgtgtgagagaggcggatt

SEQ ID NO: 222796 - DNA, 122 bp, Homo sapiens
accaagcagatcttgggtacccacaatgatctccatttcatgtctatccatttagattcccgccccccaccccacctgcctccaccaaccttgctgggaaaaacttccagatctcagtttag

SEQ ID NO: 222797 - DNA, 122 bp, Homo sapiens
tccaattcctcatcccgctggccccctggtaatttcttttccactctgcttctacgagggcgactgtcttggattccacatgtgagatcacgaggtatttgtccttgtttctggctcatttc

SEQ ID NO: 222798 - DNA, 122 bp, Homo sapiens
cctgaaagaaagcactgggattttcttaaagtttaggagaaaataaatactcggaagagacgcggggtggcgctgcagccttagaagtagcagaaacaaagcacccagccgacgctccttac

SEQ ID NO: 222799 - DNA, 122 bp, Homo sapiens
gtcctgagcgctgtcacagctgggattggtggtttcaggagcctgtgggcgtggctagtccgggggcggggcctatggtttgttcgaatgacgtcacacttgccgcagcgtataaggcgcta

SEQ ID NO: 222800 - DNA, 122 bp, Homo sapiens
gacacgcgcaggggtctgaggaatcggcttcgggattctgtggtctttgtggtccgcagccggcaccactgcttcctgtaatttaattttctctcccgaaagcgttgctaattaaatccttt

SEQ ID NO: 222801 - DNA, 122 bp, Homo sapiens
tttgtcaccccaccctgtagttggcacctgtttccacggtgtctcccatggtgtctcccacgtggcccctgtcagcctagggatcagcctgctatgagaacctgccaccttgtcctagctgc

SEQ ID NO: 222802 - DNA, 122 bp, Homo sapiens
cgggctcggggtgggggctcggggcctattacgggatggaagctccgggtgtcgcgggggcgggaggaattaagggagggagagaggcgcgcgggtgaaaggcgcattgatgcagcctgcgg

SEQ ID NO: 222803 - DNA, 122 bp, Homo sapiens
gcggggtcatccgcttctgaccacaaacttctagggcggccggaggagacaaaggtgccgcgcgtcgctgctccagcagcagcggctgcgcggcggcacgggctcggagcccgcaggcgccg

SEQ ID NO: 222804 - DNA, 122 bp, Homo sapiens
cctgcctgctgttatttaacagaggtgctgggatccggcaggggagcaacaaatgtggttcggcaaattgctaaacgaaaagcggacacccgcccacgacgcctgctctgatctgacctccc

SEQ ID NO: 222805 - DNA, 122 bp, Homo sapiens
gatcctttcctagatagcagggcctctcactatcactgggcaatcaagacgactgtaaaacgttaaacaccttctcgggccgggcagctctgcacgagaaaaccccaaatcccacatacttc

SEQ ID NO: 222806 - DNA, 122 bp, Homo sapiens
agatgaaaagatccacctcgtgatggaattgaccttcagcaggggacagtgaggtgtctgcggttgttcctcttgtgaacaacgccttaaaggcgagaaacagcctactgtacagtgtgcca

SEQ ID NO: 222807 - DNA, 122 bp, Homo sapiens
gctgtgctccgtgcgctgtgtgctttgttgtgcgctgtgttctacgtgctctgtgctgtgcgctgtgctgtgtgctgagctgtgctggcatcgttctcactcctcctggtggctgtgggagg

SEQ ID NO: 222808 - DNA, 122 bp, Homo sapiens
acagtaacgcccgttctcctttggtgaaagtagatgacaggtaggtgtggtctgtgtggtcgctggaagtcctttgttcaatagctgtgccacgcacttgaccgtagctaatcccagcgact

SEQ ID NO: 222809 - DNA, 122 bp, Homo sapiens
agataataggcaaagcaggcaaagacctcaggagtctagaattttcccctgcaggcaaggcggggtgtgggcacggggcctggggccgggcagcaccggacgtcaaggtattgccgagaacg

SEQ ID NO: 222810 - DNA, 122 bp, Homo sapiens
gtgtggagggctgattggtggccgataaatggaatgattccgcgtgggtgtgggctggcccgagccgcgccagggttccctggatgtctggggttgcctgcaggtttggattggttgggttg

SEQ ID NO: 222811 - DNA, 122 bp, Homo sapiens
aaccttacattttacttcgttggggcagttgtttttaggtggccgttggtcttgatgtttcgagaacagacatacttagataaagtcacgtaagatttcagttctcaccttgcacactctgg

SEQ ID NO: 222812 - DNA, 122 bp, Homo sapiens
ccccttccgcttcgggctcgctgacttccggcttagggccgagggtggggaactgccgggcgcggaagcgatgggcatatctgtggcttattttcagcactgtcgcgcagacagtggcgcga

SEQ ID NO: 222813 - DNA, 122 bp, Homo sapiens
ctgatcttcggtgggaagggttcagggagactgcagcacttcgatggcttgaggcaagaacgtacccatgtccctgctgaggggatgtgttagtagtaacctcagaccctctctgtgctgaa

SEQ ID NO: 222814 - DNA, 122 bp, Homo sapiens
tgagaagcaggagaaatgaccacgcagaccctgcaggcagaggctgtcagtctctgagcccgggccatggctgctccttgtgtcaaaggaaatgctaccaagtgtgtagcccgcctgcctgg

SEQ ID NO: 222815 - DNA, 122 bp, Homo sapiens
tgggtactagcagtagagaatgaacggcccgtgtgacatggtggtcctcactgatgacgacgggctgttggagctgctgcttaagccctcatcacagaagctcatagccaccagatcgcatt

SEQ ID NO: 222816 - DNA, 122 bp, Homo sapiens
aggggggaaaaaacaagcagctctgtctctcccataagacatatgataaaatattaagcacgtaccgtgtaacaggcatcatgcaaggcattttgtaaacctttttccaatgtaaactttat

SEQ ID NO: 222817 - DNA, 122 bp, Homo sapiens
acacacaaaagcagcccaggacagcccatctcgctaacagcccagccccgccagttcagtcgaagacttatttttagtccccaaataggggctgcattcaatatctgacaattcacacaaaa

SEQ ID NO: 222818 - DNA, 122 bp, Homo sapiens
tactatttttgatagtccgattcatccgctccacctttccggaactctgaggccgggaggcggcatgcagtttccgtgtgatccccaatacctttgccgtcttctctaccaaggcagccaaa

SEQ ID NO: 222819 - DNA, 122 bp, Homo sapiens
agccctttattcacttctaaggcataaacgtttttccattatcattaaaaatgtcaaacacgctgaggcaggagaatggcatgaacccgggaggcggagcttgcagtgagccaatatcgcgc

SEQ ID NO: 222820 - DNA, 122 bp, Homo sapiens
cgcacaggccacgccctccgcgcacagcccaagctcgcggccacacccccaccgcgcgggcgctacgtcccgccccgcacagggctcgctcccaggcacaccctgagctcgcggccacgccc

SEQ ID NO: 222821 - DNA, 122 bp, Homo sapiens
tgcataatcagctcaagtaatgctctcattggattccattagaatgtggctctcatcgctcgcctggactgagacttgagaggaggctgttgccagctgacctcaaggtagcaaaaaagaaa

SEQ ID NO: 222822 - DNA, 122 bp, Homo sapiens
aatagtcattctttttgctctcaaatctgcaattgagcaggacttggtagggacagcttccgtctgctccataggacatcagtcggagcagcactactagtgtctggaggacccccctttta

SEQ ID NO: 222823 - DNA, 122 bp, Homo sapiens
caggcccgtgtcgctctcccgcatggacgccatcttgggggaaagcgcgcgccgctgccccggcatcttatgaagacacctacgcgtccctcgctaggaccccaacatggcggcgcccgtcg

SEQ ID NO: 222824 - DNA, 122 bp, Homo sapiens
ttgccggccccagggtaagagccacctcctaggccgcagtggcccaaggtcccagctgctcgcctgaggccgccgggggtgcggtccaggcctcccgtctccgggggatctgtagggttccc

SEQ ID NO: 222825 - DNA, 122 bp, Homo sapiens
ttttcttctactgccagctgcgaaccctggtcctcggaaaatcgacataataatccctgacgtttgctcttcagtctcgcggcatttaaggtatctccgagcccctttgggaagagcaggaa

SEQ ID NO: 222826 - DNA, 122 bp, Homo sapiens
cctacttctgtcggcgtctgttcgggcgcccgcagaagccagactcttgggcagggaagacgctaaccgaggtctccaaagttcaaagacccacaagcaaactgctccttcacttcagcagc

SEQ ID NO: 222827 - DNA, 122 bp, Homo sapiens
ccaactcacgcctaatcacaggaagaaacagttggcggagccatcaccttcctcattccacgcatccacggccatgcccaggttccaggcctgaatctcccctttatacacaggaagagaaa

SEQ ID NO: 222828 - DNA, 122 bp, Homo sapiens
aaatgttctgactcaggcgtcttttaaattcttagagctgtctttacacgctgcactgaacgttaaattgattttacaggttattttcacaagatatgacccttacagggcccgagatgaat

SEQ ID NO: 222829 - DNA, 122 bp, Homo sapiens
ttttatgtgcctcagatgcatgatggagttggtggaaggcaggagattagtagagaacttcgaaagaacagaaggatcatttgcattggacagtagtgtttcacaatagaaattgatgtctg

SEQ ID NO: 222830 - DNA, 122 bp, Homo sapiens
acggctcccgctccacatgtgcgactcgtgtttcggctttcgctggcgacaaactggagccggggcctttccgcttaggaggaactcgctacgtgtcgctaacaacaacacaaacaccgccg

SEQ ID NO: 222831 - DNA, 122 bp, Homo sapiens
tacgggacatcagctggtaataaacgtcacggaggtcagaacagctgtgtcctcgggtgacgtcacctcctcggctctgcgccccgccgtccacaggcgcgaagccggagctggggttggcg

SEQ ID NO: 222832 - DNA, 122 bp, Homo sapiens
gctagcgaggcaggctcagcccagcaggggccggctgaatggagaacaggccccgatcctcgcgcttcccaggggaggtggccggggttgagggagcagctgcccgtggtggaggggatgtg

SEQ ID NO: 222833 - DNA, 122 bp, Homo sapiens
gagcctgccgtgtcccgtgtgcagcggcggaccaccaggcagagcgccaaggggagtgtccggagatccagcatgggaagagccccctgccacttccagcaaggagcacacaggtgcatccg

SEQ ID NO: 222834 - DNA, 122 bp, Homo sapiens
agacggtgccacgggaagtaccacaaaccagaacatgtgaattccacggtgagcgatgtgcggcttgcccaggcccacagggagcccggcaggggtgccagctgggtagacggggcagtgag

SEQ ID NO: 222835 - DNA, 122 bp, Homo sapiens
ttcccaagaaaaagaaacaatatttttctctccactgctcttccaagaagtagctgaggacgggaagaaacacagaatcaaagtgttgctcaagggtgctttctgatccaaacccacaatgt

SEQ ID NO: 222836 - DNA, 122 bp, Homo sapiens
acgagatctgaggaggcaggaaggcggaaagcgaagggagtgtagaatatgttttaagaacgtgtgaaaacgaattgcctacttagggactgtctcaaagttctcttttttgtatacagaaa

SEQ ID NO: 222837 - DNA, 122 bp, Homo sapiens
ggaaatgagacttgctctctggccttttcctattttcagcccatatttcatcgtgtaaaacgagaatccacccatcctaccaatgcatgcagccactgtgctgaattctgcaatgttttcct

SEQ ID NO: 222838 - DNA, 122 bp, Homo sapiens
aggctactcctcccgcagtgtgggtggttccgaggctgactaccctgcggcggcgcggctcgcagtccttctcagcatggaccgcacttgtgaggagaggcccgctgaggatgggagcgacg

SEQ ID NO: 222839 - DNA, 122 bp, Homo sapiens
caccgctcctgcaccttggtgccattttcaaggaaaatacgggttctttgaacacacgcacggccacctggagagtcggcctcataagggacagggttcctcagtggctgagggacaggcag

SEQ ID NO: 222840 - DNA, 122 bp, Homo sapiens
tgttaaaatcttttcattacgtgcagtagcaatgaaccacgtgggatttggctgagagagcgaaggattttgtgattttgcctttggagtaaacgtgcccataagcccctctgcgctctttg

SEQ ID NO: 222841 - DNA, 122 bp, Homo sapiens
cggggggcttgatgtgctcgaggccgagttttccaagacctgggagttcaagaaccacaacgtggcggtgtactccatccagggccggagagaccacatggaggaccgcttcgaagttctca

SEQ ID NO: 222842 - DNA, 122 bp, Homo sapiens
gactctagccacagcctaaccaaggattatcaaaggaggtggacactcaaggaagggccacgccaggctgcgtttcctgcaaggactcagatgttcagtaccttatgatacagggaagatag

SEQ ID NO: 222843 - DNA, 122 bp, Homo sapiens
ccatcgcgaggagctaggggtctctctgcatcccggcggggtcggagcggcgcagagggccgtcagaaacccgggggagcgcccgggggagggggcatggtgccgagtggagagggagggga

SEQ ID NO: 222844 - DNA, 122 bp, Homo sapiens
acagcaagttctttcctttttaagggcagtgaaggttgccaggccttgtctatttgcagccgacctgctcagaaacattttgctgcccttcccccacttctgtgaataggttttcccaaaat

SEQ ID NO: 222845 - DNA, 122 bp, Homo sapiens
tgttagcatcgcccttcttggagctggggtccccggcgcctgtgtccaggatggtgcctccgtgcagcaccagtagcagcacgtggatcttggagggcggtgcagccagcggctggctaacc

SEQ ID NO: 222846 - DNA, 122 bp, Homo sapiens
tcctcatccccaagtgccttattggtgcctcttctttgatgccatgttcacactggaactcgggccattcttcccatcctccaccctcccaaatatggtcctcttccggggcttcccaaaac

SEQ ID NO: 222847 - DNA, 122 bp, Homo sapiens
gtggagaaggggcactgctctggggaacgctggcacacagccagcgcgtgtgcagcaggacgacctgtatgcactgtcaccacgggacggggccagagggatgcacccaccaactcagggga

SEQ ID NO: 222848 - DNA, 122 bp, Homo sapiens
aaaaggcaaagtgcgggacactgtgtcacaatgaacaaaatggcattaataaatatgtgccggcatcagcaagaaagacgttcacaggaaactgctaggaccggctgcctcttgggagaact

SEQ ID NO: 222849 - DNA, 122 bp, Homo sapiens
gggttctgtgtgcagcgagcatggtgtccttggcaccagggtttcggcagaggagcctagcgtgggcctacttggactcctccgcgtggggcagctcgggacacccgggcctgcaggagagc

SEQ ID NO: 222850 - DNA, 122 bp, Homo sapiens
caggaaccttgcccatcccctttaccactagcaccgatcaaaatgcctggcacagggaggcgcaatgaacagctgttgaacgagtgacttccaaatcgacagcaaagggggcggctggatag

SEQ ID NO: 222851 - DNA, 122 bp, Homo sapiens
agaagccaaggaggacaaattcagtaatagtttcgtttcctgtggagacaatttccatgtcgatcgtccaagtttctgcttggcaataattgggggagaaattttagcatgtctctgcatct

SEQ ID NO: 222852 - DNA, 122 bp, Homo sapiens
cgtcggggggcggcggggagggggcccggagccggaggagggggcggccgcgggcacccccgcctgtgccccggcgtccccgggcaccatgctgtccaactcccagggccagagcccgccgg

SEQ ID NO: 222853 - DNA, 122 bp, Homo sapiens
tgttcacccccaggctttccagggctgactgggcctccagggtcgcagggagagctggggcggattggactgcctggtggcaaaggagatgatggctggccgggagctccgggcttaccagg

SEQ ID NO: 222854 - DNA, 122 bp, Homo sapiens
gctgtctgttaggaagaattagggcccctcagagcctgggcggaggctgtctgcctcacacggagaggggaacccagaggcgcttccctctgtcccccaggactcaggctatcagaagcagg

SEQ ID NO: 222855 - DNA, 122 bp, Homo sapiens
ggactggggtgctcttcctacatccgggcgctggggacagcagggggcaagggccggggtcggcagggaggaagggccggggtgaagcccgcctgtctcctcgcggactcgggggtctcctc

SEQ ID NO: 222856 - DNA, 122 bp, Homo sapiens
cgtcaagcagaatgccagccgggcacccccaggcacctcgtagaccacgcccagaatcagcggtggagaagcaccgatcgctaacggcacaaatgggcggtcagaacaccagcaacacacat

SEQ ID NO: 222857 - DNA, 122 bp, Homo sapiens
gttctaccgcacgctcagtcgctggctccagaggtgctgctgggggccagggttcactgccgcgcgccaggtgcctgcccgtgaggcggcgcggggctcccgggtggctgcgcgcccagacg

SEQ ID NO: 222858 - DNA, 122 bp, Homo sapiens
cttgcaacgggccacaagtaccgggttgcgatcacaagtacccggttcaggtccaaggtccgccacttgctcgcaggagctttgagcaggtgagttcatttctctcagccagggtctcctct

SEQ ID NO: 222859 - DNA, 122 bp, Homo sapiens
actcaggccgggctcgacagcacggggctgggagctgaggtgctcgcgggacaggagtggcgggggcggggcgggcagtggcgggcagcgcaggctgcgacgagggagggggcgaggaggga

SEQ ID NO: 222860 - DNA, 122 bp, Homo sapiens
aaatgggcaccatgaaaccaaaaccaaagttctggatgtgggggagtggagcttttctttcgaagcactgggagcttgggcagggcgtcccgactgcccctcagttttgccggagcactcgg

SEQ ID NO: 222861 - DNA, 122 bp, Homo sapiens
cgatggtggaacggaagtggaatccagggccggttgggggtggggtgtgcctggcacatgcgccgcgggcactgggtggggggcctccgagagtcggaaggaggtggaggagagcgcgacgc

SEQ ID NO: 222862 - DNA, 122 bp, Homo sapiens
tgcccatgtacaagagcggggacctggtgtttgccaagttaaagggctatgcccactggccggcgaggatagagcacatgacccagcccaaccgctaccaggtgtttttcttcgggacccac

SEQ ID NO: 222863 - DNA, 122 bp, Homo sapiens
cactctggcgccctcttctggccgctctcgcgcacctccgccacgccgggcccaggcctgcgtagctctcacatgtcctggcccaggaggtcgctatcccttgcccatggacaggcccgctc

SEQ ID NO: 222864 - DNA, 122 bp, Homo sapiens
gtcagcacaggtgagggtcctgggcctgcccctggtggaaggagtgtgtttgtgccaaaccgggtttcaggcgccgtgcgtgccccaccccccttggctgttactccgttttaagctgccga

SEQ ID NO: 222865 - DNA, 122 bp, Homo sapiens
gggtctctctgggacagatgtggctttagaggaagcctttgcaaagtggcagctttggggcgggtttgggattctggaagcttctgagcatagtgtgagtgtgtgcgaggggatgggggaag

SEQ ID NO: 222866 - DNA, 122 bp, Homo sapiens
ccgcggcctggagctgctggatggcccaggctccgcgaggttatgcaaccgcagagcaggcggccgagcccccagccctccccgcgggccctcaccggagtgagcagctccggggtggagat

SEQ ID NO: 222867 - DNA, 122 bp, Homo sapiens
aggtgtgaggggctctctatgagctcaacaaatcattttgcttgttactgtaaaactgcacgctggccatgaccttttgtaaagattagaggagcacaggggccgagttttgtccttacacc

SEQ ID NO: 222868 - DNA, 122 bp, Homo sapiens
tcatttgaaagattacctggctgatacttctgcctgaaagaataactatcctaaagtacccgaggtaggtgaaaacctagcttatatttaaaacctccagaaaaggagaatcagtttaactc

SEQ ID NO: 222869 - DNA, 122 bp, Homo sapiens
caaactcctgacctcaagtaaacctaccgccttggccttccaaagtgctggggttacaggcgtgagccactgcccccggcctaatcatcgtgttctagtctgccctccaatgggagaaacaa

SEQ ID NO: 222870 - DNA, 122 bp, Homo sapiens
aaaaaaaaaaaaaatcatctacttcatatttcttcttggatgtctagtgagcatatcaaacgtaacatggcccaaacaaaactgtttcatttttatcctcaaaacatcgtcaccagttttcc

SEQ ID NO: 222871 - DNA, 122 bp, Homo sapiens
gcccgcccccaaccttgagacgctccacgcggagtttctcctcctccacctcccggcgcgcggcgcggatctcctcctgcagccgccgcttctcctgcgcacagaggacccggagctgcccg

SEQ ID NO: 222872 - DNA, 122 bp, Homo sapiens
gagactctgtttcaaaaaaaaaaaaagaaggaagcaaaatacgattggttcggtcccgtccgctctcagcggctcagtcccaggcctcggggccagaaccgtgttccccgcgctacttgggc

SEQ ID NO: 222873 - DNA, 122 bp, Homo sapiens
aagagttccgaatattcccgagcgttgagcgaattttcggcggaagcagccgaacatcatcgagccgcctcggaggtggggaccgacaactcctgtcgtgcccgcccggagaggaagcggaa

SEQ ID NO: 222874 - DNA, 122 bp, Homo sapiens
attcattcattcattcattcattccataaacaaattgagcacctactgagtgctagataccgacagttccattctccgtttctcactcgatccctacctctcaactctccaaaccctctttt

SEQ ID NO: 222875 - DNA, 122 bp, Homo sapiens
cacgccgcgcggtgcggagccgagccgcagccccgaaaccgagtgcggcggcagcagggccggcaggaccgccacgactcaccaagtgagcagcgagacctggagtcctgtaaccaaaacac

SEQ ID NO: 222876 - DNA, 122 bp, Homo sapiens
gggctaggcctttggggaagcgggaccctcactctcagccccagccaagaagggcaaggtcggttccccaccccagcacagtctggacgatccagggctgcaggccaggaaagaacccctga

SEQ ID NO: 222877 - DNA, 122 bp, Homo sapiens
ttagaggatggggcgaggggctggttcactctgacctcatcacattcttggacgggggagcggaagcctggtgagccatccccaggtccagcctcctgaagcctgctgctgtgatttgtggg

SEQ ID NO: 222878 - DNA, 122 bp, Homo sapiens
cctgagcacatccccaccccgggggctgccctgtcgtggcaggcggccatcgacgcagcccggcaggctaagctgatgggcagcgctggcaatgcgaccatctccacagtcagctccacgca

SEQ ID NO: 222879 - DNA, 122 bp, Homo sapiens
aagagataccgtttgtcccctgaagacaatgtgccactgctgaatcacgccccctccccccgctgctcagctagtcccccagcccggcccggatcgggcctgacatctgcttagctccggag

SEQ ID NO: 222880 - DNA, 122 bp, Homo sapiens
gctacagcttccgcttcggctggggcgggagggcggtcggtgcgtgtcgagttccttctccgccaccgccgccgctgcggaggagagaacgggaggcggcggctgggccgccccaagcgccg

SEQ ID NO: 222881 - DNA, 122 bp, Homo sapiens
ctggcggtcctcggcggagcgggagcagtgggacgtttccgggggtcgggtgggtagcggcgagcgctgtgcggtcagggcggggctcctgtgccctgtcggtggcgcagggagctggacgc

SEQ ID NO: 222882 - DNA, 122 bp, Homo sapiens
cagctaattcaagcatagtgaacacggaggtcagctgcaaacatttacgttgtgcaacatcgtgttcctctcattccagccccattcctttccaataagagcacatttagcacaaagcaatc

SEQ ID NO: 222883 - DNA, 122 bp, Homo sapiens
ccacggctgacgtgagtcaacaaaggtcacgtgaggcgtgcgggccgcgccgattggtggcgccagccgggcggggagggggggtcacggcggcggcgtggggttcgctgtgtgacacaatt

SEQ ID NO: 222884 - DNA, 122 bp, Homo sapiens
tgggcggggccggggcggggcctgaaccctggaggcggaggttgcaatgagccgatatcgcgccattgcactccagcctgggtgacagagtgagacttcgtctctcccaaaaaaaaaaaaaa

SEQ ID NO: 222885 - DNA, 122 bp, Homo sapiens
ttggcagctcccggccccggggtgcgaacggcggccgtggctcaccgcttcaggagcaggcgaccaggacactaggaagagaagcccggaccagggctagtttgtttccccaactcctctgg

SEQ ID NO: 222886 - DNA, 122 bp, Homo sapiens
ctccccctccccagtaaacagcaacaaccgtgctgatggcgggacttggcacgagctccccgccaagcattatcagacaccccagacgttggaggctgctatcaggtgggggcccaggccag

SEQ ID NO: 222887 - DNA, 122 bp, Homo sapiens
cctacaagtgccggtaggtgtgggctgagaccatcctacatggggaaggccctgagaggccgggaatttgcaggccgaagagggatcctggagagtgggggactcacctcaacagcactctc

SEQ ID NO: 222888 - DNA, 122 bp, Homo sapiens
catggtggggcagatgccgtggggcggacatgtccctgcaagtgacgtctgcagccggctcgtctgtgtgtggggcgtcccggctgctgcaccgagccccgtggggacggcacctggtgcct

SEQ ID NO: 222889 - DNA, 122 bp, Homo sapiens
cttctttcttcctaacattttcatgtgagatccagaaaggacacattgtctctggccattcgaagaaagaaagaaagaaaaaaaaaaaaggtatttagagacagagagagaaaaaggctgaa

SEQ ID NO: 222890 - DNA, 122 bp, Homo sapiens
caaaggtttgggggcgggcaggtgcagcaaaagctgcttaattggacagaaaaagtaactcgtgggcgggaccgtgagaatccgaggagggacctaagtcaccccgtggccctggatattac

SEQ ID NO: 222891 - DNA, 122 bp, Homo sapiens
aggtcatgtagaaaacaattcagcgcatactactactcctaaataaaatccctgatccaacggcatcatcttgggtaccagatttcttgaaaaatgacggccaggactccgtgacagtttag

SEQ ID NO: 222892 - DNA, 122 bp, Homo sapiens
gctggccgcgctgcttctgcagctgaagctggagctgccgttcgaccgggtggtcaccatcggcaccgtgctggtgcccatcctgctggtcaccctggtcttcaccaagaacttcgcaggtg

SEQ ID NO: 222893 - DNA, 122 bp, Homo sapiens
taagaaagtgtatctttgtctttcactacagacatggatgggtgcaaaaaagagctgccccgcttgcaagagccggaggaggacgaggattggtgagatttagaaagttctgttttctttta

SEQ ID NO: 222894 - DNA, 122 bp, Homo sapiens
tccgaccccaagaagaaaacactgccgcccgctgattggctgagcggggctggaaacaggcgtcgaccaatcagcagccagccccccgcccgccccgccgcgagcagaagccggttccggcc

SEQ ID NO: 222895 - DNA, 122 bp, Homo sapiens
gagctgggccttttctgcctcagcggctttaggactgttccaggaagaggtgagcagcggcggccctcgacccagagaagcaggggccacaaggaactgggtgcaggaaggtggtgaagggc

SEQ ID NO: 222896 - DNA, 122 bp, Homo sapiens
tgccttctggtccagtcgttggccgtccagaccactccactcctcccgccccaacacacacgacacacaccctgtatagcccaaagaacggcatgccaggatactcagtcctaggacctagg

SEQ ID NO: 222897 - DNA, 122 bp, Homo sapiens
gggcgcacagcgggaactcctccttgtcttcgttgctgggcaggcagcgttgagccactgcgtagagtgcgcggccctcggcgctgcggtcgcgggccagctgcagcagccacacagtgggc

SEQ ID NO: 222898 - DNA, 122 bp, Homo sapiens
tcacatcccagatgaggcggcggggcagaggcgctctccacatctcagacgatgggctgccgggcagagacgctcctcacttcctagatgggatggcggccgggacgaggtgctcctcactt

SEQ ID NO: 222899 - DNA, 122 bp, Homo sapiens
cccggaagtcggggtgactcggaagttccggctcagtcgctaggaaacgagcgagcccgacgccaggggcggagctctggcctcctcgccgagttgggggaggcaggtgcgacaggtgagga

SEQ ID NO: 222900 - DNA, 122 bp, Homo sapiens
gcgtttggagctgggcgtgcgggtctcagtggcggcctcggcattcggggcggcgggaggcgcccggtgcatccccgggacggccaggagcaaagacggagaggagaggggggttagagaaa

SEQ ID NO: 222901 - DNA, 122 bp, Homo sapiens
tcgtcggggagtgaaagcaggcgcagggaaataaaaagaaggaaagggagacagaccaggcgcctaacagatggggaccaagaaacaagagatagctgagaggtgcaaacagaagagaaaaa

SEQ ID NO: 222902 - DNA, 122 bp, Homo sapiens
gaaccctccccggccggggatgcgattcaaacccccggcggcgcctcaaccaatcgcgagcgggctgctggccgagcggcagggacttcgtccaatcgcctctctccaaagaccggcggctc

SEQ ID NO: 222903 - DNA, 122 bp, Homo sapiens
caacccccaccttttgagttttatttctagacttaatagtttctctcctctcagtgcgaacgatagcagaataatcatatagaaatccccagtgtgtgtataaattagcattcatgctcttt

SEQ ID NO: 222904 - DNA, 122 bp, Homo sapiens
cagggactcaatgctgttgaaattcatttgtgaccagaactagtgaccaaaagacgtttccggcagctgttccgcccgttaggaaacgtgctgcagttctcaatttctatttgaaagtttcc

SEQ ID NO: 222905 - DNA, 122 bp, Homo sapiens
actgcgggaaaagcttcagctgcaagctgagggggtgggaggtggggagatggaagaacgcgctgcaggtgtgcggattctgcctaaaattgcggctacgaactggaccttgaacactcctc

SEQ ID NO: 222906 - DNA, 122 bp, Homo sapiens
gaaccggagtgtgtaccgccatcttgaatgtgtctaactgtagaacagggctcaatgtgtcgtcatcttgagtgtggcgacggagccgcaaaaggtgcatgggactcagttcccacctccac

SEQ ID NO: 222907 - DNA, 122 bp, Homo sapiens
cggacttgtctcccccaccttgatgccaaggtggcatctgggagatatctcgaagggcaacgtcgaggggactgcaagcgtcaaccctggcgcggcagcacggcgcccctctccgcgggcgg

SEQ ID NO: 222908 - DNA, 122 bp, Homo sapiens
ccagcaaggaggcctggctgtaggagccaggaggagtgcttggcctcactctgctgcaggcgccgcactctgttaactaaaggtcctagttagaatttaaaagcctgacaataccaactgtt

SEQ ID NO: 222909 - DNA, 122 bp, Homo sapiens
gctagccattataaatggaatatagccagtgctttgcttgcaatagttaaacctattgggcgagatgagggtaagcttcatttgaagaattgcaatatttctcaaaaatgactgtgagggtc

SEQ ID NO: 222910 - DNA, 122 bp, Homo sapiens
ttgcattttccttcatttctatcaaccgactttgctgctatagccgctgcttagcaaagccggtaaacatgaggttgtaatcgttgaatacggcactctggcaaccgagacgctgaaaggct

SEQ ID NO: 222911 - DNA, 122 bp, Homo sapiens
ggcggggcccaggggcgggtcgagggcggcccgtggcggctgggcctttcctcaactttgcgcctgttgctgggccgccggcgcgcgggcggccgcgaccgccggggacgagcttggaggaa

SEQ ID NO: 222912 - DNA, 122 bp, Homo sapiens
cagctctcccttgatcggcagagctgagcccagctttgcttggcctggagggaggtagggcgggcacagaagggagggccttgggggctctgagccatggtccccatatctgtggcatccag

SEQ ID NO: 222913 - DNA, 122 bp, Homo sapiens
aaatctgcattttttaagcaagcgccgcggaccggttggaaaccacagccgggatttacacgcccctcgtttacgccagcttcacacccgctcactagtgctcgcccctgtgcctgccatcg

SEQ ID NO: 222914 - DNA, 122 bp, Homo sapiens
gcatggagccctcggctaagggtctgcctctggtctctccccaggtgggcgggggcaggacggaagcccggttatcaccttccctgactacccggccttcagcgagattccggacaaggagt

SEQ ID NO: 222915 - DNA, 122 bp, Homo sapiens
atcctggaaggtgaggggaaaggagacaccgcgtcaagggagagaggagagggcaccgagcgcccgcccctccgacgtggtccgccccggcctcacgacgccccgcctctgccacgcctctt

SEQ ID NO: 222916 - DNA, 122 bp, Homo sapiens
cagagtagctgaaacctgtgtcctgattagcaatgataacaggtgaaatctggcccattgcgttgtttcatgggttgtttttttttttttttttgacggaatctctgttgcccaggcttgag

SEQ ID NO: 222917 - DNA, 122 bp, Homo sapiens
tgtctgaaattcaaatacaacagccggcgtctcctcccccttgattttctgtctgtgtcccgacagcggttccctcctggatacctgaaaatgtgaaggtccaagagaaagggcggcagtgg

SEQ ID NO: 222918 - DNA, 122 bp, Homo sapiens
tctggggtttgaatgaacaggtgctaacacaccagcttagaagggcgcgttcagcacccgcgccagcagctgctcggcacctttgcccctcggtggcggctgccttgcgcaccaaaggccca

SEQ ID NO: 222919 - DNA, 122 bp, Homo sapiens
gcctaaatctcaggtcttcaccgtcatctcccagcgatcgcagggatctcaggcactgaccgcgcccgtccctgcgcacccgagccccaccccacgcccccacgcccccacgcctccacgcc

SEQ ID NO: 222920 - DNA, 122 bp, Homo sapiens
gaacagccaaggaagccccggctcctagggcattcactgcggtacatgctggagttgtaccggcgttcagctgactcgcatgggcaccctagagagaaccgcaccattggggccaccatggt

SEQ ID NO: 222921 - DNA, 122 bp, Homo sapiens
cctaccccctagtaccctgacaatgtattcattctcaagcaaaacatggtaattcagtaacgttgactacttgccctgctgatctgcctccctgactgctctactgctgtcctgaaaaatgc

SEQ ID NO: 222922 - DNA, 122 bp, Homo sapiens
ttaggcattattctgtgtatgtctgtgaggatgtttttagatgagattaacatttgaatccgtagactaagtaaggcagattgccctcccagtgtaagtgggccccatccaatctgttgaag

SEQ ID NO: 222923 - DNA, 122 bp, Homo sapiens
actgttttggaatatttttgagtgtgatcgaagagacttcatggtattttagaaactgcccgggaaaaagctgggcagtctatgccccttaatagtttgtcctgggtagtaagttacttaac

SEQ ID NO: 222924 - DNA, 122 bp, Homo sapiens
aaggggctatgcaggtggaaaaaggtggccgagaggtggaggtcccccggcaggggcagtcgcctctctggcctgagccagaaactcccaattctcatgggtggctgatgagagaacccctc

SEQ ID NO: 222925 - DNA, 122 bp, Homo sapiens
cttacccgcactgccgactggggcatgagtccgcaacgccctctgcgcctcgccctgcttcgatgtctccttccgaaactacacgcggaacccaagaatcactgggatgcgcaaagcggatc

SEQ ID NO: 222926 - DNA, 122 bp, Homo sapiens
tctcgccactcagcaccctgcagtcttaattcacaaggcccgagttcccttggagggacgcgcgcgcgtcgagccctcatccccacgcggcggtgcaagcgcatgaatggacactggaaggc

SEQ ID NO: 222927 - DNA, 122 bp, Homo sapiens
agccatgcagcatcttacttctcaaccactttgcctttttgaggatttctgagtgtggggcggatagatggtgatggttgtgtgtctctgaggatgagcccttataaaggaatatattggaa

SEQ ID NO: 222928 - DNA, 122 bp, Homo sapiens
gaacactgagggctaagcaattcatgtaataggcttgagtgacagcttgtcatcagcattcgaaaagagactgatagacaatttggctaacaaggccaacaactctggtatctgcagtggga

SEQ ID NO: 222929 - DNA, 122 bp, Homo sapiens
tggttgagtggatcaagtgaagggctgtatgtcaagcccctgtcaagccacctggtgctccgtgtcctgtggatggtagctgccctgaagcgggactttgcagactgaagtgctgtctcttc

SEQ ID NO: 222930 - DNA, 122 bp, Homo sapiens
caccctgggccaggccatacgcttccaagtaatacgcagttttttgttcttcatctttctcgttctgggcacgtaacctttataagacataagaatggaattttaaaacattatgttattat

SEQ ID NO: 222931 - DNA, 122 bp, Homo sapiens
ccttattcttttgaattttctgtctcctcagcctctcagatatcttgggcccatctagaccgccccctcgtttcctcccatcccttcatttccctcctgctcagcctctcatcacctccacc

SEQ ID NO: 222932 - DNA, 122 bp, Homo sapiens
ccctgaccctgggcctctgggacctcgaccctaaccgaggggccagaagctccctcttggcgttgaagacacatgaagatgcagggagagaggccaagtgcagtggctcacgcctgtaatcc

SEQ ID NO: 222933 - DNA, 122 bp, Homo sapiens
ccaactatgttttaaattaaggcatagccatcacatgccaagctctagctactgttttcacgaggaaagggcaattattcaccccatctgagtgtgactgtgccagacatcattcaagagtg

SEQ ID NO: 222934 - DNA, 122 bp, Homo sapiens
cagttacagggctgggtgcggagaccaactctggccagacacagaggagcagcaagaacccggggcaacggtcctgtgagtgagtgcatgtgggggagagaaatggaatgaacagaaataat

SEQ ID NO: 222935 - DNA, 122 bp, Homo sapiens
tgacctcgtgatccacctgcctcggcctcccaaagtgctgggattacaggcgtgagccaccgcgcccggccaagcattgttaaaattatatgacttcttctagaaaatattttaggaatgta

SEQ ID NO: 222936 - DNA, 122 bp, Homo sapiens
ttctgtgccccacctgcaaatttggttttatcctggaaacatgtcagtacagttggctcccggtccccgcgtgcggactggaaatcattccctggcgactccagcccgagcgcagaaactag

SEQ ID NO: 222937 - DNA, 122 bp, Homo sapiens
gcttgctaaggggccccattttgaagatgaggaagttgagagttacagagataggggatccggcacaaacgcacagctcctccatgctaggcagcctgtcccacgtcccagagcggggccca

SEQ ID NO: 222938 - DNA, 122 bp, Homo sapiens
tgtctggtggggtggaggagaccacgggcagtgcgagcctgtctggtggggtggagactgcgggcaacgtgagcctggcgctggcgggtgtctggtggggtggaggagactgcgggcagtgc

SEQ ID NO: 222939 - DNA, 122 bp, Homo sapiens
aagtgacaatatgctatctccagagactacggatcgcctttgctgcaaatggtcccaacccggcctggcgctctagagcaggcgtggtttctgcgcgcggacactttggagagaaactacgc

SEQ ID NO: 222940 - DNA, 122 bp, Homo sapiens
caggatcggaagcctgcgtaactttctcccttgatccgggagtctttccactgggtaaggcgcctccccggtccaccccagcgccttgtgcggggcggcctccagctgcatctcttttaggg

SEQ ID NO: 222941 - DNA, 122 bp, Homo sapiens
aacagatacacagagtgtctgtagacagtgagctgtgtgttttgcgtgagtgtgaatgagcgtgttttgtgtgtgagctgtgcataagctatgagtgtttatgagtttttgtgtgagctgtg

SEQ ID NO: 222942 - DNA, 122 bp, Homo sapiens
tctcctctgaattccctgtcctccctggcctgtgtctgggcaggtggctcaggtcctcctcgacccctgaacatcagggttttcacaggtgcactgcccctaaacctgccccactctcctac

SEQ ID NO: 222943 - DNA, 122 bp, Homo sapiens
tctgtctccatagaccatcatcattcctacttccttgactttaggtgtggccttgtgactcgttataaccggcgaactgtgagtggaaaccatggagagcgtgatggggctgaggtatctga

SEQ ID NO: 222944 - DNA, 122 bp, Homo sapiens
tcagtgaaacctgcatcctaacacaacactctgtggggtgtcggggcagtcgcaacctcccgttctctgagaaacccccaattccacacacctaggaggtagcctggtgacattatatccgg

SEQ ID NO: 222945 - DNA, 122 bp, Homo sapiens
gggcatccgtgcttgccgagaacccaggctttcctagtggccgctggcagcggagggcagcgactgggagctccctctccttccctcccgggcccattgccatgggggttccacagttaaag

SEQ ID NO: 222946 - DNA, 122 bp, Homo sapiens
ggtgctgagaagggggatgggggcaagtgaggaggaactcactttccatacaacgcagaccgagagcacacagcgtcacacgcagatctctccgtcacgctcctccatggcaggcttccctg

SEQ ID NO: 222947 - DNA, 122 bp, Homo sapiens
ccctcccaaagggcgggagtttggggggcggggcctggccctctgcctcggggtgggctccgcccccgtcccccgcagggccttagcagcggctgccgcagctcaatcgcggagcaactagc

SEQ ID NO: 222948 - DNA, 122 bp, Homo sapiens
tgcccagtcagcggcctccttcagacctctgctgggatacgactgtctcagtcaggctgacgccaaccacacgaggtgcgaccccaggtgtgtgagggaaaggcccctaccccacagggaac

SEQ ID NO: 222949 - DNA, 122 bp, Homo sapiens
gggagggaggggagggagagaggaagaaggggtgagagggagaaacctgccgccgctcgccgcctctttgtctgctccgggacttggaacaaaagggggaactctgatgaactctctttcct

SEQ ID NO: 222950 - DNA, 122 bp, Homo sapiens
cgctggtatgtgaaaaacaggtccgtcaccgccgtcacgacggccagagattatacccgccgagatgcccgcggcccagggcctacaatttcctccggccagctcctttggccgcgcaagcg

SEQ ID NO: 222951 - DNA, 122 bp, Homo sapiens
ggagacggcagttttgaagtaaaactggaaacctgatccccaccccttcacttctcgagccgggcctcgtcccttaattctagaaatagcgatcgcgaaagctaagtgccgagaagtgcgag

SEQ ID NO: 222952 - DNA, 122 bp, Homo sapiens
gaacccagcagaggctgtggccagagccccagggccaggcaagcggccaagctgcgctctcgataaaggagccagaatggttccatctggttacaaacatatctttttattaaaaagcaatc

SEQ ID NO: 222953 - DNA, 122 bp, Homo sapiens
acgccctgggacaggggtgaggagggggcgccggtgggacgggtgggctctaggaccggccgggaatctggggactggccacttggctttttgcagattcgagcagcccggtgtgccctgcg

SEQ ID NO: 222954 - DNA, 122 bp, Homo sapiens
tattgggaagaggagacagggaccgccaaggccaaagcacagttttaccgagtgaacctgcggaccctgagcggctactacaaccagagtgaggcctgtgagtgacaccggccgggggcgca

SEQ ID NO: 222955 - DNA, 122 bp, Homo sapiens
ggtactcatcccgtccacagaaagcacctgagcacagcgactctgcagggcactcccatccgagtttctaagtgccagggctaagtgccaggaagagcagctgaccccgcacaaggtcagga

SEQ ID NO: 222956 - DNA, 122 bp, Homo sapiens
ctcaaagttctgggatttcaggcatgagccaccgcaccggtccttgagacttttgacctccgtgcccgcccctccggaatgcccaccccagccaaactcctctctctcctccagctggtggc

SEQ ID NO: 222957 - DNA, 122 bp, Homo sapiens
gccgcgccccgccagggactcagccactagcagttgggacggaagatgggattaagacaccgaccaatcaggactatcggcaggacgttaccagggagaccaggcacaccttgtttgttacc

SEQ ID NO: 222958 - DNA, 122 bp, Homo sapiens
cttggagcccctggtggaaggggcagcccgtgtgtccgcgtgtgtgttcgtgcccatgctcgtgtctcctgtgtgtcggtgccatgtgcacacgggggcccagttcctcgtgcacacatgtg

SEQ ID NO: 222959 - DNA, 122 bp, Homo sapiens
ttttgtgcagatctctgtaagtttgtgttttgggggagatagaagggaaatgggagccgacgtagaccgtgatggggttgatcattgtgatctagtgatccattgagtatttggaaattggt

SEQ ID NO: 222960 - DNA, 122 bp, Homo sapiens
tccctcctcccagggatggggaaactccacaggaagtgaccgcactggggatggatggcccgtctggccacgacccattagcgaggcggccaatcgctgaacggcgattcgagggcccaccc

SEQ ID NO: 222961 - DNA, 122 bp, Homo sapiens
ctcctgatggtgacgctgaacgaggaaaccctgaatagcatgcgccagacagcgagcactcgtcattctcattggagggccggggccacaggaacaacttcacgcgctgacagcgtgacctg

SEQ ID NO: 222962 - DNA, 122 bp, Homo sapiens
ttgcagcctgcagaccttttgggcttgcaggaccaacatccctgattggtttgggaggggcgtgtgtgtgtggatctgcctcacaatggcctgtctgagcccttatctgaggtcacacgtta

SEQ ID NO: 222963 - DNA, 122 bp, Homo sapiens
agaaagaaattacaagtactattagatttacattaaacaagttacctctatcaaatttctcgattctcttatgctgtagctatatttgattttaccttaaaaagttctaaggtcctttcccc

SEQ ID NO: 222964 - DNA, 122 bp, Homo sapiens
cttcactcatgtgcttcgtaaggttcatctgcaaccctcccgagcacacgtatcttaccacgtgcacttgctgtttcttgttcatgccgtctgatttaacgcgatatcatcagtagtgagct

SEQ ID NO: 222965 - DNA, 122 bp, Homo sapiens
aagctgtactttcatcccctcgggacacttgtaatcgtaatcgggcttttaaaatcgtaacgtaggcagggacgtcgaaataactgccttccaaggccccttacagcttacatctccattgc

SEQ ID NO: 222966 - DNA, 122 bp, Homo sapiens
agccgacagaagggcgggaggcgggaggggaaaggtcccccgggatgggtagggcctcaacgctgggcatcggcgcaggtgtgtactgcagggagccagccagaccccccacggactgcctg

SEQ ID NO: 222967 - DNA, 122 bp, Homo sapiens
gtagctgtgtgtcttgggccaccagtggcctgcaggacgaaggtactgttccatcacctgcggtgtgcctcaggatcaccaggtgcaggcccccaccctcggagatgctgctgcagtgagtg

SEQ ID NO: 222968 - DNA, 122 bp, Homo sapiens
tgcacagcccttagtcctgtgccagcggtgggcagctttcatctcgcatggagccccccccggccctagctcccctgcagtgcccagtgcagccctggcatcccgccgggctcccccaccgg

SEQ ID NO: 222969 - DNA, 122 bp, Homo sapiens
gtggggacaggagtctgtggaatgcggtgcttcctcctgactgtggggctggaggagcagcggtgggtcgagggtggtttagtccacccagggggtcctgtggccccgctctgctggtgcct

SEQ ID NO: 222970 - DNA, 122 bp, Homo sapiens
aattgtaattttatgtttacaatctaagtctagctcttaaaactaaagtctattcgattccgcactgataatgtcaattacaagcttatcttccctggtatagaacaaagacaagaccagat

SEQ ID NO: 222971 - DNA, 122 bp, Homo sapiens
tatctctcttagaatatgccctagatcctaatcttcacaagtgtcattggttatctagtgcgtcagcacagcacataagcctaggttcaaacctctgtcactcagtagtagtctgggcctca

SEQ ID NO: 222972 - DNA, 122 bp, Homo sapiens
tatgccgggtggcttcccagagcctgggaggtgtgtgggcatctgggtgaacctagagggcggtatggctcgagtttatggatacgccatgaagagatggagggacgcgtgtgggcacgtgt

SEQ ID NO: 222973 - DNA, 122 bp, Homo sapiens
tggggttccgagagggggcagtgagcagatggtgcagacagtgccccaccagaagggcaccgttcaacttttggaaacacatgaaggctccatagggctggcagctgccccagtcgggggtg

SEQ ID NO: 222974 - DNA, 122 bp, Homo sapiens
tgtcatacccaagccttagtgggaatggagctgggagattagaccaggctgaaggagaaacgtgggagtcctaatctatgggtggcagggatccatgcagtacttttgaagcagagatgttg

SEQ ID NO: 222975 - DNA, 122 bp, Homo sapiens
tccacgagctggacaatcattagttcttttgtagggggatattggagagacgacataggtcgggatgcaagccccaggacagggcctctgataagacctctggacacaggaggaagatccca

SEQ ID NO: 222976 - DNA, 122 bp, Homo sapiens
agaactctctcaggaggtggtcctctaggagcgtgtgaggccaggctcagcttcactcctcgctggctcaatagcttcgctcgcctcctcctgccactgttacattgtaagccaagcccact

SEQ ID NO: 222977 - DNA, 122 bp, Homo sapiens
gcctgaaggtgcagaagctggaagaggcgggaggagtctcccgtgcaggctcaggaggggcgcggcctggccacactgggatttcagatgtcacagtactccggaacgggagaggatgattt

SEQ ID NO: 222978 - DNA, 122 bp, Homo sapiens
actctcttccaaaccaggctttgaaagcaaagggctactgatttcctgggcctgcccacccggtgctctctcctgggccgtctgccccagggccttcctggctcctgatgcagaggaaactt

SEQ ID NO: 222979 - DNA, 122 bp, Homo sapiens
ttgctcgcacaaagcctgtttcgtggtctcttcacatggatgcgagtgaaattttggtgccgtgactcggatcgggggacctcccttgggagatcaatcccccgtcctgctctttgctccgt

SEQ ID NO: 222980 - DNA, 122 bp, Homo sapiens
aagggtagacaaagttgggctgcaggacattaatttttgattttcacatcttcactatggcggagattttgttaagatcagaggaatatccattccatgtagtttgcagtttaaccaaagtt

SEQ ID NO: 222981 - DNA, 122 bp, Homo sapiens
agcacatggactaactctccagcggcatccggaatccctgtgaggctgggggtctcgggacgcccgggccagccagaggctaggctgggagtgctcttgccaggtgtgaggccccgggctcg

SEQ ID NO: 222982 - DNA, 122 bp, Homo sapiens
ccgagggggtcactggggtgcctggatgccctcgtccatctcggccttcgaaggcacgtgcgtctccatcccctgccgctttgacttcccggatgagctgcggcccgctgtggtgcatggtg

SEQ ID NO: 222983 - DNA, 122 bp, Homo sapiens
ctcgtcatccgagtagcgtacgttgcacctaatatgtaggtttttaaaaatcccacaccccgccttccttgcttttttctttctttctctttccttttctttttctttatttccctttcccc

SEQ ID NO: 222984 - DNA, 122 bp, Homo sapiens
gtgtttcctctgcaggacgagcgtgtgactctggtgaccgcagagcccccctgaggcccccgggttctgtgatctcagaaagtggttagaggcgcattctcttgaccagagaaacgcgtggg

SEQ ID NO: 222985 - DNA, 122 bp, Homo sapiens
atggctgcgccgcggttgccgaagcaacgctttggttacttccgttggtttcaatgcttccgggttggcgctgcagtggcgtttccgactgtgggagcctcagcttcccagtcgtccgatga

SEQ ID NO: 222986 - DNA, 122 bp, Homo sapiens
cacatctgagattttgttgaatgctttgacatcttcctgctggaattgtgctgctgaccacgtgtgctctcatccttgcagaagcggtggggccaacacgacttcccgggcagcctcgggag

SEQ ID NO: 222987 - DNA, 122 bp, Homo sapiens
cttcattctctttcctgagtgtttgaatcataaaagcgtgtagctctttcatctctccctcgtcctgctcctcccctgcacagacaaatggtattttgagttttgttcccaccccagagtac

SEQ ID NO: 222988 - DNA, 122 bp, Homo sapiens
agccagcttctggttaggatcagcatacggcagcagcaggtgcagctgtgtcaactcttgcgtgaacaccgggggtgggtttgctttttcctgagggtcccaccttcatttctcctggctcc

SEQ ID NO: 222989 - DNA, 122 bp, Homo sapiens
gacttcaggtgatccgcccgcctcagcctcccaaagttctgggattacaggcatgagccacgcgcccggccctggagaggtttttaaaagatggcagaaggctgtttggaggagtccacccc

SEQ ID NO: 222990 - DNA, 122 bp, Homo sapiens
ggaggaggaggcgccgccctggctttggggcaaatggggctgcatccatcttaaggaaaacgctgctgttcacagccctacctgatgaggagtgagattccctgcgcgtctcccggatattt

SEQ ID NO: 222991 - DNA, 122 bp, Homo sapiens
gccagcccaactgttgtattttcagttcttccagtgtgaatcagttaatattctcgggaacgagggagaggttgatcctatgaggaaatcaaccacagtgaaaaggcttgggccgcttttgt

SEQ ID NO: 222992 - DNA, 122 bp, Homo sapiens
ttttttttttaaactaaaatggaggctggtttcttgccttaaggagcccattgcctttcccgctgaagtctagatgttgacatgtaataaagcgggcagcaggatggtggtggatgcggcca

SEQ ID NO: 222993 - DNA, 122 bp, Homo sapiens
cctggctgcgggtaggcgggagcgagggagccgggcccggcggaggattgacgaggcccgcgttcggtgtccttacccagccctgctctacggagacgccgagaagccggcggagagcggcg

SEQ ID NO: 222994 - DNA, 122 bp, Homo sapiens
agattccgaaagttctggattcaggtggccgaggccagaaatgtgtgtttttatatagcacgcgcccgctcccgccccgtgactcgggcgcaccggctcttggaccacacaggagtgctttt

SEQ ID NO: 222995 - DNA, 122 bp, Homo sapiens
aaactgggacctaggggcttggggaactggcccgaaggtatggagagtacctgaccttgtcgttcttccaggatatgatatttactcctggcaccaatcccctctaccttgtactgaaagca

SEQ ID NO: 222996 - DNA, 122 bp, Homo sapiens
ctcacaggagaacattacttggcccaaaggcaagagcatatcagaagcctctgtctcctgcgagaaacctgggaaaaatcatctgtagggtaacagaaaaccaaaaacctgggaattaaagt

SEQ ID NO: 222997 - DNA, 122 bp, Homo sapiens
tgtgtgacattgtagtccgttttctttttcatagggaaactggtcctaagaatgattaagcgtcctagaatcacaatggctatttttgattggtttttgtttaaattctaaacacatgatct

SEQ ID NO: 222998 - DNA, 122 bp, Homo sapiens
aaaggagcaacagttgagaaattctccctaccctcttgtattctgagaaagatctaaccccgaaggacaatgctgctcccacacactctgagctaagcctcactttccccaatgactcataa

SEQ ID NO: 222999 - DNA, 122 bp, Homo sapiens
tctcctgtaattgtcaaaccctgtgagttaattaaaaaaacaatagaccttagggctgggcgtggtggtgcatgcctgtaaccccagcactttggggtttgcttgaggccaggagtttgaga

SEQ ID NO: 223000 - DNA, 122 bp, Homo sapiens
actggcaaagagaagggattcctcggattcccaaggcacccagcgcccctgcctgggggtcgcctttcgtccattttgctcccccgggattttgctttcgctaccgcgagcccggctgaggc

SEQ ID NO: 223001 - DNA, 122 bp, Homo sapiens
gctgtgaggggcccgatgagcctgggcaggaacccagcttctgcacttccggcaaagctacgctctccttggaaaagctacgctgtccttgctctgagcccagctgctcgtctgtgaagtag

SEQ ID NO: 223002 - DNA, 122 bp, Homo sapiens
cctagacattttatctttcccagctcaagatggataaactcagaatgacaggccaggcaccgtggctcatgcctgtaatcccagcactttgggaggcggaggcgggtggatcacttgagacc

SEQ ID NO: 223003 - DNA, 122 bp, Homo sapiens
atgaatgaatgcgcaggacgggatgggcgtgctcagtcctcgggctgactgcagaacaaacgccaaagcatttcctctcagatctgagggggccccagcctccccgagagtcttcctctccc

SEQ ID NO: 223004 - DNA, 122 bp, Homo sapiens
atctccatagaaacgtgtcagtttcaatagtagtgtcaaagttcactatatacagacattcgcgcagatccccctttcggaaacattgctctgcgagtcctcccgtttaaacgcattcaatt

SEQ ID NO: 223005 - DNA, 122 bp, Homo sapiens
tagagtcgctgggagcgaggctgagagacgcacaggtcccgccccggccccgccctctgccggttctaaagggcaaggtctctccgcctggggccccgcctctacctcgatcaggccccgcc

SEQ ID NO: 223006 - DNA, 122 bp, Homo sapiens
agccgtgcggtgggccggctctgcaacagctaggcgaggcacatggggtcagcacgcccgcggtccccgtgcaggccgctgcgattcagggatcaagtccagggtcacccttcaccacccat

SEQ ID NO: 223007 - DNA, 122 bp, Homo sapiens
caggtgtgagccaccgcatccagcctcctgctgctgttctcgatggctgtagtgggttaacggtgtcctcccagaattcatggcctcctggaactgcagaatatgacctcattttgaaatta

SEQ ID NO: 223008 - DNA, 122 bp, Homo sapiens
aggccaggcagttggtggggatgaccggtttcactttgccttgtctatcatcttcagagccggattgccccagcttgtatttttgacccttaatgggttggagcctagagtggatggactcc

SEQ ID NO: 223009 - DNA, 122 bp, Homo sapiens
gttccaggaaaacacccaccgcctggggcttctgtgtgggccttttgttcctgggagatgcgctcttccaccagagaaggcccttcttggatgatatgttctgtgtctcttgggaatgatcg

SEQ ID NO: 223010 - DNA, 122 bp, Homo sapiens
gcgggctcccgagtggccccccaccgaaggcggtgggaccagcggctgaggccaggatgccgtccaggcggcgcggcggctcctcactcatcccaggtaagggggacgcggcgctcgctgcg

SEQ ID NO: 223011 - DNA, 122 bp, Homo sapiens
aagcttccactgccaaattttgattcctctaaatgtgttaggttgatgcaaaagtcattgcggtttttgtcattaatatttgcctgcaccttgtctaatgtttaatccatgtttatccagca

SEQ ID NO: 223012 - DNA, 122 bp, Homo sapiens
ggtgtgagccaccgcgcctggccgcatctttcagtttctgtgcttacagtaatgatgatccgtagtgtctccatacttattatatataagtggaagatttttaatacatgaattagaaagtt

SEQ ID NO: 223013 - DNA, 122 bp, Homo sapiens
tgacagcgcgcatccccgcccggccccgccattggtggaccgcagttgctagggcagctgcgcgctttcactggcttggttgtccgtccatcttactctcgtcaccgcctccgggctgtcgc

SEQ ID NO: 223014 - DNA, 122 bp, Homo sapiens
ctgagaggtttcccgacctgcccaaagacacaaagcaagtagaatgtacgagtgaagactcgaacacaggtccgtgaatcaatctctgcgtggggatgggagcggttccagtgataagggcc

SEQ ID NO: 223015 - DNA, 122 bp, Homo sapiens
cggcctccagggaggtcctgtctccccagccgggtgtcggagagcgattggggagctgagcgaccacccaccgctccatggccgtccccttcgaaacacggcgcactggccatgactgactc

SEQ ID NO: 223016 - DNA, 122 bp, Homo sapiens
gacctcaatcgttgatttcggctgcacttcctatccctgggggagctttcaacgctccgccgtccaggccgccgggccccgcagcccgcgccccgctctctagggctgggcccccaggggct

SEQ ID NO: 223017 - DNA, 122 bp, Homo sapiens
ggccgcgggcgggccgcgggcgggccctgggcagtcgtggcgcccctggcccggccttcgcggccccttctgccacagccgggtacggggccaacccctcggctcctcctcctggcggagag

SEQ ID NO: 223018 - DNA, 122 bp, Homo sapiens
ctacttcttccgtggccaggagtactggaaagtgctggatggcgagctggaggtggcacccgggtacccacagtccacggcccgggactggctggtgtgtggagactcacaggccgatggat

SEQ ID NO: 223019 - DNA, 122 bp, Homo sapiens
tgaaggaggcgcctccagaaaagatgccgagtgttgcaagctgtcgatgcagccaagagccgaagaggcatcttgccgattggggagggagcggcgcttacgtgtttattggcttaactctc

SEQ ID NO: 223020 - DNA, 122 bp, Homo sapiens
gagtcgtctccctgttagtgctaccatctgtcagtgttgtgatgtggactcagctgactccgtggccctcggtattgagctggctgtaaggacacctcactacagtggtggggcctggggtg

SEQ ID NO: 223021 - DNA, 122 bp, Homo sapiens
cgcaggtcaggggtcaggctgggctcagcaggtggctcttctgtcctcgccggggtcactcgggactcactcactcgtctagggctgcttggctctcggctgccatcaggcagctctgtccc

SEQ ID NO: 223022 - DNA, 122 bp, Homo sapiens
cggatttccatgttttaaataacatattttgccaccccctagtggacagtggctcaccaccggcacaaggggctacataggcagtcaatgggaaccaggcggggacgggaaatgtcgtgaac

SEQ ID NO: 223023 - DNA, 122 bp, Homo sapiens
tcccttgccattcccgggacccccgggaccccgggaccccgccgcccgcgcgagccgggccgcttacctcagccgctcgcagccagcttgccgccgccgctcggatctccctccgctccgcc

SEQ ID NO: 223024 - DNA, 122 bp, Homo sapiens
ttattacctgtacattttaagtctcattctagcaggtttagccagttcagcccccaattccgaatgatttaaccccatccactgccatcttctaatttcctagaaatggtaaggtaagacta

SEQ ID NO: 223025 - DNA, 122 bp, Homo sapiens
tgccagcctgaagggccctacacaaggatagtgcttctgtctgacgtgcactctctcctccgccacaaacatacacacacacacacacacacacacatgccagaaatgtagactgtgactta

SEQ ID NO: 223026 - DNA, 122 bp, Homo sapiens
atatctggaagatggtgtcataaagcagcacatccggttttttctttttatgcgcagttccgcagattccctctaggatgccatgagacatgagtaccaagaacgtgctgtcagaggacttg

SEQ ID NO: 223027 - DNA, 122 bp, Homo sapiens
tagagaaactaggcattccctacctctcttaggcaaacctatagctatgtaacatggcaacggaatgacactaactgtctcattctccttgggagtgctctctgtatgttcagtctcccagt

SEQ ID NO: 223028 - DNA, 122 bp, Homo sapiens
cgtgctcgctcatctatatgtgcgcacgttgacccacgcgtgctcgccctctctgagagtcgttgcatatgtggtgactgctctgccctgaatactgcagctgcatttcccatgaagggcct

SEQ ID NO: 223029 - DNA, 122 bp, Homo sapiens
tcggaagatgggcgggtgtgggaacagtggtacgcccccattcctgccttccagagagaacgtgcgacagcgttcctgctacacccggcagccggccgtaggggcgcgctggaaaggctgct

SEQ ID NO: 223030 - DNA, 122 bp, Homo sapiens
ctgggaaatgcagaggctgcctgccgctttctttcgcagttttgcggcccaaggcttgggcgaatcagttcacatcaacacccctactagcctctccctccggggtcgaccatttatctcca

SEQ ID NO: 223031 - DNA, 122 bp, Homo sapiens
gcctatctcgggagccagaggaggccccgggctttgtcctgcctggtggtgctggggtttcgcatcctggacagcttccccagacagtgtttggaattcagggaaggaagaaagtacgtgcg

SEQ ID NO: 223032 - DNA, 122 bp, Homo sapiens
accgcccctgcacctcggggacgtgaccccccccccaggctgacccgttcctcgctctgtcgtccccaggtggaggaggagctgacgcacctccagaagaaactaaaagggacagaggacga

SEQ ID NO: 223033 - DNA, 122 bp, Homo sapiens
cctcatctctaggtgtcaggccttgtaccctcccagcagccccctacaatctcttggattcgcttagagcgacccatcttctccctccgagactcagcagttcggctcccgccccatccttc

SEQ ID NO: 223034 - DNA, 122 bp, Homo sapiens
cgtggaatgaaaatcaacttttatggatattttgaggactaaaagaataaatagggcgtccgtactgtagcgaaagtgcgactaaggttaggcatctggatttcccccgtagccctctttca

SEQ ID NO: 223035 - DNA, 122 bp, Homo sapiens
ctatacacatcaatatcacttgcattgccagtgctacaaatggaaacctgtgttctaaaacgcaaaggcccttaagtccctctcctcaccattccctgccctgtcaacgtgtaacccatgaa

SEQ ID NO: 223036 - DNA, 122 bp, Homo sapiens
tttctatttggatcccttcgaggtgcagcccccgtggctgtggaacccggggcagaagtgcgctcacttctctcacccggcctcctgccccacctgctgcccgcgctggggttcaaaaacaa

SEQ ID NO: 223037 - DNA, 122 bp, Homo sapiens
tacacaatcatagcagcattatttgcaatagccaaaacctggaaaccatccaggcatccacgagtaatgaaatggaactgtcgtattttcatacaattgaatagtctgtggcaataaaaaga

SEQ ID NO: 223038 - DNA, 122 bp, Homo sapiens
ctggtgggtcagcatgtgggtatgcaggtggctgagctgcttgaagagcttcccgcagtgcgtgcacgcgtgcggcttgatcccactgtggcccaggatgtgggtgaccaggttgtacttgg

SEQ ID NO: 223039 - DNA, 122 bp, Homo sapiens
gggatgtagctcagtggtagagcgcgcgcttcgcatgtgtgaggtcccgggttcaatccccggcatctccaaatcagccgacgtttgctttttattttttctcctttcctgttgtatcttag

SEQ ID NO: 223040 - DNA, 122 bp, Homo sapiens
caaaaaaaaaaaaaaaaaagaaaaaaaaaagcaactgacagtgactcacttgctccaggccggcaggcctaagtttaatgttctgtaaagtaattgatagtcataatgactgcctgaggcac

SEQ ID NO: 223041 - DNA, 122 bp, Homo sapiens
gggggaggtgggggtgggcccgagcagccggcgcgcccacgtgcctctcccgcgagggcccggccaccccagctccagccaacccgaggccgcctctcgtgccccaccccaagccccgcccc

SEQ ID NO: 223042 - DNA, 122 bp, Homo sapiens
ccaggttctttgctttcctagaatgtgccagaaacactcccttgcttagggactttgcctcgcctagtccttcggtaggaagcatgctgcatccagagatcctcagcccactccctgtctgc

SEQ ID NO: 223043 - DNA, 122 bp, Homo sapiens
tgggggtcggtgggtgagtggtgtcaaaggccttgcacctgggccacgcacggtggctcacgcctgtaatcctaacactttgggaggctgaggcaggaggatcacttgagcccaggagttca

SEQ ID NO: 223044 - DNA, 122 bp, Homo sapiens
aatggggggacccattcccccattccagatgatccatcccacccctctgggatccccacccgagagtcctgaaggcagggcacaggccgccctgggaaatctccgaaatccagccccggtcc

SEQ ID NO: 223045 - DNA, 122 bp, Homo sapiens
ctgcaggaccggggcgctgtcggtccacgtggccgctctggagcaggttggagttggcagcgggctgcgctgcagggacaggcgcggcggacagccccgggggcagcggcggggtcctgtct

SEQ ID NO: 223046 - DNA, 122 bp, Homo sapiens
aattgtagagcacatctctcccatgctttcttgctatgtatcttatatataaacaggcatcgttcctaaggtggtgtatttctccccttgctttcgaggacaccctgctctgtctatggagt

SEQ ID NO: 223047 - DNA, 122 bp, Homo sapiens
aatagatattaccaaatagatgagctgctgaagaatgttctatttcccgtagaaagaagacgtgaggaggaaacacatccgtctgcacatggaaggggcgctgactgcccgggacaaggtcg

SEQ ID NO: 223048 - DNA, 122 bp, Homo sapiens
gtgccaggacacgttgatgctcattgagagcggtgagaaggccctggcgtgcagagaccccgccctgtcccctcagtcccttgatccctgtgcagggacccgggagccacccctccggggga

SEQ ID NO: 223049 - DNA, 122 bp, Homo sapiens
tcagggaaaaccgcccttggttgggcttaaaaatacctaaattactcagtgctaaaaatacgtgcacgcagagaacaaacgggctggccgcacctcctgttttccttggaaggccagggggt

SEQ ID NO: 223050 - DNA, 122 bp, Homo sapiens
gtttgcccggcattattcattcctttgtgttctcagggttcacctgctagattggcaggccgagggagagaagtgccgggatgttgcagctctcggcgaggaaatgtcctttcccagaggac

SEQ ID NO: 223051 - DNA, 122 bp, Homo sapiens
gcgcatgcgcgcctgcctgcagccgcgattgaccttcccagtcaagccggtgacgtcttgcgtcgcagtggatgtgacgcaagagataggaaagtcccgcctttcccacgcggcactggaca

SEQ ID NO: 223052 - DNA, 122 bp, Homo sapiens
cccagctagcattctgtggttatttctactgattttttggcaagtgttgcttgtctgtgtcgagctgtgccacatcagccttaagtttctactttgcgtagctcagctaggaattagaaaga

SEQ ID NO: 223053 - DNA, 122 bp, Homo sapiens
tccttaccagttctctacctccactctgctccccggcttggctaactacccctctcccttcgggtctcatagatgaactttctctgtatgattttcttgaaactcaagctctcaagtctagc

SEQ ID NO: 223054 - DNA, 122 bp, Homo sapiens
accacttcttaacacctcaactactcccattctggtctgtaccaccaactaaatgatagccggagtctcctgactggtttccaagttgcttccacccttgcctcctccatagtctgttctca

SEQ ID NO: 223055 - DNA, 122 bp, Homo sapiens
ggcacttcggcctatcgcagctgcggactgacctggcctagttaggagcccaatgagaggcggcaattccgtagtggaggcgggctctgggagcaacggccccgccccttttgggggttcac

SEQ ID NO: 223056 - DNA, 122 bp, Homo sapiens
cccggaaacgtggggtgccagccccctcagcacagatgcaatgcagagttatgggaggtgcgaatgactctgctctctgtcctgtctcctcatctgcaaaattaggaagcctgtcttgatta

SEQ ID NO: 223057 - DNA, 122 bp, Homo sapiens
tgaggccgggggccaggggccgtcccgggctgcggggtgcgggacgagggactgcgagtgcgaggtcccccctggtgcgtgcctcggccttccctgggtttttggctcgatggggactaaga

SEQ ID NO: 223058 - DNA, 122 bp, Homo sapiens
ccctctcattgggtgagaacacgctctcaacaacagcctcccttattggctgcagtatgccggcagccccgccctgtgtgcggtgtctaaggattccgtccccaagcaaggacaacatatta

SEQ ID NO: 223059 - DNA, 122 bp, Homo sapiens
ctgctgctcaaagcccgtgtctaggatgtcaccagagctcccttttctgtgtcctggacccggttcagggcccccgaggaagctgcggtttggggcgagccgattgcaccagcagggccggg

SEQ ID NO: 223060 - DNA, 122 bp, Homo sapiens
ggaaatagttaatgtgattcatctgggaatctgttattgtaatgacctgtgtccaaatgtcggttttatagtcatacctattccaagagctgtgttctgtgaaaggatggcaagtcatggtt

SEQ ID NO: 223061 - DNA, 122 bp, Homo sapiens
cctgaccctggtcacccccatcagctgggtcaccccgttacccccatgccccggtctttccggtcaccttgtccgagttgttcttgagctgcacaaacttgccctccaggtcgatctcctcg

SEQ ID NO: 223062 - DNA, 122 bp, Homo sapiens
ctgggtgggtggattgagtgacacgttagtgagaaagttccctccccttgaagagctcctcgaaaaaggagtcagagagatatcatttgagaaagtgacaggcagatcatgtagcctcggcg

SEQ ID NO: 223063 - DNA, 122 bp, Homo sapiens
gggcacttagccacgcaggaataattgcgagcctctagcccaatcaggagcagcaatgggcgcctcactggatcagaagggcagcggacaccctgccggatccggagggatggaagtcagtg

SEQ ID NO: 223064 - DNA, 122 bp, Homo sapiens
agcggatcgcactctctttgtgggcaaccttgaaacgaaagtgaccgaggagctccttttcgagcttttccaccaggtaagcggctgggttcggccctttgcctttcgttttccgtctcgcc

SEQ ID NO: 223065 - DNA, 122 bp, Homo sapiens
aaaagaagttcgacatctctatcagagaaatgcaaatgaaaaaacacaaggtgatgccaccgcacacctgttagggtatcaactatcaaaaaaaaaaaaaaaactaacaagtattggtgaga

SEQ ID NO: 223066 - DNA, 122 bp, Homo sapiens
gcgcggtgggtggggggcagagaatgtgaagctccagacgcatggcacccgccgccaagtcgccgcggtggctgccgggatgcgccgcagcgaatggtcgcgccgggcgccgctctgagtga

SEQ ID NO: 223067 - DNA, 122 bp, Homo sapiens
tgtcagtgtgcgcatgagggtggggacaccctgggccgcgaggtggtacctgcgcggggtcgagcgcccctgccactgaatccccgatccagagatgctcccggagaagctgctggtagctg

SEQ ID NO: 223068 - DNA, 122 bp, Homo sapiens
tggaccgggaggaagagcgggttcaccacctggtcctcacagcctctgatggcggcgacccgccccgatccagcaccgcccacatccaggtgacagtggtggatgtgaatgaccacacgcct

SEQ ID NO: 223069 - DNA, 122 bp, Homo sapiens
tggaagtagcagaagcctctgtgagccatccttcatgcagaactagtcaggagcagctcccgctcagccaagagagtgaagcatgcccatcgcccagctcagccaggtaagtactagggaaa

SEQ ID NO: 223070 - DNA, 122 bp, Homo sapiens
tctatctcctgttttgcatgttttgagagcagatgaatgtgtcgatgctcaccctgatgacgtggtgactttgatttgattccctatctgcttggatgaatgaatgatcctttcatctctcc

SEQ ID NO: 223071 - DNA, 122 bp, Homo sapiens
attccattataactggatggacacttttcattttttccttctttcagagacaatctgtttcgtgttttcctaagaaaaattggaaccttcgtaatagcatctaatttgacgggggttgtcga

SEQ ID NO: 223072 - DNA, 122 bp, Homo sapiens
aaccagacttccattgtgttatgtgagctctccccattcagagaaaacctatgaaatgaccgtggaaggagaggtggcaggctggaaacccaatgatacccaatgtctaagaagttcccaag

SEQ ID NO: 223073 - DNA, 122 bp, Homo sapiens
gaggctctcatttctggagtaatagtgacatacatttgctgcaagaaattgcagcctcatcgcaaatgcctacacgcagtgtctatttcaacatcagaccacatttcattcattaattgtta

SEQ ID NO: 223074 - DNA, 122 bp, Homo sapiens
ttaggcaccaggcattcattccaccaggtaaggcgaggactgtggctacggcttccctcccggctcagccactctacagaaagagaaactagggggcccagaagctaccattgtggtgagcc

SEQ ID NO: 223075 - DNA, 122 bp, Homo sapiens
ccctctcccccactggggggggacttcccggggccgcagagagaagtccgactgcgactgcgagatcgcgccctgagggggctgccgccctgggagtcacagccccgcccctctccctgccc

SEQ ID NO: 223076 - DNA, 122 bp, Homo sapiens
ctcaggtgatccacccacctcagccttccaaagtgctgggattacaggcatgagccaccgcgcccagcccatttttgtaaacttttacaatgaagtaatttggtgtcaaaatctgacctgaa

SEQ ID NO: 223077 - DNA, 122 bp, Homo sapiens
cccagggcccgatctgggctgaaaacctcaggaatccaggctcctagcaggctcgggctgcgcgaggagatggcctggctttcaagaaaacccaattatacgtgaacagaatgcaccgaaca

SEQ ID NO: 223078 - DNA, 122 bp, Homo sapiens
gagggtgcgggaggctcggggcggggcggggagctgtccgcggtgctgaacaccaccggccgagcctgggaacaacagagcccgcagggttcttgttcctaccaggtttctcgacctcaatt

SEQ ID NO: 223079 - DNA, 122 bp, Homo sapiens
cacactagaagtctgcaaaatgcagttccgtccatgtcagcccgcaccgactctccagcacggagctgtgatgagccaatccccactgtgcacccagtgtcagtctcttctgagaccactca

SEQ ID NO: 223080 - DNA, 122 bp, Homo sapiens
cccaaagcacagggggcagtgaggtcggcctcctcccaccctaccccacccgactccacccggccctcggcctactgaagctcttaggtcggctaacgctgacctggtgatcacaggcctcc

SEQ ID NO: 223081 - DNA, 122 bp, Homo sapiens
aagctctgggcttcctccccggccgggcgacacccgggggacaccggggctctctcgggccgttaccctgcctatgtggactggtgtgcaccctcgggggaggttcctagggtgccacggtg

SEQ ID NO: 223082 - DNA, 122 bp, Homo sapiens
ccccgcgcgtacctgccgctgccgccgagggcagcgccctctgtgttccctgccttcctacgggccgacgcctggcatagttgaggtttcgctccaactctgtcctgcccctgatgtcacag

SEQ ID NO: 223083 - DNA, 122 bp, Homo sapiens
aggaggcctcaggctcagctgttgaattataatttggccaaccgcattgagacaagtaatcggcaatgtatagaaatagcctttaaaacgttcctgcctcctttaacacgataaaatcttaa

SEQ ID NO: 223084 - DNA, 122 bp, Homo sapiens
gctgagtccgggacctggattcccagcctcccaccagcttcctagccaggctccccctgacgccctcccggtggagtgcattctccacgccggaccagaccatttctcatgctgtccatggc

SEQ ID NO: 223085 - DNA, 122 bp, Homo sapiens
ggctcggaccccaggagcagagacagcgctcgagcttgtcactttaaattcaagagggagcgggcgggcaagcgggcgagcgcgagggagcgcgcggcgggctcctgggagcgtgcccggac

SEQ ID NO: 223086 - DNA, 122 bp, Homo sapiens
tgaacttaactgtgttcaatttttcccgtccctctttcattctctctaaacaggctttcacgtcccttattcatcaccaggggctgctggtgaggccccattattgactctgatcatggcca

SEQ ID NO: 223087 - DNA, 122 bp, Homo sapiens
tacccgattcctggtagtgaaggaggccgggaacccgggcagcctcttcggctactcggtcgccctccatcggcagacagagcggcagcagcgctacctgtaagtgaagctggagggtgtgg

SEQ ID NO: 223088 - DNA, 122 bp, Homo sapiens
catcacagaacttctgccccagtgtcccagcctccagagggccaccaggactttggtcttcgccccgagcgtccactggccaaaccgccgaccctgcccacccgagggccgggcgcaccgcc

SEQ ID NO: 223089 - DNA, 122 bp, Homo sapiens
catttctgtcgtttttatagctaaggatactaagtggttgtccgcacatctcacaggcaacgcatgatgccggatcctgctatgatttcaggcaggactcaggccccagaagcagggagcgg

SEQ ID NO: 223090 - DNA, 122 bp, Homo sapiens
cagcagcctggcccggagtcgggtgagggtcagaaaggaggagagcagcccaaactggtccgggggcacttctgccccattaaacgaaaagccaacagcaccaagagggacagaggaacttt

SEQ ID NO: 223091 - DNA, 122 bp, Homo sapiens
gaagaaaaaaaaaacacaaaacagaaaacaggctagccgtttctcagccactacctttcacgaaccacttttctctggagttattctcaaaaaaaaagatgatgcaatttcctgtcttgtcc

SEQ ID NO: 223092 - DNA, 122 bp, Homo sapiens
gggaacggaggtccggcggcgcccggacagcgtccgttcccaagcccagcccgcggcgagcgcccaccccctaacccccttgcaggcatggaggaacctggcatggacacggaggccgagac

SEQ ID NO: 223093 - DNA, 122 bp, Homo sapiens
ctgctccaaggctgctgagtcttcagttccattccattcaaaatgttaattcctgagacacgcaacctacgccctactgtcctttgtcccacggcttctcgagattatctctgtgttttaat

SEQ ID NO: 223094 - DNA, 122 bp, Homo sapiens
ccatcggccgccatcatgattatctactgggaccttgtcagccatgatcaggtgtgttcacgagatccgggagatctcagactggctgtgcgtggaagtggaggcgaagatggtctgtagga

SEQ ID NO: 223095 - DNA, 122 bp, Homo sapiens
gacggagaggtaattccacaaacacgagaccctgctgcccactccacaaacatgagaccccgctgcccattcccgacggagaggtaattccaggtcagtggcatccagccttccccggcccc

SEQ ID NO: 223096 - DNA, 122 bp, Homo sapiens
agtgctacagcagagtggtttctgagaactgtgcactcattaggaccaggggaagcaaagcgtaagttgcaatgtaggggaactgaagagctctcaatgtcaggccttgaaaggcttcctgt

SEQ ID NO: 223097 - DNA, 122 bp, Homo sapiens
tcaggtatctttttttttttttttcacattcactgtaatccttgtttgatgtcaatgtcacgtcaccaccccaagcggggggcacaagcacgaggaaaggaaaccttccccgtgaggggagg

SEQ ID NO: 223098 - DNA, 122 bp, Homo sapiens
agagctataacgctccacggagccggcaggagccccgccctccctgggtgcccctgcagccgccctgccacggctctcggctctcgggatcacgcgtctctgtgttcttgggggcccaggaa

SEQ ID NO: 223099 - DNA, 122 bp, Homo sapiens
caggcaatgtcatacaaagcgagggaaaggataaagtgatgaagcttttcggggctggttcggtaatgtatatgagtatttacaatgcatatctctaaggcccagcggttctgagttcctcc

SEQ ID NO: 223100 - DNA, 122 bp, Homo sapiens
ctggtcaccgatagggtctttcctcaaaaacctggagaacagacgcgcccagagacaggccgaaggcagcgcagaccccgcccctcaccgccccaccctctcttctctcgggtctcgcccat

SEQ ID NO: 223101 - DNA, 122 bp, Homo sapiens
acgggtaatcattctataggttggcaaacccacctcttctctcagttccttgacaaaccgcgacgcctgttaccagggtaaccagcctgggtacaacatctaattgggtccggggaacttca

SEQ ID NO: 223102 - DNA, 122 bp, Homo sapiens
gctctgcgcgcgctttaaggaaatggcttccctccaggacctcgagggatgcagcttttgcgcggatgacggtggggtgctgaaccagccggtgcgcctctggaaatgtctgggcacggatc

SEQ ID NO: 223103 - DNA, 122 bp, Homo sapiens
ggttggggcagtgccagctccctgcttctcacctggccacagaaggggtagcgggaggagcgtgggttcatggaggcaggtggaccaccccttggctcctggctctgccacctgtccactgt

SEQ ID NO: 223104 - DNA, 122 bp, Homo sapiens
ccgcccccacaagagccccaccgacgtggggttggcggtggtggaaggactaggagttggcgcgtgcgtactggcggcctctcccgcaccgaccggcctgggccccgcccccgggcgtgagg

SEQ ID NO: 223105 - DNA, 122 bp, Homo sapiens
agtaagccttcagaggattgaaactgtataaattgtttatctcttaaacatctacacagccgcttagatgtagaatttttgttgttgttttctgcaaaggcagatacatttaaatatattcc

SEQ ID NO: 223106 - DNA, 122 bp, Homo sapiens
aggccatggacagaacggagactaggttccgtaagaggggacagattacggaaaagatcacgaccagccgtcaaccgcaaccccagaatgagcagagtccccagcggagcacctcggggtac

SEQ ID NO: 223107 - DNA, 122 bp, Homo sapiens
ccttatcctaggcggggcctaatgggaacgtatggccaatcagcggcggcgtttcttttgcggctccacgtcggcaccagctgcggggcaagatggaggcgctgattttggtaggagctgga

SEQ ID NO: 223108 - DNA, 122 bp, Homo sapiens
gcgtgctgcgcgacggcacagctgacggcggcagccaggaggactaaggcgacgcaactccggcccggcatcgctctagcagccaacgccactccccggactccagcagaggcaaagaagag

SEQ ID NO: 223109 - DNA, 122 bp, Homo sapiens
caggcctcttcattatgaccccggcaggtgtgttcctggccgagagcgcgctgcacatggcgggcctggctgagtaccccatgcagggagagctggcctctgccatcagctccggcaagaag

SEQ ID NO: 223110 - DNA, 122 bp, Homo sapiens
gcccgggtagcctggggcggagcccggggagaggcggggtctgcagagggaccgcgggggcggggcctgtgcagttgtaaggtaaaaagcatagagttgtgtgggccccttctgttggaaag

SEQ ID NO: 223111 - DNA, 122 bp, Homo sapiens
ggtcctgagaacagacatgcagacacatgaacacaaggacagacaagtagacagggcactcgttaggctgctgtcccagagcccgcaccttcctcctggcctagtccccagcgagcatcccc

SEQ ID NO: 223112 - DNA, 122 bp, Homo sapiens
gtgggccctgagggaaaggatcacagaggcgctgagccgggatggctacgtgtacaagtacgacctctccctccctgtggagcggctctacgacatcgtgactgacctgcgcgcccgcctcg

SEQ ID NO: 223113 - DNA, 122 bp, Homo sapiens
tctctcccagcccctcagagcctgtgggaggtggtgggatggactctgctggcactggtgcgggatgggttgcagctgcagctgtgggtggctttgttcttacagcctagctttcagagtcc

SEQ ID NO: 223114 - DNA, 122 bp, Homo sapiens
acctgcgtggccgggcccctccccacctctctctggccaccccttacctgcctgcccctccgatgggcctgccacactcgatttgctcacaggcccaagacatggtgccttcctcacctccg

SEQ ID NO: 223115 - DNA, 122 bp, Homo sapiens
aattacggttcacatgctaggcatgcctggatcaggctagtggacagcatcctgtaccaccgtgtcccatcctaagtgctgtagaaacatgttcctaatacttcagtgcatgccaaaatagg

SEQ ID NO: 223116 - DNA, 122 bp, Homo sapiens
gcgcgccgccttgtgggtaatctcagggtgagacgaggctagcgcgaggtacggctagagcgtcatttccggctcgaatgcccggcagccgtggcggctagagcgttcctccccagctcgaa

SEQ ID NO: 223117 - DNA, 122 bp, Homo sapiens
ttttgaatgctcctataaatgacaagttagatatatagttctgtggaagtgaaagcgcaccgataatgtgtaattgttcggagaactggatttcatttgtttcatattctaagttactttct

SEQ ID NO: 223118 - DNA, 122 bp, Homo sapiens
acccaactcccggtcctgccgctgctccccggaggcgccccgcatccgtcaagtcccctacggctccaacagggagaggcttctcccattgcagtcctagctccagaggggatggagaggcg

SEQ ID NO: 223119 - DNA, 122 bp, Homo sapiens
gagaagtgaaaagacagctaaatggcatcattgaggtgctcaaggaagcaagcatctactcggaattatatatccacctaaaatatcctttaggaatgaaagtaaaataaatacattctcaa

SEQ ID NO: 223120 - DNA, 122 bp, Homo sapiens
ttcctccaggatcccggcgtcccagccccgcccggtcttggcgcggccctcgccagggggcgccgcgcagcccgcccgccgcccgccagtctagcacacaccccctccgccccgcgcgccgg

SEQ ID NO: 223121 - DNA, 122 bp, Homo sapiens
ttgtcatgtctgtccttactataagcctcaccatggcaagagtttttctgttttgttcatcgtatccacaacagctggaagagtgcctgttagtgtacccagttaatatttgtcaaattaat

SEQ ID NO: 223122 - DNA, 122 bp, Homo sapiens
cgaactagagtctgaggctgggctgaggacaccctccccatcagctgccagggtcactggcggtcaaaggcagctggtggggaaggaattggactccagccctgggggacggatgtggtgat

SEQ ID NO: 223123 - DNA, 122 bp, Homo sapiens
gcggaagaggcggccgcgcgggcgagctcggggcgcgttccggcggagccagcctggatccgggttttcactcgtgccctgttcacaagctcttgggacccgggttctaagaacaccgggcc

SEQ ID NO: 223124 - DNA, 122 bp, Homo sapiens
gcggcctggccgaggaagtcacgggagatcgagggctgcggggcgagaccgggaccagcgcgaggccgggctgggcggggcgcgcggcgcaacagcgtttggggcgccgtcggggttgcggc

SEQ ID NO: 223125 - DNA, 122 bp, Homo sapiens
gattacaggtgtgagccacggcgcccggccagctgctggatattttgaccacctcaagtacgctgagcacgaaatcagtgcatctggcagtacacaggagcttgaaatactttttttaaaag

SEQ ID NO: 223126 - DNA, 122 bp, Homo sapiens
ctcaggtgatctacctgccttggcctcccaaagtgctgggattacaagcatgagccaccacgcctggctgacttattgtctttttcagtaatatcttatattggtcagaataggctaggttt

SEQ ID NO: 223127 - DNA, 122 bp, Homo sapiens
gccccgcctgaggaattggacaacagcgatgaggatgtggtgcagcaccaggaccatgctcgcagccgcccgcccgcccgccggcccggccgctgcgctcggtcagcgcgtccgcgacagct

SEQ ID NO: 223128 - DNA, 122 bp, Homo sapiens
ctttcctctgctagccagtctgtaccttccattaaacaaactaaattggaagccagagggcgctgggtgcagctgatgcaatctataaggtcagactcccatagcacagaactgagtggagg

SEQ ID NO: 223129 - DNA, 122 bp, Homo sapiens
ggtggttgttgttgttgtttgtttttgctttcttggtgtgcgggactgatttgcagaaaccgccactgacttaaaagtttccagttattgctcgtggggagggggttgtttgagaagatgtg

SEQ ID NO: 223130 - DNA, 122 bp, Homo sapiens
ttccgcggcttgtagtcgaggaggagcccacgaggctttagctgctgcaagatccaagcgcgctcccgcccagcggtggccccgggctcagggaaccagcgctgcttctctccgaggctcgc

SEQ ID NO: 223131 - DNA, 122 bp, Homo sapiens
agggcatcgcccgctcctcctcagggctcctcctgcctccctgcaggctctccatggtcacgccaggctgggcagcgtgccagactttgctgtctgcagccgccttggctgcccggaggacc

SEQ ID NO: 223132 - DNA, 122 bp, Homo sapiens
catcgcaaaactgtgatccaataatctagggtcaatattaaaaatcaaaagtttctagaccgagcctgaagaagtcttaattctagacaatggcaaggaaggtgaggggcagaaaaaaaccc

SEQ ID NO: 223133 - DNA, 122 bp, Homo sapiens
ggcgggccgggtcaggtgtgggaggggacacgtgtgggtggggctagggcttagtgtgggcggggcttgaagttaaggtcagggatgagattattccaggcaaggactccaggcccagtccc

SEQ ID NO: 223134 - DNA, 122 bp, Homo sapiens
aaccattgtcagtgggctcagaccttgtcctggtgggtgcacagcaaattcacgagtgcacgtggtgccctccatacgtaggcatcggtacaccagctgaaaagtgtgtgtgtgagacagac

SEQ ID NO: 223135 - DNA, 122 bp, Homo sapiens
ccagccttcaagtgcttcaacagtgaagagttaggacggaggcccagcctggaacattcacgccaccttctgcccccagtaaaattccttaaagctatgaggttctgactcaccacggggag

SEQ ID NO: 223136 - DNA, 122 bp, Homo sapiens
tgtcacttcccaaagtctcccagcgggataccggtgccctctgcccttaatcaagatggccgccttgggggggctctagcgcacagtggaatatggcggtgcttccggtcccgctgccctca

SEQ ID NO: 223137 - DNA, 122 bp, Homo sapiens
gaagggggcggggctaggaaatgggcggggccctggaccaatgaggagcagagtcccagccgcctgctcccttcagctgccccctccaccttcactgcacatttggctaggatatacagggc

SEQ ID NO: 223138 - DNA, 122 bp, Homo sapiens
aatggaacctatcagatgggtctgaaatgatcccactaaaaatcccttaaatacagaatccgctcatttcttctattccgtgctccagtcacagtacacctacaacctgaaggaaactgtac

SEQ ID NO: 223139 - DNA, 122 bp, Homo sapiens
ttccagctagggcttggggctgacaagcgccgtggttggggcggtgtggccagcaggggtcgctgtgtctgcgtgtcggatcttgcaggagcggcaggtctgcgggctcacaaagtcccgtg

SEQ ID NO: 223140 - DNA, 122 bp, Homo sapiens
gggtctctggtcttggcagttgcagagcgtgcatggtacctgctggtgctgacgtctgcccgccctgggagcaggcccacccagcagcgcccagtgcacccggacagcccagagacacggag

SEQ ID NO: 223141 - DNA, 122 bp, Homo sapiens
ggaggggcgggcgtgaatggtctgatgattggaacaatccccccgattcaggcctacaaacgcatcttctgttccacaccgaggggacagaaaggagaaaagtgacaaagaacgcggggcgg

SEQ ID NO: 223142 - DNA, 122 bp, Homo sapiens
cagttcacctctgtggccacttccctctggatgaagccctcagccatggtctcctcttcacgagattataaggaaagataattcagatggaaatcttttttacccagcctgctggaaatgca

SEQ ID NO: 223143 - DNA, 122 bp, Homo sapiens
ccaaccttcacatctgtcacgttctccacacgggggagagacgcagtccgcccaggtccccgctttctttggaggcagcagctcccgcagggctgaagtctggcgtaagatgatggatttga

SEQ ID NO: 223144 - DNA, 122 bp, Homo sapiens
gtgatccttcacatgatgctttagctggaagtctcatttatagaaagaaacctcgacccacgtcacatctgcaatctaagagccccactgtggccatctccccagtttctcccatgcactag

SEQ ID NO: 223145 - DNA, 122 bp, Homo sapiens
ggtgttcgcttaagggcgaaagctaagaacctgcaaccttcccgtctctttcctaccacccgccgccgttaggaatcttcagatcccgctgtaaagaatggaggaaggaggagccatttatc

SEQ ID NO: 223146 - DNA, 122 bp, Homo sapiens
atggtcttcaactaaatatggccttcaaccggaagcacgcaaggggagaggagctccgaacgccagctccagcagcagctgacccacggtcttccccagcctcatgattgctcttttaagtg

SEQ ID NO: 223147 - DNA, 122 bp, Homo sapiens
gcagcggctctccgcactaactctcctctcctggtcagctgtaacccctgccgcagagcccggcaactttcagctgtcgcccgcggagccccgagggccactcgcctcacctgtgcgtgcag

SEQ ID NO: 223148 - DNA, 122 bp, Homo sapiens
caatggaaatagttgcctaacaggtaaagattcagggtgacctctcctggagtgaaggaacgaggggatcggagggacctctcctggagtgaaggaacgagggtcgctgtcttgcagatgcg

SEQ ID NO: 223149 - DNA, 122 bp, Homo sapiens
ccaggaggagaggcgggcgcggcaggaagactggagatggcctgagcctgcagctgccggcgcgcggacgcgtctggggcggttcgccttagccaagtggaaagagactccgcgccgcgggc

SEQ ID NO: 223150 - DNA, 122 bp, Homo sapiens
tggatggtctgcagagcttaatctattgactctggtcttttgctgaaaaagggtgccaaccgcagtattaaacagttacagaccaggcacagtggctcatgcctgcactttgggaggctgag

SEQ ID NO: 223151 - DNA, 122 bp, Homo sapiens
tggggaaaatgttctgactcttaatcttcgcggtttcttttttcccacggatgtagatttcgccagcctctggacagcacatgcgcagtatgctgctagcgccgccccaggcgcccggagct

SEQ ID NO: 223152 - DNA, 122 bp, Homo sapiens
acgctctgcagcgttgaaaacgttgtgtctcgccctccaggccgggagctggatcccaagcgggctggacccgatgcctcccttccccaagcgtggagagcggctggatccgcggtgggagg

SEQ ID NO: 223153 - DNA, 122 bp, Homo sapiens
ccaggctgccgtggcggggggctccggaccgtccctgagactctcggaggaaatcggggccgttgtggaagcctccacggctttgcgcacacggcaaagtccctcccggcgcgggccccatc

SEQ ID NO: 223154 - DNA, 122 bp, Homo sapiens
aaatggatagctctttctttcacccctggaccggcaatttcacatgccaatggcagcagccgggcagtggtggccccttagacctcatacacgctcactctctttttggagaggagagtcac

SEQ ID NO: 223155 - DNA, 122 bp, Homo sapiens
cggcggcggggcggggggagttatattgcggggtccttcctcgctcaccctggttcctctcggagcggagacggcaaatggcggacttcgacacctacgacgatcgggcctacagcagcttc

SEQ ID NO: 223156 - DNA, 122 bp, Homo sapiens
ccgggcacatttggacgtgtttggcagggagagtcctggcccagccccggcacgtagggccgcgcttccacgggccgccgccaggagacgcgcgaggctgtagatgcggctttgcagagaag

SEQ ID NO: 223157 - DNA, 122 bp, Homo sapiens
gcctgggcgctaagatggcggcggcgtgagttgcatgttgtgtgaggatcccggggccgccgcgtcgctcgggccccgccatggccgtcaccatcacgctcaaaacgctgcagcagcagacc

SEQ ID NO: 223158 - DNA, 122 bp, Homo sapiens
gtccccccggtagctcagcggggacttcctttatgtggtacagggttgggcctggagacccggatgccggcgaggtcctggctgggagaggccgccgctgccttcaggtttccgaggtgggt

SEQ ID NO: 223159 - DNA, 122 bp, Homo sapiens
gaggccgcggcggagaaactttctcctccgcgccgcccgcttctcacgctcggccccgcacgcgcccgcgggtccgcgccgcctgagtttctccaactaaggcagcaactctcggccggcgc

SEQ ID NO: 223160 - DNA, 122 bp, Homo sapiens
ctgttctcttggctatcccataccaagtggagccaaaggctctgcacaggtttccaaacccgaatcatagccatgatagcaactgtggtcctctccctcctggttacctgctcacctgaagc

SEQ ID NO: 223161 - DNA, 122 bp, Homo sapiens
atgtcaccaacttggcttccacgtcgagcgtgtcgagcgtgtggaggtcactggcctgatcgggtggccgagctcagtgcccctggggtgggggagcaaactcacgggggacggaagctatg

SEQ ID NO: 223162 - DNA, 122 bp, Homo sapiens
tctgtctgcttgtggcttcgtggggaccaggggagacaggtccccacgaggggacctgggcgagctctgtgccccagagcgagcgaggactcgtcgggaaggtcctccagcacacacggaag

SEQ ID NO: 223163 - DNA, 122 bp, Homo sapiens
cccgcgccccggagccgcgccacaaagggcccgcgcgcagccgccgccgccgccgccgcgcgaggagccaggatggtcctggtccacgtcggctatctcgtgcttccagtgtttggctctgt

SEQ ID NO: 223164 - DNA, 122 bp, Homo sapiens
aaacccaattttgccatctacggctctccaaacagctggcaaacagctccttctggagcacgggaaaggaattcactcaaaccagcacttttgccaaggatgtctaacagcgtcaacttccc

SEQ ID NO: 223165 - DNA, 122 bp, Homo sapiens
cagatgcgttctgtttttcccagtgacttctgtgttattacaatattcatgcttaaaggacggccagataaaataaaaatttgttcatcattccaataattagactctgcttcccatttcac

SEQ ID NO: 223166 - DNA, 122 bp, Homo sapiens
ggaccttgggtccaagtgccatggtcagggtttccttggggaccccagatctgagtgcagcgccagggtttcctcggggccccgggtccaagtgccatggtcagggtttcctcggggatccc

SEQ ID NO: 223167 - DNA, 122 bp, Homo sapiens
tgctggtgtaagagacggtttctggtttgaaccttcctctggaagcccctcttcccaccccgcccggcgctccccgttttggtagcgttgcgagcgtccccatgttgtaaatgtttaatgag

SEQ ID NO: 223168 - DNA, 122 bp, Homo sapiens
ggagactttatgtcaagtcttaaaaattcgagcctgtggaaggctgcgctgtcaagagaccggagttgcgagcgtctgggtgacgtccgtcctcctggaaggtgggatccgggtggcaggtc

SEQ ID NO: 223169 - DNA, 122 bp, Homo sapiens
gcccccgccaccacaagcctgccctctgaaaattaattcgccatcgagatatacatgcttcggttctattttgcatttctgcactcaatgaggtttttgcagccagattcccttcccacagt

SEQ ID NO: 223170 - DNA, 122 bp, Homo sapiens
accatgccggtcctgtagtgcccggctggcccccttcagcaccagtgcccgaactgcgcccggttggtccagatgtacagccagatggagtgctgtctggaggcacaaatagagggtcatgg

SEQ ID NO: 223171 - DNA, 122 bp, Homo sapiens
tgaaagaacaaagcttccacagcgtggaagcggaccctgcaggttgtcactgctggctggcgcagcctgcttgtattcccttatctggccccacccacatcctgctgattggtccattttac

SEQ ID NO: 223172 - DNA, 122 bp, Homo sapiens
gcagaggtggtccgtgtggccgtctgcttggtagcaggtgcgggtgtgctgcagggtaaacgtgcttcggggcacgtgtgagaccagagcagttggtgccactgttccaggcatttcttccg

SEQ ID NO: 223173 - DNA, 122 bp, Homo sapiens
gaaacaatgcatcttttatgaagcgatccccgctcctcgcctggaaaccttgcattaatgcggcattgatttccctcgtaatagagggggctctcccgcgcccccaacccgaggggcgcaag

SEQ ID NO: 223174 - DNA, 122 bp, Homo sapiens
ctggtcccactagccctgaggccagagacccttctgttcccctttttttcagagttgacccgtgcactgaacaaggcggcaactgaagaaaaggggacactaatagaaatgcagagataatg

SEQ ID NO: 223175 - DNA, 122 bp, Homo sapiens
gggcttcacctttctctctatgggcagaaaccggtaccctcctgcctgctggtgggtggccgtcccttctctccgccgacagaggctctccctcgctctgctgcccgtcggcggcatcgccc

SEQ ID NO: 223176 - DNA, 122 bp, Homo sapiens
ccgtgttccagaagccggtcaagttccaggttgatatcacctacacggagggtggggaggcgcagaaggagaacggcatctactccgtcaccttcaccctgctctcaggtgagctggcgccc

SEQ ID NO: 223177 - DNA, 122 bp, Homo sapiens
gaaacagcctctggatttcagcaccgacactcagatggcatgttggggtcatcaccgccccgcccggcccgtaggcccccggccacactacgaaggagaaggcaaaagatattttaaaagtt

SEQ ID NO: 223178 - DNA, 122 bp, Homo sapiens
tcttttgttgaacaagaaagccctatgcttccaaatggttataggagcattaattttagacgattaaagacatctctcctactcgcaggtcatgtgagattaaataaatcgcttaagctctt

SEQ ID NO: 223179 - DNA, 122 bp, Homo sapiens
actaacaggaaagactcggtctctcccagaggattcagggcctccgtagcgggctgctgtcggcctccctcccggcctcctgctcctctgcgcggtccccagccctctacccggcgggcaga

SEQ ID NO: 223180 - DNA, 122 bp, Homo sapiens
tcgccgccgacgacctgtctcgctgcgtgcacgccctgccgccgccccgcagaaatgcttcggttacccacagtctttcgccagatgagactggtgtccagggtgctggctcctcatctcac

SEQ ID NO: 223181 - DNA, 122 bp, Homo sapiens
ttaaataattctctgcctcagtggttcaagttgcgtaaattatgcgtttacacttttcttcggattacttttaaaatgacaaccactatgttttgctggtctcaattaccagagaattggca

SEQ ID NO: 223182 - DNA, 122 bp, Homo sapiens
ggggtggcggtggccgcagctgcctggcctgctcctcccagccccagtccctccaagccacgagccccagatgggcggtgacaccccacaaggacacggcctcagcggttccattttccccc

SEQ ID NO: 223183 - DNA, 122 bp, Homo sapiens
tcacctctattaaacatagagtctggaactccctgcacacacttatgacactgtgcaggacgaagaagcagggacagaccattgacagagccacttctagtaattaagacgagcaagtttgg

SEQ ID NO: 223184 - DNA, 122 bp, Homo sapiens
catggcggttctgtggcccattgcgcacgcgcattgaggaagccctggacggggcggggccgccctcagtcccgcccgcatccacttgtaaacgaggcgtaccgctgctaaccccgcccctg

SEQ ID NO: 223185 - DNA, 122 bp, Homo sapiens
tgactccgctccttccgtgccgcttcactccccgaggaaaagatttggtggccaagtcagcggatccaacccgcgaccaccagcgacctactggctgcgtctttgtccagcgtccacactgc

SEQ ID NO: 223186 - DNA, 122 bp, Homo sapiens
ctagtgcgttagcctcataaagggtttacctggatccagacctaacctcttcagtctgtccgttgctcagcactttctgcataagaaacaaacctgggcgcttgcctccctacttaaaattc

SEQ ID NO: 223187 - DNA, 122 bp, Homo sapiens
tttccttccccttccgcgtctctgggtaaagtccccgctacagaatgcctagcagagcatcgtaggagtcccgcatggcccgatccaagcatgcacctgtgcagttctctctgtgccccagg

SEQ ID NO: 223188 - DNA, 122 bp, Homo sapiens
ttgctacacatattgtttctaatcctcaataacaaggtccacagcattaccctatcatagcgagactgaggctcagaagtgaggaaggtctgcagccaggaagaggacgcaactctgttctg

SEQ ID NO: 223189 - DNA, 122 bp, Homo sapiens
accttttttagacacctgggttttattgctcaagtaactgtgtagggaccagagataaaacgtacggaccattaacgccaggtaatgggaactgagactcttaacataaattctagacttaa

SEQ ID NO: 223190 - DNA, 122 bp, Homo sapiens
aggtgtggccgcggggaagtggcggcgaacagccccgacgcgaggacggggaaaccaaggcggcagccagggagaccctgaccgaggtgacctctgtttagggcgacaaccgggttggggct

SEQ ID NO: 223191 - DNA, 122 bp, Homo sapiens
acatagaaaacagctcttccgttaatcaattctcttgcgtgctgcccagttaataatttgcgttcattctcaaagcagctcataaatatattaccacttcaggcacactactccacaatgca

SEQ ID NO: 223192 - DNA, 122 bp, Homo sapiens
taggagttatgttttgtatctatcctttccctacagctttttctatgagcctatctcacacgtctctaccttctttcctgtttcctttccgttatttttcacactacttaagtactccaaca

SEQ ID NO: 223193 - DNA, 122 bp, Homo sapiens
ccagcagctgcagagggggtgccgggtcccccagcactgctggcgggaccacaccaggctcgaattcttgtggggcctcagctgccaccctatggggcagggttcaggacctgcagcctgcc

SEQ ID NO: 223194 - DNA, 122 bp, Homo sapiens
gttcgaggagagccggctgcctgtgtttacgctggattacccccacgtgcagatccccttcgagatcaccctttggatcctgctggcctccctggccaagattggtgagcgaactggacttg

SEQ ID NO: 223195 - DNA, 122 bp, Homo sapiens
cgggcggcctgtgctcgtgagctggggtctccgggcaggcaggggcaggcgggctcccagcgccccaccaggaggctgcactgcgggtgcgccccgtctgagtgcagatgcaggtggcttgg

SEQ ID NO: 223196 - DNA, 122 bp, Homo sapiens
ggtccccgtaggtgggggtggtcagcttgagggtgcggaaacagatgtcgtagagtgcctcgttgtcgatgcagtaggtctcatccgtattctccaccagctggtgcacagacagcgtggcg

SEQ ID NO: 223197 - DNA, 122 bp, Homo sapiens
gaggaggagagtgaaccaagagatgaggtcagaaggaccaggaaggggtgggatggcaaacggtgcagaccttaggccactgtaggagttttggcttttactctgaaagagatgggaagcca

SEQ ID NO: 223198 - DNA, 122 bp, Homo sapiens
gcctccaatagcgctctcctgacctggccacgaacattaaaacaagttgaaacaaatatgcgaataacatcgtcaaagcacgttggtcatgcgcctacccggggtgcctttcccctctttga

SEQ ID NO: 223199 - DNA, 122 bp, Homo sapiens
cctggctttgcctctcagaggttccggggctctcccagggttggtttacttgtggtgaagcgtgactaataggtaaagtatctgacaaaatgggccccacaggccatggttgctgcttctgg

SEQ ID NO: 223200 - DNA, 122 bp, Homo sapiens
tcctagcaactcgagcttacttctcccgatagctccctcctggccgctgctcccaggggccgaatgtgggaaagggatgctaattccaagtgagagttcatgcttggggtttcaggcagcct

SEQ ID NO: 223201 - DNA, 122 bp, Homo sapiens
aagggtatacattggcccattgtcatacgtgcgccctgagcaggtgactaggcctgcaagcgtcccctccagcgtgggccacccagagccagcgagaccctggccacgcgcggagcagccat

SEQ ID NO: 223202 - DNA, 122 bp, Homo sapiens
ttctgtcagctgcctactttcccatcccacccctgagtcttggaggagtgacctcctcctcgcccctgtgggcccatccaatcactacacggtcaccagagcccccttgctcagggaggatc

SEQ ID NO: 223203 - DNA, 122 bp, Homo sapiens
cggagtgggtggggctcagactctccctccaggctggttccaaaatggtgggggcagtggcgtcagcaacgcccccgccccttccgtccaccgccctcctccatctccaggccacccaggcg

SEQ ID NO: 223204 - DNA, 122 bp, Homo sapiens
tgtttctcaattcccactcctggtttttggcctccatttttacaaagcgaatgtatctaacgccttcctcttttgcacccttatctgcctcatgtcataggtttaccttttcttcatctgtg

SEQ ID NO: 223205 - DNA, 122 bp, Homo sapiens
ccccgccccggaagcccggagccccgtgttctgtgcgggtgagggtgaaggctgccggagcggggcccacccattcccccgccaggccgggagccccggcccagctgcggctctctcagctc

SEQ ID NO: 223206 - DNA, 122 bp, Homo sapiens
cgcccattttaaaaaaaaaagattttgtagtctgcatttcccacttggcgaggcgtactgcgcccccttagaggcctcctaccctaaccacttcctcccgggccgcccgccctggtggccca

SEQ ID NO: 223207 - DNA, 122 bp, Homo sapiens
cagagcctggtgtacacttaagcacacgagatgtgtcaaagttttcaaaaacattgccaacgaggcatcagttacaaaacttgctgcagagtgagctgatattgtgccactgcactccagcc

SEQ ID NO: 223208 - DNA, 122 bp, Homo sapiens
tgagctctgtcctgagccccaggctctgaggaaggacccacattaaggtagggtctggtccgtcccctgcagcactcagggtagggctcacatgggggttgtttctagtcagagtcctccca

SEQ ID NO: 223209 - DNA, 122 bp, Homo sapiens
agcaggaatgcaatcagtatttgtcgatggttccccaaactaacaggagtggctgcactacgcacacttaggtgatacgtacacttgtcaaaacggcagaaacgcaacctcaatttcagaaa

SEQ ID NO: 223210 - DNA, 122 bp, Homo sapiens
gggcaaggccacgaggcttcttatacccggtcctcgcccctccagcgccggcctcgcccgcgctcctgagaaagccctgcccgctccgctcacggccgtgccctggccaacttcctgctgcg

SEQ ID NO: 223211 - DNA, 122 bp, Homo sapiens
cggcaggccgagaacggctgggcgggcccaggccgggaggcggcaaggagctgccgggggcggctggccgggggatcggggggccggaagagttttcgcctctccccagctctgaaagcgcc

SEQ ID NO: 223212 - DNA, 122 bp, Homo sapiens
acagctttaacaatgatgcagggctggtccattgctctgtgtagcacttggtcaacttgccgctagcattactttgctaggagccttgtttagcaatgcctcattgaaaatcagttgctctg

SEQ ID NO: 223213 - DNA, 122 bp, Homo sapiens
gccagcagctcctgtgctcaacttctggtagggccttaggtgcctccgcgcggggcagggcgcgggacctgcagcctgccatgcctgagcctctcccacgccgagggctcctgcgccgccgg

SEQ ID NO: 223214 - DNA, 122 bp, Homo sapiens
cataaatggtgccttcattttgtgagtctgcgctgagtgaggccgtgaggcgggcggttccgccacctgctttccacgccagaggcctttcaagacggcgggagccctgcggttccagcgcg

SEQ ID NO: 223215 - DNA, 122 bp, Homo sapiens
aaaaccagaacataatctaaaccctgcacacaagaatatatgtacaggagaagctatcttcgacatcatttccacaaaatggggaatatcttatataaagatagcattgtttgatcttagaa

SEQ ID NO: 223216 - DNA, 122 bp, Homo sapiens
ggtgacagagtgagactctgtcttagaaaataaagtccatgggctggtcgcagtggctcacgcctgtaatcccagcactttgggaggccaaggcaggtggatcatgaggtcaggaaatcgag

SEQ ID NO: 223217 - DNA, 122 bp, Homo sapiens
catgtgctcagtcagatggtgcttcatcttgaactttttgttgcacacggggcagtcaaacggccgcagattgaggtgcatgttcacgtgccggtcccgcatgctcttgtgggagaaggcct

SEQ ID NO: 223218 - DNA, 122 bp, Homo sapiens
ccgacaataatattgacttcacattagataaacatgaatcttctaaacaacaggtgaacacgcaggagccggcctccccgcgcgatgtgcgggagaaggcggtgggacacagtccatagagt

SEQ ID NO: 223219 - DNA, 122 bp, Homo sapiens
tcaaagcagtgcgcacggagctgtgagataaattggctgagatcatcgatttgaaaacgccgtgagaaaatatggggcaaggcagagagcacagaggggctttagggcagcgagcccgcgct

SEQ ID NO: 223220 - DNA, 122 bp, Homo sapiens
aagtataagtgggattttcaccaaaaccctatccttccccagactccagtgacagtttaacggtcagctgcatcaaggcttgtgtactgtgcagtcttaaaaggcaccactcctgtccatct

SEQ ID NO: 223221 - DNA, 122 bp, Homo sapiens
atgaacaaattcaggtcagtcatggtaagcgatgacactctgaacggcccaccacacactcgaaacgtcccaatcaaagaatccccattacccaggccttttccctctgccccacccccgac

SEQ ID NO: 223222 - DNA, 122 bp, Homo sapiens
ggttagcatgctgctggagcaaatccagtgctttagattcagtggttgttttcgtgttgacgctagggctggtattgactttctctgtctcttctctccctgacatcttcccataaacagga

SEQ ID NO: 223223 - DNA, 122 bp, Homo sapiens
aggaaagacaggcagcggggcctcagctccaggtgggagggggccctaggcccggcttcccgcagccccgcagccccgcagccccgcagccccgtagccccgaagccccgcagcacctgggg

SEQ ID NO: 223224 - DNA, 122 bp, Homo sapiens
ctgtctcaaaaaaaaaaaaaaagttaaggggtacatgtgcaggtttgttacatagataaacgtgtgtgatgggggtttgttgtacagattatttcatcccccaggtattaagtctggtaacc

SEQ ID NO: 223225 - DNA, 122 bp, Homo sapiens
agtacataatgtatgattctggttttttgaaatgctaggaaaggcaaaactctaagtgaccgaaagcccagcagtgtttgcccacttgtagggattggaagcattggctgccaaggggcatg

SEQ ID NO: 223226 - DNA, 122 bp, Homo sapiens
tttaacaaatacattaattaggcaatttacattctttgttgaaatgcagtgtgtagtatacgtttacagcacatctcagttgagacccatcattgtccaagtgcccactagccacatgtggc

SEQ ID NO: 223227 - DNA, 122 bp, Homo sapiens
gtgagtgttaacagctcttaaggcggcgtgtctggagttgttcatccctcctggtgggctcgtggtctcgctggcttcaagagtgaagctgcagaccttggaggtgagtgttacagctcata

SEQ ID NO: 223228 - DNA, 122 bp, Homo sapiens
ccgtctttttaagggaatacagcttcattggttcaaaaccatttaaggtgatgaaaccctcgtcccggacggtcagcgtccacggcaaaaggcgcccactctggaggccgcggtggcggtgg

SEQ ID NO: 223229 - DNA, 122 bp, Homo sapiens
ccacctcactccgccaagccctaggcaaacgggaatctttacccggccatattgtgattccgaagcagcttggaattctgtcattaaagagacacaagaaggaattctgtataactggccgt

SEQ ID NO: 223230 - DNA, 122 bp, Homo sapiens
ccctctcccctgacctgagtctcagccatggactcagcatacgctagtgaggacccttcccggccagggcctggataggcttgggggaccagggtgggtaagaccccatgtctcagaggcag

SEQ ID NO: 223231 - DNA, 122 bp, Homo sapiens
tcagacggtgacgtcaaaagatcaccccgtggcccggcaaatccttgcgcgagctccagtcggtcatattggttctggcgggtttcagctggtcctgtggtctcatagtggacatcctgcaa

SEQ ID NO: 223232 - DNA, 122 bp, Homo sapiens
ctgctgctgctgctgctgcggcggcggcggaggctgctgctggggcggctgctgctggggcggctgcggcggcggctgctgcgggggctgctgctgctgttgctgcaccgggcgcggccgcg

SEQ ID NO: 223233 - DNA, 122 bp, Homo sapiens
atttttagggaggcaaccatttatccctgtgacctggcttacccctttaaagatgggccccgttcacaggaaaacaaaatatatgttgcctaaattcttatggagaaatagtgccctggagt

SEQ ID NO: 223234 - DNA, 122 bp, Homo sapiens
aggggcaaggagtccaagctccatcttgaggcgggcggaggaagcgaaggcccggctcggcgctgacagggccgccacttttccagctccggaggagccccccagggacccccggcctccgg

SEQ ID NO: 223235 - DNA, 122 bp, Homo sapiens
tgccccctgccggaagaagtttgggtgcagcccagtattcaagctccaggacaaagggggcggggaggccgccactagcaaacaacctcagcttcataaatccagcagaaaggtccggggta

SEQ ID NO: 223236 - DNA, 122 bp, Homo sapiens
gtggcccgtattcaattcaggtctgctggcgggggcgcgtaaactcgacgtttgtggaaacgtgaacccgaagtttgcctaaaccccaaacttggaacccttccagattcccagccggtcct

SEQ ID NO: 223237 - DNA, 122 bp, Homo sapiens
cacagtgcagctgggacaagcaggtgtcacccaggactcccactgatgccaagggcaggccggggaccttgggcctagagaggtggcccaggaaggattcccagcggaggaggaacatccaa

SEQ ID NO: 223238 - DNA, 122 bp, Homo sapiens
ccagctttgctaggacactggctgaagggcaggccaccaagatggggaacttcacattcacgggagggaaactggggccctccgggaggctaatcaggactgatgagtatcctgaaaccagt

SEQ ID NO: 223239 - DNA, 122 bp, Homo sapiens
agtctctgcggaactggtcgaagagcccctggctcttgaggtggttcacgatcatggccacgagctgcgggtccccggcgcccgcacccgcgccgcccgccccgcccgcgccggggccagcc

SEQ ID NO: 223240 - DNA, 122 bp, Homo sapiens
gtgtgtgtgcgcgcgcgcctgcctagagttaatgattaagtttgctgaagcccttcttcccggtcctaagctgcctgttgcgaaggcgctttcattgaattcagtttctcttaccgtcttaa

SEQ ID NO: 223241 - DNA, 122 bp, Homo sapiens
cggcggggacgacgggggcaagaaggccggggtgtccccgctcgctaaggaccactgagccgcgtgctttcgggaagcgaggacgcgaggcggcgcgggcacggccgccccgagggcctggc

SEQ ID NO: 223242 - DNA, 122 bp, Homo sapiens
aagagctaggagacaagcgatcagaaagtattgacaaagttcgacagttactacctttgccgaaacagacatgtgatgtcatcacttgtgaacctatgggttccttgattgacacaaaagga

SEQ ID NO: 223243 - DNA, 122 bp, Homo sapiens
gcaaggctcttatgcaacctgctgtttgcataaacaagtaataagaatcccctgggcagacgggaacccacaaaatgtcttaaatgtaaaggataagtttaggcaagccgactgtcattcga

SEQ ID NO: 223244 - DNA, 122 bp, Homo sapiens
tcccagaccactgccattcttcctttcccactctcccagcctctcaccagcaccacaacccgggcctggggctgtcgctcattcaccagttgcacaatggccttgatgccaccagtcacctg

SEQ ID NO: 223245 - DNA, 122 bp, Homo sapiens
cagaacccattattaccacaaaggcgcggcatcccttcttagcggttatgatggctgtgacgtctcagctcaatggaaaattaaagtcacctctgggcacctcagtcactattgtaaatgcg

SEQ ID NO: 223246 - DNA, 122 bp, Homo sapiens
aagccagtcactagatcaagccagtctcctgtgctccagcgatattctgaacctgtaacccgataccactgtttgctgccggcgcctcctccgggctctcccgctgcgcaccggccgcgcgg

SEQ ID NO: 223247 - DNA, 122 bp, Homo sapiens
tgatcagatatcaccatcttctcattaatgtttgtgattaacattaagaagacatggttacgtgagaagtgatgcaaatgctgtatcttttaaaactttatttgaatcactcatttctggcc

SEQ ID NO: 223248 - DNA, 122 bp, Homo sapiens
ggtactcacaggctgcccgagtactggctgcccccaaggaagccatacttgtccgtcttgcgcagggccagcccgtttatctctgaatctgagcccatggagctcacatcatccgccaagga

SEQ ID NO: 223249 - DNA, 122 bp, Homo sapiens
cctagtcctaggttagtccccaccttagcctgtctcgtgttttcagaactcagacatatgcgctgagtacgcaccgagtgccacaacaaagtccggctagcggcccttagaatagcaaccta

SEQ ID NO: 223250 - DNA, 122 bp, Homo sapiens
gcggtgtgactggtgagcctcggagggatcctcctccctgctagaatatgcatgatcctccgcgagtcttcgcccgccaggagcagggacgcgtccgagccaacacggggcgcgcgcccaga

SEQ ID NO: 223251 - DNA, 122 bp, Homo sapiens
tacagtcgataccatagaaacacaaaataatcatccaaggctactatgaacacttttatgcgcacaaactggaaaatcaagaggataaattcctggaaatacacaacccttctagatataga

SEQ ID NO: 223252 - DNA, 122 bp, Homo sapiens
ctcaggtgatccgcccaccttggcctcccaaagtgctgggattacaggtgtgagccaccacgcctggcctggttttcattcttgagtaagaatgactgtaatgtcattctcaatttctctgt

SEQ ID NO: 223253 - DNA, 122 bp, Homo sapiens
tgcatgatctgagttaggtcaccagacttctctgagccccagtttccccagcagtgtatacgggctatgtggggagtattcaggagacagacaactcactcgtcaaatcctccccttcctgg

SEQ ID NO: 223254 - DNA, 122 bp, Homo sapiens
agaccaagctgcagaacttggtgcctcccaccctgttcttccaggcgcaggctgcccgcacgcctcgcggcacttactccctcggacatgtttcttcaagcgcctttttctgctaaaaatac

SEQ ID NO: 223255 - DNA, 122 bp, Homo sapiens
gacgcgggcggggagtttgacgggttcggcaggtggcccttttgcagcatctttttcagccgggggtgcagcagtcaccatacagctgaactcggccaggttaaggcggcagaagaaagagg

SEQ ID NO: 223256 - DNA, 122 bp, Homo sapiens
aatgatcctcccacctcagcctcctaagtagctgggaccacaggtgcctgccaccatgcccggataattttgtttattttttgtagagactaggtctcactgtgttgcccagtctggtctca

SEQ ID NO: 223257 - DNA, 122 bp, Homo sapiens
aatatcaggttctaagccattgtgaacactgccagatacaattcatgatgtctggataagcgtgaatttcagatacacaatttgggacatacttacattaaaaattatacatcgtttatctg

SEQ ID NO: 223258 - DNA, 122 bp, Homo sapiens
agagggtggagaggaaggttttcaacattattaaaaaaaacaccgggaaattcacaaaaacgcactacagtaagttggatgcaaacccggccacggaactcaaaagtgaagcagccttcgcg

SEQ ID NO: 223259 - DNA, 122 bp, Homo sapiens
aaacccatgttcactttctcaagaccacacacaaccgagccgcaaaccagggcggaatctcgactctccgggttcagatcatgtcgaatttacgacctgctgctgtggacactgcaggaaat

SEQ ID NO: 223260 - DNA, 122 bp, Homo sapiens
ttgaaccagggtatttgatctttaaacatagttctttgttctataccaaagctctctcctcgctgctcttttccccacttaattccttggctacatttttcatattctacctattcattcct

SEQ ID NO: 223261 - DNA, 122 bp, Homo sapiens
ccttctggcagaaatggcccgagccctccccagctgaacataccatgtgctgcagatgagcgagctcagatttgcaaagggttctaacactccctggtgaaaggcaccgcatgagtctggac

SEQ ID NO: 223262 - DNA, 122 bp, Homo sapiens
cagatatactgaatttgaatctctcaaattgggactgggagactctgtaacttaacaaggcgattagtatgccctcagctgaccccagtccacagcatggctgagactagggtgaggcaagt

SEQ ID NO: 223263 - DNA, 122 bp, Homo sapiens
ctttagataaaccaacccttggtaggaagctgcccaacaaagggcccatgacactgaacacggcagcttcttggaccaagaacaattcctgtgagggattcaattgtgatccaacagcaagt

SEQ ID NO: 223264 - DNA, 122 bp, Homo sapiens
tgctgcgacttgcagcgtttggggaaagttactcaccaactagtcatgcgcctcggatgccgccggccacggggctcccggaggggggtccgacaccgcccggtgcccgggatccccaatct

SEQ ID NO: 223265 - DNA, 122 bp, Homo sapiens
aaaatccagaatgactacagtgttaagctacggtggctcacacccaacatggtgaaaccccgtctctactaaaaatacaaaaattagctggacgtgctagtgcacgcctgtaatcccagcta

SEQ ID NO: 223266 - DNA, 122 bp, Homo sapiens
ccctaattctccgttaaaacgcccagaggttctgtactaatcgaagttgagttcggttcacgctgggctcttttccctagtgcaacagtatattactgtttaaaaatctgtccttaccacct

SEQ ID NO: 223267 - DNA, 122 bp, Homo sapiens
tgggcagctgccaggcgggggcggggcagcaggtcacgtgcctggcttcgaggcgggcgccggagggggaactctgaccatgattggttcctcctaaccaggtgaccgcaggtcgcgttccg

SEQ ID NO: 223268 - DNA, 122 bp, Homo sapiens
tgagccggcgactgacaagagaagatgacaaatcacttaggccccaggttgagagcccggcggcaggcagggagatgcagagacaggtcttgtcaattctgaaggattgtcagtgtcaccgg

SEQ ID NO: 223269 - DNA, 122 bp, Homo sapiens
cgccacccctcttccagggaggcggaaccagggcgggccgtggggcgcatgcgcggccggcgtccagctctccgggaacccggtacctatccgccctttggtcgggccttctccgcctcatg

SEQ ID NO: 223270 - DNA, 122 bp, Homo sapiens
tatcctctttaggtcccctcatatgcccctcctccaagtctgtccctcagcgtccccgtccgcgtctctactgtctgtccccgaatgtgttcctctgttcctggagtctggccctcggtcca

SEQ ID NO: 223271 - DNA, 122 bp, Homo sapiens
tttgcagggtaccatgtcaacaatttgggtcaactaaaatcagcgtgtccgcaccattttcgcccgcccaatttcacgcgatcctgcgaaagaatgacccagaccggtccgggcgcggtggc

SEQ ID NO: 223272 - DNA, 122 bp, Homo sapiens
aggtggctctccgccagggctcaggcgtggctgtcttctcacagagattccccttttccacgtgctcaatgcccgcatcaccttcagcaacctgtgtggctgtgatgagcccctgagctccg

SEQ ID NO: 223273 - DNA, 122 bp, Homo sapiens
atagcacagggatattcatggagcaatacatgttgctgtgttacacaccatcgagcacctcgcactgcaggtgcaccccaagacggtgcagagccccgctgttcatgtgtgaatctgcatga

SEQ ID NO: 223274 - DNA, 122 bp, Homo sapiens
caagggtggagcagagcctcatgggtctggtggctaggctccgcgcgcccccccccaccccgtgtgctgggcaacccacgcccctggtgcccagcctgccgccccctaccaggccccagggt

SEQ ID NO: 223275 - DNA, 122 bp, Homo sapiens
cacgtcctcctggctcgggctggctggcagctcggggagctgttggatgaaacgtccatgcgtgtggctgtggctgtcacatgcaactgcgaggatggtcggctcccaaagcggaaccgcgg

SEQ ID NO: 223276 - DNA, 122 bp, Homo sapiens
tgggaagggggctgggtggcaggggctgactcagcctgccaaacccggctggctggctggcgagcgggggcggccgcgtgcacgtggcaggggcggcgcgggggcagggcgggggggctcac

SEQ ID NO: 223277 - DNA, 122 bp, Homo sapiens
tgggtttactacagtttgggatgacagtctcttctaggctgctaagctttctttatccttcggatgaggttctccttggcctcaccctactgattcattaactcattaggaatcttatattt

SEQ ID NO: 223278 - DNA, 122 bp, Homo sapiens
ttcaaaatacttacgtgcttggcttagcttgctcttgccctctgttacaacgatgaaatacgcctgggctagcctgctggaagatgaaagacacatgtagtagagccaagttgccccagtca

SEQ ID NO: 223279 - DNA, 122 bp, Homo sapiens
aattgttggcgcgcccgtcttatctaggcttcttttgttgtgtttgtcattagttacactcgtagtcaagggtttagacgtcgagattttcattttccttgaaattttgtaaagggggaaaa

SEQ ID NO: 223280 - DNA, 122 bp, Homo sapiens
ccgggtctggacctcctggcgtttggattggagactgtgttctcttcgctgtttagttagcgagcagctagggtggagtcggcctcaaaggttccgctctcatgtcggcaagtgtgatttga

SEQ ID NO: 223281 - DNA, 122 bp, Homo sapiens
cccaccttcctaacggcccgcccacgctcgcctccaacgggcccccaagagggcggggcgcgagaccctacggcgttccattggctgtctgcagagtctgtcggaaggaggaggcgttcccc

SEQ ID NO: 223282 - DNA, 122 bp, Homo sapiens
caaaggccaaagtgcggaaggcactgagacaaagcaaagcgacccacagagcaagaggaccgagccgccgccgccgctcaccggaaaaagcgttgcacagggcccgaggcaggggcttcgca

SEQ ID NO: 223283 - DNA, 122 bp, Homo sapiens
acctacttcaccaaaagtccctctgttccccaagcttcacagcttttctctgatttatctcggtgtcacatcccaaagggcctggctctggactatctgacttagagtggccaaggaaggga

SEQ ID NO: 223284 - DNA, 122 bp, Homo sapiens
ctcttcctctttctctcctcctttccttttggtctctcgccatttacaggcacgccttggcgtggaccctgagtggcagacatcttgaaaataaatgaagttttgagatgcaaatccaaaca

SEQ ID NO: 223285 - DNA, 122 bp, Homo sapiens
tcctggggggtgctggctgctgtgctgggaggaagccctgtggacaagcccaggtgacagcgatgaggggctgagtcaacagctgtgcaagtgagctggggagcagatcccctaagctgagc

SEQ ID NO: 223286 - DNA, 122 bp, Homo sapiens
aggtccccggtcttgacaacggcgcggggacccagcggatgcccccgcggggcagaacagcggctactcctcccggcccccgggccagagccgccagccgaggccccgccccggccaggccc

SEQ ID NO: 223287 - DNA, 122 bp, Homo sapiens
cgctagcgctgcatggcgcacgggggctggccgggggcccggggaagcgtgtctagttggcggcggcacctccggctctcgcggctcgctagtggctcccccgcctttccccgccccgcgtc

SEQ ID NO: 223288 - DNA, 122 bp, Homo sapiens
gcgggaggccctggccctgattgggcgccggggcggagcggcctttgctctttgcgtggtcgcgggggtataacagcggcgcgcgtggctcgcagaccggggagacgggcgggcgcacagcc

SEQ ID NO: 223289 - DNA, 122 bp, Homo sapiens
agctgcaggtcacggctgcgaagtacagccgagttcttctcctcactgagctgtgccaggcgcatggcgatcatgtagttctcatccttgagccgcagcagctccaggctgcccgcctccca

SEQ ID NO: 223290 - DNA, 122 bp, Homo sapiens
tggggcctgggccaggacagttaggctaaactgactctaggccacgcggaccccgtggggcggggcggaacctggcagggcgccagtgaccgctggggccagagccctgccgggaaaggagg

SEQ ID NO: 223291 - DNA, 122 bp, Homo sapiens
ccgcccaaagtgctgggaatacaggcatgagccaccgctcccagccctgctggtccctttcgaaggaaaccttcgctggctccctagtgccctggaataacactgaaaccccttagaacggt

SEQ ID NO: 223292 - DNA, 122 bp, Homo sapiens
gcgctccaatcagcgacctgtgtagctgtcacgtgggcctctggggcagaccctggagatcgggctcgcggcgccttccatcgtggctccgcgctggggcttgcggagcacgcttcccgccc

SEQ ID NO: 223293 - DNA, 122 bp, Homo sapiens
gcagaagcgctttagaagaggcagcgatgtatagagcggtgggccggcagctgcggtatccgccacagggtgtcttcctggagccacaagggaaccaatgggacacaccccagaaacacccc

SEQ ID NO: 223294 - DNA, 122 bp, Homo sapiens
gtttccaggaaaaaaaaagttgtatttgcgtgcctagctcaacctggccccagctaacatcgttacgcgccatccccgacgtgctccccaacccggtggcaccaccatccgtcgctggtcca

SEQ ID NO: 223295 - DNA, 122 bp, Homo sapiens
agccagaacaagtagggccttgtgcacaagtaagaggttcagcgtaagttttcctgagggcgatgagaagccatggaacggtttaaagggcagcagcaatataaggagacatttgcatgtca

SEQ ID NO: 223296 - DNA, 122 bp, Homo sapiens
cggggtctgggacctggagtctcttccagcagcccaggagaacctctccccactaaggatcgagtttcacttaattgcaggcttcaggtttctgcatgcaggcccagaggcctgggggaagg

SEQ ID NO: 223297 - DNA, 122 bp, Homo sapiens
cttcactacctgaccggtcaggtctggcttgctcctccgtatcttccagacatagcccaacgcgcagatttcccatgtggctttaagcagtttgccagctagcttaatatgtgctgctaaat

SEQ ID NO: 223298 - DNA, 122 bp, Homo sapiens
gcgcaaacacatcccccgggaccagctctgctgttgccgctcccgagggaggccgccttgcgcagctgttggttgggaaagacttttccgagcagctggaccccggggctgtatgtggggca

SEQ ID NO: 223299 - DNA, 122 bp, Homo sapiens
cagcaggacagctaatgatatgctaatgagctgacagtttttattgatcataatgaaagtcgacaagtgtctttcttggcggttttgcatgctggaatattttattaacgtcttcagggcag

SEQ ID NO: 223300 - DNA, 122 bp, Homo sapiens
tcaaaacaccaagttgcttggtagcatgcagggttggaacatgcctttaacagaaaatctcgtgtctcttgaacctagttatttattccttgagcagagtagatattcaacaaaagaattgt

SEQ ID NO: 223301 - DNA, 122 bp, Homo sapiens
gcgctgatgtccagccccacaaagcccagccccaactcagtgggtcctgccctttgccctcgcgcttccaaaccttccgccccggagcaccgccccctcgccgggccaccgcggccgtccct

SEQ ID NO: 223302 - DNA, 122 bp, Homo sapiens
tttctattgggtgtgggcggaacgcgagggattgcggcatcttcgggggctgcaggtgagcgcgcgcacgcgccgcggctgtggtccgctcgggtgcgcgcgcgcgggctcgcgggggaggc

SEQ ID NO: 223303 - DNA, 122 bp, Homo sapiens
gggctgaggcctcagattctgcatttctaacaagttcctgtcacgccagcctctctggcccgtggatcacactgtgagggccaggtgtggtggtgcatgactataatccaaacactttgtga

SEQ ID NO: 223304 - DNA, 122 bp, Homo sapiens
gaaggagatgcagacgcggtggcgggcgaagcagcggtccaggtagtcccagtcccagagcgcgggcgcggggctgggcgcctcccccatggcgcggctgggcgcgcggcgcggggccgggg

SEQ ID NO: 223305 - DNA, 122 bp, Homo sapiens
ccgcaatgggagacagccgtgcccagaaaccagtgaagtgaaggttcctctgggtgccctcgaacatgggcccctgtgagcccagctgattcacaggctgggcgaggcctgtgtgtctaacg

SEQ ID NO: 223306 - DNA, 122 bp, Homo sapiens
tttgtttcctgctctatccccagggaccagaacagtgtgtggcacagaggaggcacccaacgtatgttgaatgaataagtgactactccattaaaaggaacctgaggttggctgagtgtatg

SEQ ID NO: 223307 - DNA, 122 bp, Homo sapiens
acctgcctaattgttctaagcgggcctctgcccctcccccattagtaataatagcttaaacgctcttcctccccggttaccaggcccaggagctgatgaatgaaccccctcgtaggggaaaa

SEQ ID NO: 223308 - DNA, 122 bp, Homo sapiens
atattcagcagcagggtctttaattattctgaaatctctttggtcagtatttttaagcatcgttcatcagaaagactcctttcccaactaacatttgtatattttacaggatcagcagtaaa

SEQ ID NO: 223309 - DNA, 122 bp, Homo sapiens
aaggttttatgactgagttcctgtcttttaaataaagctggggaatttaatagacaattacgtttatggcattggatttgagttgcccacagtaatgtacttagatggaaaagaaattgaaa

SEQ ID NO: 223310 - DNA, 122 bp, Homo sapiens
cctgacccatggatgattctcagctgcttgataaaggtactcttgccactctctcctgtccggagcagcagcagcttgagctcccggcgggcatcccgcttgtccctgcggagctgccgctc

SEQ ID NO: 223311 - DNA, 122 bp, Homo sapiens
gttgaaggcgggtggggatggggcgaggcctcgtggagggagggtgggcaggcgggtcttcggcacactcccctcacggtgcctccccaacagctgcgccaacggaggaggctactaccact

SEQ ID NO: 223312 - DNA, 122 bp, Homo sapiens
gaactggaagctttaatgcccagcgcagcaggccaggagaagcaaagagatgctgaacaccggtttgtccttagtgtcctgtcctttggaagtttagggtactgtgacagttgaatattatg

SEQ ID NO: 223313 - DNA, 122 bp, Homo sapiens
ttcctttaccagagtagccatgatgcactgattagcgaggcttggtttgtctgcaaattgcgtttactaagatacgtagtttgagaaccaaaagcagggaagaatgcagtgctacaccatta

SEQ ID NO: 223314 - DNA, 122 bp, Homo sapiens
ctgtaaaggagcgtgtcacaacctctgttccttcttcacatctagtggtatcctgaggtgcggcaccactgtcccaacactcccatcatcctagtgggaactaaacttgatcttagggatga

SEQ ID NO: 223315 - DNA, 122 bp, Homo sapiens
ggctgcctggtgagtggcagaccacaggctagacttcccaggccccggccctggaaggggcggggaaccctccccctcactgccagctggaagaatccgagcggtccccgcacgcacttctg

SEQ ID NO: 223316 - DNA, 122 bp, Homo sapiens
tttaacagctcagtctctgaattactcccacttctcatttcccctggtagaaagacactacgcctaactgggtaaaccttgcaaaggggacaaataagccttagactcacagtaactttgac

SEQ ID NO: 223317 - DNA, 122 bp, Homo sapiens
cggagcatggggccgctggccactggggatggaatggcgggggcagtgcttacctgaccccggagcatggggccgctggccactggggatggaatggtgggggcagtgcttgggcttccctg

SEQ ID NO: 223318 - DNA, 122 bp, Homo sapiens
tgattaaaattgtcagagataaagctgaaccaaagcagtcaatctcagagaggcaggagccgtagatgcagccagtttgatctctgacttgtcatgtttacaacaggcctgcagacaaacac

SEQ ID NO: 223319 - DNA, 122 bp, Homo sapiens
ccgccagggatttagacggcggagccaatggaaaaatatcatacacactctttcagccttcggaggatattagtaaaactttggaggtaaatcctatgacaggggaagttcgactgagaaag

SEQ ID NO: 223320 - DNA, 122 bp, Homo sapiens
ttccattgaaggtctccatctgccttttctgccatgcccctttcctgcatgcccactagccgctgagtggaggtggcccaacctctccaaagttcactctgatcttggaattcaaaaagcaa

SEQ ID NO: 223321 - DNA, 122 bp, Homo sapiens
tcatgcttcataacaccgggacaccaggcaaaggagctcccaagctgaacctctgcctgccgcaaggtaaatacaagcaggaccgcatgctgcaatttcagggttatgatcgtcttaataaa

SEQ ID NO: 223322 - DNA, 122 bp, Homo sapiens
cctgcccctgcacaagaattgtctctttccacgctctgagaccacaatactgtcctccggcgaactccagggaaatagcttaagtgggagatatcaaaatttattttttttccaaccggcga

SEQ ID NO: 223323 - DNA, 122 bp, Homo sapiens
gtattgctgtggagcctcttgaggagttctccgggcgtggaacgggtctgtttccgggctcgaatccagccctggcacggtggcctgctccaaccgctaccttgctctttcgagatggggct

SEQ ID NO: 223324 - DNA, 122 bp, Homo sapiens
aatgatgcctttcgaagaaggacacaactggaatggccagtttaccccttgtcccctcttcggtggcattatttattctggagtaaggagggatggctgagggaatctgtctgtgggtccaa

SEQ ID NO: 223325 - DNA, 122 bp, Homo sapiens
aaagctattggcttctatatggcagttccggccttggcaggtcacaagaaagacattggccgattgaaacttctcctacctgacctgcaaccccaaagcaacttctgtttgctctttgatta

SEQ ID NO: 223326 - DNA, 122 bp, Homo sapiens
ctcacccttaaccggacccttgcgccgccccgcctgcctgagcgcggctctgcgaagcggcgagaagtagggaagactggatttcctaccttttgcccggaactttcagccgacgcggcttg

SEQ ID NO: 223327 - DNA, 122 bp, Homo sapiens
actgcaggaaactcattcacctcctgaggccagcccatagcatgtgattccagattcctgcggtccagcctccaactttggttgccagctctttcttattctactacacaagccgccaactc

SEQ ID NO: 223328 - DNA, 122 bp, Homo sapiens
aatatcagtttaaaagacaaaaatgaaaacaatctggcgcgcctccactgcgccggtgcccggcggccaccgcccttcaagtcgaaagcagatgcctgactccggtttctcgctcaccccaa

SEQ ID NO: 223329 - DNA, 122 bp, Homo sapiens
cattttccccttatctaaggtctatgggaaagcactaggcattttccatctgatgagggccgaggtttctgaaagacaactcagagacatacgttaagatgctacctttggtttctttagag

SEQ ID NO: 223330 - DNA, 122 bp, Homo sapiens
ctgccttatcagaaaatgtgtcagacaggttttatgtcagcctcagtgctcctgcggtgtcgacgctctgataaggaccatgttccagttagaatgcgagggagggaaagagctgcactttg

SEQ ID NO: 223331 - DNA, 122 bp, Homo sapiens
taattctgatttagtacacaccatgggtactaggaagcagtaccaggatgtaaaaggcaacgaggaagacatttatgcacaaaggactgacagagaggtggggaatctaaggtattccatat

SEQ ID NO: 223332 - DNA, 122 bp, Homo sapiens
gatgctgcagcccgcccccttctcatggtgctacttcctctgtcagctacagaaagcctccgtgacaccgtccaccagagctctggggtctcgaacataacaacacagctacctttgaaaca

SEQ ID NO: 223333 - DNA, 122 bp, Homo sapiens
agtggcactccagaataattttacgtgggttagcatcttttataaaacgggcaggcagagcggcttatgaaattaaccttggaaaccacgcggccactctttcgggaaatgcctcctattta

SEQ ID NO: 223334 - DNA, 122 bp, Homo sapiens
actcgctccatcgcattcacatatgtctaaggctccctcatcttaaagtacctagccctccgtcccacctctcactctgggagcagcttccagtcctcagacaccaccgcctcgccccaccc

SEQ ID NO: 223335 - DNA, 122 bp, Homo sapiens
ccaaactctttctcttccagctgtgcccaaagcgggaacactcgtcggaacagccaccagcggaagaccaaccagcaggaggagagctgccagaacctcacggacttcccctcggcccgggt

SEQ ID NO: 223336 - DNA, 122 bp, Homo sapiens
cggtggaggagggggcgtttccccggaaaaggaaggaagtgggtgtcacgggcctcaatacggcccctttgacgtcttgagtgggaaatcacaagatactgctccagattttcccattttat

SEQ ID NO: 223337 - DNA, 122 bp, Homo sapiens
ggcgccccgaggccagatcccactgctgaccgcagcacgcccctcacagaccgtgctgggcgatggcttcctccagcctgctccaggggctgcccccgaccccccagcaccgctcatggaca

SEQ ID NO: 223338 - DNA, 122 bp, Homo sapiens
accgccggcgtgacttctgagttgtcactaatccgaacctgatattcaccagagctccttcggtcaccgacaacgctccccgctgctgccgcggcctcccgcccgccctcctcggcgtgttt

SEQ ID NO: 223339 - DNA, 122 bp, Homo sapiens
ggggcccctggaggtgtgggcgcacccgactcccgcacagacccccgcccacgtcagccccggctccctgcccacgcacaacaccgacctagctcctcgcgcctcgccgccccggcagccgc

SEQ ID NO: 223340 - DNA, 122 bp, Homo sapiens
aagcctcgggtaagtgagctgtaaactgagacctgaacccagacacagcccatgccaggccgagcgaagagcctgtgcaggggcttggagtagagaagagcacggctcctgtgaaggattca

SEQ ID NO: 223341 - DNA, 122 bp, Homo sapiens
ctcggcgtacggtcctcccctgacccctccttccacccgccgagaggatgcgctccccggcgcccagcagcagaggccaccgctcccagaaatgcatgcgaccgatccccttctcccggacc

SEQ ID NO: 223342 - DNA, 122 bp, Homo sapiens
tgctgcgacctccacgctcagaatcattctactgcattttataaaagtgccactccgtagcgtatgggagatgaaaagcaaagccacactgctgtccccactcggctttgcggaggcagaga

SEQ ID NO: 223343 - DNA, 122 bp, Homo sapiens
gcggattctcacttcctcttcttccagggcggcaggcgcttttcctgcaccttggcctggcgcttcttctcggcctcctccgcctccggtttctcctccttggccaccttgtaaggccactt

SEQ ID NO: 223344 - DNA, 122 bp, Homo sapiens
aggaaggcatctgtctcctgcttgtccctgggaatggaatgtcttggtgtaaaacccgagcgtacattctatttactgagataggagaaagccgccttatggctggaggtaagacatgctgg

SEQ ID NO: 223345 - DNA, 122 bp, Homo sapiens
acttccttccaggcctgggtaggataaaacacggagcgcgcagcgctgagactgcgcatgcgcgtcactagacgacacggctgtcttctttcctggagaatttctcaaggactgctggctgg

SEQ ID NO: 223346 - DNA, 122 bp, Homo sapiens
tgataactatcggaaagaaccctccttgtcttaaacataatttctgaatatagtttgaggcgtatgtcactttctgttgctttaaagagtggagtgttgatccctgtagcaaacttcggttc

SEQ ID NO: 223347 - DNA, 122 bp, Homo sapiens
tacgacgtcactaggcagtaggaatttttcagctccactataatcttatgggaccctcatcgtatatgcgatccattgttaaccaaatgtttttgtgtggcacattactgtatattcattta

SEQ ID NO: 223348 - DNA, 122 bp, Homo sapiens
cacatatgttttaaggggtgtgtgtgtgtgttttcttttttccaagaacaatacagacatcgttttcttgccaagtcacaaatcaattgatgggttatttttatagtgaaaagttcaggact

SEQ ID NO: 223349 - DNA, 122 bp, Homo sapiens
agtgaagagtagttctgagaagttgctgttgtccacctgaactcccaagcaaccagagtccggtccttccaatcaggaaagtcggaatctctgatgtcatcggtcattccaaactggcaact

SEQ ID NO: 223350 - DNA, 122 bp, Homo sapiens
gggctacccgaacctgtgggcgctctggggacgcagggacagaggtaaacattgctccagcgaggtcgtatgggagggcgtttatattggtagtggtgcttgactgagcaatacatgaaagc

SEQ ID NO: 223351 - DNA, 122 bp, Homo sapiens
tgtaagacacatgatcgtgtgtgcacacatcgcatgcagatatccatgtgaacttgtgcccgtgtaagatgcatgatcgtgtgtgcacacatccacagtaaggcctcagtgctatccacagg

SEQ ID NO: 223352 - DNA, 122 bp, Homo sapiens
ggcgcccattggcccggtgcgaagccattcacccagcgcattccgccgcccgcaggcttgcggggaaacttccttattattgtgacgccgaaaacggagaaaccccgggtccggcgagaggg

SEQ ID NO: 223353 - DNA, 122 bp, Homo sapiens
cacaagacggtcaggtaaccggcttggagtgatgaatgaaactaaaataagcgccgacctcgaagctcatttggtctttccccaaccccatgcggcctcattaaagagacttttttgattag

SEQ ID NO: 223354 - DNA, 122 bp, Homo sapiens
attctatatgtttgaaccattacctcttgcagctatttaaaaacaaattttgatacttcccgtctgaataattagtaacacatgactgtaatagtagagataatacattgttacttctacca

SEQ ID NO: 223355 - DNA, 122 bp, Homo sapiens
acgtacctcactttagccttttgttttgttttgttttgtttttttgtagagatgagctctcgctttataacccgggctggtcttgaacttctggcctcaagcaagcatcctgtctcagcctc

SEQ ID NO: 223356 - DNA, 122 bp, Homo sapiens
aagccgtgccagggcccgagtcgcccgacccgggcagagtctccgccatcgtcgcgttcccgtcttcgccaccgactcagtcgcacaccgccggcagctatagcggctctgaacacaaaatg

SEQ ID NO: 223357 - DNA, 122 bp, Homo sapiens
agctgttctgggggtggagggtggagagggattccagattaagttctcattgcttcatcacgtaaaagaatctcagagacgagtttacatttagcttacatgagcacaccgaggagatctgt

SEQ ID NO: 223358 - DNA, 122 bp, Homo sapiens
tgttccaccctcagttctcccacgcccttctccactccagtctcttcccaacctctgcagcgttacctcacctgtttgccccgtccttgcttgtgagtcttccaggggatggcacagttttc

SEQ ID NO: 223359 - DNA, 122 bp, Homo sapiens
tgcaaacttaagggagccagctccagccttggccagctcagaaaagggctcccacagtgccgcggtgggctgaagagctcctcaggtgcaaccaaagtgggagcccagccagaggaggcgcc

SEQ ID NO: 223360 - DNA, 122 bp, Homo sapiens
tctgccaaaagggaacgataaatgtatacttgatacagatgtgagggtgaaatgagctaacgtatgtgaagccctcagcacagtgtctggcataataaaataggagctgttcctctccgttg

SEQ ID NO: 223361 - DNA, 122 bp, Homo sapiens
actcgcaggagaggccggtgggtgccgggcctcctgcagggggttgcaggccgaggggcgcgccacgaacccagcgggaatccctgcgcttcccggcaccgtcgggctgaaatcggggttcc

SEQ ID NO: 223362 - DNA, 122 bp, Homo sapiens
ggaagccgtagtctggcgggaaggttggcatctgcagggggtcgggctccaccgaggcatcgcccaggtagcgccggaccaggtgggcccccatggctgcagtcgctgcagatccctgcagc

SEQ ID NO: 223363 - DNA, 122 bp, Homo sapiens
tccggggcccaaccagggctccaggggcagcgacatggccggggggcgggcgaacggcagcgctggggcctcggggagtctcggagctgccacggcacccgagcctgactccagccgctcct

SEQ ID NO: 223364 - DNA, 122 bp, Homo sapiens
tgcggaggtgtcttcgctctttcgtgccgcccctcaagcctcttaatttagggatggacacgaaatggttgaaaaccattcgtgataatataaacgggcctgtaaacgttagctgtgtggga

SEQ ID NO: 223365 - DNA, 122 bp, Homo sapiens
cccccactccccgcgcgcgcccggtggaggtaaccgcggccgcgcgcccccctctgcccccgctgcccaggattggtaggctccaccgctcggcagccggcttccctgctcggacgccgagc

SEQ ID NO: 223366 - DNA, 122 bp, Homo sapiens
cgcctccgccaggcggacccggggcccttgtccttggtgctgacccagctgtctcattctcgccggccctttccagagcgcggggccttgccgcaccactaaggaacgtctggccgcgccgt

SEQ ID NO: 223367 - DNA, 122 bp, Homo sapiens
gtgaggctgtatctcttaacctctgtctctaacctgaaaattctgaatcactgtgattgacggaattctgtctgttggttgcattcttacacccgaaatttgccttctgctttttaggagag

SEQ ID NO: 223368 - DNA, 122 bp, Homo sapiens
aggctgaagcaagagaatcacttgagcctgggaggtggaggttgcagtgagccaagatcgcgccactgcactccaacctggatgatggagcaagactacatctcgaaaaaaaaaaaaatcta

SEQ ID NO: 223369 - DNA, 122 bp, Homo sapiens
agaaggatgagcaggcgcggcggcagcggctgcggagcaagctggagcaggtggtggacacgatggccctgagcagctgagccccagctgtgatcatccagcatgatgcagcgtgaggacag

SEQ ID NO: 223370 - DNA, 122 bp, Homo sapiens
ggtctccagagacccagcttctgagagacagggtgtgggcatctccatgcccctataaagcgtgcctggggcttgtctggggctggggaggaataaaccatgtatataaaagagtttcaggc

SEQ ID NO: 223371 - DNA, 122 bp, Homo sapiens
cctcggtttccacgtgggtaaaatgatcgtgaaaaaaagcaccgaggagtactttgagctcgaacggaggccatccgtgtaaagggccagattctgtcaatggatcgatccccccgatattg

SEQ ID NO: 223372 - DNA, 122 bp, Homo sapiens
ccgccccgatggttcgctccacctctgccccggcgcccgaaacacggtggtacaacccatcgcgcatggcagctctgaggaccgaagatgttgccgccatctttattgaggacgtgagcgtt

SEQ ID NO: 223373 - DNA, 122 bp, Homo sapiens
gagcttcagaacgactcctccctcctcttctctcactcctgcctctcccatacctactttcggagtgccttatactaagaaagaaggggtatgaagggttagcttgaatcatgccggttccc

SEQ ID NO: 223374 - DNA, 122 bp, Homo sapiens
tgtacatttctcttcacaggtgagtacattccttggcgctttaagtgatcacgtgccttccgaatgccaggtgcggcgcccgctctgcgctgctcgctgcaactgctcccaccctttcccag

SEQ ID NO: 223375 - DNA, 122 bp, Homo sapiens
cccgccggctccgagggtgagtgacagccggagaggccaagctggacacgccctgaaaagcgggagactccagtccccgggtttgggggcggtggactccatccgtgtgcgggcctgagccg

SEQ ID NO: 223376 - DNA, 122 bp, Homo sapiens
cccaacaaagagtaggcagaaatgatcaaggacgacctggcctggggatagtgcaggccccgatagacaatagagttccctgaagggttgctttcctctcatatagtctcagactccatcca

SEQ ID NO: 223377 - DNA, 122 bp, Homo sapiens
cacttccctgataaaaataaaaaaaccaaaaaccaaaaaacaactgttgttttatatggtcggcctagaggcaaggtgatcagtccaaggtcacattacctgaaaaaacaaatcaaggacag

SEQ ID NO: 223378 - DNA, 122 bp, Homo sapiens
ctaacccacagattctattcactaatgggaaaaggtaaaactcaggaaaccagagaccagcgccctgaaacctggcgggactggccgaatgtcagattagcccgagcagctacactgaacgc

SEQ ID NO: 223379 - DNA, 122 bp, Homo sapiens
ctcggagaagaacaggttagaggaggcagctccagcccatgcataatcagggctccgcggcgcctccattctttcctcctcctcctcctcctcctcctcctcctcctcctcctcctcctcct

SEQ ID NO: 223380 - DNA, 122 bp, Homo sapiens
ataggaagtagccattagcaattaatatgcttcaagttgaacacattctatgataaatttcgtatctgtctttcccctctgcttctgcccacaaagtttcatgatccacagcactgttcgta

SEQ ID NO: 223381 - DNA, 122 bp, Homo sapiens
acctcgtgatccacctgcctcagcctcccaaagtgctgggattacaggcgtgagctaccacgcccggccaggtgctccctttgctagagataaggagttaatggtatctactttgggatcta

SEQ ID NO: 223382 - DNA, 122 bp, Homo sapiens
accctctgtcagtgtctcccatggagaataatcactgcccagcgtcctccgagtcccacccgaagccatccagcccccggcaggagagcacacgcgtgatccagctgatgcccagccccatc

SEQ ID NO: 223383 - DNA, 122 bp, Homo sapiens
agtgctttgtgctgggggaaggacagagggtgagaaatcaccccaaatcatgggagaacccgacaaattcagagactcaaggccaccgaagagagacaaccagtcctcacaggtatctgggg

SEQ ID NO: 223384 - DNA, 122 bp, Homo sapiens
acgtttggcgcatgaatgcatgcatgcatgcatgaatgaatgaatgaatgaaacatcacacgcatttaacataggttaatcatgcagagagtattttgtaaactgcgaagtgcaggactttc

SEQ ID NO: 223385 - DNA, 122 bp, Homo sapiens
cgtgggcaaccaaatgcaggcaccctctgaagagacgccgagaaggccctgcattcgatccgggaggacatagaaagatgccatgaagttctattgggtgcagcaagccgttccccacgcac

SEQ ID NO: 223386 - DNA, 122 bp, Homo sapiens
tttgctggtttgtcccatctgctcctcaggggagtgtgtggttgcactcaaatccatgatcggcagcacggcccaacagttcctgaccttcctatcccaccgtggcgaggagacaggcaata

SEQ ID NO: 223387 - DNA, 122 bp, Homo sapiens
gccacactggctcgcattgcgggaagaagggcaccgcgggcggcccgggggcatcatcgacgactcgtagagccccaaatgccgagtgctacctgaggcaggctgtagctggggtgaaaagg

SEQ ID NO: 223388 - DNA, 122 bp, Homo sapiens
ggtggggaactaggcacggcaggaacccgaagtccatcacgacccgatcgcgggagggggcgctgtctgcacttccggcaggcggcgggagaaaagaaaaccagctctaataggctggaggg

SEQ ID NO: 223389 - DNA, 122 bp, Homo sapiens
cctagggaagaagagactcgctgggtgagcgggactgttggcgcggggtgctaccccagccgtgtcccgctccggagaccccagggcgccgggacccatctgccgctcgccggccggaggct

SEQ ID NO: 223390 - DNA, 122 bp, Homo sapiens
ggcctgcagctccagacgggctgcagacacacagcgatttgttcatctttccagccaccccgtctggtcctgacagtaattagctcccagactggtggggagacggtgaacagcctgagagt

SEQ ID NO: 223391 - DNA, 122 bp, Homo sapiens
cggacgaggagggggccaagcccaaagtgtccccttcgctcctgcccttcagcgtggaggcgctcatggccgaccacaggaagccgggggccaaggagagcgccctggcgccctccgagggc

SEQ ID NO: 223392 - DNA, 122 bp, Homo sapiens
atatacattttacataaacatcaatttttgaaagcttcttaaaaactcttgcagagcctccggttataaactttaatcaacagagggcgctcggagcccaccaaacacgctttgggccccca

SEQ ID NO: 223393 - DNA, 122 bp, Homo sapiens
agcaggtgagtggcctaactggattggtcactgcagtgatccaccttacaatttctccggcgctctctgccgacctcagccggcgatcaggccggcttcgcagtaggtggcggctgagcgcc

SEQ ID NO: 223394 - DNA, 122 bp, Homo sapiens
taggaccctccgagcctggtgggggatataatctcgtggtgcgccgttttttaagccggtcggaaaagcgcagtattcgggtgggagtgacccgattttcccgattttccaggtgctgtccg

SEQ ID NO: 223395 - DNA, 122 bp, Homo sapiens
ctgaaggattttcagaatagaaaggagttctgctctgaaaatactgatttctgactgtcccgtagaggaacagaatccccagccctggtgaagaagaggatgcctgatgcgtgcaccctggg

SEQ ID NO: 223396 - DNA, 122 bp, Homo sapiens
agcgagatgagtggggagctagagggggatggagtggaaggcagtcttcccctggagtcgcgctgcccagcagccggacttttctccgaccacccctggccgaattcccctcgatggctgcg

SEQ ID NO: 223397 - DNA, 122 bp, Homo sapiens
gcctctggttggctggcgtggggtgacgtaatggcacatggcccgtcgccattggctgggcggcaagctccgccccctggactgcggcgcgggtgggggttgtgcgttttacgcaggctgtg

SEQ ID NO: 223398 - DNA, 122 bp, Homo sapiens
aaaggtcgtgaagcgggtgggaaaccgagcactggaatcatggagccgaaggactctgggcgagcagaactggaaccttcggattatttacactcttattcaggtcttggaggtccttacct

SEQ ID NO: 223399 - DNA, 122 bp, Homo sapiens
acagggagggctgggctgtgcggctgtcccgtcctcgtgaagaggagcgttgggaggagccgggagagacaaggctatgggcggcgggcggggacggctgtccctccctcaaggagtggagt

SEQ ID NO: 223400 - DNA, 122 bp, Homo sapiens
ctccctcttcctggctgctaaagttgacacaagacggcttcttggaactccccctcctcccgcctaaatgtacagagcaagacttgaagtcaaaagatagatagcgatcgtgctgaaagtca

SEQ ID NO: 223401 - DNA, 122 bp, Homo sapiens
catttttgtctgtctggaaaaatgacgtgtttgaattcaaatcaggggactggttctagtcgtaggtgtatatagggtaatggttaagcaggcagggtccctgattcagactgcctgggttg

SEQ ID NO: 223402 - DNA, 122 bp, Homo sapiens
cccaaggggccggaatgctccgggcccgcggtataaaggcagccgcggtggcggtggcggcgcagagctctgtgctccctgcagtcaggactctgggaccgcagggggctcccggaccctga

SEQ ID NO: 223403 - DNA, 122 bp, Homo sapiens
cggcctccagagtcgaaggcgctctgaggagatgcaggttgtgtccaaaacctcccacctcggggtctcctgaacgtcccaacaagctccttgggcccttaggcgttaggccaaccccaggc

SEQ ID NO: 223404 - DNA, 122 bp, Homo sapiens
gccttcttctcttttacacacatcacgcccctgcgaggatctcctctcggtctcttcccccgccacacaccctggagacccagaccccgacctcgctggggggtctcgagcgctccggtctc

SEQ ID NO: 223405 - DNA, 122 bp, Homo sapiens
ttcttcaatgagcacttatcaaaagcctagatactgtgtactcagtgtcttgagtggcagcgaaagataaccacgaatacgtcagaagcagtgtagccacggctgccctggatttgggcata

SEQ ID NO: 223406 - DNA, 122 bp, Homo sapiens
gctgaatatggatccacacatgcatgaagataaaccacctgaggccagagaaaaaacccccgtagctcaggtcacacggtctggagacagtttgtgttcccacaaaactatataatacacag

SEQ ID NO: 223407 - DNA, 122 bp, Homo sapiens
ctgcgctgcctgggccggaggtcttctccggccagggagcgctgtgggaaggggctcgagcggccagggccaggcgaggccgggggggcggggggttaggggaccgcggggctactcttggg

SEQ ID NO: 223408 - DNA, 122 bp, Homo sapiens
cgcgggaagctgaagaaggccaagtcaagtcggactgcgtgctcttccgcgtgcagttggcggcagcgcagaagttcggcatcgtcgcccgcccgccggccggtccagccctcccctccccg

SEQ ID NO: 223409 - DNA, 122 bp, Homo sapiens
aatcatttgggtgagctgtttgctgaggttttaaagctgtcctcttgaacctgaaaggaacgtcctggcgcggtgacagcagtggctggttgtgcgtgggctgcagttcccaaggccgtgag

SEQ ID NO: 223410 - DNA, 122 bp, Homo sapiens
cagggctcaagtggtctttccacctcagcttcctgggactgcaggcacgtgctaccaccacgcctggctaatttttagtttttttacagaagcgggcttttgccatgttgtccaggctggtc

SEQ ID NO: 223411 - DNA, 122 bp, Homo sapiens
cggcttgcgagctcgcacacccggtgcacagtcccccgggccgtcctcgtgtccgtcctgcgccactgggatcggctgtttctcagcgccgaggcccccgaggctgcatccgagcttgcgtc

SEQ ID NO: 223412 - DNA, 122 bp, Homo sapiens
ttggtgttcaagtcgtttcctgtgttttctggttggttggtgggtctttggtgttcaagtcgtttcctgtgttttctggttggttggtgggtctttggtgttcgagtcatttgcctgtgttt

SEQ ID NO: 223413 - DNA, 122 bp, Homo sapiens
tcctcttgcccccggcgcagctgggctccgcttggatttcggtgacgctgtggctctgttcgtttgctgctgctgctgctgctgctgctgctgcagccagggggaaggggtggggagagttg

SEQ ID NO: 223414 - DNA, 122 bp, Homo sapiens
gttgctatggcgacagagtccgctactagagaagcgcaaacgcagtgagaggcgctcggccgaggtggttaaatcccgggctgggcttgcagccgtgatggagggaaaaataaatgagacac

SEQ ID NO: 223415 - DNA, 122 bp, Homo sapiens
agtacccagcagtggctgctgctataaacctggctctcctgcctggccccagaggaggcacggaagggcggccccacctcctggccactcccacagcctgactcacaccctgtgcccgggga

SEQ ID NO: 223416 - DNA, 122 bp, Homo sapiens
tctgtttggaaaatctcttacaggtcctggggttgtcccaggaccaaactgcagcgaggccgcgcgcccctggccctggaacgcagcatcctccccattttacctggaggctagatcgttgg

SEQ ID NO: 223417 - DNA, 122 bp, Homo sapiens
tgtcgcagccacagtcgctcaggttgccctgggtacaggcagctgtgatggcgtgggccacgccggcggcaatgatggcgtaggtgaacgcagcctcccggctccctgcgaggaggagagaa

SEQ ID NO: 223418 - DNA, 122 bp, Homo sapiens
gcaccgtggagcagggggcggcactcgttggggagactcgggttgtgcaggagcccacggcggctggcggtggggaggctcaggcatggcaggctgcaggtcccaagccctgccccgcgggg

SEQ ID NO: 223419 - DNA, 122 bp, Homo sapiens
atctggaggcatgagtgggtggaaactcttctttccaaggcaggctattagaaaacttggcgtctggtaattagaggagatgatgtgggagagatgcaggggcagaattatggaaagtcttg

SEQ ID NO: 223420 - DNA, 122 bp, Homo sapiens
gtggtttggtgccggagctgtggctcctccgcagcaccagcagtttctgcgtcgctcgcgcgtcaccagcaaaggtcaccccagtggaaaaagcagatcacatcttagggctgttgtgaaca

SEQ ID NO: 223421 - DNA, 122 bp, Homo sapiens
aagcaaggcagatttaaattttatatgtgtccaactgcttgttccctcttagctaataaccggcatgctggaaacatttcaaatgaaagggagttcacagccccacaactcggctctgaata

SEQ ID NO: 223422 - DNA, 122 bp, Homo sapiens
tgtggaaggggctccccctgccccgcaggtgccgccccgaggaggtggaggaggaggagccgggcactgactggggacccaggtgagtctagcaaatgacaaggcccaacggtcaaaaccgc

SEQ ID NO: 223423 - DNA, 122 bp, Homo sapiens
ttctattcaaggtgcttcctgcatgtgttcccattggacagctttatgtttcttccagttcgagagaattcagggcaggaattgccaacatcctatctgggggcatctcagctctgtggaat

SEQ ID NO: 223424 - DNA, 122 bp, Homo sapiens
gaatgagacaaaaatgaagaaaacggcagccacacgctcacactggtagcataatgccatcggttgcccagcattacggggcaacatatacggcatacaacttctccacacatggagctgga

SEQ ID NO: 223425 - DNA, 122 bp, Homo sapiens
tgggagtttggggatgaggcagctgaagaacagagtcttgtgatggtggaaccaggacttcgttgttccttcattgtgtgggcagaagaggtggaggattttaggcgccacctggtcttgtc

SEQ ID NO: 223426 - DNA, 122 bp, Homo sapiens
aggtcggtcctgtccttgtggaaaatgagcttgttatctttcactcggcaccagcgctctcgccagcggctgttggagagcacgttcagatagcctgcggagacacaaggccacaggtcagc

SEQ ID NO: 223427 - DNA, 122 bp, Homo sapiens
tgaccactgcgaaacggctgcgacaggcggctgggaaacctagagcaacaagtgccttctcgccggctgatgcctggcggccccccggccaccagttcccagtcccgctgcccgctcttcgc

SEQ ID NO: 223428 - DNA, 122 bp, Homo sapiens
cagtaccccagccctgccccgcggggaggcggctgaggcctggaaagagttccagtgcggcgctcagtgctgggggacctggtgcactctcctcagctgctggcccgggtgctaagcccctc

SEQ ID NO: 223429 - DNA, 122 bp, Homo sapiens
caggcatgctgtcacccccgtgggctcacatctgcccgccctggccaagacatctctccacgtgaatcgtcttccgggcctggcccgcctcactcaccgtcttctttgcggccaccatcttc

SEQ ID NO: 223430 - DNA, 122 bp, Homo sapiens
tgacataggctgctctggggcctatttccatccctgggcttccagcagcccgcactttcccggagcaccttgatgggggaaaagctttcacgatgtcagctggagtgagaatcaacaccaag

SEQ ID NO: 223431 - DNA, 122 bp, Homo sapiens
ccctacacacggaactcaccgtccttgtctccgtcgggggcctctgcggaggacgcgccgcgaagccgccgctgtcgccgcctccagctcaccagacccaccaggaccagcgccaggaccag

SEQ ID NO: 223432 - DNA, 122 bp, Homo sapiens
gattgactcagatttaaactataaacaaaccttttcaggcatcacttgtcttcactactccgttagttcaatagcactcaagaccaatgtttggaattgttctactttttactctaaatcca

SEQ ID NO: 223433 - DNA, 122 bp, Homo sapiens
gagacccaggggactcccgcagagagggcctcttgggcttcagcgcagaggaaagtttcccgggcaccccctctcctcccctgccctccgccgcctgggccctgccctgcgtgcccccaggc

SEQ ID NO: 223434 - DNA, 122 bp, Homo sapiens
aggcctttgtccttattccatcctaaatacggcatggtcacggctatacaaaatgtaggacggggtggcaggccaatgtgggaagataatcttctctgtcaaggtcattatacataatactg

SEQ ID NO: 223435 - DNA, 122 bp, Homo sapiens
ctgcagcgcccaggagcggaggccgagcgcgccggtgcccgcaggaagcctcgcccagcgcggaccgcaccctcccgcgacgcccctggagaagccgccagtctctgggccgccagcagcgc

SEQ ID NO: 223436 - DNA, 122 bp, Homo sapiens
aagcaggagttcaagtcagaaatttagcaatcatatttgggtcctcccactctttggtcccgcattccttttcttaaatatctctagacttacccctctccatctctgctgctgatactcta

SEQ ID NO: 223437 - DNA, 122 bp, Homo sapiens
ctgggcgccttggaatcgcggtcccgtgctgtcctccaaacttcagactcacctcggacgcgtcaacctctttgaagacttttcagtcgccagatgagccttatatgaccttagccccttta

SEQ ID NO: 223438 - DNA, 122 bp, Homo sapiens
gggcgcgggcggccccactcacctgcgattcatgggccggaccctcacggccaccttgaccgatgccatcgctcatcccgaaccagcccgcgcggggtcccactagcccagaactccgcggt

SEQ ID NO: 223439 - DNA, 122 bp, Homo sapiens
agacaggatctcaaaacttctgactgcaaggccagagcacttttctccactccaggacatcgtggttccatgtgttgctaataaaagcaaaccctgattaagaactatccatttgaaatact

SEQ ID NO: 223440 - DNA, 122 bp, Homo sapiens
cggccctgcgcattccccggcgggcggcgggagccgcgcggagcgttcgccgctgcggggcggcggccgagctcccccacaaccccggggtgccccccttgctgggatccttagccttctca

SEQ ID NO: 223441 - DNA, 122 bp, Homo sapiens
ttgctgtccatgtgaaggcagcactgctcccaattgcactgttacagaatcacagcttctcggaagcatggatagcagggcccttctttcaggcatcttcttctcattctttcctagctctc

SEQ ID NO: 223442 - DNA, 122 bp, Homo sapiens
aggccttgcttcaagctgagggcccagggaaaagccggtacctttccacctcctgcagctcgccttcctctggctcccggccagtaaggcctgggcccgccacccagtgggtctcgaaggta

SEQ ID NO: 223443 - DNA, 122 bp, Homo sapiens
aaccacacaccacactcaaaaactcttgatgttttcttgctaaaggggctctctcgctcgcgctctctctcctccctcattccctccctccctccctttcacccccccacccccatctctct

SEQ ID NO: 223444 - DNA, 122 bp, Homo sapiens
atcaggaaatcgacgcccaggatcagatgcagatcctgggatccttggctctgagtagcacggtggaaaagtgaggtaatccaggctctgggcccgttttcctaggagcccagggcgcttca

SEQ ID NO: 223445 - DNA, 122 bp, Homo sapiens
ttttgggccagatacttcttggttgtagggggctgccctgtgccttgtaggacatttagccgcccctctggcctctaccacgaaatgccaatagcatccctatcccattgttgacaaccaaa

SEQ ID NO: 223446 - DNA, 122 bp, Homo sapiens
ccctgctcgttgaggtaatactggagaaacatgatcgcttataagccagcggtcccaattcggtccaccgctcagtctgcagtggtccgcccgaccgcgtcacgtgttcgtcaatttccttc

SEQ ID NO: 223447 - DNA, 122 bp, Homo sapiens
ggcggggcccccgaggagggggctggcgaagcctccgggtggggacgggcctcctgggggcggggccacagctggccacctgctcacctgtggcaaactcctcccacatctggccaaccagg

SEQ ID NO: 223448 - DNA, 122 bp, Homo sapiens
ggaggggcagggacaggcgtgagggactggctcctagaatccctttctcctaagagtccacgtggtgggcagaaccccaaagggatcatttagtcaaccttcacgtggcactcatgtggccc

SEQ ID NO: 223449 - DNA, 122 bp, Homo sapiens
ggctgcatgggcgaacgttcctgagtctggaggccgttgccagagctctctctagacacgcgcatccaccctggcaccacccgtgggcactggccgtgccgcatccttgccacacgagggga

SEQ ID NO: 223450 - DNA, 122 bp, Homo sapiens
cgatcccggcctaggactgggtggagaccctctggctgggtaaaggcgcggcagagctggcgcaacagagggacgggcgtggggcgaggacgccaggatctggacccctgcagggaaagggt

SEQ ID NO: 223451 - DNA, 122 bp, Homo sapiens
gaagtgacagcaagacccaagcaactagggagggcgaccggaggaactgtggaggatgctcggagcccctggggcggaggagcacgcggggacgcctccagacagccgtccagctctggcat

SEQ ID NO: 223452 - DNA, 122 bp, Homo sapiens
ttttctgtggagctgttccatgtctgggcacagaagcacctctctgggagcaggtggggacgtgagagccccctgctggaactgttctgtcacaggccccgggaggagctggacctgctgcc

SEQ ID NO: 223453 - DNA, 122 bp, Homo sapiens
cctgagcctactgtactcaatccctacctccctgctaaatgccagatcctaaagcaggggcgtcactcaaaacaagttgtcactttctctgccctgagcttcagagaggataagagattttg

SEQ ID NO: 223454 - DNA, 122 bp, Homo sapiens
cggtcccccgtcaatggcagacacggctcctcacacacagcattcctccctcccgttcaccgacgcagcctctgagtccttctcaacatggcgttccgggaaacaaccacccatagactaaa

SEQ ID NO: 223455 - DNA, 122 bp, Homo sapiens
aaacgtcaccttctgatgagtgaaggcagcaaggtgggctttggccttcccaatgggtgtcgacactaaccagaaaattcttctgagcaacactgagcctcagttctatcatttatcttctt

SEQ ID NO: 223456 - DNA, 122 bp, Homo sapiens
cccggttccccggcccacagtgggggtgtgcaaacccgagagaactgggtaagttggggtcggcttgcagtttggggtaccccgagggcggtgtacgtcggtaagattgtaacagtattact

SEQ ID NO: 223457 - DNA, 122 bp, Homo sapiens
atcaaggagggacaactggatgtgattttttggatctgcagttcaggataattcatgagtcgtttcctgtgcacaaggccattgctccttctgtggtctcagaaccccttcaagaaccactg

SEQ ID NO: 223458 - DNA, 122 bp, Homo sapiens
ttaaaatgcactaatactcatgaatattctctgtaagttgtaaaatggcacacagttgtgcggtgttagtggcttactctctcaagattctaaacaattacggctaggtttctatctatatg

SEQ ID NO: 223459 - DNA, 122 bp, Homo sapiens
gggctctgtcgatggcaaagacgcctggctgcgggctggcgatggagtaccggatgagtccgttccgcccactgtctctgtcttccgcacgtgcgaggtacaaggctgtgccagggggcgtg

SEQ ID NO: 223460 - DNA, 122 bp, Homo sapiens
cttttgcccgtgggccgttgggagcgccagcgcgggggcgggacgcggggcctccgacctcgggtccagtcctctgacctcggcctcacgtctgtggagtgaagatttgagaccgtgggaca

SEQ ID NO: 223461 - DNA, 122 bp, Homo sapiens
ggcggaggaggagccgcgggcgcggcgccgcgctgtccccggccgccgcccgccccactccgcaccgcatgtaaacagtcccagccggcccagcccggccccggaggagcccgcgcaggccg

SEQ ID NO: 223462 - DNA, 122 bp, Homo sapiens
ctttggggaccactcccaatttctctctctcctaatggcttgagaaattcagcctcctctcggtggtcaaaaggtcacccccaagtcacccaagcacatcactcaagctggcaactttaacc

SEQ ID NO: 223463 - DNA, 122 bp, Homo sapiens
ctttttaccttctactcccaggccctcccactctaagctggcttttcagacactgaggtccgcctttccctgcggtcttccctcccctctcagtttggagcccctccaagggctccagaaga

SEQ ID NO: 223464 - DNA, 122 bp, Homo sapiens
caaggactttcccattatccccactaccaggagagggagccccggctccggtgccggagacgtgaaggcggccattctaacccacaaaggcccgcacagggaggcaaacttgggagatcttc

SEQ ID NO: 223465 - DNA, 122 bp, Homo sapiens
ttccaaggcttgttcccttcaggtttcagtttcagacggaagcgaagttgtttgtgatgccggagcacacacctgcgggaactgtagacttcttaggagtccaccggggttgcgtcgcattg

SEQ ID NO: 223466 - DNA, 122 bp, Homo sapiens
ggacccttcgctcaggacaagcgattgtgtcggggtccggggggctgcggcgctggcgcgcgctcgggtcccgcagcagccacccacgcctctccgcaggtgcccaagcccgcgctctcccc

SEQ ID NO: 223467 - DNA, 122 bp, Homo sapiens
tgaaacaccgggtggaggatggttttcaactaggctccacatcagaaagcagtgcactcacgctgacaggcttgatcccctgtggctgctcgactctgggctctggtccaaagctgagagcc

SEQ ID NO: 223468 - DNA, 122 bp, Homo sapiens
ggtccccaagacttggggctcctctgctctcttgtgagtgttggagtctgaggcggggcccgtggacaaggcagtttctgcgtctcttggccacagctgcttggggaagtgttttcattgca

SEQ ID NO: 223469 - DNA, 122 bp, Homo sapiens
acggagacaaaccaaccccagctgggaacatgatcagataagaagtggtccttctgtctgcggagcccttcacacttctcaaagtgaccactcgacagttaatattattctctccattttat

SEQ ID NO: 223470 - DNA, 122 bp, Homo sapiens
gcccggccctcccctcgcactccttcccccctcccaccatccaccgcagccacttccgcccgtcctccggaagtgggccccggcaacgcagcgttccacatcccgcccatttttctacccaa

SEQ ID NO: 223471 - DNA, 122 bp, Homo sapiens
gagaagagagaggaaaacgaaataaacccaaggaaccaatgctactcgcgaagccgaagtcgcggctgcccgaaggatctccgcagccccgcgtgcgcgatccttaaatacccttcgcgatg

SEQ ID NO: 223472 - DNA, 122 bp, Homo sapiens
ggactccggtgaagcctgttcagccgtctgtgtcatgtggccatcttgagtctactctgtcgctcttgtgccctagcaccccgagaaccgtcagtttgagccagatggtgagtaataacctg

SEQ ID NO: 223473 - DNA, 122 bp, Homo sapiens
ggtgtacaacaagttattttgaaatatgttgtatttttaattgagcctccaagaggaggccgaaccaggtttgggagactgattcaatccactgtatggatgaggaagctgaggttaagaga

SEQ ID NO: 223474 - DNA, 122 bp, Homo sapiens
tccatcctcccgccctgcgagttgagtagagggcagcgacttggcctattttgcgatactcgcccctcccttgggtaatccctcacgccctccctccgggcacctctgtgaagacacgtgga

SEQ ID NO: 223475 - DNA, 122 bp, Homo sapiens
cctcgcctgcagcatccgcccagccctgcaccgtgtactccctgctccctcttgcccggccgcaacacccggtcacaaacgtgggccttactctgcctgtccttcctggcctcgtctcccgc

SEQ ID NO: 223476 - DNA, 122 bp, Homo sapiens
gaaggcccctcttaggacttctaaagatatgattagaaactacttggaacactgaagccccgaaactgcgccgtgcatagtgctgaggaaagctgcccactctgttctcgcccttgtagctg

SEQ ID NO: 223477 - DNA, 122 bp, Homo sapiens
aagttgatatttggccctgacttttatatgaaggtaacatttttgcaagtaaattgtagacgtaattaaaaaaacccagctaaaacaaaggtggtattgagaaagaggaagagcaagtggtc

SEQ ID NO: 223478 - DNA, 122 bp, Homo sapiens
ggactcccaagccttcctcccagaaggggtggtgcctgggaggacctgcagaggagctcccgcatctcctcaggccctttcttctgcgccatcttgtggcagttgagagcaggcccagggca
